(19) United States
(12) Patent Application Publication
(10) Pub. No.: US 2009/0089901 A1
(43) Pub. Date: Apr. 2, 2009

(54) Nucleic Acid Molecules and Other Molecules Associated with Plants

(76) Inventors: Philip W. Miller, Ballwin, MO (US); Ming Peng, Ballwin, MO (US)

Correspondence Address: ARNOLD & PORTER LLP, 555 TWELFTH STREET, N.W., ATTN: IP DOCKETING, WASHINGTON, DC, 20004, US

(21) Appl. No.: 12/272,622

(22) Filed: Nov. 17, 2008

Related U.S. Application Data
(63) Continuation of application No. 09/692,257, filed on Oct. 19, 2000, now abandoned.
Application No. 09/692,257 is a continuation-in-part of application No. 09/262,979, filed on Mar. 4, 1999, now abandoned.
(60) Provisional application No. 60/076,912, filed on Mar. 6, 1998.

(51) Int. Cl. A01H 5/00; C07H 21/04; C07K 14/00

(52) U.S. Cl. 800/312; 536/23.6; 530/350; 800/320.1; 800/314; 800/320.3

(57) ABSTRACT

Expressed Sequence Tags (ESTs) isolated from maize are disclosed. The ESTs provide a unique molecular tool for the targeting and isolation of novel genes for plant protection and improvement. The disclosed ESTs have utility in the development of new strategies for understanding critical plant developmental and metabolic pathways. The disclosed ESTs have particular utility in isolating genes and promoters, identifying and mapping the genes involved in developmental and metabolic pathways, and determining gene function. Sequence homology analyses using the ESTs provided in the present invention, will result in more efficient gene screening for desirable agronomic traits. An expanding database of these select pieces of the plant genomics puzzle will quickly expand the knowledge necessary for subsequent functional validation, a key limitation in current plant biotechnology efforts.

### CROSS REFERENCE TO RELATED APPLICATIONS

[0001] This application is a continuation of U.S. application Ser. No. 09/692,257, filed Oct. 19, 2000 (pending), which is a continuation-in-part of U.S. application Ser. No. 09/262,979, filed Mar. 4, 1999 (abandoned), which claims the benefit under 35 U.S.C. § 119 of U.S. Provisional Application No. 60/076,912, filed Mar. 6, 1998 (expired), all of which applications are incorporated herein by reference; U.S. application Ser. No. 09/692,257 also claims the benefit under 35 U.S.C. § 119 of U.S. Provisional Application No. 60/162,747, filed Oct. 28, 1999 (expired), which also is incorporated herein by reference.

### INCORPORATION OF SEQUENCE LISTING

[0002] A paper copy of the Sequence Listing and a computer-readable form of the Sequence Listing submitted electronically via EFS web, containing the file named 15771C_seqlist.txt, which is 9,339,851 bytes in size (measured in MS_DOS) and which was created on Nov. 17, 2008, are herein incorporated by reference.

### FIELD OF THE INVENTION

[0003] The present invention is in the field of plant biochemistry. More specifically the invention relates to nucleic acid molecules that encode proteins and fragments of proteins produced in plant cells, in particular, maize plants. The invention also relates to proteins and fragments of proteins so encoded and antibodies capable of binding the proteins. The invention also relates to methods of using the nucleic acid molecules, proteins and fragments of proteins.

### BACKGROUND OF THE INVENTION

### I. Expressed Sequence Tag Nucleic Acid Molecules

[0004] Expressed sequence tags, or ESTs, are short sequences of randomly selected clones from a cDNA (or complementary DNA) library which are representative of the cDNA inserts of these randomly selected clones. McCombie, et al., Nature Genetics, 1:124-130 (1992); Kurata, et al., Nature Genetics, 8: 365-372 (1994); Okubo, et al., Nature Genetics, 2: 173-179 (1992), all of which references are incorporated herein in their entirety.

[0005] Using conventional methodologies, cDNA libraries can be constructed from the mRNA (messenger RNA) of a given tissue or organism using poly dT primers and reverse transcriptase (Efstratiadis, et al., Cell 7:279-288 (1976), the entirety of which is herein incorporated by reference; Higuchi, et al., Proc. Natl. Acad. Sci. (U.S.A.) 73:3146-3150 (1976), the entirety of which is herein incorporated by reference; Maniatis, et al., Cell 8:163 (1976) the entirety of which is herein incorporated by reference; Land, et al., Nucleic Acids Res. 9:2251-2266 (1981), the entirety of which is herein incorporated by reference; Okayama, et al., Mol. Cell. Biol. 2:161-170 (1982), the entirety of which is herein incorporated by reference; Gubler, et al., Gene 25:263 (1983), the entirety of which is herein incorporated by reference).

[0006] Several methods may be employed to obtain full-length cDNA constructs. For example, terminal transferase can be used to add homopolymeric tails of dC residues to the free 3′ hydroxyl groups (Land, et al., Nucleic Acids Res. 9:2251-2266 (1981), the entirety of which is herein incorporated by reference). This tail can then be hybridized by a poly dG oligo which can act as a primer for the synthesis of full length second strand cDNA. Okayama and Berg, report a method for obtaining full length cDNA constructs. This method has been simplified by using synthetic primer-adapters that have both homopolymeric tails for priming the synthesis of the first and second strands and restriction sites for cloning into plasmids (Coleclough, et al., Gene 34:305-314 (1985), the entirety of which is herein incorporated by reference) and bacteriophage vectors (Krawinkel, et al., Nucleic Acids Res. 14:1913 (1986), the entirety of which is herein incorporated by reference; and Han, et al., Nucleic Acids Res. 15:6304 (1987), the entirety of which is herein incorporated by reference).

[0007] These strategies have been coupled with additional strategies for isolating rare mRNA populations. For example, a typical mammalian cell contains between 10,000 and 30,000 different mRNA sequences. Davidson, Gene Activity in Early Development, 2nd ed., Academic Press, New York (1976). The number of clones required to achieve a given probability that a low-abundance mRNA will be present in a cDNA library is N=(1n(1−P))/(1n(1−1/n)) where N is the number of clones required, P is the probability desired, and 1/n is the fractional proportion of the total mRNA that is represented by a single rare mRNA. (Sambrook, et al., Molecular Cloning: A Laboratory Manual, 2nd ed., Cold Spring Harbor Laboratory Press (1989), the entirety of which is herein incorporated by reference.).

[0008] A method to enrich preparations of mRNA for sequences of interest is to fractionate by size. One such method is to fractionate by electrophoresis through an agarose gel (Pennica, et al., Nature 301:214-221 (1983), the entirety of which is herein incorporated by reference). Another such method employs sucrose gradient centrifugation in the presence of an agent, such as methylmercuric hydroxide, that denatures secondary structure in RNA (Schweinfest, et al., Proc. Natl. Acad. Sci. (U.S.A.) 79:4997-5000 (1982), the entirety of which is herein incorporated by reference).

[0009] A frequently adopted method is to construct equalized or normalized cDNA libraries (Ko, Nucleic Acids Res. 18:5705-5711 (1990), the entirety of which is herein incorporated by reference; Patanjali, S. R. et al., Proc. Natl. Acad. Sci. (U.S.A.) 88:1943-1947 (1991), the entirety of which is herein incorporated by reference). Typically, the cDNA population is normalized by subtractive hybridization. Schmid, et al., J. Neurochem. 48:307-312 (1987) the entirety of which is herein incorporated by reference; Fargnoli, et al., Anal. Biochem. 187:364-373 (1990) the entirety of which is herein incorporated by reference; Travis, et al., Proc. Natl. Acad. Sci. (U.S.A.) 85:1696-1700 (1988) the entirety of which is herein incorporated by reference; Kato, Eur. J. Neurosci. 2:704 (1990); and Schweinfest, et al., Genet. Anal. Tech. Appl. 7:64 (1990), the entirety of which is herein incorporated by reference). Subtraction represents another method for reducing the population of certain sequences in the cDNA library. Swaroop, et al., Nucleic Acids Res. 19:1954 (1991), the entirety of which is herein incorporated by reference).

[0010] ESTs can be sequenced by a number of methods. Two basic methods may be used for DNA sequencing, the chain termination method of Sanger et al., Proc. Natl. Acad. Sci. (U.S.A.) 74: 5463-5467 (1977), the entirety of which is herein incorporated by reference and the chemical degradation method of Maxam and Gilbert, Proc. Nat. Acad. Sci. (U.S.A.) 74: 560-564 (1977), the entirety of which is herein incorporated by reference. Automation and advances in technology such as the replacement of radioisotopes with fluorescence-based sequencing have reduced the effort required to sequence DNA (Craxton, Methods, 2: 20-26 (1991), the entirety of which is herein incorporated by reference; Ju et al., Proc. Natl. Acad. Sci. (U.S.A.) 92: 4347-4351 (1995), the entirety of which is herein incorporated by reference; Tabor and Richardson, Proc. Natl. Acad. Sci. (U.S.A.) 92: 6339-6343 (1995), the entirety of which is herein incorporated by reference). Automated sequencers are available from, for example, Pharmacia Biotech, Inc., Piscataway, N.J. (Pharmacia ALF), LI-COR, Inc., Lincoln, Nebr. (LI-COR 4,000) and Millipore, Bedford, Mass. (Millipore BaseStation).

[0011] In addition, advances in capillary gel electrophoresis have also reduced the effort required to sequence DNA and such advances provide a rapid high resolution approach for sequencing DNA samples (Swerdlow and Gesteland, Nucleic Acids Res. 18:1415-1419 (1990); Smith, Nature 349:812-813 (1991); Luckey et al., Methods Enzymol. 218:154-172 (1993); Lu et al., J. Chromatog. A. 680:497-501 (1994); Carson et al., Anal. Chem. 65:3219-3226 (1993); Huang et al., Anal. Chem. 64:2149-2154 (1992); Kheterpal et al., Electrophoresis 17:1852-1859 (1996); Quesada and Zhang, Electrophoresis 17:1841-1851 (1996); Baba, Yakugaku Zasshi 117:265-281 (1997), all of which are herein incorporated by reference in their entirety).

[0012] ESTs longer than 150 bases have been found to be useful for similarity searches and mapping. (Adams, et al., Science 252:1651-1656 (1991), herein incorporated by reference.) EST sequences normally range from 150-450 bases. This is the length of sequence information that is routinely and reliably generated using single run sequence data. Typically, only single run sequence data is obtained from the cDNA library, Adams, et al., Science 252:1651-1656 (1991). Automated single run sequencing typically results in an approximately 2-3% error or base ambiguity rate. (Boguski, et al., Nature Genetics, 4:332-333 (1993), the entirety of which is herein incorporated by reference).

[0013] EST databases have been constructed or partially constructed from, for example, C. elegans (McCombrie, et al., Nature Genetics 1:124-131 (1992), human liver cell line HepG2 (Okubo, et al., Nature Genetics 2:173-179 (1992)), human brain RNA (Adams, et al., Science 252:1651-1656 (1991); Adams, et al., Nature 355:632-635 (1992)), Arabidopsis, (Newman, et al., Plant Physiol. 106:1241-1255 (1994)); and rice (Kurata, et al., Nature Genetics 8:365-372 (1994).

### II. Sequence Comparisons

[0014] A characteristic feature of a protein or DNA sequence is that it can be compared with other known protein or DNA sequences. Sequence comparisons can be undertaken by determining the similarity of the test or query sequence with sequences in publicly available or propriety databases (“similarity analysis”) or by searching for certain motifs (“intrinsic sequence analysis”) (e.g. cis elements) (Coulson, Trends in Biotechnology, 12: 76-80 (1994), the entirety of which is herein incorporated by reference; Birren, et al., Genome Analysis, 1: 543-559 (1997), the entirety of which is herein incorporated by reference).

[0015] Similarity analysis includes database search and alignment. Examples of public databases include the DNA Database of Japan (DDBJ) (www-ddbj.nig.acjp/); Genebank (www-ncbi.nlm.nih.gov/web/Genbank/Index.html); and the European Molecular Biology Laboratory Nucleic Acid Sequence Database (EMBL) (www-ebi.ac.uk/ebi_docs/embl_db.html). A number of different search algorithms have been developed, one example of which are the suite of programs referred to as BLAST programs. There are five implementations of BLAST, three designed for nucleotide sequences queries (BLASTN, BLASTX, and TBLASTX) and two designed for protein sequence queries (BLASTP and TBLASTN) (Coulson, Trends in Biotechnology, 12: 76-80 (1994); Birren, et al., Genome Analysis, 1: 543-559 (1997)).

[0016] BLASTN takes a nucleotide sequence (the query sequence) and its reverse complement and searches them against a nucleotide sequence database. BLASTN was designed for speed, not maximum sensitivity, and may not find distantly related coding sequences. BLASTX takes a nucleotide sequence, translates it in three forward reading frames and three reverse complement reading frames, and then compares the six translations against a protein sequence database. BLASTX is useful for sensitive analysis of preliminary (single-pass) sequence data and is tolerant of sequencing errors (Gish and States, Nature Genetics, 3: 266-272 (1993), the entirety of which is herein incorporated by reference). BLASTN and BLASTX may be used in concert for analyzing EST data (Coulson, Trends in Biotechnology, 12: 76-80 (1994); Birren, et al., Genome Analysis, 1: 543-559 (1997).

[0017] Given a coding nucleotide sequence and the protein it encodes, it is often preferable to use the protein as the query sequence to search a database because of the greatly increased sensitivity to detect more subtle relationships. This is due to the larger alphabet of proteins (20 amino acids) compared with the alphabet of nucleic acid sequences (4 bases), where it is far easier to obtain a match by chance. In addition, with nucleotide alignments, only a match (positive score) or a mismatch (negative score) is obtained, but with proteins, the presence of conservative amino acid substitutions can be taken into account. Here, a mismatch may yield a positive score if the non-identical residue has physical/chemical properties similar to the one it replaced. Various scoring matrices are used to supply the substitution scores of all possible amino acid pairs. A general purpose scoring system is the BLOSUM62 matrix (Henikoff and Henikoff, Proteins, 17: 49-61 (1993), the entirety of which is herein incorporated by reference), which is currently the default choice for BLAST programs. BLOSUM62 is tailored for alignments of moderately diverged sequences and thus may not yield the best results under all conditions. Altschul, J. Mol. Biol. 36: 290-300 (1993), the entirety of which is herein incorporated by reference, uses a combination of three matrices to cover all contingencies. This may improve sensitivity, but at the expense of slower searches. In practice, a single BLOSUM62 matrix is often used but others (PAM40 and PAM250) may be attempted when additional analysis is necessary. Low PAM matrices are directed at detecting very strong but localized sequence similarities, whereas high PAM matrices are directed at detecting long but weak alignments between very distantly related sequences.

[0018] Homologues in other organisms are available that can be used for comparative sequence analysis. Multiple alignments are performed to study similarities and differences in a group of related sequences. CLUSTAL W is a multiple sequence alignment package available that performs progressive multiple sequence alignments based on the method of Feng and Doolittle, J. Mol. Evol. 25: 351-360 (1987), the entirety of which is herein incorporated by reference. Each pair of sequences is aligned and the distance between each pair is calculated; from this distance matrix, a guide tree is calculated, and all of the sequences are progressively aligned based on this tree. A feature of the program is its sensitivity to the effect of gaps on the alignment; gap penalties are varied to encourage the insertion of gaps in probable loop regions instead of in the middle of structured regions. Users can specify gap penalties, choose between a number of scoring matrices, or supply their own scoring matrix for both the pairwise alignments and the multiple alignments. CLUSTAL W for UNIX and VMS systems is available at: ftp-ebi.ac.uk. Another program is MACAW (Schuler et al., Proteins, Struct. Func. Genet, 9:180-190 (1991), the entirety of which is herein incorporated by reference, for which both Macintosh and Microsoft Windows versions are available. MACAW uses a graphical interface, provides a choice of several alignment algorithms, and is available by anonymous ftp at: ncbi-nlm.nih.gov (directory/pub/macaw).

[0019] Sequence motifs are derived from multiple alignments and can be used to examine individual sequences or an entire database for subtle patterns. With motifs, it is sometimes possible to detect distant relationships that may not be demonstrable based on comparisons of primary sequences alone. Currently, the largest collection of sequence motifs in the world is PROSITE (Bairoch and Bucher, Nucleic Acid Research, 22: 3583-3589 (1994), the entirety of which is herein incorporated by reference.) PROSITE may be accessed via either the ExPASy server on the World Wide Web or anonymous ftp site. Many commercial sequence analysis packages also provide search programs that use PROSITE data.

[0020] A resource for searching protein motifs is the BLOCKS E-mail server developed by S. Henikoff, Trends Biochem Sci., 18:267-268 (1993), the entirety of which is herein incorporated by reference; Henikoff and Henikoff, Nucleic Acid Research, 19:6565-6572 (1991), the entirety of which is herein incorporated by reference; Henikoff and Henikoff, Proteins, 17: 49-61 (1993). BLOCKS searches a protein or nucleotide sequence against a database of protein motifs or “blocks.” Blocks are defined as short, ungapped multiple alignments that represent highly conserved protein patterns. The blocks themselves are derived from entries in PROSITE as well as other sources. Either a protein or nucleotide query can be submitted to the BLOCKS server; if a nucleotide sequence is submitted, the sequence is translated in all six reading frames and motifs are sought in these conceptual translations. Once the search is completed, the server will return a ranked list of significant matches, along with an alignment of the query sequence to the matched BLOCKS entries.

[0021] Conserved protein domains can be represented by two-dimensional matrices, which measure either the frequency or probability of the occurrences of each amino acid residue and deletions or insertions in each position of the domain. This type of model, when used to search against protein databases, is sensitive and usually yields more accurate results than simple motif searches. Two popular implementations of this approach are profile searches (such as GCG program ProfileSearch) and Hidden Markov Models (HMMs) (Krough et al., J. Mol. Biol. 235:1501-1531 (1994); Eddy, Current Opinion in Structural Biology 6:361-365 (1996), both of which are herein incorporated by reference in their entirety). In both cases, a large number of common protein domains have been converted into profiles, as present in the PROSITE library, or HHM models, as in the Pfam protein domain library (Sonnhammer et al., Proteins 28:405-420 (1997), the entirety of which is herein incorporated by reference). Pfam contains more than 500 HMM models for enzymes, transcription factors, signal transduction molecules, and structural proteins. Protein databases can be queried with these profiles or HMM models, which will identify proteins containing the domain of interest. For example, HMMSW or HMMFS, two programs in a public domain package called HMMER (Sonnhammer et al., Proteins 28:405-420 (1997)) can be used.

[0022] PROSITE and BLOCKS represent collected families of protein motifs. Thus, searching these databases entails submitting a single sequence to determine whether or not that sequence is similar to the members of an established family. Programs working in the opposite direction compare a collection of sequences with individual entries in the protein databases. An example of such a program is the Motif Search Tool, or MoST (Tatusov et al. Proc. Natl. Acad. Sci. 91: 12091-12095 (1994), the entirety of which is herein incorporated by reference.) On the basis of an aligned set of input sequences, a weight matrix is calculated by using one of four methods (selected by the user); a weight matrix is simply a representation, position by position in an alignment, of how likely a particular amino acid will appear. The calculated weight matrix is then used to search the databases. To increase sensitivity, newly found sequences are added to the original data set, the weight matrix is recalculated, and the search is performed again. This procedure continues until no new sequences are found.

### SUMMARY OF THE INVENTION

[0023] The present invention provides a substantially purified nucleic acid molecule that encodes a maize protein or fragment thereof comprising a nucleic acid sequence selected from the group consisting of SEQ ID NO: 1 through SEQ ID NO: 14882.

[0024] The present invention also provides one or more substantially purified nucleic acid molecules comprising a nucleic acid sequence selected from the group consisting of SEQ ID NO: 1 through SEQ ID NO:14882 or complements thereof.

[0025] The present invention also provides a substantially purified maize protein or fragment thereof, wherein said maize protein is encoded by a nucleic acid molecule that comprises a nucleic acid sequence selected from the group consisting of SEQ ID NO: 1 through SEQ ID NO: 14882.

[0026] The present invention further provides a substantially purified protein, peptide, or fragment thereof encoded by a nucleic acid sequence which specifically hybridizes to a nucleic acid molecule comprising a nucleic acid sequence selected from the group consisting of a complement of SEQ ID NO: 1 through SEQ ID NO:14882.

[0027] The present invention further provides a substantially purified antibody capable of specifically binding to a protein or fragment thereof encoded by a nucleic acid sequence which specifically hybridizes to a nucleic acid molecule having a nucleic acid sequence selected from the group consisting of a complement of SEQ ID NO:1 through SEQ ID NO:14882.

[0028] The present invention also provides a transformed plant transformed to contain a nucleic acid molecule which comprises: (A) an exogeneous promoter region which functions in plant cells to cause the production of an mRNA molecule; which is linked to (B) a structural nucleic acid molecule, wherein said structural nucleic acid molecule comprises a nucleic acid molecule that encodes a protein, peptide, or fragment thereof which hybridizes to a nucleic acid sequence selected from the group consisting of a complement of SEQ ID NO:1 through SEQ ID NO:14882 expressed in an effective amount to produce a desirable agronomic effect; which is linked to (C) a 3′ non-translated sequence that functions in plant cells to cause the termination of transcription and the addition of polyadenylated ribonucleotides to the 3′ end of the mRNA sequence.

[0029] The present invention also provides a transformed plant cell containing a nucleic acid molecule whose non-transcribed strand encodes a protein or fragment thereof, wherein the transcribed strand of said nucleic acid is complementary to a nucleic acid molecule that encodes a protein or fragment thereof. The present invention also provides bacterial, viral, microbial, and plant cells comprising a nucleic acid molecule of the present invention

[0030] The present invention also provides a method of producing a plant containing one or more proteins encoded by sequences comprising SEQ ID NO:1 or complement thereof through SEQ ID NO:14882 or complements thereof, expressed in a sufficient amount and/or fashion to produce a desirable agronomic effect.

[0031] In accomplishing the foregoing, there is provided, in accordance with one aspect of the present invention, methods of producing genetically transformed plants, comprising the steps of:
[0032] (a) inserting into the genome of a plant cell a recombinant, double-stranded DNA molecule comprising
   [0033] (i) a promoter which functions in plant cells to cause the production of an RNA sequence,
   [0034] (ii) a structural DNA sequence that causes the production of an RNA sequence which encodes a desired protein.
   [0035] (iii) a 3′ non-translated DNA sequence which functions in plant cells to cause the addition of polyadenylated nucleotides to the 3′ end of RNA sequence; where the promoter is homologous or heterologous with respect to the coding sequence and adapted to cause sufficient expression of a protein in desired plant tissues to enhance the agronomic utility of a plant transformed with said gene.
[0036] (b) obtaining a transformed plant cell with said nucleic acid molecule that encodes one or more proteins, wherein said nucleic acid molecule is transcribed and results in expression of said protein(s); and
[0037] (c) regenerating from the transformed plant cell a genetically transformed plant

[0038] The present invention also encompasses differentiated plants, seeds, and progeny comprising said transformed plant cells and which exhibit novel properties of agronomic significance.

[0039] The present invention also provides a method of producing a plant containing reduced levels of a protein comprising: (A) transforming a plant cell with a nucleic acid molecule that encodes a protein, wherein said nucleic acid molecule is transcribed and results in co-suppression of endogenous protein synthesis activity, and (B) regenerating plants and producing subsequent progeny from the transformed plant.

[0040] The present invention also provides a method of determining an association between a polymorphism and a plant trait comprising: (A) hybridizing a nucleic acid molecule specific for a polymorphism to genetic material of a plant, wherein said nucleic acid molecule comprising a nucleic acid sequence selected from the group consisting of SEQ ID NO: 1 through SEQ ID NO:14882 or complements thereof; and (B) calculating the degree of association between the polymorphism and the plant trait.

[0041] The present invention also provides a method of isolating a genetic region, or nucleic acid that encodes a protein or fragment thereof comprising: (A) incubating under conditions permitting nucleic acid hybridization: a marker nucleic acid molecule, preferably an EST, with a complementary nucleic acid molecule obtained from a plant cell or plant tissue; (B) permitting hybridization between said marker nucleic acid molecule, preferably an EST, and said complementary nucleic acid molecule obtained from said plant cell or plant tissue; and (C) isolating said complementary nucleic acid molecule.

[0042] The present invention also provides a method for determining a level or pattern in a plant cell of a protein in a plant comprising: (A) incubating, under conditions permitting nucleic acid hybridization, a marker nucleic acid molecule, the marker nucleic acid molecule selected from the group of marker nucleic acid molecules which specifically hybridize to a nucleic acid molecule having the nucleic acid sequence selected from the group consisting of SEQ ID NO: 1 through SEQ ID NO: 14882 or complements thereof or fragments of either, with a complementary nucleic acid molecule obtained from the plant cell or plant tissue, wherein nucleic acid hybridization between the marker nucleic acid molecule and the complementary nucleic acid molecule obtained from the plant cell or plant tissue permits the detection of an mRNA for the enzyme; (B) permitting hybridization between the marker nucleic acid molecule and the complementary nucleic acid molecule obtained from the plant cell or plant tissue; and (C) detecting the level or pattern of the complementary nucleic acid, wherein the detection of the complementary nucleic acid is predictive of the level or pattern of the protein.

[0043] The present invention also provides a method for determining the level or pattern of a protein in a plant cell or plant tissue comprising: (A) incubating under conditions permitting nucleic acid hybridization: a marker nucleic acid molecule, the marker nucleic acid molecule comprising a nucleotide sequence selected from the group consisting of SEQ ID NO: 1 through SEQ ID NO:14882 or complements thereof, with a complementary nucleic acid molecule obtained from a plant cell or plant tissue, wherein nucleic acid hybridization between the marker nucleic acid molecule, and the complementary nucleic acid molecule obtained from the plant cell or plant tissue permits the detection of said protein; (B) permitting hybridization between the marker nucleic acid molecule and the complementary nucleic acid molecule obtained from the plant cell or plant tissue; and (C) detecting the level or pattern of the complementary nucleic acid, wherein the detection of said complementary nucleic acid is predictive of the level or pattern of the protein synthesis.

[0044] The present invention also provides a method for determining a level or pattern of a protein in a plant cell or plant tissue which comprises assaying the concentration of a molecule, whose concentration is dependent upon the expression of a gene, the gene having a nucleic acid sequence which specifically hybridizes to a protein marker nucleic acid molecule, the molecule being present in a plant cell or plant tissue, in comparison to the concentration of that molecule present in a plant cell or plant tissue with a known level or pattern of said protein, wherein an assayed concentration of the molecule is compared to the assayed concentration of the molecule in a plant cell or plant tissue with a known level or pattern of said protein.

[0045] The present invention also provides a method of determining a mutation in a plant whose presence is predictive of a mutation affecting a level or pattern of a protein comprising the steps: (A) incubating, under conditions permitting nucleic acid hybridization, a marker nucleic acid, the marker nucleic acid selected from the group of marker nucleic acid molecules which specifically hybridize to a nucleic acid molecule consisting of the nucleic acid sequence selected from the group consisting of SEQ ID NO: 1 through SEQ ID NO: 14882 or complements thereof or fragments of either and a complementary nucleic acid molecule obtained from the plant, wherein nucleic acid hybridization between the marker nucleic acid molecule and the complementary nucleic acid molecule obtained from the plant permits the detection of a polymorphism whose presence is predictive of a mutation affecting the level or pattern of the protein in the plant; (B) permitting hybridization between the marker nucleic acid molecule and the complementary nucleic acid molecule obtained from the plant; and (C) detecting the presence of the polymorphism, wherein the detection of the polymorphism is predictive of the mutation.

[0046] The present invention also provides a method for determining a mutation in a plant whose presence is predictive of a mutation affecting the level or pattern of protein synthesis comprising the steps: (A) incubating under conditions permitting nucleic acid hybridization: a marker nucleic acid molecule, the marker nucleic acid molecule comprising a nucleic acid molecule that is linked to gene, the gene having a nucleic acid sequence which specifically hybridizes to a sequence selected from the group consisting of SEQ ID NO: 1 through SEQ ID NO:14882 and complements thereof, and a complementary nucleic acid molecule obtained from a plant tissue or plant cell of the plant, wherein nucleic acid hybridization between the marker nucleic acid molecule and the complementary nucleic acid molecule obtained from the plant permits the detection of a polymorphism whose presence is predictive of a mutation affecting said level or pattern of a protein synthesis in the plant; (B) permitting hybridization between said marker nucleic acid molecule and said complementary nucleic acid molecule obtained from said plant; and; (C) detecting the presence of the polymorphism, wherein the detection of the polymorphism is predictive of the mutation.

[0047] The present invention also provides a method for reducing expression of a protein in a plant cell, the method comprising: growing a transformed plant cell containing a nucleic acid molecule whose non-transcribed strand encodes a protein or fragment thereof, wherein the transcribed strand of said nucleic acid is complementary to a nucleic acid molecule that encodes the protein in said plant cell, and whereby the strand that is complementary to the nucleic acid molecule that encodes the protein reduces or depresses expression of the protein.

[0048] The present invention provides maize nucleic acid molecules for use as molecular tags to isolate genetic regions (i.e. promoters and flanking sequences), isolate genes, map genes, and determine gene function. The present invention further provides maize nucleic acid molecules for use in determining if genes are members of a particular gene family.

[0049] The present invention also provides a method of obtaining full length genes using maize ESTs or complements thereof or fragments of either.

[0050] The present invention also provides a method of isolating promoters and flanking sequences using maize ESTs or complements thereof or fragments of either.

[0051] The present invention also provides maize ESTs or complements thereof or fragments of either for use in marker-assisted breeding programs.

[0052] The present invention also provides a method of identifying tissues comprising hybridizing nucleic acids from the tissue with maize ESTs or complements thereof or fragments of either.

[0053] The present invention also provides a method for production of antibodies targeted against the proteins, peptides, or fragments produced by the disclosed or complements thereof or fragments of either.

[0054] The present invention also provides a method for the transformation and regeneration of plants comprising sequences hybridizable to the disclosed ESTs or complements thereof or fragments of either.

[0055] The present invention also provides a method of modifying plant protein expression by inserting in a chimeric gene sense or antisense constructs of the maize ESTs.

### DETAILED DESCRIPTION OF THE INVENTION

### Agents

[0056] (a) Nucleic Acid Molecules

[0057] Agents of the present invention include nucleic acid molecules and more specifically EST nucleic acid molecules or nucleic acid fragment molecules thereof. Fragment EST nucleic acid molecules may encode significant portion(s) of, or indeed most of, the EST nucleic acid molecule. Alternatively, the fragments may comprise smaller oligonucleotides (having from about 15 to about 250 nucleotide residues, and more preferably, about 15 to about 30 nucleotide residues).

[0058] A subset of the nucleic acid molecules of the present invention includes nucleic acid molecules that are marker molecules. Another subset of the nucleic acid molecules of the present invention include nucleic acid molecules that encode a protein or fragment thereof. Another subset of the nucleic acid molecules of the present invention are EST molecules.

[0059] The term “substantially purified”, as used herein, refers to a molecule separated from substantially all other molecules normally associated with it in its native state. More preferably a substantially purified molecule is the predominant species present in a preparation. A substantially purified molecule may be greater than 60% free, preferably 75% free, more preferably 90% free, and most preferably 95% free from the other molecules (exclusive of solvent) present in the natural mixture. The term “substantially purified” is not intended to encompass molecules present in their native state.

[0060] The agents of the present invention will preferably be “biologically active” with respect to either a structural attribute, such as the capacity of a nucleic acid to hybridize to another nucleic acid molecule, or the ability of a protein to be bound by antibody (or to compete with another molecule for such binding). Alternatively, such an attribute may be catalytic, and thus involve the capacity of the agent to mediate a chemical reaction or response.

[0061] The agents of the present invention may also be recombinant. As used herein, the term recombinant, refers to a) molecules that are constructed outside of living cells by joining natural or synthetic DNA segments to DNA molecules that can replicate in a living cell or b) molecules that result from the replication or expression of those molecules described above or c) amino acid molecules from different sources which are joined together.

[0062] It is understood that the agents of the present invention may be labeled with reagents that facilitate detection of the agent (e.g. fluorescent labels (Prober, et al., Science 238:336-340 (1987); Albarella et al., EP 144914, chemical labels (Sheldon et al., U.S. Pat. No. 4,582,789; Albarella et al., U.S. Pat. No. 4,563,417, modified bases (Miyoshi et al., EP 119448, all of which are hereby incorporated by reference in their entirety).

[0063] It is further understood, that the present invention provides bacterial, viral, microbial, and plant cells comprising the agents of the present invention.

[0064] Nucleic acid molecules or fragment thereof of the present invention are capable of specifically hybridizing to other nucleic acid molecules under certain circumstances. As used herein, two nucleic acid molecules are said to be capable of specifically hybridizing to one another if the two molecules are capable of forming an anti-parallel, double-stranded nucleic acid structure. A nucleic acid molecule is said to be the “complement” of another nucleic acid molecule if they exhibit complete complementarity. As used herein, molecules are said to exhibit “complete complementarity” when every nucleotide of one of the molecules is complementary to a nucleotide of the other. Two molecules are said to be “minimally complementary” if they can hybridize to one another with sufficient stability to permit them to remain annealed to one another under at least conventional “low-stringency” conditions. Similarly, the molecules are said to be “complementary” if they can hybridize to one another with sufficient stability to permit them to remain annealed to one another under conventional “high-stringency” conditions. Conventional stringency conditions are described by Sambrook, et al., In: Molecular Cloning, A Laboratory Manual, 2nd Edition, Cold Spring Harbor Press, Cold Spring Harbor, N.Y. (1989), and by Haymes, et al. In: Nucleic Acid Hybridization, A Practical Approach, IRL Press, Washington, D.C. (1985), the entirety of which is herein incorporated by reference. Departures from complete complementarity are therefore permissible, as long as such departures do not completely preclude the capacity of the molecules to form a double-stranded structure. Thus, in order for an nucleic acid molecule or fragment of the present invention to serve as a primer or probe it need only be sufficiently complementary in sequence to be able to form a stable double-stranded structure under the particular solvent and salt concentrations employed.

[0065] Appropriate stringency conditions which promote DNA hybridization are, for example, 6.0× sodium chloride/sodium citrate (SSC) at about 45° C., followed by a wash of 2.0×SSC at 50° C., are known to those skilled in the art or can be found in Current Protocols in Molecular Biology, John Wiley & Sons, N.Y. (1989), 6.3.1-6.3.6. For example, the salt concentration in the wash step can be selected from a low stringency of about 2.0×SSC at 50° C. to a high stringency of about 0.2×SSC at 50° C. In addition, the temperature in the wash step can be increased from low stringency conditions at room temperature, about 22° C., to high stringency conditions at about 65° C. Both temperature and salt may be varied, or either the temperature or the salt concentration may be held constant while the other variable is changed.

[0066] In a preferred embodiment, a nucleic acid of the present invention will specifically hybridize to one or more of the nucleic acid molecules set forth in SEQ ID NO: 1 through SEQ ID NO: 14882 or complements thereof under moderately stringent conditions, for example, at about 2.0×SSC and about 65° C.

[0067] In a particularly preferred embodiment, a nucleic acid of the present invention will include those nucleic acid molecules that specifically hybridize to one or more of the nucleic acid molecules set forth in SEQ ID NO:1 through SEQ ID NO: 14882 or complements thereof under high stringency conditions.

[0068] In one aspect of the present invention, the nucleic acid molecules of the present invention have one or more of the nucleic acid sequences set forth in SEQ ID NO: 1 through SEQ ID NO:14882 or complements thereof. In another aspect of the present invention, one or more of the nucleic acid molecules of the present invention share between 100% and 90% sequence identity with one or more of the nucleic acid sequences set forth in SEQ ID NO: 1 through SEQ ID NO:14882 or complements thereof. In a further aspect of the present invention, one or more of the nucleic acid molecules of the present invention share between 100% and 95% sequence identity with one or more of the nucleic acid sequences set forth in SEQ ID NO: 1 through SEQ ID NO:14882 or complements thereof. In a more preferred aspect of the present invention, one or more of the nucleic acid molecules of the present invention share between 100% and 98% sequence identity with one or more of the nucleic acid sequences set forth in SEQ ID NO: 1 through SEQ ID NO:14882 or complements thereof. In an even more preferred aspect of the present invention, one or more of the nucleic acid molecules of the present invention share between 100% and 99% sequence identity with one or more of the sequences set forth in SEQ ID NO: 1 through SEQ ID NO:14882 or complements thereof. In a further, even more preferred aspect of the present invention, one or more of the nucleic acid molecules of the present invention exhibit 100% sequence identity with one or more nucleic acid molecules present within the cDNA libraries designated LIB3136, LIB3137, LIB3156, LIB3157, LIB3158, and LIB3159 (Monsanto Company, St. Louis, Mo., United States of America).

[0069] The term “sequence identity” refers to the extent to which two sequences, nucleotide or amino acid, are invariant throughout the portion at which they are aligned. While there exist a number of methods to measure identity between two polynucleotide or polypeptide sequences, the term “sequence identity” is well known to skilled artisans. Methods commonly employed to determine identity between two sequences include, but are not limited to, those disclosed in Guide to Huge Computers, Martin J. Bishop, ed., Academic Press, San Diego, 1994, and Carillo, H., and Lipton, D.; Siam, J Applied Math (1988) 48:1073. Methods to determine identity are codified in computer programs. Preferred computer program methods to determine identity between two sequences include, but are not limited to, the BLAST suite of programs publicly available from NCBI and other sources (BLAST Manual, Altschul et al., Natl. Cent. Biotechnol. Inf., Natl. Library Med. (NCBI NLM) NIH, Bethesda, Md. 20894; Altschul et al., J. Mol. Biol. 215:403-410 (1990), Pearson et al., Proc. Natl. Acad. Sci. U.S.A. 85:2444-2448 (1988), the FAST programs (Pearson et al., Proc. Natl. Acad. Sci. U.S.A. 85:2444-2448 (1988). the GAP and BESTFIT programs found in the GCG program package, (Madison, Wis.) and Cross_Match (Phil Green, University of Washington). Another preferred method to determine identity, is by the method of DNASTAR protein alignment protocol using the Jotun-Hein algorithm (Hein et al., Methods Enzymol. 183:626-645 (1990)).

[0070] In a preferred embodiment of the present invention, a maize protein or fragment thereof of the present invention is a homologue of another plant protein. In another preferred embodiment of the present invention, a maize protein or fragment thereof of the present invention is a homologue of a fungal protein. In another preferred embodiment of the present invention, a maize protein or fragment thereof of the present invention is a homologue of a mammalian protein. In another preferred embodiment of the present invention, a maize protein or fragment thereof of the present invention is a homologue of an algal protein. In another preferred embodiment of the present invention, a maize protein or fragment thereof of the present invention is a homologue of a bacterial protein. In another preferred embodiment of the present invention, a maize protein or fragment thereof of the present invention is a homologue of a soybean protein. In another preferred embodiment of the present invention, a maize protein or fragment thereof of the present invention is a homologue of a cotton protein. In another preferred embodiment of the present invention, a maize protein or fragment thereof of the present invention is a homologue of a wheat protein.

[0071] In a preferred embodiment of the present invention, the nucleic molecule of the present invention encodes a maize protein or fragment thereof where a maize protein or fragment thereof exhibits a BLAST probability score of greater than 1E-12, preferably a BLAST probability score of between about 1E-30 and about 1E-12, even more preferably a BLAST probability score of greater than 1E-30 with its homologue.

[0072] In another preferred embodiment of the present invention, the nucleic acid molecule encoding a maize protein or fragment thereof exhibits a % identity with its homologue of between about 25% and about 40%, more preferably of between about 40% and about 70%, even more preferably of between about 70% and about 90% and even more preferably between about 90% and 99%. In another preferred embodiment, of the present invention, a maize protein or fragment thereof exhibits a % identity with its homologue of 100%.

[0073] In a preferred embodiment of the present invention, the nucleic acid molecule of the present invention encodes a maize protein or fragment thereof where the maize protein exhibits a BLAST score of greater than 120, preferably a BLAST score of between about 1450 and about 120, even more preferably a BLAST score of greater than 1450 with its homologue.

[0074] Nucleic acid molecules of the present invention also include non-maize homologues. Preferred non-maize homologues are selected from the group consisting of alfalfa, Arabidopsis, barley, Brassica, broccoli, cabbage, citrus, cotton, garlic, oat, oilseed rape, onion, canola, flax, an ornamental plant, pea, peanut, pepper, potato, rice, rye, sorghum, soybean strawberry, sugarcane, sugarbeet, tomato, wheat, poplar, pine, fir, eucalyptus, apple, lettuce, lentils, grape, banana, tea, turf grasses, sunflower, oil palm and Phaseolus.

[0075] The degeneracy of the genetic code, which allows different nucleic acid sequences to code for the same protein or peptide, is known in the literature. (U.S. Pat. No. 4,757,006, the entirety of which is herein incorporated by reference).

[0076] In an aspect of the present invention, one or more of the nucleic acid molecules of the present invention differ in nucleic acid sequence from those encoding a maize protein or fragment thereof in SEQ ID NO: 1 through SEQ ID NO: 14882 due to the degeneracy in the genetic code in that they encode the same protein but differ in nucleic acid sequence.

[0077] In another further aspect of the present invention, nucleic acid molecules of the present invention can comprise sequences, which differ from those encoding a protein or fragment thereof in SEQ ID NO: 1 through SEQ ID NO: 14882 due to fact that the different nucleic acid sequence encodes a protein having one or more conservative amino acid changes. It is understood that codons capable of coding for such conservative amino acid substitutions are known in the art.

[0078] It is well known in the art that one or more amino acids in a native sequence can be substituted with another amino acid(s), the charge and polarity of which are similar to that of the native amino acid, i.e., a conservative amino acid substitution, resulting in a silent change. Conserved substitutes for an amino acid within the native polypeptide sequence can be selected from other members of the class to which the naturally occurring amino acid belongs. Amino acids can be divided into the following four groups: (1) acidic amino acids, (2) basic amino acids, (3) neutral polar amino acids, and (4) neutral nonpolar amino acids. Representative amino acids within these various groups include, but are not limited to, (1) acidic (negatively charged) amino acids such as aspartic acid and glutamic acid; (2) basic (positively charged) amino acids such as arginine, histidine, and lysine; (3) neutral polar amino acids such as glycine, serine, threonine, cysteine, cystine, tyrosine, asparagine, and glutamine; and (4) neutral nonpolar (hydrophobic) amino acids such as alanine, leucine, isoleucine, valine, proline, phenylalanine, tryptophan, and methionine.

[0079] Conservative amino acid changes within the native polypeptides sequence can be made by substituting one amino acid within one of these groups with another amino acid within the same group. Biologically functional equivalents of the proteins or fragments thereof of the present invention can have 10 or fewer conservative amino acid changes, more preferably seven or fewer conservative amino acid changes, and most preferably five or fewer conservative amino acid changes. The encoding nucleotide sequence will thus have corresponding base substitutions, permitting it to encode biologically functional equivalent forms of the proteins or fragments of the present invention.

[0080] It is understood that certain amino acids may be substituted for other amino acids in a protein structure without appreciable loss of interactive binding capacity with structures such as, for example, antigent-binding regions of antibodies or binding sites on substrate molecules. Because it is the interactive capacity and nature of a protein that defines that protein's biological functional activity, certain amino acid sequence substitutions can be made in a protein sequence and, of course, its underlying DNA coding sequence and, nevertheless, obtain a protein with like properties. It is thus contemplated by the inventors that various changes may be made in the peptide sequences of the proteins or fragments of the present invention, or corresponding DNA sequences that encode said peptides, without appreciable loss of their biological utility or activity. It is understood that codons capable of coding for such amino acid changes are known in the art.

[0081] In making such changes, the hydropathic index of amino acids may be considered. The importance of the hydropathic amino acid index in conferring interactive biological function on a protein is generally understood in the art (Kyte and Doolittle, J. Mol. Biol. 157, 105-132 (1982), herein incorporated by reference in its entirety). It is accepted that the relative hydropathic character of the amino acid contributes to the secondary structure of the resultant protein, which in turn defines the interaction of the protein with other molecules, for example, enzymes, substrates, receptors, DNA, antibodies, antigens, and the like.

[0082] Each amino acid has been assigned a hydropathic index on the basis of its hydrophobicity and charge characteristics (Kyte and Doolittle, 1982); these are isoleucine (+4.5), valine (+4.2), leucine (+3.8), phenylalanine (+2.8), cysteine/cystine (+2.5), methionine (+1.9), alanine (+1.8), glycine (−0.4), threonine (−0.7), serine (−0.8), tryptophan (−0.9), tyrosine (−1.3), proline (−1.6), histidine (−3.2), glutamate (−3.5), glutamine (−3.5), aspartate (−3.5), asparagine (−3.5), lysine (−3.9), and arginine (−4.5).

[0083] In making such changes, the substitution of amino acids whose hydropathic indices are within ±2 is preferred, those which are within ±1 are particularly preferred, and those within ±0.5 are even more particularly preferred.

[0084] It is also understood in the art that the substitution of like amino acids can be made effectively on the basis of hydrophilicity. U.S. Pat. No. 4,554,101, incorporated herein by reference in its entirety, states that the greatest local average hydrophilicity of a protein, as govern by the hydrophilicity of its adjacent amino acids, correlates with a biological property of the protein.

[0085] As detailed in U.S. Pat. No. 4,554,101, the following hydrophilicity values have been assigned to amino acid residues: arginine (+3.0), lysine (+3.0), aspartate (+3.0±1), glutamate (+3.0±1), serine (+0.3), asparagine (+0.2), glutamine (+0.2), glycine (0), threonine (−0.4), proline (−0.5±1), alanine (−0.5), histidine (−0.5), cysteine (−1.0), methionine (−1.3), valine (−1.5), leucine (−1.8), isoleucine (−1.8), tyrosine (−2.3), phenylalanine (−2.5), and tryptophan (−3.4).

[0086] In making such changes, the substitution of amino acids whose hydrophilicity values are within ±2 is preferred, those which are within ±1 are particularly preferred, and those within ±0.5 are even more particularly preferred.

[0087] In a further aspect of the present invention, one or more of the nucleic acid molecules of the present invention differ in nucleic acid sequence from those encoding a maize protein or fragment thereof set forth in SEQ ID NO: 1 through SEQ ID NO: 14882 or fragment thereof due to the fact that one or more codons encoding an amino acid has been substituted for a codon that encodes a nonessential substitution of the amino acid originally encoded.

[0088] One aspect of the present invention concerns markers that include nucleic acid molecules SEQ ID NO: 1 through SEQ ID NO: 14882 or complements thereof or fragments of either that can act as markers or other nucleic acid molecules of the present invention that can act as markers. Genetic markers of the present invention include “dominant” or “codominant” markers “Codominant markers” reveal the presence of two or more alleles (two per diploid individual) at a locus. “Dominant markers” reveal the presence of only a single allele per locus. The presence of the dominant marker phenotype (e.g., a band of DNA) is an indication that one allele is present in either the homozygous or heterozygous condition. The absence of the dominant marker phenotype (e.g. absence of a DNA band) is merely evidence that “some other” undefined allele is present. In the case of populations where individuals are predominantly homozygous and loci are predominately dimorphic, dominant and codominant markers can be equally valuable. As populations become more heterozygous and multi-allelic, codominant markers often become more informative of the genotype than dominant markers. Marker molecules can be, for example, capable of detecting polymorphisms such as single nucleotide polymorphisms (SNPs).

[0089] SNPs are single base changes in genomic DNA sequence. They occur at greater frequency and are spaced with a greater uniformity throughout a genome than other reported forms of polymorphism. The greater frequency and uniformity of SNPs means that there is greater probability that such a polymorphism will be found near or in a genetic locus of interest than would be the case for other polymorphisms. SNPs are located in protein-coding regions and noncoding regions of a genome. Some of these SNPs may result in defective or variant protein expression (e.g., as a results of mutations or defective splicing). Analysis (genotyping) of characterized SNPs can require only a plus/minus assay rather than a lengthy measurement, permitting easier automation.

[0090] SNPs can be characterized using any of a variety of methods. Such methods include the direct or indirect sequencing of the site, the use of restriction enzymes (Botstein et al., Am. J. Hum. Genet. 32:314-331 (1980), the entirety of which is herein incorporated reference; Konieczny and Ausubel, Plant J. 4:403-410 (1993), the entirety of which is herein incorporated by reference), enzymatic and chemical mismatch assays (Myers et al., Nature 313:495-498 (1985), the entirety of which is herein incorporated by reference), allele-specific PCR (Newton et al., Nucl. Acids Res. 17:2503-2516 (1989), the entirety of which is herein incorporated by reference; Wu et al., Proc. Natl. Acad. Sci. (U.S.A.) 86:2757-2760 (1989), the entirety of which is herein incorporated by reference), ligase chain reaction (Barany, Proc. Natl. Acad. Sci. (U.S.A.) 88:189-193 (1991), the entirety of which is herein incorporated by reference), single-strand conformation polymorphism analysis (Labrune et al., Am. J. Hum. Genet. 48: 1115-1120 (1991), the entirety of which is herein incorporated by reference), primer-directed nucleotide incorporation assays (Kuppuswami et al., Proc. Natl. Acad. Sci. USA 88:1143-1147 (1991), the entirety of which is herein incorporated by reference), dideoxy fingerprinting (Sarkar et al., Genomics 13:441-443 (1992), the entirety of which is herein incorporated by reference), solid-phase ELISA-based oligonucleotide ligation assays (Nikiforov et al., Nucl. Acids Res. 22:4167-4175 (1994), the entirety of which is herein incorporated by reference), oligonucleotide fluorescence-quenching assays (Livak et al., PCR Methods Appl. 4:357-362 (1995), the entirety of which is herein incorporated by reference), 5′-nuclease allele-specific hybridization TaqMan assay (Livak et al., Nature Genet. 9:341-342 (1995), the entirety of which is herein incorporated by reference), template-directed dye-terminator incorporation (TDI) assay (Chen and Kwok, Nucl. Acids Res. 25:347-353 (1997), the entirety of which is herein incorporated by reference), allele-specific molecular beacon assay (Tyagi et al., Nature Biotech. 16: 49-53 (1998), the entirety of which is herein incorporated by reference), PinPoint assay (Haff and Smimov, Genome Res. 7: 378-388 (1997), the entirety of which is herein incorporated by reference) and dCAPS analysis (Neff et al., Plant J 14:387-392 (1998), the entirety of which is herein incorporated by reference).

[0091] Additional markers, such as AFLP markers, RFLP markers and RAPD markers, can be utilized (Walton, Seed World 22-29 (July, 1993), the entirety of which is herein incorporated by reference; Burow and Blake, Molecular Dissection of Complex Traits, 13-29, Paterson (ed.), CRC Press, New York (1988), the entirety of which is herein incorporated by reference). DNA markers can be developed from nucleic acid molecules using restriction endonucleases, the PCR and/or DNA sequence information. RFLP markers result from single base changes or insertions/deletions. These codominant markers are highly abundant in plant genomes, have a medium level of polymorphism and are developed by a combination of restriction endonuclease digestion and Southern blotting hybridization. CAPS are similarly developed from restriction nuclease digestion but only of specific PCR products. These markers are also codominant, have a medium level of polymorphism and are highly abundant in the genome. The CAPS result from single base changes and insertions/deletions.

[0092] Another marker type, RAPDs, are developed from DNA amplification with random primers and result from single base changes and insertions/deletions in plant genomes. They are dominant markers with a medium level of polymorphisms and are highly abundant. AFLP markers require using the PCR on a subset of restriction fragments from extended adapter primers. These markers are both dominant and codominant are highly abundant in genomes and exhibit a medium level of polymorphism.

[0093] SSRs require DNA sequence information. These codominant markers result from repeat length changes, are highly polymorphic and do not exhibit as high a degree of abundance in the genome as CAPS, AFLPs and RAPDs, SNPs also require DNA sequence information. These codominant markers result from single base substitutions. They are highly abundant and exhibit a medium of polymorphism (Rafalski et al., In: Nonmammalian Genomic Analysis, Birren and Lai (ed.), Academic Press, San Diego, Calif., pp. 75-134 (1996), the entirety of which is herein incorporated by reference). It is understood that a nucleic acid molecule of the present invention may be used as a marker.

[0094] A PCR probe is a nucleic acid molecule capable of initiating a polymerase activity while in a double-stranded structure with another nucleic acid. Various methods for determining the structure of PCR probes and PCR techniques exist in the art. Computer generated searches using programs such as Primer3 (www-genome.wi.mit.edu/cgi-bin/primer/primer3.cgi), STSPipeline (www-genome.wi.mit.edu/cgi-bin/www-STS_Pipeline), or GeneUp (Pesole et al., BioTechniques 25:112-123 (1998) the entirety of which is herein incorporated by reference), for example, can be used to identify potential PCR primers.

[0095] It is understood that a fragment of one or more of the nucleic acid molecules of the present invention may be a probe and specifically a PCR probe.

[0096] (b) Protein and Peptide Molecules

[0097] A class of agents comprises one or more of the protein or peptide molecules encoded by SEQ ID NO: 1 through SEQ ID NO:14882 or one or more of the protein or fragment thereof or peptide molecules encoded by other nucleic acid agents of the present invention. As used herein, the term “protein molecule” or “peptide molecule” includes any molecule that comprises five or more amino acids. It is well know in the art that proteins may undergo modification, including post-translational modifications, such as, but not limited to, disulfide bond formation, glycosylation, phosphorylation, or oligomerization. Thus, as used herein, the term “protein molecule” or “peptide molecule” includes any protein molecule that is modified by any biological or non-biological process. The terms “amino acid” and “amino acids” refer to all naturally occurring L-amino acids. This definition is meant to include norleucine, ornithine, homocysteine, and homoserine.

[0098] One or more of the protein or fragment of peptide molecules may be produced via chemical synthesis, or more preferably, by expression in a suitable bacterial or eukaryotic host. Suitable methods for expression are described by Sambrook, et al., (In: Molecular Cloning, A Laboratory Manual, 2nd Edition, Cold Spring Harbor Press, Cold Spring Harbor, N.Y. (1989)), or similar texts.

[0099] A “protein fragment” is a peptide or polypeptide molecule whose amino acid sequence comprises a subset of the amino acid sequence of that protein. A protein or fragment thereof that comprises one or more additional peptide regions not derived from that protein is a “fusion” protein. Such molecules may be derivatized to contain carbohydrate or other moieties (such as keyhole limpet hemocyanin, etc.). Fusion protein or peptide molecule of the present invention are preferably produced via recombinant means.

[0100] Another class of agents comprise protein or peptide molecules encoded by SEQ ID NO: 1 through SEQ ID NO:14882 or complements thereof or, fragments or fusions thereof in which non-essential, or not relevant, amino acid residues have been added, replaced, or deleted. An example of such a homologue is the homologue protein of all non-maize plant species, including but not limited to alfalfa, Arabidopsis, barley, Brassica, broccoli, cabbage, citrus, cotton, garlic, oat, oilseed rape, onion, canola, flax, an ornamental plant, pea, peanut, pepper, potato, rice, rye, sorghum, soybean, strawberry, sugarcane, sugarbeet, tomato, wheat, poplar, pine, fir, eucalyptus, apple, lettuce, peas, lentils, grape, banana, tea, turf grasses, etc. Particularly preferred non-maize plants to utilize for the isolation of homologues would include alfalfa, Arabidopsis, barley, cotton, oat, oilseed rape, rice, canola, ornamentals, soybean, sugarcane, sugarbeet, tomato, potato, wheat, and turf grasses. Such a homologue can be obtained by any of a variety of methods. Most preferably, as indicated above, one or more of the disclosed sequences (SEQ ID NO: 1 through SEQ ID NO:14882 or complements thereof) will be used to define a pair of primers that may be used to isolate the homologue-encoding nucleic acid molecules from any desired species. Such molecules can be expressed to yield homologues by recombinant means.

[0101] (c) Antibodies

[0102] One aspect of the present invention concerns antibodies, single-chain antigen binding molecules, or other proteins that specifically bind to one or more of the protein or peptide molecules of the present invention and their homologues, fusions or fragments. Such antibodies may be used to quantitatively or qualitatively detect the protein or peptide molecules of the present invention. As used herein, an antibody or peptide is said to “specifically bind” to a protein or peptide molecule of the present invention if such binding is not competitively inhibited by the presence of non-related molecules.

[0103] Nucleic acid molecules that encode all or part of the protein of the present invention can be expressed, via recombinant means, to yield protein or peptides that can in turn be used to elicit antibodies that are capable of binding the expressed protein or peptide. Such antibodies may be used in immunoassays for that protein. Such protein-encoding molecules, or their fragments may be a “fusion” molecule (i.e., a part of a larger nucleic acid molecule) such that, upon expression, a fusion protein is produced. It is understood that any of the nucleic acid molecules of the present invention may be expressed, via recombinant means, to yield proteins or peptides encoded by these nucleic acid molecules.

[0104] The antibodies that specifically bind proteins and protein fragments of the present invention may be polyclonal or monoclonal, and may comprise intact immunoglobulins, or antigen binding portions of immunoglobulins (such as (F(ab′), F(ab′)₂) fragments, or single-chain immunoglobulins producible, for example, via recombinant means). It is understood that practitioners are familiar with the standard resource materials which describe specific conditions and procedures for the construction, manipulation and isolation of antibodies (see, for example, Harlow and Lane, In Antibodies: A Laboratory Manual, Cold Spring Harbor Press, Cold Spring Harbor, N.Y. (1988), the entirety of which is herein incorporated by reference).

[0105] Murine monoclonal antibodies are particularly preferred. BALB/c mice are preferred for this purpose, however, equivalent strains may also be used. The animals are preferably immunized with approximately 25 μg of purified protein (or fragment thereof) that has been emulsified a suitable adjuvant (such as TiterMax adjuvant (Vaxcel, Norcross, Ga.)). Immunization is preferably conducted at two intramuscular sites, one intraperitoneal site, and one subcutaneous site at the base of the tail. An additional i.v. injection of approximately 25 μg of antigen is preferably given in normal saline three weeks later. After approximately 11 days following the second injection, the mice may be bled and the blood screened for the presence of anti-protein or peptide antibodies. Preferably, a direct binding Enzyme-Linked Immunoassay (ELISA) is employed for this purpose.

[0106] More preferably, the mouse having the highest antibody titer is given a third i.v. injection of approximately 25 μg of the same protein or fragment. The splenic leukocytes from this animal may be recovered 3 days later, and are then permitted to fuse, most preferably, using polyethylene glycol, with cells of a suitable myeloma cell line (such as, for example, the P3X63Ag8.653 myeloma cell line). Hybridoma cells are selected by culturing the cells under “HAT” (hypoxanthine-aminopterin-thymine) selection for about one week. The resulting clones may then be screened for their capacity to produce monoclonal antibodies (“mAbs), preferably by direct ELISA.

[0107] In one embodiment, anti-protein or peptide monoclonal antibodies are isolated using a fusion of a protein, protein fragment, or peptide of the present invention, or conjugate of a protein, protein fragment, or peptide of the present invention, as immunogens. Thus, for example, a group of mice can be immunized using a fusion protein emulsified in Freund's complete adjuvant (e.g. approximately 50 μg of antigen per immunization). At three week intervals, an identical amount of antigen is emulsified in Freund's incomplete adjuvant and used to immunize the animals. Ten days following the third immunization, serum samples are taken and evaluated for the presence of antibody. If antibody titers are too low, a fourth booster can be employed. Polysera capable of binding the protein or peptide can also be obtained using this method.

[0108] In a preferred procedure for obtaining monoclonal antibodies, the spleens of the above-described immunized mice are removed, disrupted, and immune splenocytes are isolated over a ficoll gradient. The isolated splenocytes are fused, using polyethylene glycol with BALB/c-derived HGPRT (hypoxanthine guanine phosphoribosyl transferase) deficient P3x63xAg8.653 plasmacytoma cells. The fused cells are plated into 96-well microtiter plates and screened for hybridoma fusion cells by their capacity to grow in culture medium supplemented with hypothanthine, aminopterin and thymidine for approximately 2-3 weeks.

[0109] Hybridoma cells that arise from such incubation are preferably screened for their capacity to produce an immunoglobulin that binds to a protein of interest. An indirect ELISA may be used for this purpose. In brief, the supernatants of hybridomas are incubated in microtiter wells that contain immobilized protein. After washing, the titer of bound immunoglobulin can be determined using, for example, a goat anti-mouse antibody conjugated to horseradish peroxidase. After additional washing, the amount of immobilized enzyme is determined (for example through the use of a chromogenic substrate). Such screening is performed as quickly as possible after the identification of the hybridoma in order to ensure that a desired clone is not overgrown by non-secreting neighbors. Desirably, the fusion plates are screened several times since the rates of hybridoma growth vary. In a preferred sub-embodiment, a different antigenic form of immunogen may be used to screen the hybridoma. Thus, for example, the splenocytes may be immunized with one immunogen, but the resulting hybridomas can be screened using a different immunogen. It is understood that any of the protein or peptide molecules of the present invention may be used to raise antibodies.

[0110] As discussed below, such antibody molecules or their fragments may be used for diagnostic purposes. Where the antibodies are intended for diagnostic purposes, it may be desirable to derivatize them, for example with a ligand group (such as biotin) or a detectable marker group (such as a fluorescent group, a radioisotope or an enzyme).

[0111] The ability to produce antibodies that bind the protein or peptide molecules of the present invention permits the identification of mimetic compounds of those molecules. A “mimetic compound” is a compound that is not that compound, or a fragment of that compound, but which nonetheless exhibits an ability to specifically bind to antibodies directed against that compound.

[0112] It is understood that any of the agents of the present invention can be substantially purified and/or be biologically active and/or recombinant.

[0113] Uses of the Agents of the Invention

[0114] The nucleic acid molecules and fragments thereof of the present invention from the cDNA libraries LIB3136, LIB3137, LIB3156, LIB3157, LIB3158, and LIB3159 are generated from young maize seedlings. Seedlings are a developmental phase in the growth process therefore, the ESTs of the present invention will also find great use in the isolation of a variety of agronomically significant genes, including but not limited to genes that regulate germination, developmental stress, protein, amino acids, sterols, oils, minerals, isoflavones, saponins, trypsin inhibitors, vitamins, tocopherols, antinutrient components, carbohydrates, starch metabolism, and seedling and vegetative regulatory elements. Such genes are associated with plant growth, quality, yield, and could also serve as links in important metabolic, developmental and catabolic pathways. Libraries from this tissue can enable the acquisition of a variety of agronomically significant genes involved in the synthesis and catabolism of commercially important traits. The ESTs of the present invention also can enable the acquisition of promoters and cis-regulatory elements which will be useful to express agronomically significant genes in these tissues and/or other tissues. The ESTs of the present invention also can enable the acquisition of molecular markers, which can be used in, including but not limited to, breeding schemes, genetic and molecular mapping, and cloning of agronomically significant genes.

[0115] The nucleic acid molecules and fragments thereof of the present invention from the cDNA libraries are generated from cold-treated young maize seedlings and from cold tolerant germplasm WIGOR. Therefore, the cDNA library of the present invention can enable acquisition of, including but not limited to, cold-response genes, cold-resistance genes, and genes that encode cold regulatory transactivation proteins. The ESTs of the present invention can also be used in isolating genes, which would be involved in developmental and metabolic pathways and which would play a role in the nature of plant protection mechanisms under cold conditions (biochemical and physical changes, and gene regulation). Such genes are associated with plant growth and crop yield under cold stress environment and can be used, including but not limited to, in the development of cold tolerant germplasms and in the increasing of crop yield under cold stress environment. The ESTs of the present invention also can enable the acquisition of promoters and cis-regulatory elements which will be useful to express cold regulated genes. Sequence analysis using the ESTs provided in the present invention will result in more efficient gene screening for desirable agronomic traits.

[0116] Nucleic acid molecules and fragments thereof of the present invention may be employed to obtain other nucleic acid molecules. Such molecules include the nucleic acid molecules of other plants or other organisms (e.g., alfalfa, rice, potato, cotton, oat, rye, barley, soybean, wheat, Arabidopsis, Brassica, etc.) including the nucleic acid molecules that encode, in whole or in part, protein homologues of other plant species or other organisms, and sequences of genetic elements such as promoters and transcriptional regulatory elements. Such molecules can be readily obtained by using the above-described nucleic acid molecules or fragments thereof to screen cDNA or genomic libraries obtained from such plant species. Methods for forming such libraries are well known in the art. Such homologue molecules may differ in their nucleotide sequences from those found in one or more of SEQ ID NO:1 through SEQ ID NO:14882 or complements thereof because complete complementarity is not needed for stable hybridization. The nucleic acid molecules of the present invention therefore also include molecules that, although capable of specifically hybridizing with the nucleic acid molecules may lack “complete complementarity.”

[0117] Any of a variety of methods may be used to obtain one or more of the above-described nucleic acid molecules (Zamechik et al., Proc. Natl. Acad. Sci. (U.S.A.) 83:4143-4146 (1986), the entirety of which is herein incorporated by reference; Goodchild et al., Proc. Natl. Acad. Sci. (U.S.A.) 85:5507-5511 (1988), the entirety of which is herein incorporated by reference; Wickstrom et al., Proc. Natl. Acad. Sci. (U.S.A.) 85:1028-1032 (1988), the entirety of which is herein incorporated by reference; Holt, et al., Molec. Cell. Biol. 8:963-973 (1988), the entirety of which is herein incorporated by reference; Gerwirtz, et al., Science 242:1303-1306 (1988), the entirety of which is herein incorporated by reference; Anfossi, et al., Proc. Natl. Acad. Sci. (U.S.A.) 86:3379-3383 (1989), the entirety of which is herein incorporated by reference; Becker, et al., EMBO J. 8:3685-3691 (1989); the entirety of which is herein incorporated by reference). Automated nucleic acid synthesizers may be employed for this purpose. In lieu of such synthesis, the disclosed nucleic acid molecules may be used to define a pair of primers that can be used with the polymerase chain reaction (Mullis, et al., Cold Spring Harbor Symp. Quant. Biol. 51:263-273 (1986); Erlich et al., EP 50,424; EP 84,796, EP 258,017, EP 237,362; Mullis, EP 201,184; Mullis et al., U.S. Pat. No. 4,683,202; Erlich, U.S. Pat. No. 4,582,788; and Saiki, R. et al., U.S. Pat. No. 4,683,194, all of which are hereby incorporated by reference in their entirety) to amplify and obtain any desired nucleic acid molecule or fragment.

[0118] Promoter sequence(s) and other genetic elements including but not limited to transcriptional regulatory elements associated with one or more of the disclosed nucleic acid sequences can also be obtained using the disclosed nucleic acid sequences provided herein.

[0119] In one embodiment, such sequences are obtained by incubating EST nucleic acid molecules or preferably fragments thereof with members of genomic libraries (e.g. maize and soybean) and recovering clones that hybridize to the EST nucleic acid molecule or fragment thereof. In a second embodiment, methods of “chromosome walking,” or inverse PCR may be used to obtain such sequences (Frohman, et al., Proc. Natl. Acad. Sci. (U.S.A.) 85:8998-9002 (1988); Ohara, et al., Proc. Natl. Acad. Sci. (U.S.A.) 86: 5673-5677 (1989); Pang et al., Biotechniques, 22(6); 1046-1048 (1977); Huang et al., Methods Mol. Biol. 69: 89-96 (1977); Hartl et al., Methods Mol. Biol. 58: 293-301 (1996), all of which are hereby incorporated by reference in their entirety). In one embodiment, the disclosed nucleic acid molecules are used to identify cDNAs whose analogous genes contain promoters with desirable expression patterns. The nucleic acid molecules isolated from the library of the present invention are used to isolate promoters of tissue-enhanced, tissue-specific, developmentally- or environmentally-regulated expression profiles. Isolation and functional analysis of the 5′ flanking promoter sequences of these genes from genomic libraries, for example, using genomic screening methods and PCR techniques would result in the isolation of useful promoters and transcriptional regulatory elements. These methods are known to those of skill in the art and have been described (See for example Birren et al., Genome Analysis: Analyzing DNA, 1, (1997), Cold Spring Harbor Laboratory Press, Cold Spring Harbor, N.Y., the entirety of which is herein incorporated by reference).

[0120] Promoters obtained utilizing the nucleic acid molecules of the present invention could also be modified to affect their control characteristics. Examples of such modifications would include but are not limited to enhancer sequences as reported by Kay et al., Science 236:1299 (1987), herein incorporated by reference in its entirety. Such genetic elements could be used to enhance gene expression of new and existing traits for crop improvements.

[0121] The nucleic acid molecules of the present invention may be used to isolate promoters of tissue enhanced. tissue specific, cell-specific, cell-type, developmentally or environmentally regulated expression profiles. Isolation and functional analysis of the 5′ flanking promoter sequences of these genes from genomic libraries, for example, using genomic screening methods and PCR techniques would result in the isolation of useful promoters and transcriptional regulatory elements. These methods are known to those of skill in the art and have been described (See, for example, Birren et. al., Genome Analysis: Analyzing DNA, 1, Cold Spring Harbor Laboratory Press, Cold Spring Harbor, N.Y. (1997), the entirety of which is herein incorporated by reference). Promoters obtained utilizing the nucleic acid molecules of the present invention could also be modified to affect their control characteristics. Examples of such modifications would include but are not limited to enhancer sequences as reported by Kay, et al Science 236:1299 (1987), herein incorporated reference in its entirety. Such genetic elements could be used to enhance gene expression of new and existing traits for crop improvements.

[0122] In an aspect of the present invention, one or more of the nucleic molecules of the present invention are used to determine whether a plant (preferably maize) has a mutation affecting the level (i.e., the concentration of mRNA in a sample, etc.) or pattern (i.e., the kinetics of expression, rate of decomposition, stability profile, etc.) of the expression encoded in part or whole by one or more of the nucleic acid molecules of the present invention (collectively, the “Expression Response” of a cell or tissue). As used herein, the Expression Response manifested by a cell or tissue is said to be “altered” if it differs from the Expression Response of cells or tissues of plants not exhibiting the phenotype. To determine whether a Expression Response is altered, the Expression Response manifested by the cell or tissue of the plant exhibiting the phenotype is compared with that of a similar cell or tissue sample of a plant not exhibiting the phenotype. As will be appreciated, it is not necessary to re-determine the Expression Response of the cell or tissue sample of plants not exhibiting the phenotype each time such a comparison is made; rather, the Expression Response of a particular plant may be compared with previously obtained values of normal plants. As used herein, the phenotype of the organism is any of one or more characteristics of an organism (e.g. disease resistance, pest tolerance, environmental tolerance, male sterility, yield, quality improvements, etc.). A change in genotype or phenotype may be transient or permanent. Also as used herein, a tissue sample is any sample that comprises more than one cell. In a preferred aspect, a tissue sample comprises cells that share a common characteristic (e.g. derived from leaf, root, or pollen etc).

[0123] In one sub-aspect, such an analysis is conducted by determining the presence and/or identity of polymorphism(s) by one or more of the nucleic acid molecules of the present invention and more specifically, one or more of the EST nucleic acid molecules or fragments thereof which are associated with phenotype, or a predisposition to phenotype.

[0124] Any of a variety of molecules can be used to identify such polymorphism(s). In one embodiment, one or more of the EST nucleic acid molecules (or a sub-fragment thereof) may be employed as a marker nucleic acid molecule to identify such polymorphism(s). Alternatively, such polymorphisms can be detected through the use of a marker nucleic acid molecule or a marker protein that is genetically linked to (i.e., a polynucleotide that co-segregates with) such polymorphism(s).

[0125] In an alternative embodiment, such polymorphisms can be detected through the use of a marker nucleic acid molecule that is physically linked to such polymorphism(s). For this purpose, marker nucleic acid molecules comprising a nucleotide sequence of a polynucleotide located within 1 mb of the polymorphism(s), and more preferably within 100 kb of the polymorphism(s), and most preferably within 10 kb of the polymorphism(s) can be employed.

[0126] The genomes of animals and plants naturally undergo spontaneous mutation in the course of their continuing evolution (Gusella, Ann. Rev. Biochem. 55:831-854 (1986)). A “polymorphism” is a variation or difference in the sequence of the gene or its flanking regions that arises in some of the members of a species. The variant sequence and the “original” sequence co-exist in the species' population. In some instances, such co-existence is in stable or quasi-stable equilibrium.

[0127] A polymorphism is thus said to be “allelic,” in that, due to the existence of the polymorphism, some members of a species may have the original sequence (i.e., the original “allele”) whereas other members may have the variant sequence (i.e., the variant “allele”). In the simplest case, only one variant sequence may exist, and the polymorphism is thus said to be di-allelic. In other cases, the species' population may contain multiple alleles, and the polymorphism is termed tri-allelic, etc. A single gene may have multiple different unrelated polymorphisms. For example, it may have a di-allelic polymorphism at one site, and a multi-allelic polymorphism at another site.

[0128] The variation that defines the polymorphism may range from a single nucleotide variation to the insertion or deletion of extended regions within a gene. In some cases, the DNA sequence variations are in regions of the genome that are characterized by short tandem repeats (STRs) that include tandem di- or tri-nucleotide repeated motifs of nucleotides. Polymorphisms characterized by such tandem repeats are referred to as “variable number tandem repeat” (“VNTR”) polymorphisms. VNTRs have been used in identity analysis (Weber, U.S. Pat. No. 5,075,217; Armour, et al., FEBS Lett. 307:113-115 (1992); Jones, et al., Eur. J. Haematol. 39:144-147 (1987); Horn, et al., PCT Application WO91/14003; Jeffreys, European Patent Application 370,719; Jeffreys, U.S. Pat. No. 5,699,082; Jeffreys. et al., Amer. J. Hum. Genet. 39:11-24 (1986); Jeffreys. et al., Nature 316:76-79 (1985); Gray, et al., Proc. R. Acad. Soc. Lond. 243:241-253 (1991); Moore, et al., Genomics 10:654-660 (1991); Jeffreys, et al., Anim. Genet. 18:1-15 (1987); Hillel, et al., Anim. Genet. 20:145-155 (1989); Hillel, et al., Genet. 124:783-789 (1990), all of which are herein incorporated by reference in their entirety).

[0129] The detection of polymorphic sites in a sample of DNA may be facilitated through the use of nucleic acid amplification methods. Such methods specifically increase the concentration of polynucleotides that span the polymorphic site, or include that site and sequences located either distal or proximal to it. Such amplified molecules can be readily detected by gel electrophoresis or other means.

[0130] The most preferred method of achieving such amplification employs the polymerase chain reaction (“PCR”) (Mullis, et al., Cold Spring Harbor Symp. Quant. Biol. 51:263-273 (1986); Erlich, et al., European Patent Appln. 50,424; European Patent Appln. 84,796, European Patent Application 258,017, European Patent Appln. 237,362; Mullis, European Patent Appln. 201,184; Mullis, et al., U.S. Pat. No. 4,683,202; Erlich., U.S. Pat. No. 4,582,788; and Saiki, et al., U.S. Pat. No. 4,683,194, all of which are herein incorporated by reference), using primer pairs that are capable of hybridizing to the proximal sequences that define a polymorphism in its double-stranded form.

[0131] In lieu of PCR, alternative methods, such as the “Ligase Chain Reaction” (“LCR”) may be used (Barany, Proc. Natl. Acad. Sci. (U.S.A.) 88:189-193 (1991), the entirety of which is herein incorporated by reference). LCR uses two pairs of oligonucleotide probes to exponentially amplify a specific target. The sequences of each pair of oligonucleotides is selected to permit the pair to hybridize to abutting sequences of the same strand of the target. Such hybridization forms a substrate for a template-dependent ligase. As with PCR, the resulting products thus serve as a template in subsequent cycles and an exponential amplification of the desired sequence is obtained.

[0132] LCR can be performed with oligonucleotides having the proximal and distal sequences of the same strand of a polymorphic site. In one embodiment, either oligonucleotide will be designed to include the actual polymorphic site of the polymorphism. In such an embodiment, the reaction conditions are selected such that the oligonucleotides can be ligated together only if the target molecule either contains or lacks the specific nucleotide that is complementary to the polymorphic site present on the oligonucleotide. Alternatively, the oligonucleotides may be selected such that they do not include the polymorphic site (see, Segev, PCT Application WO 90/01069, the entirety of which is herein incorporated by reference).

[0133] The “Oligonucleotide Ligation Assay” (“OLA”) may alternatively be employed (Landegren, et al., Science 241:1077-1080 (1988), the entirety of which is herein incorporated by reference). The OLA protocol uses two oligonucleotides which are designed to be capable of hybridizing to abutting sequences of a single strand of a target. OLA, like LCR, is particularly suited for the detection of point mutations. Unlike LCR, however, OLA results in “linear” rather than exponential amplification of the target sequence.

[0134] Nickerson, et al. have described a nucleic acid detection assay that combines attributes of PCR and OLA (Nickerson, et al., Proc. Natl. Acad. Sci. (U.S.A.) 87:8923-8927 (1990), the entirety of which is herein incorporated by reference). In this method, PCR is used to achieve the exponential amplification of target DNA, which is then detected using OLA. In addition to requiring multiple, and separate, processing steps, one problem associated with such combinations is that they inherit all of the problems associated with PCR and OLA.

[0135] Schemes based on ligation of two (or more) oligonucleotides in the presence of nucleic acid having the sequence of the resulting “di-oligonucleotide”, thereby amplifying the di-oligonucleotide, are also known (Wu, et al., Genomics 4:560 (1989), the entirety of which is herein incorporated by reference), and may be readily adapted to the purposes of the present invention.

[0136] Other known nucleic acid amplification procedures, such as allele-specific oligomers, branched DNA technology, transcription-based amplification systems, or isothermal amplification methods may also be used to amplify and analyze such polymorphisms (Malek, et al., U.S. Pat. No. 5,130,238; Davey, et al., European Patent Application 329,822; Schuster et al., U.S. Pat. No. 5,169,766; Miller, et al., PCT Application WO 89/06700; Kwoh, et al., Proc. Natl. Acad. Sci. (U.S.A.) 86:1173-1177 (1989); Gingeras, et al., PCT Application WO 88/10315; Walker, et al., Proc. Natl. Acad. Sci. (U.S.A.) 89:392-396 (1992), all of which are herein incorporated by reference in their entirety).

[0137] The identification of a polymorphism can be determined in a variety of ways. By correlating the presence or absence of it in a plant with the presence or absence of a phenotype, it is possible to predict the phenotype of that plant. If a polymorphism creates or destroys a restriction endonuclease cleavage site, or if it results in the loss or insertion of DNA (e.g., a VNTR polymorphism), it will alter the size or profile of the DNA fragments that are generated by digestion with that restriction endonuclease. As such, individuals that possess a variant sequence can be distinguished from those having the original sequence by restriction fragment analysis. Polymorphisms that can be identified in this manner are termed “restriction fragment length polymorphisms” (“RFLPs”). RFLPs have been widely used in human and plant genetic analyses (Glassberg, UK Patent Application 2135774; Skolnick, et al., Cytogen. Cell Genet. 32:58-67 (1982); Botstein, et al., Ann. J. Hum. Genet. 32:314-331 (1980); Fischer, et al. (PCT Application WO90/13668); Uhlen, PCT Application WO90/11369).

[0138] Polymorphisms can also be identified by Single Strand Conformation Polymorphism (SSCP) analysis. The SSCP technique is a method capable of identifying most sequence variations in a single strand of DNA, typically between 150 and 250 nucleotides in length (Elles, Methods in Molecular Medicine: Molecular Diagnosis of Genetic Diseases, Humana Press (1996), the entirety of which is herein incorporated by reference); Orita et al., Genomics 5: 874-879 (1989), the entirety of which is herein incorporated by reference). Under denaturing conditions a single strand of DNA will adopt a conformation that is uniquely dependent on its sequence conformation. This conformation usually will be different, even if only a single base is changed. Most conformations have been reported to alter the physical configuration or size sufficiently to be detectable by electrophoresis. A number of protocols have been described for SSCP including, but not limited to Lee et al., Anal. Biochem. 205: 289-293 (1992), the entirety of which is herein incorporated by reference; Suzuki et al., Anal. Biochem. 192: 82-84 (1991), the entirety of which is herein incorporated by reference; Lo et al., Nucleic Acids Research 20: 1005-1009 (1992), the entirety of which is herein incorporated by reference; Sarkar et al., Genomics 13: 441-443 (1992), the entirety of which is herein incorporated by reference). It is understood that one or more of the nucleic acids of the present invention, may be utilized as markers or probes to detect polymorphisms by SSCP analysis.

[0139] Polymorphisms may also be found using a DNA fingerprinting technique called amplified fragment length polymorphism (AFLP), which is based on the selective PCR amplification of restriction fragments from a total digest of genomic DNA to profile that DNA. Vos, et al., Nucleic Acids Res. 23:4407-4414 (1995), the entirety of which is herein incorporated by reference. This method allows for the specific co-amplification of high numbers of restriction fragments, which can be visualized by PCR without knowledge of the nucleic acid sequence.

[0140] AFLP employs basically three steps. Initially, a sample of genomic DNA is cut with restriction enzymes and oligonucleotide adapters are ligated to the restriction fragments of the DNA. The restriction fragments are then amplified using PCR by using the adapter and restriction sequence as target sites for primer annealing. The selective amplification is achieved by the use of primers that extend into the restriction fragments, amplifying only those fragments in which the primer extensions match the nucleotide flanking the restriction sites. These amplified fragments are then visualized on a denaturing polyacrylamide gel.

[0141] AFLP analysis has been performed on Salix (Beismann, et al., Mol. Ecol. 6:989-993 (1997), the entirety of which is herein incorporated by reference); Acinetobacter (Janssen, et al., Int. J. Syst. Bacteriol 47:1179-1187 (1997), the entirety of which is herein incorporated by reference), Aeromonas popoffi (Huys, et al., Int. J. Syst. Bacteriol. 47:1165-1171 (1997), the entirety of which is herein incorporated by reference), rice (McCouch, et al., Plant Mol. Biol. 35:89-99 (1997), the entirety of which is herein incorporated by reference); Nandi, et al., Mol. Gen. Genet. 255:1-8 (1997); Cho, et al., Genome 39:373-378 (1996), herein incorporated by reference), barley (Hordeum vulgare) (Simons, et al., Genomics 44:61-70 (1997), the entirety of which is herein incorporated by reference; Waugh, et al., Mol. Gen. Genet. 255:311-321 (1997), the entirety of which is herein incorporated by reference; Qi, et al., Mol. Gen. Genet. 254:330-336 (1997), the entirety of which is herein incorporated by reference; Becker, et al., Mol. Gen. Genet. 249:65-73 (1995), the entirety of which is herein incorporated by reference), potato (Van der Voort, et al., Mol. Gen. Genet. 255:438-447 (1997), the entirety of which is herein incorporated by reference; Meksem, et al., Mol. Gen. Genet. 249:74-81 (1995), the entirety of which is herein incorporated by reference), Phytophthora infestans (Van der Lee, et al., Fungal Genet. Biol. 21:278-291 (1997), the entirety of which is herein incorporated by reference), Bacillus anthracis (Keim, et al., J. Bacteriol. 179:818-824 (1997)), Astragalus cremnophylax (Travis, et al., Mol. Ecol. 5:735-745 (1996), the entirety of which is herein incorporated by reference), Arabidopsis (Cnops, et al., Mol. Gen. Genet. 253:32-41 (1996), the entirety of which is herein incorporated by reference), Escherichia coli (Lin, et al., Nucleic Acids Res. 24:3649-3650 (1996), the entirety of which is herein incorporated by reference), Aeromonas (Huys, et al., Int. J. Syst. Bacteriol. 46:572-580 (1996), the entirety of which is herein incorporated by reference), nematode (Folkertsma, et al., Mol. Plant. Microbe Interact. 9:47-54 (1996), the entirety of which is herein incorporated by reference), tomato (Thomas, et al., Plant J. 8:785-794 (1995), the entirety of which is herein incorporated by reference), and human (Latorra, et al., PCR Methods Appl. 3:351-358 (1994)). AFLP analysis has also been used for fingerprinting mRNA (Money, et al., Nucleic Acids Res. 24:2616-2617 (1996), the entirety of which is herein incorporated by reference; Bachem, et al., Plant J. 9:745-753 (1996), the entirety of which is herein incorporated by reference). It is understood that one or more of the nucleic acids of the present invention, may be utilized as markers or probes to detect polymorphisms by AFLP analysis for fingerprinting mRNA.

[0142] Polymorphisms may also be found using random amplified polymorphic DNA (RAPD) (Williams et al., Nucl. Acids Res. 18: 6531-6535 (1990), the entirety of which is herein incorporated by reference) and cleaveable amplified polymorphic sequences (CAPS) (Lyamichev et al., Science 260: 778-783 (1993), the entirety of which is herein incorporated by reference). It is understood that one or more of the nucleic acids of the present invention, may be utilized as markers or probes to detect polymorphisms by RAPD or CAPS analysis.

[0143] Polymorphisms are useful, through linkage analysis, to define the genetic distances or physical distances between polymorphic traits. A physical map or ordered array of genomic DNA fragments in the desired region containing the gene may be used to characterize and isolate genes corresponding to desirable traits. For this purpose, yeast artificial chromosomes (YACs), bacterial artificial chromosomes (BACs), and cosmids are appropriate vectors for cloning large segments of DNA molecules. Although fewer clones are needed to make a contig for a specific genomic region by using YACs (Agyare et al., Genome Res. 7: 1-9 (1997), the entirety of which is herein incorporated by reference; James et al., Genomics 32: 425-430 (1996), the entirety of which is herein incorporated by reference), chimerism in the inserted DNA fragment can arise. Cosmids are convenient for handling smaller-size DNA molecules and may be used for transformation in developing transgenic plants. BACs also carry DNA fragments and are less prone to chimerism.

[0144] Through genetic mapping, a fine scale linkage map can be developed using DNA markers and, then, a genomic DNA library of large-sized fragments can be screened with molecular markers linked to the desired trait. Molecular markers are advantageous for agronomic traits that are otherwise difficult to tag, such as resistance to pathogens, insects and nematodes, tolerance to abiotic stress, quality parameters and quantitative traits such as high yield potential.

[0145] The essential requirements for marker-assisted selection in a plant breeding program are: (1) the marker(s) should co-segregate or be closely linked with the desired trait; (2) an efficient means of screening large populations for the molecular marker(s) should be available; and (3) the screening technique should have high reproducibility across laboratories and preferably be economical to use and be user-friendly.

[0146] The genetic linkage of marker molecules can be established by a gene mapping model such as, without limitation, the flanking marker model reported by Lander and Botstein, Genetics 121:185-199 (1989) and the interval mapping, based on maximum likelihood methods described by Lander and Botstein, Genetics 121:185-199 (1989) and implemented in the software package MAPMAKER/QTL (Lincoln and Lander, Mapping Genes Controlling Quantitative Traits Using MAPMAKER/QTL, Whitehead Institute for Biomedical Research, Massachusetts, (1990). Additional software includes Qgene, Version 2.23 (1996), Department of Plant Breeding and Biometry, 266 Emerson Hall, Cornell University, Ithaca, N.Y., the manual of which is herein incorporated by reference in its entirety). Use of Qgene software is a particularly preferred approach.

[0147] A maximum likelihood estimate (MLE) for the presence of a marker is calculated, together with an MLE assuming no QTL effect, to avoid false positives. A log₁₀ of an odds ratio (LOD) is then calculated as: LOD=log₁₀ (MLE for the presence of a QTL/MLE given no linked QTL).

[0148] The LOD score essentially indicates how much more likely the data are to have arisen assuming the presence of a QTL than in its absence. The LOD threshold value for avoiding a false positive with a given confidence, say 95%, depends on the number of markers and the length of the genome. Graphs indicating LOD thresholds are set forth in Lander and Botstein, Genetics 121:185-199 (1989) the entirety of which is herein incorporated by reference and further described by Arús and Moreno-González, Plant Breeding, Hayward et al., (eds.) Chapman & Hall, London, pp. 314-331 (1993), the entirety of which is herein incorporated by reference.

[0149] Additional models can be used. Many modifications and alternative approaches to interval mapping have been reported, including the use of non-parametric methods (Kruglyak and Lander, Genetics 139:1421-1428 (1995), the entirety of which is herein incorporated by reference). Multiple regression methods or models can be also be used, in which the trait is regressed on a large number of markers (Jansen, Biometrics in Plant Breeding, van Oijen and Jansen (eds.), Proceedings of the Ninth Meeting of the Eucarpia Section Biometrics in Plant Breeding, The Netherlands, pp. 116-124 (1994); Weber and Wricke, Advances in Plant Breeding, Blackwell, Berlin, 16 (1994), both of which are herein incorporated by reference in their entirety). Procedures combining interval mapping with regression analysis, whereby the phenotype is regressed onto a single putative QTL at a given marker interval and at the same time onto a number of markers that serve as ‘cofactors,’ have been reported by Jansen and Stam, Genetics 136:1447-1455 (1994), the entirety of which is herein incorporated by reference and Zeng, Genetics 136:1457-1468 (1994) the entirety of which is herein incorporated by reference. Generally, the use of cofactors reduces the bias and sampling error of the estimated QTL positions (Utz and Melchinger, Biometrics in Plant Breeding, van Oijen and Jansen (eds.) Proceedings of the Ninth Meeting of the Eucarpia Section Biometrics in Plant Breeding, The Netherlands, pp. 195-204 (1994), the entirety of which is herein incorporated by reference, thereby improving the precision and efficiency of QTL mapping (Zeng, Genetics 136:1457-1468 (1994)). These models can be extended to multi-environment experiments to analyze genotype-environment interactions (Jansen et al., Theo. Appl. Genet. 91:33-37 (1995), the entirety of which is herein incorporated by reference).

[0150] Selection of an appropriate mapping population is important to map construction. The choice of an appropriate mapping population depends on the type of marker systems employed (Tanksley et al., Molecular mapping plant chromosomes. Chromosome structure and function: Impact of new concepts, Gustafson and Appels (eds.), Plenum Press, New York, pp 157-173 (1988), the entirety of which is herein incorporated by reference). Consideration must be given to the source of parents (adapted vs. exotic) used in the mapping population. Chromosome pairing and recombination rates can be severely disturbed (suppressed) in wide crosses (adapted×exotic) and generally yield greatly reduced linkage distances. Wide crosses will usually provide segregating populations with a relatively large array of polymorphisms when compared to progeny in a narrow cross (adapted×adapted).

[0151] An F₂ population is the first generation of selfing after the hybrid seed is produced. Usually a single F₁ plant is selfed to generate a population segregating for all the genes in Mendelian (1:2:1) fashion. Maximum genetic information is obtained from a completely classified F₂ population using a codominant marker system (Mather, Measurement of Linkage in Heredity, Methuen and Co., (1938), the entirety of which is herein incorporated by reference). In the case of dominant markers, progeny tests (e.g. F₃, BCF₂) are required to identify the heterozygotes, thus making it equivalent to a completely classified F₂ population. However, this procedure is often prohibitive because of the cost and time involved in progeny testing. Progeny testing of F₂ individuals is often used in map construction where phenotypes do not consistently reflect genotype (e.g. disease resistance) or where trait expression is controlled by a QTL. Segregation data from progeny test populations (e.g. F₃ or BCF₂) can be used in map construction. Marker-assisted selection can then be applied to cross progeny based on marker-trait map associations (F₂, F₃), where linkage groups have not been completely disassociated by recombination events (i.e., maximum disequillibrium).

[0152] Recombinant inbred lines (RIL) (genetically related lines; usually >F₅, developed from continuously selfing F₂ lines towards homozygosity) can be used as a mapping population. Information obtained from dominant markers can be maximized by using RIL because all loci are homozygous or nearly so. Under conditions of tight linkage (i.e., about <10% recombination), dominant and co-dominant markers evaluated in RIL populations provide more information per individual than either marker type in backcross populations (Reiter et al., Proc. Natl. Acad. Sci. (U.S.A.) 89:1477-1481 (1992), the entirety of which is herein incorporated by reference). However, as the distance between markers becomes larger (i.e., loci become more independent), the information in RIL populations decreases dramatically when compared to codominant markers.

[0153] Backcross populations (e.g., generated from a cross between a successful variety (recurrent parent) and another variety (donor parent) carrying a trait not present in the former) can be utilized as a mapping population. A series of backcrosses to the recurrent parent can be made to recover most of its desirable traits. Thus a population is created consisting of individuals nearly like the recurrent parent but each individual carries varying amounts or mosaic of genomic regions from the donor parent. Backcross populations can be useful for mapping dominant markers if all loci in the recurrent parent are homozygous and the donor and recurrent parent have contrasting polymorphic marker alleles (Reiter et al., Proc. Natl. Acad. Sci. (U.S.A.) 89:1477-1481 (1992)). Information obtained from backcross populations using either codominant or dominant markers is less than that obtained from F₂ populations because one, rather than two, recombinant gametes are sampled per plant. Backcross populations, however, are more informative (at low marker saturation) when compared to RILs as the distance between linked loci increases in RIL populations (i.e. about 15% recombination). Increased recombination can be beneficial for resolution of tight linkages, but may be undesirable in the construction of maps with low marker saturation.

[0154] Near-isogenic lines (NIL) created by many backcrosses to produce an array of individuals that are nearly identical in genetic composition except for the trait or genomic region under interrogation can be used as a mapping population. In mapping with NILs, only a portion of the polymorphic loci are expected to map to a selected region.

[0155] Bulk segregant analysis (BSA) is a method developed for the rapid identification of linkage between markers and traits of interest (Michelmore et al., Proc. Natl. Acad. Sci. (U.S.A.) 88:9828-9832 (1991), the entirety of which is herein incorporated by reference). In BSA, two bulked DNA samples are drawn from a segregating population originating from a single cross. These bulks contain individuals that are identical for a particular trait (resistant or susceptible to particular disease) or genomic region but arbitrary at unlinked regions (i.e. heterozygous). Regions unlinked to the target region will not differ between the bulked samples of many individuals in BSA.

[0156] It is understood that one or more of the nucleic acid molecules of the present invention may be used as molecular markers. It is also understood that one or more of the protein molecules of the present invention may be used as molecular markers.

[0157] In accordance with this aspect of the present invention, a sample nucleic acid is obtained from plants cells or tissues. Any source of nucleic acid may be used. Preferably, the nucleic acid is genomic DNA. The nucleic acid is subjected to restriction endonuclease digestion. For example, one or more EST nucleic acid molecule or fragment thereof can be used as a probe in accordance with the above-described polymorphic methods. The polymorphism obtained in this approach can then be cloned to identify the mutation at the coding region which alters the protein's structure or regulatory region of the gene which affects its expression level.

[0158] In one aspect of the present invention, an evaluation can be conducted to determine whether a particular mRNA molecule is present. One or more of the nucleic acid molecules of the present invention, preferably one or more of the EST nucleic acid molecules of the present invention are utilized to detect the presence or quantity of the mRNA species. Such molecules are then incubated with cell or tissue extracts of a plant under conditions sufficient to permit nucleic acid hybridization. The detection of double-stranded probe-mRNA hybrid molecules is indicative of the presence of the mRNA; the amount of such hybrid formed is proportional to the amount of mRNA. Thus, such probes may be used to ascertain the level and extent of the mRNA production in a plant's cells or tissues. Such nucleic acid hybridization may be conducted under quantitative conditions (thereby providing a numerical value of the amount of the mRNA present). Alternatively, the assay may be conducted as a qualitative assay that indicates either that the mRNA is present, or that its level exceeds a user set, predefined value.

[0159] A principle of in situ hybridization is that a labeled, single-stranded nucleic acid probe will hybridize to a complementary strand of cellular DNA or RNA and, under the appropriate conditions, these molecules will form a stable hybrid. When nucleic acid hybridization is combined with histological techniques, specific DNA or RNA sequences can be identified within a single cell. An advantage of in situ hybridization over more conventional techniques for the detection of nucleic acids is that it allows an investigator to determine the precise spatial population (Angerer et al., Dev. Biol. 101: 477-484 (1984), the entirety of which is herein incorporated by reference; Angerer et al., Dev. Biol. 112: 157-166 (1985), the entirety of which is herein incorporated by reference; Dixon et al., EMBO J. 10: 1317-1324 (1991), the entirety of which is herein incorporated by reference). In situ hybridization may be used to measure the steady-state level of RNA accumulation. It is a sensitive technique and RNA sequences present in as few as 5-10 copies per cell can be detected (Hardin et al., J. Mol. Biol. 202: 417-431. (1989), the entirety of which is herein incorporated by reference). A number of protocols have been devised for in situ hybridization, each with tissue preparation, hybridization, and washing conditions (Meyerowitz, Plant Mol. Biol. Rep. 5: 242-250 (1987), the entirety of which is herein incorporated by reference; Cox and Goldberg, In: Plant Molecular Biology: A Practical Approach (ed. C. H. Shaw), pp. 1-35. IRL Press, Oxford (1988), the entirety of which is herein incorporated by reference; Raikhel et al., In situ RNA hybridization in plant tissues. In Plant Molecular Biology Manual, vol. B9: 1-32. Kluwer Academic Publisher, Dordrecht, Belgium (1989), the entirety of which is herein incorporated by reference).

[0160] In situ hybridization also allows for the localization of proteins within a tissue or cell (Wilkinson, In Situ Hybridization, Oxford University Press, Oxford (1992), the entirety of which is herein incorporated by reference; Langdale, In Situ Hybridization 165-179 In: The Maize Handbook, eds. Freeling and Walbot, Springer-Verlag, New York (1994), the entirety of which is herein incorporated by reference). It is understood that one or more of the molecules of the present invention, preferably one or more of the EST nucleic acid molecules of the present invention or one or more of the antibodies of the present invention may be utilized to detect the level or pattern of a protein or fragment thereof by in situ hybridization.

[0161] Fluorescent in situ hybridization also enables the localization of a particular DNA sequence along a chromosome which is useful, among other uses, for gene mapping, following chromosomes in hybrid lines or detecting chromosomes with translocations, transversions or deletions. In situ hybridization has been used to identify chromosomes in several plant species (Griffor et al., Plant Mol. Biol. 17: 101-109 (1991), the entirety of which is herein incorporated by reference; Gustafson et al, Proc. Nat'l. Acad. Sci. (U.S.A.). 87: 1899-1902 (1990), herein incorporated by reference; Mukai and Gill, Genome 34: 448-452. (1991); Schwarzacher and Heslop-Harrison, Genome 34: 317-323 (1991); Wang et al., Jpn. J. Genet. 66: 313-316 (1991), the entirety of which is herein incorporated by reference; Parra and Windle, Nature Genetics, 5:17-21 (1993), the entirety of which is herein incorporated by reference). It is understood that the nucleic acid molecules of the present invention may be used as probes or markers to localize sequences along a chromosome.

[0162] It is also understood that one or more of the molecules of the present invention, preferably one or more of the EST nucleic acid molecules of the present invention or one or more of the antibodies of the present invention may be utilized to detect the expression level or pattern of a protein or mRNA thereof by in situ hybridization.

[0163] Another method to localize the expression of a molecule is tissue printing. Tissue printing provides a way to screen, at the same time on the same membrane many tissue sections from different plants or different developmental stages. Tissue-printing procedures utilize films designed to immobilize proteins and nucleic acids. In essence, a freshly cut section of an organ is pressed gently onto nitrocellulose paper, nylon membrane or polyvinylidene difluoride membrane. Such membranes are commercially available (e.g. Millipore, Bedford, Mass.). The contents of the cut cell transfer onto the membrane, and the molecules are immobilized to the membrane. The immobilized molecules form a latent print that can be visualized with appropriate probes. When a plant tissue print is made on nitrocellulose paper, the cell walls leave a physical print that makes the anatomy visible without further treatment (Varner and Taylor, Plant Physiol. 91: 31-33 (1989), the entirety of which is herein incorporated by reference).

[0164] Tissue printing on substrate films is described by Daoust, Exp. Cell Res. 12: 203-211 (1957), the entirety of which is herein incorporated by reference, who detected amylase, protease, ribonuclease, and deoxyribonuclease in animal tissues using starch, gelatin, and agar films. These techniques can be applied to plant tissues (Yomo and Taylor, Planta 112:35-43 (1973); Harris and Chrispeels, Plant Physiol. 56: 292-299 (1975). Advances in membrane technology have increased the range of applications of Daoust's tissue-printing techniques allowing (Cassab and Vamer, J. Cell. Biol. 105: 2581-2588 (1987), the entirety of which is herein incorporated by reference; the histochemical localization of various plant enzymes and deoxyribonuclease on nitrocellulose paper and nylon (Spruce et al., Phytochemistry, 26: 2901-2903 (1987), the entirety of which is herein incorporated by reference; Barres et al. Neuron 5: 527-544 (1990), the entirety of which is herein incorporated by reference; the entirety of which is herein incorporated by reference; Reid and Pont-Lezica, Tissue Printing: Tools for the Study of Anatomy, Histochemistry, and Gene Expression, Academic Press, New York, N.Y. (1992), the entirety of which is herein incorporated by reference; Reid et al. Plant Physiol. 93: 160-165 (1990), herein incorporate by reference; Ye et al. Plant J. 1: 175-183 (1991), the entirety of which is herein incorporated by reference).

[0165] It is understood that one or more of the molecules of the present invention, preferably one or more of the EST nucleic acid molecules of the present invention or one or more of the antibodies of the present invention may be utilized to detect the presence or quantity of a protein by tissue printing.

[0166] Further, it is also understood that any of the nucleic acid molecules of the present invention may be used as marker nucleic acids and or probes in connection with methods that require probes or marker nucleic acids. As used herein, a probe is an agent that is utilized to determine an attribute or feature (e.g. presence or absence, location, correlation, etc.) or a molecule, cell, tissue or plant. As used herein, a marker nucleic acid is a nucleic acid molecule that is utilized to determine an attribute or feature (e.g., presence or absence, location, correlation, etc.) or a molecule, cell, tissue or plant.

[0167] A microarray-based method for high-throughput monitoring of gene expression maybe utilized to measure expression response Schena et al., Science 270:467-470 (1995); cmgm-stanford.edu/pbrown/array.html; Shalon, Ph.D. Thesis, Stanford University (1996). This approach is based on using arrays of DNA targets (e.g. cDNA inserts, colonies, or polymerase chain reaction products) for hybridization to a “complex probe” prepared with RNA extracted from a given cell line or tissue. The probe may be produced by reverse transcription of mRNA or total RNA and labeled with radioactive or fluorescent labeling. The probe is complex in that it contains many different sequences in various amounts, corresponding to the numbers of copies of the original mRNA species extracted from the sample.

[0168] The initial RNA source will typically be derived from a physiological source. The physiological source may be derived from a variety of eukaryotic sources, with physiological sources of interest including sources derived from single celled organisms such as yeast and multicellular organisms, including plants and animals, particularly plants, where the physiological sources from multicellular organisms may be derived from particular organs or tissues of the multicellular organism, or from isolated cells derived therefrom. The physiological sources may be derived from multicellular organisms at different developmental stages (e.g., 10-day-old seedlings), grown under different environmental conditions (e.g., drought-stressed plants) or treated with chemicals.

[0169] In obtaining the sample of RNAs to be analyzed from the physiological source from which it is derived, the physiological source may be subjected to a number of different processing steps, where such processing steps might include tissue homogenation, cell isolation and cytoplasmic extraction, nucleic acid extraction and the like, where such processing steps are known to the those of skill in the art. Methods of isolating RNA from cells, tissues, organs or whole organisms are known to those of skill in the art and are described in Maniatis et al., Molecular Cloning: A Laboratory Manual (Cold Spring Harbor Press) (1989).

[0170] The DNA may be placed on nylon or glass “microarrays” regularly arranged with a spot spacing of 1 mm or less. Expression levels can be measured for hundreds or thousands of genes, by using less than 2 micrograms of polyA+RNA and determining the relative mRNA abundances down to one in ten thousand or less (Granjeaud et. al., BioEssays 21:781-790 (1999)).

[0171] In addition to arrays of cDNA clones or inserts, arrays of oligonucleotides are also used to study differential gene expression. In an oligonucleotide array, the genes of interest are represented by a series of approximately 20 nucleotide oligomers that are unique to each gene. Labeled mRNA is prepared and hybridization signals are detected from specific sets of oligos that represent different genes supplemented by a set of control oligonucleotides. Potential advantages of the oligonucleotide array include enhanced specificity and sensitivity through the parallel analysis of “perfect match” oligos and “mismatch” oligos for each gene. The hybridization conditions can be adjusted to distinguish a perfect heteroduplex from a single base mismatch, thus allowing subtraction of nonspecific hybridization signals from specific hybridization signals. A disadvantage of oligonucleotide arrays relative to cDNA arrays is the limitation of the technology to genes of known sequence (Granjeaud et. al., BioEssays 21:781-790 (1991); Carulli et al., Journal of Cellular Biochemistry Supplements 30/31:286-296 (1998)).

[0172] These techniques have been successfully used to characterize patterns of gene expression associated with, for example, various important physiological changes in yeast, including the mitotic cell cycle, the heat shock response, and comparison between mating types. Once a set of comparable expression profiles is obtained, e.g. for cells at different time points or at different cellular states, a clustering algorithm generally is used to group sets of genes which share similar expression patterns. The clusters obtained can then be analyzed in the light of available functional annotations, often leading to associations of poorly characterized genes with genes whose function and regulation are better understood.

[0173] Regulatory networks that control gene expression can be characterized using microarray technology (DeRisi et al., Science 278: 680-686 (1997); Winzler et al. Science 28: 1194-1197 (1998); Cho et al. Mol Cell 2: 65-73 (1998); Spellman et al. Mol Biol Cell 95: 14863-14868 (1998). For example, it is has been reported that both cDNA and oligonucleotide arrays have been used to monitor gene expression in synchronized cell cultures. Analysis of the corresponding temporal patterns of gene expression resulted in the identification of over 400 cell cycle-regulated genes. In order to identify possible common regulatory mechanisms accounting for co-expression, consensus motifs in putative regulatory sequences upstream of the corresponding ORFs were examined. This resulted in the identification of several new potential binding sites for known factors or complexes involved in the coordinated transcription of genes during specific phases of the cell cycle (Thieffry, D. BioEssays 21: 895-899 (1999)).

[0174] The microarray approach may be used with polypeptide targets (U.S. Pat. No. 5,445,934; U.S. Pat. No. 5,143,854; U.S. Pat. No. 5,079,600; U.S. Pat. No. 4,923,901) synthesized on a substrate (microarray) and these polypeptides can be screened with either (Fodor et al., Science 251:767-773 (1991)).

[0175] As disclosed in U.S. Pat. No. 5,445,934 arrays with nucleic acid molecules can comprise a substrate with a surface comprising 10³ or more groups of oligonucleotides with different, known sequences covalently attached to the surface in discrete known regions, e.g. 10⁴ or 10⁵ or 10⁶ or more different groups of known sequences in discrete known regions. In preferred arrays 10³ or more groups of oligonucleotides occupy a total area of less than 1 cm². In preferred embodiments the groups of oligonucleotides are at least 50% pure within the discrete known regions.”

[0176] It is understood that one or more of the nucleic acid molecules or protein or fragments thereof of the invention may be utilized in a microarray-based method.

[0177] In a preferred embodiment of the present invention microarrays may be prepared that comprise nucleic acid molecules where preferably at least 10%, preferably at least 25%, more preferably at least 50% and even more preferably at least 75%, 80%, 85%, 90% or 95% of the nucleic acid molecules located on that array are selected from the group of nucleic acid molecules that specifically hybridize to one or more nucleic acid molecule having a nucleic acid sequence selected from the group of SEQ ID NO: 1 through SEQ ID NO: 14882 or complement thereof or fragments of either.

[0178] A particular preferred microarray embodiment of the present invention is a microarray comprising nucleic acid molecules encoding genes or fragments thereof that are homologues of known genes or nucleic acid molecules that comprise genes or fragment thereof that elicit only limited or no matches to known genes. A further preferred microarray embodiment of the present invention is a microarray comprising nucleic acid molecules having genes or fragments thereof that are homologues of known genes and nucleic acid molecules that comprise genes or fragment thereof that elicit only limited or no matches to known genes. Site-directed mutagenesis may be utilized to modify nucleic acid sequences, particularly as it is a technique that allows one or more of the amino acids encoded by a nucleic acid molecule to be altered (e.g. a threonine to be replaced by a methionine). Three basic methods for site-directed mutagenesis are often employed. These are cassette mutagenesis (Wells et al., Gene 34:315-23 (1985), the entirety of which is herein incorporated by reference), primer extension (Gilliam et al., Gene 12:129-137 (1980), the entirety of which is herein incorporated by reference); Zoller and Smith, Methods Enzymol. 100:468-500 (1983), the entirety of which is herein incorporated by reference; and Dalbadie-McFarland et al., Proc. Natl. Acad. Sci. (U.S.A.) 79:6409-6413 (1982), the entirety of which is herein incorporated by reference) and methods based upon PCR (Scharf et al., Science 233:1076-1078 (1986), the entirety of which is herein incorporated by reference; Higuchi et al., Nucleic Acids Res. 16:7351-7367 (1988), the entirety of which is herein incorporated by reference). Site-directed mutagenesis approaches are also described in European Patent 0 385 962, the entirety of which is herein incorporated by reference, European Patent 0 359 472, the entirety of which is herein incorporated by reference, and PCT Patent Application WO 93/07278, the entirety of which is herein incorporated by reference.

[0179] Site-directed mutagenesis strategies have been applied to plants for both in vitro as well as in vivo site-directed mutagenesis (Lanz et al., J. Biol. Chem. 266:9971-6 (1991), the entirety of which is herein incorporated by reference; Kovgan and Zhdanov, Biotekhnologiya 5:148-154; No. 207160n, Chemical Abstracts 110:225 (1989), the entirety of which is herein incorporated by reference; Ge et al., Proc. Natl. Acad. Sci. (U.S.A.) 86:4037-4041 (1989), the entirety of which is herein incorporated by reference, Zhu et al., J. Biol. Chem. 271:18494-18498 (1996), Chu et al., Biochemistry 33:6150-6157 (1994), the entirety of which is herein incorporated by reference, Small et al., EMBO J. 11: 1291-1296 (1992), the entirety of which is herein incorporated by reference, Cho et al., Mol. Biotechnol. 8:13-16 (1997), Kita et al., J. Biol. Chem. 271:26529-26535 (1996), the entirety of which is herein incorporated by reference, Jin et al., Mol. Microbiol. 7:555-562 (1993), the entirety of which is herein incorporated by reference, Hatfield and Vierstra, J. Biol. Chem. 267:14799-14803 (1992), the entirety of which is herein incorporated by reference, Zhao et al., Biochemistry 31:5093-5099 (1992), the entirety of which is herein incorporated by reference).

[0180] Any of the nucleic acid molecules of the present invention may either be modified by site-directed mutagenesis or used as, for example, nucleic acid molecules that are used to target other nucleic acid molecules for modification. It is understood that mutants with more than one altered nucleotide can be constructed using techniques that practitioners skilled in the art are familiar with such as isolating restriction fragments and ligating such fragments into an expression vector (see, for example, Sambrook et al., Molecular Cloning: A Laboratory Manual, Cold Spring Harbor Press (1989)).

[0181] Sequence-specific DNA-binding proteins play a role in the regulation of transcription. The isolation of recombinant cDNAs encoding these proteins facilitates the biochemical analysis of their structural and functional properties. Genes encoding such DNA-binding proteins have been isolated using classical genetics (Vollbrecht et al., Nature 350: 241-243 (1991), the entirety of which is herein incorporated by reference) and molecular biochemical approaches, including the screening of recombinant cDNA libraries with antibodies (Landschulz et al., Genes Dev. 2: 786-800 (1988), the entirety of which is herein incorporated by reference) or DNA probes (Bodner et al., Cell 55: 505-518 (1988), the entirety of which is herein incorporated by reference). In addition, an in situ screening procedure has been used and has facilitated the isolation of sequence-specific DNA-binding proteins from various plant species (Gilmartin et al., Plant Cell 4: 839-849 (1992), the entirety of which is herein incorporated by reference; Schindler et al., EMBO J. 11: 1261-1273 (1992) the entirety of which is herein incorporated by reference). An in situ screening protocol does not require the purification of the protein of interest (Vinson et al., Genes Dev. 2: 801-806 (1988), the entirety of which is herein incorporated by reference; Singh et al., Cell 52: 415-423 (1988), the entirety of which is herein incorporated by reference).

[0182] Steps may be employed to characterize DNA-protein interactions. The first is to identify promoter fragments that interact with DNA-binding proteins, to titrate binding activity, to determine the specificity of binding, and to determine whether a given DNA-binding activity can interact with related DNA sequences (Sambrook et al., Molecular Cloning: A Laboratory Manual, 2^{nd} edition. Cold Spring Harbor Laboratory Press, Cold Spring Harbor, N.Y. (1989). Electrophoretic mobility-shift assay is a widely used assay. The assay provides a simple, rapid, and sensitive method for detecting DNA-binding proteins based on the observation that the mobility of a DNA fragment through a nondenaturing, low-ionic strength polyacrylamide gel is retarded upon association with a DNA-binding protein (Fried and Crother, Nucleic Acids Res. 9: 6505-6525 (1981), the entirety of which is herein incorporated by reference). When one or more specific binding activities have been identified, the exact sequence of the DNA bound by the protein may be determined. Several procedures for characterizing protein/DNA-binding sites are used, including methylation and ethylation interference assays (Maxam and Gilbert, Methods Enzymol. 65: 499-560 (1980), the entirety of which is herein incorporated by reference; Wissman and Hillen, Methods Enzymol. 208: 365-379 (1991), the entirety of which is herein incorporated by reference) and footprinting techniques employing DNase I (Galas and Schmitz, Nucleic Acids Res. 5: 3157-3170 (1978), the entirety of which is herein incorporated by reference), 1,10-phenanthroline-copper ion methods (Sigman et al., Methods Enzymol. 208: 365-379 (1991), the entirety of which is herein incorporated by reference) or hydroxyl radical methods (Dixon et al., Methods Enzymol. 208: 380-413 (1991), the entirety of which is herein incorporated by reference). It is understood that one or more of the nucleic acid molecules of the present invention, preferably one or more of the EST nucleic acid molecules of the present invention may be utilized to identify a protein or fragment thereof that specifically binds to a nucleic acid molecule of the present invention. It is also understood that one or more of the protein molecules or fragments thereof of the present invention may be utilized to identify a nucleic acid molecule that specifically binds to it.

[0183] The two-hybrid system is based on the fact that many cellular functions are carried out by proteins that interact (physically) with one another. Two-hybrid systems have been used to probe the function of new proteins (Chien et al., Proc. Natl. Acad. Sci. (U.S.A.) 88: 9578-9582 (1991) the entirety of which is herein incorporated by reference; Durfee et al., Genes Dev. 7: 555-569 (1993) the entirety of which is herein incorporated by reference; Choi et al., Cell 78: 499-512 (1994), the entirety of which is herein incorporated by reference; Kranz et al., Genes Dev. 8: 313-327 (1994), the entirety of which is herein incorporated by reference).

[0184] Interaction mating techniques have facilitated a number of two-hybrid studies of protein-protein interaction. Interaction mating has been used to examine interactions between small sets of tens of proteins (Finley and Brent, Proc. Natl. Acad. Sci. (U.S.A.) 91: 12098-12984 (1994), the entirety of which is herein incorporated by reference), larger sets of hundreds of proteins, (Bendixen et al., Nucl. Acids Res. 22: 1778-1779 (1994), the entirety of which is herein incorporated by reference) and to comprehensively map proteins encoded by a small genome (Bartel et al., Nature Genetics 12: 72-77 (1996), the entirety of which is herein incorporated by reference). This technique utilizes proteins fused to the DNA-binding domain and proteins fused to the activation domain. They are expressed in two different haploid yeast strains of opposite mating type, and the strains are mated to determine if the two proteins interact. Mating occurs when haploid yeast strains come into contact and result in the fusion of the two haploids into a diploid yeast strain. An interaction can be determined by the activation of a two-hybrid reporter gene in the diploid strain. The primary advantage of this technique is that it reduces the number of yeast transformations needed to test individual interactions. It is understood that the protein-protein interactions of protein or fragments thereof of the present invention may be investigated using the two-hybrid system and that any of the nucleic acid molecules of the present invention that encode such proteins or fragments thereof may be used to transform yeast in the two-hybrid system.

[0185] Synechocystis 6803 is a photosynthetic Cyanobacterium capable of oxygenic photosynthesis as well as heterotrophic growth in the absence of light. The entire genome has been sequenced, and it is reported to have a circular genome size of 3.57 Mbp containing 3168 potential open reading frames. Open reading frames (ORFs) were identified based upon their homology to other reported ORFs and by using ORF identification computer programs. Sixteen hundred potential ORFs were assigned based on their homology to previously identified ORFs. Of these 1600 ORFs, 145 were identical to reported ORFs (Kaneko et al., DNA Research 3:109-36 (1996), herein incorporated by reference in its entirety).

[0186] Several prokaryote promoters have been used in Synechocystis to express heterologous genes including the tac, lac, and lambda phage promoters (Bryant (ed.), The Molecular Biology of Cyanobacteria, Kluwer Academic Publishers, (1994); Ferino and Chauvat, Gene 84:257-266 (1989), both of which are herein incorporated by reference in their entirety). Several bacterial origins of replication such as RSF1010 and ACYC are reported to replicate in Synechocystis (Mermet-Bouvier and Chauvat, Current Microbiology 28:145-148 (1994); Kuhlemeier et al., Mol. Gen. Genet. 184:249-254 (1981), both of which are herein incorporated by reference in their entirety).

[0187] Synechocystis has been used to study gene regulation by gene replacement through homologous recombination or by gene disruption using antibiotic resistance markers (Pakrasi et al., EMBO 7:325-332 (1988), herein incorporated by reference in its entirety). In such gene regulation studies, double reciprocal homologous regions of the host genome flanking the gene of interest recombine to stably integrate the gene of interest into the genome. The gene of interest can be expressed once that gene has been stably integrated into the genome. Biochemical analysis can be performed to study the effect of the replaced or deleted gene.

[0188] It is understood that the agents of the present invention may be employed in a Synechocystis system.

[0189] Exogenous genetic material may be transferred into a plant cell and the plant cell regenerated into a whole, fertile or sterile plant. Exogenous genetic material is any genetic material, whether naturally occurring or otherwise, from any source that is capable of being inserted into any organism. Such genetic material may be transferred into either monocotyledons and dicotyledons including but not limited to the crops, maize and soybean (See specifically, Chistou, Particle Bombardment for Genetic Engineering of Plants, pp 63-69 (maize), pp 50-60 (soybean), Biotechnology Intelligence Unit. Academic Press, San Diego, Calif. (1996), the entirety of which is herein incorporated by reference and generally Chistou, Particle Bombardment for Genetic Engineering of Plants, Biotechnology Intelligence Unit. Academic Press, San Diego, Calif. (1996), the entirety of which is herein incorporated by reference).

[0190] Transfer of a nucleic acid that encodes for a protein can result in overexpression of that protein in a transformed cell or transgenic plant. One or more of the proteins or fragments thereof encoded by nucleic acid molecules of the present invention may be overexpressed in a transformed cell or transformed plant. Such overexpression may be the result of transient or stable transfer of the exogenous material.

[0191] Exogenous genetic material may be transferred into a plant cell by the use of a DNA vector or construct designed for such a purpose. Design of such a vector is generally within the skill of the art (See, Plant Molecular Biology: A Laboratory Manual eds. Clark, Springer, New York (1997), the entirety of which is herein incorporated by reference).

[0192] A construct or vector may include a plant promoter to express the protein or protein fragment of choice. A number of promoters which are active in plant cells have been described in the literature. These include the nopaline synthase (NOS) promoter (Ebert et al., Proc. Natl. Acad. Sci. (U.S.A.) 84:5745-5749 (1987), the entirety of which is herein incorporated by reference), the octopine synthase (OCS) promoter (which are carried on tumor-inducing plasmids of Agrobacterium tumefaciens), the caulimovirus promoters such as the cauliflower mosaic virus (CaMV) 19S promoter (Lawton et al., Plant Mol. Biol. 9:315-324 (1987), the entirety of which is herein incorporated by reference) and the CAMV 35S promoter (Odell et al., Nature 313:810-812 (1985), the entirety of which is herein incorporated by reference), the figwort mosaic virus 35S-promoter, the light-inducible promoter from the small subunit of ribulose-1,5-bis-phosphate carboxylase (ssRUBISCO), the Adh promoter (Walker et al., Proc. Natl. Acad. Sci. (U.S.A.) 84:6624-6628 (1987), the entirety of which is herein incorporated by reference), the sucrose synthase promoter (Yang et al., Proc. Natl. Acad. Sci. (U.S.A.) 87:4144-4148 (1990), the entirety of which is herein incorporated by reference), the R gene complex promoter (Chandler et al., The Plant Cell 1:1175-1183 (1989), the entirety of which is herein incorporated by reference), and the chlorophyll a/b binding protein gene promoter, etc. These promoters have been used to create DNA constructs which have been expressed in plants; see, e.g., PCT publication WO 84/02913, herein incorporated by reference in its entirety.

[0193] Promoters which are known or are found to cause transcription of DNA in plant cells can be used in the present invention. Such promoters may be obtained from a variety of sources such as plants and plant viruses. It is preferred that the particular promoter selected should be capable of causing sufficient expression to result in the production of an effective amount of a protein to cause the desired phenotype. In addition to promoters which are known to cause transcription of DNA in plant cells, other promoters may be identified for use in the current invention by screening a plant cDNA library for genes which are selectively or preferably expressed in the target tissues or cells.

[0194] For the purpose of expression in source tissues of the plant, such as the leaf, seed, root or stem, it is preferred that the promoters utilized in the present invention have relatively high expression in these specific tissues. For this purpose, one may choose from a number of promoters for genes with tissue- or cell-specific or -enhanced expression. Examples of such promoters reported in the literature include the chloroplast glutamine synthetase GS2 promoter from pea (Edwards et al., Proc. Natl. Acad. Sci. (U.S.A.) 87:3459-3463 (1990), herein incorporated by reference in its entirety), the chloroplast fructose-1,6-biphosphatase (FBPase) promoter from wheat (Lloyd et al., Mol. Gen. Genet. 225:209-216 (1991), herein incorporated by reference in its entirety), the nuclear photosynthetic ST-LS1 promoter from potato (Stockhaus et al., EMBO J. 8:2445-2451 (1989), herein incorporated by reference in its entirety), the phenylalanine ammonia-lyase (PAL) promoter and the chalcone synthase (CHS) promoter from Arabidopsis thaliana. Also reported to be active in photosynthetically active tissues are the ribulose-1,5-bisphosphate carboxylase (RbcS) promoter from eastern larch (Larix laricina), the promoter for the cab gene, cab6, from pine (Yamamoto et al., Plant Cell Physiol. 35:773-778 (1994), herein incorporated by reference in its entirety), the promoter for the Cab-1 gene from wheat (Fejes et al., Plant Mol. Biol. 15:921-932 (1990), herein incorporated by reference in its entirety), the promoter for the CAB-1 gene from spinach (Lubberstedt et al., Plant Physiol. 104:997-1006 (1994), herein incorporated by reference in its entirety), the promoter for the cab1R gene from rice (Luan et al., Plant Cell. 4:971-981 (1992), the entirety of which is herein incorporated by reference), the pyruvate, orthophosphate dikinase (PPDK) promoter from maize (Matsuoka et al., Proc. Natl. Acad. Sci. (U.S.A.) 90: 9586-9590 (1993), herein incorporated by reference in its entirety), the promoter for the tobacco Lhcb1*2 gene (Cerdan et al., Plant Mol. Biol. 33: 245-255. (1997), herein incorporated by reference in its entirety), the Arabidopsis thaliana SUC2 sucrose-H+ symporter promoter (Truernit et al., Planta. 196: 564-570 (1995), herein incorporated by reference in its entirety), and the promoter for the thylacoid membrane proteins from spinach (psaD, psaF, psaE, PC, FNR, atpC, atpD, cab, rbcS). Other promoters for the chlorophyll a/b-binding proteins may also be utilized in the present invention, such as the promoters for LhcB gene and PsbP gene from white mustard (Sinapis alba; Kretsch et al., Plant Mol. Biol. 28: 219-229 (1995), the entirety of which is herein incorporated by reference).

[0195] For the purpose of expression in sink tissues of the plant, such as the tuber of the potato plant, the fruit of tomato, or the seed of maize, wheat, rice, and barley, it is preferred that the promoters utilized in the present invention have relatively high expression in these specific tissues. A number of promoters for genes with tuber-specific or -enhanced expression are known, including the class I patatin promoter (Bevan et al., EMBO J. 8: 1899-1906 (1986); Jefferson et al., Plant Mol. Biol. 14: 995-1006 (1990), both of which are herein incorporated by reference in their entirety), the promoter for the potato tuber ADPGPP genes, both the large and small subunits, the sucrose synthase promoter (Salanoubat and Belliard, Gene. 60: 47-56 (1987), Salanoubat and Belliard, Gene. 84: 181-185 (1989), both of which are incorporated by reference in their entirety), the promoter for the major tuber proteins including the 22 kd protein complexes and proteinase inhibitors (Hannapel, Plant Physiol. 101: 703-704 (1993), herein incorporated by reference in its entirety), the promoter for the granule bound starch synthase gene (GBSS) (Visser et al., Plant Mol. Biol. 17: 691-699 (1991), herein incorporated by reference in its entirety), and other class I and II patatins promoters (Koster-Topfer et al., Mol Gen Genet. 219: 390-396 (1989); Mignery et al., Gene. 62: 27-44 (1988), both of which are herein incorporated by reference in their entirety).

[0196] Other promoters can also be used to express a fructose 1,6 bisphosphate aldolase gene in specific tissues, such as seeds or fruits. The promoter for β-conglycinin (Chen et al., Dev. Genet. 10: 112-122 (1989), herein incorporated by reference in its entirety) or other seed-specific promoters such as the napin and phaseolin promoters, can be used. The zeins are a group of storage proteins found in maize endosperm. Genomic clones for zein genes have been isolated (Pedersen et al., Cell 29: 1015-1026 (1982), herein incorporated by reference in its entirety), and the promoters from these clones, including the 15 kD, 16 kD, 19 kD, 22 kD, 27 kD, and gamma genes, could also be used. Other promoters known to function, for example, in maize, include the promoters for the following genes: waxy, Brittle, Shrunken 2, Branching enzymes I and II, starch synthases, debranching enzymes, oleosins, glutelins, and sucrose synthases. A particularly preferred promoter for maize endosperm expression is the promoter for the glutelin gene from rice, more particularly the Osgt-1 promoter (Zheng et al., Mol. Cell. Biol. 13: 5829-5842 (1993), herein incorporated by reference in its entirety). Examples of promoters suitable for expression in wheat include those promoters for the ADPglucose pyrophosphorylase (ADPGPP) subunits, the granule bound and other starch synthases, the branching and debranching enzymes, the embryogenesis-abundant proteins, the gliadins, and the glutenins. Examples of such promoters in rice include those promoters for the ADPGPP subunits, the granule bound and other starch synthases, the branching enzymes, the debranching enzymes, sucrose synthases, and the glutelins. A particularly preferred promoter is the promoter for rice glutelin, Osgt-1. Examples of such promoters for barley include those for the ADPGPP subunits, the granule bound and other starch synthases, the branching enzymes, the debranching enzymes, sucrose synthases, the hordeins, the embryo globulins, and the aleurone specific proteins.

[0197] Root specific promoters may also be used. An example of such a promoter is the promoter for the acid chitinase gene (Samac et al., Plant Mol. Biol. 25: 587-596 (1994), the entirety of which is herein incorporated by reference). Expression in root tissue could also be accomplished by utilizing the root specific subdomains of the CaMV35S promoter that have been identified (Lam et al., Proc. Natl. Acad. Sci. (U.S.A.) 86:7890-7894 (1989), herein incorporated by reference in its entirety). Other root cell specific promoters include those reported by Conkling et al. (Conkling et al., Plant Physiol. 93:1203-1211 (1990), the entirety of which is herein incorporated by reference).

[0198] Additional promoters that may be utilized are described, for example, in U.S. Pat. Nos. 5,378,619, 5,391,725, 5,428,147, 5,447,858, 5,608,144, 5,608,144, 5,614,399, 5,633,441, 5,633,435, and 4,633,436, all of which are herein incorporated in their entirety. In addition, a tissue specific enhancer may be used (Fromm et al., The Plant Cell 1:977-984 (1989), the entirety of which is herein incorporated by reference).

[0199] Constructs or vectors may also include, with the coding region of interest, a nucleic acid sequence that acts, in whole or in part, to terminate transcription of that region. For example, such sequences have been isolated including the Tr7 3′ sequence and the nos 3′ sequence (Ingelbrecht et al., The Plant Cell 1:671-680 (1989), the entirety of which is herein incorporated by reference; Bevan et al., Nucleic Acids Res. 11:369-385 (1983), the entirety of which is herein incorporated by reference), or the like.

[0200] A vector or construct may also include regulatory elements. Examples of such include the Adh intron 1 (Callis et al., Genes and Develop. 1:1183-1200 (1987), the entirety of which is herein incorporated by reference), the sucrose synthase intron (Vasil et al., Plant Physiol. 91:1575-1579 (1989), the entirety of which is herein incorporated by reference) and the TMV omega element (Gallie et al., The Plant Cell 1:301-311 (1989), the entirety of which is herein incorporated by reference). These and other regulatory elements may be included when appropriate.

[0201] A vector or construct may also include a selectable marker. Selectable markers may also be used to select for plants or plant cells that contain the exogenous genetic material. Examples of such include, but are not limited to, a neo gene (Potrykus et al., Mol. Gen. Genet. 199:183-188 (1985), the entirety of which is herein incorporated by reference) which codes for kanamycin resistance and can be selected for using kanamycin, G418, etc.; a bar gene which codes for bialaphos resistance; a mutant EPSP synthase gene (Hinchee et al., Bio/Technology 6:915-922 (1988), the entirety of which is herein incorporated by reference) which encodes glyphosate resistance; a nitrilase gene which confers resistance to bromoxynil (Stalker et al., J. Biol. Chem. 263:6310-6314 (1988), the entirety of which is herein incorporated by reference); a mutant acetolactate synthase gene (ALS) which confers imidazolinone or sulphonylurea resistance (European Patent Application 154,204 (Sep. 11, 1985), the entirety of which is herein incorporated by reference); and a methotrexate resistant DHFR gene (Thillet et al., J. Biol. Chem. 263:12500-12508 (1988), the entirety of which is herein incorporated by reference).

[0202] A vector or construct may also include a transit peptide. Incorporation of a suitable chloroplast transit peptide may also be employed (European Patent Application Publication Number 0218571, the entirety of which is herein incorporated by reference). Translational enhancers may also be incorporated as part of the vector DNA. DNA constructs could contain one or more 5′ non-translated leader sequences which may serve to enhance expression of the gene products from the resulting mRNA transcripts. Such sequences may be derived from the promoter selected to express the gene or can be specifically modified to increase translation of the mRNA. Such regions may also be obtained from viral RNAs, from suitable eukaryotic genes, or from a synthetic gene sequence. For a review of optimizing expression of transgenes, see Koziel et al., Plant Mol. Biol. 32:393-405 (1996), the entirety of which is herein incorporated by reference.

[0203] A vector or construct may also include a screenable marker. Screenable markers may be used to monitor expression. Exemplary screenable markers include a β-glucuronidase or uidA gene (GUS) which encodes an enzyme for which various chromogenic substrates are known (Jefferson, Plant Mol. Biol, Rep. 5: 387-405 (1987), the entirety of which is herein incorporated by reference; Jefferson et al., EMBO J. 6: 3901-3907 (1987), the entirety of which is herein incorporated by reference); an R-locus gene, which encodes a product that regulates the production of anthocyanin pigments (red color) in plant tissues ((Dellaporta et al., Stadler Symposium 11:263-282 (1988), the entirety of which is herein incorporated by reference); a β-lactamase gene (Sutcliffe et al., Proc. Natl. Acad. Sci. (U.S.A.) 75: 3737-3741 (1978), the entirety of which is herein incorporated by reference), a gene which encodes an enzyme for which various chromogenic substrates are known (e.g., PADAC, a chromogenic cephalosporin); a luciferase gene (Ow et al., Science 234: 856-859 (1986), the entirety of which is herein incorporated by reference) a xylE gene (Zukowsky et al., Proc. Natl. Acad. Sci. (U.S.A.) 80:1101-1105 (1983), the entirety of which is herein incorporated by reference) which encodes a catechol diozygenase that can convert chromogenic catechols; an α-amylase gene (Ikatu et al., Bio/Technol. 8:241-242 (1990), the entirety of which is herein incorporated by reference); a tyrosinase gene (Katz et al., J. Gen. Microbiol. 129:2703-2714 (1983), the entirety of which is herein incorporated by reference) which encodes an enzyme capable of oxidizing tyrosine to DOPA and dopaquinone which in turn condenses to melanin; an α-galactosidase, which will turn a chromogenic α-galactose substrate.

[0204] Included within the terms “selectable or screenable marker genes” are also genes which encode a scriptable marker whose secretion can be detected as a means of identifying or selecting for transformed cells. Examples include markers which encode a secretable antigen that can be identified by antibody interaction, or even secretable enzymes which can be detected catalytically. Secretable proteins fall into a number of classes, including small, diffusible proteins detectable, e.g., by ELISA, small active enzymes detectable in extracellular solution (e.g., α-amylase, β-lactamase, phosphinothilcin transferase), or proteins which are inserted or trapped in the cell wall (such as proteins which include a leader sequence such as that found in the expression unit of extension or tobacco PR-S). Other possible selectable and/or screenable marker genes will be apparent to those of skill in the art.

[0205] Methods and compositions for transforming a bacteria and other microorganisms are known in the art (see for example Sambrook et al., Molecular Cloning: A Laboratory Manual, Second Edition, Cold Spring Harbor Laboratory Press, Cold Spring Harbor, N.Y., (1989), the entirety of which is herein incorporated by reference).

[0206] There are many methods for introducing transforming nucleic acid molecules into plant cells. Suitable methods are believed to include virtually any method by which nucleic acid molecules may be introduced into a cell, such as by Agrobacterium infection or direct delivery of nucleic acid molecules such as, for example, by PEG-mediated transformation, by electroporation or by acceleration of DNA coated particles, etc. (Pottykus, Ann. Rev. Plant Physiol. Plant Mol. Biol. 42:205-225 (1991), the entirety of which is herein incorporated by reference; Vasil, Plant Mol. Biol. 25: 925-937 (1994), the entirety of which is herein incorporated by reference. For example, electroporation has been used to transform maize protoplasts (Fromm et al., Nature 312:791-793 (1986), the entirety of which is herein incorporated by reference).

[0207] Other vector systems suitable for introducing transforming DNA into a host plant cell includes but is not limited to binary artificial chromosome (BIBAC) vectors (Hamilton et al., Gene 200:107-116, (1997), the entirety of which is herein incorporated by reference, and transfection with RNA viral vectors (Della-Cioppa et al., Ann. N.Y. Acad. Sci. (1996), 792 (Engineering Plants for Commercial Products and Applications), 57-61, the entirety of which is herein incorporated by reference.

[0208] Technology for introduction of DNA into cells is well known to those of skill in the art. Four general methods for delivering a gene into cells have been described: (1) chemical methods (Graham and van der Eb, Virology, 54:536-539 (1973), the entirety of which is herein incorporated by reference); (2) physical methods such as microinjection (Capecchi, Cell 22:479-488 (1980), electroporation (Wong and Neumann, Biochem. Biophys. Res. Commun., 107:584-587 (1982); Fromm et al., Proc. Natl. Acad. Sci. USA, 82:5824-5828 (1985); U.S. Pat. No. 5,384,253; and the gene gun (Johnston and Tang, Methods Cell Biol. 43:353-365 (1994), all of which the entirety is herein incorporated by reference; (3) viral vectors (Clapp, Clin. Perinatol., 20:155-168 (1993); Lu et al., J. Exp. Med., 178:2089-2096 (1993); Eglitis and Anderson, Biotechniques, 6:608-614 (1988), all of which the entirety is herein incorporated by reference); and (4) receptor-mediated mechanisms (Curiel et al., Hum. Gen. Ther., 3:147-154 (1992); Wagner et al., Proc. Natl. Acad. Sci. USA, 89:6099-6103 (1992), all of which the entirety is herein incorporated by reference).

[0209] Acceleration methods that may be used include, for example, microprojectile bombardment and the like. One example of a method for delivering transforming nucleic acid molecules to plant cells is microprojectile bombardment. This method has been reviewed by Yang and Christou, eds., Particle Bombardment Technology for Gene Transfer, Oxford Press, Oxford, England (1994), the entirety of which is herein incorporated by reference). Non-biological particles (microprojectiles) that may be coated with nucleic acids and delivered into cells by a propelling force. Exemplary particles include those comprised of tungsten, gold, platinum, and the like.

[0210] A particular advantage of microprojectile bombardment, in addition to it being an effective means of reproducibly, and stably transforming monocotyledons, is that neither the isolation of protoplasts (Cristou et al., Plant Physiol. 87:671-674 (1988), the entirety of which is herein incorporated by reference) nor the susceptibility of Agrobacterium infection is required. An illustrative embodiment of a method for delivering DNA into maize cells by acceleration is a biolistics g-particle delivery system, which can be used to propel particles coated with DNA through a screen, such as a stainless steel or Nytex screen, onto a filter surface covered with corn cells cultured in suspension. Gordon-Kamm et al., describes the basic procedure for coating tungsten particles with DNA (Gordon-Kamm et al., Plant Cell 2: 603-618 (1990), the entirety of which is herein incorporated by reference). The screen disperses the tungsten nucleic acid particles so that they are not delivered to the recipient cells in large aggregates. A particle delivery system suitable for use with the present invention is the helium acceleration PDS-1000/He gun which is available from Bio-Rad Laboratories (Bio-Rad, Hercules, Calif.) (Sanford et al., Technique 3:3-16 (1991), the entirety of which is herein incorporated by reference).

[0211] For the bombardment, cells in suspension may be concentrated on filters. Filters containing the cells to be bombarded are positioned at an appropriate distance below the microprojectile stopping plate. If desired, one or more screens are also positioned between the gun and the cells to be bombarded.

[0212] Alternatively, immature embryos or other target cells may be arranged on solid culture medium. The cells to be bombarded are positioned at an appropriate distance below the macroprojectile stopping plate. If desired, one or more screens are also positioned between the acceleration device and the cells to be bombarded. Through the use of techniques set forth herein one may obtain up to 1000 or more foci of cells transiently expressing a marker gene. The number of cells in a focus which express the exogenous gene product 48 hours post-bombardment often range from one to ten and average one to three.

[0213] In bombardment transformation, one may optimize the prebombardment culturing conditions and the bombardment parameters to yield the maximum numbers of stable transformants. Both the physical and biological parameters for bombardment are important in this technology. Physical factors are those that involve manipulating the DNA/microprojectile precipitate or those that affect the flight and velocity of either the macro- or microprojectiles. Biological factors include all steps involved in manipulation of cells before and immediately after bombardment, the osmotic adjustment of target cells to help alleviate the trauma associated with bombardment, and also the nature of the transforming DNA, such as linearized DNA or intact supercoiled plasmids. It is believed that pre-bombardment manipulations are especially important for successful transformation of immature embryos. In another alternative embodiment, plastids can be stably transformed. Methods disclosed for plastid transformation in higher plants include the particle gun delivery of DNA containing a selectable marker and targeting of the DNA to the plastid genome through homologous recombination (Svab et al., Proc. Natl. Acad. Sci. (U.S.A.) 87:8526-8530 (1990); Svab and Maliga, Proc. Natl. Acad. Sci. (U.S.A.) 90:913-917 (1993); Staub and Maliga, EMBO J. 12:601-606 (1993); U.S. Pat. Nos. 5,451,513 and 5,545,818, all of which are herein incorporated by reference in their entirety).

[0214] Accordingly, it is contemplated that one may wish to adjust various aspects of the bombardment parameters in small scale studies to fully optimize the conditions. One may particularly wish to adjust physical parameters such as gap distance, flight distance, tissue distance, and helium pressure. One may also minimize the trauma reduction factors by modifying conditions which influence the physiological state of the recipient cells and which may therefore influence transformation and integration efficiencies. For example, the osmotic state, tissue hydration and the subculture stage or cell cycle of the recipient cells may be adjusted for optimum transformation. The execution of other routine adjustments will be known to those of skill in the art in light of the present disclosure.

[0215] Agrobacterium-mediated transfer is a widely applicable system for introducing genes into plant cells because the DNA can be introduced into whole plant tissues, thereby bypassing the need for regeneration of an intact plant from a protoplast. The use of Agrobacterium-mediated plant integrating vectors to introduce DNA into plant cells is well known in the art. See, for example the methods described (Fraley et al., Biotechnology 3:629-635 (1985); Rogers et al., Meth. In Enzymol, 153:253-277 (1987), both of which are herein incorporated by reference in their entirety. Further, the integration of the Ti-DNA is a relatively precise process resulting in few rearrangements. The region of DNA to be transferred is defined by the border sequences, and intervening DNA is usually inserted into the plant genome as described (Spielmann et al., Mol. Gen. Genet., 205:34 (1986), the entirety of which is herein incorporated by reference).

[0216] Modern Agrobacterium transformation vectors are capable of replication in E. coli as well as Agrobacterium, allowing for convenient manipulations as described (Klee et al., In: Plant DNA Infectious Agents, T. Hohn and J. Schell, eds., Springer-Verlag, New York, pp. 179-203 (1985), the entirety of which is herein incorporated by reference. Moreover, recent technological advances in vectors for Agrobacterium-mediated gene transfer have improved the arrangement of genes and restriction sites in the vectors to facilitate construction of vectors capable of expressing various polypeptide coding genes. The vectors described have convenient multi-linker regions flanked by a promoter and a polyadenylation site for direct expression of inserted polypeptide coding genes and are suitable for present purposes (Rogers et al., Meth. In Enzymol., 153:253-277 (1987), the entirety of which is herein incorporated by reference). In addition, Agrobacterium containing both armed and disarmed Ti genes can be used for the transformations. In those plant strains where Agrobacterium-mediated transformation is efficient, it is the method of choice because of the facile and defined nature of the gene transfer.

[0217] A transgenic plant formed using Agrobacterium transformation methods typically contains a single gene on one chromosome. Such transgenic plants can be referred to as being heterozygous for the added gene. More preferred is a transgenic plant that is homozygous for the added structural gene; i.e., a transgenic plant that contains two added genes, one gene at the same locus on each chromosome of a chromosome pair. A homozygous transgenic plant can be obtained by sexually mating (selfing) an independent segregant transgenic plant that contains a single added gene, germinating some of the seed produced and analyzing the resulting plants produced for the gene of interest.

[0218] It is also to be understood that two different transgenic plants can also be mated to produce offspring that contain two independently segregating added, exogenous genes. Selfing of appropriate progeny can produce plants that are homozygous for both added, exogenous genes that encode a polypeptide of interest. Back-crossing to a parental plant and out-crossing with a non-transgenic plant are also contemplated, as is vegetative propagation.

[0219] Transformation of plant protoplasts can be achieved using methods based on calcium phosphate precipitation, polyethylene glycol treatment, electroporation, and combinations of these treatments. See for example (Potrykus et al., Mol. Gen. Genet., 205:193-200 (1986); Lorz et al., Mol. Gen. Genet., 199:178, (1985); Fromm et al., Nature, 319:791, (1986); Uchimiya et al., Mol. Gen. Genet.:204:204, (1986); Callis et al., Genes and Development, 1183, (1987); Marcotte et al., Nature, 335:454, (1988), all of which the entirety is herein incorporated by reference).

[0220] Application of these systems to different plant strains depends upon the ability to regenerate that particular plant strain from protoplasts. Illustrative methods for the regeneration of cereals from protoplasts are described (Fujimura et al., Plant Tissue Culture Letters, 2:74, (1985); Toriyama et al., Theor Appl. Genet. 205:34. (1986); Yamada et al., Plant Cell Rep., 4:85, (1986); Abdullah et al., Biotechnology, 4:1087, (1986), all of which the entirety is herein incorporated by reference).

[0221] To transform plant strains that cannot be successfully regenerated from protoplasts, other ways to introduce DNA into intact cells or tissues can be utilized. For example, regeneration of cereals from immature embryos or explants can be effected as described (Vasil, Biotechnology, 6:397, (1988), the entirety of which is herein incorporated by reference). In addition, “particle gun” or high-velocity microprojectile technology can be utilized (Vasil et al., Bio/Technology 10:667, (1992), the entirety of which is herein incorporated by reference).

[0222] Using the latter technology, DNA is carried through the cell wall and into the cytoplasm on the surface of small metal particles as described (Klein et al., Nature, 328:70, (1987); Klein et al., Proc. Natl. Acad. Sci. USA, 85:8502-8505, (1988); McCabe et al., Biotechnology, 6:923, (1988), all of which the entirety is herein incorporated by reference). The metal particles penetrate through several layers of cells and thus allow the transformation of cells within tissue explants.

[0223] Other methods of cell transformation can also be used and include but are not limited to introduction of DNA into plants by direct DNA transfer into pollen (Hess et al., Intern Rev. Cytol., 107:367, (1987); Luo et al., Plant Mol. Biol. Reporter, 6:165, (1988), all of which the entirety is herein incorporated by reference), by direct injection of DNA into reproductive organs of a plant (Pena et al., Nature, 325:274, (1987), the entirety of which is herein incorporated by reference), or by direct injection of DNA into the cells of immature embryos followed by the rehydration of dessicated embryos (Neuhaus et al., Theor. Appl. Genet., 75:30, (1987), the entirety of which is herein incorporated by reference).

[0224] The regeneration, development, and cultivation of plants from single plant protoplast transformants or from various transformed explants is well known in the art (Weissbach and Weissbach, In: Methods for Plant Molecular Biology, (Eds.), Academic Press, Inc. San Diego, Calif., (1988), the entirety of which is herein incorporated by reference). This regeneration and growth process typically includes the steps of selection of transformed cells, culturing those individualized cells through the usual stages of embryonic development through the rooted plantlet stage. Transgenic embryos and seeds are similarly regenerated. The resulting transgenic rooted shoots are thereafter planted in an appropriate plant growth medium such as soil.

[0225] The development or regeneration of plants containing the foreign, exogenous gene that encodes a protein of interest is well known in the art. Preferably, the regenerated plants are self-pollinated to provide homozygous transgenic plants, as discussed before. Otherwise, pollen obtained from the regenerated plants is crossed to seed-grown plants of agronomically important lines. Conversely, pollen from plants of these important lines is used to pollinate regenerated plants. A transgenic plant of the present invention containing a desired polypeptide is cultivated using methods well known to one skilled in the art.

[0226] There are a variety of methods for the regeneration of plants from plant tissue. The particular method of regeneration will depend on the starting plant tissue and the particular plant species to be regenerated.

[0227] Methods for transforming dicots, primarily by use of Agrobacterium tumefaciens, and obtaining transgenic plants have been published for cotton (U.S. Pat. No. 5,004,863, U.S. Pat. No. 5,159,135, U.S. Pat. No. 5,518,908, all of which the entirety is herein incorporated by reference); soybean (U.S. Pat. No. 5,569,834, U.S. Pat. No. 5,416,011, McCabe et al., Biotechnology 6:923, (1988), Christou et al., Plant Physiol., 87:671-674 (1988), all of which the entirety is herein incorporated by reference); Brassica (U.S. Pat. No. 5,463,174, the entirety of which is herein incorporated by reference); peanut (Cheng et al., Plant Cell Rep. 15: 653-657 (1996), McKently et al., Plant Cell Rep. 14:699-703 (1995), all of which the entirety is herein incorporated by reference); papaya (Yang et al., (1996), the entirety of which is herein incorporated by reference); pea (Grant et al, Plant Cell Rep. 15:254-258, (1995), the entirety of which is herein incorporated by reference).

[0228] Transformation of monocotyledons using electroporation, particle bombardment, and Agrobacterium have also been reported. Transformation and plant regeneration have been achieved in asparagus (Bytebier et al., Proc. Natl. Acad. Sci. USA 84:5345, (1987), the entirety of which is herein incorporated by reference); barley (Wan and Lemaux, Plant Physiol 104:37, (1994), the entirety of which is herein incorporated by reference); maize (Rhodes et al., Science 240: 204, (1988), Gordon-Kamm et al., Plant Cell, 2:603, (1990), Fromm et al., Bio/Technology 8:833, (1990), Koziel et al., Bio/Technology 11:194, (1993), Armstrong et al., Crop Science 35:550-557, (1995), all of which the entirety is herein incorporated by reference); oat (Somers et al., Bio/Technology, 10:1589, (1992), the entirety of which is herein incorporated by reference); orchardgrass (Horn et al., Plant Cell Rep. 7:469, (1988), the entirety of which is herein incorporated by reference); rice (Toriyama et al., Theor Appl. Genet. 205:34, (1986); Park et al., Plant Mol. Biol., 32: 1135-1148, (1996); Abedinia et al., Aust. J. Plant Physiol. 24:133-141, (1997); Zhang and Wu, Theor. Appl. Genet. 76:835, (1988); Zhang et al. Plant Cell Rep. 7:379, (1988); Battraw and Hall, Plant Sci. 86:191-202, (1992); Christou et al., Bio/Technology 9:957, (1991), all of which the entirety is herein incorporated by reference); sugarcane (Bower and Birch, Plant J. 2:409, (1992), the entirety of which is herein incorporated by reference); tall fescue (Wang et al., Bio/Technology 10:691, (1992), the entirety of which is herein incorporated by reference), and wheat (Vasil et al., Bio/Technology 10:667, (1992), the entirety of which is herein incorporated by reference; U.S. Pat. No. 5,631,152, the entirety of which is herein incorporated by reference.

[0229] Assays for gene expression based on the transient expression of cloned nucleic acid constructs have been developed by introducing the nucleic acid molecules into plant cells by polyethylene glycol treatment, electroporation, or particle bombardment (Marcotte, et al., Nature, 335: 454-457 (1988), the entirety of which is herein incorporated by reference; Marcotte, et al., Plant Cell, 1: 523-532 (1989), the entirety of which is herein incorporated by reference; McCarty, et al., Cell 66: 895-905 (1991), the entirety of which is herein incorporated by reference; Hattori, et al., Genes Dev. 6: 609-618 (1992), the entirety of which is herein incorporated by reference; Goff, et al., EMBO J. 9: 2517-2522 (1990), the entirety of which is herein incorporated by reference). Transient expression systems may be used to functionally dissect gene constructs (See generally, Mailga et al., Methods in Plant Molecular Biology, Cold Spring Harbor Press (1995)).

[0230] Any of the nucleic acid molecules of the present invention may be introduced into a plant cell in a permanent or transient manner in combination with other genetic elements such as vectors, promoters enhancers etc. Further any of the nucleic acid molecules of the present invention may be introduced into a plant cell in a manner that allows for over expression of the protein or fragment thereof encoded by the nucleic acid molecule.

[0231] Cosuppression is the reduction in expression levels, usually at the level of RNA, of a particular endogenous gene or gene family by the expression of a homologous sense construct that is capable of transcribing mRNA of the same strandedness as the transcript of the endogenous gene (Napoli et al., Plant Cell 2: 279-289 (1990), the entirety of which is herein incorporated by reference; van der Krol et al., Plant Cell 2: 291-299 (1990), the entirety of which is herein incorporated by reference). Cosuppression may result from stable transformation with a single copy nucleic acid molecule that is homologous to a nucleic acid sequence found with the cell (Prolls and Meyer, Plant J. 2:465-475 (1992), the entirety of which is herein incorporated by reference) or with multiple copies of a nucleic acid molecule that is homologous to a nucleic acid sequence found with the cell (Mittlesten et al., Mol. Gen. Genet. 244: 325-330 (1994), the entirety of which is herein incorporated by reference). Genes, even though different, linked to homologous promoters may result in the cosuppression of the linked genes (Vaucheret, C.R. Acad. Sci. III 316: 1471-1483 (1993), the entirety of which is herein incorporated by reference).

[0232] This technique has, for example been applied to generate white flowers from red petunia and tomatoes that do not ripen on the vine. Up to 50% of petunia transformants that contained a sense copy of the chalcone synthase (CHS) gene produced white flowers or floral sectors; this was as a result of the post-transcriptional loss of mRNA encoding CHS (Flavell, Proc. Natl. Acad. Sci. (U.S.A.) 91:3490-3496 (1994)), the entirety of which is herein incorporated by reference). Cosuppression may require the coordinate transcription of the transgene and the endogenous gene, and can be reset by a developmental control mechanism (Jorgensen, Trends Biotechnol, 8:340344 (1990), the entirety of which is herein incorporated by reference; Meins and Kunz, In: Gene Inactivation and Homologous Recombination in Plants (Paszkowski, J., ed.), pp. 335-348. Kluwer Academic, Netherlands (1994), the entirety of which is herein incorporated by reference).

[0233] It is understood that one or more of the nucleic acids of the present invention including those comprising SEQ ID NO:1 through SEQ ID NO:14882 or complement thereof or fragments of either or other nucleic acid molecules of the present invention may be introduced into a plant cell and transcribed using an appropriate promoter with such transcription resulting in the co-suppression of an endogenous protein.

[0234] Antisense approaches are a way of preventing or reducing gene function by targeting the genetic material (Mol et al., FEBS Lett. 268: 427-430 (1990), the entirety of which is herein incorporated by reference). The objective of the antisense approach is to use a sequence complementary to the target gene to block its expression and create a mutant cell line or organism in which the level of a single chosen protein is selectively reduced or abolished. Antisense techniques have several advantages over other ‘reverse genetic’ approaches. The site of inactivation and its developmental effect can be manipulated by the choice of promoter for antisense genes or by the timing of external application or microinjection. Antisense can manipulate its specificity by selecting either unique regions of the target gene or regions where it shares homology to other related genes (Hiatt et al., In Genetic Engineering, Setlow (ed.), Vol. 11, New York: Plenum 49-63 (1989), the entirety of which is herein incorporated by reference).

[0235] The principle of regulation by antisense RNA is that RNA that is complementary to the target mRNA is introduced into cells, resulting in specific RNA:RNA duplexes being formed by base pairing between the antisense substrate and the target mRNA (Green et al., Annu. Rev. Biochem. 55: 569-597 (1986), the entirety of which is herein incorporated by reference). Under one embodiment, the process involves the introduction and expression of an antisense gene sequence. Such a sequence is one in which part or all of the normal gene sequences are placed under a promoter in inverted orientation so that the ‘wrong’ or complementary strand is transcribed into a noncoding antisense RNA that hybridizes with the target mRNA and interferes with its expression (Takayama and Inouye, Crit. Rev. Biochem. Mol. Biol. 25: 155-184 (1990), the entirety of which is herein incorporated by reference). An antisense vector is constructed by standard procedures and introduced into cells by transformation, transfection, electroporation, microinjection, or by infection, etc. The type of transformation and choice of vector will determine whether expression is transient or stable. The promoter used for the antisense gene may influence the level, timing, tissue, specificity, or inducibility of the antisense inhibition.

[0236] It is understood that protein synthesis activity in a plant cell may be reduced or depressed by growing a transformed plant cell containing a nucleic acid molecule whose non-transcribed strand encodes a protein or fragment thereof.

[0237] Antibodies have been expressed in plants (Hiatt et al., Nature 342:76-78 (1989), the entirety of which is herein incorporated by reference; Conrad and Fielder, Plant Mol. Biol. 26: 1023-1030 (1994), the entirety of which is herein incorporated by reference). Cytoplamic expression of a scFv (single-chain Fv antibodies) has been reported to delay infection by artichoke mottled crinkle virus. Transgenic plants that express antibodies directed against endogenous proteins may exhibit a physiological effect (Philips et al., EMBO J. 16: 4489-4496 (1997), the entirety of which is herein incorporated by reference; Marion-Poll, Trends in Plant Science 2: 447-448 (1997), the entirety of which is herein incorporated by reference). For example, expressed anti-abscisic antibodies reportedly result in a general perturbation of seed development (Philips et al., EMBO J. 16: 4489-4496 (1997)).

[0238] Antibodies that are catalytic may also be expressed in plants (abzymes). The principle behind abzymes is that since antibodies may be raised against many molecules, this recognition ability can be directed toward generating antibodies that bind transition states to force a chemical reaction forward (Persidas, Nature Biotechnology 15:1313-1315 (1997), the entirety of which is herein incorporated by reference; Baca et al., Ann. Rev. Biophys. Biomol. Struct. 26:461-493 (1997), the entirety of which is herein incorporated by reference). The catalytic abilities of abzymes may be enhanced by site directed mutagenesis. Examples of abzymes are, for example, set forth in U.S. Pat. No. 5,658,753; U.S. Pat. No. 5,632,990; U.S. Pat. No. 5,631,137; U.S. Pat. No. 5,602,015; U.S. Pat. No. 5,559,538; U.S. Pat. No. 5,576,174; U.S. Pat. No. 5,500,358; U.S. Pat. No. 5,318,897; U.S. Pat. No. 5,298,409; U.S. Pat. No. 5,258,289 and U.S. Pat. No. 5,194,585, all of which are herein incorporated in their entirety.

[0239] It is understood that any of the antibodies of the present invention may be expressed in plants and that such expression can result in a physiological effect. It is also understood that any of the expressed antibodies may be catalytic.

[0240] In addition to the above discussed procedures, practitioners are familiar with the standard resource materials which describe specific conditions and procedures for the construction, manipulation and isolation of macromolecules (e.g., DNA molecules, plasmids, etc.), generation of recombinant organisms and the screening and isolating of clones, (see for example, Sambrook et al., Molecular Cloning: A Laboratory Manual, Cold Spring Harbor Press (1989); Mailga et al., Methods in Plant Molecular Biology, Cold Spring Harbor Press (1995), the entirety of which is herein incorporated by reference; Birren et al., Genome Analysis: Analyzing DNA, 1, Cold Spring Harbor, N.Y., the entirety of which is herein incorporated by reference).

[0241] The nucleotide sequence provided in SEQ ID NO:1, through SEQ ID NO:14882 or fragment thereof, or complement thereof, or a nucleotide sequence at least 90% identical, preferably 95%, identical even more preferably 99% or 100% identical to the sequence provided in SEQ ID NO:1 through SEQ ID NO:14882 or fragment thereof, or complement thereof, can be “provided” in a variety of mediums to facilitate use fragment thereof. Such a medium can also provide a subset thereof in a form that allows a skilled artisan to examine the sequences.

[0242] In one application of this embodiment, a nucleotide sequence of the present invention can be recorded on computer readable media. As used herein, “computer readable media” refers to any medium that can be read and accessed directly by a computer. Such media include, but are not limited to: magnetic storage media, such as floppy discs, hard disc, storage medium, and magnetic tape: optical storage media such as CD-ROM; electrical storage media such as RAM and ROM; and hybrids of these categories such as magnetic/optical storage media. A skilled artisan can readily appreciate how any of the presently known computer readable mediums can be used to create a manufacture comprising computer readable medium having recorded thereon a nucleotide sequence of the present invention.

[0243] As used herein, “recorded” refers to a process for storing information on computer readable medium. A skilled artisan can readily adopt any of the presently known methods for recording information on computer readable medium to generate media comprising the nucleotide sequence information of the present invention. A variety of data storage structures are available to a skilled artisan for creating a computer readable medium having recorded thereon a nucleotide sequence of the present invention. The choice of the data storage structure will generally be based on the means chosen to access the stored information. In addition, a variety of data processor programs and formats can be used to store the nucleotide sequence information of the present invention on computer readable medium. The sequence information can be represented in a word processing text file, formatted in commercially-available software such as WordPerfect and Microsoft Word, or represented in the form of an ASCII file, stored in a database application, such as DB2, Sybase, Oracle, or the like. A skilled artisan can readily adapt any number of data processor structuring formats (e.g. text file or database) in order to obtain computer readable medium having recorded thereon the nucleotide sequence information of the present invention.

[0244] By providing one or more of nucleotide sequences of the present invention, a skilled artisan can routinely access the sequence information for a variety of purposes. Computer software is publicly available which allows a skilled artisan to access sequence information provided in a computer readable medium. The examples which follow demonstrate how software which implements the BLAST (Altschul et al., J. Mol. Biol. 215:403-410 (1990)) and BLAZE (Brutlag et al., Comp. Chem. 17:203-207 (1993), the entirety of which is herein incorporated by reference) search algorithms on a Sybase system can be used to identify open reading frames (ORFs) within the genome that contain homology to ORFs or proteins from other organisms. Such ORFs are protein-encoding fragments within the sequences of the present invention and are useful in producing commercially important proteins such as enzymes used in amino acid biosynthesis, metabolism, transcription, translation, RNA processing, nucleic acid and a protein degradation, protein modification, and DNA replication, restriction, modification, recombination, and repair.

[0245] The present invention further provides systems, particularly computer-based systems, which contain the sequence information described herein. Such systems are designed to identify commercially important fragments of the nucleic acid molecule of the present invention. As used herein, “a computer-based system” refers to the hardware means, software means, and data storage means used to analyze the nucleotide sequence information of the present invention. The minimum hardware means of the computer-based systems of the present invention comprises a central processing unit (CPU), input means, output means, and data storage means. A skilled artisan can readily appreciate that any one of the currently available computer-based system are suitable for use in the present invention.

[0246] As indicated above, the computer-based systems of the present invention comprise a data storage means having stored therein a nucleotide sequence of the present invention and the necessary hardware means and software means for supporting and implementing a search means. As used herein, “data storage means” refers to memory that can store nucleotide sequence information of the present invention, or a memory access means which can access manufactures having recorded thereon the nucleotide sequence information of the present invention. As used herein, “search means” refers to one or more programs which are implemented on the computer-based system to compare a target sequence or target structural motif with the sequence information stored within the data storage means. Search means are used to identify fragments or regions of the sequence of the present invention that match a particular target sequence or target motif. A variety of known algorithms are disclosed publicly and a variety of commercially available software for conducting search means are available and can be used in the computer-based systems of the present invention. Examples of such software include, but are not limited to, MacPattern (EMBL), BLASTIN and BLASTIX (NCBIA). One of the available algorithms or implementing software packages for conducting homology searches can be adapted for use in the present computer-based systems.

[0247] The most preferred sequence length of a target sequence is from about 10 to 100 amino acids or from about 30 to 300 nucleotide residues. However, it is well recognized that during searches for commercially important fragments of the nucleic acid molecules of the present invention, such as sequence fragments involved in gene expression and protein processing, may be of shorter length.

[0248] As used herein, “a target structural motif,” or “target motif,” refers to any rationally selected sequence or combination of sequences in which the sequences or sequence(s) are chosen based on a three-dimensional configuration which is formed upon the folding of the target motif. There are a variety of target motifs known in the art. Protein target motifs include, but are not limited to, enzymatic active sites and signal sequences. Nucleic acid target motifs include, but are not limited to, promoter sequences, cis elements, hairpin structures and inducible expression elements (protein binding sequences).

[0249] Thus, the present invention further provides an input means for receiving a target sequence, a data storage means for storing the target sequences of the present invention sequence identified using a search means as described above, and an output means for outputting the identified homologous sequences. A variety of structural formats for the input and output means can be used to input and output information in the computer-based systems of the present invention. A preferred format for an output means ranks fragments of the sequence of the present invention by varying degrees of homology to the target sequence or target motif. Such presentation provides a skilled artisan with a ranking of sequences which contain various amounts of the target sequence or target motif and identifies the degree of homology contained in the identified fragment.

[0250] A variety of comparing means can be used to compare a target sequence or target motif with the data storage means to identify sequence fragments sequence of the present invention. For example, implementing software which implement the BLAST and BLAZE algorithms (Altschul et al., J. Mol. Biol. 215:403-410 (1990)) can be used to identify open frames within the nucleic acid molecules of the present invention. A skilled artisan can readily recognize that any one of the publicly available homology search programs can be used as the search means for the computer-based systems of the present invention. Having now generally described the invention, the same will be more readily understood through reference to the following examples which are provided by way of illustration, and are not intended to be limiting of the present invention, unless specified.

### EXAMPLE 1

[0251] The cDNA library (LIB3136) is prepared from young maize seedlings which have been subjected to cold treatment. The cold tolerant germplasm WIGOR is used for collection. Seeds are incubated on a moist filter paper on a covered tray that is kept in the dark at 10° C. for seven days. Then, the tray along with the moist filter paper is placed in a growth chamber set at ˜23° C. for 2 days until seed germination. The germinating seeds are continuously incubated at 23° C. for three additional days. Then, the temperature of the growth chamber is readjusted to 10° C. and the seedlings are grown at 10° C. for four more days. Seedlings are collected seven days after germination, placed immediately on dry ice and then crushed. Total RNA is isolated from the harvested tissue using Trizol (Gibco BRL, Life Technologies, Gaithersburg, Md.).

[0252] Construction of plant cDNA libraries is well-known in the art and a number of cloning strategies exist. A number of cDNA library construction kits are commercially available. The cDNA library is prepared using the Superscript™ Plasmid System for cDNA synthesis and Plasmid Cloning (Gibco BRL, Life Technologies, Gaithersburg, Md. U.S.A.), as described in the Superscript II cDNA library synthesis protocol. Poly A+RNA (mRNA) is purified from the total RNA preparation using Messenge Marker Reagent Assembly (Gibco BRL, Life Technologies, Gaithersburg, Md.), or equivalent methods. The cDNA is ligated into the pSPORT 1 cloning vector. The ligated cDNA is introduced by transformation into E. Coli DH5αF′IQ Competent cells (Gibco BRL, Life Technologies, Gaithersburg, Md.). The library is quality controlled for a good insert:vector ratio and the average insert size is determined.

### EXAMPLE 2

[0253] The cDNA library (LIB3137) is prepared from young maize seedlings. The cold tolerant germplasm WIGOR is used for collection. Seeds are incubated on a moist filter paper on a covered tray that is kept in the dark and placed in a growth chamber set at ˜23° C. for 2 days until germination. Then seedlings are grown at ˜23° C. for seven more days. Seedlings are collected seven days after germination, placed immediately on dry ice and then crushed. Total RNA is isolated from the harvested tissue using Trizol (Gibco BRL, Life Technologies, Gaithersburg, Md.).

[0254] Construction of plant cDNA libraries is well-known in the art and a number of cloning strategies exist. A number of cDNA library construction kits are commercially available. The cDNA library is prepared using the Superscript™ Plasmid System for cDNA synthesis and Plasmid Cloning (Gibco BRL, Life Technologies, Gaithersburg, Md. U.S.A.), as described in the Superscript II cDNA library synthesis protocol. Poly A+RNA (mRNA) is purified from the total RNA preparation using Messenge Marker Reagent Assembly (Gibco BRL, Life Technologies, Gaithersburg, Md.), or equivalent methods. The cDNA is ligated into the pSPORT 1 cloning vector. The ligated cDNA is introduced by transformation into E. coli DH5αF′IQ Competent cells (Gibco BRL, Life Technologies, Gaithersburg, Md.). The library is quality controlled for a good insert:vector ratio and the average insert size is determined.

### EXAMPLE 3

[0255] The subtractive cDNA library (LIB3156) is generated using a first cDNA library prepared from cold-treated young maize seedlings as a target and a second cDNA library prepared from control (without cold treatment) young maize seedlings as a driver. The cold tolerant germplasm WIGOR is used for collection. Seeds are incubated on a moist filter paper on a covered tray that is kept in the dark at 10° C. for seven days. Then, the tray along with the moist filter paper is placed in a growth chamber set at ˜23° C. for 2 days until seed germination. The germinating seeds are continuously incubated at 23° C. for three additional days. Then, the temperature of the growth chamber is readjusted to 10° C. and the seedlings are grown at 10° C. for four more days. In a control experiment, seeds are incubated on moist filter papers on covered trays that are kept in the dark, and the trays are placed in a growth chamber where the temperature is constant and set at ˜23° C. Seedlings with cold treatment and without cold treatment (control) are collected seven days after germination, placed immediately on dry ice and then crushed. Total RNA is isolated from the harvested tissue using Trizol (Gibco BRL, Life Technologies, Gaithersburg, Md.).

[0256] Construction of plant cDNA libraries is well-known in the art and a number of cloning strategies exist. A number of cDNA library construction kits are commercially available. The target and driver cDNA libraries are prepared using the Superscript™ Plasmid System for cDNA synthesis and Plasmid Cloning (Gibco BRL, Life Technologies, Gaithersburg, Md. U.S.A.), as described in the Superscript II cDNA library synthesis protocol.

[0257] For the construction of the target cDNA library, poly A+RNA (mRNA) is purified from the total RNA isolated from the cold-treated seedlings using Messenge Marker Reagent Assembly (Gibco BRL, Life Technologies, Inc., Gaithersburg, Md.). The cDNA is ligated into the pSPORT 1 cloning vector. The ligated cDNA is introduced by transformation into E. coli DH5αF′IQ Competent cells (Gibco BRL, Life Technologies, Inc., Gaithersburg, Md.). The library is quality controlled for a good insert:vector ratio and the average insert size is determined.

[0258] For the construction of the driver cDNA library, poly A+RNA (mRNA) is purified from the total RNA isolated from the control seedlings using Messenge Marker Reagent Assembly (Gibco BRL, Life Technologies, Gaithersburg, Md.). The cDNA is ligated into the pSPORT 2 cloning vector. The ligated cDNA is introduced by transformation into E. coli DH5αF′IQ Competent cells (Gibco BRL, Life Technologies, Gaithersburg, Md.). The library is quality controlled for a good insert:vector ratio and the average insert size is determined.

[0259] For the construction of the subtractive library, 600 nanograms of target DNA (poly dA blocked, single-stranded pSPORT 1-cDNA plasmids spiked with 5 picograms of pBR322 plasmid DNA) are hybridized with 50 micrograms of biotinylated RNA driver under the conditions suggested by GIBCO BRL (Life Technologies, Inc., Gaithersburg, Md.). Single-stranded DNA is prepared from the target cDNA library using kits from Gibco BRL (Life Technologies, Inc., Gaithersburg, Md.) according to the protocol suggested by the manufacturer. The poly dA region of the single-stranded pSPORT 1-cDNA target is blocked following the GIBCO BRL's protocol (Life Technologies, Inc., Gaithersburg, Md.). Double-stranded DNA is prepared from the driver cDNA library using QIAGEN Plasmid Maxi Kit (QIAGEN-tip 500). Biotinylated RNA driver is generated according to GIBCO BRL's protocol (Life Technologies, Inc., Gaithersburg, Md.). The single-stranded pSPORT 1-cDNA produced from the subtractive hybridization is repaired and introduced by transformation into E. coli DH5αF′IQ ElectroMax DH12S cells.

### EXAMPLE 4

[0260] The subtractive cDNA library (LIB3157) is generated using a first cDNA library prepared from control (without cold treatment) young maize seedlings as a target and a second cDNA library prepared from cold-treated young maize seedlings as a driver. The cold tolerant germplasm WIGOR is used for collection. Seeds are incubated on a moist filter paper on a covered tray that is kept in the dark at 10° C. for seven days. Then, the tray along with the moist filter paper is placed in a growth chamber set at ˜23° C. for 2 days until seed germination. The germinating seeds are continuously incubated at 23° C. for three additional days. Then, the temperature of the growth chamber is readjusted to 10° C. and the seedlings are grown at 10° C. for four more days. In a control experiment, seeds are incubated on moist filter papers on covered trays that are kept in the dark, and the trays are placed in a growth chamber where the temperature is constant and set at ˜23° C. Seedlings with cold treatment and without cold treatment (control) are collected seven days after germination, placed immediately on dry ice and then crushed. Total RNA is isolated from the harvested tissue using Trizol (Gibco BRL, Life Technologies, Gaithersburg, Md.)

[0261] Construction of plant cDNA libraries is well-known in the art and a number of cloning strategies exist. A number of cDNA library construction kits are commercially available. The target and driver cDNA libraries are prepared using the Superscript™ Plasmid System for cDNA synthesis and Plasmid Cloning (Gibco BRL, Life Technologies, Gaithersburg, Md. U.S.A.), as described in the Superscript II cDNA library synthesis protocol.

[0262] For the construction of the target cDNA library, poly A+RNA (mRNA) is purified from the total RNA isolated from the control seedlings using Messenge Marker Reagent Assembly (Gibco BRL, Life Technologies, Inc., Gaithersburg, Md.). The cDNA is ligated into the pSPORT 1 cloning vector. The ligated cDNA is introduced by transformation into E. coli DH5αF′IQ Competent cells (Gibco BRL, Life Technologies, Inc., Gaithersburg, Md.). The library is quality controlled for a good insert:vector ratio and the average insert size is determined.

[0263] For the construction of the driver cDNA library, poly A+RNA (mRNA) is purified from the total RNA isolated from the cold-treated seedlings using Messenge Marker Reagent Assembly (Gibco BRL, Life Technologies, Gaithersburg, Md.). The cDNA is ligated into the pSPORT 2 cloning vector. The ligated cDNA is introduced by transformation into E. coli DH5αF′IQ Competent cells (Gibco BRL, Life Technologies, Gaithersburg, Md.). The library is quality controlled for a good insert:vector ratio and the average insert size is determined.

[0264] For the construction of the subtractive library, 600 nanograms of target DNA (poly dA blocked, single-stranded pSPORT 1-cDNA plasmids spiked with 5 picograms of pBR322 plasmid DNA) are hybridized with 50 micrograms of biotinylated RNA driver under the conditions suggested by GIBCO BRL (Life Technologies, Inc., Gaithersburg, Md.). Single-stranded DNA is prepared from the target cDNA library using kits from Gibco BRL (Life Technologies, Inc., Gaithersburg, Md.) according to the protocol suggested by the manufacturer. The poly dA region of the single-stranded pSPORT 1-cDNA target is blocked following the GIBCO BRL's protocol (Life Technologies, Inc., Gaithersburg, Md.). Double-stranded DNA is prepared from the driver cDNA library using QIAGEN Plasmid Maxi Kit (QIAGEN-tip 500). Biotinylated RNA driver is generated according to GIBCO BRL's protocol (Life Technologies, Inc., Gaithersburg, Md.). The single-stranded pSPORT 1-cDNA produced from the subtractive hybridization is repaired and introduced by transformation into E. coli DH5αF′IQ and ElectroMax DH12S cells.

### EXAMPLE 5

[0265] The subtractive cDNA library (LIB3158) is prepared from cold-treated young maize seedlings. The cold tolerant germplasm WIGOR and cold sensitive germplasm LH195 are used for collection. Both WIGOR and LH195 seeds are incubated on a moist filter paper on a covered tray that is kept in the dark at 10° C. for seven days. Then, the tray along with the moist filter paper is placed in a growth chamber set at ˜23° C. for 2 days until seed germination. The germinating seeds are continuously incubated at 23° C. for three additional days. Then, the temperature of the growth chamber is readjusted to 10° C. and the seedlings are grown at 10° C. for four more days. WIGOR and LH195 seedlings are collected seven days after germination, placed immediately on dry ice and then crushed. Total RNA is isolated from the harvested tissue using Trizol (Gibco BRL, Life Technologies, Gaithersburg, Md.)

[0266] Construction of plant cDNA libraries is well-known in the art and a number of cloning strategies exist. A number of cDNA library construction kits are commercially available. The target and driver cDNA libraries are prepared using the Superscript™ Plasmid System for cDNA synthesis and Plasmid Cloning (Gibco BRL, Life Technologies, Gaithersburg, Md. U.S.A.), as described in the Superscript II cDNA library synthesis protocol.

[0267] For the construction of the target cDNA library, poly A+RNA (mRNA) is purified from the total RNA isolated from the cold-treated WIGOR seedlings using Messenge Marker Reagent Assembly (Gibco BRL, Life Technologies, Inc., Gaithersburg, Md.). The cDNA is ligated into the pSPORT 1 cloning vector. The ligated cDNA is introduced by transformation into E. coli DH5αF′IQ Competent cells (Gibco BRL, Life Technologies, Inc., Gaithersburg, Md.). The library is quality controlled for a good insert:vector ratio and the average insert size is determined.

[0268] For the construction of the driver cDNA library, poly A+RNA (mRNA) is purified from the total RNA isolated from the cold-treated LH195 seedlings using Messenge Marker Reagent Assembly (Gibco BRL, Life Technologies, Gaithersburg, Md.). The cDNA is ligated into the pSPORT 2 cloning vector. The ligated cDNA is introduced by transformation into E. coli DH5αF′IQ Competent cells (Gibco BRL, Life Technologies, Gaithersburg, Md.). The library is quality controlled for a good insert:vector ratio and the average insert size is determined.

[0269] For the construction of the subtractive library, 600 nanograms of target DNA (poly dA blocked, single-stranded pSPORT 1-cDNA plasmids spiked with 5 picograms of pBR322 plasmid DNA) are hybridized with 50 micrograms of biotinylated RNA driver under the conditions suggested by GIBCO BRL (Life Technologies, Inc., Gaithersburg, Md.). Single-stranded DNA is prepared from the target cDNA library using kits from Gibco BRL (Life Technologies, Inc., Gaithersburg, Md.) according to the protocol suggested by the manufacturer. The poly dA region of the single-stranded pSPORT 1-cDNA target is blocked following the GIBCO BRL's protocol (Life Technologies, Inc., Gaithersburg, Md.). Double-stranded DNA is prepared from the driver cDNA library using QIAGEN Plasmid Maxi Kit (QIAGEN-tip 500). Biotinylated RNA driver is generated according to GIBCO BRL's protocol (Life Technologies, Inc., Gaithersburg, Md.). The single-stranded pSPORT 1-cDNA produced from the subtractive hybridization is repaired and introduced by transformation into E. coli DH5αF′IQ and ElectroMax DH12S cells.

### EXAMPLE 6

[0270] The subtractive cDNA library (LIB3159) is prepared from cold-treated young maize seedlings. The cold tolerant germplasm WIGOR and cold sensitive germplasm LH195 are used for collection. Both WIGOR and LH195 seeds were incubated on a moist filter paper on a covered tray that was kept in the dark at 10° C. for seven days. Then the tray along with the moist filter paper was placed in a growth chamber set at ˜23° C. for 2 days until seed germination. The germinating seeds were continuously incubated at 23° C. for three additional days. Then, temperature of the growth chamber was readjusted to 10° C. and the seedlings were grown at 10° C. for four more days. WIGOR and LH195 seedlings were collected seven days after germination, placed immediately on dry ice and then crushed. Total RNA was isolated from the harvested tissue using Trizol (Gibco BRL, Life Technologies, Gaithersburg, Md.)

[0271] Construction of plant cDNA libraries is well-known in the art and a number of cloning strategies exist. A number of cDNA library construction kits are commercially available. The target and driver cDNA libraries are prepared using the Superscript™ Plasmid System for cDNA synthesis and Plasmid Cloning (Gibco BRL, Life Technologies, Gaithersburg, Md. U.S.A.), as described in the Superscript II cDNA library synthesis protocol.

[0272] For the construction of the target cDNA library, poly A+RNA (mRNA) is purified from the total RNA isolated from the cold-treated LH195 seedlings using Messenge Marker Reagent Assembly (Gibco BRL, Life Technologies, Inc., Gaithersburg, Md.). The cDNA is ligated into the pSPORT 1 cloning vector. The ligated cDNA is introduced by transformation into E. coli DH5αF′IQ Competent cells (Gibco BRL, Life Technologies, Inc., Gaithersburg, Md.). The library is quality controlled for a good insert:vector ratio and the average insert size is determined.

[0273] For the construction of the driver cDNA library, poly A+RNA (mRNA) is purified from the total RNA isolated from the cold-treated WIGOR seedlings using Messenge Marker Reagent Assembly (Gibco BRL, Life Technologies, Gaithersburg, Md.). The cDNA is ligated into the pSPORT 2 cloning vector. The ligated cDNA is introduced by transformation into E. coli DH5αF′IQ Competent cells (Gibco BRL, Life Technologies, Gaithersburg, Md.). The library is quality controlled for a good insert:vector ratio and the average insert size is determined.

[0274] For the construction of the subtractive library, 600 nanograms of target DNA (poly dA blocked, single-stranded pSPORT 1-cDNA plasmids spiked with 5 picograms of pBR322 plasmid DNA) are hybridized with 50 micrograms of biotinylated RNA driver under the conditions suggested by GIBCO BRL (Life Technologies, Inc., Gaithersburg, Md.). Single-stranded DNA is prepared from the target cDNA library using kits from Gibco BRL (Life Technologies, Inc., Gaithersburg, Md.) according to the protocol suggested by the manufacturer. The poly dA region of the single-stranded pSPORT 1-cDNA target is blocked following the GIBCO BRL's protocol (Life Technologies, Inc., Gaithersburg, Md.). Double-stranded DNA is prepared from the driver cDNA library using QIAGEN Plasmid Maxi Kit (QIAGEN-tip 500). Biotinylated RNA driver is generated according to GIBCO BRL's protocol (Life Technologies, Inc., Gaithersburg, Md.). The single-stranded pSPORT l-cDNA produced from the subtractive hybridization is repaired and introduced by transformation into E. coli DH5αF′IQ and ElectroMax DH12S cells.

### EXAMPLE 7

[0275] The cDNA libraries are plated on LB agar containing the appropriate antibiotics for selection and incubated at 37° for a sufficient time to allow the growth of individual colonies. Single colonies are individually placed in each well of a 96-well microtiter plates containing LB liquid including the selective antibiotics. The plates are incubated overnight at approximately 37° C. with gentle shaking to promote growth of the cultures. The plasmid DNA is isolated from each clone using Qiaprep plasmid isolation kits, using the conditions recommended by the manufacturer (Qiagen Inc., Santa Clara, Calif. U.S.A.).

[0276] The template plasmid DNA clones are used for subsequent sequencing. For sequencing the cDNA libraries LIB3136, LIB3137, LIB3156, LIB3157, LIB3158, and LIB3159, a commercially available sequencing kit, such as the ABI PRISM dRhodamine Terminator Cycle Sequencing Ready Reaction Kit with AmpliTaq® DNA Polymerase, FS, is used under the conditions recommended by the manufacturer (PE Applied Biosystems, Foster City, Calif.). The ESTs of the present invention are generated by sequencing initiated from the 5′ end of each cDNA clone.

[0277] A number of sequencing techniques are known in the art, including fluorescence-based sequencing methodologies. These methods have the detection, automation and instrumentation capability necessary for the analysis of large volumes of sequence data. Currently, the 377 DNA Sequencer (Perkin-Elmer Corp., Applied Biosystems Div., Foster City, Calif.) allows the most rapid electrophoresis and data collection. With these types of automated systems, fluorescent dye-labeled sequence reaction products are detected and data entered directly into the computer, producing a chromatogram that is subsequently viewed, stored, and analyzed using the corresponding software programs. These methods are known to those of skill in the art and have been described and reviewed (Birren et al., Genome Analysis: Analyzing DNA, 1, Cold Spring Harbor, N.Y., the entirety of which is herein incorporated by reference)

The application's sequence listing, which the Patent Office published only in electronic form, follows.

SEQUENCE LISTING (14882 sequences)

SEQ ID NO: 1 - DNA, 488 bp, Zea mays
  Clone ID: LIB3136-003-D6-F1A
cctaaaaatagtttcgtatatatccggatctggtattacaatagtaacacgtgttttgttgtggtacaaataatacgtcccgagtcggataaatcttccgatctccaataacagtgtacgtacatacctgcatggcacgaaattatgcagttcatcatggactggaacggagcggtgtgtaaaagcgcaggcgctactggtaataatagcgtactgctgggggggtatcttggctggctgcatccaattccaacaacaatgatgtggtgttggtggtggctacggaaggacggggggtgccacccggcaggtgttgtgggactggcagtggcagcacttgtggcccgccacgccggagaagacctgcgtcgtgtccctgcagtcgttgcacacgacccatccctttcccgtgtacaagtagcttgcctccatctctgcgtcgagggccttgaagaacttgtccatgtcgaagatgggcgtggcgcata

SEQ ID NO: 2 - DNA, 466 bp, Zea mays
  Clone ID: LIB3136-003-D6-R1A
cggacgctggatcctgccccgccaccacgccgcggcacacaactgcacaagccctcctcagatctcaatcccggcgctccctccctccctccctcctcgcctcgggacagcgagcgccgccgtccgccgtccatggagcacgacgccgaggcgcgccgcgggttcgccaggatgggcttcgggtgcaagcactaccggaggcgatgccggatccgcgcgccctgctgcggcgacgtcttccactgccgccattgccacaacgagtccacgaaagacgggcacgagctggatcggcacgacgtccaatcggttatctgcctcgtctgtgacaccgagcagccgatcgcgcaggtgtgctgcaactgcggcgtctgcatgggggagtacttctgcgcacctgcaacttcttggacgatgacgttgacaaggagcagttccattgccacgattgcggcatctgcagagt

SEQ ID NO: 3 - DNA, 486 bp, Zea mays
  Clone ID: LIB3136-018-G10-F1A
ccattataacagccataaatattttgtttaaatgcagggagacaaattccagggattatttactgcagcagcagtttacagggaccgccatcttctcttccacctccaacacccccccaccactttcccaggtgaaatggcaaaattttcccaaccaaaaaacgcatagtaaaaaccaatcgggtaaatgatcttgcgaccgatcgaatggacatggaacatgggtgtgtcgcctttgttcggtttcaggctttcaatgcggtgttcttgcagatggggcacacgttcttcaccaccagccattgcttgatgcagccagcatggaagtcgtgcccgcagtccagcctcccgagatcgtctccatcaacgtactcctcctggagagcgagaaagagcatgagtatgtattagccttgttcaactgctaacttcattgctttgtaacaaagctaggtgatgcagggagcatgttcacaggcggaaagc

SEQ ID NO: 4 - DNA, 472 bp, Zea mays
  Clone ID: LIB3136-018-G10-R1A
gcaggattcaatcaccaaaacctcaccagacgccatcctcgaaatttatcagaggtaattttctccctccatttttcgcattttgttttctccgttttttggttttcagtttgattgctcatcttttcaccaaaatatcaagtagcgtcatacttgaaatttgattgatcatcttctcgatttgatcttttattttcttataggagattggtcgtctatctggagcactccgcggccatcaacccccacgcttaaggtcagggtttctgttggagcgtcagggcgatggtgtttggggcgttcctttatcaacaaggggtagagaaggaagaaggttaatggagattcggaatgcacttgaaatgattcaaaggggggaaaatgtaaggctcgagtctatcttctatggcggcctcgacattcatgacagacacagggacatgcgccttgacattgacaatatgtcctatga

SEQ ID NO: 5 - DNA, 498 bp, Zea mays
  Clone ID: LIB3136-023-C2-F1A
tttttattttttttttttttttttttttttttttaatgacaatgaacacaattattccttgtcgattgaacaatagtttacatcatggtacaaactgaaaaccagcgtgcgctcacatgcatccggacacctaaaggtcaccggcggcgcctccctcacttgccggggacgaagttggtggcgtaggcccaagcgttgttgttgacggggtcggcaatgtggtcagcgaggttctcgagcgggcccttcccggtgacgatggcctggacgaagaatccgaacatggagaacatggcgaggcggccgttcttgagctccttcaccttgagctcggcgaaggcctcggggtcgtcggcgaggccgagcgggtcgaagctgccaccggggtagagcgggtcgacgacctcgccgagcggaccgccggcgatgcggtaccctcgacggcgcccatgagcacgacctggcaggcccagatggcaaggatgctctgcgcgtgga

SEQ ID NO: 6 - DNA, 472 bp, Zea mays
  Clone ID: LIB3136-023-C2-R1A
cgatctgcaagtctcgctacgtagcagtgcaatacaaaaaaagcagccgcaatggcgagcagcaccatggccctctcctccacggccttcgccggcaaggccgtgaacgtgccgtcgtcgtccgccttcggcgaggcccgcgtgacgatgcgcaagacggcggcgaaggccaagcctgcggcggcgtccgggagcccgtggtacggccccgaccgcgtgctgtacctgggcccactgtccggcgagccaccgagctacctgacgggcgaattcccgggcgactacggctgggacaccgcggggctgtcggcggacccggagacgttcgccaagaaccgggagctggaggtgatccactcccgctgggccatgctgggcgcgctcggctgcgtcttccccgagctgctcgcccgcaacggcgtcaagttcggcgaggccgtgtggttcaaggccggctcccagatcttcagcg

SEQ ID NO: 7 - DNA, 417 bp, Zea mays
  Clone ID: LIB3136-026-B3-R1A
cccacgcgtccgactagttctagatcgcgatctaggactagtctgaagatccatgttctgtctgccttgataatccttctgtgggtgatagtatccgccatttgccttgctttcacaagttccataaagagtgtattgacgagtggcttaggagaaagaaactgtgcccagtctgcaagtttgggattaactgaagtttgccgtaccattctacagtggagttctacttagtagtggcatcgacgaggtgctgcaatttctcatacgggatgctttcctgcagggaattggctgtgtctaagataaaataaacaatgtattgctatgatctgcgcttttgggcatcattttgtatgcacgcacgagtgcttgcgaggactattatcgtaaaccaccaattcccataaattggttacc

SEQ ID NO: 8 - DNA, 408 bp, Zea mays
  Clone ID: LIB3136-033-F7-F1A
ctacgttcacatatgtattttaagcaggctcatgggcctttatcctccccttactttacaacatattcaagaatcggggaaacaaaaccatgcgttttttcaatccgtatgaaatgcttcatcgtaaacagcagtggcggtgtggctggcggaaacgcctgatcggtcaaggtttcagaaaccaaggtcgtcgttagggccgggaccctgaccacccagagggggccacggaagtcgggaggatccggacccggggcatacgaggtacggaaaatccgggagccccctcggtttcaggggttggagtgtccgaaacggcggtatttgcagtagcgggagccgcaacgggagcagttcaccaaatcctgccgaaccggggcgtagcttatgggccctaaggtgtataac

SEQ ID NO: 9 - DNA, 378 bp, Zea mays
  Clone ID: LIB3136-033-F7-R1A
acaagggaaagattgcgcttgcgcatgcttgggcgccggccgcgcaggtgccggttaatcttcgagagacgcgagtcacgcgcactgctgaagagtcaaaaaggtgtgtgtgtgtgagatagagatgaggctccctatcctctcgcggtaacttggctaggagagataggggctgggaaagcgaatggttttcgggaaggcgctgtgatttgacctgtaaaggaagaacctttccttcctcttcccgtcctttgccgactcttgtaccgccctcagatcggcgacgcggttgtttcttcggcaacgggctaaaatgaggctctcatcgtcgtccggcagcgtcctaccggctcagccgggctctccggaagctgtgga

SEQ ID NO: 10 - DNA, 485 bp, Zea mays
  Clone ID: LIB3136-044-H10-F1A
caaaacaaaacaactcaaatcctttattatttggaccattattccagaacgagaagggatggcgtctcctttttgatcacccatccctcacaaaaggggtaacatcaaagtacatacaaaaaaccataaagagaaaaaaagtcaagagaaaaaaaaaatgtgcggggcgaatgggatcaacagccctctgataatggagcctaccacaaatcacgtagaagatatatggctggctggcatcaagatctacgggtgcggcgaaaacagaggaggacaagacgatcaacggagtgattagcttggcactaataatccgccccaatcacaagatcacacaaccctgagataggcctgcaatcgttcggcagtcactgtgcagggggtacgttgtatgtacactgctgatctggcgttggagggtccttatccatgaagcaacgtggatgtgggcgaagaagatagggtcatcagcagcagagcagcct

SEQ ID NO: 11 - DNA, 489 bp, Zea mays
  Clone ID: LIB3136-055-C12-F1A
aatagaacagcacacagtatgttatatatatagcctgatctacacatacagccgcatgctgtatatacatacacacacggcaaaaaacacacacacatgccccacccgttcatccttgtgatggaacaaaaaaatgtaagatgcggcataaaacacacatgttataagttccatactacaatgggcaaaactggaggggcgcagagaataaagaaaaaggcgcataaacttgcaacatgtcggtcgagcaaaccaagctatcctaaagctgcttattaagatatatgtacatacgcatcgccttgctcctgagtgtgacgactccaaacgaccttcttgccttcaggccagccagctgcttctctcacttgctcgttatcatgaacgggagatgaacccgggaagagcccgacttttgatccatgcttgaggcatccgaagagagcaacctcctatgctccctcaaagttggactagtttagggtgatg

SEQ ID NO: 12 - DNA, 474 bp, Zea mays
  Clone ID: LIB3136-055-C12-R1A
cggacgctggtcgcacggcagccgatggtgtcgatgagctcgacgccgcaccctctggatccgtccgtcccggccgtcgtggggtacggcaaggaggaggaggaggcggtggagtcttgtgccgccgccgcgcccttgccgccggttgggatcgacgacgacgaggagggcccccggagagtgcgcaaccctacaccatcaccaagtcgcgcgagagctggaccgaccccgagcacgacaagttcctcgaggcactgcagctctttgaccgtgactggaaaaagattgaagcatatgttggctccaagacagtaatacagattaggagtcacgcacagaagtactttttgaaggttcaaaagaatggaacaggtgagcatttgcccccacctaggccaaagcgaaaggctgcccatccatatccacacaagtcctcaaaaaaggcccttcaagttgtcttaccacaacaagttt

SEQ ID NO: 13 - DNA, 364 bp, Zea mays
  Clone ID: LIB3136-059-Q1-K1-D5
ttcgcccctgtaccttattcatctggggcctctactattagttcgagactcggcgcttttcttgggtgtggatctatcaaagcaacatttgctttggtatggttatgatcgcaagaatggagttcattccctctgtccagctatatggtcaaatcataggagatggctgatgatgtcaatgatgtgtctcaatccaatatcttgttcgtttatggatctgcattttcctattgggcaactaacatatgttgcttggtgaaggaatataacccgtggctttcttcctttatttggtggcttgcttcaagcctaatggaatatttccctgtagaaccaaataatgattcttttctttgcataaata

SEQ ID NO: 14 - DNA, 334 bp, Zea mays
  Clone ID: LIB3136-059-Q1-K1-D6
caccactcccaagccagtaccgagtcctacgagcagtcgcacgcaagtgtcaagagacgaaacggtcgacatggctcgcacgcaatctgccgtagcggtcgccgtggtggccgcggtgctgctgctggcagcggcggcgacgacctcggaggccgccatcacctgcgggcaggtgagctccgccatcgcgccctgcctctcctacgcccgcggcacggggtccgccccctccgcgtcctgctgtagcggcgtcaggaacctcaagagcgccgccagcaccgccgccgacaggcgtgccgcctgcaactgcctcaagaacgccgccaggggcgtc

SEQ ID NO: 15 - DNA, 358 bp, Zea mays
  Clone ID: LIB3136-059-Q1-K1-D7
ctgaggcccttgagattacccgcaagttcatgaacaaaccagtgagaattcttgtgaagagagatgagctgacccttgagggtatcaagcagttctatgtgaatgtggacaaggaagactggaagctggacacactgtgtgacctgtatgagaccctggccattacccagagtgtcatctttgtcaacacccgccgcaaggtggactggctcactgacaagatgaggagcagggaccacaccgtttctgccactcatggtgacatggaccagaacactagagacatcatcatgagggagttccggtctggctcctcccgtgtgctcatcaccactgacctgcttgctcgtggtattga

SEQ ID NO: 16 - DNA, 304 bp, Zea mays
  Clone ID: LIB3136-059-Q1-K1-D8
agcgtcgttaaacttctaggttaccctggccaggagggctgccagctgtgacagttccaaagtcatctatcattgaacccaccctggggcagataggcactggctatgccccagcgctggactgccacacctcccacattgctgtcaagtttgctgaactcattaccaagatcgacaggcggtctggcaaggagcttgagaaggagcccaagttcctgaagaacggtgatgctggtatggcgaagatgattcccaccaagcccatggtggtggagacattctcgcagtatcctccccttggtag

SEQ ID NO: 17 - DNA, 253 bp, Zea mays
  Clone ID: LIB3136-059-Q1-K1-D9
gaccctgaaaggaatcacacatttttatgctttctgtgaagaaaggcacaaaggggattgggtgaatacactctggtcaaagctttaaattaatcaattcattttattctgcaactctgtttatagagttgatctgctggctaaaaaaataactgtactaggttattcatgcttctacatgcatgctaagatgttgcaagaccacagaaattgagtttttcatgattttcataatggagcttgcagaaacctt

SEQ ID NO: 18 - DNA, 354 bp, Zea mays
  Clone ID: LIB3136-059-Q1-K1-E1
atttactaatgacaggcgcaatgaagaatttggaaaattcaatggtttagtcgctcagaaaaaggcttattttgaagagtattacaagaagatcagggaactaaaggcttcacagcagcaaaaccagcaaactgaacttattctggaatacagcggtgatggtagtgactccagccaaacagcagaagaggagcagggtgctgatcttgaaacccccactggatctggagcagctgttgatgtttatgtggaagaagttccatgtgaaaccacatcggagcatggactgcagtgctataatgaccaaggaaacgaaaattttgatacagaaatttcctcatctaatctttcttc

SEQ ID NO: 19 - DNA, 254 bp, Zea mays
  Clone ID: LIB3136-059-Q1-K1-E10
cggacgcgtgggcggacgcgtgggtgggcagcaacacagaatggatatttggcaccaggacaagtctaagaagggggacgataagaatactgcttctcaggaattctaggtttttttagagttaattgagtatgtgcgaggatgcatcttgtgtctggcagagtatgtttactttagggatgtaacaaagtggacttcttgttcactgtttgaagaatttgtctgcaaatccaagttcgagtaatttattcttc

SEQ ID NO: 20 - DNA, 279 bp, Zea mays
  Clone ID: LIB3136-059-Q1-K1-E12
ggcagccgaagcgactgtcgcgagtgcaaggttcatcgtccgccatgacgctctgcgtctccagctctttcctccccatacccgccgccgcgaggaccaccgtccgcaccctacgatccgtcgtcccctcccaggggatgcgctgctcgatgcgcaagaaggggttgcacccggagatctactaggacgcgaaggctgctctgcatcagcgagctggtgctggtgaccgtgggcaccaaaccggcatacacggtggacgtgtggtccggaaaccacccc

SEQ ID NO: 21 - DNA, 350 bp, Zea mays
  Clone ID: LIB3136-059-Q1-K1-E2
ccactcgttcgttccaaagggagaagaggatcaggttcgttccaagggagaagagggtcaggagagagagagagagagagagagagagaaagaagagcccttgctcgttcgttcaccaccactgcagctccgatcgatccgcaaggcaggcaagatgtacaacgcgccgtcgggccaggagatgtcctacttggagcacgtccagaggcgccacgaggagaagggctgcctctacgcctgcatcttcactgcgctgtgctgcttctgctgctacgagacctgcgagtgctgcctcgactgcctctgctgctgctgcaactagccggggctagctccggaggacggtcgag

SEQ ID NO: 22 - DNA, 327 bp, Zea mays
  Clone ID: LIB3136-059-Q1-K1-E3
gcaaccctgctgggcggaacggcgactagcgcagcgtgcgctcgcctaaccatcaggctccagacccgcggcgcagagacactgcgggggcatccaagtatggagcagaggttagcaggactagctctaccagcgactctggtcggcgatcaggcctgcatgacatggacctgaccgggtcgcaagtgggaagcccaccgcaaaacggaagaagaagagaagctccaaggggcaccgacagacagcgcgcgtgtgcagaggccatgacatggggggagaattcaagggagcgaacaaatggtcatgggagcttggacagcacccatg

SEQ ID NO: 23 - DNA, 343 bp, Zea mays
  Clone ID: LIB3136-059-Q1-K1-E4
gcggcaagcaacgaacgcgatcgcgctccgacgacgacgcgcggtgccggcgcctggtggtgccgcgttgcggactccgctgcatcgcctcggtcggtcgtcgtcatatcatgggtgtccggctgccggtggcgtggtccgccgtcctcgtcctcctcgtgcgggcggccgtggcgcgggagtacgcggccatcttcaacttcggggactccctggtggacgccggcaacctggtggtggacggcatcccggactacctggccacggcgcgcctgccctacggcatgacccacttcggctaccccaccggccgctgctccgacggccgcctcgtcgttgactt

SEQ ID NO: 24 - DNA, 304 bp, Zea mays
  Clone ID: LIB3136-059-Q1-K1-E5
gccatgacgtttctagtaatatatatgtcgggcatcaactggggtttatgtgggaggaaaggagatggccttctgaaggtggcggtccgctcccattgccattaaggttcactggactatagcggaggagaggacaccttgcctataaagcattatggactgctatggtgctagcgtgccgacaagatgtatggtgggttgcgtgtaaaaggtggcggcaagagttggagaaagtgaatgacttatatgttctgcatgtctggtctttgccttggttggataaacacactgaggtgaaagttga

SEQ ID NO: 25 - DNA, 266 bp, Zea mays
  Clone ID: LIB3136-059-Q1-K1-E6
gcgacaaaagctaaacctatccgccgggggaccatccgaggacctggcgtgccaactgatgagtgccgaccgacgttgcgcccgttgtttcgactcgacgatcgttggacctcacctcgaaacgcgatggaagatggacattggaccgagtcgacaccatatagcctacttggacgagacaccgatggccaatcaacagagtctgtgcctcaaagccacagtgagatgtgagaatacaagatcgttcttttaggaaagctataatt

SEQ ID NO: 26 - DNA, 402 bp, Zea mays
  Clone ID: LIB3136-059-Q1-K1-E7
cggacgcgtggtcggacgcgtgggcggacgcgtgggtagcttttcacgtacagttgcagttcagagagaagagaaagagaccgacatctatctcgccgatagctagcatcatggcgtccaaggcgctcctcgtggtagcgctcctgctcgccgccaccttcctcgtcgcctccgctaacgagcaagcccaggcggccaaagaggagaagaaggcggaggtccaagactggcacggcggcggcggctacccgcactgccggtggggctgctgcaaccgcgggtaccatggcggctgccggtgctgctcgcaccctgatcagataccagagcccatgtaccgtcctgagctcgttgaggtccacaactaaatagtaatgagctgcgctgctactatatataccg

SEQ ID NO: 27 - DNA, 249 bp, Zea mays
  Clone ID: LIB3136-059-Q1-K1-F1
ccgtcagcgactcacctattctcccctctctccccgacgtctcccatttcgtgtacggtgaccttcctcaccctgcaactcagcacgtgtaatggccgtgtttcccgttctctttccccacaccttcacatcctcttgtcttctttgcctctttctcaaacagcactgctccacattcttctattgccgttcccgcacttttttttcctcaatttcactttctcacatctttggttgcctttcctttcc

SEQ ID NO: 28 - DNA, 430 bp, Zea mays
  Clone ID: LIB3136-059-Q1-K1-F10
ccacgcgtccgcgagcttatgtttttgcttatgaaccgcattcggtgctgcctattggcgtttgtgcgcttgcggatcatacaggttttttgcccctgccgaagattaaggctcttgcgagtaccgcggttttctatgtgccgtttgtgaggcagatatggacatggttggggcttgtccctgcgtcgagaaggaatttttacgagtacttggcggctgggtatagttgcatcatagtgccgggtggtgtgcaggagttgttgtatatggaatgtgattcggaggttgcttttcttaaatcaaggaaaggatttgtaaagatagccatggagatgggtcaacctcttgtacctgtattctgctttggtcagagttaagcgtacaagtggtggaagccaagtgggaaattatatttacgtatttccagagc

SEQ ID NO: 29 - DNA, 452 bp, Zea mays
  Clone ID: LIB3136-059-Q1-K1-F12
ctcacaaacgcccctcgagctccttgtatttactgccattacgctaggtctggtgtacattggttcctgcaatgaagaagatcgctcaagccattattcatgctttaatggtgcgcagcgacaacgaaatgggggaaccactttctcgcctgctgcctgtagcccttggccttctgtaccttggaaagcaggaaagtgtcgaggcttcggcagaggtttctaagaccttcaacgagaaaatccagaaatactgtgacatcacacttctatccttggcctatgctggaacaggaaatgtcctcaaggtccaaaaacttctgggatactgttctcaacatcttgagaaaggtgaaacccaccagggatctgcagtgctcggaataggccttgtggctatgtcagaggagctaggcattgatatggcaattcggtctctttgacatttgttacag

SEQ ID NO: 30 - DNA, 375 bp, Zea mays
  Clone ID: LIB3136-059-Q1-K1-F2
cgtttcgccgcctccgccgacaccgactgcctacctcagctgccgtcgccatgggcagaaggcctgctagatgctatcgccagatcaagaacaagccataccctaagtccaggtactgccgtggtgtccctgaccccaagatcaggatctacgatgttgggatgaagaggaagggtgttgatgagttcccctattgtgtgcaccttgtctcttgggagaaggagaatgtctccagtgaggcgcttgaggctgcccgcattgcctgcaacaagtacatgaccaagtctgcaggaaaggatgctttccaccttagggtccgggttcacccgttccatgtcctccgtatcaacaagatgctttcgtgtgctggggctg

SEQ ID NO: 31 - DNA, 335 bp, Zea mays
  Clone ID: LIB3136-059-Q1-K1-F3
cgtttcgccgcctccggcgacaccgattgcctacctcagctgccgtcgccatgggcggaaggcctgctggatgctatcgccagatcaagaacaagccataccctaagtccaggtactgccgtggtgtccctgaccccaagatcaggatctacgatgttgggatgaagaggaagggtgttgatgagttcccctattgtgtgcaccttgtctcttgggagaaggagaatgtctccagtgaggcgcttgaggctgcccgcattgcctgcaacaagtacatgaccaagtctgcaggaaaggatgctttccaccttaggggccgggtttacccggtccat

SEQ ID NO: 32 - DNA, 365 bp, Zea mays
  Clone ID: LIB3136-059-Q1-K1-F5
ggcggcgagccaacacctcctcccatggctgccccccagaccccagtcccgtccgcgcatccgctcttccgtcagcgacgcacctattctcccctctctccccgacgtcgcccatggcgtggacggcgacctccctcaccctgcaactctgcacgtgtaagggccgtgttgcccgcctcctttccccacaccggcgcagccccctgtcgccgcggccccttccccaaacagcacggcaccacatgctccccctgccgcgcccgcactctccttccccaaataacacggccccacatcgctggttgcctcgcctcgccggggacccagcacgatggtcagggagctggtgggtgggggagacaggg

SEQ ID NO: 33 - DNA, 342 bp, Zea mays
  Clone ID: LIB3136-059-Q1-K1-F7
cgaggcgcccgtgctccccaccgatggtctccccgacgatttcgactggagggaccacggcgccgtcggccccgtcaagaaccagggttcgtgcgggtcgtgctggtcgttcagcgcgtctggagcgctggagggtgcgcactacctcgcaactggcaagctggaggtgctttcggagcatcagttcgtcgactgtgaccacgagtgtgattcatcggagcctgattcatgtgattcgggttgcaatggtgggctaatgacgacggcattcagttatctacataaggccggtggccttgagagtgagaaggattacccttacactgagagtgatggcaaatg

SEQ ID NO: 34 - DNA, 308 bp, Zea mays
  Clone ID: LIB3136-059-Q1-K1-F8
ccggggcggccacgcgtccgtcgccacggtcttactacccgttagccctggggaggcacaccttgtcgggggcagagacagcgaccactccggcgcacaagcgggatcctcttcttcctcggcaagtgccccatcatgtggcagtcggtcaagcagcacgcggtggccatgtccagctgcgaggccgagtacatagcggcctccaccgctataactcaggcgctctggcttgctagcctgctcggtgatctacttgtgagagccgttgaaacaatggaactgcgcttggacagccagtccggcctggc

SEQ ID NO: 35 - DNA, 445 bp, Zea mays
  Clone ID: LIB3136-059-Q1-K1-F9
cgtccgggagacacatgcacaggtgagccagatgtacttggttgcaccactagacttgcatttttctatcctatatgatgtattgaagaaacatgtcgcagaagatgcagactacaaagttattatattctgtactactgcaatggtcaccaaacttgtggctgaagttctctcccagctgaaactgaatataagagagattcattccagaaagtcgcagtctgcaagaactaaggtctcagacgaattcaggaaatcaaaaggtttgatactggtcagttcagacgtatctgcccggtgtgttgactatcctgatgtcactcttgtaatacacgttggagttcctgcagatagagagcagtacatacatagactatgccggaccggacggaaaggcaaggaatggcaaggactcctactttggcaccttgggaaaaatattttc

SEQ ID NO: 36 - DNA, 347 bp, Zea mays
  Clone ID: LIB3136-059-Q1-K1-G1
gggagccaaccaggaggatgccctcgcgcgaattgaaaagctttcagaagtaaacccgatgcttggcttccgtgggtgcaggcttggtatatcgtaccctgaattgacagagatgcaagcccgggccatttttgaagctgctatagcaatgaccaaccagggtgttcaagtgttcccagagataatggttcctcttgttggaacaccacaggaactggggcatcaagtgactcttatccgccaagttgctgagaaagtgttcgccaatgtgggcaagactatcgggtacaaagttggaacaatgattgagatccccagggcagctctggtggctgatgagatagcgg

SEQ ID NO: 37 - DNA, 327 bp, Zea mays
  Clone ID: LIB3136-059-Q1-K1-G12
acgcgtgcgaaaacgttggtccgagtcctccgatctcattcgccgtcttaccggcgatcccaaagagggtttggtttagggttcggatggcgtcgaagttgctacagctgcagggaaaggccgcccaggcctcgagtttcgtggctaaacacgggtgcgcttactacaagcagctcttggagaagaacaagcagtatatcgtggatccgccgactgcggagacgtgccaggagctgtcgaagaagttgttttaacactcggctttgcgaatattcctttgcgctattaggagttttggaaaagaggctcgacgggtgtggaagcata

SEQ ID NO: 38 - DNA, 382 bp, Zea mays
  Clone ID: LIB3136-059-Q1-K1-G2
cccggctctcccacggtacttcagccgctagtctgcgactccgccagtacgccaccaccaccgagcctggactaccgccgccgcccttcgccgatatcttcagcggcgaacagcgcccaccagatcccgcccctgcgatggagtccgtggtgaacccgaaggcatacccgctggctgatgcgcagctgacgatgggtatcctcgatatcatccagcaggccgccaactacaaacagcttaagaagggagcgaatgaagcgacgaagaccctgaataggggcatatcggagtttgtagtgatggcggcggacacagagcctctcgagatcctgctccacctccccttgttagctgaagataagaacgtgccatatggggttgg

SEQ ID NO: 39 - DNA, 365 bp, Zea mays
  Clone ID: LIB3136-059-Q1-K1-G3
cggacgcgtggggctagatggttatcatcaatcgattgatcatgttcacaacttaagaactgtttattctggtgtcagtgacagcactgcatttgccactccattccccttccctgggaaacaacagttatctgggatgcatgcacaaggggctaccaatgaaaagacatggcaagatttccgtctttttgagccttcaaaacagaacatgctccaaaattaccaccaaagaaatcagcaaaatggtcaaatagctgaacaagagccagaaaattctgtctggtctagcagttaccatgtgtgattcagtaacttgtaccaggatgattgctggagttgctggggactattggattaaatggcac

SEQ ID NO: 40 - DNA, 379 bp, Zea mays
  Clone ID: LIB3136-059-Q1-K1-G5
gggagccaaccaggaggatgccctcgttcgaattgaaaagctttcagaagtaaaccggatgcttggcttgcgtgggtgcaggcttggtatatcgtaccctgaattgacagagatgcaagcccgggccatttttgaagctgctatagcaatgaccaaccagggtgttcaagtgttcccagagataatggttcctcttgttggaacaccacaggaactggggcatcaagtgactcttatccgccaagttgctgagaaagtgttcgccaatgtgggcaagactatcgggtacaaagttggaacaatgattgagatccccagggcaactctggtggctgatgagatagcggagcaagctgaaatcttctccttcggaacgaac

SEQ ID NO: 41 - DNA, 379 bp, Zea mays
  Clone ID: LIB3136-059-Q1-K1-G6
cgccggcgtccagcggcgtcgaggcctgggtgtggcagctcgccaaggcctatgtggccgtcaacgactctggctggcaccaactcgtcagccactggctgaacacccacgcggtgatggagccgttcgtgatcgcgacgaaccggcagctgagcgtgacgcacccggtgcacaagctcctgagctcgcacttccgcgacaccatgaccatcaacgcgctggcgcggcagacgctcatcaacggcggcggcatcttcgagatgaccgtcttcccgggcaagtacgcgctgggcatgtcctccgtggtgtacaagagctggaacttcaccgagcagggccttcccgccgacctcttcaagaagggcgtggcggtggcgga

SEQ ID NO: 42 - DNA, 362 bp, Zea mays
  Clone ID: LIB3136-059-Q1-K1-G7
cgagcagcagcaacaacaatctgtccatagaagtcttggacgaactcaagtccatacatctacaccacatgagcaaacaccttcaaagaaggcataacttgatggcaatgtagtcacagatttgccaagtgatcctatattgcacaacatgagaactcgaagggttcaagctgccaacatgggcatatcagaatcaagacaaaagcaagtctaccttatttcactgataaacaaaggcagagttgtggccaaagggaagttagtgactacaaatagccaaagagaaatattaggagcaaagcttggaccaaaatattgtggagttcttgttgaaggccttgaaaatattgaacttggcaata

SEQ ID NO: 43 - DNA, 395 bp, Zea mays
  Clone ID: LIB3136-059-Q1-K1-G8
cggacgcgtgggctgcgcaccaaggagatcaagaacggacgcctcgccatgctcgccgtcatgggcgcctggttccaggccgagtacaccggcaccggccccatcgacaacctcttcgcccacctcgccgaccctggccacgccaccatcttccaggccttcacccccaaatgaggagttgaacttattattagcattttgaggagtgctaccacacatgcatcgtcaggttgatggccgatatatatgaaacttcacattttttttggtggggaaggactgctgagtagactgtcaatgatggaatgctcgtggtgcgagtgcgatgcatggtgtacttgtactatgttgtaaccagtgtaaaaaggggatactcgttagatggtatgccatgt

SEQ ID NO: 44 - DNA, 363 bp, Zea mays
  Clone ID: LIB3136-059-Q1-K1-H1
caattatgcccatcgaaggcccaactagaacccaattacaagtataactccattcccctccgtcctcccgcatcaactcgaaccgaagggacgaccgagcggagtctagactcgagagcaacctcgacctcccggatctctctcccacccacgcctcgtcggcgccgtcgtctgctgcagcgatggcctcccccgacctgctcttcaatctgcggaacctcttctacctgggcgcctaccaggcagccatcaacaacagcgacgtcccgggcctcgacgccgacgccgccgctgagcgcgacgccatcgtcttccgctcctacatcgccctcggctcctaccagctggtgatcagcgagatcg

SEQ ID NO: 45 - DNA, 130 bp, Zea mays
  Clone ID: LIB3136-059-Q1-K1-H10
gcggtttaattagcacaccctcctgtagatgactgttgtttgttggatcgacaacttggtatggcttgaataaggtgtgttatctgtacctgtatactttttttttatttaagaaaatgcaattgtgaac

SEQ ID NO: 46 - DNA, 335 bp, Zea mays
  Clone ID: LIB3136-059-Q1-K1-H11
tgaagttcaccctctggattttagcactaactgtggcaaaattcgcttctattgctgggacactgctgggcaagaaaagttcggtggcctcagggatggctactacattcatggtcagtgtgccatcattatgtttgatgtcacttcgaggctgacatacaagaatgttccaacatggcacagggacctgtgcagggtgtgtgagaacatccccatcgttctctgcggaaacaaggttgatgtaaagaacaggcaggtcaaagccaagcaagttacattccacaggaagaagaacttgcagtactatgagatttctgccaaaagcaattacaact

SEQ ID NO: 47 - DNA, 242 bp, Zea mays
  Clone ID: LIB3136-059-Q1-K1-H12
gaacaaaaaaaaaagaaaaaagaagaaaaaaagagagaaaagaaaaaaaaaaaaaaaaaaagagaaaagagaaaaaaaagaaaaaaacaagaaaacaaaaaaagaaaaaaaagaaacaaaaaaaaaaaaaaaaaaaaaaagaaaaggaaaagaaaaaaaagaaaaaagaaaagaaaaaaaagagaaaaaagaaaaaaaaaaagaaggaaaaaaaaaaaaaaaaaagaagaaaaggagaggtt

SEQ ID NO: 48 - DNA, 337 bp, Zea mays
  Clone ID: LIB3136-059-Q1-K1-H2
aaaaaaggaaaaaggctcgattcgctgttgcctcattgcctgccacagctcgccgcggacgccgtcgccgctcaagtgaagtccggagtgggggcttgcgatctccgctgcgggcgcggaagatggctgacccagagttggaagctatcaggcagagacggatgcgagaactacaacacggtgcggcaaatcagcaaaatgcgggccaacaaaaggctcaggaagacgcgaaacaggaagctgaggaacgccggcagatgatgcttgctcagatattatcttctgaagcaagagaaaggctttcccgcatagctttggtcaaacctgacaaagcaag

SEQ ID NO: 49 - DNA, 372 bp, Zea mays
  Clone ID: LIB3136-059-Q1-K1-H3
cagacacccgagggaaaaaacaccaacgcaacatctaccacccggccacatcgtcacagcatcggggcttctaaagatgccagcagagtacagtgctcgccgaagagcggcgtggcgaccaaaactagatctgtcaagcctgagctgaaggccctctgaagcgcatgcgaagcagccaagtgctgcgattgtctctgtacaaacagaatcgcctgactcttagccgtttccatttccatgcattttttgttttgttttgttttgttctatacccagcatctccaccaaaaagaaggctgtagggccaatgacgttgttcgcgatgctggaccttgtccccattttcgtcttgtactcggtaagaactttggt

SEQ ID NO: 50 - DNA, 373 bp, Zea mays
  Clone ID: LIB3136-059-Q1-K1-H4
ggaccacattgagggctttgcacctgaggtagcttgggttactaagtcagggaaatctgacctggaagcacctattgcaatccgccccacaagtgagactgtcatgtatccatacttctccaaatggataagaagccacagagacttacccttgaggtgtaatcaatggtgtaatgttgttagatgggagtttagcaatcctactccattcataaggagccgtgaatttctgtggcaagaggggcatactgcttttgcgaataaagaagaggcagatgaagaggttctccaaatactggaattgtacagaaggatatatgaagaatttttagcagttccagtgtccaaagggaagaaaagtgagatggaaaaa

SEQ ID NO: 51 - DNA, 293 bp, Zea mays
  Clone ID: LIB3136-059-Q1-K1-H5
tgagacacccgcaggaaaaaacaccattgcaacatctaccttttcgccacatcgtcgggcattggtgctggtaaagatgccagcagagtacagtgctcgccgaagagcggcgtggcgaccaaaactagatctgtcaagcctgagctgaaggccctctgaagcgcatgcgaagcagccaagtgctgcgattgtctctgtacaaacagaatcgcctgactcttagccgtctccatttccatgcattcttcggtttgatttgtcttggtctatacccagcatcttcaccacaaaga

SEQ ID NO: 52 - DNA, 409 bp, Zea mays
  Clone ID: LIB3136-059-Q1-K1-H7
gtttctatttctggctatttattgttgacagcgttgtataggatatgggaggagacttggcctggcaatggaggatgggctcttgatatcgggggcccgggctggctgtttgctgtgaagaactttgctcttcttgtgctcactttgccgaatcacatactcttcaaccgcttcatgtgggattatgtcagacagacagatgccaagctactgctgacgctacctctcaacttgccttcgattataatgacagacatacttactattcgggtgttaggattgctaggagctatgtactctcttgcccagtacatgatatcaaggcgcataagaattgctgggatgagatacatttgaaataagtcatgtaactttctgaggcttgcactatacattaaggtcttttaaa

SEQ ID NO: 53 - DNA, 369 bp, Zea mays
  Clone ID: LIB3136-059-Q1-K1-H8
ggcgcttggcattgaccttccacctgagaaggtctttttgtttcaaaagtctgcgcttcacaagtgcaacatggctggaaagcctgctgttgttactcgtgtcgtggacagcatgactgacaacctcagacctactcgcgcagaggcaactgatgtggcaaatgcagttcttgacgggagtgacgccattctccttggtgctgagactctccgtggtttatatccagtggagactatttcaacagtgggcagaatttgtgctgaggctgagaaggtattcaaccaagatttatactacaagcggactgtgaagtatgtgggagaacctatgacccacttggagtctattgcttcttcagcagtgcgagc

SEQ ID NO: 54 - DNA, 245 bp, Zea mays
  Clone ID: LIB3136-059-Q1-K1-H9
ggaccacattgagggctttgcacgtggggtgtcttgggttactaatggaaggagacctggcctggaaacacctgttggactccggcccacagggggacactgtcaggttgccatacgttaacaactgggttatactcgagcgaaacttacccttgaagatgcactaatgccgctacgtgtgggaatgtgagttacagactgatactccgctactgatgacgctgccttttatcgtggcctgaggg

SEQ ID NO: 55 - DNA, 122 bp, Zea mays
  Clone ID: LIB3136-060-Q1-K1-A1
acgccatcccgcggtgggagacgtccggcttcgtggagtacatcgagtcggggcacaagcagggggacatgctgctggtggtgccgcaaggcgcgcacgcggtgcggctgggcaacgaggcg

SEQ ID NO: 56 - DNA, 380 bp, Zea mays
  Clone ID: LIB3136-060-Q1-K1-A10
caactatgtccctggccagaagaaggacctgtatgtcaagagtgttcagcgtactggtatctggatgggaaagaaacaagagtcagttgaggatgttccttgtggtaacactgttgctatggttggtctggatcagttcatcacgaagaacgctacactcactaatgagaaggaggttgatgcatgcccaatcagagcaatgaagttctctgtctcccctgttgtgcgtgttgctgttcagtgcaaggttgcttgcgaccttcccaagctagtagaacgtttgaagcgtctggcgaagtccgatcctatggttctgtgtacaatggaagaatctggtgagcatatcattgcttgagctggtgagcttcatcttgagattt

SEQ ID NO: 57 - DNA, 357 bp, Zea mays
  Clone ID: LIB3136-060-Q1-K1-A12
cgatttcggactctctgtcttcttcaagcctggtcaagttttcaccgatgttgttggtagcccatattatgtagctccagaagttttgttgaaaaattatggaccagcagctgatgtatggacagctggcgtcattctttacattctactaagtggcgtgcctccgttttgggcagaaacacaacaaggaatatttgatgctgtattgaaaggtgtcattgattttgattctgatccgtggcctgtcatatctgatagtgcaaaagatcttataagacggatgctgaatcctcgctctgccgagcgcttaacagcacatgaacgtctatgccatccatggattcgtgaccatggagt

SEQ ID NO: 58 - DNA, 424 bp, Zea mays
  Clone ID: LIB3136-060-Q1-K1-A2
gcgacgggttcttcgtgcaattcgaggcaccggcgctgaggaagatatggtttgtgccaagcacaaaagagaagggacggacattgtgcaggagccctgaggccttggacatcggcatccatgaagtgctcccccgtatattcaaggaggcagcttaagcccaataatggaggactgtccatggattcctgatcctgcacagcgcttgctggatgttctccctgggacctgggaggaggaaagagctcgcccgacatacatttgtgtaaccagtggaatcggctacgctggcagacgcagactcggaagatttgatgctgtcactgtgctatgcaatgagcgtgttgtgtttcgagtggcaccgtctcgtggttagtgccgggtgtttcgtttccatttccttttgatatctacctattaaccg

SEQ ID NO: 59 - DNA, 431 bp, Zea mays
  unsure (1)..(431): unsure at all n locations; Clone ID: LIB3136-060-Q1-K1-A3
aatctggctgctgctggtttgtccgtgtctctatttgatgctattgtttctgctgatgcgtttgaaaaattgaagcccgctccggatatattcctggcagcatcaaagagcttaggtgtcgacacaaatgagtgcattgtgatagaagatgcgcttgctggtgttcaagctgctaaagctgcggaaatgagatgtatcgctgtgacaactactctagaggaaatagcgttacgacaaggcagtccctcgttcatacgaaagaatattggagacatttcaattaacgacattttgtatggtggttctaatgctcgccacagtatgtaatacaaacaaagattattttgatctagtaacatatctcttgtatgaaataatggactagaaactattgaacccattacattaattctgatttatcagcctgnnat

SEQ ID NO: 60 - DNA, 342 bp, Zea mays
  Clone ID: LIB3136-060-Q1-K1-A4
ggcgtcggcgcagcagcggtggcgacaacgacgacagcaacagcgggcgcgaaggcgacgaggcagcagcaagaggcaaagcaggataccggcggcggcgcgaggagggccgcgcggggccctgcaggcgcgctgatggaggggtcgcggtgcagccggaagaacgggcgcgggtggcggtgcagccagccgacgctggtgggctacgctctctgccagtaccacctcggcaagggccgtatgcggagcgggagcgccgcgaccggcgggcgcggcccaggccagctcggacgcaccgagcacgcgaagaaaacctccgccgctgcgcccaaggcggacgtg

SEQ ID NO: 61 - DNA, 345 bp, Zea mays
  unsure (1)..(345): unsure at all n locations; Clone ID: LIB3136-060-Q1-K1-A5
ggagagtgtttgcctccttctgagggcagcttggtttgaacctctgatcgtagaggctcacgaggaggctctggaagaagaagagtttctccaccagcagtaccaatacgatgatgacgaagatgatcttgacgaggaatcttattacatgaacaggtccncaagcatccgtattggtaacaggagatggggtgacaatgggtacatcaggggaggcaggaaagaggcgaggccagtgaatactgatgtggctgctggtccatccaggactccgaagaagaaagagaaagccgcatcctcttcggcgtcggtgtcagtgtctggttcggggtcaggatcggggtc

SEQ ID NO: 62 - DNA, 278 bp, Zea mays
  Clone ID: LIB3136-060-Q1-K1-A6
atcgagaagtttaagatatttatttcttacatcttgtgggtgaaccttaaagctatcgatagactcgaagaggctgaggcacttaagatggaaattattccaaaccccaaggaagttgatggtgtgaaagtcctttaactctaaaccgcatctggtgcatctattcggttctttgacaaagcgatcggtattaatgttttctgttcaaggtttttcccattgaatgctacatttgattctgttgcgttggcagtctgatctttacaccattgattata

SEQ ID NO: 63 - DNA, 226 bp, Zea mays
  Clone ID: LIB3136-060-Q1-K1-A7
acgcgtccggtcggcgctggtgaaccggacgggggggttgggcgcccaccccatcccgcggtgggagacggggggcttcgtggagtacatcgagtcggggcacaagcaaggggaccttgttgttgtgggggccgaagggcccccacccgtggcggttgggaaacgaggcgtcgatccggcagcgcctggccgtggcgcgcggcgcctactacgccatttcacgttc

SEQ ID NO: 64 - DNA, 326 bp, Zea mays
  Clone ID: LIB3136-060-Q1-K1-A8
cggacgcgtgggcaagaggctaaagaaaaatcaagtgaaactcctgtttttcttctgtgtctctgtgaatgcaagtggccagtttgtcggccttgctgaaatggtgggtcgtgttgattttgaaaaaacagtagagcattggcaacaggacaaatggactggttgtttccctgtcaagtggcacattgtgaaggatgttccaaacagcttgctgaagcacatcattcttgagaacaatgaatacaagccagtgacgaacagcagagatacacatgaggtgaagcttgagcaaggccttcaagtgcttaagattttcaaggatcatg

SEQ ID NO: 65 - DNA, 431 bp, Zea mays
  Clone ID: LIB3136-060-Q1-K1-A9
gccaagtttacaagttccttcgctcgcaagggtttgtttcatcatatgacactgctcatcaatacagtgacagcgaagaagatgcacataagtgggtcagtcaccgaaaccatcgagggaacatctgcggagttgatttcatatggcttttaaatcctgataagtgcaggaagcccctgaagaccagctggaatgaagctgtttttggtatcattaagtacttcctccaagttgcattcctttccgaggagaatgcatttgcactcctgaaggcagacagcctttatgatcacatcacatattcaagtttctaccgggcattgtgtcagttaggaatggtccatcctgatagactaaaatcagaagaaattgaggagttggggagtgaagctgaccgggatggcgatggtgttattaactacaaagaattt

SEQ ID NO: 66 - DNA, 291 bp, Zea mays
  Clone ID: LIB3136-060-Q1-K1-B10
cttcaagaacgacgctttgctgatagtcaagttacagcaccggaatcttgttcgccttctcggatgcagcattagcggacaggataggatgcttgtttaccagtacatggcaaacatgagcctgcacttcttcctgtttgagaaagacactgcggtgcttgactggcaagtgcggtatcgtataatagaaggcatcactcgaggtttactctaccttcaccaggactcgaggtaaagaatcattcatagagatctgaaggcggccaatgttctactagaaaagggagatga

SEQ ID NO: 67 - DNA, 468 bp, Zea mays
  unsure (1)..(468): unsure at all n locations; Clone ID: LIB3136-060-Q1-K1-B11
aaaaagggaaaaaaaaaaaaaaannaaaaaggtggggataaaaaaaaaaaaaagaaaaaaagagaaagggaaaaaaggggaaggggggaaaaccaaaaaaaggggagaaaaaaaaaaaataaaaaaaaaaaagaagaaaaaaggaaaaaaaaaaagaaaagaggaaaaaagagagaaaaaaaaaaagaaaaagagaaaaagagagaagaagaaaaaagaagaaaaaaaaaagaagaaaaagagaaagaaaaaaaaaaggaaaaaaaaaaaaaaaaaaagaaaaaaagagaaaaaaaaaaaaagaaaaagaagaaagaaaaaaaaaaaaggaaaaagaaaaacagtgaaaagaaaaaaaaaaaaaaaaaaaaaagaaaagagaaggaaaaaaaaaaaaaagaaaagaaaagaaaaaaaagagaaaaaaaaaagaaagagaaaaaaaaaaagaggaaggaaaaaaaggaa

SEQ ID NO: 68 - DNA, 258 bp, Zea mays
  Clone ID: LIB3136-060-Q1-K1-B12
aaaaaaaaaagagacaaaaaaaaaaagagataaaggaaaaaaaaaaagagaaaaataaaaaaaaaaaaaaaaaaaaaaaaaaaatatagaaaaaaaaaaaagaaaaaagagaaaagaaaaaagaaaagagaaaagagagaaaaaagatagaaaaggaaagaaaaaagaaaaaaaaaataaaaaaaaaaaaaaaagaaagaaaaaaaaaaaaaaaggaaaagaaagaaaaaaaaagaaaaaataagaaaaagaaaaaaa

SEQ ID NO: 69 - DNA, 277 bp, Zea mays
  Clone ID: LIB3136-060-Q1-K1-B2
cgtgctcagcttcatcggtgcaacgcgcctgttccaccgccgctgcctgggacctctaattatggcgcgcggaggaaggcgaaggccgcctgtcgccgtgtccccgaaggcgtcctggattcctgggacaggttgttcttggagggataccagtctgacctccgtgtctccacagacggcggcgctgagattccgtcgcattcctgcgttcttggcgtcaaatcccctgtcctgagagctatgctggaggaagctagactgagagatgatgggtttc

SEQ ID NO: 70 - DNA, 454 bp, Zea mays
  unsure (1)..(454): unsure at all n locations; Clone ID: LIB3136-060-Q1-K1-B4
gtggaagatcacgtcgatgggcatcttctgatgactcttatggtagtcagggatatggtgctaaaagatcaactgatagtttcaagaacagcagcttcggcaaccaggccgggggtggttcaagctttcactcgagcttccataacagctctagtggcaatcagttcggtgatactacaagctttcatgccagctatggtaacagcagccagaacaatcagacgggtgacaatccgagcttcccacccagctccagcaacaatcagtccggggatggtctcagttntcatgaaaggttctatggatcacgcggaagggacgagagcacatcanacaatgatggattccgtgctaggagcagaagtcctggcaagcctgtggaagtttccaactggtgattgcatccactacgtgcaatcaacttttgcgatggtgacgaaaccaagtaaaagat

SEQ ID NO: 71 - DNA, 433 bp, Zea mays
  unsure (1)..(433): unsure at all n locations; Clone ID: LIB3136-060-Q1-K1-B5
gnggaattctttagcccctcttcctcttctttttctttccttccgcatgtctttggactcgctgctgttcttttgcttggtacccttggatctctgactccagcccgttccccgaaatttccagttcttgcttcttcctcttggaggaggagggctgcagcctgcaggggccggagagagcaggaggaggcggagacatgggtagcttcgctaagctggcgaggagggcggtggagacggacgctccggtcatggtgaagatacaagaactgctccgaggggccaaggatgtgatgtcgcttgcgcanggagttgtttactggcaaacctccgagtcagctatggataacatcgaaacgacatcagggaaccaatagtcagtaatatggttctgatgatggctttctgagctcgagaacacttctcgaaagct

SEQ ID NO: 72 - DNA, 329 bp, Zea mays
  unsure (1)..(329): unsure at all n locations; Clone ID: LIB3136-060-Q1-K1-B6
gcgtccggaaacacctgatcttgttggctgcctaatanagtacctgttacacttgcgcgagaggcttggtcagcatggtgatgagatgcattgtgacacttgtagtcattttctggataatgaacctgctgccctgagcgtttgtcagcctgcgtcctgatcggggcctgtaatttcttttttgatgagctctggacatggatgggtacaacttcacgcagtgtcacggaaacgggaccaaatgattgaaatttttatactagtagggtgtgactgttcaaagacccattcaggaggtgcaacaacattcttgtggtcggcggttgtaa

SEQ ID NO: 73 - DNA, 283 bp, Zea mays
  unsure (1)..(283): unsure at all n locations; Clone ID: LIB3136-060-Q1-K1-B7
gaaacacagatcatcatcattcatggtcatggctatggcaaactcggcaacgatcctgaccgtcgtcctggctctgatcgggctagcgctcctccgcgccgcagctccggcctccgcgcagaacgactgcggcagctgcccgccaggctactgctgcagcaagttcggttactgcggcaccagcttcgactactgcaatggcaacacgtgccagtccggcccgtgcacggncgggggcgccgggagcggcggcgccaacgtgagtggcgtcgtcaccgacgca

SEQ ID NO: 74 - DNA, 257 bp, Zea mays
  Clone ID: LIB3136-060-Q1-K1-B8
cgcgtccgcggacgcgtgggcggacgcgtgggttgcgcatgtcgcctggattggacccaagaaccgggcgacccgtggcgaccggcgacatggccggcggtggcggagaggaggagtgggagggcccccccggctacgtgctctcgctcccggcggtggcgccgctcctgcccgtcgccgtctcctgcctcgacgccaccgtccggtgcaagatgcgcaaccgatcccgtcttcgtgcccagccgtctggtctggtg

SEQ ID NO: 75 - DNA, 243 bp, Zea mays
  Clone ID: LIB3136-060-Q1-K1-B9
cggacactgccgctcgcgatatttgcgagagagagagagagggcccgagagccgaggacgagtgaagtctggctggcgtgatgctgcttcggagcgcgtcctcgccgctgctcaactgcgggcgcgcgccggctgcggcggcgtcggtcgagcacctcgcggtggtttcgccgttgttgtcaccggcagtggcggcgcctaggcatgggccggtgctgtgccgcgccatgtccgagggggacc

SEQ ID NO: 76 - DNA, 243 bp, Zea mays
  Clone ID: LIB3136-060-Q1-K1-C1
cggacgcgtgggctagcctcccgagccctatctatccttttctcggcacctcgcgggtctcccgtccgccccgtcccgcattcgtatcctctcctcactctcgccgccgccgcttcccctgcgccccgagccaagatgaatgttgaaaagctcaagaagatggcaggtgctgtgcgcactggggggaagggtagcatgcgcaggaagaagaaagcagtccacaagactacgaccacagatgat

SEQ ID NO: 77 - DNA, 442 bp, Zea mays
  Clone ID: LIB3136-060-Q1-K1-C11
tgaaatcgggcgaggttttctctgactcaacccacaagtggtatgaaccagactggtggaaatttggtgatgggaaatcgtacttccggcacgcttctagtgaaatgtttgtcatatcaagggccattgctcagttcatttctataaacaagtctgttctccggacatatgcccatgatgatgttagtgtaggatcgtggatgattggccttgctgtgaagcatgtaaatgaagcaaagctgtgctgttcatcgtggccctcaggtgcaatgtgttcagcgctataacgagcaacaatgcatgctgaggagttttgcaaacatcgtgcctggtggataatacatgcaatatgaggtcgaatacctgaggaacatttcgtttcttctgccattttttgtaacgtcttttggaggaagctcttgcgagccagttcataccgaat

SEQ ID NO: 78 - DNA, 311 bp, Zea mays
  Clone ID: LIB3136-060-Q1-K1-C12
agagaatggtgattggatactggatgttaggttatatgtgcgccctacggtgaccgggcggtaaggcaaagaacttattggcaagtctgagcactattttggggggtggggtgggggggagcgaagaaatataactagctgtaagccacgaacagaagctggctaactaatcgaaagaacgagaggaacttagagatacaaccaaacgcggtgagaaaaaaaaagaaaaaaaagggggaacgggttataggatccaaacttacaacgcgagaatgcgaaggcatagattttcatatagtggcaactaaaat

SEQ ID NO: 79 - DNA, 343 bp, Zea mays
  Clone ID: LIB3136-060-Q1-K1-C3
aggcttttcacttcttgggccttccttgctacatagaagacaatgaaattgtaattttggagctggaatagttctgcaggaccctctcagaaatgaagacttttactgtgccacacgttcacgtactcagtattcatacaccaatgatggacgtcagaagtgcacaagatttctgtgcgtcatttgggcattggtgcatgaactttgaaacaacttgttggtctacatttgtgtgctttttgcaggtactgggctgttcctgagctgagaagatgggcatgtgcagaagcacaatggtgactttaaggatttggcttgataaaaagggaagcgaaaaagacag

SEQ ID NO: 80 - DNA, 235 bp, Zea mays
  unsure (1)..(235): unsure at all n locations; Clone ID: LIB3136-060-Q1-K1-C4
ctgagctgcgcccgttttagcgagcgagacatgnccgcgcgcgtgcgccggcgaggattggattggaaccgtcgcccgtcggtcgtcgatggggatccacctggtggcgttcgtggcggcgaggggcttcctgcaggtgttccaggtgttgggtgccgatgctgtggccagttaacctttggctgccgtttgcgcgccacctgcctgaggactgcgtcgtcttttacgatggcct

SEQ ID NO: 81 - DNA, 397 bp, Zea mays
  unsure (1)..(397): unsure at all n locations; Clone ID: LIB3136-060-Q1-K1-C5
cgtgtgaaaggtgaaaaatactgcggggaaatcaaagttggtctcacattcactcctgaggatcctcgccagcggggtctcccagaggaccttcgtggatggaagcaatcatcttagagctagatgctntaagggtgcaccagagcacagcgacaattcatgcgcttggagccttcagccgtcgagtacttcatgctaatgcagaattcattcgatttggcttcttttgattgtttcagaagacgtgttattagtgagtttcaacaaaaaatagctccatattgctctatatcccgtattggaaattctaaggcccgttgtgattactgcttacaacaagaagttttgcttctagttcccactacgcttttttttttggagttttgagtggaacatc

SEQ ID NO: 82 - DNA, 299 bp, Zea mays
  Clone ID: LIB3136-060-Q1-K1-C7
gtcagaatcagatggcattttttcccctccttccctcgtcgacgaatcgagtttggagccgtggcgtaaccaatcccaataaaaatcgccgcctccaattcttcaacctcggtgacaccagaagcagaggggtcgcgaattgatcgaggctttctgcagcccacttgtccactccaacacaagagccggggcggcggatcggccatggcgccgccacggcaagggggggagcatgcggaggcgggtgttcgtgattcggcgccctggctgcgggcccttcgacacgtgatggcgcgggt

SEQ ID NO: 83 - DNA, 280 bp, Zea mays
  Clone ID: LIB3136-060-Q1-K1-C8
gcaggagctgcctggaggcgggctcctcgtgtaccagagcttctgtgctgctgaagacgctgttgctacctcgcccaaatctgttttccactgctttgacggcgagaacgtggagagtgctcctcctcctatgaagaaggactacaagctggctaatcttctctgctgggaggaggaagcggatgccatggaggagaaggcgggagtgcttgatgagtaagacgggcttctggggtcgatttgcttctgagttgtttattttatatcgtcgcaatttcgt

SEQ ID NO: 84 - DNA, 306 bp, Zea mays
  Clone ID: LIB3136-060-Q1-K1-D1
gcaggtcctgatcgaggcgcacaagtccgacgtgcgcatctacgccagcctcacccgcctccacttccacgactgcttcgtccaggtacggtacggtaccatggccatgccgcatgcacgcatcagcaataatcagctggtgtatataacctgttgccgccgtgccgcatatctctgctgtatgcatgtcttcaattagggctgcgatggctcggtgctcctggacgccgttccgggggtggccaactccactgagaagctggcgccggccaacaacaactcggcgcgggggttcccggtggtgga

SEQ ID NO: 85 - DNA, 437 bp, Zea mays
  Clone ID: LIB3136-060-Q1-K1-D10
cccacgcacactcttctcccccacgagtccggaccccggaggagccaagccatggcgtccacctcctgctgcctcctccaccagtcaaccgcccgcctcggcgcgtcgccgcgcctggccgccgccccgccgcgcagcgcccagctgctcgtctgcaaggcccggaagcaggaagccgccgcggaccagagcgacgtctcgcgccgcgccgcgctcgcccctcgccggcgtcacggccgccgccggcgccaaggtgggtcccgccgccgcggcatacggagaagcagccaacgtgttcggcaagcccaaggcgagcacggagtacatcgcgtacagcggcgacggcttcaagctgctgatcccgtccaagtggaaccccagcaaggagcgggagtttccccggcaggtgctccgctacgaggacaacttcgacgcca

SEQ ID NO: 86 - DNA, 450 bp, Zea mays
  Clone ID: LIB3136-060-Q1-K1-D11
ctgctggctgcttccctctccctccggtgctgagctgatccaccgccatgggggtggcgatggggaggcttcttgggtggaagcaggaggcgcacatcgcgctgtttggcctcggtggcgctggcaagacagccattctgcacaagctcaagctcggccacgccgtcaccaccgggccaacgatagggttcaacagcgagacgcttgaatacaatggcatcagcttcagggtctgggacgtgggtggtcaaggcgaggtagctcatgtatcagcagctgtattgttcttgcattcaaggcgtggtattcgtcgtcgacagcagcgaccgggagtggattcttcgagccaaagatctgctgaacatcattctggacgaggaccagtttaagaatagggatctcgcgctgcttgtgtttgcaaacaaagcaggaccgccgaacgtcatgagc

SEQ ID NO: 87 - DNA, 425 bp, Zea mays
  Clone ID: LIB3136-060-Q1-K1-D12
agatgggcagggttggggagcagctcagcatcgacttcgtcatatccaccggcgacaacttctacgagaacggcctcacgggcacggacgacgaggcgttcgagcagtctttcaccgatatctacacggcgaagagcctgcagaagccgtggtacctggtgctgggaaaccatgactacaggggtgacgcgctcgcgcagctgagcccggtcctgcggaagatcgacagccggttcatttgcatcaaatcattcgtcgtcaacgcagaaatcgtggagttcttctacgttgacaccaccccgtttcaactcaagtactggactcaccctaaggacgatcactacgactggagaggggtggcgcctcgggaaaaatacataaacaatctgctcaaggatttggacggggccatgaagagatcgact

SEQ ID NO: 88 - DNA, 350 bp, Zea mays
  Clone ID: LIB3136-060-Q1-K1-D2
accacattgatgcgctcgtgaggctgagcggaattactgcagagggccaaggtgtgaaggttgaatcctcagcagttccttcagccccaactccagatgttgctgaagcacaggccccagttgctgaggaggacgacgacgatgatgttgacctttttggtgaggagaccgaagatgagaagaaggctgctgaagagcgtgctgcagctgccaaggcttctggcaagaagaaagaatctgggaagtcatcagttttacttgatgtgaagccatgggacgatgagactgacatggccaagctcgaggaagctgttaggagtgtccagatggaagggctgctctggggcgca

SEQ ID NO: 89 - DNA, 252 bp, Zea mays
  Clone ID: LIB3136-060-Q1-K1-D3
cggacgcgtgtacggacgcgtgtatggctgtcgagcatcgaccgactgagactgacccgttcatcacacaccatgacagtgatgcatgaggacaagatcctagttgcgcagaagcagcagcatggatggagaccggagttgcacctcctgcttctccaaccaccctgtagacgctgccggtgccgtcaacgacgaccgctgcaacatcatcaggattgtccaataccgtcacgacaggtgacggcgacccat

SEQ ID NO: 90 - DNA, 377 bp, Zea mays
  unsure (1)..(377): unsure at all n locations; Clone ID: LIB3136-060-Q1-K1-D4
aaatgtagttcttttattctgcatggttgattgactgaacaatcatttgagattctaacctgaagaatactctcgtcatttcttttttggttacttcctacaacagtgtagcgaggaaatttctggaccttgatgcattgctatcacatgcttatgatacatgcaagggccggtttgaagacaaaacacttggggtttcacaaagcactgtgtgttctgatggggtggaattggcatgttgctccagacacatctaaatcacatcactccattccatctgaggaagtaaatgccatgaggggagacctcatgctgtggcctccagttgttgtgatacataacagctcgactggtcatgaggcanaggatactgatgc

SEQ ID NO: 91 - DNA, 356 bp, Zea mays
  Clone ID: LIB3136-060-Q1-K1-D6
ggcatatccaagcgcacacctgagggcactgtttctttgatcggtctggtcatatggtccggggggggaaaactgagtgcaattgtaacctgggaaacgatgctttgcataacatgaagcggaagctacgccgccaaaagcctgcaaaaaccatgcgtattgatcatagtaaaccgtcactacatgcaagacgcgctcgctcagctgagcaccgtcctgcggaacatcgacagcctgttcatttgcatctgacacaactggagcacaacagtgaatcggactctgggctactatgacaccaccccgtttcaacttaagtactggactcaccctaaggacgatcactacgactggtg

SEQ ID NO: 92 - DNA, 361 bp, Zea mays
  Clone ID: LIB3136-060-Q1-K1-D7
gatggagtgcatgcagaacctgaacgtggtgtgccagtactacccgccgtgcccggagccgcaccgcaccgtgggcgtcaagaggcacacggaccctggcttcttcaccatcctcctgcaggacggcatgggcggcctgcaggtgcgcctcggcaacaacgggcagagcggcggctgctgggtggacatcgctccccggcctggggcgctcatggtcaacatcggtgatcttctgcagctcgtgaccaatgaccggttcaggagcgtggagcaccgggtgccagccaacaagagcagcgacacggcgagggtctccgtggcgtccttcttcacacggacgtgaggaggtccgagaggatgt

SEQ ID NO: 93 - DNA, 365 bp, Zea mays
  Clone ID: LIB3136-060-Q1-K1-D8
cggacgcgtgggttatcattgagtggcgagaaagggtacagaaataactcaattagtagttctggtggaaccttcacctttgacaacttatttcctggaagtttctatctccgaccacttctaaaggaatataaattcaatccgtcagcagtagctattgatcttaattctggagagtctagggaggctgaatttcgtgcaaccagagtggcttacagtgccatgggttctgtaacactattaactggccaaccaaaggagggtgtttttgttgaagcaagatctgaatccacaggtttttatgaggaagctaccacggattcttttggtagatttcgtcttagaggacttgtgcctggatcgac

SEQ ID NO: 94 - DNA, 324 bp, Zea mays
  Clone ID: LIB3136-060-Q1-K1-E1
ctctttttcctttttgccggtcccgaataaagagcagcagcgcaagaggtcggtagagcgagaagaaggcaatggcggccgagagcttccttttcacctcggagtccgtgaacgaggggcaccccgacaagctgtgcgaccaggtgtcggacgccgtgcttgacgcatgcctcgcgcaggaccccgacagcaaggtggcctgcgagacctgcaccaagaccaacatggtgatggtgttcggcgagatcacgaccaaggcgaccgtggactacgagaagatcgtgcgcgacacctgccgcgagatcgggttcacctccgacgacg

SEQ ID NO: 95 - DNA, 399 bp, Zea mays
  unsure (1)..(399): unsure at all n locations; Clone ID: LIB3136-060-Q1-K1-E10
ccagcactgaacacttgattgattcagtgggtagctagctaggtgaatgacaatggatcctaccaagttccgtccgtccagcagccacgacacgacggtgacgacgacgaacgcgggcgctcctgtgtggaacgacaacgaggcgctgactgtggggcctcgcggtcccatcctgctggaggactaccacctgatcgagaaggtggcgcacttcgcgcgggagcgcatcccggagcgcgtggtgcacgcgcgcggggccttcgccaagggcttcttcgagtgcacccacgacgtgacgtcgctgacgtgcgccgacttnctgcgcgcgcccggcgtgcggacgcccgtgatcgtgcgcttctcgacggtgatccacgagcgggggtccccggagacgat

SEQ ID NO: 96 - DNA, 101 bp, Zea mays
  Clone ID: LIB3136-060-Q1-K1-E11
tcagcactgaacacttgattgatttattggttttctagctaggataatgacaatggaggctgggaagtttcatacgtccagcatccatgatactactgtga

SEQ ID NO: 97 - DNA, 366 bp, Zea mays
  unsure (1)..(366): unsure at all n locations; Clone ID: LIB3136-060-Q1-K1-E2
cggacgcgtgggcccgtctctttctcatggctgcggcgtcggtgtcgacgccgcanggagtggcggagcggcggggcatcccggcggcggccttcgttgaggacgtcgaggcctacctccgccaggtcgggctcgacgtcaactccgcgctcgcttttctccaggaaaggttgcagcagtacaaaatagtggagatgaagcttctagcacaacaaagggatcttcaggcaaagattcctgatatagagaagtgcttggatattgttgcaacattacaagctaaaaaggatttgggtgaggcactcatagctgatttcgaatcgtccgaggggatctactcccgtgcaaaaattgaggatactgact

SEQ ID NO: 98 - DNA, 343 bp, Zea mays
  unsure (1)..(343): unsure at all n locations; Clone ID: LIB3136-060-Q1-K1-E4
ctcatagtcataaaccactcctgcactctcactcgattcacctctaccagcaactcgccacttcctccctgagaaattaaactgagaaatggcaccgcctcacagtcacagaagcttccgcggctggcagaacgcgagccacgtcgcgcttgtgctggtgtccgtgctgttcctgagcaaggcacgtccctccgcgggcgccaggagcctgctggagctgtacaagccgccggccagcgcgctcctcacgtaccacaacggcgccgtgctgcagggccgcatcccggtgaccatcctctggtacggccgcttcgcgccggcgcanaaggccgtggtcaccgac

SEQ ID NO: 99 - DNA, 293 bp, Zea mays
  Clone ID: LIB3136-060-Q1-K1-E7
cgaaagacactttgcaccatttgggattcatataagtgttaggataaggaagaacggggcttttgtccggtttgaaacactagaagaagcccgtaaggctcttgaagctactcatgctaccatgcttttggatagggtgatttctgttgagtatgcctttagggatgatgatgaacggagtgataggtacgacagcccaagaagaggtggtggatatggtaggcggggggatagcccagcgtacagatcacgttctagtccagactatggtcggccagtaagtcctgtatatg

SEQ ID NO: 100 - DNA, 334 bp, Zea mays
  Clone ID: LIB3136-060-Q1-K1-E8
ggaggggcaagatcgtgcggcggtgcgccgggaagcagcacttgctcgccaagaagaacaccaagcgcaagaagaggctctcgaagatggtgcaagtcaacaagagtgactacgacaatgttacgggtgcactgccctacctcaaagtgaataggaaagcaaactgagatctacgtggtcttcaaaacatcattaagtttcgttccaccaaattgtaattttgtgtatcttccactgtatttccttctcaaaaatactgaggcatcatttcaaagcaagcaaaaaacaactcctggtatcaacagtctagcgatatttcagaatgaggtgcact

SEQ ID NO: 101 - DNA, 404 bp, Zea mays
  unsure (1)..(404): unsure at all n locations; Clone ID: LIB3136-060-Q1-K1-E9
gcagtttataaggagtggcgcttttggcatctatgactatgaacctctcttggattcccttgaagggaattctggatttgggcgtggtgattatttccttgttggctatgacttcccaagctacatcgatgcacaggaccgggtggatgcagcctacaaggataagaagaagtggaccaagatgtccatcttgaacacagctgggagtggcaaattcagtagcgatcggaccatcgcccagtatgccaaggagatatgggacatcaaggctagccctgtcgtgtgaacgagggggttgcgattcaacaccaaacgtagtttcttggggtgctataatagtaagggaagataatgacccacggtgcttgacgcccacttgcgttgtangcatggaacgggggcac

SEQ ID NO: 102 - DNA, 296 bp, Zea mays
  Clone ID: LIB3136-060-Q1-K1-F2
gcaccggccgccacaccaccccgaccggaccctccacaacaatggccaccgtcctgggcagcccccgcgcgccggccttcttcttttcgtcgtcctccctccgcgccgcgccggcgcctaccgccgtggcgctgcctgcggccaaggtgggcatcatgggccgtagcgccagcagcaggagcaggctgcgcgcgcaggccacctacaacgtgaagctgatcacgccggagggggaggtggagctgcaggtgcccgacgacgtgtacatcctggaccaggccgaggaggacggcatc

SEQ ID NO: 103 - DNA, 383 bp, Zea mays
  unsure (1)..(383): unsure at all n locations; Clone ID: LIB3136-060-Q1-K1-F3
tttcaggtccacagaatcacgaaagttaacatggacgaagttctctcgaaggcagaaaatgatcttgctgcagttgttaatcaatacattgcaaaactagtaaaagaattacaaggaactgacttctggaaactcagaagagcctacacctttggtgtacaagaatatgtcgaagctgcaacactctgtagattttgcaagactggcactctattaagccttgctgaaatcaatgattctttactagcactaagtggtcaatctgttgagcccttacagttaaatgtgcttgactatcttttaggggttgctgatttgtccggagagcttatgangctcgcaattggccgtatatctgatggggaagttgatatgcaaaacta

SEQ ID NO: 104 - DNA, 442 bp, Zea mays
  Clone ID: LIB3136-060-Q1-K1-F5
cttagtggggatggacttcgtgttgcaactttttcttatggtaatatatttcgtgttttcggtcgtcctccgggaagcatagaggcaacaactttggaagcaagtaggaacccaatgaggcgtcagattgcaaatccagcaaggcccacacggacactaacttcttttgcccgtggtgttcggagaggtggagaaaatcaaggcgttgatgctaatgggaattcactcgacttctcaacgaagctggtccacctcgcatggcacccgaccgagaattctattgcatgtgctgctgcaaatagcttgtatatgtattatgcgtagagaatgccctacagaaaatttgtttttttttgtggcttgctctcggtaaaggcccaaggctctttaattgcaaccagagagatggtgcaggacattgttgtcacgtcaccccttgggg

SEQ ID NO: 105 - DNA, 352 bp, Zea mays
  Clone ID: LIB3136-060-Q1-K1-F6
gccaaagcaagttgctaggtcctttgaaccagcaactgaagcttcctcgtctcatcatcgagaccagtaagcaacatggcggctaatctcaagtgggctcctgttctagccctcctcgtcgtcgttgctgccatggttggcaccaccagcgccggcaacatcgcagtgtactggggccagaacggcaacgaaggcagcctggcggacgcctgcaactccgggctctacgcctacgtcaacatcgcgttcctcacaaccttcggcaacggacagaccccagttctcaacctcgccggacactgcgaccccggctccggcagctgcaccggccagagcagcgacatccagacct

SEQ ID NO: 106 - DNA, 202 bp, Zea mays
  Clone ID: LIB3136-060-Q1-K1-F8
gtgcattttcgctgacgtggatggttgacatctaagggctagtttgggaacatcaggttcccaaaggaaaatgaactaatttcccttggtaaaatagaaatcccttgagaaaattgggttcccaaactagccctaagtgttcattttaaagaaaaagtatgtagaggtacatacccaacaatgtgacaaggtacaaaagggg

SEQ ID NO: 107 - DNA, 388 bp, Zea mays
  Clone ID: LIB3136-060-Q1-K1-F9
attcttaagagatcgagcttcttttgcaccacaaggtcgaggatgtcttgcagctgcggatcaagctgcggctgcggctcaagctgcaagtgcggcaagaagtaccctgacctggaggagacgagcaccgccgcgcagcccaccgtcgtcctcggggtggccccggagaagaaggccgcgcccgagttcgtcgaggccgcggcggagtccggcgaggccgcccacggctgcagctgcggtagcggctgcaagtgcgacccctgcaactgctgatcacatcgatcgacgaccatggatatgattattatctatctagcttgtggtggtggttgaacaataataaacgaggccgagctggcttgcatacatatgtattgtgtggtgtgtg

SEQ ID NO: 108 - DNA, 304 bp, Zea mays
  unsure (1)..(304): unsure at all n locations; Clone ID: LIB3136-060-Q1-K1-G1
gccaggtcgccaagaaggccagaaaaaccaaaaaccaacccggccgggggctcgggaccggaaacggacaggacccaaaatctcagatccttcctgcccgcccgcccgtgcccgtcgacgcgtcgttcttgccggccgcgccccacctttcgcctctnctnctncaggggaatcggatacgccacaggctgcgcgatggtgctgtgggtcttcggctacggctccctcatctggaaccccggcttcgacttcgacgacaaaatcctcggcttcatcaagggctacaagcgcacctttaatctcg

SEQ ID NO: 109 - DNA, 363 bp, Zea mays
  Clone ID: LIB3136-060-Q1-K1-G2
gttggataacacccaaggagctcggaactgtaatgcaatcactgggtcagaacccaaccgaggctgagctccaggacatgatcaacgaggtcgatgcggacggcaacggcaccatcgacttcccggagttcctcaacctcatggcccgcaagatgaaggataccgactctgaggaggagctcaaggaggcgttcagggtgttcgacaaggaccagaacggcttcatctctgcggcggagctccgccacgtgatgaccaacctcggcgagaagctgaccgacgaggaggtcgatgagatgatccgcgaggccgacgtcgatggcgatggccagatcaactacgaggaagtcgtaaggtcatgat

SEQ ID NO: 110 - DNA, 391 bp, Zea mays
  Clone ID: LIB3136-060-Q1-K1-G3
atgaacaagcctcctgaaatgatatctggcaatatgacagcagccatgtgtgtgtattctggactctttatgaggtttgcatggatggtacagccccgaaattatttgcttctagcatgccatgcttccaatgaaagcgtccagctctttcttctccaggtacccctgagacctagcccagcggcctgctgccgtcttcttccgccgccgtcttcgtccgtagagcagagcacatcagagagcggggaggaagaaaaagcgatcgatggcgtccaactacgtggacacgacgggcgaggagggacggttccacggccctcacagccacagcaccagcacgaccccgacgggcggcgcggcggcggcggcatcgccgcgcaactttcggcgc

SEQ ID NO: 111 - DNA, 339 bp, Zea mays
  Clone ID: LIB3136-060-Q1-K1-G5
gggaacttcaccaaatacaatgctggattgttgttcactcatgaagaccttatcgcatcccttaatatgaacaacaagggagacaaccttactggagcttactaccacaaggtgagcgaattgacaaacacagctgttggggcagagcttacccacagtttctcgaccaatgaaaacaccctcacctttggcgggcagcacactctggacccactaaccgtcttgaaggcacgcatcaacaactctggcaaagccagcgccctgatccagcatgagtggaggccaaagtcgctggtcaccatctcggctgaggtcgatacaaaaaccattgagaagagc

SEQ ID NO: 112 - DNA, 290 bp, Zea mays
  Clone ID: LIB3136-060-Q1-K1-H10
ggaaacggggggggacggacgcgaccgcccacgcgaccgggacggggacagattaggctcttcaagaccttactaacagctgtgaggtgtaacaaaaatcttcagggggatttgagaactcgaatatatttgcacataaaaaacctgttgctgtatctgtgtcattgctttgacttcttcatcattggcttatatatttccgtgcactaacttgacttgccattcttgtggtagcatcttgacaatacttttagaagagacccgaccaactatgagggcgtgtataaaca

SEQ ID NO: 113 - DNA, 324 bp, Zea mays
  Clone ID: LIB3136-060-Q1-K1-H11
ggcggcggcgatggggatcggtgagcacttcgagggcgtcaagcagcactgggcgagcaacttcgccttcctcgactacttcaagaaggtctacggccgcgccgagcccctccccaagtggtccgacgccgacgtcgacgagttcatcgcctccgacccggtctacgggccccagctcaaggccctgcgggagtcgaggaagttcgcgctcgccggggccctcgtcggcgccgcccacctcggcggcgtcgcgctcaagtactccaaagcgccgcacggcgtcctgctggcgacgggcttcggcgcgatcaccggcgccgtgct

SEQ ID NO: 114 - DNA, 297 bp, Zea mays
  Clone ID: LIB3136-060-Q1-K1-H2
gggagactgagccctataactgtttgatgagtttttataaaataggacccctgttggagtatgttggagtatgtttctggtgttagggtcctatatttcaaaataggatcctatttaggactcttgttggagatgctctataggtgattatatcttgggccttgacttaaccggtcattgggactaacttcaactgtacatagtatagaggtgttcatcactggtgggaatctacatgttgcggctcgtggcgcgtgtaaattatcatacaagtggacagcacgtttggtgcaatgc

SEQ ID NO: 115 - DNA, 381 bp, Zea mays
  unsure (1)..(381): unsure at all n locations; Clone ID: LIB3136-060-Q1-K1-H3
gcacagcaggggtgcccggcggccttctattctaccccggccccacattggcctgatgctgctgccatgtagcccagcgctcccccctcggcttcaccggcggcggcggcaacgacggtgaaaactacatcgggtgctagctccgacggtggtgcgtgccctgttgacgatagggcgcgcggggcgcgggcagcttgtaggcgttcgatcggccatgtagggcaactatacatctttggcaggtctccatcatcctccgttggagaagatggtaatggagtgcgtgtgtatgtatgtgtatgcccagngcgcgcgcgcgcggctctgggcgagtcacagtagagatgcaatatcatgtatccagtatctttcttacaacac

SEQ ID NO: 116 - DNA, 134 bp, Zea mays
  Clone ID: LIB3136-060-Q1-K1-H4
cggacgcgtgggcggacgcgtgggcggacgcgtgggtaagatctgccgcggttccattttctggtcgcctcctccgccactgccatctccctcctctgtcctccgaaccactcgtcttcgtttagccgccgacc

SEQ ID NO: 117 - DNA, 362 bp, Zea mays
  unsure (1)..(362): unsure at all n locations; Clone ID: LIB3136-060-Q1-K1-H5
cggcagtcggcccgcaggctaccattacagcagcagccagagccatcccctttcctcgctacgcttcgcttcctcggcgccgattcctcctcctcctcctccaccctcgtccgtcccgttccggcgcgcgagctcgcccgagatggcgaacgcgagatcgggtgtcgctgtgaacgatgagtgcatgctgaagtttggcgagctgcagtcgaagaggctgcaccgcttcataactttcaagatggacgacaagttcaaggagatagttgtggaccacgtcggngatcgcgctaccagctacgatgacttcacaaacagccttcctgagaatgactgccgatacgccatctatgatttcgact

SEQ ID NO: 118 - DNA, 354 bp, Zea mays
  Clone ID: LIB3136-059-Q1-K1-D4
gaccctgaaaggaatcacacaatattatgcttttgttgaagaaaggcagaaagttcattgcctgaatacacttttctcaaagcttcaaattaatcaatccattatattctgcaactctgttaatagagttgagctgctggctaaaaaaataactgaactcggttattcatgcttctacattcatgctaagatgttgcaagaccacagaaatcgagtatttcatgattttcgtaatggtgcttgcagaaaccttgtgtgcacagatctgtttaccagaggaattgatattcaggctgttaatgtggttattaattttgacttccctaagacatctgagacatatttacacaaggt

SEQ ID NO: 119 - DNA, 337 bp, Zea mays
  Clone ID: LIB3136-057-Q1-K1-B6
cgttcgtccaccagagacaacaatggccatggagacgtgcttcagagcgtgggcgctgcacgcccccgctggcagcaaggacaggctcctcgtcggcaacctggtgctgccgtcgaagcgggcgctcgcgccgctgtccgtgggccgcgtcgccacgcgccggccgcggcacgtctgccagtccaagaacgcagtggacgaagttgtggtggcggacgagaagaactgggacgggttggtgatggcgtgcgagacgccggtgctggtggagttctgggcgccgtggtgcggtccgtcccggatgatcgcgccgggaatcgacgagctggccaaggac

SEQ ID NO: 120 - DNA, 360 bp, Zea mays
  Clone ID: LIB3136-057-Q1-K1-B7
accggcaccgcggcggcagttcagcatggtggcagcatccgtagccgagcgggcctatgaggcggcgacgcggtccgcgctggtggcgctggagcgcaacctcattccggacgcggtgacccggcgcctgacgcggctcctgctcgcgcagcgcctccgccagggctacctcccctccgcgccgctccagctgcagcagctcctccagttcgtccactctcttgaagagatgcccattgccattgaaacagacaaagctaaagtccaacactatgagttgccaactacatttttcaagctagggctgggaaagaattttaaatacaggtcccgctattttccttgtgaattaagcaccct

SEQ ID NO: 121 - DNA, 279 bp, Zea mays
  Clone ID: LIB3136-057-Q1-K1-B8
cctgttaattggaccaatgatactctgcaattctcgaagttagagcacagcaatgttgataagctttcaatatcaaacataccagttggatcaaaaaggtttatagcccacttggcaatggcgtatgttttcacattttggacctgctatgtactgttacgtgagtatgaagtagttgcaaagatgagactgcgatttctttcatcagagaaacgcagaccagatcagttcacggtccttgtgcggaatataccgcctgatccagatgaatcaattagt

SEQ ID NO: 122 - DNA, 418 bp, Zea mays
  unsure (1)..(418): unsure at all n locations; Clone ID: LIB3136-057-Q1-K1-B9
agctagctcttgtcttgtcactgagtgagcagcagggagctgtctagctagcctagtacaggtggagtggagtgtgtggtggagtgcaaaccaaatcaaacgaagaaaagtgggagcgaggaggaagaaaagaagaagacgacgacgacacccaccaccagcagcaatcagcnatcagctgaacgtattgtcgattaagtattgtttccatcacaaggactgcgagcggcagcgtctgtaccgtcgcttctgcgccgccctggtgggcgtcatcgtgctcgtcctcctcatcgtgctcatcgtctggctcgtcctccgccccaccaagcctcgcttcttcctcaacgacgtgagcatcgtgtgcatcaacgtcagctccgcctcctacctcaccgtcaccatgcaggccacgctggcg

SEQ ID NO: 123 - DNA, 384 bp, Zea mays
  Clone ID: LIB3136-057-Q1-K1-C1
cagagaccagagcctccggaaaccgcagcctcttggcctttgcttcctcgcttatctggcgtacaggctaagctagagagggagggagggagagctcgccgtttccgacccatcggcagcgccggagatcctgaaaagagtgccagctgagtacctcctgctgctcgaattttctcgtgggacagacaattttcagataaggacgtcagggagcatcatggacgacagggagcagatgaggatgaccgtcctgaaccaagaacaggtcttcagacatcaggtacacgagctgcaccggctgtaccacgtccagaagcagctgatgatgcagcaagcacacacgcctgctccggcgacccgtgctccagcagtgctcgacgacgc

SEQ ID NO: 124 - DNA, 348 bp, Zea mays
  unsure (1)..(348): unsure at all n locations; Clone ID: LIB3136-057-Q1-K1-C10
gaaaactctaaccttaactnggttgggcgtgcatatatataagtcgagtacttgggccaagcccattacactgagggtatgcaagtaaatacacatggactagccccgaaatactaacaatactctcacgattaccactggatgggcacatactattattagaccatcttnantcatgggaggggatttgcatggatttgggttgtccnacnagcacattgtgggaatacaagcatgtaacccgtcatttcacatgcataggtaagcatgtaaccaaactgcattattggaatatggaaaatctaggctaggaacttattctgaatacaactatccgaatctatacat

SEQ ID NO: 125 - DNA, 413 bp, Zea mays
  unsure (1)..(413): unsure at all n locations; Clone ID: LIB3136-057-Q1-K1-C11
atggctcactaaggaatgttcttttaaggaaagacagatatgtgtagaatgcttgatcgccggagaaaacttacaattgctatggaagcggcgtttgggatggaatacctgcactccaaaagcatagtgcattttgatctgaaatgcgacaacttacttgttaacttgagagatcctcagaggccaattggctggtgtggagactttgggtnatcaaggatcaagcgcaacactctggtttctgggggtgtccgcggcactcttccatggatggcaccagagctactgaatggcagcagcagcaaagtctctgagaaagtggatgtgttctcttttgggatagttttatgggagatcttgactggtgaggaaccgtatgcaaatatgcattgtggtgctatcatagggggtat

SEQ ID NO: 126 - DNA, 315 bp, Zea mays
  unsure (1)..(315): unsure at all n locations; Clone ID: LIB3136-057-Q1-K1-C12
ggcagatgctggggcgctccattccccagcaaaggttatccgctgcatgcccttatttgccgagcacttcaggtgggggcgccaggaggatgcacacgatttcctcccctatgttggagatgcctgtcacactgctgacctccgcatgcgcaaggggttacttgcagcagntgtcattggatattgttggtgaagatttaagtggncnnggtgattgtgtgcttatgagggagacataccgcgggggattactgagtcaagtgaagtgcctacagtgccagggagaatgtaacaagactgatgagataatgcata

SEQ ID NO: 127 - DNA, 423 bp, Zea mays
  Clone ID: LIB3136-057-Q1-K1-C2
agctcccacatgcagcttggtggtcctaagatcatggcgactaatggtgttgtccacctcactgttccagatgaccttgaaggtgtttccaatatattgaggtggctcagctatgttcctgcaaacattggtggacctcttcctattaccaaacctctggaccctccagacagacctgttgcttacatccctgagaacacatgcgatccacgtgcagctatctgtggtgtagatgacagccaagggaaatggttgggtggtatgtttgacaaaaacagctttgtggaaccattggaaggatggccaaaaccaggggttcctgccaaaccaaacttggaaggatttccgggggcctcataacttgggaaaccccaaccattgtgccaatcattccttgttatccaagtcaacttggtttccatt

SEQ ID NO: 128 - DNA, 281 bp, Zea mays
  Clone ID: LIB3136-057-Q1-K1-C3
cggacgcgtgggccgaggccgtggcctacgccgaggcgcatcacggcatcggcaagaaggacgccatcaacaacatcctgttcgtgctcggcttcaacgccttcggcggcttctccgtgttcctgcccttcctggtggccaaggtcggcggcgccccggcgctgctcgagcggctgcgggacgaggtgcggcgcgccatggtgggcaaagacggcgagttcgggttcgccaccgtccgcgagggcatgccgctggtgcgggcgacggtgtacgagatgctt

SEQ ID NO: 129 - DNA, 162 bp, Zea mays
  Clone ID: LIB3136-057-Q1-K1-C4
cggactcgtgggccgaggccgtggcctacgcttaggcgcatcacggcatcggcaagaaagacgccatcaacatcatcctgttcgtgctcggcttcaactccttcggctgctttttcgtggtcctgcccttcctggtttccaaggtctttttgtgcccctgct

SEQ ID NO: 130 - DNA, 356 bp, Zea mays
  Clone ID: LIB3136-057-Q1-K1-C5
cggacgcgtgggtgagccctgtcccagcattttaagaggatttctcacggaagaagcttacttcattcgacaaacttatagaaagaacatgtagttctataaggaatgtaaggcttcattgtgacgctgatctaaagccaagtggaggtgttggaacttctggaatggcaccagatgcagctgagatacagcttaaaagccccaactggttgtttggtcaaaggaagcatacggagacaatttcaaccgcaagagttgccccagttgaaaacgtgaacgaggggaacagagacgagtcaaatgtgtccctttgtgggggactaatttggctatccttcttagttggatcatgcgag

SEQ ID NO: 131 - DNA, 276 bp, Zea mays
  Clone ID: LIB3136-057-Q1-K1-C6
acacactatagaccacagccagtcagccacatcactagctagctgtgcagaggcaatggcgtccaaggttgagctggtggtggaggtcaagtccccggctgacaagctgtgggcggcgctgcgcgactccacggagctgttccccaagatcttccccgagcagtacaagagcatcgagaccgtcgagggcgacggcaagtcggccggcaccgtccgccttctcaagtacaccgaggcggtgccgatgctgacgttcgccaaggagaagcttgagac

SEQ ID NO: 132 - DNA, 423 bp, Zea mays
  unsure (1)..(423): unsure at all n locations; Clone ID: LIB3136-057-Q1-K1-C7
gcctgcagcgccagcgcagcgcctctctgctactgtgctggctgacgccggtggggtgtgagcgaactgcgagctgctgccacccctgctgccgcggtcgaccgccggccccggaccgagatggacgctcggtgggcggtgctgctcgcgctgctggtcgccagcggcggcgtccgtgtctgcgccgccgctggggccaagggcgccaactggctgggcgggctgagccgcgcgtcgttccccaaggggttcgtgttcgggacggcgacgtcggcgtaccaggtcgagggcgccgcgtccaccaacggccggggcccctccatctgggattcattcgcgcacgtcccaggaaatatngcagggaatcaaaatggagacgttgcagtggatcaataccatcgctacaaggaagacgtccatctc

SEQ ID NO: 133 - DNA, 265 bp, Zea mays
  Clone ID: LIB3136-057-Q1-K1-C8
gatcagaggaggcatccgtgaccaaagatcgagtagccaagaagaagagagatgaacgccgacttcggcgcgcccaaggagctcgcgggaggcctgcagcagcggcgggccctctaccagccccgcctcccgccatgcctccagggaccgacggtaagggcggagtacggtgacgcgaccacaaccatagatcccacctgtgcccaagccgtcgcgcaggccttcccgcacacctttggccagccgctcgtcagcttcgtcgcgc

SEQ ID NO: 134 - DNA, 134 bp, Zea mays
  Clone ID: LIB3136-057-Q1-K1-C9
cgacccactcgtccatgacatgcgtttactgcccggcttttcgttttgcctggcatggaaagctccggggcgcaagctaacagcaagaagcccgacctatcctacaaactggttggtgccataaacgacgcccg

SEQ ID NO: 135 - DNA, 375 bp, Zea mays
  Clone ID: LIB3136-057-Q1-K1-D1
atcaagactgcgctgatgcatgcttgtcggcatgggcactgggaggtggtgcagatgcttcttctatttagatgcaatgttactagggcagattacttgagtggtcgaacagcactgcattttgctgcacatgatggatttgttcggtgtattagacttttagttgcagactttgtcccgagtgtggccttggaggatattgcttcttctgtggtggatggtggtgattgccagacaaacagtgggagcagtcctaattcatcgtcggggcagaagtttaatgaatcggcccgtgtgaagtacatcaacaaacctgcagatgggggtgttacaagactttacattgcaacattgaaccggcacttaaattggatt

SEQ ID NO: 136 - DNA, 165 bp, Zea mays
  unsure (1)..(165): unsure at all n locations; Clone ID: LIB3136-057-Q1-K1-D10
cgcacatatttgctagccccacatattnatttctggacacaaaatattgaactgggcctgggggccctttttagatccacaacgtggccttcaaaataacagtcanaggaggctacctgacggtgaacacgcttgtggccgtggtgcttccatttctcggggact

SEQ ID NO: 137 - DNA, 448 bp, Zea mays
  Clone ID: LIB3136-057-Q1-K1-D11
atcttcagagagaacaagggagtaatgctgggacaccaagaagcccctacagaacagctgctgggtctgcttcaccaatgcagccaaacaaccaatcaaagccaaagcacaggtcaactggaatgcagactccagagaggagggcatcttcagaggggcttggccagcatacacctggaaggagcaggatgaagccgggtggctatgagcctgaagaagtggctgtaccaccctttggcgaatgggatgatgcaaatgcagcatcaggtgaaaagtacactggtatcttcaacagggtgagggatgataggttgtcacctacctcttctgctaggcaaccgtctactactcgtagtgaagagaataaggtgcaacagaaatgttcttgctgcatactttgagaaaataaggacaggatctcgaagagttctagacaacttcctatgct

SEQ ID NO: 138 - DNA, 444 bp, Zea mays
  Clone ID: LIB3136-057-Q1-K1-D12
gtggagagaaacttgtaactgctttgtcatcagctcagggacatcgagctgctggtcgcagtattgtgattgactggcagcagcaatctggttatctgtatgcatctggtgacatgtcttccatcttggtatgggatcttgacaaggaacaacttctcaacaccattcagtcaactgctgatgctggcattggtttcgtggctgcatctcaggttcactccggacactttgctgctggttttgctgatggctctgtcaggatatatgatgttcgctctcctgataggttcgactatgtggccaggccacatgccccaagaacagaaaaggttgtgagcatatgatttcaacctgggtttgatccatacacgattgtaagtgcatctcaagctcgagacatccaatttcttgatgttagaaaggcagcataaccctacctgacta

SEQ ID NO: 139 - DNA, 345 bp, Zea mays
  Clone ID: LIB3136-057-Q1-K1-D2
accaaggaggttgatgttgaagtgccagctgatgaggatgagacaagtgaagaagaggattcgtccccagaaactacagaggaagagacagaagaagatgaagagaaagagaaaaagcctaagacgaagacaataaaggagactacttctgaatgggaacttctgaatgatgtgaaggctgtatggcttcgcagcccaaaggaggttactgacgaagaatactcgaagttttaccactcactagccaaggacttaagtgatgacaagcctgtgggtggaagccacttaactgttgaaggaaatgttaagtcaaaagcttggtttttaattcaaccaaaggttccg

SEQ ID NO: 140 - DNA, 385 bp, Zea mays
  Clone ID: LIB3136-057-Q1-K1-D3
gtggtttggcaggagctcggacttggcccgtcagtgcctctccacgttgtcctccaagactgggtcagacacgccgacgggaagctgagcttcctggggttcatcaagctcttgcacggggtctcgtcgcgctcgatcccaaaggcctagcattgtacaccatccatccctgcatatctatatccatcgaccgagggagacgagtgatggctgagccagtctctggctgcaggtgcgtgcgtgtgtgttcagtgttctgttccacggtggacggcctgaacccaaacccaaagaccaagaaaaatgcctgacaatagtcctgtttaaaaagagtaaggcagcccagggtctggggcctgtgcacaacttgtacaacatccttggc

SEQ ID NO: 141 - DNA, 79 bp, Zea mays
  Clone ID: LIB3136-057-Q1-K1-D4
ccggacgaccacgcgtccgagcatttcacgagcttggactaaccccttttttgcctttccaccgagccctacaacactg

SEQ ID NO: 142 - DNA, 261 bp, Zea mays
  Clone ID: LIB3136-057-Q1-K1-D5
atcttgagtctcgccgccgcaagcttgtgtatggtgtaaccctaaccctaaaacacttaccttcgcctccagcaccacgcttccatggaggggcgcggaggctaagtatagccaacctctacaccatatccccatggattgagcggattcccaaggcatgggtacaaaccctcacctgcaagagctggccgcttcggcggtggcggcttctgaaccaccaccgcgggcgcgcgtggtgcggatcctagtgcacgatgctga

SEQ ID NO: 143 - DNA, 293 bp, Zea mays
  Clone ID: LIB3136-057-Q1-K1-D6
cggacgcgtgggcggacgcgtgggcggacgcgtggggatgggaccaaactattctatttccacagcttgtgctaccagtaacttctgtatccttaatgcagcaaaccacatcagaagaggcgaagctgacgttatgctctgcggtggttctgatgcacctcttatcccaatcggattgggaggttttgtggcctgcagagcactttcacagaggaacagtgacccaacaaaagcttctcggccttgggacatgggacgtgatggttttgttatgggggaaggggctggtgtcc

SEQ ID NO: 144 - DNA, 341 bp, Zea mays
  Clone ID: LIB3136-057-Q1-K1-D7
ctccgctgggccaccagctttgactcgccgccttccttcccctccgctactgctcctccccaccccactcccccgcaggagcggcggcggcggcggcgaggtcgtaccccacatcggcgagcggcggcggcaccgccggaggcaaaggcaagatgttcgggcgcgcgccgaagaagagcgacaacaccaagtactacgagatcctcggggtgcccaagtcggcgtcccaggacgatctcaagaaggcctaccgcaaggctgctatcaagaaccacccccacaagggcgggtgaccccgagaagttcaaggagctcgcacaagccctatgaaggttttgagt

SEQ ID NO: 145 - DNA, 452 bp, Zea mays
  Clone ID: LIB3136-057-Q1-K1-E10
cacacaagatgagagccgagagctagctacctagcgcgcgatggcgatgtccgcttccaagatgatggcggtcgccgcccctgcccttctagccctggtcctggccccgtcgaccggggaagccaggaacattaagaccaccaccaccaccaccgaaaaaaaagacgattccgttggtgctgatttttacctttctagtttttgaccaactaggaggcggcccgtccccggcgtccggtggcctccccggcacctcgtcgggcggcagcagcattccagcgttcagcatgccgggcagcggcagcagcctccccggcgggtcgttcttgcccggcagcagcggcagcatcggcagcatgcccctcttcagcggcggctccccggccttcagcggcttcggcggcatgcccgggtccaccgccgacggctccgtctccgtcgtccccgtgcac

SEQ ID NO: 146 - DNA, 169 bp, Zea mays
  Clone ID: LIB3136-057-Q1-K1-E11
cacacacgatgagagccgagagctagctacttatcgcgcgatggcgatgtccggttccaagatgatggcggacggcgacgctgatctggtagccctgggcctggccgcgtacaccgcgagcgctaggaacattaaagatactacgacgactaccctataagaaggacga

SEQ ID NO: 147 - DNA, 131 bp, Zea mays
  unsure (1)..(131): unsure at all n locations; Clone ID: LIB3136-057-Q1-K1-E12
tcgcacacatgaagagagccantagctatctacctatcgcgccatcgcgctaaacgggttaaacaaaaaggcgggcggtcaacatgaccagacttccttgacaaaaaaaaatcatttcatggaaacttact

SEQ ID NO: 148 - DNA, 418 bp, Zea mays
  Clone ID: LIB3136-057-Q1-K1-E2
ggatcagaaagaaggggcctcgtaagtgttgaggccaagaagaaaaatggacagtatgacatgaagctactagctgttgacataccaatggcatcaggtcctgaccagcggctgttcctcgtcggtgatgaacaagagtacaaggtgggcgggggcttgatatctgagctgcgagacccgatcgtaaaagctatggccgcggagaaggagtttgactatcttgacgagagagaggatgaggaggacgagcggagggagcgtgaggagcgggaacaagaggaagcggaagctttgaggcccaaggaggaaaggctgccccagccggttaaaaaccgtagccggcggaagaagcctaaaaccctgaaaaaagttccttaccccaccgtccggacctacctttcaaccttgcctgggccat

SEQ ID NO: 149 - DNA, 354 bp, Zea mays
  Clone ID: LIB3136-057-Q1-K1-E3
gattttatttgagttggacggttacatactaaaaaatcgaaataggctagtttggtcggtgtgcgtccatgtgctgtcccagtggagcagcagcagtgaggcgtacagcatttgctgaaggtgaaagcagtcttacagatctgtagaaaatgttgtgcatatccatgttagcagccgaactaggttatttggtgttacagtgctacacatgggggggaaggaaactaaaaagcggattggggctccgggtttaataggtgaccggcatccggttggtggttaaattggggtacccaaacccagaggtgagacctggattggtttggaccggcggtggtttgggaattggcgggg

SEQ ID NO: 150 - DNA, 220 bp, Zea mays
  Clone ID: LIB3136-057-Q1-K1-E4
gattttatttgagttggacggttacatacttataaaatttatataggctagtctggtcggtgtgcgtccatgtgctgtcccagtggagcagcatcagtgaggcgtacagcatttgctgaaggtcaaagcaggcttacagatctgtagaaaatgttgtgcatattcatgttagcagccgaactaggttatttgttgttacagtgctacacatgggggggaa

SEQ ID NO: 151 - DNA, 296 bp, Zea mays
  Clone ID: LIB3136-057-Q1-K1-E5
gtggatgctcaagcagcagctcaaccaggacgacgaccctttccagctgcctggcgtcgccatggacaactgatacaccgaccccttcaagaagtggatgctcaagcagcagctcaacgaggacgtacgacgaccctttccagctgcctggcgtcgccatggacaactgatacaccgtaccgtcgtctctgtttgcgtttctgtcaagtgtgcatggaataatactgtaactgtgtttcctgccgggcaatgcactgtgatatgatgcccaacgaaataatggcgcttttattttt

SEQ ID NO: 152 - DNA, 388 bp, Zea mays
  Clone ID: LIB3136-057-Q1-K1-E7
ggggacggagagcagagagcttcagcgcaactgtgctcaatcgtttcttcgtctttagttggtgcttggtctccctccgtcctctgtttcccaaacagaggtgtctcagctgactcttttgcttgctagcaaaatagcacactctctctctagagctgagcaccaccttgctgaaggcagctagctagcgacgaccatggtctcctcggacaccatccgcacggccatcggcgtcatcggcaatgggaccgccctggtgctcttcctctccccggtgcctacgttcatccgcatctggaaaaaggggtcggtggagcataactcgccgatcccgtccttgccaaccctgctgaactgcatgatgtgggtgtggaacggcctgccgttg

SEQ ID NO: 153 - DNA, 327 bp, Zea mays
  unsure (1)..(327): unsure at all n locations; Clone ID: LIB3136-057-Q1-K1-E9
gggagaacatcagctatcagnatagattcttaactacccaagtgggctgattcaaccaagacgattcacccgtatatagaatatgaagaactatccaaagcagaaacttctgaacaatgtgcttacacatataacagaacactagaagaatacctttgacaaggacgtatacccagttgatgggtaaatttcagtgcttattgtttcanctngaaaagatgatctgtaacacatagtgtgattcaggtaaaacaacctgtgatgcatagcgaaagtgcacacgtcatacaacatatgattgaccaaaataatctacaacaaaatccc

SEQ ID NO: 154 - DNA, 422 bp, Zea mays
  unsure (1)..(422): unsure at all n locations; Clone ID: LIB3136-057-Q1-K1-F10
gacacttccaagtgaagcgtctgccgaactttctcttgtcctcaccagtgctgggtctcgcgggttattctattgtccataacacaaaactgcttcaccggcgttaccagagatctagcgcccacaagcagattatcactgctctagagaaaaggccgagtgcgtcgtanattttattaggtgtttgtnactgtnattgtagtatttcnctgttgctttcgtaccaataaagcacaagggaactctaaggctaatcagataaaaccagttgctacctagatagctgctgctgacataccatgacagttccacgccagctaaccaaatcattttacaggatcaggactcttgctgcatactactactaccaatctgtctgcatctagcctttatggcatgcacagccttggtcgtgatgcacg

SEQ ID NO: 155 - DNA, 265 bp, Zea mays
  Clone ID: LIB3136-057-Q1-K1-F2
ggcgttgctgtcggtgagaacgcgggtggcgacgacggtgtctgtggccacgtcggggtccagcacggaggccaaggatgggaagaagaccgtgcggcagggcgtggtgttgatcacgggcgcgtcgtcggcgttgggcctggcggctgccattgcgctggctgcgaccgtgaagtggtacgtggagatggcctgccgcgactttctcaaggcagccaatgtgtgcatgggcgcccgcatgtctgactgcagctacaccatcatg

SEQ ID NO: 156 - DNA, 420 bp, Zea mays
  Clone ID: LIB3136-057-Q1-K1-F3
cggacgcgtgggtgaggataagctcttcaatctgttttccttgtacggaaacatagttcgtatcaaggtactgcgtaataaaccagatcatgctcttgttgagatggctgacgggttgcaggctgagctagctgtgcattatttgaagggggctatactatttgggaagaagctggaagttaactactcaaagtaccctaacattacacctgccccagacgcccacgactacttgaactcgagcctaaaccgattcaacagcaacatggtaaaaaactaccgacattgctgttctccaacaaaaatgatccaaatttttgccctcccccaaaagatctttgaggaagcaatcctgaaccatttgtttgaccacggtactgttgtcaacaccaagctttttgaggggaatggcaaaaggca

SEQ ID NO: 157 - DNA, 309 bp, Zea mays
  Clone ID: LIB3136-057-Q1-K1-F4
cggacgcgtgggtgaggataagctcttcaatctgtttttcttgtacggaaacatagttcggatcaaggtactgcgtaataaaccagatcatgctcttgttgagatggctgacaggttgcaggctgagctagctgtgcattatttgaagggggctatactatttgggaagaagctggaagttaactactcaaagtgccctaacattacacctgccccagacgcccactactacttgaactcgagcctaaaccgattcaacagcaacatggttaaaaactaccgacattgctgttctccaacaaagatgat

SEQ ID NO: 158 - DNA, 311 bp, Zea mays
  Clone ID: LIB3136-057-Q1-K1-F5
atcccgcatatactcacagggccctcttctctcatctctcactccctcgctccgtctaccaccacgtccctcctcgtcgacgatctcgtagcggcggcgcacatggcgagcgacggcgcggcggctacgccagcgaaggttaccccaaagaaggccaatctcctcgacccgcactccatcaagcaccttctcgacgagaccatcttcgaggtcgtgaagagcaagggctacaccgaggacacgcggctgggcaactggaagctggggatcggagccggcgtgattgctgtcgccctactcgctcagtttta

SEQ ID NO: 159 - DNA, 235 bp, Zea mays
  Clone ID: LIB3136-057-Q1-K1-F7
ggggttcacggtgaagcagatggtgaacccgtggcggacctacgtgcgcctctcggcggtgctcatgggctccaatggcctcaccaagggctccctcgccttcctcaattaccctgcacagatcatgttcaagtcaaccaaggttctaccggtgatggtgatgggagccttcatccctggtctgaggcgcaagtacgcgttccaagagtacgtgtcggccgtgatgctcgtcgtc

SEQ ID NO: 160 - DNA, 301 bp, Zea mays
  Clone ID: LIB3136-057-Q1-K1-F8
gttcttgcgcgtacgcgtacacagccccgatccgaatcgtcctcctcgcgagcctcgccgatcccccactcccctcccctcgcttcaagatgcagatctttgtgaagaccctcaccggcaagactatcaccctcgaggtggagtcttctgacaccattgacaatgtcaaggctaagatccaggacaaggagggcatccctcctgaccagcagcgccttatcttcgccggcaagcagcttgaggacggccgcacacttgctgactacaacatccagaaggagtcaacccttcatttggtgct

SEQ ID NO: 161 - DNA, 169 bp, Zea mays
  Clone ID: LIB3136-057-Q1-K1-F9
gacaggagttcgcgtaccggcggtttccgcggcacgtcacggccaagcgcatgcggctgggctagaaagttacctactcgtgccattatgcatggaggcgaagcaacgcccgcgtgctctgccgggagaggaggccttcgcctgcgacaaactgtcgcgaggaggactg

SEQ ID NO: 162 - DNA, 418 bp, Zea mays
  Clone ID: LIB3136-057-Q1-K1-G1
atctggccttcatggcattcacagccttgttcgtgatgcacgtccaggtcagtaatatgatcatcttcctcgttaaagcaaaagcttgtgtgggagggagcactgttgggctgagtaccaacttaacttgcgttcgttttcatgcaggtgtccacacggttcctatccgctagccccgcggtttactgggctgccgcgcacgttctggcttctccgagccgcgccaacagacgatggggctacctggtctgtggtctatttcatcgggtccattcttctaggtagcctgtttttttccaccttttaccttttaacgtaccgaagaaccaacgaatgggggggggtccccgattccgtattccataaccaggcacttccggcagggatgggttattttgttattaaggggattattttg

SEQ ID NO: 163 - DNA, 272 bp, Zea mays
  unsure (1)..(272): unsure at all n locations; Clone ID: LIB3136-057-Q1-K1-G10
tctttaacaaagacctgcacgggccaacgaagaggccgcttcagaacctgggagccgaaaccaaccacatgtgtttggacccctatgcctaagccatgttcgaagccattcaataagcacattctataaattattgagnggaataagggtgtttgtgctagagtggagagaggnnnatggagagatacattaacctggccctggtgcttgtgggcacctaaatcctggcttgatgttggcgccgcacaatggtttatgcagatgggttgaat

SEQ ID NO: 164 - DNA, 443 bp, Zea mays
  unsure (1)..(443): unsure at all n locations; Clone ID: LIB3136-057-Q1-K1-G12
tggctgggaatagtgatcatgnaataatctaaattctaaaagcattggaatcctgatgccttggttttattctccctacttgtttgcaacttgtaatttttctcgatataatctctgtagctgaattgaagtatctgttttcaccatgcctaagctattcctgatcagtgaccatgctttatttattgttctatgtcgagtaattagccnggtagctcaccatggaatgcttttcgtcccaattggctacacctttggttcacgcatgttcgacatgtatggtatcagaggaggcagcccctattgcgcggaggtatttgctggcgatggcagcatacaacccattgagactgaactcgcccttgcagagcaccagggcaagtacatggccttcataatgaaaaagctagctcttcatgcttgagacagacacccctgtgcag

SEQ ID NO: 165 - DNA, 399 bp, Zea mays
  Clone ID: LIB3136-057-Q1-K1-G2
cggacgcgtgggcgcaccggcaccgcggcggcagttcagcatggtggcagcatccgtagccgagcgggcctatgaggcggcgacgcggtccgcgctggtggcgctggagcgcaacctcatcccggacgcggtgacccggcgcctgacgcggctcctgctagcgcagcgcctccgccagggctacctcccctccgcgccgctccagctgcagcagctcctccagttcgtccactctcttgaagagatgcccattgccattgaaacaaacaaagctaaagcccaccactatgagtggccaactacatttttaaggctagggctgggaaagaatttaaaatccagttccggctatttccttggggattaaagccccttaaaaaatcctaaggtggcaagaat

SEQ ID NO: 166 - DNA, 435 bp, Zea mays
  Clone ID: LIB3136-057-Q1-K1-G3
gtcccgtccggatccgtcgatggggaaggagggcgtggtggcagggccggcggcggatgggagtaaatcgcggccggagtgcatcaactcgtccaacccgtaccacgagtgcactgactactgcctccgcaagatcgccgaggccaggcagcgcctcgacgacgagctccccgactcgtggaagcgcccgcccgagcaccgcaccgtccaccgggactgcatcaacgcctgcaacccctaccacaagtgctccgactactgcttcaagcgcatggccgaccccaagtcaggctttgggcgtggggggcaccaccaaccagttgcctgggcaacggttgccggaccttttattcccgggaaccacaaccacctggagattaccgttcccaccgaccagaaggcgccaccccggattaccggttcccgcaaattacc

SEQ ID NO: 167 - DNA, 121 bp, Zea mays
  Clone ID: LIB3136-057-Q1-K1-G4
gtgccgcccggatccgccgatggcgaaggaggtcgtgttgttagggccagcatctgttgggagtaaggcgtgttaggcgggcattaactcctccctcctggacctcgagcgcactgactac

SEQ ID NO: 168 - DNA, 332 bp, Zea mays
  Clone ID: LIB3136-057-Q1-K1-G7
ccgccgcctccccacccgcggcacccatctccgtcaggcttggagccgccgcttctcgctcctccctgtccttctccagtgggcgccgacgccccgtggccgcgtccctctcgacctctgccaccgttgtaaaggaggctgttcagacagagaaggcaccaccagcactaggcccttattctcaggccatcaaagcaaataatcttgtgtttgtttctggagttcttggcttgaatcccgagaccaggaagttaatctctgaaaatgttgaggagcaaactgagcaggttatgaaaaacatggccgagatattgaaggctagtgtggctagc

SEQ ID NO: 169 - DNA, 389 bp, Zea mays
  Clone ID: LIB3136-057-Q1-K1-G8
cggacgcgtgggcaacggtttaaaccgtagaacaagaaaactgactatttaatatagtagagatataaacggttcatttgacccttgtaactagattcatttaacaatgcagcactgtattttctatgatgatgcggaaatatgaatgctgccaagcctttttttactttcgaaaagaacacacttccatcttgtctctaaattctgcttgttgattttgaaatctaatctatgcctcctcatctagtccaccttgaaaagtagttctagggtacttgaatgctgggaagtggtaaggtcaggtcatgggctcatggcaaacctgcttactcttctactcccaccttaaacagtactacagtagtagttctaaagtacttaaatgctga

SEQ ID NO: 170 - DNA, 455 bp, Zea mays
  unsure (1)..(455): unsure at all n locations; Clone ID: LIB3136-057-Q1-K1-G9
cggacgcgtgggcggacgcctgggcggacgcgtgggcggacgcgtgggatcaccgggaccaccaccgcctgcttcaagatcggcgggcgggcaccggccggctatgacatccaccgtcaccacaaccgttgggtgcggggggctccccgtccgcccgtcgtcgacggaaancaagagtttgttttttttnaatgtatttgtgtgtccntgccgtgggagcggatgccttcaatgataagtcagtggaggtcatgcgcaaggtcttcgagcagtacgcccgccgctccaacactttcttctgcgccgacaagacagtcactggcgtcgtcatcaaaggacttgctgatcacaagggatactcttgggagcctcctctattcccttggagggcattattgatgacaaagctgggggaggggagcacaaggatttttgggaattgcccatgttgtccc

SEQ ID NO: 171 - DNA, 375 bp, Zea mays
  Clone ID: LIB3136-057-Q1-K1-H1
gtggatcggagccattgagttaagctttgtcctcgacaaactactgggcgtgagttgtaaggttatcaatgtgaggtctggcgatgagcttcctgaaaagtgcagagaacttgccaggcattttgaaacccagggaactcctgtgatgattggtggtggagtcttggcttacacccttttgggagttgattataacgaagccagtggagactctgcatttcttatccttgatccgcactacactggtactgacgatctaaaaaaaatggaaaatggcggttggtccggttggaaaaattctgccaacagcaaaggccgaactttttttttgaagaacaagttttccaacttttaattacccaaaaggccaacctt

SEQ ID NO: 172 - DNA, 317 bp, Zea mays
  Clone ID: LIB3136-057-Q1-K1-H2
cgccgcgacgtccctcgccttcgccgccgaatccgagactccgatctcgggttcaccgcagcgcacagagcagccccgactcccggcccgatccgcgctctcctctccgtcgcttcagtcatggcaggaatggcacctgagggttctcagttcgatgctaagcactatgattctaagatgcaggagctgctgagcaccggtgagactgaggagttcttcacttcatatgatgaagtttctgagagttttgatgatatgggcctccaagagaatcttctgagaggcatttatgctaatggtttgggaaagccatctgc

SEQ ID NO: 173 - DNA, 216 bp, Zea mays
  Clone ID: LIB3136-057-Q1-K1-H3
gagagcgttcttgaatgctgcgattgttcatctcgcactggtctgatggaatcccacgccaaggaaggagctgttgcaacacaagcaccagcagcgaccccaacgtcggcggctaccgtacgcgctgaacatctgaaagagcacccgtaactgactgtggacccatacatgcaagagatgtcgaaaaccgccgcacggagcgttagttactgcaag

SEQ ID NO: 174 - DNA, 210 bp, Zea mays
  Clone ID: LIB3136-057-Q1-K1-H5
gctgctcatctcgaatccagcccgaaacctctcgccacgcgtgccgtcgacccagttcgtgcgcgttcagctgctgccccgcgctcagggatcgggaaggcaagctctttggtggttcctaagggcgaatctcgtggcgattcgctcagatttggatttagggtttaggaggcggtgctggtgatcggtttgtgccgccgggagagatgt

SEQ ID NO: 175 - DNA, 190 bp, Zea mays
  Clone ID: LIB3136-057-Q1-K1-H7
ctctctatcaagctatttctaccgtttctcttgtactcgagcggggaaaacaaagaaacaaaaaagcaaggaagcagctgcacgcacgccgtctcctgtccggccatggagttcccgtcggtgtgctactgtgtgatcctgccgcagccgctaatacttgtgctgcaactgctggacttcccgcggcacg

SEQ ID NO: 176 - DNA, 199 bp, Zea mays
  Clone ID: LIB3136-057-Q1-K1-H8
gtacgagctggcgtacactgaggcaaagggtaggatcaggaagcgcgacaggatctggcagatcgcattcggttctggattcaagtgcaacagcgccgtctggaaggcactccggacggtgaacccggccaaggagaagagcccctggatggatgagattgacaacttcccggtggaggttccaaaatattaaaaggtg

SEQ ID NO: 177 - DNA, 112 bp, Zea mays
  Clone ID: LIB3136-057-Q1-K1-H9
tggacgactggcgcaagactgttatcggcatttaccttggctacgcactcaagggggaggggcgtaccctctacgggtacggcgtctaggccgcacccactcccggaagaaa

SEQ ID NO: 178 - DNA, 432 bp, Zea mays
  Clone ID: LIB3136-058-Q1-K1-A1
ctgtacgacccctaccgtgagggtgctgactttgtgcgtggataccccttcagcctcagggagggtgcccacactgctgtctcccacggcctgtggctgaacatccctgactatgatgcacccacccagctggtcaagcctaaggagaggaacgaaaggtacgttgatgctgtcatgacaatccccaagggaaccttgttccccatgtgcggcatgaaccttgccttcgacagggatctcattggccctgccatgtacttcggtctcatgggtgatggccagcccattggtcgctacgacgacatgtgggccggatggtgtgtgaaggtcatctgcgaccacttgagcctgggagtcaagactggcttgccatacatctggcacagcaaggctagcaaccccttcgttaacttgaagaaggatacaaaggca

SEQ ID NO: 179 - DNA, 410 bp, Zea mays
  Clone ID: LIB3136-058-Q1-K1-A12
cggacgcgtgggcgccgccgtcgccgtctgatagctccagcgccctcgccgtcggctgcccggctgccgtcctcccgctacgagctaggcatctccttcgccgatccagcatgggtaagacacgtggtatgggagctgggcgcaagctcaagacccacaggaggaaccagaggtgggctgacaaagcctacaagaagagccatcttggcaacgagtggaagaaaccctttgctggatcatctcacgcaaaggggatcgtcctcgaaaagatcggcatcgaggccaagcagcctaactctgctatccgtaagtgtgctcgcgttcagctggtgaagaacggtaagaagaatgccgcctttgtgccgaacgacggctgcttgaactacatcgaggaaaacgatgaggtgctg

SEQ ID NO: 180 - DNA, 392 bp, Zea mays
  Clone ID: LIB3136-058-Q1-K1-A2
cccgcaccccaccgcagcaggagccgaagcccgcggtcctacgctggcgcccacccgtccgcgtgacctcggagtttgacagcgaacgacggctcttctcccaccgcctctcctgccgcgtcctcgacggcctcgccaagctccgcctccgcattagccatggtgctgggggaggagggattctctggggcccgactgatgtggggctcctggcgcggaacttctccgtcgtcgtcgaccctgcaacccgaggcgccgtgctgcgcggcgccgccgacctcgccggctcgctgcgactgcgcgcctcgcacaacaccaaagagcaacaaggagaagtggcaattactgcaaatttgagggattcaccatgcaagattgaactgtcatctctg

SEQ ID NO: 181 - DNA, 440 bp, Zea mays
  Clone ID: LIB3136-058-Q1-K1-A3
ctcctgcaactgaagcccagatgggtaaggatgttgtatcattcctttcatgggcagctgagcctgagatggaagagagaaagctgatgggagtgaaatggatctttctactatcactagcgcttcttcaagctgcatactaccgccgcatgaggtggtcagtcttgaagtcccgtaagctggtcctggatgttgtcaactgaggactaccattacccttttttatatttaaatatgagctgttaaggagtattcaaaataatgaatttgtgatgtacaattttgccactgggggctaggttccatgcctagagattattttgttttctttactctgctgagctgcaaaagcatttcaccaacgggtacatttcacgtttttttggtttgcaatgcctcgatgttatcagcaaccttgtaacttaacagctgatgagagt

SEQ ID NO: 182 - DNA, 404 bp, Zea mays
  Clone ID: LIB3136-058-Q1-K1-A4
gggcaatgaggatttagtggttgttcatgatgctcttgagtttggacattgtcgtttgtcccttgcggtacctaaggaaggcatttttgagaacatacatactatggaagatttgctaaagatgtctgaatggacagaagaaaggccactacgtgttgttactggatttggatatctaggcgataagttcttaagagagaaaggttttaagcatgttcgttttttatctgccgatggagctcttgagtcatatcctcctatgggtatggctgatgctattgtggatctcgtgagtagcggaacgaccttgcgtgagaataacctaaaggaaattgatggtggagtagttctggaaagccaggccactcttgtagcaagtaggaaatctctgcacaagcgtaaag

SEQ ID NO: 183 - DNA, 425 bp, Zea mays
  Clone ID: LIB3136-058-Q1-K1-A5
ctccaaaaccccaaaccctcgttcaacatagccattatccgaagttccgaacccacgccaagccccagggtccgaccgcagaaccgacccaaaatgtcgcccgcctcttccatgctcaccgccgtgtcgctctcctccccgctcccagccccgcgcctccgcgccgccgccgccgcctcctccttcgctccgccgcgccgcgcggcagtcgcactcgtcgtgcgcgcggcgtccgcatcttccaagtcccctgccacggcggaggcggccccgaagaagaagagggcgaccggcatcacccagccgaagtccgtgtcgccggcgctgcaggcaatcgtgggcgacccggttattccccgcaccgaggtcctcaagcgcctctgggcctatatcaaggagcataacctccaggatccctctgataa

SEQ ID NO: 184 - DNA, 306 bp, Zea mays
  Clone ID: LIB3136-058-Q1-K1-A6
ctccaaaacccgaaaccctcggtcaatatagccgttatccgaagttgggcacccgaggcaagctctagggagccaccgtaaaaccatacccaaaatgtcgacagcctcttccatgctcaccgccggggacaatacacgccccttcccagcccctctcctgcttgacgtcgccaccatctgctccttcgatacaaagggcctaacggcagtggcactcttcatgcgcgcggaggccgcatctcccaagtcccctgccgcggtggaggcgactcctacgaagatcagggggaccggtatcacccatcc

SEQ ID NO: 185 - DNA, 351 bp, Zea mays
  Clone ID: LIB3136-058-Q1-K1-A7
gtctggattactggaattaatggattaacacgtgccatggcggcttcggcaaacagccaggactcaccgctgaagccactcatcatgaaattctttatttcctgtcgatatccattggaattcacacgatactgtgctgatcctttgtcaaagatcgtgatattaagctatttgcagctatcttggctggacgcctgctagcaactcgtattgaaccacctgctttcatggctacatcctcgaattacgcggatgccactattaagagggatatcgatgtagcacaggagacagcagcttgtaatccctctggggctgccaacacgactcaacatcacaccgggcatatgt

SEQ ID NO: 186 - DNA, 356 bp, Zea mays
  Clone ID: LIB3136-058-Q1-K1-A8
ggctgaatgtcttgtatcagttgtccagtagacttaccgcataagcggatatggacaactgatggctgaatgtcttgtatcaataagattttttttccacatccgacaccattctttttggatcaatcgggcttttaatattacctacctttcatcgagacaacttggcagttggtacacattaaatatgcgcaaatcagttcaggtcgtttcagtcctatttgaataattgctctagtttaatatgccatctgtggtcaattggtcataatttcagtttctttccaattatagcgtcgcattcgtacaagatcatgtagcaattgatttggcaagttgtgttccaaatcgcatgt

SEQ ID NO: 187 - DNA, 310 bp, Zea mays
  Clone ID: LIB3136-058-Q1-K1-A9
ggtgtacaacgtgcgtagcgcggcacacctggggtacttcctggagcactgaagctgaagcaggacacggggggcgccggtcttgatcataaggtccatgcgtcattagccacacgaggacaatgacatgcagacgtgcggtggcgctatgaccacgttcacagacactacgtgaacctgcggcgccgagactactgtgctgccttgattataccggaagggaagtgcgtgaaccttacttacagctactactacaacggcgaccacttgcaagtgatgagctgtaagaccaccagcggcgagaaccatg

SEQ ID NO: 188 - DNA, 416 bp, Zea mays
  Clone ID: LIB3136-058-Q1-K1-B1
cgcatccgtttcgtctctttgctcgcatctggcctcaagcccctcaggcctcagctgaccaccacgaaccaaccgacagaaagagggacgaatggcgagctctcagtgctgcgataacccgccggccctgaacccggcctgcggggagggcaaggtcgtcgacagcttcggcgggctcaaggcctacgtcgccggccccgaggactccaaggccgccgtcgtcctcgtcgccgacgtcttcggattcgaagcgccgattatgaggaagatagccgacaaggttgcttcgtcagggtactttgttgtggtaccagatttgtttcatggggatccttatgcacctgagaatgttgagaagccctttcctgtgtggataaagtcacatactccggaaaaagggtttgaagagacaaaac

SEQ ID NO: 189 - DNA, 420 bp, Zea mays
  unsure (1)..(420): unsure at all n locations; Clone ID: LIB3136-058-Q1-K1-B2
gcgctgcacgcggctgtcaactttgggcagtacccatacgccgggtacctcccgaaccggccgacggtcagccggcgcccgatgccggagccaggcagccacgactacaagaagctgggagcggggcagaaggaggcggacatggtgttcatccgcaccatcaccagccagttccagaccatcctgggcatctcgctcatcgagatcctctccaagcactcctccgacgaggtgtacctcggccagcgtgacgagcctgagcgctggacgtcagacgccaaggcgctggatgcgttcaaaagatttgggagccggctggtgcagattgagaatcggatcaagacgatgaacgacagtccggacttgaaganaccggaagggcctgtggaaatgccgtacatgctgctgtaccccaacacg

SEQ ID NO: 190 - DNA, 426 bp, Zea mays
  unsure (1)..(426): unsure at all n locations; Clone ID: LIB3136-058-Q1-K1-B3
cagagaaccagattccgttcccctggacccgatcgagatggagtcggaagctgacagagccgcggcgccggcgccggcagttgccgcggagaccagcgacgacgccatccaggaggagtctccagccacggccccttcctcagacggaaagcccggatcaggggcggcggcggccccggcgccggaggtggaggtgcagctgttccggcgcgggcgtccggtggccgtgttccggtcgcagctgggcgggtatacgcaggaccagctggaggtgggcgacatcctggagcagcacggcctcaagtccgtcttcgccttcgaccctgccgcccgcaaacgcggcgtcgccatccgcttcaaccctcgcaacggccggtccctcctnccctacgcccctggttccacgatcttcctagacggcgagcc

SEQ ID NO: 191 - DNA, 383 bp, Zea mays
  Clone ID: LIB3136-058-Q1-K1-B4
ggccgtacggtgctcaccggcgtgccggacaacgtgtcggcggcgcacgcggccggggcggggctcgtcgacggggccttcgtcggcgcccacgccggcgaggccaagagccaccacgtcttcaccttcggcacgctccgggactgccggttcctgtgcctgttccggttcaagctgtggtggatgacgcagcggatgggcgtctccggccgcgacgtccctctggagacccagttcatgctcgtcgaggtccctgccagtgacggcgacggcgacggcgacgacgcccccgcgtacgtggtgatgcttccgctgctggaggggcagtttcgggcggcgctgcaggggaacgaccgcgacgagctgcagatctgcatcgagag

SEQ ID NO: 192 - DNA, 397 bp, Zea mays
  Clone ID: LIB3136-058-Q1-K1-B5
atccggagcaggcgcagtcccaccgaacccgccgccggtcggcctggatctcctgggcggtgcctctcgtttctcttttcaataatcaagatgagccgtggcggtagtgccggcggcggtcaacacctctctggcatgtctattcggaagcggggagccccccaaaccaggagtggcacgagcagcaacagctccacctgttgagaaaccatctgctccaaagactgatgcggccaaacatgttgctgctggcgctaccagacaaaccaataactaccacacggctcatggtcaaaacactggcaactttcttactgaccgtccttaaaccaacgtacacactgcttttgacggtggatataacctgtgctacctgatccgtggcaactgatgcccg

SEQ ID NO: 193 - DNA, 314 bp, Zea mays
  Clone ID: LIB3136-058-Q1-K1-B6
cccacgcgtccgagcgcgctggcgaccgtgctggactacaacgtgatgcgggtcaagggcggcgccatctgggccgtgaacgggatgcgccccgacggagccgtcgacgcatcgtccacgcagtccaaggaggtgtggcccgtggtcacgtacgccgttgtggaggtcatggtccacgagggcatgacggaggccgccttccggacggccaatggcgcccacgacgccgtctggggcaacgacggcttcgggtacgcgttccagacgcccgaggcttggacggaggacggcggatatcggtcgctgcactacat

SEQ ID NO: 194 - DNA, 395 bp, Zea mays
  unsure (1)..(395): unsure at all n locations; Clone ID: LIB3136-058-Q1-K1-B7
cccaatatgaaggcgcttgaaattgctgagaaagccagggatgctgtgctaagtggaaagtttgaccaggtacgtgtcaacctgacaaatggtgacatggttggtcacactggtgatattgaggccaccgtagttgcttgcaaggcatctgatgaagctgttaacattattttggatgctgtcgagcaagttggtggtatttaccttgttaccgccgatcatggcaatgctgaggatatggtgaaaaggaacaagtctggcaagccgttgctcgacaagaatgaccgtatccagattcttacctcgtatacccttcagccgctccaggttgccattggaggcccttgcattcaccctggagtgaaattcctgaacgacatncaaaccgttgggct

SEQ ID NO: 195 - DNA, 347 bp, Zea mays
  Clone ID: LIB3136-058-Q1-K1-B8
atcccggggggagcacgcgtccgggccggactgcgctcaccggcgtgccgtacaacgtgttgtctgcgcacgcaaccggggggaatctcggggacggggccttcgtctgcacccacgccggcgaggccaatagccaccacgtcttcaccttcggcacgctccgggactgccggcatcgtgtgcctgttccggttcaagctgaggcggatgacgcagcggatgggcgtctccggccgcaacgtccctgtggagacccagttcatgctcgtcgaggtccctgccagagacggcgaccgtgacggtgactactcccccgagtacgtggtgatgcttccgctgctggaggg

SEQ ID NO: 196 - DNA, 428 bp, Zea mays
  Clone ID: LIB3136-058-Q1-K1-C1
gccccgggctccccctacgcctcctcgccggaatccgaccccaagcgtgccccacgctcccctccgcagcagcagcagtctccctccgaggaaggagatgacaaggagaaaccaacacatttgagatttctagtgtctaatacggcagcagggtgcatcattggcaagggtggatcaaccattaatgattttcagtcccagtctggggctcgtattcagttatcacgtagcaatgagtttttccctggtacaaatgacagaatcatcatggtttctggactgtttgatgaagtaatgaaggccatggagctgattcttgagaaactgttggctgagggtgaagaattcaacgaagcagaagctagacctaaagttagacttgtaagtcctaatagctcttgtggtggtataatttggtaaggtggagc

SEQ ID NO: 197 - DNA, 400 bp, Zea mays
  Clone ID: LIB3136-058-Q1-K1-C11
ggccacctccgatgtacagacctctcgttcctccagcactcgcaggcaagagccagcaagacgcgctggttcagctacagatacagccatcaagcagagcatagatgcagcaataggtgatgttttaacgaagccgtggctgccgctgcccctcggactgaagcccccttcggtagacagtgtcatgggcgagctgcagaggcaaggcgtatcgaatgtgccgcaagcttgtggatgatccccggggctgcatagctgctagctcgtccctgcacgcagtgcaacaaaagaaatttgtcgacatgccttttatgttttgaattcccgtgaaccgtttatggagcactcacagctcgttcagggtcagatgaacagaacattataggagtatattctttga

SEQ ID NO: 198 - DNA, 415 bp, Zea mays
  Clone ID: LIB3136-058-Q1-K1-C12
cggacgcgtggggcgtgcggcagttcgtggacagcttccggcgcgccggcatgccgctcgactcgctcgtctgcaacgccgccatctaccggcccacggcaaggacgccgacgttcacggcggacggatacgagatgagcgtcggcgtcaaccacctgggccacttcctcctggcgcgcctgctcctggacgacatgcagaagtccgactacccgtcccgccgcctcatcatcctcggctccatcaccggcaacaccaacacgctggccgggaacatcccgcccaaggccgggctgggcgacctccgcggcctcgcggcggggctgcgcggccagaacggctctgccatgatcgacggctccgagagcttcgacggcgccaaggcgtacaaggacagcaagatctgcaacatgct

SEQ ID NO: 199 - DNA, 441 bp, Zea mays
  Clone ID: LIB3136-058-Q1-K1-C3
cccggatggcgaagggaaagtcaatccagaaggtgtagcgtattacaataatttgataaactatctgcttcagaaaggcatgactccttacatcaacctttaccactatgatcttcctcttgcgcttgagaagaaatatggagggtggttaagcgcgaagatggcgtacgtcagtctaaagatatatctggtcatgttattaacgtgcttcgactttctgtgttttcccgaaagaaggacacacaacatagaatctctagtttcacatgatatagaactggaaataccagattatacttatatatgtatacaatttgctttgtagggacttgtgtacagactatgctgacttccgttttaagacctacggcgatcgcgtaaagcactggtttacattcaatgagccaaggatagtagcgctacttggctatgacacagggt

SEQ ID NO: 200 - DNA, 426 bp, Zea mays
  Clone ID: LIB3136-058-Q1-K1-C4
atcagaataagggaaagttggtggctattgatactgactataatctggaggaagatgaacagcttgcacgggctctgcaggagagcctgaatgcagagtctcctcctcgacagaatgttcctattgaggatgtgccagtgcctcaatggaatattcctgttgagcaggtgcctcctcgacagtatgttccagcaaatgaaccaaccccacatgtttacccacggggtggatccaggatttgtgctggatgccaaaacccaattggccatggacgtttccttagttgtatggattcagtttggcatcctcaatgcttcagatgttttgcttgcaacaaacccatatcagagtatgagtttgctatgcatgatgatcagccataccacaaatcctgctacaaagagttttttcatccgaaatgcgatg

SEQ ID NO: 201 - DNA, 427 bp, Zea mays
  unsure (1)..(427): unsure at all n locations; Clone ID: LIB3136-058-Q1-K1-C5
tttcaactcattgatatgtgttgtctgaatttcatcttgcacagagattgggcttggcctgacaggctttggaatattcttctcatttctgggaattgttttcttctttgacaaggggctcatcgcaatgggcaatattcttttcctgtcaggtttgggtttgacaattggtctgaaatcaactatgcagttcttcaccaagccaaagaattacaagggtactatctcatttggngctggtttttttctggttctcattgggtggccgctttttggcatgctcttagaggcatatggctttattgtactcttcagtgggttctggccaacactttctgtgttcttgcagaggattcctatcatcggctggattttccaacaaccatttgtgacatcggtaagaagctcgcgacacatgatgttcttc

SEQ ID NO: 202 - DNA, 325 bp, Zea mays
  Clone ID: LIB3136-058-Q1-K1-C6
tcaagcctgttacacttggactcggtgtaaaaagtcctataaaaaggagcagatatgacgacctttacaaagcagtctagaggactatgtttgtgttcttctgaaccaatggacagaggtgctgcccgacatctaatgttattatccatacaaaaattgctcaaaaatttaatgagaggacagctgcatggcccacacgaattattgatccagatccacttcaagaggtttgcacgctatggccaaaccttagtgaacgacgacgtgagaatattaagaagcatatatcgaatgccaaaagacgaggcgcaactattctgactgg

SEQ ID NO: 203 - DNA, 375 bp, Zea mays
  Clone ID: LIB3136-058-Q1-K1-C7
caacgagtcatcaaataggtgttctgtgaaaagctgggtgcgtgggggtgtctctgcgaacagtgatgatgtcattgagcttgaaaagagtaacatccttctgattgggccgacagggtcaggtaaaacactggtagcgaaaacgctagctcggtatgggaatgcgccattcgtgattgctgatgcaacagcaattacacaggctggatattctggtgaagatgtgggatctgtaacctacaaacttctagtggctgttgacttcaatattgaagctgcagagcatggtattgtgtacattgactgagttgatcagctcacacagaaggctgactgccgcaaggatcgaaaggatgtatttcgagaggttgtgca

SEQ ID NO: 204 - DNA, 374 bp, Zea mays
  Clone ID: LIB3136-058-Q1-K1-C8
gagccacgcgtccgagacactaacggaaaggtcgtggctgttgatacttgtgctagcgagaggggaaaacggaaaaccctagcaccctctgcccggtagccgtcgggcataggagtatagagatggagagtggacgatgttgaactatggtctacgtgcggtggactgccttaccaggccaacgaggagatgcttcgagacgctttcggatactacggaaccatcgtatatgtcaaggtgattaatgatcatgctattaaaggcaagtgtcaaagctcagttactcacactcactccataactgctgagcatgcaattgcgggcattgactgctagaaatgatgcaatcgcattgcacgagtaaaagaattgcg

SEQ ID NO: 205 - DNA, 304 bp, Zea mays
  unsure (1)..(304): unsure at all n locations; Clone ID: LIB3136-058-Q1-K1-C9
cccggctcgagccacgcgggcgcggacgcgtgggcggacgcgtgggctacgacacacattcccttgctgacggtatcgggaaagaaagggaagagcacaaggaaacaggagatggaatgccactcctgcnnngtcagcctcggatctgaatatctcccgagagttgggttaaatcaagcaaaaaccaaatggcacacgagaccatgtggcaaaagctgatgacattcgaatctcggggcggctcctatttcagcagattctggtgcacatggtgcggttttgtgcacgctctcgtcacggcaaa

SEQ ID NO: 206 - DNA, 397 bp, Zea mays
  Clone ID: LIB3136-058-Q1-K1-D1
gacagcttcatcacgcacagggccttctgcgacgcgctcgcggaggagagcgcgagggcggtgaccgccgccgcggcggtcgcgggccagcaccatccgggaccggccgggatgctcttctcgcaggccgccggcgggggtgacggcggtgcggggttacacctgccgccaggcgtgcttgacccgtcgcagacgctgggcggcggccacgcccacggcatgtcctttcaagagctgtgcctgaagagagagcagcagcagcagcagttcgcgccgtcgtcgtggctcacggcgcaacatcaccagcaggagctggagctgcccggatcggccgtgttcggattggcgaggccgctagaccagcaggagtacatggggaactccacaacggaaagca

SEQ ID NO: 207 - DNA, 396 bp, Zea mays
  Clone ID: LIB3136-058-Q1-K1-D11
ccgaccctcgccatagttaagaacgccaaggtcgaggactacgtggtcggcttcgacgagctcggcggcaaggacgacttcagcaccgaggacctggaagagcgcctggcgaggtcccaggtcgtcttcctggacggcgaagggtccgcgcaagcgtcgaagcatgctgccgccgccaccaaacggagcgtccggcagtcgggcaccggcgactcatccgactccgagtagctctcgtgtgttgctgttgttattattattatatatctaaatgggtacacagcacagacatgttttggctgctatgccaacaggcaacattagcattgcaaggatacgcgtcttattaggacctggaagcaaaagtggttgtggtttgagttgctgtacagtgct

SEQ ID NO: 208 - DNA, 259 bp, Zea mays
  Clone ID: LIB3136-058-Q1-K1-D12
ccatgtgggcgactgcgttctgattcggtcgtcggactctgtcaagcagttctttttttcttcgagtggtttaaattgtatgtcgtctttactcgtttattttcggttgcaagttctcttcgtactaccgccccgaggaatccaagggcggtcgcctgcagttccacggcgccaaggagcttttcctttccgatcatttttacctacagatcgcccacaccatcgagtggttattggtgttgttcactctttcaagaac

SEQ ID NO: 209 - DNA, 387 bp, Zea mays
  Clone ID: LIB3136-058-Q1-K1-D3
ctccattattcgacctcaccttgccaccagccatggctgccgtgaccgacgcggccggctctctgtcctcctcctgcgcctcctcccctgcggctgctgccaaggccaaggcggcgtccccgtcatcgtcgccatgcaggcacctgcagttcctgtcggcggctagcccgcggcggccgtggcgggccggcgcccgcgcggtgcgggcgcacgtgtccaccacccataccagagctgcggggccagcgaaaacgtccaagaagcatgaccaggggctggtcaccaacaagtacaagcccaaggagccggacgttgggaggtgcctgtccaacaccaggatcaccggcgacgactcgccagcagagacgtggcacatggtcttcagca

SEQ ID NO: 210 - DNA, 401 bp, Zea mays
  Clone ID: LIB3136-058-Q1-K1-D4
caaagaccaggtggttccctggatggtcgccggctagcgtgcaagagaaaaaatattgaaggagccaatggccagagttcagcaggtgctagtacaagttttccccacaggaacgataatgcattccataacattgcttcttcaagttacaatcctgcacctatcagaaattcatcatctcccaagtgtttgccagttccaagttctattgaagatcaactcccacggtatggaactaatgtagggctctcagccggtacttatgaccttcatggaggggtcaacaatgctgtgaattcacagagaagtttccgggcaagaactaccacatctcaacagattgctccctgtagtgtatggccctcttcaaatgctatcagactttctaattcatggaatca

SEQ ID NO: 211 - DNA, 396 bp, Zea mays
  Clone ID: LIB3136-058-Q1-K1-D5
gacaaaagctgagaacaaggctgctattaaagtatccgctattctgggatgggaaaacacaaagaaagcaaacatagaagctgaactgaagaagattgaggaacaactggaaaagaagaaggctgaatatgcagagaagatgaagaacaagggtgcaatgatacacaaggaagccgaacagaagcgagcgatggtggaggcaaacgcggtgaggaggtcctgaaggccgaggagatggctgccaagtaccgggccaccggccacgcttctaagaagctcatcggttgcttcagagcctaagaagccttacaagtcagaccgagagcagaaagtgaaaaacgtgagccagtgattgcttggtcctcttgctctatcaagtgtgtagtgtgtcttcga

SEQ ID NO: 212 - DNA, 260 bp, Zea mays
  Clone ID: LIB3136-058-Q1-K1-D6
ggcctttgtcgcttgtgtctccctttcttccggagcgaaaccaaatatcggccagagcgctagcgtctacgagatggtgctgcaaaacaacatttactcactcgatccaccgggcgagcttgagaatctattgctcaagatgaagcggctagcccattccaacaacttcttcttcatggatgttaagtgccagcgctgtttaatcataaccactgtgtacagccactcccatactgggggggtgtgcccaggctttcaaa

SEQ ID NO: 213 - DNA, 358 bp, Zea mays
  Clone ID: LIB3136-058-Q1-K1-D8
ggtttttctatgtacctctgttatatggctatgtatctcatctttggggagtttggaatttactggatgcacagggagttgcatgacataaaaccattatacaaatatctgcatgcaacccaccatatttacaacaaggagaataccttgtctccatttgctggacttgcatttcatccactggatggtattctgtaagcaataccgcatgtgttcgcgctcttcctcttttcaacacacttcacgacacatattgcactcttgttcctagaagctgtgtggacaacaaacatacacgactgcattcatggcatgatatggccagtcatgggcgctggatatcacaccattcaccata

SEQ ID NO: 214 - DNA, 394 bp, Zea mays
  Clone ID: LIB3136-058-Q1-K1-D9
ctcaaggtggatccccacaccggtgctttagccgaaggggtgctcaccttcgtcatcaccctgaccgtgctctgggtcatcgtcaagggcccccgcaacgtcatcctcaagaccttgctgctctcaacctccatcgtctccgtcatcctcgcaggcgcagagtacacggggccgtctatgaacccagctaatgcatttggctgggcatatgttaacaattggcacaacacatgggagcagctgtatgtgtactggatatgcccctttattggggccatgctcgctggatggatatttagggtggtgttcctaccaccggcacctaaacccaagaccaagaaagcatgattactcgtttatggatgctgggttagaataaataagaaatacagga

SEQ ID NO: 215 - DNA, 433 bp, Zea mays
  Clone ID: LIB3136-058-Q1-K1-E1
ggacggtctctctctcgtctctcccgacgcgcctccacggccggccccgccccggggcgctagcctcctcccactcccagtaccagcccccgcccctccagcaccaccagcagctcgccttcggaccatgagacgggtcggaggagacctgcagggcgacggcacgacgcctcggtccgcggcggcggggcaggccatgatggagcttcaggccaacgggtcggccgccgtcgggggcgccatggtggtggggctcagcccgctcagcgaggccctgtggcgggacagcaaggcgctcccgccgggggccggccccgccgcgctcatcggcgacgtgtccgccaggctcacgtggaaggacctctgcgtcaccgtggctctgggccccggcaagacgcagaccgtgctggacgagctcaccgggtacgcggag

SEQ ID NO: 216 - DNA, 352 bp, Zea mays
  Clone ID: LIB3136-058-Q1-K1-E12
gcgtgtgtacattagtttcaccaaatctgcaacgccgctcctgattgggatatgccgcgtgtcgggaaccatatgctacttcatggtgcgcctacatcctggcttcgagcactacatcttcttcgtcttgaacctgtacgccagcgatacagtggacgagagcttgatgatggcgattgccagtgtcatagccaaataactcatggggatcataataagggccggaattcaaggaatattcaagctggtctaagtgtacttcagacatgcattacgacatcccgaagtcctttggagattacccatgcagtcattagcttacatacttgacactgcatggccagtgccagaa

SEQ ID NO: 217 - DNA, 365 bp, Zea mays
  unsure (1)..(365): unsure at all n locations; Clone ID: LIB3136-058-Q1-K1-E3
actaattgtcgtgtcaccaccagcccaccactgaccacttcgctatggaagttttgtggaagctgttggtttaattggaaccgaccattatttgcaagatgatgttcgtatctgtgccattgacctgcatatatgtatagttccaatcacggatcaaattcagaatttgacacgaaaaagaaaaaaaacagggaatatggctaggatgctactcggtttgaatggagtccaatcaaaacatgtaaaaaggtcagcctgtgaacagggactcagactgtttgctgcggctttaatccactggctcctgttttttcaaagnagacgaatggacgaatagtgcgacatgcatatatgtaaagacctct

SEQ ID NO: 218 - DNA, 419 bp, Zea mays
  Clone ID: LIB3136-058-Q1-K1-E4
cacttccttcgtcgcatcctagtttttctcttcaacaagtccttgagatgtcagaaaagtggaggtctcggccactaccaaaaggccccgtttcccttttcattggaatactgtctgcatcaaatcatttcgctgagcgcatggctgtgaggaaaacatggatgcaggctccagaaattaagtcttctgaagccgtggctcgattctttgttgcactgaattcaaggaaagaggtcaatgtaatgttgaagaaagaagcagaatactttggagacattgtcattttgccatttatagaccgctatgagctggttgttcttaagacaattgctatctgtgagtatggggtccagaacttgactgctgcaaacatcatgaaatgtgacgatgatacatttgtgagagtagatgtagttctg

SEQ ID NO: 219 - DNA, 427 bp, Zea mays
  Clone ID: LIB3136-058-Q1-K1-E5
gggaaataccactgagcatctctcgaccgaagttaatgatggccccggaaatgggacagtggtaccaatcattactgaagcttctgagatagtaacagggtctgattctttttcaacacaatcaagaactagtcaagtaccaaatgattttgatccatcacaaattggcatgcctaatccagtgtttgcaccttttcttattggatccccacagcataggcaagctgatagctctggacttacttttgttccaacaggtccaccagttccttttgctgtgctcccgcttgtctcagggaatagcgatggttctggtccccagtttgagagaagtgaaggaattgatcagcttcctgccaatactgtaggtcattttgttggctcacttcatgatgtttaccaacaagattccagtgctaccttaaca

SEQ ID NO: 220 - DNA, 296 bp, Zea mays
  Clone ID: LIB3136-058-Q1-K1-E6
cccggacagcggcgtgcttgccgacatgtacgactacgctatcgtgggggtcggggagccgccatacgcggagacgttcggcgacaacctgaacctgacgatccctgcgcccgggccgagcgtgatccagatggtttgcggggacaccaagtgcgtggtggtcctcatttacggtaggccgctggtggtggagccgtacctgggcgacatggacacgctggtggcggcgtggctgccatggtcagaggggcaaggctttgcggacttgctgttcggcgactactggttcacggtga

SEQ ID NO: 221 - DNA, 365 bp, Zea mays
  Clone ID: LIB3136-058-Q1-K1-E7
gtactctaccaaccactaagagctcggcgccattgtcagggtggatggggaggattcataacggacagataaccgctgatggtgaacttgtcactgatccagatatgactctgggggatgggtctaagttggtatatcatccttatccttggcaggagccatttgcgccgtatttgatggcagtgctctacgaggatgatgacatggttgcccttaataagccttctgacttgttagtactgcctaacggactgcatcggcaacgaactgttttagcacagcttaaattgaaagactggaagattgcctcatcttgccggctcaagagaaaagatgtgcagacacatccagtacctgttcatcgt

SEQ ID NO: 222 - DNA, 345 bp, Zea mays
  Clone ID: LIB3136-058-Q1-K1-E8
gggcacacgcgtccgggtgtcttcaccatgtctatctactacacggtgatggatcggcacccgggatgaaggtgggtgcctctagcaaggggcgcctcaccattttcaagagcgaggctgagtccatcgaggcattgtgctgaacccattggtactgacgaaaacatgtaaagaacctccacaaattatctgttgagccgccgaggttccatacctgggagtactcaagtgactgcaggagggacacgtcctggctgagaaacaaccacaatacattcgacacaaaccgatagctgcatgtgaacaactctctgagctgcatgctctgaacacaatggctctttt

SEQ ID NO: 223 - DNA, 383 bp, Zea mays
  Clone ID: LIB3136-058-Q1-K1-E9
gtcgagcaggaaggaacataacagagatcattcaggctagtggtgctcggatcaagatatcagataggggtgactatatatctgggacatctgacaggaaagtgacgattactggaacacccgaagctatccggaccgcggagtccatgatcatgcatagggtgtcagccagttcagagaggtgatgagccccttctgaaggaagggcgtatgccattgctgtgtccgagcacagcaacgtgtttgatgcaagttaggaggatgtgggaacttgcttccttttattttacccccttttttcttttttcctagcaagctcgagcagaaaaaaaaaacaagctgttattgtttgtcggattgcgttcaaccgatgggttatgtta

SEQ ID NO: 224 - DNA, 53 bp, Zea mays
  Clone ID: LIB3136-058-Q1-K1-F1
gttgacttctccttcccctccggtttttgttcgggttcgtgaggttctccggg

SEQ ID NO: 225 - DNA, 383 bp, Zea mays
  Clone ID: LIB3136-058-Q1-K1-F12
ccacgcgtccgggactcaaagggtttgattgttgactctcgtaaaaactccgttcagtcattcaaaaaaccttgggcacatgagcatgagcccttgacaaccttgtacgatgctgttcagtccatcaaacctacagttctgattgggacgtctggagttggaagaacattcacaaaagaagttgttgaggccatggcttccttcaatgagaggcctatcatcttttcactgtcaaatccaacctctcattctgaatgtactgctgaagaagcatataactggactcagggtcgtgtaatatttgccagtggcagtccatttgaccctgttgagtacgatgggaaggtttttgtacctggacagtcgaacaacgcctacatttt

SEQ ID NO: 226 - DNA, 395 bp, Zea mays
  Clone ID: LIB3136-058-Q1-K1-F2
tgcccacctcccctttcccgcctggtcctcccattcacttgcccccttttttccctctcccgacctcccaattcccgaaatcacccccgacactccccacccaagaacccctcgtccccacctcgccatgggcagcgccgccgcctcgccgccgccgtccgggaagctgacgcaggaagagctgaagcgcgtggcggcgcaccgcgcggtggagttcgtggagcccggcatgacgctgggcctgggcacgggctccacggcggcgcacgcgctggaccgcctgggcgacctcctccgcgcgggcgcgctgccgggggtggccggcgtgcccacctccctcaagacggaggcccacgcggcgcgcgccgggatcccgctgctcccgctcccgggcg

SEQ ID NO: 227 - DNA, 426 bp, Zea mays
  Clone ID: LIB3136-058-Q1-K1-F3
attacatttgatccgccgcgcgcggcccgatcgacgagcgagcctcattcacactccgatctagctagctagctagtttaggaaagagaaatctgaccacagggatgcggtggcggctgcagccggcgccggcgccggcgctgctcctcgtcctggccaccatcgccgccgtcgtggtggtgcgagcggagccccaggtgccgtgctacttcgtgttcggggactccctcgtggacaacggcaacaacaacgacatcgcgtcgctggcgcgggccaactacccgccctacggcatcgacttcgccgccggccccaccggccgtttcagcaatggcctcaccaccgtcgacgctatatctcggcttctgggcttcgacgattacatccccgcgtatgctggcgcgagcggcgatcagcttctcaccg

SEQ ID NO: 228 - DNA, 410 bp, Zea mays
  Clone ID: LIB3136-058-Q1-K1-F4
tgcctatgatgtgtcacttaatgacgactcttggccaacacaagcatttgagcttgtcactggagagaaatcgaagacattggaaaggcttgaccctggtgccactgctacacacacatatgtcctggagaccaaaacacagggcaggttccagggttcaccagctattattacgtaccgtgttcccacaaagactgctcttcaggaggcctactcaactcccatcttcccactggatattctcgctgagagacttcctgagaagaagtttgaatgggctaagaggcttgtggcgaaatatgggtcacttgtgtctggtgtctcatttgttggattgtttatctacctcgttgcgagcccgtcgaagagcagctcaaaaggaagcaagaagagacgttgatctacttata

SEQ ID NO: 229 - DNA, 433 bp, Zea mays
  Clone ID: LIB3136-058-Q1-K1-F5
accaaggaggttgatgttgaagtgccagctgatgaggatgagacaagtgaagaagaggattcgtccccagaaactacagaggaagagacagaagaagatgaagagaaagagaaaaagcctaagacgaagacaataaaggagactacttctgaatgggaacttctgaatgatgtgaaggctgtatggcttcgcagcccaaaggaggttactgacgaagaatactcgaagttttaccactcactagccaaggacttcagtgatgacaagcctgtgggttggagccacttcactgctgaaggagatgttgagttcaaagctttgctcttcattccaccgaaggctccgcatgatctctatgagagttactacaacagcaacaagtcaaacctcaagttgtatgttagaagagtgttcatctctgatgaatttgatg

SEQ ID NO: 230 - DNA, 172 bp, Zea mays
  Clone ID: LIB3136-058-Q1-K1-F6
accgggccgggatccacgcgtcggcccactactgtatcgagcaaggtagtggctactgtagtgcctcacgatcatgtatgagcactggggatgaagaggaatcgtacacattgacaaggcttgaccctcgtaccactgttaaaaacacaatatgttctggtgaccaaaacac

SEQ ID NO: 231 - DNA, 392 bp, Zea mays
  Clone ID: LIB3136-058-Q1-K1-F7
tcggcccacacgtgcgaccaacgagcgcggtccgaacgagcagcgagcctaagtcacactcgggagctaactggctagctaggttaagaaagagaaagctgaccacaaggatgcggaggaagctgcagccggcgccggccccagagctgatactagacctggccaccatgggcactcgtcgaggaggtgcaagcggagtcccatgtgccgcgctacttcgtgaccggcgactacctcgtggacaacggccactacatcgacatcgagttgatggcgcacaccaactacccgccctaccgcatcaactttgacggcggccccaccggccgatttagcaatggccttaccaccgaagactctatatatcggtttttgagcttctacgataacat

SEQ ID NO: 232 - DNA, 358 bp, Zea mays
  Clone ID: LIB3136-058-Q1-K1-F8
ccggatccgggccgggattcacgcgtcggcccactcgtatcgatcatttgcaagctggttgtaaagtatctgggggttgtggcgcttcggctttggtgcgttggcatgagaaattttgcggtggttgcttgtgctgcgtgtgtattgctcctacgcccttgtacacctagcctgtgttgtaactgaatttttgccgaggccttatgcgtgactagtgtttccactgacactgtattgcacatttttgtcgcatggaatgtactattattgtgtggctcgtgccagtcttaaaaaaaaaaaaataaaatggccttcgatctttatgatccaatattacttactcgtgcatgctacgtca

SEQ ID NO: 233 - DNA, 406 bp, Zea mays
  Clone ID: LIB3136-058-Q1-K1-F9
cggacgcgtggggccgccagaagttgatgcaggataagaggtcgaaacagcagcagctccaaaagcaggtctgggacactaggacccccgtttctgtcaccggtgagcgaccgcaggaacctgctaatgggaagcccaatccgtccgtaccagatggtgtcacggcagaggtgaaggcggtgaaggctcccgcagagaacggcatcactgctcctgttgtttcctatgcagcaaaggtggcccagacagcaccagagaagcccgtcctctccaacggagtcgccaagaccggttaactcgatcgtgcaaccagagctccatatccaggatgcggtgcaagggaactggtgaccaaccaaggcaggctgtggaactggcagcatggccccataaagcgtgctcgatc

SEQ ID NO: 234 - DNA, 441 bp, Zea mays
  Clone ID: LIB3136-058-Q1-K1-G1
ctcacccgtttccccactcgctcgctgacacatcgcacattcgcaccataccagataccaccgccgctgcacacaaacccagaaaccaccggcaataaacaactcccgctcccagtctccgatccgaggaagccggaagaggggatttcgagccgcggcgatcggggctagagtggccctcgacgcgtccgcgggtggaattgccgagaagccgagagagagggcttggagcggagttgcgggaggtgggagagaaggcggcgatggggcgcctgttcctgatgcacctggacggcaacgtctacagctgcaaacactgcaagacccacctcggcgttgccagcgacatcatctccaaggccttccagtgcaagcacggcaaggcgtacctcttccataaggttgtcaacgtgacttctggagtaaaaagagaccgcatga

SEQ ID NO: 235 - DNA, 304 bp, Zea mays
  Clone ID: LIB3136-058-Q1-K1-G10
cgtgcgggaggagcagaagatgaatatacactgtgggagaatattgcagcatatggaagaatggtgttacggccacgagtccttatagatgtgagcaagatagacatgtcaacatgcttattaggatataatatgccatcgccaataattgtcgcacctacaggggcacacaaattagccaatcccgaaggggaagaggccacatcaagaacagtcgggtcacgtaacaccatgatggtaacttagctgttattatgtgatgagtagagggggtgtcttctgagaatcgggacattgacctaac

SEQ ID NO: 236 - DNA, 273 bp, Zea mays
  Clone ID: LIB3136-058-Q1-K1-G12
ggcactcgtgcgggaatgttcaaggtgctacgaactgttttgcgaaaaaccaagcagcggaagagaatgggtaccaaaggcacttttggtggcgctggatttacaaggaacccaccgatgtatgagcggtttcattcgaccaactggtctgcgtttcaccaaagctcatgtgactcacccataactgaagtgcactttcaaccttgacataatatgtgtgaagaataacccatatggtccgatgtacactttttttggtgttatgacaagggg

SEQ ID NO: 237 - DNA, 388 bp, Zea mays
  Clone ID: LIB3136-058-Q1-K1-G2
cgcgcacctctcatcatgccgcgcgccgcctccagcgccggcccggtcccggctgcggcgacgaccgtggccaggcgccagtccgcgcagtgtctccacgcgaggggggctgtcggcggcctcttcttcgaccagaggacagcgcggccggtccaccacctcctccctggcgccaagttcggagcgattgggagcaccgcggaggccgcgccgtcggaggggctcgcgcagaagctgcagggggtcgatgtgttcgatctgagcggcaagacggtgcccatcgttgatctgtggaaggaaaggaaggcagtggttgcgtttgcccggcatttcgggtgcgtgctgtgccgaaagagggcggaccttctcgccgcgaaacaggatgaca

SEQ ID NO: 238 - DNA, 329 bp, Zea mays
  Clone ID: LIB3136-058-Q1-K1-G4
cactcctcgccatcacataaaaccagtgcaagcagaagcagcgcaatggcgagcagcaccatggccctctcctccacagccttcgccggcaaggcagtgaacgtgccgtcgtctctcttcggcgaggcccgcgtgacgatgcgcaagacggcggcgaatgcaaagccggcggcgagctccggcagtccgtggtacggccccgaccgcgtgctctacctgggcccgctgtccggcgcgcccccgagctacctgacggtcgagttcccgggcgactaccggctgggacaccgtgtagctgacgactgactcggaaaccttcgtcaagaact

SEQ ID NO: 239 - DNA, 173 bp, Zea mays
  Clone ID: LIB3136-058-Q1-K1-G5
tcgatcagatcgtcatgtatacagccgggtgttcactcatgagagacgggtgacgatggtgtacctacgcgtggcaatcatactcatgggactactcctggtaacaggcaccaatgggaggatgccgtcagaaggccagttacagccgtcagctttcgcaatatcatgagatc

SEQ ID NO: 240 - DNA, 274 bp, Zea mays
  unsure (1)..(274): unsure at all n locations; Clone ID: LIB3136-058-Q1-K1-G6
taccggtccgganaccgcggcgggagccacgcgtcgacccacgcgttcgctccaaacccagcgccgactgctacgagcagtctcacgcaagctgcgggaaacaaagcggtcaacatggcatttcacccaatgtgctcgtagcggaggggcgctgtggccgtggcgctgctgctggcagaggacagccacgaccgttgcagcacgctattacctgcggccaagttagcttcgatatggagcactgcctatgctacgcccgctgaacggcttccgc

SEQ ID NO: 241 - DNA, 383 bp, Zea mays
  Clone ID: LIB3136-058-Q1-K1-G7
cggacgcgtgggcggacgcgtgggcggacgcatgggcggacgcgtggggtcctgatcgccgtcggtgccaccgacgactgctgcttcgtctgccccttctgggtcttccgttcctcttcgtcctcctaccccgcatacccaaagaagcaccaatccccttgcaccaactgctgtggctgcgcctcctgcggctgacgtgacaccaagcccgccaacggtgagatggccgcgggtggggagaacaagaagaaggcgccggagtcggatccgccggaggcgccctccatgatggagcagctcatgcccgagatcaccacccacgcgctcaggtacctcgactacaccagtctgtgccgtttctacatgaccaactacgacatgcg

SEQ ID NO: 242 - DNA, 383 bp, Zea mays
  Clone ID: LIB3136-058-Q1-K1-G8
accagctatttctactcggatccgatctatttacaagcccaacaggatcagaggaggtgatggcgaggagtgacagctgcctggcgcgcgtgggtgccggaattgctatcggtggcgcggtcggcggagccgtcggtgcttgctatggaacttttgaggcgttcagatacaagatccctggattgctaaagatcagatacattgggcaaaccaccgttggcagcgctgcgatttttgggcttttcttgggggctgggagcttgattcactgtggaaaatcctactagtttgtttccctttttttttctgaagtctgaacacacctttgtcgatgggcttcagtgaaaactattcaatgcctgttttatgtaacagctaatagc

SEQ ID NO: 243 - DNA, 418 bp, Zea mays
  unsure (1)..(418): unsure at all n locations; Clone ID: LIB3136-058-Q1-K1-H1
gcttcgccgtcatcggcaccgacgccgcgctctacaacgacacggccacggtcgacgtcgtcgactcctactccggcctgctcagcaacttcttcgggccctacttccggcaggacttcgcggacgccatggtccgcatgggcagcatcggcgtggtcaccggcagcaagcagggcgaggtccggaaggtctgctccaagttcaactgactgattccgctcccgccaatgcaatgcaagcgcgtaccgtccatagatcgtcccttcattcattgcacacagctagctggctggccggccccatccatataagcatgaagagcacgtacgtacggtggggtttggttgcctgctttcatggcagtgtttctctcttcttcatccattcgntccattcatgagtacagagtacacacatc

SEQ ID NO: 244 - DNA, 375 bp, Zea mays
  Clone ID: LIB3136-058-Q1-K1-H11
catcccaccatgtcctcttctctgttcctctccagcccccttttcaacctttgacgctgtagcttgagagcgagcttagtgcctaccatattctcctcctgagcgactgagcgctggtctccgataggctcgccatgcaggtgctctgcgacgtctgcggcggcgcgccggccgccgtgctctgctgcactgacgaggccgcgctctgctccgcctgcgaccgccgcgtccaccgcgccgacaagcgccgtcgcatcccgctcgtccagccctgcgccgacgactccgccgtcgtcgcgccgctctgcgacgtctgcaaggagcggaggggcctcgtgttctgcgtggaggaccgcgccatcctgtgccccgact

SEQ ID NO: 245 - DNA, 253 bp, Zea mays
  Clone ID: LIB3136-058-Q1-K1-H12
agaatttgaaggttctgttggggcataccatgtttcatatctagccactatgaagcttttggaagtgactggtaaacaggtggaaactagcccagaggcaaatgatcttggagaaattattttcttgtacaaacttgttgctggagcttcagatagaatctttggacttaatgttgccctgcttgcacagcttccgtttagatgtatcatgagggcattcgtcatggctgtcaaactgcaataggagttaagt

SEQ ID NO: 246 - DNA, 357 bp, Zea mays
  Clone ID: LIB3136-058-Q1-K1-H2
gcttcgccgtcatcggcaccgacgccgcgctctacaacgacacggccacggtcgacgtcatcaactgctactccggcctgctcagcaacttcttcgggccctacttccggcaggacttctcggacgccatggtccgcatgggcagcatcggcgtggtcaccggcagcaagcagggcgaggtccggaaggtctgctccaagttcaactgactgattccgatcccgccaatgcaatgcaagcgcgtaccggccatagatcgtgcctgcattcattgcacacagctggatggctggcccgccccattcatattagcatgaagaggacttacgaacagtgtggtctggttggctgctttac

SEQ ID NO: 247 - DNA, 427 bp, Zea mays
  unsure (1)..(427): unsure at all n locations; Clone ID: LIB3136-058-Q1-K1-H3
ctgaaatctgagttgcaagcaatgcgtgattgcgacccttcatctgcccgccactggattgtacgcaacacacgaactgtgaatcggacggggcagccaactggctacaggctcgtacctggttcgaactgcctgcctttggctctgcctgaggcgaaatttctgaggagggctgggttcttgaagcacaacctctgggtcactcaatacaagcgtggcgagatgttccctggaggggagtttcccaaccagaatcctcgcatccatgagggtctgccaacatgggtcaagaatgataggcctctggaggaaaccgacattgttctctggtacgtgttcgggctcacccatatccccaggctagaagattggccagtcatgccggtggagcacatangcttcatgctcatgccacatggattcttca

SEQ ID NO: 248 - DNA, 284 bp, Zea mays
  Clone ID: LIB3136-058-Q1-K1-H4
gtgaaatcggcatcgccagcaacgcctgactgtaaaactacacgggcacggcagaggatggcacgtaatactccagccgggtaagggactgcgcaggcccctacttacaggctgactcctgggacgcactggctcgcatgggctgtatctgaggggacactggtgaggaggacggcgaggtccaaaaagaatgtttgaagtacatactgacagacttcgctagagcattgctgtaggggcgcgtaccagccataaatcttgcattcattaagtgctcacaacat

SEQ ID NO: 249 - DNA, 279 bp, Zea mays
  Clone ID: LIB3136-058-Q1-K1-H5
gctgccgaaacttgtgttttgaactattatgtgtattatgaacttttgtttgcccgctctgggtatttttccgctaacatgaattaggactaggtcgggcctacacattgggttcagcacgtgccttggagtaaaatgcttccataggtattatcatcggtcaaaacttggtggctgggtatgcctttataaaccaacccattggtatcgtccaaacaaaccagcgaggtatttaccgggcgggagctatccgagcaacaatcattcctaactgagggt

SEQ ID NO: 250 - DNA, 330 bp, Zea mays
  Clone ID: LIB3136-058-Q1-K1-H7
aaccgcgccgggatccccgcgtcggcccaaacgttcgatctttatgagcgggccttatatgacgttcctgtgaccaacccctggggttcatccgcgaaaactattgacacacagtcaggctacacaacttgcttccctgctcatcacaaggttgcactgcctctctttgatcttgtctgaggccaaattttggtagagggctgggctattacatgaccacctattggttactacctaccagcttggacagattttttctggactggagttatgctaccagaaatctatgataacaatagggtcgtccacatggggtaagaaatggtagcc

SEQ ID NO: 251 - DNA, 357 bp, Zea mays
  Clone ID: LIB3136-058-Q1-K1-H8
gccatcttagctggagcagcagcggtccctggttcactgcactccgtgcgcgcctggcctcctcattgactccgcggaaggaaggagcagcaggaggtttggccggctcatcacgcccgtcaataaccctcggaggattctgctcttattcgcgacgctgtcgagcgtggggacgacgatactgatctacttcacgctggcgatcaacagcagagcagaggcctagtcgtctgaaagccacaaccacagacgccgccgccaagccatttgtgtcgcgggcgtttacagcagtacatgccttgatgtattcctgagctcagtgagacaatggatgaggtggtgggggggggggggtta

SEQ ID NO: 252 - DNA, 155 bp, Zea mays
  Clone ID: LIB3136-058-Q1-K1-H9
cattattggcaatagcaaaattcacatctatttgtctctggataacgggtctttcttctctgcaatgcccttttttcattcttatggtctgagtggagccctcttataccgtacacggcatgtcttgcgtcttgggttttatgtttacattacat

SEQ ID NO: 253 - DNA, 367 bp, Zea mays
  Clone ID: LIB3136-059-Q1-K1-A1
gccgtgttaatttaatggctgaagagggtgtcacatttgtggtgaatgccaatgttggtagtgatcctttgtactcgattgaacgtctacgttctgaaaatgatgcagttattttggcttgtggagcaacaaaaccgagagatctcaccatccctggacgtgagctatctggagttcattttgcaatggaatttctccatgcaaatacgaaaagtttactcgacagcaacctggaggatggtaaatatatctccgcccgtgggaaaaaggtggtggttattggtggaggtgatacaggcacagattgcattggcacatctattaggcatggttgcaccagccttgtaaatcttgaactcctgtcaaa

SEQ ID NO: 254 - DNA, 360 bp, Zea mays
  Clone ID: LIB3136-059-Q1-K1-A2
ctttaatgcaagaagcgaatgagctgtcgcggcgaacgaggcgataacacactcatcaactcatcgtaggagtagcctgaaactccacaaggcagtagtactagtctagtactagaggacgccattattatcggacgaggagtaaccatccaatcagacaacacttcatcgacgcaaggacgcatgacatcgggcaattttaccgaaccatctctctcttgtcttcctcccttgcttttagccaagctacgctagcgtctgaagacgaaggaagctacagcggccgaggtccccgtttctgcgcccaccgaggcgtcgcgcatgcggccacccgcacccaggcgctggcacgggggagtg

SEQ ID NO: 255 - DNA, 388 bp, Zea mays
  Clone ID: LIB3136-059-Q1-K1-A3
cggacgcgtggggctgcatcggcgcccgccgggaggcggatcccgcccgcctcgtccatgttgtgggtccgcaatatccgccgcttcgtcgacacgggcgccggcctcggatccgaggccatcatggaactggagactaaaaggatattgcttgagattttcaaggagcggcagcggaagagtgccgaggctggttccatcccaagtttttacaagaaacctgaagaaggatccattagctctagagttcaaaggttggccaagtacaggtttctaaagaaacaatcagagcttctgctgaatgctgatgatcttgatgccatgtgggtttgtctcagagaaaattgtgttattgatgatgctactggtgctgaaaagatgaaatatg

SEQ ID NO: 256 - DNA, 382 bp, Zea mays
  Clone ID: LIB3136-059-Q1-K1-A4
aaagcagcttcgtcaacaaaaagagggtcaggacggcgttgatttggaaatgaatataaacggagcaaagtctacatttgaagatgatgagtttgacgatgtgggtttcactgaggttcagatgtcaaaacttaagaaaagcgaagccttcactagagaaagggagagagaaattgagcaggttgttgaatcagtcaacgaacttgcacagatcatgaaggatctttcagttctcgtgattgatcagggaaccatcatcgatcggatagactacaacatacagaatgttgcagcttcagttgaggagggttacaaacaattgcaaaaggctgagaggacccaaaagaaagggggcatggggaagtgtgccactggcccttgc

SEQ ID NO: 257 - DNA, 282 bp, Zea mays
  Clone ID: LIB3136-059-Q1-K1-A5
aatggctgaagagtgtgttacatttgtggtgaatgccaatgtggggcgttttccttggtactcgaatgaacgtctacgttctgaaaatgatgcagttattttggctggtggagcaacaaaactgatagatctcaccatccctggacttgagctatctggagttcattttgcaatggaatttttccatgcaaatacgaaaaggttactcgacagcaacctggatgatggtaaatatatcttcgtccttgggaaaaaggtggtggttattggtggaggtgatac

SEQ ID NO: 258 - DNA, 362 bp, Zea mays
  Clone ID: LIB3136-059-Q1-K1-A6
gtggtgatctccgcgaagaccaccctgggggaggagttcgagggccagatcgtcgccttcgaccgcccctccaacctcctcgttatccaggagggcgtgggtagggcggagaggggggagcggaggaacgtgagggtcctcaaagcgaactacatccgggagttctccgtggtcagtaagggtgacgaccctctcgatcctgccagctgcatgctggacctcaactccatttatgcccgggaggatgctgcacttaggcaagcagagattgaagctgagagaattggtgttggtgtcaccccagaagctcaaagtatatttgatgcgctgtccaagacgctttcggttcagtgggacaagac

SEQ ID NO: 259 - DNA, 341 bp, Zea mays
  Clone ID: LIB3136-059-Q1-K1-A7
ggcaaccaggctctgaggaagcaaggactagtggttggtcatgaatggatcggcgtcgtgccccactaccaattacaagtgtggggacattatctaagcagaaagcaccggtagggaatgatgctattgtttctagagacgctgtgatatctggaccaaatttcttgggaaggtcaagtggatcttcaaggaggcctgttatctcgagtagccgcgatgcggtggtcaccgatagttccgagccttcacgagcgcgcacaactgatgcaagccctggggtgttccgcagagcctcaggtcctcagagaagctcacctgtccactctgcagaacagaagcgc

SEQ ID NO: 260 - DNA, 376 bp, Zea mays
  Clone ID: LIB3136-059-Q1-K1-A8
gacgatctcgtgtgcaacgcaacgttggcgcttggcggccagtagtagcagctaatttagcgtcgctccttcctactagacgagagatcgagaaaccatggccaagctccaagtcactcctggcgccgcgttcaccgagtgcaatgaactcaacttccagggcctgtacatgtaccacacgcccctgggtcccaaggccaaccaagctgcgatcctagagagcaaggccaagatcggcatcggtgccaccgtggttaacaactgggcagtgtatgacgggccagggccaggcgctaagctggtcggccgtgcgcagggcttgcacatcctagccggaaactgggtcaactcattcaccctggtgttcgaggatgaa

SEQ ID NO: 261 - DNA, 268 bp, Zea mays
  Clone ID: LIB3136-059-Q1-K1-A9
ggcagccatatctatctattcattcttgcgctccggccttgttgagattttttatgtattttggttttatccactttatgtcttcagcttcatattaaagataaaggcattggccaacatgcattggatggtgggaaaaggaagaacctaattttgactcaatcactggatgcctcaccacgtaactgaaacaaaaaaacaacctggaagatttgacaggggtgcacttggtattggggaacaaggctattcaattctttctttaaac

SEQ ID NO: 262 - DNA, 418 bp, Zea mays
  Clone ID: LIB3136-059-Q1-K1-B1
gagcagcccagaagacacgtaaaaaatatagcctattgtctggcgtgggatcgaaggtaaaacaccaactcgcaaaagtgaagaaagccattgtaggcaaacctgggcacacaaaaccagtatctccgacggcataaaactccagtcaccttagaacatgtacattattgtattgtttgtagtcttgtgagccatttatttcggtggtagtgtttgcgatgggctaggagaaggtcctcttcacaaccatagcattggaattctatgatgttgcacatgaaacacccccccccccctcgagagtatgttgaagatgtttgtaaatatgtctagtgtgtaaattcaagtttcccttgaactttgaggtagaatcaaggacatgtaattgggcaaatggttggattctttcgtggatggc

SEQ ID NO: 263 - DNA, 434 bp, Zea mays
  Clone ID: LIB3136-059-Q1-K1-B10
cgctcgctcgttcttccgcctcgctccaccaccggcgcccgcacgcacgtctggcgtagggatacagccgcacaggaagaccccctcccctcgacggaagcctcctccgagtgggggcatctacctctctttccctttagcttctgggcgcagttaattttccaaactatatttgggggtgttcagcaaaaaaaccgcgtccaactgcgcccgtgcgggtgagggatcactagaggctggactcgcgctagagatggtgaaggcaaaagcaagggtccgctatgagcctggaccggcttttgaggaggtcaaagaagaagccatgcttgatatatcaccaacagactcgacagagttttgggtaattcagtggcctaaggaccagatagatgttttggattttcatggcaaagagctttctttcaagctgcata

SEQ ID NO: 264 - DNA, 247 bp, Zea mays
  Clone ID: LIB3136-059-Q1-K1-B12
gtaatacacatggccaacttggttacggtttcaccatatacagggccactccaaagcttatagaattgtttgaaggccccactcatgtggtgcagattgcagccggcgcaagctacacttttgctgtaacagatgatgggactgttcattcgtttgggtcttgcactatattttgccttgtacatggggatcagcatgactaacttcttcctggggcaatccaatcttttaagaggaggaacattca

SEQ ID NO: 265 - DNA, 238 bp, Zea mays
  Clone ID: LIB3136-059-Q1-K1-B2
agaagttcttgcattcgacctagatcaggagtgaaaacacttatcatagaatctgttgatttctttcctgttggtgttaaagttcattggggtcgcattgcataataggccctagtgatcaagtgcgcaatttactgatcgttgtactgcttatttgtacacttgctgcttgaattgttggatcatgtgttcagatatcaaattttgctgctggattactaatctgtctggttctgca

SEQ ID NO: 266 - DNA, 342 bp, Zea mays
  Clone ID: LIB3136-059-Q1-K1-B3
cggacgcgtgggcggacgcgtgggcggccgaggcgcgcgcgcagctggggttcgcggggccgatggtgctgaccagcatggcctactacggcatcccgctggtgtcggtgatgatctcgggccagctcggcgacgtgcacctcgccggcgccacgctcggcaactcctgggccaccgtcaccggctacgcgttcgtgaccggtctgagcggcgccctggagacgctgtgcgggcaggcgtacggcgcggggctgcaccgcatgctgggcctctacctgcagtcgtcgctcatcatgtcggccgccgcgtcggcgctcgtcttcgcgctgtggtggttcacgg

SEQ ID NO: 267 - DNA, 362 bp, Zea mays
  Clone ID: LIB3136-059-Q1-K1-B4
cggacgcgtgggtgcgggtggacaacttgcgtagcgcggttcccctcgtgtccttgctggagcacggaagctgcaacaggacgcggggggcgccggccttgctcataaggtccgtcgtgcaagagccggacgaggacgaggacatgcagccgggcggtggcgctcgggccacggccacggccacgacggcgacgtgcggggccgagccgacggtgcgccttgtcggcccggaagggaggtgcgtggacgttccttacggctactactacaacggcaaccaggtgcagctgtggagctgcaagtccaccagcgccgtgaaccagctctggacgctcaagagggacggcaccattcggtccaac

SEQ ID NO: 268 - DNA, 360 bp, Zea mays
  Clone ID: LIB3136-059-Q1-K1-B5
gctctccaacgccacagcttgcgcccgcaatggcactcgtctccgcctcctcgtcctccaccaccgccgtcacggcgctccccaggaatgggcagcgggcgtcgtcctccttcctcggcggcaagacgctgctgagacaggccgaggcggcccggccgtcgttcgccgtgcgcgccgcggcggaccccaacaggccgatctggttccccggcagcacccctccgccgtggctcgacggcagccttcccggcgacttcggctttgatccctggggcctcggatctgacccggagagcctgcggtggaacgtgcaggcggagctggtgcactgccggtgggcgatgctcggcgcggcgggca

SEQ ID NO: 269 - DNA, 389 bp, Zea mays
  Clone ID: LIB3136-059-Q1-K1-B6
atttcaggaaattgcgggtggccttgattctactcttacaaatacctttagtcctactggatcgaatgaggctcaacagaaaccgttgctcttgaagcaaagtattaagctcttagaaagtttggattcatgttggggtgatgaggttcttgtattctctcactgcgataaattcctccgtctgtccttgcagcttatttcaaggtatacaacatggctttcatgtggtttatcagcacgtaaagcttctgacaggagcccgaattcacctgcagatgctgaatgggcactgtctattcctatagaagatttcatatatataatgcatgatgtgcatgctgtaattggtgagctttcagaatcaggcagctttattggacatgtgaatc

SEQ ID NO: 270 - DNA, 370 bp, Zea mays
  Clone ID: LIB3136-059-Q1-K1-B7
gcgggacccacgcgtgcgccggtccaacactttcacgctcaggcgctcagctctagcaatggctgcctccaccatggcgatctcctccacggcgatggccggtacccccatcaaggtgggctccttcggcgagggccgcatcaccatgcgcaagaccgtgggcaagcccaaggtggcggcgtccggcagcccctggtacggccccgaccgcgtcaagtacctcggccccttctccggcgagcccccgagctacctcaccggcgagttccccggcgactacggctgggacaccgccgggctgtccgccgaccccgagaccttcgccaagaaccgtgagctggaggtgatccactcccgctgggccatgctc

SEQ ID NO: 271 - DNA, 372 bp, Zea mays
  Clone ID: LIB3136-059-Q1-K1-B8
actttgcatgcagtggttggaagataaggttttctcgatcagagatgctggtgccaataatttaaagcgtttgacagaggaatttggccctgagtgggcgatgcaacatataattccccaggttttggagaagataaacaacccacattatctgtatcggatgaccactttgcaagctatttctttgctagctcctgtcatgggtcctgatatcacatgccaacagttgctccctgtcgtcattgcttcttcaaaggacagggttccgaacatgaaattcaatgtcgctaaagtcctgcaatcacttgtaccaatccttgatcaatctgttgtggagaagacagtgaaaccatgcttagttgagctcagtga

SEQ ID NO: 272 - DNA, 443 bp, Zea mays
  Clone ID: LIB3136-059-Q1-K1-B9
ctctaccgtccgagaccccaagctccagcgcggcggcggcggcggcggcgaccatggctgtcgggaagaacaagaggatctccaagggaaagaagggtggcaagaaaaagaccgtcgaccctttctctaagaaggattggtatgacatcaaggcaccgtcggtgttcagtgtgcgcaacatcgggaagactctcgtatccaggacacagggtaccaggattgcttctgagggtctgaagcacagagtctttgaggtttgcctagctgatcttcagggcgacgaggatcaagcttacaggaaaatcaagcttcgtgctgaagatgtgcagggcatgaatgtgctcacaaacttttggggtatgaattttaccactgattaattgaggtccctagtgaagaagtggcagacattaatctaagcccatgttgatgtcaagacaacc

SEQ ID NO: 273 - DNA, 361 bp, Zea mays
  Clone ID: LIB3136-059-Q1-K1-C1
ccggtccaacactttcacgctcaggcgctcagctctagcaatggctgcctccaccatggcgatctcctccacggcgatggccggtacccccatcaaggtgggctccttcggcgagggccgcatcaccatgcgcaagaccgtgggcaagcccaaggtggcggcgtccggcagcccctggtacggccccgaccgcgtcaagtacctcggccccttctccggcgagcccccgagctacctcaccggcgagttccccggcgactacggctgggacaccgccgggctgtccgccgaccccgagaccttcgccaagaaccgcgagctggaggtgatccactcccgctgggccatgctcggcgcgctc

SEQ ID NO: 274 - DNA, 304 bp, Zea mays
  Clone ID: LIB3136-059-Q1-K1-C11
cgcgcatcctatagcaactagtgccattgtcttcgcagttgtagcaagccaacgagcctggcgttgcctgatgtacacaccaaaccaccgacatggtgcgcacgcacagccatgggaagggtatctattcatcggcgctggcgaacacgcggactcctctcatctagattaagacacctaccagcgaggtggcggagatgaacaccaaagatggcaaaaacgggcagaagacgggcgataatggtgttctgctccgccaccaggagggcaaccaccttgtcaagagcgttactgatatcaagaa

SEQ ID NO: 275 - DNA, 356 bp, Zea mays
  Clone ID: LIB3136-059-Q1-K1-C2
cgaaatccgaatccatggccgtcctccgcgcgtcgccgccgccctttctcccccatccgctctcgcgcccctctcagtgcaagcggcgccccacctgccgcgtggtcgcagccacagccagacccagtcctgctccttccaggcccaggagcggcggcgtccatggaggccgccccaagagggggcttcttgcggcaaggagaaggccgggggaggggcgggtgccctgcttgcgtgccgcggaggcgggggtcggtgcggcaggcgtcgcgaaggaggaagacgagtacctggcgcgggaggccgggtggggcgtgcggcggatggcacgggttggggaggagatgcggcgggtg

SEQ ID NO: 276 - DNA, 321 bp, Zea mays
  Clone ID: LIB3136-059-Q1-K1-C3
ctggattcagaaacttgtgtccatttccttcttaaattattaaaccctccagtgaatgttgttgatgccaaagcgccatcaataggttccaaacttcttggaatcagtaaatttcagatgcttaacagttccaataaggatgcagattctagttcagaggacatacttttaaaagttgaagaaatcctcttaagctgcaaagagatcaagccactagacagtgatgataagaaaacaacaaggccagaactatgttcaaagtggcttgctttgttgacaatggaaaaggcgtgcttgtctgcttgtgcattagaggataca

SEQ ID NO: 277 - DNA, 382 bp, Zea mays
  Clone ID: LIB3136-059-Q1-K1-C4
tgcaggcctctcaaggtgacctagtgtctggcatgttttgctgggctcattctctatttcccacattatgtgcgaagtcaagtgggaatccccttgcaagagatttggttttgcagttgcttgaaagaattttgtctgtcaccaaagctcgttctatattattgaatggtgctgttagaaagggagaacgcttagttccccctgtttcatttgacttgttcatgagagccacatttcctgtttctaatgctcgagtgaaggctacagaaaggtttgaagcagcctacccaataatcaaggagttggctcttgccggtcctcctggctcaaaaactgtgaaacaagcatcacaacagcttttacctttgtgtgccaaagccat

SEQ ID NO: 278 - DNA, 283 bp, Zea mays
  Clone ID: LIB3136-059-Q1-K1-C5
ccggtacggatgcgtgcgtcggcccaagcgttcggcacatgaggatcgcgggcctacgcttgtacagctgtcagctgggcccaccttttcggcccgacgccctgatttccgcatcgtcttgctctcgcacccttcccactgccatcagcatgtgaaggaggcgcggcatcagcttggtgatttgtgagcgatggcgccgccacggtcgcgaccgtgggcttaccttcgcgtgattgtcggcaccatcctcgatggcgcactcggattctacgtcatgcaacta

SEQ ID NO: 279 - DNA, 379 bp, Zea mays
  Clone ID: LIB3136-059-Q1-K1-C6
aaagaaccaagtataaacctgacattgctttcacaaaagcatgggacaatgagcttccaaatatcttcgcggctcccaaaaatccaaagacattactgcttcctgcaaacagggctatttgcagcaataaactttcagaagatagccattaccggcctgaaagccttgttaaattatttcttctaccagacgttttgtgtcttgctaagagaagaaaatcacttgatgctccagtggataataatgatgactatatcccatctgaaccttgggaagacgacaactattgcaatgatcacattcatgaaggacatgtcagtagtgatgtagaaaacccagtaaatcttattacttaaccgagacaagtcaaccagattga

SEQ ID NO: 280 - DNA, 418 bp, Zea mays
  Clone ID: LIB3136-059-Q1-K1-C8
cccacgcgtacggtttgcttgtttcttgtataaacattgtaacttaatagttaatggtaatacctagtgcttggcgtaagttctttaaggactacacattctttttaaattggcactgtaccatatgaataaataactctagtaatgtgataccgattttgattatgcattctgaaggacaggaaccccaatggaaacatatacctgtgggcactgcatgagcaagctgtattttggcaaagagtatatatgctgatcagattgctttgatccatccattatggacatgaatagacaactgggttactgcaaaagtggctcctacttcacaatgtaataaacactacaaaaaacctttcgatgggttgttggcccatggattacatgcttactaccatgtgattgttgtatttgcttt

SEQ ID NO: 281 - DNA, 261 bp, Zea mays
  Clone ID: LIB3136-059-Q1-K1-C9
tgcaggcctctcaaggtgacctattgtctgttttgtcttagctgggctcattcggtatttgggacattatttgcgaagtcaagtgggaatccccttgcatgagatttgcctttgcagttgctcgaaagaattttgtctgtcaccaaagctcgtgctatattattgaatggtgctgctagaaagggagaacgcttattttcccctgtttcatttgacttgttcatgagagccacattgttctgttactaatgctccgagtga

SEQ ID NO: 282 - DNA, 380 bp, Zea mays
  Clone ID: LIB3136-059-Q1-K1-D1
gatacttcgcccctgtaccttattcagttggggcctctactatttgttcgagactctacgcttctcttgcctgttcatctatcaaagcaacatttgctttggtatggttatgatcgcaagaatggagttcattccctctgtccagctatatggtcaaaacataggagatggttgatgatgtcaatgatgtgtctcaatccaatagcttgttcgtttatggatctgcaattccctaatgggcaactaacatatgttgctggtgagggaatatcagccagtggctttcttccgttatttggtggtttgcttcaagctcatggaaaatatcctggagaaacaagagtgagtttttcttgcaagaataagcgtggcacaagggt

SEQ ID NO: 283 - DNA, 337 bp, Zea mays
  Clone ID: LIB3136-059-Q1-K1-D2
gccccatcaagtttggctgatgtccttgcaaatccattccatgcactgttttatgtggtcttcatgctgtcagcctgtgctctgttctcaaagacatggattgaattttctggttcatcagcaaaggatgttgctaagcagctcaaggaacaacaaatggtgatgccaggccatcgtgagtcgaacttgcagaaggaacttaaccgatacatccccactgctgctgcatttggtggtgtatgcattggcgcattgaccgtcctggctgatttcatgggtgcgattggttcaggaactggtatattgctcgctgtgacaatcatataccaatacttcg

SEQ ID NO: 284 - DNA, 337 bp, Zea mays
  Clone ID: LIB3136-059-Q1-K1-D3
gccccatcaagtttggctgatgtcctttcaaatccattccatgcactgtttatgtggtcttatgctgcagcctgtgctctgttctcaaagacatggattgaattttctggttcatcagacaaagatgttgctaagcagctcaaggaacaacaaatgggatgccatccatttgagttaacttgcagaagaacttaaccgatacatccccactgctgctgcatttggtggtgtatgcattgcgcattgaccgtcctggctgatttcatgggtgcgattggttcaggaactggtatattgctcgcttggacaatcatataccaattcttctaaacctttg

SEQ ID NO: 285 - DNA, 253 bp, Zea mays
  Clone ID: LIB3136-057-Q1-K1-B3
ctaaaaaggaaaataggcctttggttctgccttttgaattatctgttatgggtattttattgctcatcgtattaggtggtttctatgtggtccattgtgtatgggcggcagctgaagcgtactccgcgccttcaattgtgttgacatctcgttcacgagatgggttgcatgtttttgatgatttccgcgaagcttactcatggctgagccataacacatatgttgatgacaaggttgcttgctggtgggacta

SEQ ID NO: 286 - DNA, 444 bp, Zea mays
  unsure (1)..(444): unsure at all n locations; Clone ID: LIB3136-054-Q1-K1-C2
ggaaataagaaagaccagtctgattctgatggttgctgctgtcaaatggataagtttggcgggggagaaaagaaatcatgctgctcacctattcacatcaatgatagttcaggtggagctgtgcttcgttatgcctttagcacctgcgatttctttctgccctcctagaaaaaatcctcgaaatcaatgcttcgttgcaaatctgatctatcaacgtgaccatatagcancaatacttctcctgaggaagaacggaggttctatctctacaatgatcttagagatgtatttnntnnatggtactcagatgcagatgaaggcgagctgcgagtggagcttgatttccccgccgatcccaagtactttgacataagcaactgatggttgcgctgctgcaccggacaataataatctgtaaatatggtattatgactaacttggtca

SEQ ID NO: 287 - DNA, 428 bp, Zea mays
  unsure (1)..(428): unsure at all n locations; Clone ID: LIB3136-054-Q1-K1-C3
aattaccgggtgcgccgacgcgtccgggaccttagtgaggtggagccttgcgtttcaggccccaaaaggcctcatgatcgtgtccgtgtgaaggaaatgaagtgagactggcatgcttgcctggacaacgaagttggtttcaagggctatgcggtgccaaaggaacagcaaggcaaagtatggaaattcgacttccatggaaggccagctgaaatcaagcatggcagtgttgatcttgcagcaatatgtagctccacaaacacatcaaatcccagcgtcatgattggtgctggccttgtggcaaagaaagcctgcganntgggccttgaggtgaagccatgggtaaagacaagccttacccctggatctgtggttggtaccgagtacttgaaacatagtgtgcttcaagattatctgaaccagcaagg

SEQ ID NO: 288 - DNA, 429 bp, Zea mays
  unsure (1)..(429): unsure at all n locations; Clone ID: LIB3136-054-Q1-K1-C4
ggacgaccgcggcaccggccagtcgtggacgccgaccaacgtcaccgcgcccctggacgccggcatcgtggggttccgcgacctctgcctgcatgcggactacgcgggggcggtatccgtcgctgcctgccgcgacggcttgcagtggtcgctataccccgacggcttcgtacgcccgcccgcgtggctcctccttcaatggcagtgcctggctgctgatgccagcgggggtgtgacggtgaaactctgcgacggggctggatcgtcttgcgagcgctgggtgttccnntncgtcggcaccatcttcaacaccggcaccgggatggtcttggacgccaggccatctgcgggggctaatgctagccaagtcatcgtgtcgcccgccactgggagtcccacccagcaatggacgctcatgctgggatctca

SEQ ID NO: 289 - DNA, 358 bp, Zea mays
  unsure (1)..(358): unsure at all n locations; Clone ID: LIB3136-054-Q1-K1-C6
ggaaataagaaagaccagtctgattctgatggttgctgctgtcaaatggataagtttggcatgggagaaaagaaatcatgctgctcaccttctaagatcaatgatagttcaggtggagctgtgcttcgttatgctttgcacctgcgatttctgtgtctctccaagaaaaaatcctcgaaatcaatgcttcgttgcaaatctgatctatcaacggcgccatatagcagcaatacgctaccttaggaagaacggaggttctatctctacaatgatcttagagttgtatttccnnnnaggcactcatatgcacatgaaggcgagctgcgagtggagcatgatttcccccccgatcccaagt

SEQ ID NO: 290 - DNA, 408 bp, Zea mays
  unsure (1)..(408): unsure at all n locations; Clone ID: LIB3136-054-Q1-K1-C7
cagctagctagccttccctacagcaactgcttacatacaacacttccatcttcccgagctcgtgttcgatcaattcccaattcaaataataatttaacaacaatggtggttcccgtcatcgacttctccaagctggacggcgctgagagggccgaaatcctggcgcacatcgccaatggctgcgaggagtggggattcttccagctcgtgaaccacggcatcccgctggagctgctcgagcgcgtcaagaaggtgtgctccgactgctaccgcctccgggaggcccggttcannttttttgagccggtgcgcacgctggaggcgctcgtcgactcggagcggcgcggctaggcggtggcgccggtggacaacctgtactgggaggacattttctacattcacgacgga

SEQ ID NO: 291 - DNA, 407 bp, Zea mays
  unsure (1)..(407): unsure at all n locations; Clone ID: LIB3136-054-Q1-K1-C8
cggacgcgtgggttcttggccttctctgcttcgctgttcttgttcttgagatcgcgctttctgaccggggagtgccgtgccggagatcctgaaaagaggtgatgcaattgcacagtatagatacggctttctctgctattgtcccctgcttttgtttcatggatatttccttcttcttgttgccgactgaatgataaggtctagatatatatatttgctttgcttggaacaactctctgaaagtcccggaaactctgtcggccggatcatcgcatcgcagctcccgntttttgcatgcagcatgcagcaccgatcgagtaactgatgctgaaattctcgtgaaacagacacacaccacacaccacggttgcgcgcgagaagtccgagacatggacagggagcagatg

SEQ ID NO: 292 - DNA, 429 bp, Zea mays
  unsure (1)..(429): unsure at all n locations; Clone ID: LIB3136-054-Q1-K1-D1
gcacggcacgcagatacatatagagagaggttagctatagcttgcacatctatttaactaactaactaactggctagctagctcgatcggcagagcaaagcgaaagcagcaagaagcaaagcaatggagaaccctgcgagtgtgctagttctaccagcgcagttcaccaaactcaccttccgaaacctgtacatccgccgggccgggccgggcagcagggagataaccgaggagggcaggtgcgacctggacaagagatacgtgagtgacttccccgtctacgacngccgcngccccgacgccagccttgtggcccgcgtgcaggggatcaccagcgaaatcgggaacgcgcaccaactgttcgtcgttgttttcgacaccgacaggctcaagggctccacgctcgtcaccaatggcgtgataacggcc

SEQ ID NO: 293 - DNA, 447 bp, Zea mays
  Clone ID: LIB3136-054-Q1-K1-D11
atcagccgccgtatggagcaggagtgagggagcgcgatggcggataagaagcagcgcccaggagggtccaggaaggacgaggtggttacccgcgagtacaccatcaacctccacaagcgcctccacggatgcaccttcaagaagaaagcccccaatgctatcaaggaaatcaggaagtttgcacagaaggcaatgggcaccactgacatcaggattgatgtgaaactcaacaagcacatctggagcagtggtatccggagtgtgccgaggcgtgtccgtgtcaggatcgcacgcaagaggaacgatgaggaagacgccaaggaagagctttactctcttgttaccgttgctgagatccccccagaaggcctgaagggtctgggtaccaaggttgtggaggacgacgagtagatctgcctgggtactgatctgtgtcaactgtcaaat

SEQ ID NO: 294 - DNA, 285 bp, Zea mays
  Clone ID: LIB3136-054-Q1-K1-D12
caatctgagagagagagagagctccttgccaagcattagaggtggcatgaaagaagagggctatgctccggttgacagacctctacaccctcacatactaataactacaacgacggacacagccggcccttcaccacaagcaaccgctccagacggcttgattggcaacacccccaacgataccatgctgtgcgacactcgtctgtataccaatgagacaatacactacactgcatcgcttactaatgcttgctacatacactataacagacgtgatatgctgca

SEQ ID NO: 295 - DNA, 282 bp, Zea mays
  Clone ID: LIB3136-054-Q1-K1-D2
ctgacatttatcgccgaggtgccagaacaaaaggggctcttgtagatgtagcttactgcgaagaacttggagtttctctgctggaagctgctatgaatggatagtctattcatgcgacataaagtggatcccctgtggagattgatcaggtccagtacaatggtgtcacttagcgatcctgacgatcagattgccagtgacgctgcactatataaacttccttttaatgaacatctatggtcaaggcgcagacagaatggactgaccaatactgaccaaatc

SEQ ID NO: 296 - DNA, 478 bp, Zea mays
  unsure (1)..(478): unsure at all n locations; Clone ID: LIB3136-054-Q1-K1-D3
ttcactgtctactactgccgctagccgcgcctgcttgctgcttccccctctctttttctggggtctccattccagcatggccaccaccagtccaccattccagcatcgccaccacccgagacaaaaataataataaaaaccaacaacaacactgtagcgagaatatacggcaaaaccctagatctctctctcctctcggcattgctggctggggtgtgcggcggcccgcagtggtgagggacgcacggcgatggcctccgccgccgccgtcatcgcctcgccggtcccaggnnccgccgcggccgagcccgccgcctggctcgtcgacgagcgctacggcttcatcaccttgctgcgcggcgagttcgccgccgccaacgccatcgtcgaccacctcatcttccacctccgctccatcagcgagccgggcgagtacgaccacgtcttctctctcgtncagcagcgccgtcaccactgg

SEQ ID NO: 297 - DNA, 395 bp, Zea mays
  unsure (1)..(395): unsure at all n locations; Clone ID: LIB3136-054-Q1-K1-D4
cagcagctgccacagagacatcagagagcggtcctccttgtgagtctgagctgaggaggaggagaagcagcagcggcgcagcgggaggaggaggccgggagagcgaagatgcgccgcgtcgcgctgttgctcgtcgccgccgtgtgcgcgctggcgccggctgccgcggtcgtcactgacggtcttctcccgaacggcaacttcgaggatggcccgcccaagtcggcgctggtgaacggcacggtggtgtcgggcgcccacgccatcccgcggtgggagacgtccggcttcnnggagtacatcgagtcggggcacaagcagggggacatgctgctggtggtgccgcagggcgcgcacgcggtgcggctgggcaacgaggcgtcgatccggcagcg

SEQ ID NO: 298 - DNA, 477 bp, Zea mays
  unsure (1)..(477): unsure at all n locations; Clone ID: LIB3136-054-Q1-K1-D5
caacaatagaccaacatttaatcgttccctgtcgacagaacaaatgaaagagagggggagctgtttctcagatcttgatatcagggatgttcagatggatgatcgagtgactctgactaggtggtcaaagcaaaatgtaacacggttgcctaacaagaattcaacaaacataatagagtggaaggaaaaagcagtggaatcaaaatctttgtcctggggctttgctgaagcgaagtgcatatccaagattggtagagaggacacaaaaattactgcatgggaaagtattcaaaaagcaaaagctgaggcagcaattcagaagttagtgattaagatggagaaaaaaggatcatcttcgctggataagattttgaacaccctcaagtctgctcagagaaaagcccangtgatgcgtgagcatgagcttgatgcagtaacagcaaaaccaagatggaaaaggctctaggaaggcaaaaa

SEQ ID NO: 299 - DNA, 236 bp, Zea mays
  unsure (1)..(236): unsure at all n locations; Clone ID: LIB3136-054-Q1-K1-D6
gcgctccagcttccctccattctcgggcaaaaattctgcggcgagctccgatccggtccgactactaacccacgccgcagaagccgcgcgacctgatcgcgcgggggtcgaggagaggggaagcgcggcgccncggttgcctgccaccgtaccgccgcatgagaaggaagagggagcccgtattccttcgccccgctgtccgccggaccgatggactccgagcactggatctcgcg

SEQ ID NO: 300 - DNA, 403 bp, Zea mays
  Clone ID: LIB3136-054-Q1-K1-D7
cccaaccatagtttcgtccgactctcatgatgccctaccatttgttggaacaattattcgagcgatgcaggttatatatgttgatagattctcacctgcttctcggaaggctgctgtaaatgaaataaagagaaaggcagcttgcaatagcttcccgcgggtcctgttattccctgaaggcaccacaacaaatgggagatttctgatttcgttccaacatggtgcattcatacctggctaccctgttcaacctgttgttgtccattatccacatgtgcactttgatcaatcatggggaaatatatcgttattaaagctcatgttcaagatgttcacacagtttcataatttcatggaggtagagtaccttcctgttgtctaccctcctgagatcaagcaagag

SEQ ID NO: 301 - DNA, 373 bp, Zea mays
  unsure (1)..(373): unsure at all n locations; Clone ID: LIB3136-054-Q1-K1-D8
gagagattcgccgatatgcggtccaaaggctttaatttgctaggaccacagtgcattctttgctgtgctaaagaacgtcgctgtctacctaaacaaagttatacgtgttgtcttgcaatggatggggttaaaacactttgttcaggctttgaaaagtctgagaaggttaggattgaagaactagtaacagccatgggaggtcatttgctaactaaacactctatggacgtgaattttgtaatcgtgaaggatgtcttggctgccaaatataaatgggctctgaatactttnnanaatcccattgtcaccatgaagtggttagagcaatgctggattgagcatcgtgttgtgcctcatgaaccttacaggattc

SEQ ID NO: 302 - DNA, 468 bp, Zea mays
  unsure (1)..(468): unsure at all n locations; Clone ID: LIB3136-054-Q1-K1-E1
ggcacgcctgcagcaagcagtagcctgcgggcagcactctcatactgcgtgaggcaagggggcgcctatgactaccaccactacctctgccttctccacctggccccggccgtgcgcaaggccgcgttcaccttccgcgccttcaacatccagacagcaagggccatggatgtggtgtccgacccccggaccggcctcatgcgcctcctctggtggaaggaggcggtcgacaaggtctttggcaacaagctggtcgagcacctagttgcccacgcgctctcttcggtcannnnataccataaggttagcaagcactggctgaagcggtccgtggaggcgaggatcaacgacaccaaccgtgaggaaggcaccattcctgggacgagcgcggacttggagaggtatgcagaggacacccagttcaccatcctttacatgaccctgcatgctggcggaatacagtctacc

SEQ ID NO: 303 - DNA, 435 bp, Zea mays
  Clone ID: LIB3136-054-Q1-K1-E10
gcagctctgaagcgaaagagatcgatcgtatctgcggaacaagcagcgaaggatcggagcctatccaatggccgagggcaacagcagctccggcggcgacctgttctccagcggcaagctggtggcgggggccgccgtgtcggtgttccagcagaagagcgtggagaacgtcgacaagcaggaggtcgccggcgcggcggccgagctcctgcacgcggcgtccgtgtacggtaagctcgacgacaagccggccgggcagtacgtcgagaaggccgaggggtacctgaaggagttcagcgcgggacacgccaccgagcaggagcagcctgcggcggcagcaggcgacgacgcggcgcccaagccaccggcgccggaggcgcccaatgagccggcggcggtgcctgcgccggccgcggaggaaggcagcaagtcgtc

SEQ ID NO: 304 - DNA, 413 bp, Zea mays
  unsure (1)..(413): unsure at all n locations; Clone ID: LIB3136-054-Q1-K1-E3
cagcctttgtttccgtgtgaaagtggtgtttaccaacttgttgaaatcatcaaggtcctcggtcccccaccaagggaggaatttaaatccttgaccccaatttccccaaattttaatttccaccaattaaaacacaacccttgcaccaggttttttctacaaagggttctcccacaagctctgtagatctggtctctcggctactccagtactccccaaatctgagatgcactgctttggaggcacttgttcacccattctttgatgagcttcgagatcctaatactcgccttncaaatggtcgctttttgccaccactattcaatttcaagcctcacgaacttaaaggagtcccatcagacattgtcgcgaaatttattccagaacatgcaaagaagcaatgctcctatgtt

SEQ ID NO: 305 - DNA, 394 bp, Zea mays
  unsure (1)..(394): unsure at all n locations; Clone ID: LIB3136-054-Q1-K1-E4
gcgcagccgagcaatctctataaacctttcgacgtcccctccctctcgccctgagctctgggctggcccggggttctgcaattcgccgcctcccagctccctcccgatccccaagttctcactccaccagaagcgcagtgtctcacttgaatttccacttgctgaccggtcagacgacgaagaggtgcccgtgcatgccaagtcggcaccttcatcgccgactgcaggctcaggtgttaccttcttcagtggtactgatgctaccattgccaccgagaatctgaggaggggccttnacctcaaaattgaggataactgaatggcggttgggtagttctgtgtacatagtttaactacaactgacctttgtagtatgtatagggtaacccgggat

SEQ ID NO: 306 - DNA, 308 bp, Zea mays
  Clone ID: LIB3136-054-Q1-K1-E5
cgccaggttccggcgccgcacggcgacgtgcatggccagcagcggcggtggcggtggccggggcggcgaaaatgatggcctcgtttggctgccccggcgggacgtgatgctcaacggcctgtccagtgtcgccgccgggctcgcctggtacccgggcgtcgcgtccggcgtggatgcggtgtgcaccagggccgacaaggtgaacgagaagaccgtgcagtgcacggacccggccgggcagcttccgtgccctctggtgtcgccgacggaccccgtggacttcaagccggaaagcaaggtgacgcgca

SEQ ID NO: 307 - DNA, 388 bp, Zea mays
  unsure (1)..(388): unsure at all n locations; Clone ID: LIB3136-054-Q1-K1-E8
ctgcattgcagaagctttttgagaactctagcatagggtgtgaagcgtacaaccttggaaccggaagaggtacatctgtgctggagattgttaaagcatttgagaaggcttctgggaagaaaatacctctgatttttggtgaaaggcgcccaggtgatgcagagattctgttttcagagactactaaagcagagagggagcttaactggaaagcaaaatacggtattgaagagatgtgccgcgaccaatggaactgggccagcaagaacccttatggctacggatcacctnactctatcaagcagaatggtcaccaaacaaacggatccgctgactcctccaagcagaatggccaccgcacaaacggttcaactgactcacccaagcg

SEQ ID NO: 308 - DNA, 398 bp, Zea mays
  Clone ID: LIB3136-054-Q1-K1-E9
cccgaggccccgatcccccctttcatttcaactcgcatctcccgcgccgcgcctgcccagcgcggcagccccgatggacctgccagtggtagatctcacgccgtatctcggggccgcagccggcggcccggccgcgtctggcgtggaggagctgcgcgcgctgtgcgccacagtgagcgctagtctgcgggacacgggggcgctgctggtgatggacccgcgctgctccgccgcggacaacgaccgcttcctcgacgtcgtcgagcgctacttcgcccgatccgccgacgcatagcgcctccaggaacggccccacctccactaccaggttggtgtcacacccgaaggggtggaggtgcctcgcagtttggtcgacaagaacatgcatggaaaagatc

SEQ ID NO: 309 - DNA, 452 bp, Zea mays
  Clone ID: LIB3136-054-Q1-K1-F10
ccgagtggccccggcgacgcgaggccgaggcgagctaatctgacggcggcagtgacgactccaacgaccaggcgcggaggctgcactgctccagcgaaggcaccatgtcattcatgtctccattcccggggatggatctaagtaaaatggatcccgggactctgaccctccttggggcagctggttgtgtaatgctgactatgcatttcactgtgcaattggtgtcacaacatctcttctattggaaaaaccccaaggagcagaaagccatacttattattgtgctgatggctccactatacgctatctcttccttcgtgggtcttcttgatatccagggtagcaagacatttttcacattcttagatgctgttaaagaatgctatgaggcactggtgattgctaagtttatggcattgatgtacagctacttgaatatatctatcagcaag

SEQ ID NO: 310 - DNA, 447 bp, Zea mays
  unsure (1)..(447): unsure at all n locations; Clone ID: LIB3136-054-Q1-K1-F2
catacacaagcacaagcgcactctagcaatggcttctgaggttgtccgccctagcgacgccgagctactaaaggcacaagccgacatatggcggctcagcctctcctacctcacgcccctgtcactgaggtgcgccgtggagcttggcatccccactgtgatctaccgccatggcggggctgcctcagccgctgagctggtcacggcgctgtctctcccctccactaagctgccgttcctccgccgcctgctgcggctcctcgccgcgtcgggcgtgttcaccgtcgacaagcnnatcacggaggaggagcggtaccgcatcagccccgtgtcctacctcctggtggacggcatccctcacgaggaccacatgaaccacaccgctctggtgctcacctgcacctcgacgcgctacatcgaggcggggatagggctggcggaattggt

SEQ ID NO: 311 - DNA, 373 bp, Zea mays
  unsure (1)..(373): unsure at all n locations; Clone ID: LIB3136-054-Q1-K1-F3
atactatactactatcacaggaggaagctaggaggaaatcaaagcaacaaagttgctggccgagagaagcaaccatgagacctcaggcgtcgttactcgtcacactggctgttatcgtcgtcgtccttgcagctctgccactcagcaaagggactgaggaggaaggaggaggaggggaggcagtcgccgccgtggacgccgccgccggaacgagctcgtggccatgctgcaacaagtgcggtttctgctacctgtctgacccgccgcagtgccaatgcctggacttntnnnccgtcgggtgccacccagagtgcaagcagtgcatcaggtacaccgccgacggtggcgtcgacatcccgcccgtgcacgccta

SEQ ID NO: 312 - DNA, 360 bp, Zea mays
  Clone ID: LIB3136-054-Q1-K1-F4
aaaaactgaatttaccatggcccacttgatctcttctgcaatcgcaggcgcgggcaacttggtcgctgatggaatcagtggtgtcactggcgtagcgtcgcaggttgtagaaggcgtagaggacactttaggcagtatcgtagaagcaatcgaccaaggagtcaaggatgaggaccaactggatttgcccaagtacgtgtgtttcaagggagataacggtctgtacctgagtgctcgaacggttgaaggccatccctacctgcagtttgcatcggaagacattggcgacccaagtgtgaggttcatcacctacaaccacaaggtgaacggcaaacgggtggtgcgcttcaagtcgaacca

SEQ ID NO: 313 - DNA, 377 bp, Zea mays
  Clone ID: LIB3136-054-Q1-K1-F5
tgttttgcaagttgataagcctcccaataagtgtgcagcctatggagagggcactctccttacaccagcaaatcgttcggatgcctgtgtgaaatactctgatgttgatgaaaatggcattgtccgtatgatgttgtgccgtgtaataatggggaacgtagaaatagttcaccctggatctaagcagtgccaacctagtaataagtattttgatagtggagtagacgaccttaaaaatccacggcattacgttgtgtgggatatgaatctgaatagtcatatctattctgagtttgtagtcactgtcaaattgccttctaaaaccaaagattcctttgtatcgcaggaaaactgtcagaattcgtctgatctatcac

SEQ ID NO: 314 - DNA, 219 bp, Zea mays
  Clone ID: LIB3136-054-Q1-K1-F6
acgcggacgcgttgggtttcccgccaccaccgcaagggattccaaggccaggaagaaccagcgggggttaaaaaaaatttccggcttattcaccaagtccaatttgaagggcctattccggggatcttggcgcaaattaacccccttcccaaccggtgatgtgacccgttcctattccaatacaaagggccctttcgtccagcttgctttatacaaact

SEQ ID NO: 315 - DNA, 432 bp, Zea mays
  Clone ID: LIB3136-054-Q1-K1-F7
gatgtgagaaggaagaacccaaggggaatacttatttctccaggacctggtgaaccacaagattcgggaatatcattgcagactgttcttgaattaggcccaaccatcccaatttttggagtttgcatgggtctgcaatgcattggagaggcatttggaggaaagattatccgtgctccttctggagtgatgcatgggaaaagctctccagtttattacgatgaggaattaggaaaggcattgttcaatggcttgccaaacccttttactgccgcgaggtaccacagcttggtcattgagcaagaaaccttcccacatgatgctttggaggctactgcatggactgaagatggacttatcatggctgctcgccacaagaagtacaaacacatccaaggtgtccaattccacccggagagcatcatcacccct

SEQ ID NO: 316 - DNA, 112 bp, Zea mays
  Clone ID: LIB3136-054-Q1-K1-F8
aaaaaaaaaaaaaaaaaataaaaaaaaaaaattaaaaaaaaaaaaaaaaaaaaaaaaaagggggggtaaataaaaaaaaggggtggggaaagaaaaggtctggccgtttaaa

SEQ ID NO: 317 - DNA, 450 bp, Zea mays
  Clone ID: LIB3136-054-Q1-K1-F9
ctttggtgagatcaccaccaaggccaatgttgactacgagaagattgtcagggagacctgccgcaacattggttttgtgtcaaacgatgttgggcttgacgccgaccactgcaaggtgctcgtgaacattgagcagcagtcccctgatattgctcagggtgtgcatggccacttcaccaagcgccccgaggagattggagctggtgaccagggacacatgttcgggtatgcgaccgatgagacccctgagttgatgcccctcatccatgtccttgccaccaagctaggtgctcgtctcaccgaggtccgcaagaacggaacctgcccctggctcatgcctgatgggaagacccatgtgacagtcgagtaccgcaatgagggtggtgccatggtccccatccgtgtccacaccgttctcatcttcacccagcacgacgagacagtgaccaa

SEQ ID NO: 318 - DNA, 423 bp, Zea mays
  unsure (1)..(423): unsure at all n locations; Clone ID: LIB3136-054-Q1-K1-G1
acatcgggaaccgccgccgacgccgcaggaggagacgcatcgaggagagcaagcgaggaagcgaccatgagggccaagtggaagaagaagcgcatgaggaggctcaagaggaagcgcagaaagatgaggcagagatccaagtaggcagatcgatatggattgtggacgtgatgacatgcgtgggtacatacatttcttcggatgcgttggtgtgcctgtggagagatgtcaacctgccatggtgtcacggtccgccatcagttgaacgtcttgcctgcacttcagtannccncttttcatggttctagttgtatttgaatccagcgtttgccactaagataaatcagacagtcgttttgtgaacctattatgatggagctttatttgctgataatatctagctacctatttgagctgagtgat

SEQ ID NO: 319 - DNA, 362 bp, Zea mays
  Clone ID: LIB3136-054-Q1-K1-G11
gcgacgatgaaggttttcgtggagcctggtttgaggcgactgttgttaaagctgggggcagcaagttcctcgtggagtatgctacgctgaaggccgatgacgggaccaagcctctgaaagaatctgtagaagcacggcacatcagaccttgccctccagatatccctgccactgatggattcaaactacttgacgaggtcgatgccttctgcaacgacgcgtggtgggtcggtgtggtatccaaggtcctcggcgagaagaggtgcacggtctacttcaggccttggaaggaagagatggagttcgagcatgcgcagctgacgttgcactgtgactggatgggcgggagggggatgcggctt

SEQ ID NO: 320 - DNA, 312 bp, Zea mays
  unsure (1)..(312): unsure at all n locations; Clone ID: LIB3136-054-Q1-K1-G2
gcgtccggatcgggttccaaccagcccaaaccaccccgccgccggccgtttccccgcactccaccacctgcgccggcccatcctcccggcctggcccatgccaacgcgccccgcgctgcccttgccgtgcctcagccggatccccctcaaagcacgaccacaccacgccgccggtaccggcgcaccatcgaaaccaaccctagccaaaccaaatcagatcagatccccttcccctctccacgcccaaatcgctccgatccgccgcgaccgcgatggacgacgacgacgacgtgtcnccctcctcctccccgt

SEQ ID NO: 321 - DNA, 409 bp, Zea mays
  unsure (1)..(409): unsure at all n locations; Clone ID: LIB3136-054-Q1-K1-G4
gcaaatagaatttgaatctctatgctctagttttgatggacatcagaatgtgggcaggcgtatcttgaatgatttctcaagggcgtctgctgatcttgctgctactgctgctgatttgaaagttagacttcagatttacaaggtccgtcttctactgctcactaggaaccttaaggttgcgaagcgagaactcaaagtactaatgaacatggcacgtggtagggattcatctacagagcttctcttgaaatctcagctggagtatgcccgggggaattataggaaggctgtgaanctattgagcacaccaaataatcggactgaaccagcaatgctagccattttccacaacaacatgggatgtatactccaccaacagagatcgtatcacgcctctatatggtgcttt

SEQ ID NO: 322 - DNA, 360 bp, Zea mays
  Clone ID: LIB3136-054-Q1-K1-G5
gcgagtggcccagacgtcgcgactcgcgaggccgaggcgcggcggcagcgacgactccaacaaccacgcgcggaggctgcagtgctccagccaagtagcttttggtgtgctgaatccaacaccagctcctcctccctttgttatgtatcctgagatctccatggagggaacgcaagctcaggacacagttattacagtcacacaatatactgtacctattctatagtgaagctctgaatttcatttctttttaaatatttatacttcggctgtttgtattattgtagctaccatgaaaacagttgcttaatgcatctctagatcatttctattaaaaaaaaaaaagaaacctataaacaa

SEQ ID NO: 323 - DNA, 453 bp, Zea mays
  unsure (1)..(453): unsure at all n locations; Clone ID: LIB3136-054-Q1-K1-G6
gtcgacgctagtcaactacattctgaatgagcaacatgggaagagaattgccgtgatactaaatgagtttggagaggaaattggggtcgagagggcgatgatcaatgaggggcaaggtggtgcacttatcgaggaatgggtggagctggccaatggatgtgtctgttgctctgtaaaacacagtctggttcaagcacttgagcagcttgtgcagagaaaggatagaatggatcatatattacttgagacaacagggttggccgatcctgctccacttgtttctgttctnnggcnagacgatcaattggagtcgtcaattgtgctggattctattattacggttattgatgcaaaaaacttcagggttcagattgacgagcacaaaaactcttcctcattccctgaagcatttcatcaaattgcaattgcggatggtgtgatattgaacaaaat

SEQ ID NO: 324 - DNA, 450 bp, Zea mays
  Clone ID: LIB3136-054-Q1-K1-G7
ggagggagaggaagaggaggaacacctccggcgtcaatccagcaggcagcaaatcgatgagagagaagaggagagacttcaagagagaggtagagagagagagagcggactaagcggcgatggctgcaggcagcagattggtgagagagaggcggatcggcttctcggtagagaggtgaagatcgcgtgagggaggagaggcttccggagagggagccagacagcgtacagcacgggggaggagaggcttctagagatggagccggagagcacacgcggccgcgccgagcgtggaaggaggcagcagtcacaggagagggcttttgggttgagccttctgacacgtgggcttagtgggctgcagactcatgaatagaggatgaagaggttaaaggctgctgcacggttgaccaatatcatgttgggttaccccttcatcacctgagatca

SEQ ID NO: 325 - DNA, 384 bp, Zea mays
  Clone ID: LIB3136-054-Q1-K1-G8
gtttaagaaaatcattttgaaggctatcattcttctcacagaggaagtgcaaaatgccggggcttttgtagatggggaactgttttcagaacaaatatacatatgtacagaggacccacaccaagttgattttcttgtgccattcaagaatgcttcttcctggtgtagaatgcaccttagagggagtttctgtgctcattcgctttattggatcaggcagcgccttgtcatattcaggtcctaaagaatctatttcagatgctatatctgatctaaaggtggacatcgttacaaatctaaaaaagccgttggataaaattcttgatgaggcataatatggccctgccactgttgatgtggataaaatctccatcttattaaggt

SEQ ID NO: 326 - DNA, 325 bp, Zea mays
  Clone ID: LIB3136-054-Q1-K1-G9
acaacttactgcttgctctagctagctagctgctcccggcccatatccactacaggcgtaggctagcatcagcagcagcaatggcctcggtgacgaggttcccggccgtggccctcgtcctgctgctcgccgccagcgccttcctggccagcgaggtggcggcctgcggcggctgcccaaaaccaactacttctacatcgccaccaccgccgttgaccaccatcacgccgtgccctacgacgacgttcaacttcggcggcaagtgccccaagaacgcgctcaaactgggcgtgtgcgccaacgtgctgggcctcttcaaagtgtt

SEQ ID NO: 327 - DNA, 55 bp, Zea mays
  Clone ID: LIB3136-054-Q1-K1-H1
atcgacgtggcgaagcatgttgtccgggacgccggcgccaaaggtctcttcaagg

SEQ ID NO: 328 - DNA, 405 bp, Zea mays
  Clone ID: LIB3136-054-Q1-K1-H10
cgactcccgactgccggccctgccctgcgcctcgcggagccgcggaccgcccgggcaccaccgaaaccctagagcaagcagggatgcacggtccggtcccgctcctcctcctcctcctgctcctctgcacggccgcggcggcctccgacggctcccagccccaggtacgtcacgccagccgccagcgtcttctcttcccctatcctcgcttggctgcctcgaccccccctgccgcaatcgatcccagctcacgttgcgcctccgcgcaggcgcaggcaccggcggcggcgcggcgggggatggtgccggtggcccccgcggaggcggagctcggcgccatggtggcgctcgctctcaacggcacgcggcgccggctcggtggcagctttcagctctgcgcgccct

SEQ ID NO: 329 - DNA, 273 bp, Zea mays
  Clone ID: LIB3136-054-Q1-K1-H11
ctcacacatttgtggctgaatcgctcggtatggtgatacatacaactagaggccgggacgaccacatgcgggatatatcagttttctgcctatccctgttcatgaatcaccatatggtaacacccgttatgtcctgagccatcgaggatcttctctcaaagctattactaaatgtatgctcccaccgtattacaccagtagctatagacctcgtggatctaatattgacaggagatcatatatttttttttacttaagacacaaccagcgtag

SEQ ID NO: 330 - DNA, 437 bp, Zea mays
  unsure (1)..(437): unsure at all n locations; Clone ID: LIB3136-054-Q1-K1-H5
gttattgttggcgtcggcggcaggccattgacgcgtctcttcataggccaagctgctgacgagaaaggtggactcaagaccgatgcattcttcgaaacaagtgtagccggggtatacgcgatcggcgacgtggccaccttccctctgaagctctacaacgagcagaggagagttgagcacgtggaccacgcccggaagtccgccgagcaggccgtgagggcaatcaaggccaaggagtccggcgaatcggtggccgaatacgactacctgccctacttctactcccggtcgntcgacttggcgtggcagttctacggcgacaacgtcggcgacgacgtgctgttcggcgacaacgacccggcctcggccaagcccaagttcggcagctactgggtgaaggacggcaaggtcgtcggcgtgtttctcgagggcgggtc

SEQ ID NO: 331 - DNA, 412 bp, Zea mays
  unsure (1)..(412): unsure at all n locations; Clone ID: LIB3136-054-Q1-K1-H6
ggagaggagcgggcacgacggctgcaggagacccagatgagctgatcgagcagcccgtcgccaagccaaccggacatggtgagcgacggcgcgcgcgggctgctgggcgcgtacgagctcgggcggacgctcggggagggcaacttcgggaaggtgaagcaggcgcggcaccgcggcagcggcgggcagtttgccgtgaagatcatggagcgcgccagggtgctgtcgcagcgcgcggacgagcagatatgccgcgagatcgccacgctcaagctgctcgcgcaccccaacgncntccgccttcacgaggtggctgccagcaagacgaagatctacatggtgcttgagctcgtcaacggcggcgagctgctggacaggattcaggcggccagtgagggaaagctcccggagc

SEQ ID NO: 332 - DNA, 439 bp, Zea mays
  Clone ID: LIB3136-054-Q1-K1-H7
gccaccatcgaccttcaagtctcgctacgtagcagtgcaataaaaaaagcagccgcaatggcgagcagcaccatggccctctcctccacggccttcgccggcaaggccgtgaacgtgccgtcgtcgtccgccttcggcgaggcccgcgtgacgatgcgcaagacggcggggaaggccaagccggcggcggcgtccgggagcccgtggtacggccccgaccgcgtgctgtacctgggcccactgtccggcgagccgccgagctacctgacgggcgagttcccgggcgactaccgctgggacaccgcggggctgtcggcggacccggagacgttcgccaagaaccgggagctggaggtgatccactcccgctgggccatgctgggcgcgctcggctgcgtcttcccggagctgctcgcccgcaacggcgtcaagttcggcg

SEQ ID NO: 333 - DNA, 54 bp, Zea mays
  Clone ID: LIB3136-054-Q1-K1-H8
ccggtccgggctgcccgggtcggcccgcgcgtccgcggtccccgcccctgccgc

SEQ ID NO: 334 - DNA, 320 bp, Zea mays
  Clone ID: LIB3136-054-Q1-K1-H9
gaaggttttcagtttgattatgtctttgactggacaatattgaagtaccaacaagctcaaagtgccactgctccaccccgtgcgggccatggcgctgggccttctgggttggcacctgcattacagaatgataggcaaccaggccctgaggaagcaaggactagtggttggtcatcaatggatcggcgtcgtgccccactaccaattacaagtgtggggacattatctaagcagaaagcaccggtagggaatgatgctattgtttctagagacgctgtgatatctggaccaaatttcttgggaaggtcaagtggatcttc

SEQ ID NO: 335 - DNA, 297 bp, Zea mays
  unsure (1)..(297): unsure at all n locations; Clone ID: LIB3136-055-Q1-K1-A10
ctgcgctatcagttgccctggcagtagtttttgtcgtaattactgctgggattgccatcatcaaactcttcaatggaactgtagcgatgcccaaactttttccagaattagatggtcttaattctatctggaatctttttacagctgtccctgttcttgttacggcctatatctgccactataacgttcacagcattgacaatgaacttgaagacagaacacagatcaagccgattgtgcgaacatcngctgtcctgtgctccagtgtttacattgccacaagtttctttgcttatc

SEQ ID NO: 336 - DNA, 437 bp, Zea mays
  Clone ID: LIB3136-055-Q1-K1-A11
ctgcgctatcagttgccctggcagtagtttttgtcgtaattactgctgggattgccatcatgaaactcttcaatggaactgtagcgatgcccaaactttttccagaattagatggtcttaattctatctggaatctttttacagctgtccctgttcttgttacggcctatatctgccactataacgttcacagcattgacaatgaacttgaagacagaacacagatcaagccgattgtgcgaacatcgctgttcctgtgctccagtgtttacattgccacaagtttctttgcttatctcctcttcggtgaaggcacactggacgacgtgctcgccaactttgacgcaaatcttggcattccattcagttcagtcttcgacgacatagtgcgagtgagctatgcgggacatgtcatgcttgtctttcccattgacttc

SEQ ID NO: 337 - DNA, 277 bp, Zea mays
  Clone ID: LIB3136-055-Q1-K1-A9
cccgaccacaccgttcctccgagcccaagagcagccccgcgccaggaggaagtttgttcttttaacaatatgtcgagggaggagaatgtttacatggccaacttggctgagcaggctgaaaggtatgaggagatggttgagtatatggagaaaggggcttaaactgtagatgtggaaaaacttactggtgaggaaccggaccttctgtctggtgcatacaaaaatgggaatggggcttgccgcgcttcatggggcattggttctttcattgaacaaa

SEQ ID NO: 338 - DNA, 432 bp, Zea mays
  Clone ID: LIB3136-055-Q1-K1-B12
ctggcatacaattaatccagtccctggtattatcagcatgttggactaccagtaaaaatgcaggttctctttaatggaaccagtagtatgagttatcgagattctgtttgttttactccttttatttctttgatcttactgcacatcttttttccgatccatgccaggagcgttccttaatgcatttggagcaatcattcttggggcacctgttggagtcaagtactggatagctactatttactggtcgcttgtcatgtccctgttcacgtttgttcccgcagcatgtgtctttggagcatccaggatcgattggcaggatgtgctttctcactccatttatttcacgccaactgatgttgagaactacatgatctctgcaccttgccatggaactgtgctaagaacatggctcggtgcttggcctatgcc

SEQ ID NO: 339 - DNA, 442 bp, Zea mays
  Clone ID: LIB3136-055-Q1-K1-B9
atttggtctgctggatgtgttcttgctgagcttatgctagggcagcctttgtttccgggtgaaagtggtgtggaccaacttgtcgaaatcatcaaggtcctcggtacgccaacaagggaagaaattaaatgcatgaacccaaattacacagagtttaagttcccacaaatcaaagcacacccatggcacaaggtattccacaaaaggatgccgccagaagctgttgatctggtctctcggctactccagtactccccaaatctgagatgcactgctatggaggcacttgttcacccattctttgatgagcttcgagatcctaatactcgccttccaaatggtcgctttttgccaccactattcaatttcaagcctcacgaacttaaaggagtcccatcagacattgtcgcgaaattgattccagaacatgcaaagaagcaat

SEQ ID NO: 340 - DNA, 67 bp, Zea mays
  Clone ID: LIB3136-055-Q1-K1-C10
caacagcgaaggagaaagcagaccaacctagccacccagggagaaagaggccaaaagggaggggaga

SEQ ID NO: 341 - DNA, 195 bp, Zea mays
  Clone ID: LIB3136-055-Q1-K1-C11
gaaaaaaaggatcgacccgcgcgtgcgcaacagcgaatgacaaagctcaccaacctatttatccattgagaaagacgccaaaatgcagcgtagagtgtcaacatgaatttcgttgtctcttacaacatcgcctttcctctagttcgcgctatgcagaacctcatatcaatgtccttcaattccgggactatctcc

SEQ ID NO: 342 - DNA, 301 bp, Zea mays
  Clone ID: LIB3136-055-Q1-K1-C12
cggacgcgtgggcgcagcggcagccgatggtgtcgatgagctcgacgccgcaccctctggatggcgtccgtcccggccgtcgtggggggcggcaaggaagaggaggaggcggtggagtcttgtgccgacgccgcgcccttgccgccggttgggatcgacgacgacgaggagggcccccggagagtgcgcaagccctacaccatcaccaagtcgcgcgagagctggaccgaccccgagcacgacaagttcctcgaggcactgcagctctttgaccgtgactgggaaaaagattgaaagcata

SEQ ID NO: 343 - DNA, 409 bp, Zea mays
  Clone ID: LIB3136-055-Q1-K1-C9
ccctcctgcgcctccaccctcctcgccgcctcactccctctgaggtcgcacatccgtccggtgggacgaagccgcccgcacccatggcctccggtgagctcgcctgcacctacgccgccctcatcctcagcgacgacggcatcgccatcaccgccgagaagatcgccaccatcgtgaaggcggccaacatcaaggtcgagtcctactggccggcgctcttcgctaagctcctggagaagcgcagtgttgaggatctaatcctctccgttggatctgaaattcgtttgtaggtggtggcgctgctccagttgctgctgccgccccagctggaagtgctgcagctgctgctgcccctgctgcagaggagaagaaggaagagcccaaggaggagtctgatgacgacatgggc

SEQ ID NO: 344 - DNA, 256 bp, Zea mays
  Clone ID: LIB3136-055-Q1-K1-D12
cccacgcgtccgctgttgctttggcggttgtattcgttattattactgcaggaattgctgtcgtcaagttgataggtggacaaattccaatgcccaagttgtttcccactgtttctgatttggcatctgttggggaaccttttacagcagtgccggttcttgtcactgcttacgtttgccattacaatgttaacccaattattaatgagctaaaggactctacccagattaagccaatagtccacacatcattgac

SEQ ID NO: 345 - DNA, 435 bp, Zea mays
  unsure (1)..(435): unsure at all n locations; Clone ID: LIB3136-055-Q1-K1-E10
cgactcccgactgccggccctgccctgcgccgcgcggagccgcggaccgcccgcccaccaccgaaaccctagagcaagcagggatgcacggtccggtcccgctcctcctcctcctcctgctcctctgcacggccgcggcggcctccgacggctcccagccccaggtacgtcacgccagccgccagcgtcttctcttcccctatcctcgcttggctgcctcgaccccccctgccgcaatcgatcccagctcacgttgcgcctccgcgcangcgcangcaccggcggcggcgcggcgggggatggtgccggtggcccccgcggaggcggagctcggcgccatggtggcgctcgctctcaacggcacgcggcgccggctcggnggcagcttccagctctgcgcgccctgcacctgctgcggcggggccagcggcgcct

SEQ ID NO: 346 - DNA, 195 bp, Zea mays
  Clone ID: LIB3136-055-Q1-K1-E11
cgactcacgactgtcttgcctgccctgcgccatgcggagccgaagaccaaccgaccaacagcggaacgcttaatcaagcaaggatgcacggtccatacccgataataatgctcctcttgatgctctgcacggtcgcagccgtctacaacggcttctattcccaagtacgtcacgccagacggcaccgggtaatct

SEQ ID NO: 347 - DNA, 431 bp, Zea mays
  Clone ID: LIB3136-055-Q1-K1-E9
cgtgggaggatttttttgccgcagcgtccccatggcggcgggaagagaaaccgacgaacagctgaccgagtacgagaagcagcggctgtcgcggatacgcgagaacgaggcccgactcgaggccctgggcctccgcagcctcgcagcgtcccctcttctccgcagctcgtcgccggggacggccaaggggaagcagaagaagaggtccgtcgacgaggacgaggagtacgtcccgtccgatagcggcggtgaggagaaagacgagagctcgtcggagagcgcgcaagacgaagaggtggatggagaggggaaatcagcttctatgtcacgcgccaagggaaagaaaaagaaattgtcaaaatctggtgaatctacaaagaacacgcctactaagggtagtgcttcttttgctgaggtggtggatgatgata

SEQ ID NO: 348 - DNA, 430 bp, Zea mays
  Clone ID: LIB3136-055-Q1-K1-F10
gtgctgaagtcataaggttcacacagaagaatatactccgtgtgtatccaaaaggcaccaagggtgattctttaaacttacaatccaatgaacgcctggacccatggtgcgcagatggttgcattcaacatgcagggccatgataaagcgctccggttgatgcaagggtttttcagagccaatgggggctgtggttatgttaaaaagcctgacttcttgctaagaacaggcccaaatggggaagtatttgaccccaaggctagtttgccagtgaagaaaaccctcaaggtgaaagtatatatgggagacgggtggcgcatggacttcagtaaaactcatttcgatgccttttcgcctccaaatttctatactaaggtagggatcgcacgtgtgaacgcagacagtgtgatgaataagacaagggtgattg

SEQ ID NO: 349 - DNA, 398 bp, Zea mays
  Clone ID: LIB3136-055-Q1-K1-F12
cgggtcgacgacgcgtccgacaatatgtcccttgtaatgaccagagcaacactaacgcagccggtgaggcggccagcgaagacacggggacctcagatagtaatagtggccaaaaggttgtgatctttgcgcctgctgccacacttaaacaaagtgtgaaaacttcactttctgacgctgttcaagatgctgcaaaagctgcactggctgtataaaacatagaaatggagaaggcaaaagagattaaattggcctcaaaaacatagtctcatacctaatgataagaacatgagcaatgtcctaactctgtggacgcaaaggaatcaagaacggcttgctgcacgaattggccttgatgacaaagaaccggcaaattctgatgatcaatttactcattc

SEQ ID NO: 350 - DNA, 438 bp, Zea mays
  Clone ID: LIB3136-055-Q1-K1-G10
gtggaatttatcatggcaggatccagctaccttcggattatccattcaagccaccgtccttggtgctacttacgccaagtggacgctttgagattcagaagaagatttgcttgagcatatccaattaccaccctgagcactggcagccttcatggagtgtccgcacagctttggtagccttgattgccttcatgccgacgaacccaggtggggcattgggctcactggattacaaaccagaagacagacgagcacttgctataaaatcacgtgaggtgccgccgaaatttggctccccacaacgtcagaaactaattgatgagatccatgagcaaatgctcagtaaggctcctcctatcccccaaacgctgccaaatgtgccaaacgaggagctcgcacctgactcttgtgatgagcatgcagacaaggtagatgaag

SEQ ID NO: 351 - DNA, 286 bp, Zea mays
  Clone ID: LIB3136-055-Q1-K1-G12
cgtccgggaaaggtgaatcaatcctaaaaggaatgcttcattcacttggtgaactattactcatgcttggtgctggtggtgcaactaaagtgacccattcgtaaaagcttgaagctcatattcatgcattggctaataaagctaagtctagcccattgacatctactagttcatcttagaatctatctgatgttgaacttgctgcttttggttaccgagctcatctagagaatcatgctcttgcgacaaggaaatggcatacaaactttcttatgaaaagtttcca

SEQ ID NO: 352 - DNA, 273 bp, Zea mays
  Clone ID: LIB3136-055-Q1-K1-G9
gtgatctgaatgttgtttacactgataatactgctacagattgttccatggagctccccagactgaactggagtgttgaggatgttccaggtgatagtcaacctgttgagaattctagcaagaaaactttgagatgtcccactgccggttttgaggacgatcttcctgttaccaagatggatggtactcccgttactaatgtggacgatgtagaattcacctttcatgagaagccacagacagatactgtagaagaaaatctttccatacaga

SEQ ID NO: 353 - DNA, 277 bp, Zea mays
  unsure (1)..(277): unsure at all n locations; Clone ID: LIB3136-055-Q1-K1-H10
cttattaattgtatcttgtatacntttcattttcagactagagataaaacaactggtcaacttaaaaataaatgtggtctcctcaaaacacttggacaaagagttaatccttaccttcctcatatttttggaaccatcaagtggctatttaacaataatagttcaaaatttaagcatcatgctgctcatctcatctccattatagccattgtcattaagcatttccaggacgatcaatttatgtctcactagagtgtttaactgtatgattacttat

SEQ ID NO: 354 - DNA, 487 bp, Zea mays
  unsure (1)..(487): unsure at all n locations; Clone ID: LIB3136-055-Q1-K1-H11
aaaaaaaaaaaaagggggggggaaaaaaaaaaanaaaaaaaaaaaaaaaaaaaaaaaattttaaaaaaataaaaaaaaaaataaataaaaaaaggaaaatgggtaaaaaaaaaatagggggaaaaaaaaaaaaaaaaattaaatataaaaaaaaaatagataagaatattaaaaaaaataaaaaaaaaaaaaaaaaaaaaaatataaaaaaaataataataaaaaaaaaaaataaaaaataaaaaaaaaataataaaaaaaaaaataaaaaataaaaaaaaaaaaaaaaaaaataaaataagaaaattaaaaaaaaaaaataataaaaaaaaataaaaaatttatgaaaaaaaaaatgaaaaaaaaaaaaaaattataaaaaaaaagatataaaaaaaaaaaaaaaataaaaaaatttattaaattaattaaaaataaaaagatatatttatataataaataaaataaaaaatataataaaaatata

SEQ ID NO: 355 - DNA, 283 bp, Zea mays
  Clone ID: LIB3136-055-Q1-K1-H12
cggacaatatctttaaccactttatcaaaattttacctttttaatactaaaaaaaacaacgcggcactgtgtaatctgaagcctgctatcatcataaaacatacagttgctcattccagcacttaccgggttatgaaaactattaactcctgatggttacatgcctgattcagtcctaattgttggaaacagaatcacacatcaagccttatcaagtcttattaagtggttgaagaacgaccatatggtttttattaaagaagcatcattttccatgttaaat

SEQ ID NO: 356 - DNA, 381 bp, Zea mays
  Clone ID: LIB3136-055-Q1-K1-H9
atcatgagtcagaagatgaatatgttgacgaccatgatgagcatgttgagtcctacaaatctgaggatgaccaaaaagatttaactgagccaggacatgcatcgtggttggacaaagttcagcagactgtacaaaatgttttccaaaaattcaactcttttaagacccctgtagatttgtcagaggcttctcatgttcgtaaggagtatgatgatgctagctcaaagctttcaaaaattcagtctaagatatccagtctagctgagaagctaaaacatgattttggtaatgacaaggagttctattccttttatgatcagtgttttgagaccaaagaatggaaatatacttacaaggtctgtgcatataagaaagcatcac

SEQ ID NO: 357 - DNA, 436 bp, Zea mays
  Clone ID: LIB3136-056-Q1-K1-A1
gcgacctttaacatagtgcctacgagtgctgtaagtggtgaaggtattcctgatttgcttctgggactgggtcaatggactcagaagacaatggaagaaaaactcacttttgttgatgaagtccagtgtactgtactggaagtcaaggttgttgaaggccatggtactacaattgatgttgttttggtcaatggtatactccatgaaggagatcaaatagttgtttgtggcatgcagggacccattgtgacaactgtcagggctttgttaacaccacacccaatgagagagcttcgagttaagggcacctacatacatcataaggagatcagagctgcacaaggagtcaaaatatctgctcagggtctcgaacatgcaattgcaaggacagccctttacgtgttaagacctgatgatgatttaaacaaactgaatg

SEQ ID NO: 358 - DNA, 431 bp, Zea mays
  unsure (1)..(431): unsure at all n locations; Clone ID: LIB3136-056-Q1-K1-A10
gacttgtgtttctggggtgaccagaatgctatgtacggcaatccaagtgaccaacaacagggtttcaactttggacaaaacccatcaagttggttgaaccagccatttccccaggttgaacagccacgagtggtcaggcctcatgcaacggttgctccatttgatctggagaagactagagaaggaagtggcttcaagatttttgggttccaagttgatacaaccagtccatctcctgtccaattgagctctccattgcccgctatccangagcatgtgttacaaactcgaccatcggcaccggtgaatgaattgcaacctgtgcaaattgagtgcttgcctganggatcttgtaacacagctggaactgcaacggaaaacattcaacaaggcccgcagagttcaaaagatatccaaagcaagtcccaggg

SEQ ID NO: 359 - DNA, 433 bp, Zea mays
  Clone ID: LIB3136-056-Q1-K1-A11
gtgaacaatcggaagccttaccatagtgtgaactttgtaattgctcatgatggatttactttatgtgaccttgtttcatataactccaagcacaatgatgcaaatggagaaggtggtcgtgatgggtgcaatgacaactacagctggaactgtggcattgaaggagaaacaaatgatttgaatgtgctaagtcttcgttcaaggcaaatgaagaacttccatgtggcattaatgatttcccagggtactccaatgatgctgatgggagatgaatatggtcacacacgttatggaaacaacaatagctatggacatgatactcacataaataattttcagtggggccagttggaagaaaggaaggatggccatttcaggtttttctcagagatgatcaagtttcggcataaccatcctatattgagacgagaca

SEQ ID NO: 360 - DNA, 105 bp, Zea mays
  Clone ID: LIB3136-056-Q1-K1-A12
gagaacaattggcagggttaccatagtggcaccttcggaattgcacatgattcacggactcgctaacatctacgtcaatatgacgggcaccggaatgatgggcag

SEQ ID NO: 361 - DNA, 445 bp, Zea mays
  Clone ID: LIB3136-056-Q1-K1-A2
gacgtctcgccctcggcttcttcctcccctccctgaccgctgccgcgacctctcggcgaaacgctaacctaccttagaccccgccgccgccgccgccgccgcccaagggagagagagacttgcacatcaaagggcgtccgatggggaagaagaagaagcgcgtcgataaggtcttctgctactactgcgaccgcgagttcgacgacgagaagatcctcgtccagcaccagaaggccaagcacttgaagtgccacgtatgccacaagaagctctccaccgcctctggcatggccatacacgtcctccacgtccacaaggagtccgtgaccaaggttcctaatgcaaagcctgatagggagtcaacggagatagagatatttggaatgcaaggaattcctgcgcatgtattggctgctcattatggagaagaggaagacccttcaac

SEQ ID NO: 362 - DNA, 330 bp, Zea mays
  Clone ID: LIB3136-056-Q1-K1-A3
cgagaggaagaaagcttgaggagatgttctgattggttgaaggaaatggatagcaagaataggatggtactcctagcattacgaagtgctggtgcttcaataattttatcagacgatatcagcctctgttttactctgcattcatggataccagaatgttttgttaggatgtgaccatctaatgatgcatataaccgtgcaaaacattattttgcctagtacaacaccagaaggccaagcacttgaagtgccacgtatgccacaagaagctatacaaacgggtgtggctgtttatacaatccaatcttacttcaccatgcgtgcgacacc

SEQ ID NO: 363 - DNA, 443 bp, Zea mays
  unsure (1)..(443): unsure at all n locations; Clone ID: LIB3136-056-Q1-K1-A4
ctcgtggcctccgcacactcaactctgtttgggcccaacatcttagcgaagaagtgaggagaaggttctacaagaactggtgcaagagcaagaagaaggctttcacaaagtatgctctcaaatatgaaaatgatgctggcaagaaggaaattcagctgcagcttgagaagatgaagaaatatgcttctgttatccgtgtcattgctcatacccagattaggaagatgaagggtttgaagcagaagaaggctcacctgatggagattcaggtcaatggtggtaccattgctgacaaggtggactatggctacaaattctttgagaaagacgtccctgttgatgctgtcttccagaaggatgagatgattgacatcattggtgtgaccaangggaaaggttatgaaggtgtggtcactcgttggggtgtcacccggcttccccgc

SEQ ID NO: 364 - DNA, 387 bp, Zea mays
  Clone ID: LIB3136-056-Q1-K1-A5
ggctcagggagctcaagaagatcgtccctgacgcccaggacgccgccgacgtggacgtgctggtccgccggacggccgactacatctgcgccctcgagctcaagctgaccgtcctgcggagggtatcagccatctacggggtgtgatgcttcctttgtctgtcgcgctggcagcctggcaccttcgtcgtcgtccagtcctacgtacgtgctccactccgtcggtcgtcgtccacgcacgatgatgaaaggttttgaggtcaaaacctgctgcggttgtgaggggccggacgaggggagaagatttctcgcatgctcatctcttggttgttgctcctacgggagttagtttggatccaatatgtgttgtgcatatggcagttaatta

SEQ ID NO: 365 - DNA, 401 bp, Zea mays
  Clone ID: LIB3136-056-Q1-K1-A6
gtcgcgggtaaggaagaccaacgttttgctttgcctctaaacgagctatgaagctgggggcgtgacagcaacagtgggcggcttcatgaaaacactgaacatagacgacatggccaagcaaaaaccggacaaaacgacagatctggagcctcatgtcttggaggcctacaaagcatctacttgtcaggccaaggctggtgcgatggattacatgccacctgaggttatcaagagaaactcgtatgacaggacatgcgatgttgacaacttggctaacagtgacttgcatagatacagcgtggatatccaagctgcggactagagcggctcctaggccatgcttgcggatagtcacgtacatcttgacgacggagataccacgatgctgaacgagctgtcta

SEQ ID NO: 366 - DNA, 434 bp, Zea mays
  Clone ID: LIB3136-056-Q1-K1-A7
cggacgcgtgggtttgtggagtatgcaagaggcaatgagattaaggatgcttggttggacagtgtggaagttgacccaacatatgctgcaaaggttcagaacaaaggcaaagagaaagtagacgagtttgaggacctctcttccgatgacattgggaggctaaaaaggcagatagcaaacttgcttgagccaggagaaacgataatgcaagccttgaaaaggtggaagggtacatccacggataaacgtggaaagatggctgaagggactaaacgtatatttgatgaattgactgaagctgccatgaagctaatggagaacggcgattataatgtttactcagatgatcgtgagacctttgaacgcgaggctgctgcgtatgaacgtttggcacgtgctcgacttggtttgccagaagttgatggtggctctga

SEQ ID NO: 367 - DNA, 149 bp, Zea mays
  Clone ID: LIB3136-056-Q1-K1-A8
ggctcgcgtggcttagaggagtatgcaccaagcaatgagattaaggatgcttgatgtgacggtgcgaaatctgacgcgacgtctgctgcaaaggttcaaaacaaaggcctctacaaagtagacaagtttcatgacctctcttccgatga

SEQ ID NO: 368 - DNA, 437 bp, Zea mays
  Clone ID: LIB3136-056-Q1-K1-A9
gctggacggccgcaacatcaccgttaacgaggcccagtcccgcggcggccgtggaggcggcggcggcggctacggtggtggccgtggaggcggcggctacggcggtggcgggcgccgtgatggcggcggcggctacggcggtggcggcggcggctacggtggcggcggtggctacggtggtggtggtggcggctactgcggtggcaaccgtggcggcggctacggcaactccgacgggaactggaggaactgagcggtggggcccgcgcggccaagttatcctgttcgctaccgtgatgtttaccctagtccagagggtttatcttcgttcgtctcgtttgttgttgcccatctgtgtttttgattgcaacgtcgctctgtgtcatttgttagtgctgtgttcatccttggcttcagcatacccatgcattaaccag

SEQ ID NO: 369 - DNA, 429 bp, Zea mays
  Clone ID: LIB3136-056-Q1-K1-B1
cgatctgcaagtctcgctacgtagcagtgcaatacaaaaaaagcagccgcaatggcgagcagcaccatggccctctcctccacggccttcgccggcaaggccgtgaacgtgccgtcgtcgtccgccttcggcgaggcccgcgtgacgatgcgcaagacggcggcgaaggccaagcctgcggcggcgtccgggagcccgtggtacggccccgaccgcgtgctgtacctgggcccactgtccggcgagccaccgagctacctgacgggcgagttcccgggcgactacggctgggacaccgcggggctgtcggcggacccggagacgttcgccaagaaccgggagctggaggtgatccactcccgctgggccatgctgggcgcgctcggctgcgtcttccccgagctgctcgcccgcaacggcgtcaagttc

SEQ ID NO: 370 - DNA, 413 bp, Zea mays
  Clone ID: LIB3136-056-Q1-K1-B10
cccggccgagcgaattgaagaagctccccctctgaactgaagcaatggcagacggcaatgccggtggcgccgctcgagtcctgttctccatcctcggcctggcgctggcgctgccgctgccgctgctcgtggccggcgacgacccgtaccggttcttcacgtggacggtgacctacggcgacatctacccgctgggcgtcaagcagcaggggatcctgatcaacaaccagttcccggggccgcagatcgaggccgtcaccaacgacaacctcatcatcaacgtcttgaacaagctcaacgagccgttcctcctctcctggagcgggctccagcagcggcggaactcggtcgaagacggcgtggccgggacgacgtgcccgatcccgccgggctccaacttgacctacattatg

SEQ ID NO: 371 - DNA, 318 bp, Zea mays
  Clone ID: LIB3136-056-Q1-K1-B11
tgaaatcggtaacatgatagcagatgccatgatcaacggcagtcggaagggcctggtcacccttgaagaggggaagagttctgagaactatctttatgctggggatggaatgcactttgaccgtggttacatctctccacactttgtaacagacagtgagaaaatgactgaacaatacgaaaactgaaagctgcttttggttgataagaaaaataccaatgcacgggatcttatcaacgctcgggatgaatgcatgagacgtgcatacccaattctgataattgcagaagatattgaacaagacgctcttgctatcct

SEQ ID NO: 372 - DNA, 169 bp, Zea mays
  Clone ID: LIB3136-056-Q1-K1-B12
tgaaatcgataacatgatagcagatgccatgatcaacgtaagtcataacggccttgggggccgggaagacgggaagagttctgataactatctttatgctgaggatggaacgcactttgaccgtggttacatctgtccacactccgtaacagacactgacaaaatgact

SEQ ID NO: 373 - DNA, 306 bp, Zea mays
  Clone ID: LIB3136-056-Q1-K1-B2
aaaaataaaaatatagaatacgaaaaagggcaatacaaaaaaagcaaccggcatggcgaccagggccatggcacctctcctccacggtcttcgccggcaaggccgtgaacgtgccggcgtcgtccgacttcggcgaggcccgcgtgacgatgcgcaagacggcggtgaacgccaagcctgccgcggcgttctggagcccgtggtacggacccgaccgcgtgctgtacctgagcccactgtacggcgagccaacgatctacctgacaggcgacttcccctgcaactacggcttgaacaccgcggggc

SEQ ID NO: 374 - DNA, 435 bp, Zea mays
  Clone ID: LIB3136-056-Q1-K1-B3
gttcaaatcctccgacaccgtttcgagtttgagagattctactcacagttctgtcttggcagcgtgacactctgaaacatgcagatatctggagagacagcgtccgcgtctgtgaattcgagctcattatctgatctgtcgaacgtcactaatgcgacgctctacgggtttgaagattaccatggagtggatattggtgtggtaaaggcagcacggctttggtacagctgcgtaggaggagaattgctgctggaaatcccacttgaagaaggtgacacaaggcttggctttgctatcagccgaactgaggaggtctttgtttttactagcactcgacggagtactcacagttagtatgtactacttgagcagttagaatcagccatggaatctgctgacgtgcttgtttttggtacggctttatctacatatcat

SEQ ID NO: 375 - DNA, 322 bp, Zea mays
  Clone ID: LIB3136-056-Q1-K1-B4
gctcaatctccctgcgccactccatacatctactcactcccaggacacgggaagctacgaagggtggcgttcgtcaccgcccgggcctcggtcgagacccttcgcccgtcggcggcatcgatcaaatcgtcggaggccttccttggccactctagccggctctgacgcacctgcgtattccacgaggcgcgaactcaagggggaagccaacggcaaggggctgcccagccttccctccacctgctaccttgacggcaacctgacgggtgacaatggctacaacccgttgggcctggctgaggaccactagaacctgcggtgg

SEQ ID NO: 376 - DNA, 273 bp, Zea mays
  Clone ID: LIB3136-056-Q1-K1-B5
ccagcagctgtcacagagacatcagagagcggtcctccttgtgagtctgacctgaagaggaggaggacgatgaggagaagcatcatctcatccggaggagggagagcgaatatgcaccgcgtctcgctgttgctcgtcgccaacgtgtgcgccctggcggcgccggttgccgaggacttcactgacggtcttttcccgaacggcaactccaaggttggcccgcccaagtcggcgctgataaacggcccggtggtttcggcccccaacccattc

SEQ ID NO: 377 - DNA, 380 bp, Zea mays
  Clone ID: LIB3136-056-Q1-K1-B6
gcagtcgccgagccacgtgtccgccgggccggcagttaccaagctcaccaaaaatcgggccgggttcgaggccgcccatgttcgcctgcaggtctctcctcgcaagggctagtcggctcactcggcctgcgattccaagcgcccgcggttcgccgcttcgttacctccaccagggatcatattgtcgaaataagttggcctcattcgtgatggaaggggcgcaaggatcaagcaatgtgacaaaacacaataaaaggcagtctcctgtgcatagatcgaggccagtttcaacagaagcaggtgcacagcatcagcaagatgacattattgagacatcaaattctggaagcaagagaattatagaggattgcatatcttct

SEQ ID NO: 378 - DNA, 405 bp, Zea mays
  Clone ID: LIB3136-056-Q1-K1-B7
ttccaagcttggagagtcataatgtccgtcagctttatccaaagggccccaatattgactgggaaaaggagctaaggaccctcaacagaaagcttcaattgcatattttggagctggcagatattttagttgagagaccatctcaatatgctcgtagggtggaagatatcacactcatattcaagaacttgcatcatcttctcaattccctacgacctcatcaggcaagagccacattgattcacatgcttgagagccaaattcagcgccgcaaggaagcaattgaagatataaagcagaggagagtggaagcgcagaagctgcttggggaatcactgcatatcttggatgcaagccaagctaactaggctgacgccgagttggctggttcaagactggttcttc

SEQ ID NO: 379 - DNA, 332 bp, Zea mays
  Clone ID: LIB3136-056-Q1-K1-B8
ccggactggaataaccgggtgcggccgacgcgtacgtttcaagctaggacagtcataatgtccttcatctttatccaaagggccccaatattggcttgagtaagtttctaaggacgctcaacagagagcttcaattgcatatttgaggagctgtcaaatattttatgtgatataccatctcaatatgctcgcacgtcgtaagatatcatactcatattcaagaacttgcatcatttaatcaattcccatacaacctcatcaagcaatatccacattgattaacatgctatagagccaaatgcagcgccatatggaaccatttgaacatataa

SEQ ID NO: 380 - DNA, 421 bp, Zea mays
  unsure (1)..(421): unsure at all n locations; Clone ID: LIB3136-056-Q1-K1-B9
caacctcgacgaaggaggaacgaacggacaggttgttgcacagaagcgacatggcgttcgcgcccaaaacgtcctcctcctcctcgctctcctcggcgttgcaggcagctcagtcgccgccgctgctcctgaggcggatgtcgtcgaccgcaacaccgagacggaggtacgacgcggccgtcgtcgtcactaccaccaccactgctagagctgctgcggctgctgtcacggttcccgccgccccgccgcangcgccggcgccggcgccggtgccgccaaagcaagcggcggcacccgccgagaggaggagccgtccggtgtcggacaccatggcggcgctcatggccaagggcaagacggcgttcatcccgtacataaccgccggcgaccccgacctancgacgacggccgaggcgctgcg

SEQ ID NO: 381 - DNA, 447 bp, Zea mays
  unsure (1)..(447): unsure at all n locations; Clone ID: LIB3136-056-Q1-K1-C1
ctctccgctcgccggtcacggcaattttctgtggcggagacaggcggcgccaccggtgacggtggaaattggggaattgatttgatatagcacacgaggaactaaatactctccctactctcttcggcgttcttcggtcgttgctctgtatccttacctaccttcgtggcaacctgcgctcgcgccatcagcgcgtcgatccatcaactccatggcatgcagcttcccgccttcctccgccacgaggctccatgccttggacgccgcggcggcgggggtgaagaacggcagggtccccctcaaggcctccgtcgcccccgcgcagaggtcactcggttgctgcagggcgaccgcgcggcangaaggcgctacacaggaacccagtgtgcagcttcttcgggccgtgcacagctggacctcctggagcaactgacgtgcggcacacct

SEQ ID NO: 382 - DNA, 428 bp, Zea mays
  unsure (1)..(428): unsure at all n locations; Clone ID: LIB3136-056-Q1-K1-C11
ataaaggtcgttccttttccggattcactcactgttccatgcattggaagttcaaggacaacatggcgtaggttctagctctgaatggcatggcatggcttgggcttgggcgtgcagggggtgctatcaaagggcgcggatggaagtacggctccgggttcgtcgacggagtgttcccagtgctgagtccgatggcgcangatgtgctagaactcgtgcagacgagggggaccgacgcggccagcgtctgggagtcactggacaagatccctcaagcgcacgatctttgggacgacatcgtcaacgtcgccgtccagctccgactgaaccggcaatgggagccgatcatcacagtctgcgagtgggtcctgcgccggagctcgttccgccccgacatcatctgctacaacctgctcatcgacgcgtac

SEQ ID NO: 383 - DNA, 362 bp, Zea mays
  Clone ID: LIB3136-056-Q1-K1-C12
aggcgataccgtaccgagagagttgaagctgataaagaatggcggggctctacgagaagcagggggagacgtacgccaagaagcgtccgcagtaccccaaggagtggttctccatgctggccggcctcaccgcggagcaccagcgcgcctgggacgccgggtgtggcaccagccatgccgccatcagcatggcggagcactacgagagcgtggtggcgacagacgtgagcgaggggcagattcggcacgctaccgtgcacccgaaagtgcggtacctccacaccccggagcacctatcggaggacgagctggtgtcactggtcggcggagagggctccctggacctggtcgtggcggtcacc

SEQ ID NO: 384 - DNA, 420 bp, Zea mays
  Clone ID: LIB3136-056-Q1-K1-C2
cggacgcgtgggcggacgcgtgggcggcgggctacctcttcgccatccagcacggggccaaggggatcttcgacgccgacgaccgcgccgaggtgcccgggaacgatctggggaagcatttcgacgtggatttgggatctggagtcaccaaccacccagtgctgctccagtacaggcacgcggatcccaatcgcacagtggtgaacccctacgtgcacttcggccagcggtcggtctggccaagggggctgccgctcgataaggttggggaggtcgcccatgaagtgttctacaccgaggtcttgagtggccggcaattcattcaacatgggctgtcggacgggttgccacatgtagatgcggtggtctacttcactagaaaaccaccaactttggcgttcgatctgaggtttgattcgg

SEQ ID NO: 385 - DNA, 443 bp, Zea mays
  Clone ID: LIB3136-056-Q1-K1-C3
cgactgaagagatacaacaatgcttttggagaggattcgtttgtgtgaggggctttgataggacagtaagggcaccaaggcccctttatgcaaggttgcattttcctgccagcaaggttgttagaggcaaaaagcctggagcggcaagcgtcgaagaataataggtacatcgaagaaatatagaggagctaacaaaacggatggatagccctaaatgagatgctgacccaataagtcgccgaatcacctccaagttctaacccaatttttgaggcgacatgacctgttaaattaggttccatctatggtaacagcttagatgttcttgtgagtcgcatattctttactctgaaattcaatataggaaatgaaaaaaaacacagtgcatagtctagttgttctaattgtacctctgtgagtggaatcaagtgttatacaacatg

SEQ ID NO: 386 - DNA, 449 bp, Zea mays
  Clone ID: LIB3136-056-Q1-K1-C4
gtaggattggttgctgagcatggctggaccggagaagactgttgtttggttcaggagagacggcaggatcgaggacaacccggccttggcagcggcggcgaaagggggctctgtcctccctatcttcatatggtgcccctcagactacgggcagtactaccctggaaggtgctcccggtggtggctcaagcagtctcttacccaccttgggaagtcattagagctgctcgggtgcccactcgtgctgatccgtgcggaggacagcactcttgcagctcttttggagtgcgttcgttccatcagtgccactagagtggtttacaatcgtctctacgaccctatttcacttgtgcttgacaacaaaatcaagaatgagcttccagcccatggaatttctgtccaaagtttcaatggtgatttactttacgagccgtgggatgttatgatga

SEQ ID NO: 387 - DNA, 398 bp, Zea mays
  Clone ID: LIB3136-056-Q1-K1-C5
caaacacatcggccgaccacgggcgccgccatgtctaccgctgacgcggcgagcccggccctggcgcctgacggggacgcgccggcggtcgaaggcctggccctggcccagttcgccgtgggctgcttctggagcgtggagctggtgtaccagcgccttccaggcgtggcgcgcacggaggtggggtactcgcaaggccaccggcacgcccccacctaccgggacgtctgcggcgacggcacgggccacgccgaggtggtccgcgtgcactacgaccccaacgcctgcccctacgacgtcctcctcgacgtcttctgggccaagcacaaccccaccacgctcaacagacagggcaacgacgtcgggacgcaataccggttgggcatctactactacac

SEQ ID NO: 388 - DNA, 443 bp, Zea mays
  Clone ID: LIB3136-056-Q1-K1-C6
ggctgcaacggcgggctcatggacgccgctttcgatttcatcataaagaacgggggggtcggggccgaagatgactacccttacagagccgaggacgggaagtgcgacatgaacaggaaaaatgccagggttgtgagcatcgatggctttgaagatgtgcctgagaacgacgagaagtcgctgcagaaggcggttgctcaccagccagttagcgttgacattgaggccggtggccgggagttccagctctacaaatcgggtgtcttcagcggaagctgcaccacgaaccttgaccatggtgtcgtcgcggtcggctacagcgccgagaacgggaaggactactggatcgtgcgcaactcgtggggaccgaagtgggcgaggctggttacatccgtatggagaggaaacgtaacgccagcacttggaagtgcgggatcgcgatg

SEQ ID NO: 389 - DNA, 444 bp, Zea mays
  Clone ID: LIB3136-056-Q1-K1-C7
cggacgcgtggggcagagataggcgtcttcgtactcgcctacctccgcggctcaaaccttgggcccttctcccaattccttccgccggccgccgctccacccgtacgacgacaccatgagggagtgcatttcgatccacatcggccaggccggtatccaggtcggaaacgcgtgctgggagctgtactgccttgagcatggcattcaggctgacggtcagatgcccggtgacaagaccattgggggaggtgatgatgctttcaacaccttcttcagtgagactggtgctgggaagcacgtgccccgtgctgtttttgttgaccttgaacccactgtcatcgatgaggtgagaactggcacctaccgccagctcttccaccctgagcagctcatcagtgggaaagaggatgcagccaacaactttgcccgtggtcactacaccat

SEQ ID NO: 390 - DNA, 336 bp, Zea mays
  Clone ID: LIB3136-056-Q1-K1-C8
gaagatcgtcagatgttccgtgagtgttgtatgcgatacgtcgttgattcatcaaagtgttggtagtgccatgtgaaatgcacgtgaagcgttgaacatttagggtctgtctcgtcaaccgtagattcctggaaatatagattttagctgtgagctgtgagaaagctactgtgtgagctgacgttcgtgcgaaaactgaacattgattggtccaaacaattgacaactatcgattctataaaatcatgccatgatgacaacttgacaggagggacactgacctgtcctcttaaataagcccattcgacaatgggtaatcaccgtcgacggggctgt

SEQ ID NO: 391 - DNA, 443 bp, Zea mays
  Clone ID: LIB3136-056-Q1-K1-D1
aatgaaccttgcccttgcggtcgtcgccgagctcgacgacctcactgttggtgggctgatcggcgggtacggcatcgaggggagctctcacctctatggccttttctctgacacggttgtcgcgatggaggttgttctcgcagatggccgggtcgttagagccaccaaggacaacgagtactctgaccttttctatggaattccctggtcccagggaacactggggttccttgtctctgcagagatcaagctgatccccatcaaggagtacatgaagctcacctacactccagtcaaggggggtctaaaggagatcgcgcaggcctacgcggattctttcgctccgagggacggtgacccggcaaaggtccctgactttgttgaagggatggtgtacacagagagcgagggtgtcatgatgacgggcgtgtacgcttcgaaag

SEQ ID NO: 392 - DNA, 420 bp, Zea mays
  Clone ID: LIB3136-056-Q1-K1-D11
cggcaagcccggtggcacaacggtcggcgtcggcaagggcggagtgggcgtcaacgtcaatcccggcaaaccggccggtggtgccggtacaaccgttggcgttggcaaaggcggcgtgggcgtgggcgtcaatcccgggcacggcaagccgggcggcaccacggtcggcgttggcaagggcggggttggcgttcacgtgaacccgggaaagaagcccgtccacgtcaacgtctcccctttcatctacacgtacgccgcgtcggagacgcagctgcacgacgaccccagcgtggcgctcttcttccaggagacggacctccggcccggtaagaagatgaccgtccagttcgccagcaccgggacgaccggcaccaagttcctcccgcggagcgaggccgaggccatcccgttctcctcaca

SEQ ID NO: 393 - DNA, 414 bp, Zea mays
  unsure (1)..(414): unsure at all n locations; Clone ID: LIB3136-056-Q1-K1-D12
aggagtggtgttgttgctgatcaaagtgggtctggcaagacactggcatatctttgccctataatacaaaacttaaggaacgaagaagttcaagggctccataaatcatcccctaggaaccccagggtgatagtattgacccctactgctgaacttgcttatcaggtccttaacaactgccggttgatatcaaaatctggggttccatttaggtctatggttgcaaccggaggatttcgacaaaagactcacttagagagccttgaccaagagctcgatgtaattatagcaacacctggccgtttcttgtctctgcttcaagaaggcttggtgcaactagctaaccttanatgagctcgttctgtttgcactgtggtgttggatgaagtggacattttatttggtgaagaaggt

SEQ ID NO: 394 - DNA, 441 bp, Zea mays
  unsure (1)..(441): unsure at all n locations; Clone ID: LIB3136-056-Q1-K1-D2
gacgaggaccggcggtcccttcggtaccatgaagtgcccggcggaactggctcacggcgccggcgcggggctggacatcgcggtgcggctgctcgagcccatcaaggaggacttccccaccctctcctatgccgacttctaccaacttgccggagttgtggccgtcgaggtcaccggtgggcctgagatccccttccacccaggcagggaggacaagcctcagccgccacctgagggccgtcttcctgatgccaccaagggttctgaccacctgaagcaagtctttggcaagcagatgggtttgagtgatcaggacattgttgccctctctggtggccacaccttgggaaggtgccacaaagagcggtctgcgtgtgagggggcctggactacgaaccctntggtctttgacaactcttacttcaaggaacttctgagtgg

SEQ ID NO: 395 - DNA, 442 bp, Zea mays
  Clone ID: LIB3136-056-Q1-K1-D3
cgactagcctaaatggaaaatctgtttatgcagtctagaggatctacccgcgatggtacaggggtacatgatagcattggaaaccagctccttacaaagatagatggcggtgaggcgttgaataacgtattgcttattggaatgaccaatcgtaaagatttgcttgacgaagctttattgagacctggacgattggaagttcacatcgagataaacctgcctgatgaaaatggtcggttgcaaattcttcagattcatacaaataagatgaaagagaattctttcctatctgcagatattaatcttcttgagctagccggaaggacaaagaactacagtggagcagagttggaaggtgttgtcaaaagtgctgtctcgtatgctttgaaccggcagataaccatggatgacctcactaaacctttggatgatgaaagcatta

SEQ ID NO: 396 - DNA, 341 bp, Zea mays
  Clone ID: LIB3136-056-Q1-K1-D4
ggaaaaaccattcgacccacgcgtacgcgactagactaaatgtaaaatctgtacaatcaatctacacgatctactcgctaacatacacgagggggtgataaaaatagaaaccagcttcttacaaacacataaagaatacatgcctaccatatcctatacctaattctaataacctacccgaaatattaacttcacgaatatttattgacacctgaaccattttcacccaacatgggaatacaactctcagatgaaaactgtaagacttaaatcttataccaacatacatattaaacaacttagaaatcttttttatatgcagatattatttatttataaat

SEQ ID NO: 397 - DNA, 440 bp, Zea mays
  Clone ID: LIB3136-056-Q1-K1-D5
ctgctgaatttgacatcaagaaagaagcagcctgggcaatttcaaatgccacttctggtgggacacatgatcagatcaagtaccttgttgcccacggttgcattaagccactctgtgatctgcttgtttgcccggatcccacaatcgtaacagtttgcttggagggtctcgagaacatcctgaaggttggcgaggcagagaaaaaccttggtgcacgtgatgtcaatgtctatgcacagatgattgatgatgctgagggcctggacaagattgagaacctgcagagccatgacaacaccgagatatatgagaaggctgtgaagatgctggaatcctactggctggaggaggaagatgatgccatgccctcatgcgacaatccccagaatggcttcaactttgggaaccagccctctgttacatcaggtggattcaacttt

SEQ ID NO: 398 - DNA, 436 bp, Zea mays
  Clone ID: LIB3136-056-Q1-K1-D7
gatagtttgaaccccactcctgtgtttccttctggaattttgtgccatggcgggtcggtccgccctcctagattctcttcattttcttctggaatttcaactcaggaagtgtctaagcctcctactagaccgccttctccattttcttctagattttcatcacaggacggtcttgacccctcttctagattccctttttcttctggattttcatcacatgatgggtctaatcagtcgtatggctcaacgaacccagaaaatcttctccgaggtactgttcacggtggcaacacgaatcattatcaatctcacgttggaaggcactcaattgacatggagtttgatgatcctgctatattaaccatgggcaaagggctgatgcctggaattggcgattcatggctggagatgaaaaatactcctgctgttcaagcac

SEQ ID NO: 399 - DNA, 437 bp, Zea mays
  Clone ID: LIB3136-056-Q1-K1-D8
cgatctgggtgatcctccatctctaccccttcctcaagggtctcatgggcaggcagaaccgggcgccaacaatcgtcatcgtttggtccatcctccttgcatctatcttctccttactgtgggtgaagatcgatcctttcatctccccgacacagaaagctgccgccttggggcaatgtggtgtgaactgctgatccagattgtgactcttatttgaagaggctcagccaaagatctgccccctcgtgtaaatacctgagggagctagatgggaattttttgttgtagatgaggatggatctgcatccaagttatgcctctgtttattagcttcttcggtgccggtgctgctgcagacaaaatcatggagcctttctaccttgcttgtagtgctggccagcagcgtaaattgtgaattctgcattttttttatacgt

SEQ ID NO: 400 - DNA, 246 bp, Zea mays
  Clone ID: LIB3136-056-Q1-K1-E1
cggacgcgtgggccagcgctgacatgctcctcaccggccaccaacctaaccgtgaacttattaaaagggctgggggctttcactaccgatcaataaacttgattgctgaaccttggccgaccggacaatttccggccatggaaaatggccaaaaaggccgggccctggttttttattacccaaacctgaaggaagcgctattggcattccgggaggaaggccggacccaaaacttgaacatttggg

SEQ ID NO: 401 - DNA, 276 bp, Zea mays
  Clone ID: LIB3136-056-Q1-K1-E11
gatgtatgacgctcccattggctacagcattgttgacgctcgacctgcctgaggcgtgaaggggtttcagtctgctgcttactccaactgcgcgaagaagccatcctgatatctcttttggcttgctcattctaccaatttaggacttcttttctgacactttgattatgaccaatctctctggactgatgcttactgatgatcgaccagttccccagtcttgctccttgcactacttcctactccatctgcaacattgtgttctgatttaccttc

SEQ ID NO: 402 - DNA, 406 bp, Zea mays
  Clone ID: LIB3136-056-Q1-K1-E2
agcatatgccaggtgatgaagattcagcgtcaaagaataaaattaatgagctgagtgaggcggggcgggaaaagatagatgaactggatggaatggagtcacttaaccaaactctggttatcaaagaaagcaaaagcaacattgaactgcaagaagctcgcaaagagctagaaaatggcctgcttgatctttcaggtgggcagacacatataggaatcaagagaatgggagagcttgatctaaaagcattttcaaaggcatgccaaaaggagcgtacagaaaatgcagaagttactgctgcctttctttgttcaaagtgggaggctgaaataaaaaatcctgactggcacccttttagggtcgtcacaattgatggaaaggagatggcaataatcgaggatgatgc

SEQ ID NO: 403 - DNA, 426 bp, Zea mays
  Clone ID: LIB3136-056-Q1-K1-E3
cggacgcgtggggaagaaatcagctgccaagctagctactggagcacatgttgttggcaatgtgctggtgcatgagagcgccaagattggagaaggttgtctgattggtcctgatgtcgccattggacctgggtgtgttgtggaggacggcgtgaggctttcccgctgcactgtcatgcgcggcgtgcgtatcaagaagcatgcttgcatctcaaacagcattatcggttggcactcaactgttggtcaatgggcacggatagagaatatgactatcctgggggaggatgttcatgtgtgtgatgaggtgtacagcaatggcggtgttgttctcccacataaagagatcaagtcaagcattctgaagcctgagatcgtgatgtgagctctccagttttagctacagtacattcttaacttctttga

SEQ ID NO: 404 - DNA, 395 bp, Zea mays
  Clone ID: LIB3136-056-Q1-K1-E4
atccagggcctggggccaccattggaggaatgtgtgctactcgttgttctggttcattagctgtgaggtatggaacaatgcgggataatgtgattaatcttcgggctgttttgccaaatggtgatgttgtcaagacaggctcccgggctcgaaagagtgcagctgggtatgaccttgctcgtttgatcattgggagtgaaggaactttgggtgtaattacagaagtgactttacgactccaaaagcttccatctcattctgtagttgcaatgtgcaatttcaaaacaattaacgatgctgctgatgttgccattgcaacaatgctttctgggatacacgtttcaagagtggaattgttggacgaggttcagataaaagcaataaatatggcaaat

SEQ ID NO: 405 - DNA, 398 bp, Zea mays
  Clone ID: LIB3136-056-Q1-K1-E5
aaaaggcgtttggcatggcgtatatgcgcatcctcaaggagctgaacgacctgcaggaggaggcccccacattatgcagtgcacgtcctgctagtgaggacatgtttcattggcaagcaacaattatgggaccacctgacagtccctatgctggtggtgtttttttagtgaacattcatttcccggcacattaccccttcaaacctccaatggtttctttcaagacaaaggtgttccatcctaatatcaacagcaatggaagtatatgcctcgacattctcaaagagcattggacccctgctttgacaatttataacggcctgctctccatctgctccctgcttaccaacctcaaccgggacgaccactttgtgcaggagattgcccacatgtacaag

SEQ ID NO: 406 - DNA, 384 bp, Zea mays
  Clone ID: LIB3136-056-Q1-K1-E6
gagactgaggacactttcattgctgatctggcagttggcttgtccacgggtcaaatggagagtggagcaccctgcacatcagagcgtcttgccaaatacaaccagcttcttaggattgaagaagagcttggcgctcttgctgtctacgcaggtgccaaattccgtgcacctgtggagccctactaaacgggcgggatgcaagtgcttttatgtatgcacaagtcctgtgaaactgtttactgcgacctgcagattttactcttggagtgccctgactagattttagcaataatatccaacatgtaacatgttacggacatgtacccaaacgtgatccagttttagctaatgtgctccatgcttgacgtttaaaaaaataaaatg

SEQ ID NO: 407 - DNA, 273 bp, Zea mays
  Clone ID: LIB3136-056-Q1-K1-E7
catacggatgacacttgcattcctaatcattcctgttgctagtgcacgggctacagggagggggcaccacaatattacatgagagtgtcatataaaattcaactatcttatttatactgaacatgagatcgctgctatacatgcttatacaagcaacgatttctttgtatcacatgaaacctgctaaacattaagcaatctatcactgtaatggaactataagtactgtgattctctatactaagacatgcacctattagtactctaatcttc

SEQ ID NO: 408 - DNA, 198 bp, Zea mays
  Clone ID: LIB3136-056-Q1-K1-E8
catactcctgacacattcattccttatcaaattaaaggcccactaaatacttaaattgggagggatacaccctgtgaaggatagactcttaacttttgcaatcaactcttctattttgaccatgagagttatattctttctgattaaataaatccccaattccttgctcataaatagaccttctaaacgtacattaag

SEQ ID NO: 409 - DNA, 424 bp, Zea mays
  Clone ID: LIB3136-056-Q1-K1-E9
cttcgcgcgcgagcgcatcccggagcgcgtggtgcacgcgcgcggggcctccgccaagggcttcttcgagtgcacccacgacgtgacgtcgctgacgtgcgccgacttcctgcgcgcgcccggcgtgcggacgcccgtgatcgtgcgcttctcgacggtgatccacgagcgggggtccccggagacgatccgcgacccgcgcgggttcgccgtgaagttctacacccgcgagggcaactgggacctgctgggcaacaacttccccgtcttcttcatccgcgacggcatcaagttccccgacgtgatccacgcgttcaagcccaacccgcggtcgcacgtgcaggagtactggcgggtgttcgacttcctgtcgcacctgcccgagagcctgcacaccttcttcttcctcttcgacgacgtgggc

SEQ ID NO: 410 - DNA, 199 bp, Zea mays
  Clone ID: LIB3136-056-Q1-K1-F10
tgcttacaaagctatactcgaagatggtactgtcgtggtagtgaagagattaaaagatgttggggcagggaaaagagagtttgagcagcaaatggagctcatcgagaggttgggcaaacatgcaaacctactcccactacgcgcctactactattccaaagacgagaagctcatcgtctatgattatattgacactgga

SEQ ID NO: 411 - DNA, 427 bp, Zea mays
  Clone ID: LIB3136-056-Q1-K1-F11
gcggcgcgcatcatgtcgttttctcagaagggtccacgctcggtctgcatcctctctgccaacgggtcaatctctaatgtaacactgaggcagccggatgcatctgggagcaccttcacctacgagggccgtttcgagatcctgcagctgatgggctccttcacaatggccgaggaaggccggaggagaaccggcgggctgagcgtctctcttgctggccctgacggccgcgtagtcggcggcgtagtggctgggatgctgcgtgctgcaagtcctatacaggtgatcgtcggaagcttcctgcccaacagcctgaagcagcaccagaggaggaggatgagcatgcagcagccttcccccgttccggcgttaccagcacccgtggcacccccgccgcccgtgcttaccgcggccaccccgatctcgc

SEQ ID NO: 412 - DNA, 368 bp, Zea mays
  Clone ID: LIB3136-056-Q1-K1-F12
accgaactcatcacttcaatttctacaaatgctccacgctcggcctgaatcctttggggcggtggggaaatctgtaaaggaacacttatacaagcggatgcatgggggatcaccgtaacttacgaagacaatttcaaaaccctgcaactgatcgaaagcttaacaatatacgatggaggccggaggagaaacaaaaggatgagcgggtgtcaagatgctgctgaccgccgaactatatcaggccgactgctttgcatgctctgctctgaaaggcttatacaagccatacagaaaagctttgtgcgcaacaggacctagcaggaccagatgatgatgattaacatgcaacattctaacttcggtcttat

SEQ ID NO: 413 - DNA, 428 bp, Zea mays
  Clone ID: LIB3136-056-Q1-K1-F2
cggacgcgtgggccggttggagccattccaaaagaaattaaaggcccactatatcctacaagggcaggtcatagtcagggtgaagagttgactgtaaactttggaaaggaaccattctgttttgacattgagggttatattcttgaagagaaaatgaagcagcaatcggtgtctgataaattgaacttggagacggacatcagtcattggattgtccgctcatatctcctacattatggataccaagatacattaaatgcttttgatatggcaaatgcaactgacccccccaccaatcgccaaaatggtcatgcagaacctcccgaaacgtatggtcttagccacagaaaacttttgcgtcagcttatcatgagtggagatattgactctacattcaaaagacttggggagtggtatccacaagtgat

SEQ ID NO: 414 - DNA, 383 bp, Zea mays
  Clone ID: LIB3136-056-Q1-K1-F3
ttcccccatgacctgtccgtctcaatctccctcttccccgcaccaaatcgaagctacccctgggcctgtgcgatttgggctcgtcctgtgtccttcctgttgctcaaaagctcgctcattcgatgtccctgtctgaaaggcgacaaatcccactggaattcggagcacagagctttgaatccaggggccaaaactttttgctcatctcccttgcggaaaagcgcctcctctgcgtctgaaagtcgaatcttttttcacagattcgatttgaagttcccgagcaggtcgaggaccgcggtgtcggtaagacttgctttgaagatcttgatcaccacaagagatttgctgaatttccggtcactgtactttttccacttggcatg

SEQ ID NO: 415 - DNA, 371 bp, Zea mays
  Clone ID: LIB3136-056-Q1-K1-F4
ggcagacattaatcgaagcccatgctgatgtcaagacaaccgacaactacatgttgcgtttgggctggatcggcttcaccaagaggcgcccaaaccaggtcaagagaacctgctatgctcaggcatcccagatccgtcagatccgccgtaagatggttgagattatgatcaaccaggcttctacatgtgacctgaaagaacttgtttcgaagttcattccagaagttattggtaaggagattgagaagtctacctccagcatcttcccacttcaaaacgtcttcatccgcaaggtgaagatactcaaggcccccaagttcgatcttgggaagctcatggaggttcacggcgactacaaagaggatgttggt

SEQ ID NO: 416 - DNA, 440 bp, Zea mays
  Clone ID: LIB3136-056-Q1-K1-F5
cttaaacgtcgcttccctatgaggggtctatatcaagccttagctgctgctgccatgtgctggcaagagcaagctgctacacgccctcacatcggggatgttggaactgctcttttatatatggcttctcaagcttatgacccaaacgcccctgtgcaacacagacggagcaacgcatctacccccaggtccagaaaccctgctgcatggaacggagatcagcgcagtgtgcgctcgcctaatcatcaccattctccagacccgcggcggagggaccctgccagggcatccaagtatggagcatacggtagcacgactagctctgccaacgattctggacggcggtcacgtctggatgacatggacccgaccgggtcgcaagtgggaagcccagctcaaaccggaagaagaagagaagctccaatggccaccgacagaca

SEQ ID NO: 417 - DNA, 292 bp, Zea mays
  Clone ID: LIB3136-056-Q1-K1-F6
acgtgtatggacacgattacaatctttttctgctttccagcgatggggcgattctgaacggagagcactagctcgccgtgctggggcgttgatacagaatgctaaaatattttatagggctgcttcattctttaacctattattgcgactttatagtggaaggtacataactgttgtagaaaggattctgaaggcaagacttgtttattggaaccccaacatgaatagaactgttagttttaaggacatgaataggcagctgatctggaatgaggtatcggaaatgttgctt

SEQ ID NO: 418 - DNA, 398 bp, Zea mays
  Clone ID: LIB3136-056-Q1-K1-F7
cgttgacagatcctgatccagtgtgatatttgggctgctcacaggacaattgggtggggtggggcccaatcgggacgcggaggaagaagacccggagctgcatcttccttacgtttcatcaccgcgcgcaatcggactctcatcccctcttcctatcgaccgacaacgccgccgtcgacggccgtccgcttgagtaccacgtcgatcaaggggaggtaaaagttcgtttggcgtgcgccatgtttaagaagttctcttcagaagatatatgtggacacaatcaagttaatgctgttgtacaacgaaagattctgcaaattatcgctgaagagtaccccagccttgaacctttgctagatgactggttcccaaaaaaatgacctatgattgccgataat

SEQ ID NO: 419 - DNA, 442 bp, Zea mays
  Clone ID: LIB3136-056-Q1-K1-F8
gcctaagattgctgtggctattgaccatggcagtgaccggggtgacctcccattttggcagggcttcatgaactgcttgcagtcttgtatgttccttctcgactcacttgatgctgctggcactaacgcggatgctgccagtaagattgagaggtttctgattcaaccgagagtagaggatgcagtacttggccggcggaaagctgaaaacgcaatggcttggcgggcagtgtttacatcggccgggtttgctccggtaccgctcaacaacctcgcagaagcacaagctgactgcctgttgaagcgcgtgcaggtccgaggattccatgtggagaagtgtggaatgggtctagcactctactggcaaaacggcgagctcgtgtctgtcttcgcatggcggtgctgatcatacggaccccatgcatcaaccatcatgacacct

SEQ ID NO: 420 - DNA, 363 bp, Zea mays
  unsure (1)..(363): unsure at all n locations; Clone ID: LIB3136-056-Q1-K1-F9
gttccctccaccgcatcaggacggcgcgctcggctttcccttgggctgttcgaatcacatggaaccttcattcgagcccccggacccttcttccttcagcactgtatttcctttcgagaaaagcgcggtgccaacctggtccggaccgctggcggactccgcagctgggaaccagaagcgganacacaagtctgcccgctcctcaaaacaaccagcaactgcccgtgctagatgatacacaccatgccggcttagcgcagatcaagtcttcaatacccccaaagaaatacattgtagtggttcctacaaactgggatgtctgattcggaatcaagagctacaacaaggaattgtttacttttt

SEQ ID NO: 421 - DNA, 419 bp, Zea mays
  unsure (1)..(419): unsure at all n locations; Clone ID: LIB3136-056-Q1-K1-G1
tcgttctgggccacatcaaaacggagtaaccatcacagagagatcaaacatgggcacaacctgggtggtctcgtggcctgtagccgatgggccaacacctgatgcgaacatcgtcggccaactccagggcactagtgttcaagtagccaatactcgcgttgtggtgtaccactactccctgggattagtgttggaggataaaaggttcaatgggtccacactccaaatacaagggacctcccaaataaatggcgagtggagcattgttggagggacaggacaacttactatggcaatgggtactgtcaaacgcactgaagttgtgtacaaagacaataccaggatctcagaactcanaatacatgcctatttcgctccagtgaattaaacctactacaactagtgtttatgaggctact

SEQ ID NO: 422 - DNA, 200 bp, Zea mays
  Clone ID: LIB3136-056-Q1-K1-G10
caggaaagaggtggacagctgtatcatcaaagctgctaatttcattgacagcattgagaagagtgacggttcatggtatggctcttgggctgtttgtttcacgtacggcacttggtttggtgtgaagggactaattgctgtgggtaaaccatttaaaagcatccttgcattcaaaagggctgccgcttttttgtattaaa

SEQ ID NO: 423 - DNA, 316 bp, Zea mays
  Clone ID: LIB3136-056-Q1-K1-G11
gtgaaactggcattgccaacgtttgcagcactcccattgctaatggcatatgctggtggcactggcatcatcattccaaagcccttaactccttatgttggactaacggttttggagctaggtttattttacaagctattcatgctcttgttagcagtcttttgtacaaactcgataaatatacatgctggtctaaatggacttgaagttgggcagactattggtatatctgctgcgggtttgatacataatggaatgcgcatagcatcttctacagatatcgaaactcagcaagctcatgaattctctatttatc

SEQ ID NO: 424 - DNA, 317 bp, Zea mays
  Clone ID: LIB3136-056-Q1-K1-G12
gtcttcacactcctcgccatcacataaaaccagtgcaagcagaagcagcgcaatggcgagcagcaccatggccctctcctccacagccttcgccggcaaggcagtgaacgtgccgtcgtctctcttcggcgaggcccgcgtgacgatgcgcaagacggcggcgaaggcaaagccggcggcgagctccggcagcccgtggtacggccccgaccgcgtgctctacctgggcccgctgtccggcgcgcccccgagctacctgacgggcgagttcccgggcgactacggctgggacaccgcggggctgtcggcggaccccg

SEQ ID NO: 425 - DNA, 386 bp, Zea mays
  Clone ID: LIB3136-056-Q1-K1-G3
cggacgcgtgggcaccctcgaggtggagtcttctgacaccatcgacaacgtcaaggccaagggccaggacaaggagggcatccctccggaccaacaacggctcatttttgctggcaagcagctcgaggacgggcgcacgctggccgactacaacattcagaaggagagcaccctccacttggtgttgcgtctcacgggcggcatgcacatcttcgtgaagactctgactggcaagactatcacccttgaggtcgagtcttctgataccattgacaatgtcaaggccaagatccaggacaaggagggcatccctccggaccagcagcggctcatttttgccggcaagcagctagaagacgggcgcacgcttgccgactacaacattc

SEQ ID NO: 426 - DNA, 358 bp, Zea mays
  Clone ID: LIB3136-056-Q1-K1-G5
gagcctcaagaaacaactttcggtgcctttccacaagaggaaaatacacaaatctgctttgggcttctctgagaagtctgtctctactttggagcttctcaaggtctcatggtccaaagaatggcttctcatgaagaggaattcatttgtgtacatcttcaaaatagttcagcgcttctttgctgaggtgcactacaagccaaccgcgatcagcagctcctcatcgtcttcgtcatcaattgcaataactgcagttcctatagttgaaatatgcatcattatcgaggaacctctatcccaatataggcgtagttgtgccttttgtcccagctaccagaacgttttacaccctaaaggc

SEQ ID NO: 427 - DNA, 429 bp, Zea mays
  Clone ID: LIB3136-056-Q1-K1-G6
cggacgcgtgggcggacgcgtgggtggctggcgcccctgcaagcaacccttctgggagtatgggcggtgaccttcttcactaaaccaaagaagatcaaggagcaaaaggtagatgaaaacaagataaagaaggaatagactattcttgaattagagctagagcttcataccatcttcttagtcagataacttgtggctacacacaaggcgaaatgtttcgaagctaatctaagaaatggcaacctatcatggtcagcttctgtgaagtctccttgatgtgtattccttgtatctggcttagcttagattgtgcagaagcttgtaagcaactgctccaggcttccattcaagacattgtcgtattggaaacagtatatatggaagctaaagcttctcagagttgactcacaacctacactaaatgtccac

SEQ ID NO: 428 - DNA, 368 bp, Zea mays
  Clone ID: LIB3136-056-Q1-K1-G7
gcggcggcaggctaaacgggcaactgagcttctcgtcacggcaggggtcattgatggggcagggctcagacatggacagcgaggacgtcggagggagcagcccaaaggctgccggcggccgcagggggtacatccctgggtacccaatgggctctgggtgggaggactccacggctctcttgacaaacaattggtctggcatcaaacgcccccgggactcgtcggagcctggacagagcggccttacgcaccacttcagcgggcccaagacgtcgtccgagatggcaactattgagaaattcctacacttccaggacgccgtgcctcgtaagatccgtgcctagcgggggtgcaccactcatgcacgc

SEQ ID NO: 429 - DNA, 429 bp, Zea mays
  Clone ID: LIB3136-056-Q1-K1-G8
gttgctcgcctctgatcaaaccctaaacatggagttgatttatccgctccagccatgggtaggttgcagactgagtctgtcaaggatgccatctcccaaattgatggggatgccaaggagaagaataggaagttcactgagactgtggaacttcagattggtctgaataattatgattcacagaaggacaagcgtttcactggctatgttaacttgccccatatccctcgtcccaagatgaacgtgtgcatgcttggtgatgcacaacaccttgaggaggccgagaagatgggacttgactacatggatgttgaggctctcaagaaaatgaacaacaacaagaagcttgttaagaggcttgccaagaagtaccatgctttcttggcatcagaagccatcatcaagcagattccccgtctccttggtcct

SEQ ID NO: 430 - DNA, 385 bp, Zea mays
  Clone ID: LIB3136-056-Q1-K1-H1
cggagggctggggcgctgacctgagttttatggagagaggatgccagagctgcgaagcaggggtcgggaagcatgcctaaggtcgaagaagcttgaacatctgcagctaggagagccgcctgcgaaaccggtgtcacctgctccgccgagggcaggaaagcgtgctcctacacgtgctgctaggggcagaaagggtgccactgggaaaggagtgccccccgcacctaagactagaagaaagcggggtaatattgtcgacttggaagctgatccagcttgtgaagacccccctaaagctgtcaagggactggaagttgctgctgctgctgcacccaagaaccttcctttgaaggaggtagccgaggttggtgttctgaaaatgaat

SEQ ID NO: 431 - DNA, 405 bp, Zea mays
  Clone ID: LIB3136-056-Q1-K1-H10
ctatctttcagcactttcagaaaaagctaccatcctaatagtaagaagttcgatgccacaggtgctgatcgggcgccttctagcatctgaaaacttgcagttgctcattccggtacttcgcggtttaggaaatcttgtagctggtgatggttacatggttgattcagtcctaattgttggaaacagtgtcacagatcaagccttatcaagtcttatcaagtgtttgaagagcgaccatagggttctcaagaaggaggcatcatgggccatgtcaaatatagcagcgggcagttttgagcacaaaaaactgatatttgctagtgaggcgactcctttgctgatgcacctcctcaggactgcacagtttgacatccgcagggaagcagcatacacgctgggcaacct

SEQ ID NO: 432 - DNA, 427 bp, Zea mays
  Clone ID: LIB3136-056-Q1-K1-H11
cgacctcgtctttcccccccagccagcctcgcctcaccgactccccgatccggtccctcccttcgccagctatgcatccctcctccggcgcgggggactacgccccttactacccaccttatccctccccggccgcgccgcctcccgccggctacccgtcggtgtccgccccggcttctgcgcccccgtactcgtcgtaccccgcggacttcggccccgcgccttcgtaccccgcgtacccggccggcgaccttccccactacgcgccggcggcgggtgggcccgcgcccccggaagcgtactacccctacgagccggcgccggcgccacccgtgccggcgttcccgcacaacccggttccctctccgtacccggcgctggatcgggcggggagctacggctacggatccggccctggctccgggta

SEQ ID NO: 433 - DNA, 337 bp, Zea mays
  Clone ID: LIB3136-056-Q1-K1-H12
cggacgcgtgggcggacgcgtgggttctcctcatggctacttcgctcagtccaatgtgcttggatacccttacactggcggtcaggttgtgtacattctggatcaagtccgtgctttggagaatgagatgcttctgaggattaagcagcaaggccttgatatcactccgaagatcctcattgttaccaggctgttgcctgatgctgctgggactacgtgcggtcagcggctggagaagtcattgtactgacacactacatcatcgcgtgcgtcaaaatgaaatggcatctcgcagtgatcttcgtttgatgctgccatactgagacaacactgggat

SEQ ID NO: 434 - DNA, 359 bp, Zea mays
  Clone ID: LIB3136-056-Q1-K1-H2
acgagatcacgcttctcgtcggatcgaacagctagggtttccaagatgttcgggcgcgcgcgggagaagagcgacaacagacggtactacgagatcctcggggtctccaaggacgcgtcccaggatgacctcaagaaggcctaccgcaagggcggcatcaagaaccaccccgacaagggcggcgatcccgagaagttcaaggagctagctcaggcctatgaggtcctcagtgatcctgaaaagcgagagatttatgatcaatatggtgaggatgccctcaaggagggaatgggaggtggtggagggatgcacgatccctgtgacatattccagtcattctttggtggtggaagcccttt

SEQ ID NO: 435 - DNA, 439 bp, Zea mays
  Clone ID: LIB3136-056-Q1-K1-H3
cactcgttacgagatcaacagagcctttgccaatctccgccagattgctcttggccgggacgtaaagaagttcctaatggttattgctgggttttggttgctttctgttcttggaagctgctgcaacttcttgaccttagtttacattgtctttgtggtgctgcacacagtacctgtcctgtatgagaagtacgaggatcagattgactcgtatggcgagaaggggtgggttgaaattaagaagcagtatgccgtgttcgatgagaaggttctgagcaaagtacccaggggtcctgcgaaagacaagaagcactagatgcaagtgattcgaagtccctgttagtagggaatgctagcaaaaccggttcgagtttctccggaggggcagcacttgtgggtgtgagcaccacgttgccacctgtgcattacgttgcgtatg

SEQ ID NO: 436 - DNA, 416 bp, Zea mays
  unsure (1)..(416): unsure at all n locations; Clone ID: LIB3136-056-Q1-K1-H4
cccacgcgtccgagccacccgtcgctacgtgcgtggctgccgcggcgcggctctagtcgccgggccggaccacgctccaaaccctggcctccgattcgcgtctgcggcagaggggatggctgcggaagcgagcacggcgggtgcggcgtcggcagccgaggcgaaacccttcgccgtcctcttcgtgtgcctcgggaatatttgccggagtcctgctgctgaagctgtgtttcggaccctcgtaagcaagcgtgggcttgactccaagggtctcatagactctgctggtaccatcgggtatcatgagggtaataaggcagactcaaggatgagagcagcttcaaagaagcgggggattgaggtcacatcaatatccangcctatcaaaccctcagatggtcgagattttgatctta

SEQ ID NO: 437 - DNA, 449 bp, Zea mays
  Clone ID: LIB3136-056-Q1-K1-H5
catcagtagccagctcaggagccgagcctggtcagggtagccaagcccatcccggtcctctggcggcgtcttctccctccgcaccgcggctccggcgatggcgggcgtcggctccgcgctgcgtcggctctacctctccgtctacaactgggtcgtcttcttcggatgggcgcaggtgctgtactacgcggtcctgacgctgcgtttgagcgggcacaaggccgtctatgccgccgtcgagaggccgctgcagttcgcgcagacagccgccatcatggagatcgttcatgggctcgtagggttggtgaggtctccggtctctgcaacccttccacagattggatccaggttgttccttacgtggggtgtcttgtggagttttcctgagacccagtcacatcttcttgttactaccctggtcataagctggtctatcactgagatcatca

SEQ ID NO: 438 - DNA, 422 bp, Zea mays
  Clone ID: LIB3136-056-Q1-K1-H6
tcgaccttcaagtctcgctacgtagcagtgcaataaaaaaagcagccgcaatggcgggcaggagcatggccctctcctccacggccttcgccggcaaggccgtgaacgtgccgtcgtcgtccgccttcggcgaggcccgcgtgacgatgcgcaagacggcggggaaggccaagccggcggcggcgtccgggagcccgtggtacggccccgaccgcgtgctgtacctgggcccactgtccggcgagccgccgagctacctgacgggcgagttcccgggcgactacggctgggacaccgcggggctgtcggcggacccggagacgttcgccaagaaccgggagctggacgtgatccactcccgctgggccatgctgggcgcgctcggctgcgtcttcccggagctgctcgcccgcaacggcgtc

SEQ ID NO: 439 - DNA, 410 bp, Zea mays
  Clone ID: LIB3136-056-Q1-K1-H7
gcggcggccctttttttttatttttttttgctttttatgaaggcgccacaagtatagggggggggggaaaaatatgttcctggggacagccgtttcacttccaaactttcattatcagcatctttttgttactcataccgaaaaaataatcgacgctgcaaactagaccttgccaacacacgctattgacctctaaaccaccttaacaaaatgtcaaaattcacgcctgggctttgattatgcaaccgcgacttgcatctggataccatccaagtctatcccatgaaggtttgatatggcattgttgacctcctcggcagacccatacgtgaccaaaccaaacccccttgacctgccgctatccctgttgttgatgaccttaacatccagcacctgtgcttgctcactga

SEQ ID NO: 440 - DNA, 327 bp, Zea mays
  Clone ID: LIB3136-056-Q1-K1-H8
ggactggaggccggggaccgagcagtacaagttcatcgagcaatgcctgtcgtcgggcgacaggcagaaacagccgtggctcatcttcctcgcgcaccgcgttctcggctactcctcctgcacctactacgaatcggagggcacgttcgaggagcccatggggcgggaagcgctgcatgagctctggcagaagtacaaggtggacatcgacttctatggccacgtgcacagctacgaaaggacatgcccggtctaccaatctcagtgcgtcgtcgatggatccgaccactacagccggccgttccaggcgacgacgcacgtcgttgt

SEQ ID NO: 441 - DNA, 210 bp, Zea mays
  Clone ID: LIB3136-057-Q1-K1-A1
gttggggagacgtgcaaagatgccaacttttccgtgcgcccgccgagtctgtctgtctgttgcccacttgtgtcacctggaaaagtgcggtgtgcgggtgatcattttatatgtaaatgtgctttgttattaataatattatagcagcgcgtggtggtggtgctgctgctactgtaataaagacagatactccagcatggaaagtcaccg

SEQ ID NO: 442 - DNA, 441 bp, Zea mays
  unsure (1)..(441): unsure at all n locations; Clone ID: LIB3136-057-Q1-K1-A10
ctagggtttatctgctcgaggaatggcgtcggtgcaggtctccggcgcgggggtcggtaccgcggccttctctgtgaaggggaaggcctccaccggtgcgctccggcttcgctctacgttgaccttcggcgaggtctgcccggcgcggcgggcgttccgcggcctcgtcgncagggccgctaccgtcgtcntccccaagtatacaacacttaagcccttggctgatagagtgcttgtaaagattaactcttccgaggagaagacaactggtggaatcttgctccctacgactgctcagtccagacctcaaggtggcgaggtagttgctgctggagaaggaaggataacttgggataagaaaaggtgatgtcagcattcacgttggagctcacgttgtgtattctaagtacgctggaaccgaagtcggcgttgacgatcaca

SEQ ID NO: 443 - DNA, 316 bp, Zea mays
  unsure (1)..(316): unsure at all n locations; Clone ID: LIB3136-057-Q1-K1-A11
ctaggggttaactgctcgaggnatggcgtctgtgcaggtctccggcgcgggggacggtaccgcggctttctctgtgaaggggaaggcctccaccggtgcgctccggctgcgctatacgatgaccttcggcgaggtctgcccggcgcgagggtcgttccgcggccggagaggtgntgttgtgttaggtgtttgaggccaggaagtatggaagacctangccgttggctgaaagagagcacgtaaagattaacttcttcctacgagaagacaacggctggaaacacgctcccttcgactgctcagaccagacctcaag

SEQ ID NO: 444 - DNA, 142 bp, Zea mays
  unsure (1)..(142): unsure at all n locations; Clone ID: LIB3136-057-Q1-K1-A12
ctaaggtttatctgctcgangaatggcctctgtgcaggtctcccgcccggggggggttaccgcggccttctctgggaaggggaaggcctccaccgatgcgctccggctacactctacaatgaccttcggtgagggcttgccg

SEQ ID NO: 445 - DNA, 406 bp, Zea mays
  unsure (1)..(406): unsure at all n locations; Clone ID: LIB3136-057-Q1-K1-A2
cccagacccagacccagagaggagggcgacgaacacacggtgacggagagccgagtggacaggacaggagcgcggagggaggaggaaacaaagcagaaaagcaacccccgtcttccatctttgcggagcgacgcgcatctgccctgcccatctctttcgtgctcctaccccccgccttcttccgcccgccgcctcagccctcaaggcttttccttctcagaccggggacgggcccgacggggacagggacanaaggtggtgcgatcttgtggggcacactccgcctccggccccggtaagagagagagagagagaaagagagagagagaaagagagagaccaacggagggtgccaggcccgcccccccgttaaaccaaccccaagccttggaattgccgcttcccc

SEQ ID NO: 446 - DNA, 180 bp, Zea mays
  Clone ID: LIB3136-057-Q1-K1-A3
ggccgcgcaatacattgtattcgtggtcactgccgcatactggcacggcgtattctttgtggctcactatttcaatgtacgccgtttccagtcaatacacttctgcactggctcgaggggcacaaccgcctgcaaggtgctatgcatggtcgacaccaataacaacaccagaaccgtaat

SEQ ID NO: 447 - DNA, 325 bp, Zea mays
  Clone ID: LIB3136-057-Q1-K1-A5
cgacccactatcccaaaaccgtagcgccctcgcctgctcgccgccgccgtcgttgcgagctccccatcttcctccgtcaaccatggcgacccagatcagcaagaagaagaagttcgtcagcgacggcgtgttctacgccgagctcaatgagatgctgacgcgggagctcgcggaggacggctactccggcgtggaggtgcgcgtcacaccgatgcgcacggagatcatcatccgcgccacgcgcacgcagaacgtgctcggcgagaagggccgcaaggacagggagctcacgtctggcgtccagaagaggttcaactttcccgag

SEQ ID NO: 448 - DNA, 344 bp, Zea mays
  Clone ID: LIB3136-057-Q1-K1-A6
tggagaacatcatctatcagaaaagattctgaactacccaagtgggttgattcaaccaacaagatttacccgcatattgtatatgaggaactatccaaagcagaagctcctgaacaatgtgctgacacagataactgcacactagaagaataccttttacaaggacttaagcgtgtttcatgggaaaaggtggatgttagtttccacaacagtaaagtaagatctgcagcacatagtgtgattcaggtaaaagatcctgtgatgcatagcgaaggtgccgacgtcatacaacatatgatggaccaattaattctttagtaaaagccctgttctttgaaaccaga

SEQ ID NO: 449 - DNA, 358 bp, Zea mays
  Clone ID: LIB3136-057-Q1-K1-A7
gcacatctcatcttggttcaatagacttgaagagatgtgagtcctccggcgttccttcagtgctaattaagcacgaattggcacagcttgttaagcaaccatgtatttttgacaaatctgagaactgtctttcccaaaataatggaatgcacaagtctcagatacgcctttggattgagagtggtcagaacatgaaatgtgaaagtacttcagcttctaacagcaaaggtcttgatacgccaagcaaggcgaatcgcaagagatctcgacccggtgaaagtgctaagccacgacctaaggaccggcagctgatacaggaccgtattaaagagcttcgtgagcttgtaccgaatggggc

SEQ ID NO: 450 - DNA, 236 bp, Zea mays
  Clone ID: LIB3136-057-Q1-K1-A8
gcaaatcgtacgttggaacaacatacacagatagaacagcgttcgacgacgcgcgtccacggctaatgacccacaagcgcgtctaatgacataatgcagccagtgctcgctgacaaagatcggaacaggccatatcaaattgatggaatggacaagaatgaaatacgccaatggatcgagagtgcaaagaacactaattgtgaaagttatcaaaaccttaacagcacacgtgcagt

SEQ ID NO: 451 - DNA, 454 bp, Zea mays
  unsure (1)..(454): unsure at all n locations; Clone ID: LIB3136-057-Q1-K1-A9
ccgactgtctacggccccggtggctggctgtcaggcgccggcgcgacgtactacggcgcgaccaacggcgacgggagcgacggcggcgcgtgcggctaccagacggccgtcggaaagaagccattcgactcgatgatcgccgccgggagcacgccactgtacaggggaggcgagggctgctgctctttgctacnatgtgaaatgctcgtccatcnccgcgtgctccggccagcccgtgaccatcgtaatcaccgaccagtcccctggcgggctgttccccggcgaggtcgagcactttgacatgagcggcaccgccatgggcgccatggcacggcccggcatggccgacaagctccgcgctggcggcgtgctcaggatcctgtacaggagggtgccgtgcaagtacaccggcgtcaacatcgcgttcaaggtggatcagggcgcgaacccgtac

SEQ ID NO: 452 - DNA, 242 bp, Zea mays
  Clone ID: LIB3136-057-Q1-K1-B1
ggcttcttgtacagaaagaggaaatggctggcgctgtagcactgcctgcttccaagatttgtgatggaaaatcaagttaccttttcaatggcatggcgttgtacttccaattttaacataattatttcattcttttattgaggatggcttgtaatagctgtaaacctggatttttcggcgacgcggagctatattttggtttttggctgtatttatggaatggattgatcgttgtttgagat

SEQ ID NO: 453 - DNA, 170 bp, Zea mays
  Clone ID: LIB3136-057-Q1-K1-B10
acgcgctagctactatcttcgcctttacctgcttgaacttaccccccctacacaccgggtacactttgtgatttggagccagagaacttacaacaagctcgaggccgtgtatgggtgcttaaactcgccctccaagaagaataaaggcccatttctgccgtggaccacga

SEQ ID NO: 454 - DNA, 102 bp, Zea mays
  unsure (1)..(102): unsure at all n locations; Clone ID: LIB3136-057-Q1-K1-B11
tgctagctcttgtcttgtcanttatttaccttcacggagccgcctagctagccgagtacaggtggagtggaatgcgtggtgcactgccaaccaaatcaaact

SEQ ID NO: 455 - DNA, 429 bp, Zea mays
  Clone ID: LIB3136-057-Q1-K1-B2
cagagttatcaaggtactacttcatgctgggcgagaaggccgtcgtggtggatggattctgggatcagaagagcagccggctttgcctcaaagggtgtcacgtggtgaagtcggggccatcccgtgcagatttggcagtaggtgagtgtggaattgggatgagcttctggttcccggcagtgtggtcgttacagcaacggagcttttctgctggtctggtctggaatgcaagtctgaaaagtggtgaggccgtcgctgccggttctagtgcaatcactccaaactataggggcaatctttttggttggaagtttatttccccaaaggtggccaaggttttaaattactttaaaaattttgattggaccaaaaccaggaaggggaggttccaaattggcatttataacaagacttggtggttccgttttt

SEQ ID NO: 456 - DNA, 344 bp, Zea mays
  Clone ID: LIB3136-054-Q1-K1-C12
gttctagatcgcgagcggccgccctttttttttttttttttacttctcaaaataggtgtggcctgtagcttctttcattgtttcaaagcattacaacataagcagcaaaaccagaaacagtcctcataagcaccacttattagggcagtacaacacaaacgataagcgcggtgcacatcaagaaagaaccacaacatgtagaagccatataaaagcatgattaagcacagctgaccaccaaaagcttcttactgaaaaaaaaggccgccttaggcagaaggtttctccgacttgagtggcttcaccacctcccaggtgaagtcagggtcgtcccttccaaagtg

SEQ ID NO: 457 - DNA, 446 bp, Zea mays
  Clone ID: LIB3136-050-Q1-K1-F9
caagggttctattatgaagctgcatctagtatcttggataaaaatgcttctatgctgccatccatgtcgtcttcaaatgagtctttcgaaaacaaccataaattttcaaggtttgcaccaactgaggaattaacatcagggttttatgattcatttctgtcagctttaaaagatctgcaccacgaaatcgatctgaacaatgaaaagatagctctgagaagcaaatatactgtcatttgtatatatgcaaaacaattccatgatcttcggaagatgtgcttgccatcagaacttgcatatatttcgtcgataagccgctgcaaaaactggaatgcacagggtggaaagagtaagggtttctttgcgaaatcaatggatgacagatttatcataaaacaaatcaagacgactgaatttgactcgttcttaaacgttggtcttgagta

SEQ ID NO: 458 - DNA, 336 bp, Zea mays
  Clone ID: LIB3136-050-Q1-K1-G10
gatgcagacagaactgtcggcatatattccgagattaaagatccagtttttatcaacaagcatgtcaagtgggctgatgggaagaagtttgaggacaaatttgtggataccttgcttaaatatggatacaaagggcaatatatgtcagagaattggctgaagcaagcattggttatacaatcctttgctcccaccttcattgtacatgtatcagattttattgactcttccaaggtatttttgattgatgatatcagtgtgagaacacaagacacgaaccagtcatactgggaaattacttcagatgaatacccttgcatacattagtaaaatatg

SEQ ID NO: 459 - DNA, 270 bp, Zea mays
  Clone ID: LIB3136-050-Q1-K1-G5
gagggcgaaatggtgaagcacaacaacgtcattcccaacgggcacttcaagaagcactggcagaactatgtcaagacatggttcaaccagcccgcccgcaagcagagacgccgcattgctcgtcaaaagaaggctgtgaagatattcccccgcccgactgctggtcctctacgccccattgttcaatgccagactttaaagtacaacatgaagtcaagggctgggagaggctttacccttgaggagctgaaggctgctggcattccaaag

SEQ ID NO: 460 - DNA, 228 bp, Zea mays
  Clone ID: LIB3136-050-Q1-K1-G8
gcgaggcagccccgcaggtcgcagccacaacccaagcgcagcgatctgccttcgcttcggctcagcttccggcctggcttcggctttcattccgccgcgcggcgctgccgagtgccgacgtcgtccccgccggagtttctggtttctgggttggatctctcggaatccgaacgagcgaagattggcggcggcaaccgggaaaccacccaactgggggagccactggtg

SEQ ID NO: 461 - DNA, 218 bp, Zea mays
  Clone ID: LIB3136-050-Q1-K1-G9
gcgaggcatccccgcacgtcgcagccacaacccaagcgcaacgatctgccttcgtccgatgagctccgcgtgcctccgcgtcatttcgcgagcggcctcccacaccagcgccacacccggagaactggcttctgctgtgcatctctagaagggcgagcgaccgaccatggacggcgtccactgcaaaggcacccacttggaggaggcaatgctggcga

SEQ ID NO: 462 - DNA, 239 bp, Zea mays
  Clone ID: LIB3136-050-Q1-K1-H4
cacaatcaccgagagctgtatggatttctttgagggtctcacttatgctcatgctgactttgctctcaccgatggctttcaggatcagggtaatccatactgggcaatgatgcatacaaactcgtacaaatatggatactctggtcctgggaactattacaggtatgctgatgtctatgacataaacgattacatgcatagagccaatggtgagcgcacaatatgggataacactacac

SEQ ID NO: 463 - DNA, 399 bp, Zea mays
  Clone ID: LIB3136-050-Q1-K1-H8
gctgcccagaggatgatggccaagatgggatggaaggaaggtcaggggcttggcaagcaagagcagggcatcaccgcgccactagtggccaagaagaccgataggaggggaggagttattgttgacgagagcagttctaggcccccagaaaagaagccgagatctgtcaactttgatgggcaaccaacacgagttttgctgctccgcaacatggttggtcctggtgaggttgacgatgagctggaagatgaggtggcatcggagtgtgccaagtatgggacggtttctcgggtgctgatatttgagatcacacaggcagacttcccagctgatgaggctgtaaggatattcatacagtttgagcgggcggaagaagcaacaaaggcaatgattgatctg

SEQ ID NO: 464 - DNA, 243 bp, Zea mays
  Clone ID: LIB3136-050-Q1-K1-H9
ctaggatttactctatggagagatgccattgcctatggcaacagctcgcccttctcttccttgaaggagctgttttttgggaagtgatgaaccgtcggcaaccttgtttctcttgcactttaagcagctaactgttcccgggtaggacgctctcctgcgataaatcatggtagctggtaagaacgggggttcaagtgcttccatatggtctgaagaaaccgggcttcaatctttaacattttg

SEQ ID NO: 465 - DNA, 309 bp, Zea mays
  Clone ID: LIB3136-051-Q1-K1-A10
catgcgtgcggctgatcgaggacgacgagggcgatgctcgactaccggatgctcgacggctgcctgctgtgggtgctgacgacgactcgctcgatagacgcgcttgatagacatcaagcagggcgtgaacacagaaggatacaccatcctgtacactgatatgtgcgtacatttacacttacctaaataagttcatgcggaggcaccgcagcaacaactagaagatctgaacggccaccggctaggatcctgatgtacacaactcttgcagggcgtgaacttcgtccacggccgtggggtgctggaccg

SEQ ID NO: 466 - DNA, 386 bp, Zea mays
  Clone ID: LIB3136-051-Q1-K1-A2
gcgcacgcatactggatacacaacacagagctttagaaggagctacgatctgatcgacatgggtgccgccaccatggctatcacctcccgcgcgctcgtcggcaagccggcggctggcacgagggacgtcttcggcgagggccgcatcaccatgcgcaagaccgccgccaagcccaagccggcggcgtccggcagcccatggtacggtgccgaccgcgtcctgtacctgggcccgctgtccggctcgcccccgagctacctgaccggggagatccccggcgactacgggtgggacaccgcggggctggcggcggacccggagaccttcgccaagaaccgcgagctggaggcgatccacaggcgcgggggcatgctcggcgcgctcg

SEQ ID NO: 467 - DNA, 436 bp, Zea mays
  Clone ID: LIB3136-051-Q1-K1-A4
ggccatgggcggcggcacggggcttattctacttcctccgccgcttcccgagccggtgctttttcgtcgggatcgcggagcagcacgccgtcacgttcgcggccggcctggcctgcgagggcctcaagcccttctgcgccatctactcgtctttcctgcagcgcggctacgaccaggtcgtgcacgacgtcgatctgcagaagctaccggtgcggttcgccatggacagggccgggctggtcggcgcggacgggccgacccactgcggtgcgttcgacgtcgcgtacatggcctgcctgcccaacatggtcgtcatggccccgtccgacgaggccgagctctgccacatggtcgccaccgccgcggtcatcgacgaccgcccgtcctgcttccgctacctgagaggcaacggcgttggcgtcccgttgcgcccaac

SEQ ID NO: 468 - DNA, 113 bp, Zea mays
  Clone ID: LIB3136-051-Q1-K1-A7
ggaacacaagggggggaaggcaaagcaagaggccgggcgaagtgggagaaaggggggaagggagaaggggagacaaaagaagggagagatcaagaaagagaggagcaacaaaa

SEQ ID NO: 469 - DNA, 355 bp, Zea mays
  unsure (1)..(355): unsure at all n locations; Clone ID: LIB3136-051-Q1-K1-A9
gcggcgcgaggacctagtcgagcaggtgaggcacgcggccgggacggtgggcttcttctggctggtgaaccacggagtgccggaggagctgatgggcggcatgctccgcggggtgcgccagttcaacgagggccccgtggaggcgaagcaggcgctctactcgagggacctcgctcgcaacctgcgcttcgcctccaacttcgacctcttcaaggctgctgcggccgactggcgcgacacgctcttctgcgaggtggctccgaacccgccgccgcgggaggagctgccggagccactcangaacgtgatgctggagtacggcgcggtggtgacgaagctggcgcggttcgtgttc

SEQ ID NO: 470 - DNA, 280 bp, Zea mays
  unsure (1)..(280): unsure at all n locations; Clone ID: LIB3136-051-Q1-K1-B1
ggaacaatcccttctgagctcggnaacatgtataatctaataagcttggacttggtcaagaacaaccattcggggaccataccctcctcccttgggaaggtggaaacccctggaattccggcggtcaaagggacaaaattggccggggccgacccaaagggaactttctggaatattaagtctaaaagtgtgggaggttaaaagcaaagatatatgggggacaattcccacatggggaccattagagcacattcctgtgagaaactgtgagaaaaaccca

SEQ ID NO: 471 - DNA, 315 bp, Zea mays
  unsure (1)..(315): unsure at all n locations; Clone ID: LIB3136-051-Q1-K1-B11
ctttccctcgcgccgncgccaacgcaacccttgcagccccaatccctcacagcaaccatggctggcgcgcaggagtccctctctctggtgggcacgatgcgcggccacaacggcgaggtgacggcgatcgcgacccccatcgacaactcgccgttcatcgtgtgcttctcccgcgacaagtccctgctggtgtgggacctgaccaacccggtccactccaccccggaattcggcgccaccggcgactacggcgttcccttncgccgacttaccggtcactcccacttcgtncaggacgtcgtcctcagtttcgac

SEQ ID NO: 472 - DNA, 179 bp, Zea mays
  Clone ID: LIB3136-051-Q1-K1-B2
gggccgacccacgcgaacgacaagaacaatcgcagcaaggcttccataaggtcaagcgaggcagaaaagggcggctgtgagggaggattcttgggatggcacgaggaatggggcgacaggctgagggagcaaaccgtgggaagcaagggtgcgcacgtggataacacacaggggggggg

SEQ ID NO: 473 - DNA, 379 bp, Zea mays
  Clone ID: LIB3136-051-Q1-K1-B4
ggatcatcacaaaatggacagatggtggcaatgtctatgcctcagcaacagcaacagcagcagcaatggttgaagcaaatgcaaccatccatgggctcaccactttccccacagcaacaatatcagaaccagcagaggctcctgttgatgcagcatcttcagcagaagacaggattgaaccaacaacaacttcttcaaatccaacaacagcatccacatttcaatgtccaacagctgattaagcagcaacaatttctgaagcagtttcagcagcagcaaccgctacaatctcctcgcgttttagcatctggttcacagaaatctgcgaatcttacaggctcgcagccgggaacaccattgtcaggtggaactatgactg

SEQ ID NO: 474 - DNA, 270 bp, Zea mays
  Clone ID: LIB3136-051-Q1-K1-B5
cagccgaagggccccggggggaaaagcagaggcgctgtggaggatcatcatagggacgagatgcaccgtcaagtgcgcccccaggggaacaaaaccaagcacaaggggcatcacaggggacacacagcaggcaagggcctcgagacgatgcagaagctgtgataggggcaggtggtgccaggaacagctacaaccgcaggcaaaggggagcaactatgaagaatcaagaaggcgcaccaggcgagaagacagaggagaatacaggaaggg

SEQ ID NO: 475 - DNA, 448 bp, Zea mays
  Clone ID: LIB3136-051-Q1-K1-B7
ggagaaggagcacaagcacaaggagcacctcggcgagatgggcgccctcgccgccggcgccttcgccctgtacgagaggcacgaggcgaagaaggacccggagcacgcgcagcggcacaagatcgaggagggcgtggcggcggtggcggccctgggcagcggcggcttcgcgttccacgagcaccacgacaagaaggaggccaaagacgcggcggaggacgccggggaggaggaggagtccggccgccgcggcgaggggaagaagaagcaccacttcttcggctgatcgggctgctgctcgatcgatctacttgcgtacgtaggctgctccccaggaccagaaggagcatgcatggagggcgaacgaactcaataaaagaatcagccgggggtttgattgtccgtctatgtatatcatgtgtagttactgatgatgtgtgtgcatggt

SEQ ID NO: 476 - DNA, 291 bp, Zea mays
  Clone ID: LIB3136-051-Q1-K1-B8
aagaagcacagggagcacatattagagaagggggcgagagacagagggggggacgacaggaacgagagggaggaggcgaaaaacgaccaggagcaagcgcagggaaacaagaaagaggagggcggggcggaggaggaaggcaggggaagaggtggtaacgagggaagagagaaaagaacaagaaggagggcaaaaaagcgcaggaggaaaccagagaggaggaggagaaaggaacgagaaagaaggggaagaagaagcaacaaaacagaagtgggaagggggagggggaag

SEQ ID NO: 477 - DNA, 266 bp, Zea mays
  Clone ID: LIB3136-051-Q1-K1-B9
gcgctattcctcgccccgtcgccaacgcaatctttgcagccccaatccctcacagcaaccatggctgttgcgcaggagtccctttctgtggtgggcactatgcgcggccacaacggtgaggtgacggccatcgcgaccccgatcgacaactagccgttcatcgtgtcctcctcccgcgacaagtgcctgctggtgtgggacctgaccaacccggtccactacaccccggaattcggcgccaccgtctactactgagtacccttttg

SEQ ID NO: 478 - DNA, 344 bp, Zea mays
  Clone ID: LIB3136-051-Q1-K1-C11
gcgcaccacaagcgagcgagggacccggggcggatattatagatagaagacgtctctctcctgtgggcggtttttttgggaacctgtcgcctgctgcctgcctgcctgcctgcctgcaaaaaggagtttgtcatggcgtctaagcgcatcctcaaggagctgaaggacctgcagaaagacccccccacatcatgcagtgcaggtcctgctggtgaggacatgtttcattggcaagcaacaattatgggaccacctgacagtccctatgctggcggcggttttttagtgaacattcatttttccgcagaataccccctcaaaccctcaaagggttctttcaagac

SEQ ID NO: 479 - DNA, 317 bp, Zea mays
  Clone ID: LIB3136-051-Q1-K1-C12
gccggcgaggtggcttacatctcgctcgtgggccgatctcactgagcccccgccgttcttatctgcacttgctgcgttctccagccgccgagttcgctgataggctacgccggccgctggcctgcgcgcgccgcatccttaccctgtgtgcaccctgttcctaaccctgcgtgtggccgccgccgactggcttgcgtgcgcccgcgcctacgactaaccctgctagcttgcgcgcccaacgcctgatgccctgagcccaccgcctgctgtctgtgcacgcatgtgaacccatacggctacctgggcacgccattcga

SEQ ID NO: 480 - DNA, 425 bp, Zea mays
  Clone ID: LIB3136-051-Q1-K1-C2
gggtttttgattttagccgccgccgctgctcatctcacatccctcgagaagacgcctgctcctcgccgatcgatacgatggccgtcttctccgacctccacaccgccgacggcctcaagtccctcgaggctcacctcgccggcaaaacctatgtgtctggtgactccattactaaggatgacattaaggtcttcgccgcggtgccgtcgaagcctggcgctgagtttcctaatgccgcccgctggtacgagaccgtctctgcggctgtagcctcaagattccctggtaaggctgttggtgtaaatctgcctgcgggatcagctcctgcggcagctgctcctgcggatgaggctgaggacgatgatgaccttgatctttttggggatgaaactgaggaggacaagaaggcagctgatgagcgtgcc

SEQ ID NO: 481 - DNA, 424 bp, Zea mays
  Clone ID: LIB3136-051-Q1-K1-C5
cttaccttgccttgccttcccctccatcccacctccacctcgccgctcgaatcccccccaacccaacaatcccccatggggtcgcaggccatcgaggcgcaccgcgcgggcgcggaggtgtaccgcggcgcggcgctgtgcgcggagaagtcgacggagctgctggcagaggcgcacctcccgctgggcctgctgccgctggccgacatggaggaggtcggctacaaccgcgccacgggcttcgtgtggctgcgccagaggaagtcgctcacgcacacgttccgcccgatcgcgcgccaggtctcgtacgccgccgaggtcaccggcttcgtggaggaccggcggatgaagcgcatgaccggcgtcaagaccaaggagctcctcatctgggtcaccctctccgacatgttcgtcgacagggacg

SEQ ID NO: 482 - DNA, 430 bp, Zea mays
  Clone ID: LIB3136-051-Q1-K1-D1
gtgatgtactgtctgttgctgctctacaccggtgctggaggacggcattgcccgtcgtgtaggggcgatgcctcttgtccgtgctggcggctgcgccgtcgtggacttggtcctcgcgcgctgtggaagagatttatgatcggcgcatgggtgcctttgatagcgagcaggcaggaatcactctttgtgtagtgaccggcccgacgaggaccaggactcggtcgatgcgacagatgatgattgcgaacgggcgcctgtgcataccaaggacttaacgggcctcatgcagatggtggaacactcggagacggcatgcttctgtgaggtgaccttactgggaggacatggctaatgcatggcaaacacttgacctggagctggcaactttggccgtcttgcgtgaggagaaaatggggccactatcatgcat

SEQ ID NO: 483 - DNA, 308 bp, Zea mays
  Clone ID: LIB3136-051-Q1-K1-D11
ggcttcttcttccccaccggttcgtgtttttgtttctggttcgtgggcgagagggaagagagggtggcttctgacgttgagtacccgtgcttcgttggcggcctctcctgtgccaccgacgaccactcccttaacaacgccttcagcacctacggcgaggtcctcgagtcgaagatcatcctggatcgggagacgcaaaggtcccgcggcttcggcttcctcacctttttcacggaggacgcgatgcgcagcgccatcgagggcatgaacggcaaggagctcgacggtcgcaacattaccgttaacga

SEQ ID NO: 484 - DNA, 386 bp, Zea mays
  unsure (1)..(386): unsure at all n locations; Clone ID: LIB3136-051-Q1-K1-D12
cggacgcgtggggcctgtgtatccagcatcagcttattctgttaggatccccgtctttgatttactacctcagatacagctggaagcagttctttggggcattgggactgcacttggcgagcttcccccttattttatatcacgagcagctcgcttatcaggaagcaagtcaaaagctgttaaggagcttgatgccgctacttccaaagaagatgggacagtagcatccactcttgatcgctccaagcgttggcttctttctcactctcaacatctcaacttcttctctatcttgatacttgcttcggntccgaacccactctttgatctcgctggaattatgtgtggccaatttggtgtacctttctgggagttcttttttgcaa

SEQ ID NO: 485 - DNA, 237 bp, Zea mays
  Clone ID: LIB3136-051-Q1-K1-D2
cctagattcccgaaattgaggcaagacaacatcaccccggggtggcgtgatccaggaaggaatcaaatctccatggattttccatggatttgaggatcataccttcgatgacccatccgcataatcctaggattcatcttcgaatgatgcatctggatttttgcgagcggttcacatccagcacgtgcgaacttcatcctctcgaagcccttgtgcttgtcgctgccggcgggagga

SEQ ID NO: 486 - DNA, 431 bp, Zea mays
  unsure (1)..(431): unsure at all n locations; Clone ID: LIB3136-051-Q1-K1-D6
cgcgancgcgggtaaagactttgttacctccatcgtttattgaaatgacctaatgccatcacttgggcgagattctgctgccaagcttcgggcagagggtatgtcatcgtcttgggcacatgaccttcgcaaacaaattcagcagactagattcttagggtttgtgaaccgggccgtgaggttcataagggctcatgtgccccttgcctctgatccaagatcgaaggtcgtggatgttgatatgatgcaatctcagagtcctgaggctgggagtaagccttcagcagatacccatgctgtggtgaagaaacgccctgcactggcttgctgggcatgtgtggctgcacccaaaacagagatggaatcggcaaaacaaattgagggcacgaaaagtcaaaccgacactggtgtccaaactgagaaaacaaccg

SEQ ID NO: 487 - DNA, 287 bp, Zea mays
  Clone ID: LIB3136-051-Q1-K1-D9
catcgatccggcattggtcaccgcacaagtgcacgactacctgtcaccttatacactctggtaagtagctaacgccggaggcgagaacaataaaaagctcgacatgggcgtggagaaaaagcatggcctgcagctgctggacttttgtgtgagcccattcggacagcgctgacgaatcgcgaaggtcgagaagggcctggcctactagtacctgcagcatgacctggggaacaagagcgagctgatcatccgagccaacctagtgcataagaagatccccatgctgc

SEQ ID NO: 488 - DNA, 454 bp, Zea mays
  Clone ID: LIB3136-051-Q1-K1-E1
aaccgggccgacccacgcgttcgagccaattaaggagtctgctctggggaacattcttaccattgccttctgagatactgactgggggatgcggtatgtcgaaatcggcatcccagcgaacaacaaggggaggaacagcattggatgcctgttctggctcttggccaggatggttctgcagatgaggggcactatcctccctgggcacaagagggaggacatggtggatatgttcttctacagggacccagaggaagcaaaggagcaggaggaggaagctgctgttgcccctgagtttgccgcaaacactgattaccaaggagctgatcagaggggtggagaccagtggacctaagaagtgactaggccgccagttgctccaactggagctgataggggtggctgtacagctccggatcctaccggggaaggctgggaacaagctggggcccct

SEQ ID NO: 489 - DNA, 426 bp, Zea mays
  Clone ID: LIB3136-051-Q1-K1-E11
cgtccgctctggagcggaagaggcggggcctgctcgagaccgtggtcgaccgtcggctggacggaggctacgacctggagtccgtcaggcagttggctgaggtcgccgagaagtgcgtcgcggatgagggacgggaccggccttccatcggtcaggtcctgtggcacctcgagaccgctctgcagctgcaccaagcgcatctgcagagctcatcagcctcagctgctgcgggtgatctggagccctctgatggcgcgtctgctagcaacagcatcaggcgcgccgaagaggcagcagaaaccgctggtgtgacctattgagatggacatggagatggggaagccgtggaactcaaagttgaggtactggaaacgctgtgtgtgtgtggttgccccaacaaatatactgaaattcttttggttcttt

SEQ ID NO: 490 - DNA, 449 bp, Zea mays
  Clone ID: LIB3136-051-Q1-K1-E3
ctcgtgctctgttctcatcttctgctcgctggtgtcccctctctctcacccatggcttcggcggcggcggcaactcaggtggggacttacttcctgcggaactactacaacctgctgcaacaaacccccgatgtcgtccaccagttctacagcgaagccagcaccatggtccgcgtcgacgacctcaccggcacgaccgcggctgccaacaacatgatggacatacactcgctcatcatgtctttgaacttcacccaaattgagatcaagactgccaattttgtgaactcatggggcgatggggtgctagttatggtctccggtctagtgcagaccaaggagtacagccaccaaaggaaatttatccagatgttcttccttgcccctcaagagaagggttactttgtcctcaacgattactttcacttcgttgaccaagaacatgtgca

SEQ ID NO: 491 - DNA, 445 bp, Zea mays
  Clone ID: LIB3136-051-Q1-K1-E4
gtcatccacactaacgaacgaactcttgctttgatcacgagctagctgaggtcgacgatggcggctgtgctgaacagcaggaagacgccgcaggcggtggtggccgtgctggtggcggcggcgctgctggcttcgtccgcttcggcggcgatcacctgcgggcaggtggggtcgtcgctggcgccgtgcatcccgtacgcgacggggagggccagcgcgctccccgcgtcgtgctgcagcggcgtcaagagcctcaacagcgcggcgcggaccagcgcggaccgccaggcggcgtgccgctgcctcaagagcctcgccaacagcgtcaagagcgtcaacatgggcaccgtcgccaccatccccggcaagtgcggcgtcttcgtcggattccccatcagcatgtccaccgactgcaacaagatcagctaagttacgacgaccaagc

SEQ ID NO: 492 - DNA, 410 bp, Zea mays
  Clone ID: LIB3136-051-Q1-K1-E6
cgtgcggacgaattagaaaaggatcctagtgcatttgtcgatgactgtcagaaaaaagctgagcttgatgattgggaagatgctgcagacatgtctactccaaagcagccatcagattctgggaatcatgctagcatcacccacgtgttggattcacacgtaactgcagcaaatagcaggaataaatactcacgggattttctgttaactttgcaacatcactataccggtcttccttttggatttcagatgaatgaagctcgtaatgctataatgaataacttggcaggaaagtcttatgttgttgaccgggaaccttaccctaatcctggaaggggtttggaccggcccacttctcctgtaccgcgtgggggtggcatggctgacgacaggtggactaaggcgggagt

SEQ ID NO: 493 - DNA, 397 bp, Zea mays
  Clone ID: LIB3136-051-Q1-K1-E7
gtcgaagaggatcacgtggatggtgcattttcattgtcatctcgcaattttgatagcttttcacaccattatcctgttttggttgtcaacttctatgctccctggtgttactggagcaatcgactgaaaccttcatgggagaagacagcaaaaataatgagggagagatatgaccctgaaatggatggtagaatccttctaggcaaggttgactgcactgaggaagttgaattgtgtaggagaaaccacatacaaggatacccatccattcgtgttttccgtaaagggtctgatataaaggagaatcaaggtcaccatgatcatgaatcatactatggggaacgtgatactgagagtttagtcgcggcaatggaaacatatgttgcaaacatcccaa

SEQ ID NO: 494 - DNA, 436 bp, Zea mays
  unsure (1)..(436): unsure at all n locations; Clone ID: LIB3136-051-Q1-K1-E8
cggacgcgtgggctccccctctagcctcacctaccctatacacagccactactgttgatcgattgaatttgaacccaccaggatcaggcttaggattacagcatgtcggcgtccccggagttgtacaggcccgcggaagcgccggccttctcgccgtcctgcgccacgcagccgctcgtgttcgccggcgacgactactgctgcaggacgccgacgggcagcgggatctgctacctgagggagcccaccacgtgcccgcccgcgccccggaagccgccgccgccgcccatgtgcaggaagcgcctcttccaagcggcggatcagcaggttgctgaggcggggcccgtccctgttatcagcatccgcctcgacgagctggagcgcctcttncggccctgcccgncgncgaccaccaccaccaccgacaagcgacgcc

SEQ ID NO: 495 - DNA, 345 bp, Zea mays
  Clone ID: LIB3136-051-Q1-K1-F1
gcttggtctcagaaaaggttgatgtattctcttttgggattgttctctgggaactgctaacaggagaagagccatatgcagatttacattatggtgttataataggtggcattgtgagcaacactctacggccgccagtgcccgactcctgcgaccccgagtggaggtcactgatggagcaatgctggtcaacagaaccatctgagcggccaaacttcacagaggttgcgaataggctgcgctccatggcggcatcccagaaggtacaacaacactaagggaccatcggcacgcagaagttgtaccagggcagcagtcagtcaaacttgcaagttacatccatgg

SEQ ID NO: 496 - DNA, 392 bp, Zea mays
  Clone ID: LIB3136-051-Q1-K1-F10
cttcgtctccgtccgctcccggcatcgtcccctcttccccgtctcgcggtcgccgcccacgggcttcgattgatcttcttccggtgctggtggcaggtaaggaacctttccctatcctcggttcgatggattcgatcgttcgttttgtctccggttgaatccgatttttttccatgttcccaggtggacggatcgtgtccttgcttggccgcccacagcagcaatggacgacggggacctggacttcttcaacccggacacgtacctgtgcccggcgctcggcactgacccgcccagcagctgctccatggacagctacttcgacgagatcctcaaggacacggagcaccacgcctgtacgcacacccacacctgcaacccggcggtgcacg

SEQ ID NO: 497 - DNA, 329 bp, Zea mays
  Clone ID: LIB3136-051-Q1-K1-F11
gcgtccgcgagaacacgatcgagcacacaagcacgaatactcgtttaggagaaaccacaaaccaccaagccgtgaaagcatcatggagtacggtcagcatgggcagcacggccacggcgccacgggccatgtcgaccagtacggcaacccagtctgcggcgtcgagcacggcaccggcggcatgaggcacggtacgggaaccggcggcattggccagctgggtgagcacggcggatctagcatgggtggcgggcactttcagcctgtgagggaggaagcacaagaccggcggcattctgcatggtttctgcagctacagctccagctcg

SEQ ID NO: 498 - DNA, 301 bp, Zea mays
  Clone ID: LIB3136-051-Q1-K1-F2
tgaacataaccatcctatagcgaccaacattctttctggccttgatgccacaggacatgtgctcaccttggactgctactgctgatacatgccaatgctcagcgtcatcaactagctgatgtaccagctcccgttgcagaccccccagcaggtgttcatgcaggaagacgtggacctcaaacgactcatggactccttcaagctcattaatgctgagtcgtttgtcgatcctagaatgcacatgcttctttattagctgcatgctcgattcctttgttcccggacaaatagtaatatcact

SEQ ID NO: 499 - DNA, 448 bp, Zea mays
  Clone ID: LIB3136-051-Q1-K1-F3
ccagactgtcatctctgcattggcatacttggtacattttcttgatgggtaccagcaatattggttgaggacagcctggggttttgataacgaagttagtttttattacatatgtggtaaactgcttaatcctttctttgttactactttcacctgtttttgcatgcctgatcgataaaaaatcatgccctgatttctatgatacctattgtattcatggattcttggaactcattaattgaatgggaattatttaagtttttaaattaatgtgaaaaatgatatgagtaaataataaggaaaagagcattaaaattatgtgttttttgtcagaataaaaatgcaattattgggagttaacgtgcaaggtgccatgaaaagttttgcttgcaacttaaacatctatccatggcctagattaatgagtgtttgctattcttacagaagt

SEQ ID NO: 500 - DNA, 221 bp, Zea mays
  Clone ID: LIB3136-051-Q1-K1-F4
ctctatggcacataaggcggcgcagtgtgcaacgcacctgctacgacggatccaccgtccatctgatgcaacagagcactggtgggtggtctgccacgcaagacgacacatggatatgacagtgatacatgtgcatcctatgaatgctgacacaacgatcaccacaagctaacttgaccaactaaatagacgcgcacgaagttcgaaagagaggcatacaa

SEQ ID NO: 501 - DNA, 350 bp, Zea mays
  Clone ID: LIB3136-051-Q1-K1-F5
cataaaaccagtgcaagcagaagcagcgcattggcgagcagcaccatggccctctcctccacagccttcgccggcaaggcagtgaacgtgccgtcgtctctcttcggcgaggcccgcgtgacgatgcgcaagacggcggcgaaggcaaagccggcggcgagctccggcagcccgtggtacggccccgaccgcgtgctctacctgggcccgctgtccggcgcgcccccgagctacctgacgggcgagttcccgggcgactacggctgggacaccgtggggctgttggcggacccggagacgtttgacaagaaccgggagctggaggtcatccactccccctgggccattct

SEQ ID NO: 502 - DNA, 441 bp, Zea mays
  Clone ID: LIB3136-051-Q1-K1-F6
gctgatcatccatgcacaatggtggtccggacgaagcactggatcataccagactacttcgcttggggagtccacatatcgctgctattcctaaaccgcttcgcagagctattgatccacaagccgggcgaaggcttcctcctttggctcctcgccaccctgctggctcctttggtataactaaccaaataatccatttttctcctgttccttttagaatcttaattacacgcagttgatgcgggttttttttttttttgccagagatggctgttctcgaagttcgccgagagctactacgccatcccgatgaggaagcacggcatggtgccggaccacagtctgttccaggcgttggccacgtgcctgatcgcgatccagccgaaggggttctacgagaggctggaagaaggcagcatcgttctcaagaggtcgaagacg

SEQ ID NO: 503 - DNA, 447 bp, Zea mays
  Clone ID: LIB3136-051-Q1-K1-F7
gctcgacttaccgatggtttctttgtggacgaatgaacagatcctcgcccctcttccaatcgggtttgccgtgttcctcgtccacctggccaccatccctatcaccggcaccggcatcaaccccgcgcggagccttggcgccgccgtaatttacaaccagcaccatgcctgggctgaccacgtgagtggaaaacaactttcttctaccttcatgttgctaactagtttcactgttaaaagtagtatgaagagtctaaaattaaatagtgaaataaagcctaaatagttgatataaaacaagaaagtaattacaaaatataaaaagtttttctatctacttggatacagatagcaaaaacattagttatatgtaggaaaaaatcatgtatctaaaaagacaaaaaacgtcttatctgaaggtcaaagcacgatatggtaggacacaat

SEQ ID NO: 504 - DNA, 336 bp, Zea mays
  Clone ID: LIB3136-051-Q1-K1-F8
ccttgctaaagtatttcaaggacataatgtgaaagtcgtccctatccttgtcggtgcacttagctcccaaaacgaagccctggattggccggttgttttccaaatatgtggatgacccaaaaaacttcttttctgtgtcgtcggacttttgccttgggggatccaggtttagctccacatcctacgaaaggaagcacggtgccatccataaatttatcgaggccttggaccgtttgggcatggaaatcataaagactggcgatcccgtaccgttcaaagaatacctgcaagagtacgaacacactatgtgggcacgacaccatatgagtgtttttt

SEQ ID NO: 505 - DNA, 435 bp, Zea mays
  Clone ID: LIB3136-051-Q1-K1-G1
gaggtcgtttgctcctgtctttctgtcggcggtcgtggcctggctggagctggcgggcaccgcgcagggcggcaacttctaccaggacacagagatgacctggggcgatggccgcggcaaggtagtggacggcgggcgcgggctggacctgacgctggaccgcacgtccggctccgggttccagtccaagagcgagtacctgttcggcaagatcgacatgcagatcaagctggtgccaggcaactccgtggcacggtcaccaccttctacctgtcgtcccagggcgacgcgcacgacgagatcgacttcgagttcctgggcaacgtgagcggggagccctacacgctgcacaccaacgtgttcacgcgcggacagggccagcgggagcagcagttccgcctctggttcgaccctaccactgccttccacacctac

SEQ ID NO: 506 - DNA, 365 bp, Zea mays
  Clone ID: LIB3136-051-Q1-K1-G11
tcggtcacagcagccaacctgaccctttacagagctttaacgcctcccaaacctctctatcactgggtgttgccttctttgtccgtgagtacttcgtaaacgtcactgaaggcagtctagacctcactttctcttcatccacacaccacaatggctcgtacgcgttcatcaacgggatcgagatcgtgcccacgcctgacctctttacgacaccgacaccaacactattcaatgggggcaacccggatccgttccctattcttgctggaacggggttctaaaacaatgtaccggcttaacgttgtaggcccaggccattttaccaggaaggagaaactggctttcaatcgttcatggggttaatg

SEQ ID NO: 507 - DNA, 155 bp, Zea mays
  Clone ID: LIB3136-051-Q1-K1-G12
cggacgcgtgggtctggttttgcttatgcatgcatgcatccaattttgtagcagctgttgaaactgacgttgcccaacgcacgaatcacatttgatgtaaatgcagttttttgctgcgtttatttaaaaaaaaaaaaaaaaaaaaaaaaaatatg

SEQ ID NO: 508 - DNA, 304 bp, Zea mays
  Clone ID: LIB3136-051-Q1-K1-G2
gccaagcttgagctcccaagtcccaaactgcccgtctgccctccagccgtgcagggcttcaggccatccgggctccggcttccggcatccatcaggcgtcctcataagatggtgtagggcagcgagcgccgagcagagcagcaaggcagagcagcgagcagccgagcagcgaggcagcgggcgtcctcagaatccgggctgccgagccgccgagcagagcagccgaaagcagcgaggcagcgagaacggcccacgagaaggcccgtgcgggtgcggtcgccctgggccgaacaaccccggaccg

SEQ ID NO: 509 - DNA, 351 bp, Zea mays
  Clone ID: LIB3136-051-Q1-K1-G3
cgcgtctcttcataggccaagctgctgacgagaaaggtggactcaagaccgatgcattcttcgaaacaagtgtagccggggtatacgcgatcggcgacgtggccaccttccctctgaagctctacaacgagcagaggagagttgagcacgtggaccacgcccggaagtccgccgagcaggccgtgagggcaatcaaggccaaggagtccggcgaatcggtggccgaatacgactacctgccctacttctactcccggtcgttcgacttggcgtggcagttctacggcgacaacgtcggcgacgacgtgctgttcggcgacaacgacccggcctcggccaagcccaagttcg

SEQ ID NO: 510 - DNA, 438 bp, Zea mays
  Clone ID: LIB3136-051-Q1-K1-G4
ataggcgtcttcgtactcgcctacctccgcggctcaaacctttcccccttctcccaattccttccgccggccgccgctccacccgtacgacgacaccatgagggagtgcatttcgatccacatcggccaggccggtatccaggtcggaaacgcgtgctgggagctgtactgccttgagcatggcattcaggctgacggtcagatgcccggtgacaagaccattgggggaggtgatgatgctttaacaccttcttcagtgagactggtgctgggaagcacgtgccccgtgctgtttttgttgaccttgaacccactgtcatcgatgaggtgagaactggcacctaccgccagctcttccaccctgagcagctcatcagtgggaaggaggatgcagccaacaactttgcccgtggtcactacaccattggcaaggagatt

SEQ ID NO: 511 - DNA, 190 bp, Zea mays
  Clone ID: LIB3136-051-Q1-K1-G5
cggacgcgtgggcggacgcgtgggcgcgcatgaggcgacggcgacggcgtcggccgcgaaggagacccagcgccccgtgtacccattcgcggccatcgtggggcaggacgagatgaagctctgcctgctgctcaacgtcatcgaccccaagatcggcggcgtcatgatcatgggcgacaggggcacgggg

SEQ ID NO: 512 - DNA, 444 bp, Zea mays
  Clone ID: LIB3136-051-Q1-K1-G6
gaagcgccacttgcttgagtagcgaagcgcgagagcaatggcgtcgctgtcgtgcgcctccacgctgccctggacccccgcctcctccccgcggccctcggcggaccgccgcctcacggcctctcgccgggctccgtcgctggtcatcgtcgcccaggggaaggtcaagaagtaccgccaggtcatattgacagacgacatagaagaggtggggaagaaaggggatacactgaaggtgcgagctggaattctaccgcaaccttcctccttcccaagggcaaggctacacttctgaccccagaagtcctcaaggaaatgcagctggagcaggagagaatagaagctgagaagaagcgggtaaaagaagacgcgcaacaacttgctcgagtttttgaaaccattggcgctttcaaactccctcgcaaaggtggaaaaggaaaacag

SEQ ID NO: 513 - DNA, 311 bp, Zea mays
  Clone ID: LIB3136-051-Q1-K1-G9
ccacgcgtgcgcccaaaaccaaaaaaaatgccaaattaaagaattctatgagaagaaaaacaactttcatcgccgtgcgccaccggagctcccttcgacggccttccttcagtgtcaacccccttctcaaaacttgtatttgcacctcagtccctgccggtctgcccggtcgccgcctttccggaggaagcccctcgtctccttgccctgcggcgggttcatggggttctcgctgtaccccatgaagacgtccacgctgatgctctggagcactagcttctttcgccataagcttagctcctccttctgct

SEQ ID NO: 514 - DNA, 303 bp, Zea mays
  Clone ID: LIB3136-051-Q1-K1-H1
cgctctcccgtacggcggtcgctttggatgtcatttgggaagggaagggaaggggaggggagggacgggggcgcgttcgtgccgcgtcctgtccttgtcgcgtccgtcgttcgtcggtcgccaacgccgtgaccccatcctgcaactgaccaccagctgcttctgacgcatggctgcgacgcgtcgatcctgctggacaccgcgcatagctagaagactgaggctccgaacctgtcggtgggcgggtacgaggtgatcgacgcgatcaaggcgcatgtggagagtgcgtgcccagtcgttgtg

SEQ ID NO: 515 - DNA, 322 bp, Zea mays
  Clone ID: LIB3136-051-Q1-K1-H11
cggctccccgaggacgacgagggcgtgccctccaccgcgatgcgggaggtctccttgctgcggatgctgtcgcaggacccgcacgtggtgcgcctgctggacctcaagcagggcgtgaacaaggaggggcagaccatcctctacctggtcttcgagtacatggacaccgacctcaagaagttcatccggggacaccgcagcaacaacgagaagatccccgcggccaccgtcaagatcctgaagtaccagctctgcaagggcgtggccttcgttcacggccgcggggtgctgcaccgggaccttaagccgtacaaccttttta

SEQ ID NO: 516 - DNA, 392 bp, Zea mays
  Clone ID: LIB3136-051-Q1-K1-H12
tgctcaagtccgacaaggttgtctattcagctgatggaatatggtcacgaaaagccagaagttgcagcagtatcaattgatccaaatttttcttcttatctttttggcgagtatttatgtagtacgtcagacaagaaattatctgaaggcgtctaccttgcaaggaataagcggaaatattcagataatgatgaaccttcagattttttgaaggcaatggatggtatcaaagttgtgaatggtctcgaatgcaagatatcctgcaagacctctaaggtctcgtatgtccttgacactgaagatttcttgtcccggcttttgaagagaaggaaaattttgcggggtgggagtgtgtctgacagttcgcagttttcaaaaatatatgctgcaaa

SEQ ID NO: 517 - DNA, 105 bp, Zea mays
  Clone ID: LIB3136-051-Q1-K1-H2
ctcccgctcccttccttcctcctcatcctcctcatggctctgtcgtccgccggctcgttcgtggcctgcagcctccggccaagcggagctagcattcatgccccg

SEQ ID NO: 518 - DNA, 422 bp, Zea mays
  Clone ID: LIB3136-051-Q1-K1-H3
cggacgcgtgggcgccgcggcacctcttctccggcgaagggaaatggcaaccgttccaggggatctgatctggcaggttgtgaggaagaacaactccttccttgtgaagcagttcggcaacggcaatgccaaggtgcagttcaccaaggagccgaacaacctgtacaacatccactccttcaaacactcgggtttggctaacaagaagactgtgacgatccatccagctgcaaaggactcggctgtggtcctctctactaccaagaccaagaagcagaacgcacctgctaagctcacccacaagtctgtgatgcgcaaggagttccgcaagatggccaaggctgtgaaaaaccacgttagtgacaactactacaggcctgatctgaccaagccagctcttgctaggctaagctcggtgtacc

SEQ ID NO: 519 - DNA, 303 bp, Zea mays
  Clone ID: LIB3136-051-Q1-K1-H4
ggtcaatggagagtagctctctccgggcagaaagggaatcacgactcgtgggtaaagtgtgcgacctctgcagagggttagaaactgatatatcagccgtgctcacggttatgagcggccttgggatcctctttgattagagatacttgatcagagatggttggtttacaggtggtgacaaggatgatggttatgactatggtaatggtaagtggcattctttccgtttggaaagagtacttttgggttaacaacttgggtttaatgctaaaacctggctctctactagtagtaattacctga

SEQ ID NO: 520 - DNA, 439 bp, Zea mays
  Clone ID: LIB3136-051-Q1-K1-H5
gctggctgaggttatatttcttggacagctctctcacccgaatttagtgaagttgatcggctattgttgtgaagatgaccacagggtccttgtttacgagttcatgcctctaggaagtgtggagtctcatttgttttcaagggttatggtgccacttacgtggtcgatcagaatgaaaattgcgctcggtgctgcgaaaggacttgcttttctgcatgaagctgagaagcccgtcatctatcgggacttcaagacatcaaatatattactagatgaggaatataatgcaaaactatctgactttgggcttgcaaaagatggaccagttggcgataagtcccatgtttcaactcgtattatgggtacctacggttatgctgcaccagagtacattatgacagggcatctaacggcgatgagtgatgtctacagctatggt

SEQ ID NO: 521 - DNA, 375 bp, Zea mays
  Clone ID: LIB3136-051-Q1-K1-H6
gataaacatactgaagaccatgtatccgtcttaccctaatcccaaaatttttgtggaggaggatgtcacttgtgtaccactctttgaaactgtgcaaactggggtggagctcttaagccatatagggaatcccccgcgacactgttgaatcctacagggatttgggcatctggattggaccattgacctaggatggtttcattggtggtggcctccgacctcctcctgaataatgtaggcgcagtgacaccagaactgccgttttcttaatttttaaacacttttttgtacgggttaaggccaaataaataggcccggtgctgactgttgaatggtttggggccaattggggtggttaaaaccttccaaaaattt

SEQ ID NO: 522 - DNA, 446 bp, Zea mays
  Clone ID: LIB3136-051-Q1-K1-H7
cacgcatactgcatacacaacacagagcatcagaaggagctacgatctgatcgacatggctgccgccaccatggctatcacctcccgcgcgctcgtcggcaagccggcggctggcacgagggacgtcttcggcgagggccgcatcaccatgcgcaagaccgccgccaagcccaagccggcggcgtccggcagcccatggtacggtgccgaccgcgtcctgtacctgggcccgctgtccggctcgcccccgagctacctgaccggcgagttccccggcgactacgggtgggacaccgcggggctgtcggcggacccggagaccttcgccaagaaccgcgagctggaggtgatccactgccgctgggccatgctcggcgcgctcgggtgcgtgttcccggagctgctcgcccgcaacggcgtcaagttcggcgaggcggtgtggttca

SEQ ID NO: 523 - DNA, 381 bp, Zea mays
  Clone ID: LIB3136-051-Q1-K1-H8
cctaagctgaaaattacactggtgtgtaccaacctgcctatgcattcaccaatattcgattctcatcaaggaccacaggggagcccacatcaattacgtggacacatataatacacttaaaggcaattgccgatggatcgtgtcccatggatattcaaaaaggagatgttcttgcttggccaacgaatctagcacggatgatgggcccttggctagtttatgcctgcttgctgaatggaacatccatggctctgtatgactggatcagaacaatgtcaagcatctcgaagtctgtacacgatgcataaagaacaatgcttggactgcaacacaggattgttcgtacttggaagaatactgactgtacagatggactagact

SEQ ID NO: 524 - DNA, 356 bp, Zea mays
  Clone ID: LIB3136-051-Q1-K1-H9
cgtccggtcacagcagccaacctgaccctttacagagctttaacgcctcccaaacctctctatcacttggtgttgccttctttgtccgtgagtactccgtaaacgtcactgaaggcagcctagacctcactttctctccatccacacaccacaatggctcgtacgcgttcatcaacgggatcgagatcgtgcccacgcctgacctcttcacgacaccgacaccaacactatccaatgggggcaacccggatccgttccctattcttgctggaacggggttcgaaacaatgtaccggcttaacgttggaggccaggccatctcaccaggaggagatactggcttttatcgttcatgg

SEQ ID NO: 525 - DNA, 344 bp, Zea mays
  Clone ID: LIB3136-052-Q1-K1-A1
tgagcaaaccaatcgcccaccaatctacatcgccgcttgcaagttcatggaagaaggagaagacattgcttgattgttccacagcacagatgacaagagatccaagaggttccgcaatgaacttactgccctgagttcaccgagaggcaagggccaggattgtcaatgctggtggcgagtgcctcacatttgaccagcttgctctccgtgctccacttggcgagaacacagtcctcttgaggggccccaagaatgcccgtgaggcggcgaggcacttcggcaaggctcctgtagtgccgcacagtcacaccaagccatatgtgcgctccacgggaaggaagttc

SEQ ID NO: 526 - DNA, 447 bp, Zea mays
  Clone ID: LIB3136-052-Q1-K1-A10
cgccgagaaggagatgcggatcctgatggtgggactcgactccgcccgaaagaccagcatcctctacaagctgaagctcggcgagatcgtcaccaccatccccaccatcggattcaatgttgaaaccgtggagtacaagaacatcaactctactgtctgggatgtctggggccaggacaagatcaggccagtgcggatgcattacttccagaacacccatggtcggatattcgttgaggacagcaatgatagcgaccgcgttgtcgaagcaagggatgagctataccgaatgctgtatgatgatgagttacgtgatgctgagttcgcttgtgtttgctaacaagcaagatcttgcaaatgctatgaatgccgctgagatcactgataagcttggactgcattcactggaacagcgtcattggtacattcaaagcacttgtgctacaa

SEQ ID NO: 527 - DNA, 252 bp, Zea mays
  unsure (1)..(252): unsure at all n locations; Clone ID: LIB3136-052-Q1-K1-A2
atcgtcgggagaggaaatcgcaaaagagggcccgtctcatcncgagttataggaagccatggagcacataggaggctgtggtgccaaggtcccccgagaggacccaatcctctgcatcaaataactgtgagcttcttcggcaagcgcggcgaccaatgaacatgtgctccaagtgccacaaggagatgataacgaagcatgatcaggccaagctggctgcctcctctatcgacagcatcgtgaacggcagcg

SEQ ID NO: 528 - DNA, 393 bp, Zea mays
  Clone ID: LIB3136-052-Q1-K1-A3
gcgttttaccgcccggtagactgtcgtcgctatggccgccgtggaggtgtgcgtgaaggccgccgcggggaaccccgacacgctcggcgattgcccgttctcgcagagggtgctgctcacgctggaggagaagaaggtcccgtacgaggtgaagctcgtcgacctcggcaacaagcccgaatggtttctgaacatcagcccagagggtaaggtgcctttgttcaacggtggagatggcaaatgcattgctgattctgatgtaatcacccaagtcattgaggagaagttcccgactccttctctggtcacccctccagaatatgcatcagtgggatcaaagattttcccagcctttgtcaagttcttgaagagcaaggatgctagtgatgggtc

SEQ ID NO: 529 - DNA, 437 bp, Zea mays
  unsure (1)..(437): unsure at all n locations; Clone ID: LIB3136-052-Q1-K1-A5
cacccgtttctcggtgcgcggcctccctcggctcctccttgatcccttcctccttccattggtggtcgccggggacggtgagcgaagaagcctcccttccttccctccgttggtcgccgggaggagtgaagaagcctcccttcctcttcccctccggtggtcgccaaagacggggagcgaagaagcctgttttcctccttccgtccggtggtcgccagggacgaggagcaaagatgttctatggggccatggtgtgggatccgtggctgatcgtgtcgcacatcgtgtgcctgcagtgcctctactacttgtcgctgggcgtcgccatggcgctgctcgtcggcacccgcgttccgcgactcaccctcctctacctcttcgactttncacgctcaccccgcgcacccncacaggttggtgcgccatcgcatcattcc

SEQ ID NO: 530 - DNA, 449 bp, Zea mays
  Clone ID: LIB3136-052-Q1-K1-A6
agatgggtctttctctgaatattgatatgtcctctactgcattttttgaggccctccctgtgattgattttgtttctcagcttcttaatagagacatctcagttagaccattgtctgattctgatcgcgtgaagattaaaaaagccctacgaggtgtgaaagtggaggtcacacaccgtggaaacatgcgtaggaaatatcggatatctggccttactccacaagcaacaagggagttatcattccctattgatgatcgtggtactgttaagactgtggtgcaatacttcctggagacttatggtttcagtattcagcacaccactttaccttgtttgcaagtgggcaatcagcaaagaccaaattatctgcctatggaggtctgtaagatagttgaggggcagcgctactcataacgacttaatgataaacagatcactgctctactg

SEQ ID NO: 531 - DNA, 414 bp, Zea mays
  Clone ID: LIB3136-052-Q1-K1-A8
cttcacgactggaagaatggcctgatcgactactgtcccgccattctgtagagggaagcatagattgaacaagcagccagaattaaacagcatgatgctcgtttccctgcatcattgttacctgtctcctggcataatactatgtgaaaatgaacatgatttgtttttgagtcttttgaaattaaatatccttttgtaaggactcgatttggttggaaacaattttcacctatgaactgagatttggaagcccagctcttgtgatcatgcggctgctgagaaaactagagtaggtcgagaaagattgattatagattgtttagaaggtattgccgtctaaggaacgaaaaagttggccagaagcaacatgctctgagacagctataaacatctggattggaatgactactattc

SEQ ID NO: 532 - DNA, 432 bp, Zea mays
  Clone ID: LIB3136-052-Q1-K1-A9
gtcggccgacgcgtccgctctattgaccatgttaaccttattctgacattaggtgggactggcttcacagggagagatgtcacaccggaagcaacaaaaatggtgatacagaaagaagcgcctggtctcacatttgttatgcttcaagaaagtttgaagattacaccattcgcaatgctatcccgggccacagctggaatcagaggatcaacacttatcatcaacatgcctggcaacccaaatgctgtggcagaatgcctggaagcactcctcccagcgcttaagcacgccctgaaacagatcaagggtgacaagagggaaaagcaccctcgccacactccacatgccgcatcggcgcctgtggaccagtgggagcggagcttcataaccgcatcatcttgtagtggtgggtgctcatgttatcccctgaag

SEQ ID NO: 533 - DNA, 330 bp, Zea mays
  Clone ID: LIB3136-052-Q1-K1-B1
gaaacatagttcgtatcaaggtactgcgtaataaaccagatcatgctcttgttgagatggctgacgggttgcaggctgagctagctgtgcattatttgaagggggctatactatttgggaagaagctggaagttaactactcaaagtaccctaacattacacctgccccagatgcccacgactacttgaactcgagcctaaaccgattcaacagcaacatggtaaaaaactaccgacattgctgctctccaacaaagatgatccacatctcttgcctcccccaagagatctctgaggaagcaatcctgaaccatttgtctgagcacggta

SEQ ID NO: 534 - DNA, 444 bp, Zea mays
  Clone ID: LIB3136-052-Q1-K1-B10
gaagaaccctaagaacaagtctgtcgctgcggtggggaaagctgctggcgacaggtggaaatccctgagcgagtcggacaaggctccctatgtagccaaggctaacaagctcaagctcgagtacaacaaggccatcgctgcctacaacaagggcgagagcactgcagctaagaaggctcctgccaaggaggaagaggaggaagatgaagaggagtctgacaagtccaagtcggaggtcaatgacgaggatgatgaagagggtagtgaggaggatgaagatgatgacgagtgatggagctcctcgagacaatggaccgtgctttatccaacaatggagcggctacacaaggccccgtggcgatcacaaaaaaggagcctatatccatgtactagaattattcagtttcactccacatcgtgatgttttatttttacttttgtcgt

SEQ ID NO: 535 - DNA, 442 bp, Zea mays
  Clone ID: LIB3136-052-Q1-K1-B11
cccaacttcagctgcgcctcgactcgtagcccgaaccctagccaccaagccggaggcgagagagcagccatggcgcggtgcctcgcgctcgtcgccctcctcgtactcggcctcgccgccgccgcctccgcggccgacgcgcccttcgtcgtcgcgcacaagaagatttcgctctcccgccccaagccgggcgtcgagcgcgtcgccgtctccctcgacctctacaaccagggatccgcgactgcctatgatgtgtccattaatgacgactcttggccaacagaagtgtttgagcttgtcactggagagaaatcgaagacattggaaaggcttgaccctggtgccactgcttcgcacacatatgtcctggagaccaaaacacagggcaggttccagggttcaccagctattattacataccgtgttcccacaaagacagctc

SEQ ID NO: 536 - DNA, 353 bp, Zea mays
  Clone ID: LIB3136-052-Q1-K1-B12
caaggacgccccgatcaaccaggacctcatcagcaacttcttgtcggaccctgtccatggtgccattgaggtctgcgccgagctgaggcccaccgtctacatctctgtgcctgccaacgccgactttgtgcgcccggagctccggcagtcttcctagattgaggcactgagcggagagggagagggagagagaaagagaggatttccggtcccgagttataacagagtgctgtatgttttgtgcgacttgttgtaaggcaagtctgaactgtgaacctatgtgagcttctatcataagacccggagaaagcctggccatctgtttccggaattaaaatggggtgcttccgaat

SEQ ID NO: 537 - DNA, 127 bp, Zea mays
  Clone ID: LIB3136-052-Q1-K1-B4
tccgggcgcgtggtctttcgtgatatgccacgaatttgaaagttcgcaaatatctactgaattaagttgctggctttatgagggttacattagaacatatagattgtgaaaatgaagccctctattg

SEQ ID NO: 538 - DNA, 310 bp, Zea mays
  Clone ID: LIB3136-052-Q1-K1-B5
cgcgtgggtgcagcttcaagcactaccgaatcagggcgagtgggagcagaggagggagtcccatgtctgcgcccctcgctggagcagatcgttgtcgagccgacgtggagctgctgcggtagaaagctagcggagcctgcgagctagcctgatccgtccgcagtccgatcgggatcgatgggtggggaggcgccggagtccgcgctgctgacccgggcgctgatcatcggcggcggctaccgctgctgtgttcccgaggagatgctgcaactcgtgatgggggtcgtcgaggacccgcgcgaccgggagg

SEQ ID NO: 539 - DNA, 383 bp, Zea mays
  Clone ID: LIB3136-052-Q1-K1-B7
caccctttcatcagcctgcctgtccactgttggcttggtgacttcctccgctccgctccgctcccgaacggtcgatctttgcatggcagcagcagctggctccaaggggcgggcgatcgctggaagcttcgtcagccgcgtcctcgccggcaaggccgcctcgccgaggagggccgtgcacgcctcggcgtacgacaagaacctggaggaccaggtgcgcccggcgttcgtgccggacgatgtgatcggcagcgccgggagccccgacaagtactggagcccccaccccaagaccggcgtgttcggcccggcggcggttgaccccaagctggcagctggtggcgcgccggacgccggcgcggatgctgcatgaggcacggtgc

SEQ ID NO: 540 - DNA, 352 bp, Zea mays
  unsure (1)..(352): unsure at all n locations; Clone ID: LIB3136-052-Q1-K1-B8
ctcttctccactaccacccgcccgcccgccttctcctccaccactgccccgtcgtggaataggggcaagttcaggcatctcgcttctgtcctggtcgaggggatcggagaaaaatgggctcggaggcggactgcgacaggatcaggggcccgtggagccccgaggaggacgacgcgctgcggcggctcgtggagcggcacggcgcgcgcaactggacggcgatcgggcgcgagatcccggggcggtcgggcaagtcgtgccgcctgcggtggtgcaaccagctgtcgcctcaggtggagcgccggcccttcacggcggaggaggacgcggtcatcgttcgngcccacgcgcg

SEQ ID NO: 541 - DNA, 264 bp, Zea mays
  Clone ID: LIB3136-052-Q1-K1-B9
cggtcgcgtggtcggacgcgtgggcaaagaatttccttccctatccgccgccggcgctcgtgtgcctgagaggtgcctgtacctaggaactggccgagttctatgtagagaatatgttttgcttgtctgactacgagatctgctgcgtctggtggaggcgaaagggagaaaatcctctgatctgtttcgtataacgcgtccgagctcgcaaatgaagggttttacacatagatatcccgattcgaatttgaaagactaatggac

SEQ ID NO: 542 - DNA, 375 bp, Zea mays
  Clone ID: LIB3136-052-Q1-K1-C1
atacgctgacggacggacgggctgaggcaaggccgcctgcgggcggaagaaaagcgaagctggtgcgccctccccttccccatcttcgcccccgcctcacccaccagacgagagagcgagcgcagttcggccgccggtcgcgtccgactccagcaaagccgagcgcccaccccctcaccctattaccttcctctcgggtccaattcggtgcctggctaactccgcacgtcttccccccttttccctccctcgaccgacgaccgtccgtccaccaccggatccaggagcgaccctccctcgtgctcgtcgacgatcgaccggccgccgatcgtccaggaaagatgtcgagcctcgaggagccgctgggtctcggag

SEQ ID NO: 543 - DNA, 405 bp, Zea mays
  Clone ID: LIB3136-052-Q1-K1-C10
tcgcaagggctggtctaatggttcattttcaagttagtgcaagatttggttaatgccgggttgaacttagcggaaacaatgccatcattgttatggatgatgcagatatccagcttgctgtgcgatctgtcttgttcgctgctgttggtacagcatgacatcgcttcaccacatgtcgtatgcttgatcttcattgagaacatatatcaaacctttcttgatcagcttgtttaggtatacaaacaattcctaattggggattcgttggaataaaggctccttatttgtgatcacttgacattttctgtattaaaaatgagaacctttttgtaaatgcatttaattactatttaaatttttataagtggtgaatatttctttttttgtagggattctgctcatttg

SEQ ID NO: 544 - DNA, 341 bp, Zea mays
  Clone ID: LIB3136-052-Q1-K1-C11
cttccaacgactcccaagcgctttgcgtttggcccgcgcggcatcatggcgactgcgaacgggagcagcaaggggtcgttcgaggtgcccaatgtggaggtcaggttcaccaagctcttcatcgacggcaagttcgtcgacgccgtcttcggcaagacgttcgagacccgggacccttgcaccggcgaggtgatcgccagcatcgcggatggaggcaaggccgacgtctacctctccgtcaaggccgcccgggaggccttcgacaacgggccctggcccatgatgacgggatacgagcgtggtcggatcctccacaggttcgcggacctgatcgacgagca

SEQ ID NO: 545 - DNA, 438 bp, Zea mays
  Clone ID: LIB3136-052-Q1-K1-C12
accgcttctgcgacatgaccgccgacgagttccgacgccactactcgggctccagggtcgcgcaccaccgcatgttccgcggcgacaggcagggctcctcggcgtcggcgtcgttcatgtacgccgactcgcgcgacgtcccggcctccgtcgactggaggcagaagggcgccgtcaccgacgtcaaggaccagggccagtgcggtagctgctgggcgttctcgacgatcgccgccgtggagggcatcaacgcgatcaagaccaagaacctgacgtcgctgtcggagcagcagctggtggactgcgacaccaatgccaacgccggctgcaacggtggcctcatggactacgcgttccagtacatcgccaagcacggcggggtggcggctgaagacgcgtacccgtacagagcgcgccaggcgttctgcaagaagtcgc

SEQ ID NO: 546 - DNA, 345 bp, Zea mays
  Clone ID: LIB3136-052-Q1-K1-C2
acgctccgccagccgctgccactcgccacgttccaccagccggcgccccttcttctcactccgctggcgccggcgccgcgttatccatggcgtcggagaagaagcaatccaacccgatgagggagatcaaggtgcagaagctggtgctcaacatctccgtcggagagagtggggatcgcctcacccgcgccgccaagctaggtacactgtccgttcctttggtatcaggcgtaatgagaagattgcctgctatgttactgtaaggggcgagaaggcaatgcagcttctggagagtggacttaaggtcaaggaatatgaactgctaaggaggaactttagtgacac

SEQ ID NO: 547 - DNA, 425 bp, Zea mays
  Clone ID: LIB3136-052-Q1-K1-C3
tcgccaagagtgatgggcatgaggactatggcctccttgttagtgacaaggcaaggaaatacgccataatcaaggagcttgatgagccagttaccttaaatgatgggacagtggtcctgcagtttgaagtgagacttcagaatggccttgaatgtggaggtgcctacattaagtacatccgccctcaggatgctggatgggatgccaaggagtttgataatgagactccatacactattatgtttggtccagataaatgtgggtcaaccaacaaggttcatttcatccttaagcacaagaatcctaagactggaaagtatgttgagcatcacctcaaattcccaccttctgtcccatacgacaagctctctcatgtctacacagctatcttgaagccagacaatgaggtcagaattttgatcgac

SEQ ID NO: 548 - DNA, 414 bp, Zea mays
  Clone ID: LIB3136-052-Q1-K1-C4
gagcaacctcgtccaatagctcagcacatgcctgcatcatggtcggtggctcaagcatctaatgcaattggctatgggccagatggtgtcatgggaccttacagccctggtgcacctgtgagatcgtctgttttcatgcatgcttcacagcaatatgctataccttctcgccctggagtcccatttgcacatccacaggaatcgatgggaccattcgcacagactcaccaacaacaacctgatgctagtctacgctttgcccggccccggtgaggggcccgggcatgcctgcacctgccagtgtgcaacaaacacattatcctttgttactggcagatggtagcaggcataaaaaaccgagaggcgtaaggcagagtcagccatctgtttgatgttgtcagcctgtatgcactc

SEQ ID NO: 549 - DNA, 306 bp, Zea mays
  Clone ID: LIB3136-052-Q1-K1-C5
tggtggtgctgctggtgctggcggcggcggcggccgagacggcgtcggcggcttcgtgcaacgccgggcagctggcggcgtgcgcgccggcgatcactgccggcgcgacgccctccgcgtcgtgctgctccaacctcaaggcgcagcaggggtgcttctgccagttcgtgaagaaccccacctacgggcgctacatcaacagccccaacgcgcgcaaggtcgtcgcctcctgcggcgtctccgtgccgcgctgctagtactagtacgtgtgctgtgcatgcatgtacgtgcgcacgtgggctgatc

SEQ ID NO: 550 - DNA, 358 bp, Zea mays
  Clone ID: LIB3136-052-Q1-K1-C6
gcgggtcgggagatcgatggctcagcgcgtggcctggcagccttgtcgcgcgcgcgcctacatggcacgggcttgctgttcagtacaacgcgaacgcgactgtttctctccatctctctgtgtgtgacagtgtgtgtgtcgtagctatagcagtgcccggtgcggactgcgagtgacatgggctaaataaagtgtgcgtcgtctggtctggtggtggtagtggggcgcggtgccccatgtgtgccgctgcagcttgtgtctctgtgttgcttcatgttctctgtctatctagtctcatgtatggcagtttgggtacgggtatatcaactatcaagcatgttccgtcttctttggtttt

SEQ ID NO: 551 - DNA, 344 bp, Zea mays
  Clone ID: LIB3136-052-Q1-K1-C7
atccgcatccctctctcctcggtttcctctcccaccaccaacccccagatcgcagcgatctccgccgccgccctctctgggattccgcgcgacaaagtcaggcgtagaggctccaggaggaggagggaggcgcagcaaggcgggtgggggagatgttcctctgggactggttctacggggtgctggcctccctcggcctgtggcaaaaggaggccaagatcctcttccttggcctcgacaacgccggcaagaccacgctgctccacatgctcaaggacgagcggttggtgcagcaccagccgacgcatcacccgacgtccgatgagctcagcatcggcaagatc

SEQ ID NO: 552 - DNA, 404 bp, Zea mays
  Clone ID: LIB3136-052-Q1-K1-C8
cgccaagaaggagatgcggatcctgatggtgggactcgacgccgccggaaagaccaccatcctctacaagctgaagctcggcgagatcgtcaccaccatccccaccatcggattcaatgttgaaactgtggagtacaagaacatcagcttcactgtctgggatgtcgggggccaggacaagatcaggccactgtggaggcattacttccagaacacccagggtctcatctttgttgtggacagcaatgatagggaccgtgttgttgaagcaagggatgagcttcaccgaatgctgaatgaggatgagttacgtgatgctgtgttgcttgtgtttgctaacaagcaagatcttccaaatgctatgaatgccgctgagatcactgataagcttggactgcattcac

SEQ ID NO: 553 - DNA, 331 bp, Zea mays
  Clone ID: LIB3136-052-Q1-K1-C9
ggaggtcgggatggggcgtctgggtacggcgatgctggcggagaggatgtgaggggggcgggcggcgactcatcggggtgagcgatctgggccctaggatttctgaacattaatgatgtaggtcaaaaggagatatattatttttgctttctgcaggaagatttttgtcggaggcgttgcttgggagacaactgaagaatcattctccaagcatttcgagaagtatggtgcaataactgattctgtaattattaacgacaagcatactaagatgccgtcgtgatttggattcgttacaattttttgatccatttgtatagacaaggttttt

SEQ ID NO: 554 - DNA, 378 bp, Zea mays
  Clone ID: LIB3136-052-Q1-K1-D1
gcttatttctaagcaggaatcgcaggataagttggaaaaggctcctgatacctctgtgccaactaatgggaatagctcccaagaaaagcttattggcagcccagatatacgaccaaagaaattggccttaaaattagcatttactttaccaacatcatgctacgctacaatggctatccgggagcttctgaagacttccacctcagttgcatatcagaaaacactcagctgctagattctgtttggaagacattccttcataggagtatctcttaattacatggctgctgcctgtcttcacggcagttagaatacctggaggactgatgaatccacaaacatgatgcattctgcacatgaggcataacaaacaatatg

SEQ ID NO: 555 - DNA, 433 bp, Zea mays
  unsure (1)..(433): unsure at all n locations; Clone ID: LIB3136-052-Q1-K1-D10
gcgcagccgcgatggaccgcgtccagctcgtgctcctcggcctccccatcctcctcttctgctccgacgtcgtcaccctcttcgcgcctctcccaccgccgggccccgggcccgacagggacccccacgcttttcagcccggcggggaatccttcgtcgccgacgctttcgcacatgtggagccacaggtggatggacctggctccggcaccaccgtcgacttcaagttctgcgcctcctgctcgtacaggggaactgcaatgaccatgaaacggatgctggaaacctcctttcctgggatccatgttgtcttggaaaattatcctccgccgttccccaaacgcgctctcagtaaagctgtaccccttcttcagttcggcgcgatggcaacattaatggccggtgatcagatcttccncagatttggaatggt

SEQ ID NO: 556 - DNA, 180 bp, Zea mays
  Clone ID: LIB3136-052-Q1-K1-D11
gtgaaagaaaaccacttttggtgataattgatgatgaacgcggaggatgcggcaaaaggaggaatgatctgctgatccaatgaaactgagttttttttgtcttatgttgtggtaccataactgaaatttggtatttttctctactatttattgtagtggtatctggatttcccttgtgtt

SEQ ID NO: 557 - DNA, 251 bp, Zea mays
  unsure (1)..(251): unsure at all n locations; Clone ID: LIB3136-052-Q1-K1-D12
gctctgggcaaagcatattgtccaaactctctcttgnaagcagatatctgtacatagaagaaggctcgcctgcacaaccattgagaatgatgggctttccggcgatttcacatcatcatcttaggattccaggcaaggatggaaagcgtaaaggtttaaatgaagatttaggtatttagggttctacatagtatgtcaagctgaaatgctttgccttgtttattggaatatgtatgtttcgtttcaaacgt

SEQ ID NO: 558 - DNA, 438 bp, Zea mays
  unsure (1)..(438): unsure at all n locations; Clone ID: LIB3136-052-Q1-K1-D2
gtcgagatattgggaagaataagacacanaaacctcctgagttttcgtggatattgtgcggatggacccgaacggattctggtgtatgactttatggcaaactcaagtctctatgcacatcttcatggaccacattctgctgagtgtctccttgactggcggaggagaatatctattgccatcaacactgctcgggctctcttgtaccttcaccactatgcaacacctaagataatccatggaagcatcaagaccaccaatgtgttactggattcagacttccaggcacatgttggcgatttcggtctgataaggtttattcctgatggaatggatcatgaaaagattaccagcgaaagccaacgaggctatcttgctcctgagtacattatgttcggcaaaccaactgcaggttgtgatgtataccagcttggaata

SEQ ID NO: 559 - DNA, 278 bp, Zea mays
  Clone ID: LIB3136-052-Q1-K1-D3
gtgatctctcggaggccgcggggactgagcagcgtctcggcggcggcgtggcctgcatagctgttggcttgccgagatgcaacggaacggggtggtggaatgcagcgtgtgccgctcccgggtggttgtgccgagcccccggagcgtgttcaaggccgtccaacaggcaccgcaccaggatgtcgtccaagttccgggcgctcaacgtcttcctcgtcgtcggcgactgcatccttgttggtctccagcccatcctagtgttcatgtcaaaggttgat

SEQ ID NO: 560 - DNA, 439 bp, Zea mays
  unsure (1)..(439): unsure at all n locations; Clone ID: LIB3136-052-Q1-K1-D6
gtccactcaagggtatcatgggttatgtggaagaggatctggtttctaccgacttccttggtgacagcaggtcgagcatcttctacgccaaggccgggatcgctctgaacgaccacttcgtcaagctcgtctcgtggtacgacaacgagtggggctacagcaaccgcgtcgtcgacctgatccgccacatgttcaagacccagtaggggtttttcccccctgcttctcatggatggttgctgcttgtgtatgccgagaataaatgtggatggcgcgtgcctctgggtcgccaggttcatgctgagtctggacatgttttgcacttttgtttcccttcctgctaccatctgtgacagatccgctcgctaatatgggacctgagattagcttataanaaaaaaaaaaaaantaaaatttatattttattatttaatatttt

SEQ ID NO: 561 - DNA, 436 bp, Zea mays
  unsure (1)..(436): unsure at all n locations; Clone ID: LIB3136-052-Q1-K1-D7
gcagaacgaaagagatctccggtccccgggccccggctcctcccctcccgattccaatctggtctcgccggacgccgggcctggcggcgagggagagatggggaagaaccaggcgtacaaggcgatgcagcgggcgcggctggggtcctcgtccggcgcgccgggcgccgtcgacgcccccgaagacggcatgagtggcatgcggcgcgcctggccagccttaacaagacgcacaccctcacctgggaggagttcaagaagaagcagaaggaagaggaactgaaaaggggcgagctggaggctgacaaagacaaaatgatgagagagtatagagctcaactggatgctgaaagagctcaaaagctagcaaacggaagaaatcactcaaggtcatactcataatcatcatcttccaagaaagaganggaggataagg

SEQ ID NO: 562 - DNA, 247 bp, Zea mays
  Clone ID: LIB3136-052-Q1-K1-D8
ggaattagaagctgctgcaatcttaacggacgtttcagtgacgtattttcgaggaagagggggagggaatattctcagttttggctgcaattgtatcgggttttgtttatttgttagcgttcgtcaacgagaatacgacacacatttttgccaacccaagaattcgcgtttatttactcaatatacacccacgtgttttctctataaaaaaaaaaaaaaaaaaaaaaaaaaaaaaataaatattggg

SEQ ID NO: 563 - DNA, 322 bp, Zea mays
  Clone ID: LIB3136-052-Q1-K1-D9
ctgacgcgtggtcggacgcgtgggcaaagaattccctcccctagccgccgccggcgatcgtgtccctgttaggtgccgggaccgatgaactggccgagttctatgtagagaatcggatttgcttgtatcaacacggggtccgctgcgtctggtggtggtgaatgggagaaattcatgagatctgttcctgatcaggcgtgcgagctcgggaatcaagagtttcacacatagctcctgcgatttgaatttgacgtactaatggagcctcacggtggcaaaaaggctatcagtaatcgatccatgatgtatgaagctccccttg

SEQ ID NO: 564 - DNA, 342 bp, Zea mays
  Clone ID: LIB3136-052-Q1-K1-E1
gagagagcgcatagtcgatcatgaagggtggcaagaaggaagtggccggtgcggtggtggccatactgctggttctgcagctcatggcagctccaccgacggccatggccgcccgctcgccgcacggagccgtgccggatggctccctcgccacgacgcccaaggtgacgatgctgtcggccacgctgtgctacacgggggagacatgcaaatacattggctgcctcactcctgcttgctcctgcaactatagtgatcgtctatgctacatcatatttactcctgttgcttgaggccattccgcgaagccacaactcttacatgcatgcgccggccgacgac

SEQ ID NO: 565 - DNA, 386 bp, Zea mays
  Clone ID: LIB3136-052-Q1-K1-E12
cacccccacgccacacaccaccaccggacgcttgctcaccaccaacctcagcacatcgaggagaagaggtgtggccaatggcttcgtcggtggccgccgcggcgagcacattcctgggcacccgcctggcggacccggtgccgcataacgggcgcatcgtggcccggttcgggttcggcggcggaaagcccaaggctgccgtcccgaagaaggtggcgaagacgttcatcttctctgaccggccgctgtggttccccggcgccgtggcgcccgactacctcgacggctcgctggtcggcgactacgggttcgacccgttcgggctcgtgaagcccggggagtacctgcagttcgaactggactcgctggaccagaacctggccaag

SEQ ID NO: 566 - DNA, 326 bp, Zea mays
  Clone ID: LIB3136-052-Q1-K1-E2
ctagagaagaccagtgcagtgtcacttcatggaatgcaagctgcgagttgggagtatttatgagtcctgtgaccacctcaagagaagacagtccgccaggatatgggcctcgagaaaaccaggagaatgacaatatgagatgcgagttgagaatgtttacaagtcctacaaccatctccagagaagttggcccaccaggatatgagcttactggaaaaaacaagggcaacggcgcttcatgtactacgaattaccagcatggagcgtttacgagtcctgtagccttcccaagagaagcctgtcctccaggatttgtgtctggagag

SEQ ID NO: 567 - DNA, 429 bp, Zea mays
  Clone ID: LIB3136-052-Q1-K1-E3
aaaaaattggctccgaccaccgccaaggacagtggctccgccgatcgatggcgcgaggtgcaggcgttcgaggacagcaagctgggtgtgaagggcctggtcgactccggcgtcaagtccatcccggccatgttccaccacccgccggagtccctcaaggatgtcatttctccaccagctctgccctcctccgacgatgcgccggccatcccagtggtggacctgtccgtggcgcggcgcgaggatctggtggcccacgtgaagcacgcggccgggacggtgggcttcttctgggtggtgaaccacggcgtgccggaggagctgatggccagcatgctcagcggggtgcgccagttcaacgagggctctctggaggccaagcaggcgctctactcacgggaccctgctcggagtgctcgcaacgtgcgc

SEQ ID NO: 568 - DNA, 377 bp, Zea mays
  Clone ID: LIB3136-052-Q1-K1-E4
gcggaccagcgcggaccgccaggcggcgtgccgctgcctcaagagcctcgccaacagcgtcaagagcgtcaacatgggcaccgtcgccaccatccccggcaagtgcggcgtctccgtcggattccccatcagcatgtccaccgactgcaacaagatcagctaagttacgacgaccaagctaataagcctaccgaacgtacacgtacgccccgcgcgctgcacgagtgatgaagccagggaagaaataaaataaagctagctgtattgccaggagcagcatgcattatttatcgatctatatatatatatactgtactgtagtactctattatatatgtatgtgtggcctgcagtgcgagttgcttccatccacctac

SEQ ID NO: 569 - DNA, 308 bp, Zea mays
  Clone ID: LIB3136-052-Q1-K1-E7
gatgcatctcccaagaaaagcagaaaaagaagaccaaaaccaaggctgatgggagcaatggacgtggataaacccttcaacgttgctggtggagaagctgagcctggaactgagaagaagaagaagaaaaagaagcataagctggaggaggaggcacaggaggagaacggtgcatcagatactacccctaagaaaaagaaaaagaagagccgtgaagctttcgaagaagctgaacctaagaccgccaccgatggtaagaagaagaaaaagaaagcttatgccgaggatgatgagtagccaagttattt

SEQ ID NO: 570 - DNA, 381 bp, Zea mays
  unsure (1)..(381): unsure at all n locations; Clone ID: LIB3136-052-Q1-K1-E8
ctcatncgaattcccaggcaggctggttcggctaggagggcaggaagaccgaagaccgagccgtgcgggggctcgggacgggaacgggacaggaccccaaaatctcatatccttcctgcccgcccgcccgtgcccgtcgacgcttcgttcttgccgggcgtgccccaccttcgccctttccttcttcagggggatcggatacgccacaagctgcgcgatggtgctgtgggttcttcggctacggttccctcatctggaaccccggctttgacttcgacgacaaaatactcggcttcattcaagggctacaagcgcaccttttatcttcttgccttgaccacaaatgcacaaccggagcattccgtggaggacctgcacgct

SEQ ID NO: 571 - DNA, 420 bp, Zea mays
  Clone ID: LIB3136-052-Q1-K1-E9
ctcagagcagccgcatccacaacctgcctctctcgtcccctggcggcgtccgcggcaggatggcggaatctacggcgaggacggtgaaggatgtcaacccgcacgagttcgtcaaggcctactccgcccacctcaagcgctccggcaagatggagctccctgagtgggttgacattgtgaagactgcgaggttcaaggagcttcctccttatgatcctgactggtactacatcagggctgcatccattgcaaggaagatctacctaaggcaaggcatcggtgtgggtggctttcagaagatctacggtggccgccagaggaatggctcccgcccaccacacttctgcaagagcagtggtgctgttgcacgcaacatcctgcagcagctgcagattatgggcatcatcgatgtcgatccca

SEQ ID NO: 572 - DNA, 146 bp, Zea mays
  Clone ID: LIB3136-052-Q1-K1-F1
cataaacacaagctcccttagtcgtagtcctctcgtttatcggttggtggacagtggatactgcgagagatcgatcaaaggaagaagagggaacaatcaagaagaagaagaagaagaagagatcgtttagctagggggtgcaacag

SEQ ID NO: 573 - DNA, 390 bp, Zea mays
  Clone ID: LIB3136-052-Q1-K1-F10
agcggatgggcgtctccggccgctacgtccctctggagacccagttcatgctcgtcgaggtgcctgccagtgacggcgacggcgacggcgactactcccccgcgtacgtggtgatgcttccgctgctggaggggcagtttcgggcggcgctgcaggggaacgaccgcgacgagctgcagatctgcatcgagagcggggacaaggaggtgcagacggaccatgccgcgcacatggtgtaccttcacgccggcgacaacccctttgacaccgtcaccgccgtcgtcaaggcggtggagaagcacctgcatacgttccaccaccgcgacaagaagaagctgtcgtcgttcctcgactggttcggctggtgcacctgggacgccttttacaccg

SEQ ID NO: 574 - DNA, 451 bp, Zea mays
  Clone ID: LIB3136-052-Q1-K1-F11
ctgctctcactctcctcccacccactccagaaaacctcacaaaaaccctcgctggccacaacccgccgccgcccacgccgccgcctgtaccagcggcgtcaagatgagtcggcaccctgaagtgaagtgggctcagaggatcgacaaggtttacatcactgtacagttacctgatgccaaggacgctaaggtcaatttggaaccagatggtgtcttcacattctctggcagtgctggtacaaacttatatgaattgaaactagatctgaatgacaaagtaaacgttgaggctagcaaaataagtgtgggtgtcaggtccatattctgtattgtagaaaaagctgaggccaaatggtggaagaaacttgttcgagatgatcaaagggcacctcactttgtgaaagttgattgggacaaatgggttgacgaagatgatgatggtgctgatgta

SEQ ID NO: 575 - DNA, 121 bp, Zea mays
  Clone ID: LIB3136-052-Q1-K1-F12
gaggcgtttaatgccagactcatcgtaattttcattagacttccatttacatgtggtaagttttcatatatacaatgttgatgatgtatacaactttaatgacgtgactgtgttttttttt

SEQ ID NO: 576 - DNA, 245 bp, Zea mays
  Clone ID: LIB3136-052-Q1-K1-F2
gcaggcagcagccctggcgggttggtcttgtgtcattgtttcctggctgccatcaatggaggtggtgaacaggtacgtcgccacccggcaccacatcgagggcgccccgacggaggccgattttgaggtgaaagaggagatggcgaggtgggcgccggactccggcgaggtgctcgtcaggaacctgtacctgtccatcgacccgtaccagctcaaccgcatgaagcggagcagcgtgacgcacc

SEQ ID NO: 577 - DNA, 319 bp, Zea mays
  unsure (1)..(319): unsure at all n locations; Clone ID: LIB3136-052-Q1-K1-F3
gccgtcanctgatatcctcagatcatcggctatgccgtaatcatcgacacttctgctgactcccggcgaggtacttctgacgcatgtcagcgagcgcttctcttcttctcttttcgctgtgcttttagtctgttcgtttgatgcccacatctactaggtttgtgtgatgagccgagccgatttatgcactggatttttagtcaagtgttgtttccgcctccgctacctttagtgtctatgtctgaatttgggttgcagtgattatcgagctataaattatagctgttgcgctgntctatactagatccagttaccgatc

SEQ ID NO: 578 - DNA, 406 bp, Zea mays
  Clone ID: LIB3136-052-Q1-K1-F4
cggacgcgtgggcgcgagtgagtgaacaccagccgtattgtcccgaccccgaccgatcctcgcctgctgcagccatggcgacctccgcggcgctctctaccgccgccaatcccacccagctctgccggtcccgcgcttcgctgggcaagccggtgaaggggcttggcctgagcatgggccgcgagcgcgcccagcggagcattgtgtgccaggcggcgagcagcatcttcgccgaccgcgtccccgacatggagaagcggaagctgatgaacctcctcctcctcggcgccatctcgttgcccaccgtcggcatggtcgtcccctacggcgccttcttcgtccctgccggctccgggaacgccggcggcgggacctacgcgaaggacaagctgggcaacgacatcac

SEQ ID NO: 579 - DNA, 235 bp, Zea mays
  Clone ID: LIB3136-052-Q1-K1-F5
cacgcgttcgctcttgctcgcgcatcatttgtttgcacgtttaacggtatgcgcggaaggtcataatcggggtccggcggcgcattttcctcgcccaggcctatttcctcacggtgctcggtccttctcctattctcccacagcctttcccccttgtcccttctcccctgcgcccctgctcgctcagctccccaaccccatctgtctgcgtgtctgatccacagtccacataccc

SEQ ID NO: 580 - DNA, 455 bp, Zea mays
  Clone ID: LIB3136-052-Q1-K1-F6
tggagattgattgatcctgaacagtgtagggactcgagtggcacacatcccttgttccagtgtgcctgccattttttgcctgcaaaattggctgctggtgtatgtgtaatattgtcgttttactgcctgcagcggaatgtaagatgccgcaggcttgttgctgtcacctaggcgtagactgaacagatgttgtgcagggatcgccgatctctgcacccttatgtttgttgtacgaggaaaaccggattctgttgaaccctcgtgttcaaaaattcattgattcctgatggaaactgatttgtaaatgaacatggcaatgccgccggacaggttacagtgtatcctgtaagaccaattcttttggtccttgaacaatggaatgcagactatgttttggtcattcaaagcaaagctttggtgtgatgttattgtgttggatgcaaagcaagcgatct

SEQ ID NO: 581 - DNA, 411 bp, Zea mays
  Clone ID: LIB3136-052-Q1-K1-F7
gggaacagatgttgaagccccttccatgagtgctaacatgcaaggttcatcaacgccagatgccaatgaagatgacgttgaaaaagacacaaatttggaagagggcaatacagaaagcttgacgactcctggacaagtttctgcttctggtaaaggtatacattcagaatatactgaacttgtcagtcatctggatgaaggctcgatggagaaaacagatgactttcagctcgatgctctttcatttgaacacaatctaaatctgaatggagatgtgtctacaacgacaacacaatttgatcatttgactctgcttgatggaccaaaattgtctgatgagaatccggctgtaataatcccttgccatcttcagttttaaacgctgattgtgcgcacttgacatttggtagt

SEQ ID NO: 582 - DNA, 338 bp, Zea mays
  Clone ID: LIB3136-052-Q1-K1-F8
agcttacccaatggtgtcctagccggttacccagttgtggacttccgggctgtgctggttgatggctcatatcacgatgtcgattcaagtgtcttagcattccaaattgcagccagaggagcattccgtgagggaatgaggaaagctggtccaaggcttctagagcctataatgaaagttgaagtgataactcctgaagagcatctgggtgatgttattggtgatttgaactctagaagaggacaggtcaacagctttggggataagcctggtggactcaaagtggttgattccttttgtgccacttgctggagatgttccaatacgtcagcaccctt

SEQ ID NO: 583 - DNA, 135 bp, Zea mays
  Clone ID: LIB3136-052-Q1-K1-F9
tcatctggttatggttcacagttttttttgtttccggaagtcttttgtggtgggggcccacatggatctacctttggactgtttgtcttctatcgcactgccaagggaaaggaagactttcataagtttcacgca

SEQ ID NO: 584 - DNA, 297 bp, Zea mays
  Clone ID: LIB3136-052-Q1-K1-G1
ctcgtgctgtcacccctttcttcaatcgcctcccgattcccgcggggctcgcagatcccggaaggacaccccgccgcccccgatgagccgccaccgggtcgagacctgcgactcgtggcggcccccgcggaagaaccacgccggtgcgccgccgctcctccgcgcggggcctcggctcctcgccttcgcctcgctctccgtccgcgacggcggggactccgccgcggccgtcgccaaggcggttgaggaggcggttgtcgtacaatccgatgaggtgaaggaggcggtggccgggga

SEQ ID NO: 585 - DNA, 331 bp, Zea mays
  Clone ID: LIB3136-052-Q1-K1-G10
gcccgctcctccctcgcagacggttcgggatgcacgcggcggtggctcatcaggtcgtggaggctttggccgtggtgaacgtggccgtggcagatgtggacggggatatggccagaaccgtggcttcagtggtgacaatggcaatgagttccagggaggttatggtggcggaggctatggggatggtgctgtaactggtggatctgaaggagaaagggagagagacactcgtcccccgtaccgtggcggatgcagacgtggtggttacaggaatgttgagtttggtgatgactctgaaaggccaccacggagaaactttgatcgccacaac

SEQ ID NO: 586 - DNA, 133 bp, Zea mays
  Clone ID: LIB3136-052-Q1-K1-G12
cggacaaccagcctggtgtgttgatccatgtgtacgagggtgagaggacccggacccgcgacaacaacctgcttgggaagttcgagctctccggcatcccaccggctcctcgtggtgtcccccagatcacggt

SEQ ID NO: 587 - DNA, 178 bp, Zea mays
  Clone ID: LIB3136-052-Q1-K1-G2
ctcgatctgtcccattcccgtcagaaaacccagcgaacctaggtccggcctcgctcttttcccgcgtgaaagtcacgatgcgcaagagaaccactccgggggcctggctggcgggcccgtacgcgccggggaaccgcggcgcatgcgcgaggtcgacacccaacgagcgtggcctggg

SEQ ID NO: 588 - DNA, 427 bp, Zea mays
  Clone ID: LIB3136-052-Q1-K1-G3
ggcagaatgaagatagatcactctggaaacttggtactctccctccgggtttggtcacattctggaacaagacatttcccctcagccggtcatggcatgttcttggtctaggttacaatccccatgttaacagcagagacattgagcatgctgcagtcatacattacaatggcaacatgaagccctggttggagattggtctacccaagttccggagctactggtccaagtatctggattatgaccaatctttccttcgggaatgcaacatcaatccatgaaggaacctggtgcttttagtcccttctgacataaccaatagcctgttttctgtcgatgtgcgctttagtgtagtcagcatagtactctcttgctttagatatcagttgttaacaagatttcttattgcctgtgcttcttgtcagac

SEQ ID NO: 589 - DNA, 387 bp, Zea mays
  Clone ID: LIB3136-052-Q1-K1-G4
gtcaatggttactgaatatatggaaatggggtcactgtactatctcattcatatgagtggtgagaaaaagaaacttagttggcgtaggaagttgaaaattattcgtgatatatgcaggggattgatgtgcatacaccgcatgaagatagttcacagggatctcaaaagtgcaaactgcctggtcaataagcattggactgtcaagatatgtgactttggtctatctcgactgatgattgatagtcctatgaccgataattcctctgctggcaccccggaatggatggcccctgaacttatacgtaatgaacctttcacagagaaatgtgatatattcaaccttggtgttatcatgtgggaggtgtgcacattgagttcgccatggga

SEQ ID NO: 590 - DNA, 318 bp, Zea mays
  Clone ID: LIB3136-052-Q1-K1-G5
tcgagaaaatcaactgttctggggccaaaaggaacttcaggttcaattaagtggatccttctgaaaaaagaaaagtaatactctgtatttctagcatccttggtgtgctaatttatctgtttttttttcctttcagatattgttgttacttctggctttgatcgctgttccatggatgctcttcccaaaaccttttatcttgaagaaacttcataaggagagatttcaaggtcacacttatcgtttcctagggacatctgaaatggatccagattctgaacctgatttcgtccgagcacgtcatgatgattttccatt

SEQ ID NO: 591 - DNA, 285 bp, Zea mays
  Clone ID: LIB3136-052-Q1-K1-G6
cagacattgcgcagtgtaaggtcgtatgtgggtgtgttattaactcactattattatactttcatttttatgtgtttcagcttatgactattaatgctcttgtgtgatagatacttggaagtggtatgtccaacaaaatgtgggatgcccttgtggaacatgcaaagacttgtgtcttaagtgggaaatattacatattctattctgatgagagcagaagtattggtgctattttcaacaacatctatgcattctgagggttgatttctggcgaacagctctatt

SEQ ID NO: 592 - DNA, 436 bp, Zea mays
  Clone ID: LIB3136-052-Q1-K1-G8
cggacgcgtgggcggacgcgtgggcggacgcgtggggctcaagaggtcagcggttgccgataatatgtccggcaagagcacgctcagtgaggtccgcaccagctccggcaccttcctcaggaagggccaggatcctattgttgagggtatagaggacaaaattgctgcatggacattccttccaaaagagaatggtgaagatatccaagtcctaagatataagcatggggagaagtatgaaccacactatgattacttcactgacaatgttaacactgtccgtggtggtcatcgctacgctactgttcttttgtacttaactgatgtaccagaaggaggggaaacggttttccccttggctgaggagcccgatgatgctaaagatgcaaccttgtcagaatgtgctcagaaaggcattgcagtgagaccacggaaa

SEQ ID NO: 593 - DNA, 432 bp, Zea mays
  Clone ID: LIB3136-052-Q1-K1-G9
cggacgcgtgggcggacgcgtgggggattcagtcggttctttgcgaagaccaaagagtgaaacttctcccgattgggtgggatggtggaggacatgaatttctgtagagcttattgaggcaagccttcgtgtgcgttctctcaggtcaagtgatgctttgggttgctggaataatactcagcttgcagtcgagcgggtcgtgggccatagtgttgcggaatgtatgttatcagtctcttctgctagagcttttctgggttgctgtgtgtttgaaacctcactgtacatgtgcttacatgcattataggagcatggttgttgggtttgtgtttaattcttcttgtgaatttatcattgtgtattttcctttgtactgggtttaatggacaggtaaacctgctcctattttaaagggcctttgattacgcattt

SEQ ID NO: 594 - DNA, 398 bp, Zea mays
  Clone ID: LIB3136-052-Q1-K1-H1
cattgattcttcaagagatcgagcttcttttgcaccacaaggtcgaggatgtcttgcagctgcggatcaagctgcggctgcggctcaagctgcaagtgcggcaagaagtaccctgacctggaggagacgagcaccgccgcgcatcccaccgtcgtcctcggggtggccccggagaagaaggccgcgcccgagttcgtcgaggccgcggcggagtccggcgaggccgcccacggctgcagctgcggtagcggctgcaagtgcgacccctgcaactgctgatcacatcgatcgacgaccatggatatgattattatctatctagcttggggtggtggttgaacaataataaacgaggccgagcttgctgccatacataagtattgtgtggtgtgtgtgtg

SEQ ID NO: 595 - DNA, 112 bp, Zea mays
  Clone ID: LIB3136-052-Q1-K1-H10
atccaattccaatcttagccgttctcagaggctgcttctaccagcgagcgacgcgtgccatgcgtctcgccgctgcgtccgccatacccaggctccgcttagcgtctggccc

SEQ ID NO: 596 - DNA, 423 bp, Zea mays
  Clone ID: LIB3136-052-Q1-K1-H2
taaggttggagcatcgaccgaggcagagctagaggaccgcaagctccgcatagaggacgcgaagaatccgacttttgcagcaatagaggaaggtattgttccaggaggcggtgcagcatatgttcatctatcgacattcgtaccggctatcaaggagacgttggatgatcctgaggagcgcctaggtgctgatatcattcagaaggctttggtggcacctgcagcgctgatagcccataatgctggggtggaaggtgaggtgattgtggataaaatccgggaaagcgagtgggagttcggttacaacgccatggcggacaagcacgagaacctggtggaggcttgtgtgatcgaccctgccaaagtgactaggtgcgccctgcagaacgctgccctcgtggctggaatggtgctgactaccca

SEQ ID NO: 597 - DNA, 402 bp, Zea mays
  Clone ID: LIB3136-052-Q1-K1-H3
atcgcgagccggccgcccttttttttttttttttgagcttttttttgcctccttgggacagaaatgtgtccatattttctcggcttcgtattttatatattaattcaccaagcaaaatacacataatccctcggtacaggacaaatactctagctgtgaccgaagggcgtattcataaagcccaattcctgacgaacgcttgcaccttgaattggtactatatataagctcacaccctaattagacacacaagggaaaggaactgatccaaaattagacaccctaattcataaacaaaatttaaaacaaaggccttatagtgagattcttctttacgaacttgtgacgaccgcgcaaaagccatagcgcggccaccggcgggaagccaaaacacggggtcac

SEQ ID NO: 598 - DNA, 292 bp, Zea mays
  Clone ID: LIB3136-052-Q1-K1-H4
ctgagggacaactgacatctgagagtagggctgatgatcaacatgctgctgaaccaacagtgtcagttcgatcagtatccagggaaaagcctagtgttgacatcgccatgtcaaagtccgcagctgggaagaggaagaagaaaaaggaaatgcttgctaaggctgatgctgctgggtcttcagatctttataatgcatacaagggaccagaagagaagtctgaaatggttggtactgcatatggtgctgatagttcttcaatagttgacacatcacatgtgctggttgatta

SEQ ID NO: 599 - DNA, 337 bp, Zea mays
  Clone ID: LIB3136-052-Q1-K1-H5
agcacctgaatctaccatacctggcaaaaatacaactctgtcaattcctggatcatctgacagattttctacatgcgcactgatggaaaggatacctagtctatggccacggcctacatggcatgctccttggaagaactatcgggtcatcagtgggcacttgggatgggctccatctattgcatttgatccaccgaatgaatgagtctgcactgggtctgccgataggacaataaagatatgggatcttgcatcaggaaccctgaagcttacactgactggtcatattgaacaaattcgtggacttgctgtcatgcaacgtcacacttatttattt

SEQ ID NO: 600 - DNA, 225 bp, Zea mays
  Clone ID: LIB3136-052-Q1-K1-H6
gtgggccagtgttcgcgttggccgtctcttcctatgggattctcgcactaaaggccttctaaaagtggtaaacattgatggccaagttgatacccgtttcgacatcttatctgctcaggattcatatagctatgagacaaagcaaactctgttctctccgaggaaagagaaagctcgcagtcctgttggtttcttgcagagatcacggaatgcttttgtgggagc

SEQ ID NO: 601 - DNA, 172 bp, Zea mays
  Clone ID: LIB3136-052-Q1-K1-H7
ggcgacccacgcgttcgggactatgtaccatggagccctcctttgctcacggtccacccaagcatcgggggagatctgggcgttggacacatttgactgcatgcctaccgacgtggtggggttctcgtaacaggatatagcgcagctgtcgctcattcagaggtttctcgcc

SEQ ID NO: 602 - DNA, 258 bp, Zea mays
  Clone ID: LIB3136-052-Q1-K1-H8
acactgcttctttcccaaaatgattgcatcttcttctgagctgggcttggatatggaagtcttctttcgtttagggtgaagtaagaccaagctcatgagcttattatcctaggtcggaacaaattacttgatagtgataggatcccctttttgacgttcccatgtcccatcttgtggcggcatggggatgtcaaaaggaaagggatggagtttttctctcttttggcgtatcaagcctccctttgggaggtccgggcg

SEQ ID NO: 603 - DNA, 208 bp, Zea mays
  Clone ID: LIB3136-054-Q1-K1-A10
cacacgtttggtcccaatcactcggaagggatactggccggtcaacatgggtgatgtcccgggtgatggaaaggccacctggttttgggcctgtggcctggccacccttgcaaattcttgaaccttcctgcttgcttgccccaccacccttattaccggaatcaatgaaaaaattggtgcctcttgtgttatcaggccagaatgccag

SEQ ID NO: 604 - DNA, 282 bp, Zea mays
  Clone ID: LIB3136-054-Q1-K1-A12
gtcaaaggtgatgcaatcatttaatatatatgctcacgttattaccgtgctccagagctgatatttggggcaaccgaatacacaacatgaattgatatttgttcagccaggatgcgttctagctgatctgagttcttgtccagcctctcttgcctggcgaaagtgctgtggatcaacttgctgacacaatataagggtcttgcaactacaacacgtgaggaaatcccccgtctgaattcaaactacacctaatttacatttgctcagataaaagctaaccga

SEQ ID NO: 605 - DNA, 470 bp, Zea mays
  Clone ID: LIB3136-054-Q1-K1-A2
ctggcctctctccaaagctggtggactacggcctgcacaggttcatgactccaagcggcaccgccgagcagatactgaatctaggagcgctagggtaccgagccccagagctggcgaacgcggccaagcctgcacccacgttcaaggcggacgtgtacgcgttcggggtgatcgtcatggagatgctgacgcggaggagcgccggggacatcatctcaggccagtccggcgcggtcgacctgaccgactgggtccagatgtgcagcagggaagggcggggcaccgactgcttcgaccgagacatcgccggcctggaagagtccccgaggatcatggacgagctgctggcggtctcgcttaggtgcatcctccctgtaaatgagaggcctagcatgaagacggtctgcgatgacctgtgctccataacagcgtgagtgagtttcccccttccccaatgtacatgtaaccga

SEQ ID NO: 606 - DNA, 344 bp, Zea mays
  unsure (1)..(344): unsure at all n locations; Clone ID: LIB3136-054-Q1-K1-A4
cgagtctgagagggaggccaggaggctgcgctgaaaccctggtggccttggatgtaattctggtaattttggtctatggttggcgaacttgtcgtgtcccttgcaacatctgctttgagatttactgagcctggattgcagctttattttatttttctgctggaaagggaacatgccgaggcatagatgtccttggttatctataatagctcaatcgatgcgtgcaatctgaaggctttgttatatgtggtaaggtcgtctatgtagttttgtcatacttgatgttggntaccttatatctgaagattttgtatatgtggtaaggttgtcaatgtggttttgtc

SEQ ID NO: 607 - DNA, 311 bp, Zea mays
  unsure (1)..(311): unsure at all n locations; Clone ID: LIB3136-054-Q1-K1-A5
caaccgccaccgtgaggtatccgtcgtttccttctctctccacgactgctccaacatttactaactgaccagcaccatctccgggcccgccgacagcccctactagggccgcacgttcgtcatcgatatccgtcttccccatgaatatcccttttagccttctaagattcatttcatcaccaaagtatggtaccctaacannggcaggcaaaatggatctatttgcttgtacattcttaaagatcagtttaccccatccctttacctttaaaactgcgcttccttcccttcaaactctgcttttctacttc

SEQ ID NO: 608 - DNA, 429 bp, Zea mays
  unsure (1)..(429): unsure at all n locations; Clone ID: LIB3136-054-Q1-K1-A6
acagatatggtatatcaccaaggcgatatctagagaacgatgcactatcaagtttcttcaagaggttgactacatcacctgatgaaaacggcaaggtctatgtctcaactgtacaagccaataattatccaatcacttgcacgcaatggcatcctatagaaagccatttttgagtggaggaaaccaatgatcccacacagcgaagatgcagtacatgttactcaacattttgccaatcattttatcagccaagcacgcaagtctccaaacaggcctcctgccgacaaagngcancataacttaatttacaactacagtccgacatttaccgtgaaaaaatcgaaatcgtctgaggaggtctacatcttctcctgagactggatgaacgcctgagtgtcttcaggaatctgtagttctgcactacattgc

SEQ ID NO: 609 - DNA, 400 bp, Zea mays
  unsure (1)..(400): unsure at all n locations; Clone ID: LIB3136-054-Q1-K1-A7
aatgaagatatattgaaccaaaacccaagcctgagtacggttgttttttcatgatccagtttgtcagcgatgtaacaaaatacatcagtggttgcatggcttctctatctgctatgattcagcttgaacttcctcatatcaacatcctttcaaagatggatctggtctccaacaaaaaagatgtagaagagctctaggtacctggacccgaatgcacaggttcttctttcacagctgaatcggcagatggcacctcggtttggcaagttgaacaagtgtttagctgaactggnngatgattacagcatggttaatttcattccacttgatttgagaaaggaaagcagcatacaatatgtgctatcttctatcgacacatgtatccagtatggggaagatg

SEQ ID NO: 610 - DNA, 449 bp, Zea mays
  unsure (1)..(449): unsure at all n locations; Clone ID: LIB3136-054-Q1-K1-A8
tgatagcatgccctccaacaccagaatggaagagaccagatgatctcgatttaaatggcgaagctaagcaggatgacgatgatgacaatggtgatcctggaccactgcataatgaatcagaggataaagtcatcaccaatgacgatgtgttaggggatgaagtgccatatgaccagcaagaagctttgcgtgtcctatgttatcggttgcttgaaatgcctcttggaagggggcatgcacactttcctggatcacatccagtttctcttaacagtgaaaatctgcaactacttagacagcgatactactatgctacatggaaagctgacggaacacgttatatgatgcttataatgagacatggttgtttcttgattgatcggaattttagctttagaagggttcagatgcgctttccccataagagcctncaaggtctgcaagatatg

SEQ ID NO: 611 - DNA, 412 bp, Zea mays
  unsure (1)..(412): unsure at all n locations; Clone ID: LIB3136-054-Q1-K1-B1
ctccccctccggttcgggttcgggttcgtgaggttctccggggttcggtttcgtgggtgagcggatcgagatggcggcgtcggatgttgagtaccgctgcttcgtcggcggcctcgcctgggccacggacgaccactccctccacaacgcctgtagcacctacggcgaggtcctcgagtccaagattatcctcgatcgggagacgcagaggtcccgcggcttcggcttcgtcaccttctccacggaggaggcgatgcggaacgccatcgagggcatgaacggcaaggagctngacggccgcaacatcaccgtcaacgaggcccagtcccgcggcggccgtggaggcggcggcggcggctacggtggtggccgtggaggcggccgctacggcggtggcgggcgccgtgatggc

SEQ ID NO: 612 - DNA, 312 bp, Zea mays
  unsure (1)..(312): unsure at all n locations; Clone ID: LIB3136-054-Q1-K1-B10
ggcggccatcatgaatgcggcgcgcgccgagatcgcggcggcgcttaacaagatgaagaaggagaccaccgcggagctggaggccaagctggacgagggacgcagccgtgtggaggccgagctcgtagaggcgctcgccaacctcgaggcgcagaaggaggaggctgtcaaggcgctcgacgcccacatcgcctcgctcagtgatgagatcgtcaagaaggtgctcccatccgcgtgatgaaaccaaaccggccctgccttatcctacgactatagttacatgaacatcataaattaatgataattntgaag

SEQ ID NO: 613 - DNA, 278 bp, Zea mays
  Clone ID: LIB3136-054-Q1-K1-B11
tctttcgggacgccatcattaacgcggtgctcgccgatatcacggcggctcttaactttagggggaaggagaccaccagggaggtggagtccattctctacaagggactcaaccttatccaggccgatctattataggccctcgtcaacctgaacgctcaaatcgattttgctgtgaacgcgcttaacccccacatcgcctggcttattgatcatatctgtaccaatgttcttctataagggttattaaaccaaatccatattgccttataatattac

SEQ ID NO: 614 - DNA, 288 bp, Zea mays
  Clone ID: LIB3136-054-Q1-K1-B12
agcggacaccatgatcgctgcgctctcctatatcgattcgacacttctcatgagggggtacgagacctccggggtgctgtcagccaacctggacgaaaaactcacacattttgattgcctactcgagataactctcgccaacctcgagccgcaaaaagacacatctgtaaatgcgctctacgcccaaactatcttgctcactgatgttaccgtcatgatagtgctaccatccatgtgactaaaccaaacccctcctgccttatgctactactatagtgacactaacat

SEQ ID NO: 615 - DNA, 395 bp, Zea mays
  unsure (1)..(395): unsure at all n locations; Clone ID: LIB3136-054-Q1-K1-B2
atgatccgatcaccgcagcacatgatacacctgagggagttgctgagacaaatgatgacagcatagacatggtggctatacagacactggaaacatttcctgaggaaggacagcagcatcaaatgaaagctttgaacgttgaatcaacgaatggtttggatcatctcatgaaccccagtaacccgaattatttgagaaaccacaacatggatgttgtctcatgcgattccttcacagagaaccagctcctgcttgcagagatgttnnnaatgtttccctacctactctaaaccacgaaggcgatcaccaggttccacgtcctagccagcgcagctcaggttatcacggggaagtggctagacgaaagcaacagggttcttttagacatttggcgc

SEQ ID NO: 616 - DNA, 454 bp, Zea mays
  Clone ID: LIB3136-054-Q1-K1-B4
cggacgcgtgggcggctatctgtggtacgaatatatctacaagctggacaaacatacatataacaagtaccatccctacacgtcgtggattcctataactatttatgtctgcctacgcaattgcacccaacagttgaggagtactcatttgtctctttttgtttggcttgggaaaattacaatggagagttatatttctcagtttcacatttggctcaggtaagtgccggacccagcttttttacataaagaaatgttttattgaaaatcaaaacaattacatcatgatgacacaaccatcctgagctactcctggcagcaagcaggagttcattaaactgaatctctgaaagaaaaatgttgaaatgttttttgagcttctgctgcgcagtttcagtttcttgcaccaaccaagctgtggtttcttttacaggtctagtattccgaacggaca

SEQ ID NO: 617 - DNA, 299 bp, Zea mays
  unsure (1)..(299): unsure at all n locations; Clone ID: LIB3136-054-Q1-K1-B5
aagaagataaccaaggataaccagagtgtgctggtttattgcttctcatgggttgtaattttcgttgttttactcgttatgaagaccgtatagtggggagaggaggtcatcanattcaagtatggtcggttaaaaggtctatttttactttaagcatgggtatctataaatcctggcatgacgttgcattttttgatcttgctatgccatggatgggttgtctgattgccactatagcnnattaaaaatggctggggggtcacaaagtttgccgggctcagatctatggggtttctgtt

SEQ ID NO: 618 - DNA, 195 bp, Zea mays
  unsure (1)..(195): unsure at all n locations; Clone ID: LIB3136-054-Q1-K1-B6
tatctgcggtactaatatatctacaggctggacaaatatacatgggggaatgtaccataccctacgcgtcgcttgatttctataactatttatgtctgcctacgcatccttacccaatacacgatgaggacccacttgatctctnnctattagcttatcaaaattacaatggagagttatatttcttactttaca

SEQ ID NO: 619 - DNA, 447 bp, Zea mays
  unsure (1)..(447): unsure at all n locations; Clone ID: LIB3136-054-Q1-K1-B7
cggacgcgtgggcgaggatgatgaggatgacgatgatgatgacaaggatgatgatgaactggatggacaagaaggggatgggagtggcaagtcgaagcaaagcaggagtgagaagaagagccgcaaggccatgctgaagcttggcatgaagcccatcactggtgtcagccgggtcactgtgaagaaaagcaagaatatgctttttgtcatctcgaagccagatgtgttcaagagcccaaactcggacacctatgtcatattcggcgaggcgaagatcgaggacctcagctcccanctgcagacccaagctgcagagcagttcaaggctcctgacctgagccaaatgatcccgaagcctgagacatctggcctgggcctggaggacaacgaggaggaggaggttgacgaaactggtgtcgaggccaaggatgtcgagcttgtgatgac

SEQ ID NO: 620 - DNA, 403 bp, Zea mays
  unsure (1)..(403): unsure at all n locations; Clone ID: LIB3136-054-Q1-K1-B8
cggacgcgtgggcggctatctgtggtacgaatatatctacatgctggacaaacgtacatgtgggaagtaccatccctacgcgtggtggatagctttaactatttatgtctgcctacgcaattgcacccaacagttgaggagtactcatttgttgctcttttgtttggattgggaaaattacaatggagtgttatatttctcagtttctcatttggctcangtaagtgccggacctggcttttttacataaagaaatgttttattgaaaatcaaaacaattacatcagtgattnactaccatcctgagctactcctggcagcaagcaggagttcatgaaactgaatctctgaaagaaaaatgctgaaatgttttttgagcttctgctgcgcaggttcaggtttt

SEQ ID NO: 621 - DNA, 453 bp, Zea mays
  Clone ID: LIB3136-054-Q1-K1-B9
gcacggcacgcagatacatatagagagaggttagctatagcttgcacatctatttaactaactaactaactggctagctagctcgatcggcagagcaaagcgaaagcagcaagaagcaaagcaatggagaaccctgcgagtgtgctagttctaccagcgcagttcaccaaactcaccttccgaaacctgtacatccgccgggccgggccgggcagcagggagataaccgaggagggcaggtgcgacctggacaagagatacgtgagtgacttccccgtctacgacggccgcggccccgacgccagccttgtggcccgcgtgcaggggatcaccagcgaaatcgggaacgcgcaccaactgttcgtcgttgttttcgacaccgacaggctcaagggctccacgctcgtcaccaatggcgtgataactggcgggtctgacgagtgggcgatctac

SEQ ID NO: 622 - DNA, 417 bp, Zea mays
  Clone ID: LIB3136-054-Q1-K1-C1
attacatttgatccgccgcgcgcggcccgatcgacgagcgagcctcattcacactccgatctagctagctagctagtttaggaaagagaaatctgaccacagggatgcggtggcggctgcagccggcgccggcgccggcgctgctcctcgtcctggccaccatcgccgccgtcgtggtggtgcgagcggagccccaggtgccgtgctacttcgtgttcggggactccctcgtggacaacggcaacaacaacgacatcgcgtcgctggcgcgggccaactacccgccctacggcatcgacttcgccgccggccccaccggccgtttcagcaatggcctcaccaccgtcgacgctatatctcggcttctgggcttcgacgattacatccccgcgtatgctggcgcgagcggcgatcagc

SEQ ID NO: 623 - DNA, 448 bp, Zea mays
  Clone ID: LIB3136-054-Q1-K1-C11
gttcgtgaccttctctcccatcccgatttcccttcccaccgacatccctcgccttcatgaggtcttgactgcggcggaggcggcttctttgatcggtagcccaattcccccgactaccgcccttagcccgctgctgctgcttgtcaaccgcatccgctttagtgtccgtttgctcacgtcttcttcgagctcgccgtgttataagatttacaagatgtttacataatctctgcaattgagtttgacaaatttgtgaatcatcttgctactggagatagaggtggtcatttggttttgttcgaaagatcagacattgcttataattcttgttgaagagaacttgataggcaagaatatcttgtttttatagcatttttatttccttttctatacccaaatttataattctttaaacctttgcttgacctaccttataagttttgaatat

SEQ ID NO: 624 - DNA, 348 bp, Zea mays
  unsure (1)..(348): unsure at all n locations; Clone ID: LIB3136-050-Q1-K1-F8
cggacgcgtgggctttccgtccgtcgaaggcgcatcttttcctagctcttcccaacaaccctacccgttttctggccttcgccttcgtccgggtcgcctatccttcccggtggcatcttcgcgccgccgacggggagcgggacaaccgcgtgcaagagctgagggtgcccgattcttggctgacgcctgcaggagcaacgcaagaatctgaatggctgaaggagacactgcgcaagtggctcgacgacgagtacttgccggagccggccaacgtggacatcagcagcaccgncgcgcggtcgtatcgcgaatccctgatagcgggggcagtctgaccctgggagagat

SEQ ID NO: 625 - DNA, 169 bp, Zea mays
  Clone ID: LIB3136-047-Q1-K1-F12
gcggggctaactacttctggtgccgcttcaagcgcgggcttgaccgtttggatcgcggagcatgacgccgtgcagctgcggccatcctgggctgcgagggcctgaagcccttctgcgccatctactggactctcctgcagcgcgggtaccacacagggcctgcacgacg

SEQ ID NO: 626 - DNA, 445 bp, Zea mays
  Clone ID: LIB3136-047-Q1-K1-F2
ctcatcaccaccgacctgctcgcccgtggtatcgacgtccagcaggtctcacttgtcatcaactacgacctgccgacccagccagagaactacctccaccgcatcggccgtagtggtcggtttggaatgaagggtgttgccatcaacttcgtcacccgcgacgacgagcgaatgctgtttgacatccagaggttctacaacgtgaccgttgaggagctgccggccaatgtcgccgaccttctctagatagtatggctgctaaggtttctggataaaggagtttgtttttgttaaaatacgccaacttttctctgctttggatgagtggtaaggtccggggtctgttcgtattgtggcgaaggatgggttttaagtttattttgtcgtatgcaacgtttcggaattttgtagcgagtaagctacgtgccgctcctgtgctagctgg

SEQ ID NO: 627 - DNA, 432 bp, Zea mays
  Clone ID: LIB3136-047-Q1-K1-F3
accgaacagttagcaaatgtaatagctacaccaaaccaattgggaagtgttatagtaccacaaaaggcagttcaaaattgcagttctgaacagaaacagaatctggttacacaaccactgcaagtcagccaaccaatggttagtgtggcacagcctcaacttgtccatactcaactccagcaacctcaagtagttctccaggctcagcctcagcaacctcaagtcattgtccaagctcaactacaacaacagcaacctctggttcaaaatcacaccaccatacaaggtggccttcaacaaatccagcttctgcagcaacagcaagttcagcagtcagtgcaggaacaacagcaaataaagatacagccttttcaggtacctaatgatgccaacatggtaacacagttatctgatcagatgaaaatacaacta

SEQ ID NO: 628 - DNA, 423 bp, Zea mays
  Clone ID: LIB3136-047-Q1-K1-F4
atcataaacaccgaccttgtcatccgtgcttttaaccaactttaaatcttacttgtcacagactacgtcctgcggacttggggggataactacctacaccatatggttccacaaccactgcttggaatgcaaccaattgccattgacttacatcactcaactacgaccatactaatactgcatcgacacttcagtagttctaccaacctcaccgctgaacgacctgccgtcctatgtcaacctcctcttctacatcatctacctgttgttgataatcactccaccatacagtgttggcttaaacacacccacctttttctgcttcagataattcagcaggtacgcaggcacatcatataataaagatacatgctttttaagtacctattgacgccacatcgttacacaatttttgatcagata

SEQ ID NO: 629 - DNA, 378 bp, Zea mays
  Clone ID: LIB3136-047-Q1-K1-F5
tgattactctgcgcacactatttttggcggcgtctgtcgcaccagtcgtattgtttgctcaggccatgttactgcgagaaaagaggtgaatgtgaaatcatcgatatcgcctctcgagaaaagaggtgaatgggaaatcatcgatatcggtccgctcacccagaacctgcgtaaatttgcggtcgacgaagaaaacaaaattggccagttcggacgtctgacctttaacaaggttattcgtccatgcatgaaaaagactatctacgacaacgaacgcgatatcaaaggttatgagtaccatctgtacgtttacgcgtctgaaaaactgttccgtgcggacattttcatgtgactataaaacccgtggtcgtaagctta

SEQ ID NO: 630 - DNA, 438 bp, Zea mays
  Clone ID: LIB3136-047-Q1-K1-F6
ggattaaatcatccgtcatgtcttgcactttgcggaaccgggaggagagcaaggcgtgcgacgtttttcctgccgattggctctcgtcgtatgccgtcgctgcattaggatctggatgaggtaggtgaggtagaggaggccacaacatgggccgaggcggtgctactcctcatcatgtgcggcgatcaccacgcatctggcgagggcatcaaggatgtgctttcagtctttcacccaggagcttggcgatgactgtcagaagcaagaaaaatataaggatgctgaacctagtggaatagatcttttaaaggagatgcattgcaacaaaaagaaaggttttagtgaaaatgttgagaaagctattgttgacatggaagaaatggtggtagctccagtttaggacggacaacaaccaatatctcctacaaaagttgtttt

SEQ ID NO: 631 - DNA, 169 bp, Zea mays
  Clone ID: LIB3136-047-Q1-K1-F7
ccgcaccccgtaggacggccccgaacgaggaccggaccgaggcccacgaggcagagaacgccacaacaaccgcacaggcgaggccacggccgactacgggcggagaacaccacgcaccgggcgaggaccccgagacggtgcccaaaaaccggcagccagaagcgaacca

SEQ ID NO: 632 - DNA, 416 bp, Zea mays
  Clone ID: LIB3136-047-Q1-K1-G1
gccgtgaacgtgccgtcgtcgtccgccttcggcgaggcccgcgtgacgatgcgcaagacggcggggaaggccaagccggcggcggcgtccgggagcccgtggtacggccccgaccgcgtgctgtacctgggcccactgtccggcgagccgccgagctacctgacgggcgagttcccgggcgactacggctgggacaccgcggggctgtcggcggacccggagacgttcgccaagaaccgggagctggaggtgatccactcccgctgggccatgctgggcgcgctcggctgcgtcttcccggagctgctcgcccgcaacggcgtcaagttcggcgaggccgtgtggttcaaggccggctcccagatcttcagcgagggtggactggactacctcgggaacccgagcctcatccacgc

SEQ ID NO: 633 - DNA, 373 bp, Zea mays
  Clone ID: LIB3136-047-Q1-K1-G2
gttctagatcgcgagcggccgccccgccgcagcccccgctgctgcactaccacggctcggcctctgtgcctggccctggcgacaagcgcgccaggaaagggtcggtgaagaggaggaagctctgggagctcaggttcggctgccggcacatcgtgtggcgcggctggaagcctgcgatcgtgaagggcctctgaggagagaattttgcaaacatgacaccgccgtgggaaggcttcaaatatttggcaccgccgtcgtggcaattgtaggcgtggcatccaaatctcccgacttttgcaaatttggcattgcggtcggttaatggtcattaggaactctctcgtttaaaaaaaacagataacaaatctaaaaa

SEQ ID NO: 634 - DNA, 437 bp, Zea mays
  unsure (1)..(437): unsure at all n locations; Clone ID: LIB3136-047-Q1-K1-G3
aatggatatcaaagtgacaagctcgaaaacttcgggaatgagctgtacgagatgagattcaacatgaaaacgggtgctgcttcacaaaagcaactgtctgtttctgctgtggattttcctcgtgttaatgagagctatactggcagaaagcagcggtatgtctactgcactatacttgacagcattgcgaaggtgactggcatcataaagtttgatctgcatgctgaaccggaaagtggtgtgaaagaacttgaagtgggaggaaatgtacaaggcatatatgacctgngacctggtagatttggttcagaggcgatttttgttcccaagcatccaggtgtgtctggagaagaagatgacggctatttgatattctttgtacacgacgagaacacagggaaatctgaagtaaatgttatcgatgcaaagacaatgtc

SEQ ID NO: 635 - DNA, 444 bp, Zea mays
  Clone ID: LIB3136-047-Q1-K1-G4
tctaaatctatctccaagagagtttcccggagaatcacatcctgctgaatcacaagtttcaactgatagcgtatcaactcccactggaagagctggaagaactatttcaggaaggcgtgaattacaacggtacattcagagtttgttcagaccaagtctacctagtagaccagacacgtaccacaatattgcgcagaacagtggtggtgtatcaagaaatgaaccgaaccgctggaacttcccttcttcatcagaagcaaacacatcacagaatctgcctgatggcattcagaaccatcacagtgaccttccatttgttcaagctcacagcaattttgctccatttatgtccccagatggggatgatttccagcaaattgagggtgtcaagagcaacctcaggaacatgcagtagagcccttacggcgttactagaagctcgat

SEQ ID NO: 636 - DNA, 430 bp, Zea mays
  Clone ID: LIB3136-047-Q1-K1-G5
ctgcgcgctagctgaggacagcacagcggcacagaggagcgacgtacgacgacgacgacacaggcgccgcacatggcatcccagctctccgccgccgtgccccggttccacggcctccggggctacgccgcgcccaggtccgcggtggcggcgctgccgtccgtgagggtgggcaggaagaggtcgtcgtcgcagggcatccgctgcgactacatcggctccgccaccaacctgatcatggtgacgacgacgacgctaatgctgttcgcggggcggttcgggctggcgccgtcggcgaaccgcaaggcgacggcggggctgaagctggaggcgcgcgactccggcctgcagacgggtgaccccgccgggttcaccctcgccgacacgctggcctgcggcgccgtcggccacatcctcggcgtcggcatcg

SEQ ID NO: 637 - DNA, 435 bp, Zea mays
  Clone ID: LIB3136-047-Q1-K1-G6
tcggtcggagccagctcaagaggagccgccacctggccgcggactgctcggtcagtccggacgaggacctggacgacgagcccggcgcgacgaggaggtcggcgtggctttaacttttttcgcttcttctctgttctcatgtttctcttttctgctctttcttccgtcatgttgctcagtatgagttcttcgtacttttgctttcttttttactacattgtttccgtttctcttctgttcttttttacttctactctttcttttgctttttttcttgttgtttttttattgtcattctttttttttttttcatttgtttctgcttttttttaatcttgtttttttttttcttcttattttttactgtttttttttttcattttttttttttttttctctctttcttttttttcttttagtctttttttttttttt

SEQ ID NO: 638 - DNA, 423 bp, Zea mays
  Clone ID: LIB3136-047-Q1-K1-G7
aatcgctccatgtctctgccctctggtcacttcgcttccgctgccgggtccgctccggccacccagtcatcgaccggtcgctcgccaagagacaggaccggagaccatggcggaccagctcaccgacgaccagatcgccgagttcaaggaggccttcagcctcttcgacaaggacggcgacggttgcatcacaaccaaggagctcggaactgtcatgcgatcactgggtcagaacccaaccgaggctgagctccaggacatgatcaacgaggtcgatgcggacggcaacggcaccatcgacttcccggagttcctcaacctcatggcccgcaagatgaaggacaccgactccgaggaggagctcaaggaggcgttcaaggtggtcgacaaggaccagaacggcttcatctctgcggcggagct

SEQ ID NO: 639 - DNA, 264 bp, Zea mays
  Clone ID: LIB3136-047-Q1-K1-G8
gccaggtgtaggcgggcaaggcttatttgctgtctgggactgggaggaacatcctaaacgaggctgccttagtttgtcggtggagcagattggtgttggtttctgtgggcttttacggttgttgttactctcatctccatctctcccaggaggctaccccaagcatgtagtagcttccattctgattctgggacggtgttgcacgttacagtgctctcaagctgtctctgcaaagtgtgtttaaaaaaaaaacaaaacatgatc

SEQ ID NO: 640 - DNA, 332 bp, Zea mays
  Clone ID: LIB3136-047-Q1-K1-G9
cccaaaaccaaaaaaaatcccaaattaaagaaaacgaggagaagaaaaacaactttcatcgccgtccgccaccggagctcccttcgtcggccttccttcagtgtcaacccccttctcaaaacttgtatttgcacctcagtccctgccggtctgcccggtcgccgcctcgccggaggaagcccctcgtctccttgccctgcggcgggttcatggggttctcgctgtaccccatgaagacgtccacgcggatgctctggagcactagcttcttccgccataagctcagctcctcctcctgcttcctctgaggacgccccacccgccttgatcgc

SEQ ID NO: 641 - DNA, 437 bp, Zea mays
  Clone ID: LIB3136-047-Q1-K1-H1
gcgaactctccctccgcatccactgccaccatgagccgcgatcgctacttccaccgcctcctcgacctccacctccacgccaacgacgacctcttcttccccttccctacccctgcctcgtcctgcccctacatcaccgcctcctccgcccaccaccgcttcctcctcgacgaccaccccttctacccaacctcctgcccgctcggcatcacctcccgctccccgatcgacgacaccttcgacctcgacctcctcctccccctccccctccacgccgccgtctccgcgcccccgtgcgcggccttcgacttcgaccccttcctcctcgacaccctcggccaccgcatctccgtcctcgagcgcgcgctcgccctcgccccaccccgccgcaggtacacctacgccgccgaggccaacggcaggaagctcaagtggac

SEQ ID NO: 642 - DNA, 288 bp, Zea mays
  Clone ID: LIB3136-047-Q1-K1-H11
gtcactagctccaacctgacccttttacagaactttaacgcctcccaaacctctctatcacttggtgttgccttctttgtccgtgagtactccgtaaacgtcactgtatgcagccttaacctcactttctttccatccacacaccacattggctcgtacgcgttcatcaacgggatcgatatcgagcccacgcctgacctttttacgacaccgacaccaactctatccaaagtgggcaacccggatccgtttcctattcttgctggaacggtgttcgaaacaaagtac

SEQ ID NO: 643 - DNA, 119 bp, Zea mays
  Clone ID: LIB3136-047-Q1-K1-H12
tgcggacgttcgacccggcatgttcaacgttttctcggccaccggggcgcgccggcacctgtgcgcgcgagcctcggtgctgcccaccttctaccttctcttctgggcgggtttctctg

SEQ ID NO: 644 - DNA, 440 bp, Zea mays
  Clone ID: LIB3136-047-Q1-K1-H2
ctaccggcgccgccgcgccaccgaccgcagctgcttctccgcagctggctgccacgttgcctccggtttcctccccgccactggccgctacgccacctgtctctgctacccctccagccacgctacctcccgtcgcatcgcctaccgtcgccgtcgctgcgccagccccggcgactccggctccagtcgcctccccgcccgtagcaatgccaccggcggcgcttgccccggccacgctccctccagcgatggctccgacaccacttctcgctgcccccgtcatgcctcccatcgcgccacctgtcacggctcccgcaccggctcccgtttctccggctccaagtccaagcgtcgccccgaccccgtctccgacagaagctcccaccccgtcgcccacagaggccccgaccccgtctcccacgcaggcgcctacactcgcg

SEQ ID NO: 645 - DNA, 435 bp, Zea mays
  Clone ID: LIB3136-047-Q1-K1-H3
cttctcctcctcgcctcctctccctagcctccacgacgcaagggagagtgacggaaagcgacgcggcgcgagcgaggagggccaaggggaagaggggaagcaccgcaccaggacccttgttcgccgccgtcgcctctgatctccgcgaggttgtcaggattcaatatgtcgaccagcacattcgctacttcctgcacgctgttgggcaatgttagaacaacgcaggcctcccagacagcggtgaagagcccttcgtctctaagcttcttcagccaagttacgaaggttccaagcctgaagacctccaagaaactggatgtctccgccatggctgtatacaaggtgaagcttgtcgggcctgaaggtgaagagcacgagtttgatgctccagacgacgcctacatccttgacgctgccgagacttgccgtgtggag

SEQ ID NO: 646 - DNA, 186 bp, Zea mays
  Clone ID: LIB3136-047-Q1-K1-H4
agcagatgcacatgtacatagagtcccacgctgccataacacctgaatctttcaatagtgcctttgtgggtttttggtgtttggatgacaacacaattaaaggtctaataaaagtgttcagtgttggacaagaacttagtgttaaacacaaaaaaaataaacaagacccagaaaactacattccat

SEQ ID NO: 647 - DNA, 429 bp, Zea mays
  Clone ID: LIB3136-047-Q1-K1-H5
cggacgcgtgggcgccgagccctccggacccgcgagcgaggccgtcgccggcgcgcgcgagatttgagctgaggccatggagtcaccgttccgggccgacgtggtcaaggacaaggcggcgctggtcaccggcgggggatccggcatctgctttgagatcgccgcccagctcgcgcgccacggcgcgcaggtcgctatcatgggccgccgccgggaggtcctcgacaaggccgtcgccgcgctccggtcccagggcctccgggctgttggtttcgatggagatgtccgcaaccaggaggacgcggccagagtgcttgctgcaacagttgcacattttggcaagctcgacattcttgtcaacggtgcagctggcaacttccttgcttccccggaggatttgacgcccaagggattcagaactgttcttga

SEQ ID NO: 648 - DNA, 438 bp, Zea mays
  Clone ID: LIB3136-047-Q1-K1-H6
ggtaaacgaggctaaaatttgggatccaaatacagtccatcttgtacataacttttatttggaatttggaatattcctgaatatcatatatgccaaactgttttgcaaccgaaggattcagaaaaccctgcatgaagctattttattatgtgttatctgtctctattatatgtgcctggtggatctgcaggttgctgtccaatgttgtttttgtgcttaaatagtatcatttgaatgttgtctttgatgcttcattctgtttaatatttttcaacctcagtaaagtaatctagctgatttttatatatcctgtcatttagcaatgaattgaatattttagatggtagtgaaagcacctttctatatcacatacatctctagacatctattggaactctattccacggcattgctattcaacatatgtatatgtatatg

SEQ ID NO: 649 - DNA, 337 bp, Zea mays
  Clone ID: LIB3136-047-Q1-K1-H7
gtccatcttgtacataagcttttatttggaatttggaatattcctgaatatcatatatgccaaactgttttgcaaccgaaggattcagaaaaccctgcatgaagctattttattatgtgttatctgtctctattatatgtgcctggtggatctgcaggttgctgtccaatgatgtttttgtgcttaaatagtatcatttgaatgtcgtctttgatgcttcattctgtttaatattttctaacctcagttaagtaatctagctgatatttatatatcctgtcatttagcaatgaattgaatattttagatggtagtgaaagcacctttctttatcaca

SEQ ID NO: 650 - DNA, 294 bp, Zea mays
  Clone ID: LIB3136-047-Q1-K1-H9
gtcacagcagccaacctgacccttttacagagcttcaacgcctcccaaacctctctatcacttggtgttgccttctttgtccgtgagtactccgtaaacgtcactgaaggcagcctagacctcactttctctccatccacacaccacaatggctcgtacgcgttcatcaacgggatcgagatcgtgcccacgcctgacctcttcacgacaccgacaccaacactatccaatgggggcaacccggatccgttccctattcttgctggaacggcgttcgaaacaatgtaccggctt

SEQ ID NO: 651 - DNA, 303 bp, Zea mays
  Clone ID: LIB3136-048-Q1-K1-A1
cttttatcttcttggaagcgctcccttattcctggtatattcggtctggttgctggttctctctatcgcctaaatgtgctcggcatccgcaagatgaagcatccacaggttatttcatcattttttgcaagatatttcgccccttccccaggaagcacatctcgcccctccaggagtcttgttggaaacacaccgtcccatataggccgtgctgttcagaatcagccatcaactggatttgcacctatcgtggagcctccacagtccttcgttgctatgctgttctcaatgggctttgatggc

SEQ ID NO: 652 - DNA, 349 bp, Zea mays
  Clone ID: LIB3136-048-Q1-K1-A2
tgctcctccggctggtgtccgccaaggcccggcggctcaaccagaggtggaacgacgtgttcgacgagctcatccaggaacacgtgcagagcatgccctccggcgagagcgaggagagcgaggcggacttcatacacgttctgctatccatacagcaagagtacggcctcactacggacaatctcaaggccatcttggtggacatgttctaggcaggtatagagacatcttacctgacgctagagtacggcatggccgagctcatcaacaacaggcacgtcatggagaagctacagacggaggtcaggacgacaatacgctcgcccgaccgcaagaagctggacatgct

SEQ ID NO: 653 - DNA, 390 bp, Zea mays
  Clone ID: LIB3136-048-Q1-K1-A3
gtgactgcacaacccaccactggtggctgcagtgtctcatcttgcaactatggtggctatgtcaatggaaccattgcaacatcgctatcctcaggtcttcaacccatgtgtccaggaccgcatcaatttcccccactcacggcggtgccaactgcggcaaaccatgggtcttattccccatcacctgcaccaggacctggagatgctggtggtgccaccccaggaggttccagcctttcttcatcaaatgagcctgctgggaacagctcacaagcggctgcgataaatcaaccatgccgtttcctactcattttcattctttctgtgacattgtccttgcgggtgtggattcctggggagaagaatgctttttttaaaaaaataactatg

SEQ ID NO: 654 - DNA, 371 bp, Zea mays
  Clone ID: LIB3136-048-Q1-K1-A4
gcgatgaccatcaatatcccatttgggcgtcctactgagttttcaattttgtctgctgatggtgctgagtacaatttaaagcctgcagagaatgccccatcacgagatgccattgttctaatactaaggctattcaggatgaaggctgttgagaagagcaagggaaaaagaaagggcatcttcttcaagtagtttgtagttgtagcagtattactacgtagtgtcatggcaggttgactgtatctgttacctatgttttcgcggttcatgtatgtagaaggaaagagcaagttgtctgcgtgcttatgtaaaggtcccattcaattcgattagaatcaattggcaccggacccaagtttttggttggtttt

SEQ ID NO: 655 - DNA, 422 bp, Zea mays
  unsure (1)..(422): unsure at all n locations; Clone ID: LIB3136-048-Q1-K1-A5
gctcatcaccgacgatggtgccacggctaacacaagcaagcaagcaagtcactgagtagctagcagtatataccaccataaaaacaacacacacacacacgtgcgctaataagctaagcttaaggcggtagccgtagctcctctcgatctccggctcggacggacgacgttgccatggctgctcaactgcatcacgcactatacgagctgctgcacgaagcagcagcagcgcaacaagctttgttgttcgcaatccctttttccttgttgttctggcggttctggtttcgctacctcgcggcgtcgacggcgttggcgtcggcgacaaagaacaacggagcggcggcggtggcggccagcgaccccgacaagctcttgagcctgctgncgtcgccggccatgaaagctcccatcatcgggca

SEQ ID NO: 656 - DNA, 422 bp, Zea mays
  Clone ID: LIB3136-048-Q1-K1-A6
aaggaaactgggtgggacgtgcctattcacgtcgacgccgcgagcggagggttcatagcgccattcctctaccctgagctcgagtgggacttcaggctgcctctggtgaagagcatcaatgtcagcgggcacaagtacggcctcgtctaccctggtgttggctgggtcatctggcggagcaaggatgatctgcctgaggagctcatcttccatatcaactacctggggacggaccagcctacgttcacgctcaacttctccaaaggttccagtcagatcattgcgcagtactatcaactcattcgcctaggcttcgaggggtacagaaacatcatgcagaactgccaggagaacgccgcgatactgcgggagggcatcgcggcgacgggccgcttcgacgtcctgtccaaggacgccggggt

SEQ ID NO: 657 - DNA, 396 bp, Zea mays
  Clone ID: LIB3136-048-Q1-K1-A8
acgggagtgagcaacgggacccccacatggcgccaccgccgctgcgccctgttctccccgtacgggagggcccgccgacgccgccatggctacgcgggtcctctacccaaagccgggactccggacccccggggccttcactccgcgtcgaggcaactccttccaaggtccgcatcgacagccccaaaccggcaccggcaagggaaaacaccaaagcagcacccaagcccctcactgccggagtgcgcgggggccgcacccaccgagcggtcctgggcatcatacggcgcatccgctccctcgagctctacgatgctacgagtgcgaattgcgaccacaccagcaacagcggggccgccggcgacgcattccaccttaccatcgacctgtcccggc

SEQ ID NO: 658 - DNA, 403 bp, Zea mays
  Clone ID: LIB3136-048-Q1-K1-B1
gcatggtctaatgttttcaccaattaatgctattctggcttcatcatcatgggacaaaactgttcgcctctgggatgtctttgagagcaagggtgcagtggaaacttttcagcactcacacgatgttcttactttagcttatcgacctgatggaaggcagatagcatgcagtactttagatggcctaattcatttctgggatccatctgatggtttgttgatgtataccattgagggacgcagggatattgctgggggtcgcctcatgacagataggagatctgcagctaatacaagtataggaaagtacttcacaacattgtgctattctgctgatggaagttctattttagctggaggaaacaccaaatatatttgcatgtatgatgttggagaacaagtg

SEQ ID NO: 659 - DNA, 385 bp, Zea mays
  Clone ID: LIB3136-048-Q1-K1-B2
ggagtgagcaacgggacccccacatggcgccaccgccgctgcccctcttctccccgtccctgaaggccccgccgccgccgccatggctccacgggtcctctacccaaagccgcgactccgcacccccggtgcctccactccccgccgaggcaactccttccaagttccgcatcgacagccccaaaccggcaccggcaaggaaaaacaccaaaacagcagccaagcccctcactgccggagtccccgggggccgcacccaccgagcggtcctcggcatcatccggcgcgtccgctccctcgagctctccgatgctccgagtccgaattccgtccacaccagcaacagcggtgccgccgccgccgcattccaccttacgatcgagct

SEQ ID NO: 660 - DNA, 317 bp, Zea mays
  Clone ID: LIB3136-048-Q1-K1-B3
gacggcccgtataagctgtgcctaatttgctgccataagatacgtgaaggaaacacgtctgacaacacccctgaacataaattcaggaatcggttgattcaacaagagtcttgtccatgaggatggcagtattacttgcccttccattgagctgggtggatgtggtgactccatgctgaacttaatatattcatctccatctagccagtccgtagagttcacttagaatgtgagctagatgctttaggccatcattctggagtgaaggcctcttatgctcatgggtcacctgtgccttgcagttacggaagattatt

SEQ ID NO: 661 - DNA, 322 bp, Zea mays
  Clone ID: LIB3136-048-Q1-K1-B4
cgaaacccaggccgagccaggcgtacggccgaagaaaagcggcacgcgccggaggaccggcaattgcggggagcgggctacagaaaagggaagccagagaacgggcgggcgagagaagatggccacaaaacgaactccaacagcgacacccccacacagggcgcggagaagccgacacaggtgagaacaaccccgaacacagacgccaggaacgcgcaagctgacggcaaacagcccaaaagcggcaagcccaagcactgcaggcagaggagcaagaagagcaaagggggcaagaaaagcaaaaacaaggggggggaagccc

SEQ ID NO: 662 - DNA, 429 bp, Zea mays
  Clone ID: LIB3136-048-Q1-K1-B5
ggctgatgcaaaaaagccccgttccatacaagacttactggaggagcaggtggctaaactgagagaacaagcgtctggtggaggcagagggaatgggaatcgccgcggaggcaggggtggttctggtggcccagatgatgaatcgttcaaggaaacattggatgaactaatgcaagttatcttatccactgttgctttcatacttgtgtacatccacataatcagaggggaggagctttaccgtcttgccagggactacaccagatatgtctgtaccggtaagaggactgcccgactgaagcgtgccatgcataggtggcgcaacttctcagagagcttcatgcaaaaagccggctcagaagacgaccaatattaaagaccagctgtgtcaaaaccttgatggtggcaacagccttaaaaatttgttca

SEQ ID NO: 663 - DNA, 382 bp, Zea mays
  Clone ID: LIB3136-048-Q1-K1-B6
cgcgagtgagcaactgcacccccacatggtgccaccgtttctgacccttttatccccgtccctggagggcccgccaacggcggcttggctgcacaggtcctctacccaaagcccgtactccgcacccccggtgcctccactccctcgcgaggcaactccttacaagttccggattgacagccccaaaccggcaccggcaaggaaaaacaccaaaacagcagcctagccccttactgtcggagttcccgggggcctgacccaccgagcggtcctcggcatcattcggggcgtccgctccctcgagctttacgatgcttcgagtccgaattcccgccacaaccaacaacatcgggggccccgcccgctcatttccaacttacca

SEQ ID NO: 664 - DNA, 253 bp, Zea mays
  Clone ID: LIB3136-048-Q1-K1-B7
cgagcgaccaaagccatggcatctccgcatcctggcatcgaagaatgttctaacctggccgatcggctgcgcgggccggacgatggccgtggcggagtcttgtaagctggtgactacagggacactcccggacctgtgctaccactttagcacgcgcggaaccaggcatggggggggggataatgcgcttgcggcagtagaagcagcctggctgctacctaagcaactacaagatggcgctagagcactttga

SEQ ID NO: 665 - DNA, 391 bp, Zea mays
  Clone ID: LIB3136-048-Q1-K1-C1
cagcgagcgagcgaccaaagccatggctctccgcaccctggcatcgaagaaggtcctatccttcccgttcggcggcgcgggccggccgttggcggcggcggcgtctgcgaggggggtgacgacggtcacactccccgacctctcctacgacttcggcgcgctggaaccggccatctcgggggagatcatgcgcttgcaccaccagaagcaccacgccacctacgtcgccaactacaacaaggcgctggagcagcttgacactgccgtctccaagggcgacgccttcgctgtcgtccagctgcagggcgccatcaagttcaacggcggcggtcatgtgaaccattcaatcttctggaagaaccctaagcccattaacgaaagtggcggggag

SEQ ID NO: 666 - DNA, 351 bp, Zea mays
  Clone ID: LIB3136-048-Q1-K1-C2
ctcgagtgcaacgcaacgttggcgcttggcggccagtagtagcagctaatttagcgtcgctccttcctagacgagagatcgagaaaccatggccaagctccaagtcactcctggcgccgcgttcaccgagtgcaatgaactcaacttccagggcctgtacctgtaccacacgcccctgggccccaaggccaaccaagctgcgatcgtagagagcaaggccaagatcggcatcggtgccaccgtggttaacaactgggcagtgtatgacgggccagggccaggcgctaagctcgtcggccgtgcgcagggcttgcacatcctagccggcaactgggtcaactcattcaccct

SEQ ID NO: 667 - DNA, 321 bp, Zea mays
  Clone ID: LIB3136-048-Q1-K1-C3
ccagccatggtgcacgtcaacttctaccgcaactatggtaagacgttcaagaaaccaaggcgtccttatgagaaggagcgtcttgatgctgaactgaagctggtcggtgagtatgggctgaggtgcaagcgtgagctttggagggttcagtatgcactgagcaggatccgtaatgctgcaaggcacttgctcacccttgacgagaagaacccccgtcgtatctttgagggtgaggcgcttcttcgtcgcatgaaccgctatgggctgcttgctgagggtcagaacaagcttgattattgttctgccctcaccgctgagaac

SEQ ID NO: 668 - DNA, 216 bp, Zea mays
  Clone ID: LIB3136-048-Q1-K1-C4
ccctcgcgagctctccaccccttcacacgaccctcctcggcggcggcggcagcgatgcagatggcggtgaccaccaccgagtgccaggcgggcgtgccgactaaacaccctaacgcgcacgcccactcgcccgcgcagtatgctgacccgcaccaccacatgccggagacactgtgggtcgtctttccgtacccgccgacgccgtccatggtggtc

SEQ ID NO: 669 - DNA, 329 bp, Zea mays
  Clone ID: LIB3136-048-Q1-K1-C5
gcagcgttcggtgagggaaggagcaccagccatggtgcacgtcaacttctaccgcatctatggtaagacgttcaagaaaccaaggcgtccttatgagaaggagcgtcttgatgctgaactgaagctggtcggtgagtatgggctgaggtgcaagcgtgagctttggagggtccagtatgcactgagcaggatccgtaatgctgcaaggcacttgctcaccctagactagaaaaacccccgtcgtatctatgagggtgaggcgcttcttcaacgcatgaaccactatggtctgcttgcttagggtcagaacaagcttgataattttcttg

SEQ ID NO: 670 - DNA, 271 bp, Zea mays
  Clone ID: LIB3136-048-Q1-K1-C6
acgctctcgtgcgacttaacctcggcgcttggacgctattattaggaggtaatttatactcattggttggtagacaatagagcgacatacgctgtccaacctcctaaacacttcttggggcgctttaacctacagctatgaactcaactttcaaggcctgaacttgttccacacgaccgtgggtcccaaggccaaccaatctgcgatcaaagatagcaaggccaccatcgtcgtcggagccacctgggtaaacaactggtcagggtgtgac

SEQ ID NO: 671 - DNA, 255 bp, Zea mays
  Clone ID: LIB3136-048-Q1-K1-C8
cactccacagccgttctccgcgtcgcacgtccaaattatgctgcggccgagttcattcaggcggcggcgaactccagcgaggcccacgacggcttcacctctcgtctcaactgcaagcacgaccactcgcactgctgatcagattaatcgatcaacatggatatgattatcatgtatttagcttttggtggtggttgaacaatactaagcgaggccgagcagcatggcatacataggtattgagtggctttcact

SEQ ID NO: 672 - DNA, 301 bp, Zea mays
  Clone ID: LIB3136-048-Q1-K1-D1
tgggccgacccgtgggcggacgcgtgggcggacgcgtgggcaccaatggcttgttccactgcatctttagcggcgacgctgctggcgttcgcgctgatgttccaggcctgcgtcgcggggaggaggaggctcaccgcgctcgtgcaggagccggccgtcaccatgaagtaccacaagggcgcgctcctgtcgggccccatcgccgtcaacttcatctggtacggcgacttcacggcgccacagcgggcggtgatcaccgacttcgtctcgtcgctgtccgcggccccgcgggcgggggcgc

SEQ ID NO: 673 - DNA, 319 bp, Zea mays
  Clone ID: LIB3136-048-Q1-K1-D2
caggccaccgtcgtcctcggcgtggccccggagaagaaggccgcgcccgagttcgtcgaggccgcggcggagtccggcgaggccgcccacggctgcagctgcggtggcaactgcaagtgcgacccctgcaactgctgatcacatcgatcgacgaccatggatatgattattatctatctagcttgtggtggtggttgaacaataataagcgaggccgagctggctgccatacataggtattgtgtggtgtcactggtgtgtgtgtgagagagaaaaaaacaaagttcttcagcttgctatctctctctctctctctctc

SEQ ID NO: 674 - DNA, 339 bp, Zea mays
  Clone ID: LIB3136-048-Q1-K1-D3
cgtcttcgtactcgcctacctccgcggctcaaacctttcccccttctcccaattccttccgccggccgccgctccacccgtacgacgacaccatgagggagtgcatttcgatccacatcggccaggccggtatccaggtcggaaacgcgtgctgggagctgtactgccttgagcatggcattcaggctgacggtcagatgcccggtgacaagaccattgggggaggtgatgatgctttcaacaccttcttcagtgagactggtgctgggaagcacgtgccccgtgctgtttttggtgaccttgaacccactgtcatcgatgaggtgagaactggcacct

SEQ ID NO: 675 - DNA, 266 bp, Zea mays
  Clone ID: LIB3136-048-Q1-K1-D4
ggcacacgggtagaaaagcaagatgtcggacggcacggcgacctgcatcgacatcatcctcgccatcatcctgccgccgctcggggtcttcttcaagttcggctgcggggttgagttctggatctgccttatcctcaccttcttcggctacctccccggcatcatctacgccgtctgggccatcaccaagtagccggccggagcagagcaaccacggccccctgcaatgactccctcgcgtgcgttagcatgcaatgtcttgagat

SEQ ID NO: 676 - DNA, 222 bp, Zea mays
  Clone ID: LIB3136-048-Q1-K1-D7
catagctcggctcgctgaccacattcccgaagatcttatatgagaataactatggtctttggggcttgccactgctgccatgcgggcacaatgctggctcaagttcttccgatggccaccgatcccaccggaaccaggctttactcgcgggtagtgatgctatgggactctagatctcgctgtcctgtaataagtggaattgccatcataaccactgagtgc

SEQ ID NO: 677 - DNA, 204 bp, Zea mays
  Clone ID: LIB3136-048-Q1-K1-D8
acgcacgcaccgagagaaaaacgccaagaacaagaggagtgccgccgaccctgacacaaggcgggacatcaccgcaccggccatgggggcgcgcaagaagagcaccaaggaggttgacgagcagatcagcaacaaccaaaacaagaacggataccaccccggggagaggaaccccaacaacgccaagaccaacgagcgcgacag

SEQ ID NO: 678 - DNA, 318 bp, Zea mays
  Clone ID: LIB3136-048-Q1-K1-E1
cagagctcggttcgctgttcacattcccgaagatttcatatgagaataactctggtctttgtggcttcccactgttgccatgcgggcacaatgctggctcaagttcttccgatggccaccgatcccaccggaaccaggcttcactcgcgggtagtgttgctatgggactcttgttctcgctgttctgtatagttggaattgtcatcatagccgttgagtgcaagaagcggaagcagatcaatgaagaagcaagtacctctcgtgacatatacattgatagtcggtcacattctgggactatgaattccaattggagac

SEQ ID NO: 679 - DNA, 291 bp, Zea mays
  Clone ID: LIB3136-048-Q1-K1-E2
cacgcagcagatgtgggatgccaagaacatgatgtgtgccgctgaccctcgccatgggcgttacctcaccgcctcggccatgttccgcgggaagatgagcaccaaggaggttgacgagcagatgatcaacgtccagaacaagaactcatcctactttgtggagtggatccccaacaacgtcaagtccagcgtgtgcgacatcccgcccaggggcctgtccatggcatccaccttcatcggcaactcgacctccatccaggagatgttccggagggtgagcgagcaattcac

SEQ ID NO: 680 - DNA, 278 bp, Zea mays
  Clone ID: LIB3136-048-Q1-K1-E3
gtggagttcagctacgatgccgacaccggcctcgtgtccgtcgacctgcccgtgccggagcaggagctatatcggtggacgctggagattatggtctaggccgtgacgctgtgcgctgacgccattctgagccggacgacattgtcatttgctatgtgcacgagagatagatgtattgtggtgttgttgtataattggtatggagagagtatgcttttgttatgtctgtatctgcataccctgcgtgctttgaatgttatataatacttgatagataa

SEQ ID NO: 681 - DNA, 448 bp, Zea mays
  Clone ID: LIB3136-048-Q1-K1-F2
acccacgcgtccgggaagctgcagaaaatatttctgtgaggttgaattgtaggtgtcgtgaactatgaaaaatattctagtgattttttaatatagttttacgatagcattttttctttactgcaacatgcttgggattaataggctttgtagttactgctgctgtagattgaggatagctactagctagtttttttttctctgaacattttggagattatatttagatgatgatgaggataactagtctgattttaactggatcataaaggtttggcgatttacattttatctatttgtcttggtttttctttcaaaaaaagcccttaccaatcacaagcaaccaagacgctgttcaacttaaactttgcttacctgcactatatttacatttctgtgaaatagtggtccattgtatttaactgataattgggaaatgtttttattt

SEQ ID NO: 682 - DNA, 274 bp, Zea mays
  Clone ID: LIB3136-048-Q1-K1-F3
gctcgcgctctccgcccggatcggagccagagtaggggcgtgtcggcggtgaaagcgactgcgtcagccatggcggacgaggagcattcggagaggagagaggaggcctccgagcttgcccccttcgatccgaccaagaagaagaaaaagaagaaggttgtcatccaagaaccttctgatgaagtggacaagcttgcagagaagacagaaacactggcagtcgcagaacccgctgaacttaacttcactggaatgaagaagaaaaagaagaagc

SEQ ID NO: 683 - DNA, 258 bp, Zea mays
  Clone ID: LIB3136-048-Q1-K1-F4
acgcggacgcgtgggcctgtagcttcatccgatgtgctgcgcccggttccctcgcgcagtgcggaatttaacatggccgagccggaggtggtggacgacggcgtcctcttcccaccggtggaccagacagcgggctccggcggctcgcactttcttggcggcgcaagcgtgcgaagcctagagatcggaggcaacttcatcaaggagacggtcatcggcctctaccaggaggacgcgaccgtgcccgcccttgtcaac

SEQ ID NO: 684 - DNA, 412 bp, Zea mays
  Clone ID: LIB3136-048-Q1-K1-F6
gcagcatggctcgggacacagcagcaggcacaatcagcctagcgaggcggtcccgcccagccggtcccacagctccaggtcagagagagaccccagacatggcggcagcagggatcagcacctccaggacggcgccgctgggttgctgcaccctagcgacatgttcatcgtgaagaagaagaggcaagagcgcgcgaggagcggcatcgggtccccttccagctcgggccgaggcgccggacctctgtcgccggccaaccctgggcgtccgggccctgccccctcgcccagaggtgccaggacgccgttccagagggatccaccgccacacccgtctcagcagtcgatgcattcagctgggtctggatggggcagcggcggtgcgcattcggatcatcaagcgggggcaagc

SEQ ID NO: 685 - DNA, 255 bp, Zea mays
  Clone ID: LIB3136-048-Q1-K1-F7
acgcgttcggcagcatggctcgggacacagcagctggcacaatcagcctagcgaggcggtcccgcccagccggtcccacagcttcaggttagagagagaccccagacatggcggcagcagggatcagcacctccaggacggcgcctctgggttgctgcaccctagcgacatgttcatcgtgaataagaataggctagagcgcgcgaggagcggcatttggtccccttccagctcgggtcgaggtgcactgacctt

SEQ ID NO: 686 - DNA, 327 bp, Zea mays
  Clone ID: LIB3136-048-Q1-K1-G1
agccagccccccacaggagcttctctgaggaagttgctgcacttaaccgctactttggcggcctgaaatctggtggtaatgcttatgtgattggagatccagcaagacctggacagaagtggcacgtcttctacgccactgagtacccagagcaaccaatggttaacctcgagatgtgcatgactggtctggacaagaagaaagcttgtgtctttttcaagactaatgctgatgggaacacaacatgtgccaagggaatgacaaagctctctggcatctctgaaatcattcccgagatggagatctgcgatttgactttcaacccct

SEQ ID NO: 687 - DNA, 380 bp, Zea mays
  Clone ID: LIB3136-048-Q1-K1-G2
gtactctggtaatttgatttttaggttgatttgctttagttccttggttcagttgctttaccattttattacctgacatcactgtcatgtggctaaagagttaacttaactgatacgatgatttctgatggcttgagcaggatgaaggttgttgctgcctacctgcttgctgtcctcgctgggaatgccagcccctccgctgaggatttgactggcattctggagtcagttggctgtgaagttgacaatgaaaggatggaactgctgcttgcccaactgagcggtaaggacatcaccgagctcattgccgcgggcagagagaagtttgcttcaatcccatgtggccgcggccgtgtggctgttgcggcaagtgcacctgc

SEQ ID NO: 688 - DNA, 344 bp, Zea mays
  Clone ID: LIB3136-048-Q1-K1-G3
gctgggtgaggtgtccaggtcttcgtcttgtcattcaccagcgacgagactcaccaggtttgcattgatcagtatggtgactgaaaatgcagatgaagaacatgacactggtccagaaaataagttaagacacaattttcgattgggagatataacatgggttaagtacaatggctcttcatggtggccatcccaggtcattgatgaatcatgtgttggtagcaagcctaagaagaaagacaagtatgattgcctagttcggctctatggaacttgtcaatatttatatgtagacccttggaagtctaactcagaatttgaaatgatgctgaaacaagaaaaca

SEQ ID NO: 689 - DNA, 62 bp, Zea mays
  Clone ID: LIB3136-048-Q1-K1-G4
tgggattattatttgttcatcgatgaaacattttatggcgcataaacaataatctcatgggg

SEQ ID NO: 690 - DNA, 186 bp, Zea mays
  Clone ID: LIB3136-048-Q1-K1-G5
acgcgaggggatttatgatgagaagcgactggcctaggacacggggattgctaaaaggggagcttcccatatgggataatttggaaattcgagaactggctaatctatagtttgtcgaattccagaaaagctccattacatggttggaattctttatactgacaaagtatctgaagttcagcataa

SEQ ID NO: 691 - DNA, 420 bp, Zea mays
  Clone ID: LIB3136-048-Q1-K1-G8
ctcctcctcgccttctttgccaccgcggcgtacgcggcgtcggcgtcggcgtcgcgcgcggcggccgtcgtcaggggcgcgggcgccctgtcgcagtcggagttggagtcggacccggagaaccagtgcgtgtacacggtgtacgtgcggacggggtccatctggaagggcggcacggactcgaccatcggcgtgacgctgctgggcgccgacggcacgggcatccggatccgggacctggcggggtggggcggcctcatgggcgccggccacgactactactagcgcggcaacctggacatcttcagcggccggggcccctgcatgagccaggcgccctgcgccatgaacctcaccttcgacggcaccggcgcgcaccacggctggtactgcaactaccttgaggccacggtcacgggg

SEQ ID NO: 692 - DNA, 322 bp, Zea mays
  Clone ID: LIB3136-048-Q1-K1-H1
gttgaccaagatctgtgatggcatcctcaagctgcttgagacccatcttgggccgacttccactgacgaccagttcaatgtcttctatgtcaagatgaagggtgactgctacagattccttgatgtgttcaagactggagctgtgagacaggacgccgttctaaacacgatcgtggcatacatagctgcccatgacattgctctggctgagctcgctacaactcaccctattgggcttggactggctcttaacttctcagtgttctactatgagattctgaacgcacctgatcctcacctgcatgtctagcaaagcatgctt

SEQ ID NO: 693 - DNA, 373 bp, Zea mays
  Clone ID: LIB3136-048-Q1-K1-H2
catcgccgccgaaatcccgttgcgtctctctcgcgcgttaccaagctctcaagttttctcgcgccgacggcaatggatgaggtcaccgaggccgtgaacaacctcaacatctcgggcgtaggggccgcgggcgttgccggggcggaagggcacaagaagaatcgcatccaggtctccaacactaagaagcccctcttcttctatgtcaacctcgccaagaggtacatgcagctgcacaacgaagtagagctgtcggccctcggcatggccattgcgacggtggtgacagtagcagaaattctgaaaaataacgggcttgctgtcgcgaagagtatcatgacatctactgttgatatcaaggacgagactagga

SEQ ID NO: 694 - DNA, 372 bp, Zea mays
  Clone ID: LIB3136-048-Q1-K1-H3
gcgacgccgcgcagctgaccccgtgcgcgggcgccatcatcgggagctcgccgcccaccgcggcgtgctgcagcaggctcagggagcagcagccgtgcctgtgcacgtacgcgcgcgaccccaagctgcagcgctacgtcagctcgcccaacggcaagaacgccatggccgcgtgcaaggtgcccgtgccgtcgtgctaatttaaacttctgttagcgccgccgccgccgcgcgcgtacgtacgtgtcgtgactcgtgaggcgtacctgtgtcggtagcagcatggcccactggacagggacagagtgtggcgtcgctttttttctgtttcagtacgtacgtacttggatcgcggaagcccgtgtatgcgtg

SEQ ID NO: 695 - DNA, 216 bp, Zea mays
  Clone ID: LIB3136-048-Q1-K1-H5
acggcgacgcaccgcatctgaccccgtgcgcgggcgccatcatagggagctcgccccccaccggggggtgctgtatcaggctcagggagcagcaaccgtgcctgtgcacgtacgcgcgcgaccccaagctgcagcgctacgttagcttggccaacggcaagaacgccatggccgcgtgcaaggtgcccgttccgtctggctaatttaaaacttctg

SEQ ID NO: 696 - DNA, 346 bp, Zea mays
  Clone ID: LIB3136-048-Q1-K1-H6
acgcatcgccgacgaaatcccgttgcgtctctctcgcgcgttaccaagctctcaagtttgctcgcgccgacgggaatggatgaggtcaccgaggccgtgaacaacctcaacatcttgggcgtatgggccgcgggcgttgccggggcggaagggcacaagaagaatcgcatccaggtctccaacactaagaagcccctcttcttctatgtcaacctcgccaagaggtacatgcagcttcacaacgaaatagagctgtcggcccttggcatggcccttgcgacggtggtgacagtagcagaaattctgaaaaaatacgggcttgctgtcgcgaaaagtatcatgacat

SEQ ID NO: 697 - DNA, 412 bp, Zea mays
  unsure (1)..(412): unsure at all n locations; Clone ID: LIB3136-048-Q1-K1-H7
cttagactcccaactgatgagactcttgtggcccagattaaggaagggttcgaaagcgggaaggatcttgttgtgactgtccagtctgcgatgggggaggagcacatctgcgcgctgaaggatgttggccccaagtaacttccttggctttggagacggaaccctactctatctcaacttaaatcggaaaagaagtgtatcaccaaaggattgctaccgagacattcacctggcttgagctggcttttgctatagcgtgcaaggggttgctgggtgtcgtacctacctgacttatcattatctgtggttacattctggaccctgtattttctatgctttcatgtctctctactttctagtattaattatcaataagttggtttggaatggttgaattgcatccaaaanaaaa

SEQ ID NO: 698 - DNA, 406 bp, Zea mays
  Clone ID: LIB3136-048-Q1-K1-H8
cgcgtccgcttagactcccaactgatgagactcttgtggtccagattaaggaagggttcgaaagcgggaaggatcttgttgtgactgtccagtctgcgatgggggaggagcacatctgcgcgctgaaggatgttggccccaagtaacttccttggctttggagacggaaccctactctatctcaacttaaatcggaaaagaagtgtatcaccaaaggattgctaccgagacattcacctggcttgagctggcttttgctatagcgtgcaaggggttgctgggtgtcgtacctacctgacttatcattatctgtggttacattctggaccctggatcttctatgctttcatgtctctttactttctaggattaattatcaataagttggttttggaatggttgaatt

SEQ ID NO: 699 - DNA, 428 bp, Zea mays
  Clone ID: LIB3136-049-Q1-K1-A10
ggaagctaagcattacacctagctagctgaacaccaccagatactgaattccactcagcaaaggagagccggctaccaaccatgatcaatgccaagagacttacgcagatggcaaccaagtggcaaagaataatggccgctcttacgagctaggacgaggggtcaagcccatctcggcgacagctagaaagcgatggaccgtgcatcacttcgacgacgccggtggccggcaaaaaagggcactgcgttgtgtactcggccggccgacggggggcagcggttcgaggtcccgctggcgtacctcgatcggcacggcgcggtcttctgcgagctgctaacgctgtcgcaagaagagtttgggttcgcgagcggcgacggcagggatcatcctgccctgtgacgcggcggcggtggatggagtacgtgat

SEQ ID NO: 700 - DNA, 336 bp, Zea mays
  Clone ID: LIB3136-049-Q1-K1-A11
acggccgtcgccgccctacggctcagatcttcgtcgtcatcttctccggcaacgagcacccaaagatggtggtccttcaaccacatcggttcctgagcgagctgacgagcatgtacgagcggatcacggagaatggctccgtctgggttcaccatgaagcgatcaactctcaagggcaaggcacaagtgcggaagatggagaataaggggcatgaggtagagcacaggtgcctcgtacgcgccttcaatggcaagaagaacatcttcacctcggtttctctaaaggagtacacaaagtttcaagcttcatacgcaacagttcttaaggcccatatt

SEQ ID NO: 701 - DNA, 433 bp, Zea mays
  Clone ID: LIB3136-049-Q1-K1-A12
attcatttgaaaaacatggatgatactgagtttttggctctttttaaacaccatgctttctctggagcagaaatcaaagaccaactattacgcacgaagctggaagacactgcagtggagattgctaaaaggcttggacaatgtcctttggcagcaaaagttctgggttctcgattgtgcaggaaaaaggatattgctgaatggaaagctgctctaaagcttggagatttaagtgatcccttcacatctctgttgtggagttacgagaagttagatccacgtctgcagaggtgcttcttgtattgcagcttgtttccaaaaggtcatagatatgatcctaatcagttggtcatagatagatatttatgcaaagattgccctttcatgaaagtagagaggtgtggaacaaaattttgatatgggggaactgttc

SEQ ID NO: 702 - DNA, 440 bp, Zea mays
  Clone ID: LIB3136-049-Q1-K1-A2
gctctggaagaggtttagaggggaagacaagcccccagcacatctaggtgcaagcagagactacaatgtggacatggtgccaaagtttatgatggctaatgggacattggttcgaaccctcatccacactgatgtgacaaagtacttgtcattcaaagctgttgatgggagctatgttttcagcaaagggaagatttacaaggtccctgccactgatatggaggctctgaagtcccctttgatgggtctattcgagaagcgcatagcaaggaacttcttcatttatgtccaagattacaatgaagctgatccaaggacacatttaggattagaccctactaaggtgacaactagagaacttatagcaaaatattgtttaagtgatgatacagtgggattcattggacatgcacttgctcttcataaagatgatcgctttc

SEQ ID NO: 703 - DNA, 453 bp, Zea mays
  Clone ID: LIB3136-049-Q1-K1-A5
cggacgcgtggggcaggaaaagagggcgaatcagcaactgcttcaaggccaggggggcgatgtttctcaagagaaagacaaggatgcgactaatggcaaaccagggtcacagaaacaggcaacgagcaaggaaggcactcctgctgaggtggcggcggatgcctccaaaccagtagctgaaagtggaatatcaaatgacaactaagcatcatgcatactggtcggcaccataccggtgcaaatgctgcaggttttgcggtatctgcaaatcaaaacctattgattctgcctgaattctggacttctttcggtactggagttcgtgagatggggctcatgggagtgaatcagattttacttattgtcgctttgctagttgtgtgactggtttttggtgtcttggaacccgtgttaggcttcttacatacccttgtgacgacaccgaatttgttg

SEQ ID NO: 704 - DNA, 455 bp, Zea mays
  Clone ID: LIB3136-049-Q1-K1-A6
tgctgtcctctgtgctatccgctagggtttatctgctcgaggaatggcgtcggtgcaggtctccggcgcgggggtcggtaccgcggccttctctgtgaaggggaaggcctccaccggtgcgctccggcttcgctctacgttgaccttcggcgaggtctgcccggcgcggcgggcgttccgcggcctcgtcgtcagggccgctaccgtcgtcgcccccaagtatacaacacttaagcccttggctgatagagtgcttgtaaagattaactcttccgaggagaagacaactggtggaatcttgctccctacgactgctcattccagacctcaaggtggcgaggtagttgctgttggagaaggaaggataattggggataagaaagttgatgtcagcattcaagttggagctcacgttgtgtattctaagtacgctggaaccgacgtcgcgttgaacg

SEQ ID NO: 705 - DNA, 288 bp, Zea mays
  Clone ID: LIB3136-049-Q1-K1-A9
cttcgtgtgtgctgtaagtttcttccatcactctgcacggttgcagagggatggtacatataagactgtcaagaaccctcagaccgtgcatatccatcctagttcaggattagcggaggtacgtccgcggtgggtagtgtaccacgaattagttctcacgacgaaagagtttatgcgccaggtgacggaactgaagcctggaatggctggtagagatagcaccacattattaccaactaaaggatgtggaaaactccggaacaaataagttaccgaagggccaaggac

SEQ ID NO: 706 - DNA, 110 bp, Zea mays
  Clone ID: LIB3136-049-Q1-K1-B1
gcataagccaccgatcggcgtgcgtgagggcgtgaggcgatcggagcatcccgtcccgaggaggaagaccagccggcgacgcggggggaacatggggaagacgccggtgc

SEQ ID NO: 707 - DNA, 318 bp, Zea mays
  Clone ID: LIB3136-049-Q1-K1-B10
gcgggaaagatactttgtctctgcccgacaagactgctggctctggggtaaatacggactctagtgcctcaactgaagcaccacctcatcctgttgaaaccagtgacaaggcagaagacacaaaggacgaatctagtggagacaaagtggtagttggagaacccaatgaaggcagttgcatgccatctgaagttgagggcaaaacaaaagagggagatgctgaagaaaaggaaaggacagatgaagctggaaatatcgataaaattagcaaggatgatactgggaagaaagatggagatgacactgagaagaaagatg

SEQ ID NO: 708 - DNA, 229 bp, Zea mays
  unsure (1)..(229): unsure at all n locations; Clone ID: LIB3136-049-Q1-K1-B11
gcgggaaagacacttagncgcagcccgacatttctgcgggctctggggtaaatacggactcgggggcctcaactgaaacaccacctcagcctgttaaaaccagtgacaaggcagaagacacaaaggacgaatctagtggagacaaagtggtagtttgagaacccattgaatgcaattgcattccatatgaagttgatggcaaaacaaaatgattagatgctgaagaaaa

SEQ ID NO: 709 - DNA, 448 bp, Zea mays
  Clone ID: LIB3136-049-Q1-K1-B2
gcctggcgtccatcgcggtggccggtctggccgtcgaccgctacggccgccgctccctcctcatgctgggaagcgccgttctgatcctctcccaggtggccatggcgtggatctttggcgcgcagctgggcaccgatggcggcaagtccatgccgcgtgggtacgcggtcgcggtggtggcgctggtgtgcgtgtacactgccgggttcggcgtgtcgtggggcccgatcaagtgggtggtcacgaccgagatcttcccgctggaggtgaggccggcggcgctgggcctaggtggcgccatatcgggggtgctcatcttcgtgcagtcacagtcgttcctggagatgctgtgcagcttcaagtacggcaccttcttgttctacgccgggtgggtggttgttatggcggcggccgtggccgcgtttctggcggagacccggggcgtgcc

SEQ ID NO: 710 - DNA, 444 bp, Zea mays
  Clone ID: LIB3136-049-Q1-K1-B3
ggggatgacacaaaaggtcctgatagcgacaaagccaacgaactccttgaggtatcaaaaatcgcgaaacaaaaggctcccagtgcatcaggcccatcagtagtgtcatcaagcacttcccaaggagcggcaaagtctcaacagggcaattctaaggcaggacagttttcagtttcgccaccaacaggtaaacataacgcatcactaagtttgacccatagccaagccaaggccatcccttgctatatggatgatttcaagtacggattcccgtcatctggcttgtcttgtgaaactatgaaatggtggggcacaagcagcgacacatactatgtgcctaccaaagatggaagccatgaaccccatgaatcaacaacacatgagccatcaaagggcatgactgatgatgacgagttggactggggagcagatgaagcggaagct

SEQ ID NO: 711 - DNA, 343 bp, Zea mays
  Clone ID: LIB3136-049-Q1-K1-B4
ggcaatgaacaaacctgcggagtatgacagtgatgatgaaattattgcaattggccgaagccctaccatgcggcagccattgatccatgcccaaaatgtgccggccaccggtgttcctgtcccaacactcgatcagcgtgcaagtagaaatgatgcctggagccaaaggatgcgagagaagtatggtctggacacgagccagttcacctacaacccctcagacccaagcaggtaccagcagaatggcgcgccacaggctgaagaaaggagtcgatgcactataatgtgaagaattcttcatgacgtcctacgtcataatgggtttctttgaacgggctacctc

SEQ ID NO: 712 - DNA, 244 bp, Zea mays
  unsure (1)..(244): unsure at all n locations; Clone ID: LIB3136-049-Q1-K1-B5
cggacgcgtgggcggacgcgtgggcggacgcgtgggccggcccgccgttcgccaccgccgtcgtgggcccatccacatcggtcgccacacccccttccgcccaccaccaggccgtcatctgcggcagaaggcgcgcgcccgtccgtccgccaccacgccgtcgcctcgcccctcttcgctgccgccccgtcgtcagctcggccccgtccgcagccgcgacttcatccacatncgtcgtcacacc

SEQ ID NO: 713 - DNA, 448 bp, Zea mays
  unsure (1)..(448): unsure at all n locations; Clone ID: LIB3136-049-Q1-K1-B6
gctccttggacagtgaagggcatgcgggatctcagcgatccagtgtcaatatccgatatccctggagcagggcatagagaagctggtggatttccaggtcctggtcagccatctatgatgccaaacttgactgcagaggtcttggttccaagattagttatccctgttctctgcggtgaggatggaagttgtttggacaggatccgtgagttttctgaagctaagataactgtcgctgagcctacagccgatgcgatggacactgctgttttgatatctggcacaccagagcagatgcatgcagcccgaagtctcgttgaaacattcgttatgagcgaatcttttggnccatgacatgttcagaggcagtgaagctagcgatcatatgtgggttcatgtttgtgaatatgcgttccaatctgtctggagagtgacatatgctccaagt

SEQ ID NO: 714 - DNA, 418 bp, Zea mays
  Clone ID: LIB3136-049-Q1-K1-B7
gaggggattagccgatcgaagcgtcatcggcggctgcggcaatggcggggctgtcgctgcggtgcggcgactgcggcgcgcagctgcggagtgtggaggaggcacaggcgcacgctgagtccaccaaccacgccaacttcgtcgagtccactgaggccgtcctcaaccttgtctgctccaactgcggcaagccatgccgctcccataccgaggtggacctgcacacgaagcgcacgggccatacggagttcgcggacaagaccgcggaggcggccaaacccatcgacctcgaggcgccgcttaagccggcctccgatgatgccacggacgtcgatgcgtcggcctcggcgactgaggagacacaagagacggttgtgccagaggtgaacaaggaggtgctcacggaccttgagggcat

SEQ ID NO: 715 - DNA, 120 bp, Zea mays
  Clone ID: LIB3136-049-Q1-K1-B8
acttgatttacaatatccccaggccggcatattgcatcggcataaaaactgaatttaccatggcccacctgatctcttctgcaatcgcaggcgcgggcaacttggtcgctgatggaatca

SEQ ID NO: 716 - DNA, 374 bp, Zea mays
  Clone ID: LIB3136-049-Q1-K1-B9
gctgtcctctgtgctatccgctagggtttatctgctcgaggaatggcgtcggtgcacgtctccggcgcgggggtcggtgccgcggccttctctgtgaaggggaaggcctccaccgatgcgctccggcttcgctctacgttgaccttctgcgaggtctgcccggcgcggcgggcgttccgtggcctcgtcgtcagggccgctaccgtcgtctcccccaagtatacaacactcaagcccttggctgatagagtgcttgtaaagattaactcttccgagaagaagacaactggtggaatcttgctccctacgactgctcaatccagacctcaaggcggctatgtacttgctgttgtaaaagaaggataattggggat

SEQ ID NO: 717 - DNA, 58 bp, Zea mays
  Clone ID: LIB3136-049-Q1-K1-C1
ccccccccaaaaaaaaaaaggtccggtctcctttttctcttaaaaaaagaaggggggg

SEQ ID NO: 718 - DNA, 454 bp, Zea mays
  Clone ID: LIB3136-049-Q1-K1-C11
cccacgcgtccggccgaagtgaaaagtcgatcgggattgggccgttgggggtgcgatacccctcgcctcgaatgcgagctccgtaggtccgcccccccggcggatggccgagctgggccgccgccgccgcccgctgggatgaggcagcgtgaggagtcgcgctcgcggcttccctgcccccaggcctccgctctgaatatccccgacgcgacggtaaccgaacaagcctcagttagaaaggctaagatcagagcatctccgtgtctccacaacacatcctggattcgcaattattgaggtgcctccactataaaaggccaaccatcctcaatgaatgaacacagccagccagcaagcaagcagagaacaaggataacacagcaactgataaccttattaccaagaacaaacaactacaagaggctttgcaagttcacagaggcagctgttcact

SEQ ID NO: 719 - DNA, 263 bp, Zea mays
  Clone ID: LIB3136-049-Q1-K1-C12
ggagtcagcgaagcgtgagattttagctaagcctgtgcaggttggatccgcttctcatcaatcaattcggacgcaagttgctgattacgcgagcaatgccaataaagctgatggcgcccggcgagatgatgaggcacatccttctaattctaatgaaaactatgaggctgatagtgatcgtgaaagtatggttgggcaccaaaatgcattggtttaaggagcagagggtcaactttcagagaagtctgtctttacttctaaaa

SEQ ID NO: 720 - DNA, 423 bp, Zea mays
  Clone ID: LIB3136-049-Q1-K1-C2
acttgttctagatcgcgagcggccgccctttctttttcctcttttgtcgtctttttctttctattctttgtggaacagcacatatattttttatagtctctgcaagactgcgttattatctgatccattcatcattctccaataacttgactcttgaggcaccgaaaattttaatttggagcttaaaaacatttataactcatttgcattggtgtggtgtgcatgatgcggggctacacagaatcatacatgcatgtacaactagaggctacacgtcttcccactggataccctagttactagccagtgcgtacattactagtgctggaagataagtcgtagccagcaggaaaaatttaaacccaaatcatggctgggaaataaaaaaatttgacagatgggaattgcttggtatatttatgt

SEQ ID NO: 721 - DNA, 449 bp, Zea mays
  Clone ID: LIB3136-049-Q1-K1-C3
ggaacatcaagaccacgacgacggagaagaaggacgacgcggtggtgcagccgcagaccttcccgcccttcgaccgcctcggcggcggcgcgtccccggcgttcggcggcctccccggcggcagcattcctggcagcagcattcccgggttcagcatgcccggcagcggcagcagcctacccgggttcagcttgcccggcagcggcagcatgcccctcttcggcggcggctccccgggcttcagcggcttcggcggcatgcccgggtcccccaccgccggctccgtccccgagcacgccaacaagccctgaacgccaacaagcgtggtagtagagtggtgctactgttactgtagtacgtcgtcgtcttcatgcatgcgtggttcgtggtttcccctagctccatacgagcagtagttgggccttgcacgtaccgtacgtctagctagc

SEQ ID NO: 722 - DNA, 446 bp, Zea mays
  Clone ID: LIB3136-049-Q1-K1-C4
atcttatggaagcagggaaagtcaggatggctgagggaacattgaatgaggcatatgcattgttttctgaagccttttcactgcttcaacagattactggtcccatgcacaaggatgctgcaaattgttgccggtaccttgctatggttttgtaccatgctggtgatacagccggtgcaattgtgcagcagcatagggaactcatcataaacgagagatgtcttggtcttgatcatccggacacagcccacagttatggtaacatggccttgttctatcatgggctcaatcaaactgaactggcactgcggcacatgtcccgtacactgctgctgctaagtttggcgtcaggacctgatcatccagatgttgcagcaactctcataaatgttgcaatgatgtaccatgatgccagtaatatgaatactgctcttaggtatcttcaa

SEQ ID NO: 723 - DNA, 457 bp, Zea mays
  Clone ID: LIB3136-049-Q1-K1-C5
gtttctggatccgcttgcttacactcacttcaccactgagggagaggtggaatttcggagtgttctctatgtcccagggatggcgcctcttagtaatgaggagataatgaatccaaagaccaaaaacatccgattgtatgtcaaaagagtgttcatatcagatgattttgatggcgagctgttccccagatacttgagctttgtgaaaggtgtagttgactcaaatgatctccctctcaatgtttctcgcgagatccttcaagaaagtagaattgtcagaattatgcgtaagagacttgttaggaagacatttgacatgattcaagagattgccgagaaggatggcaaataggactacaacaaattctgggagagctttggcaagttcatgaagcttggttgcatcgaggacacaggaaaccacatgcgtcttgcaccattgctgaggttctactct

SEQ ID NO: 724 - DNA, 427 bp, Zea mays
  Clone ID: LIB3136-049-Q1-K1-D1
tcgcacgcacgcagccggctgttcgagcttctgtcgctgtcagggatgctgatcgaccacaactggacggagatactgaagcggcgggacatgtacagggaggcgttcgccgacttcgaccccagcgcggttgcgcggatggaggaggaggacgtggcggagatcagcggcgacagggagctgaggatcgccgagtgcagggtccggtgcatcgtggagaacgccaggtgcatccagaaggtggccagggagttcggctccttcagcggctacatgtggggccacgtgaaccaccggccggtggtgggcaagtaccgccaccacaagtacattccgttccggacgcccaagtcggaggcggtgagcaaggacctcgtccgccggggctttcggctcgtcggccccgtcatcgtctactctttcatgc

SEQ ID NO: 725 - DNA, 435 bp, Zea mays
  Clone ID: LIB3136-049-Q1-K1-D11
gctcctccggctggtgtccgtcaaggcccggcggctcaaccagaggtggaacgacgtgttcgacgagctcatccaggaacacgtgcagagcatgccctccggcgagagcgaggagagcgaggcggacttcatacacgttctgctctccatacagcaagagtacggcctcactacggacaatctcaaggccatcttggtggacatgttcgaggcaggtatagagacatcttacctgacgctagagtacggcatggccgagctcatcaacaacaggcacgtcatggagaagctatagacggaggtgaggacgacgatgcgctcgccggacggcaagaagctggacatgctagcggaggaggacctcggcagcatgccctacctcaaggcgaccatcaatgagacgctgcgcctgcacccgccggcgccgttccttct

SEQ ID NO: 726 - DNA, 162 bp, Zea mays
  Clone ID: LIB3136-049-Q1-K1-D12
tcggctcgccgacccgccccgcgggcagccaaaatgccgatcaagaggctcgtggagatcgggcgagtgtcccttgtgtactacggcgaggagtatggccgcctcgtcgtcatcgtcgacgtcttcgaccagaacaaggctcttgtggatgcccccgacatg

SEQ ID NO: 727 - DNA, 440 bp, Zea mays
  Clone ID: LIB3136-049-Q1-K1-D2
ggaccttcgtagatacactggcccttccagataaagagaggcagcgagctcagtccagagaacttcgtccacctcgacatgcccaagacctggcaggcaatggagaggctgtacggctcatgcaaggctcgcgcggtaggcgtcagcaatttctcgaccaggaagctggccgatctgcttgccgtagcccgtgtcactccagccgttgatcaggtggagtgtcaccccggctggcagcaggcgaggctcagagcgttctgctgctccagcggggttcatttctctgcgtacgcgccgctaggcaggatgaaagccgtcgccagtgacccggtggtcgcatccgtagccgagagcttggggaaaactccggcacaggttgctctgcgatggggtatccagcagggccagagcgtgctttccaaaagcgccaatgagtcgag

SEQ ID NO: 728 - DNA, 450 bp, Zea mays
  Clone ID: LIB3136-049-Q1-K1-D3
cattattaacaaggaccggacattggtgatccagtactctctaaagattgagcaagatattgaatgcggtggtgcttacatcaaacttatgtctggttatctcaaccagaagaaatttggtggcgacactccttacagcttcatgtttgggcctgatatatgtggggatcagaaaaagaagctccatctcatactttcataccaagggcaaaactaccctatcaagaaagaactaaaatgtgaaacagacaagttgacacatttttacacatttattcttagacctgatgccacttatagcatccttatcgataaccgggagagagaattcgggagcatgtacactgactgggatatccttcctcctcgtaagatcaaagatgttaatgcaaaaaagccaaaagactgggatgacagggaatatattgaagatcctgatcaagttaagcc

SEQ ID NO: 729 - DNA, 458 bp, Zea mays
  Clone ID: LIB3136-049-Q1-K1-D4
attcaacgcatcacctccttcctcgctcctgtggtacccggaggcggaggcgccttgtgacgtcttgtcccgaccgagaacgtgggacggttccgcgcgggctcgcgcggctctctggccaccggaccatagaggatctctccaaggtcacttcctcgctcatgttacctaagggcgaccaagtctaggcggaggaggcagcacgtcgagggtcaccgaagaggtgatgaatggtgtgcgcccccgtctggaacaacttcgtgctccgtacacagaagacaatgtgctgtgggtggtgttgtcggccatgtacaacatgaggtgtgtgggcatagggttgtccgagaacgacctcattgtgggagtcgactgcgtggtgtatgaggcagtggtcctaggagacttcccaagaattcgccacccaccttcacacaagatattccagcttttcacatttg

SEQ ID NO: 730 - DNA, 460 bp, Zea mays
  Clone ID: LIB3136-049-Q1-K1-D5
cggtgaggccggctgtggaggagcctttgccggcgaaaaatcaccgtcgtcgacggcatcgtcgtcgcatgaggctgagagccggcgcaaggtgtccaagaagcactcccaagggaagaagaaagcaaaggtggattggacgccggagcttcaccggagattcgttcaggcggtggaggagctgggcatcgacaaggcggtgccgtccaggatcctcgagatcatggggatcgactccctcacgcggcataacatatccagccatctgcagaagtaccgttcccacaggaagcacatgcttgcgagggaggtggaggcagcgacatggacgacgcaccggcggccgatgtacgctgcccccagcggcgccgtgaagaggcccgactctaacgcgtggaccgtgccgaccatcggtttccctccgccggcggggaccactcctcgtccggtgcagcacttt

SEQ ID NO: 731 - DNA, 174 bp, Zea mays
  Clone ID: LIB3136-049-Q1-K1-D7
gctcgcccaccctcccttcggacagtcaaatttccgtacaagagggtcgtggaaatcgggcgagtggtccttgcgaactacggcgcggagtatggtcgtctcttctacatcgtagacctagtcgaccataacatgccccttgtagatgcccccgacatggttcgtttccaaatg

SEQ ID NO: 732 - DNA, 388 bp, Zea mays
  Clone ID: LIB3136-049-Q1-K1-D8
gcggtttagagatatggaacagttatccggtggggagaagactgttgcagcactggctttgctttttgccattcacagttttaggccatcaccgttcttcatattggacgaagtagatgctgctctggacaatttaaatgtggccaaggttgccgggtttatcagatcaaaatcatgtgaacgtgttggtgatgaacaaggcagcgatggcgagagtggttttcagagcatagttatatctctgaaggacagtttctatgacaaggccgaggcacttgttggtgtttatagggactcagaacggagttgctcgaggactctcaccttcgacctgagaaagtatagggaatcgtgaagcagctcttgttgaatgtttgtatcgaggact

SEQ ID NO: 733 - DNA, 333 bp, Zea mays
  Clone ID: LIB3136-049-Q1-K1-D9
cgcgttcgcccactcattcgtgccaagcccaccgccgtcttcgtcgggggccttgccggcccaggcgccgcggatgtgctgccgtacgtggaggcggatcttaagcgctccgccctgcgcgtcgtcgaaaaagccaaaggcctctgcacacaggcgagcgacgctgtgtttgaggcgctggaaggggacgctaggaacgtcctctgcgaggctgtcgagaggcacggggcctagatgctcgacgtcggcagccatggttactgagccattaaaagggctgttcttggaagggtgagcgactactgtgcccatcacgcgcacttgaccgtgatg

SEQ ID NO: 734 - DNA, 450 bp, Zea mays
  Clone ID: LIB3136-049-Q1-K1-E1
ctagtatcttccccatctcgaactacgcgggctcccaatatgatattagcatcctgatctggaaggaccccaaggaaggaaactggtggatgcagtttggcaaggaatacgtcctgggctactggccgtccttcctcttctcctacctcgcggacagcgcgtcgatgatcgaatggggcggggaggtggtgaactcggagcccgacggcacgcacacatcgacccagatgggcagcgggcacttcccggaggaagggttcagcaaggcgagctacttcaagaacgttcaggtggtggacagcagcaaccagctcagcgcccccaagggcgtaggcaccttcaccgagcagtccaactgctacgacgtgcagaacggtaacaatggggactggggcacctacttctactacggcggccctggcaagaactcgaactgcccgtgactggtgc

SEQ ID NO: 735 - DNA, 160 bp, Zea mays
  Clone ID: LIB3136-049-Q1-K1-E10
gaggaaagaaggggagaaaaaggagcagaggttcgaaaaaagaagagacatttgagacggggggaggacaaaagaagcggagaggggaaggaaggcggttgagcgggaggaggcaggggacacaggcaacaggacaagggggagagagcgggggacagac

SEQ ID NO: 736 - DNA, 244 bp, Zea mays
  unsure (1)..(244): unsure at all n locations; Clone ID: LIB3136-049-Q1-K1-E11
gctcaaattttggcgaaactacttcatgcaaagtgatgcgtgatcaaaatggtcttatcaaaagctctggatttgctgctttctcaactcgcggggaagcatctcaggctttaactgaaatgaatggcgaaatgatatctggaaaaccattggttgttgcatttgcgcaccgccaagaagatagaaaaacgatgttacaggcccagttnttttaaatgcgccctgctgtaccaatgacacccac

SEQ ID NO: 737 - DNA, 450 bp, Zea mays
  Clone ID: LIB3136-049-Q1-K1-E2
cgcacgacacgacaccaagtcgaggagctcgttggcaccaatcatggccggcgtgaactccagcgtcgtctggctcaagcccgccgcggcagtgccgcatgccgccgccgcctcatcgccggcgaagcgggtgcagctggccgcgcccgaaggccggcgcgccgctctgctcggcctggcggccgtcttcgccgtcacggccaccaccgggtcggccaaggccacgatcttcgatgagtacctcgagaagagcaaggccaacaaggagctgaacgacaagaataggctggccaccagtggcgccaactttgcgcgcgcctacaccgtggagttcggcagctgccagatcccctacaacttcactgggggccaggacctcgccaagcagaagaaagtccccttcatcagcgacgacctccagattgagtgcgaggagaaggagaaagtcaa

SEQ ID NO: 738 - DNA, 451 bp, Zea mays
  Clone ID: LIB3136-049-Q1-K1-E3
ggaggagctagcttgccaattgccattgcactgcgcgcgcgcacctcacatccgccgccagcaggtgccaccgccatctctgctttctctctctctctctctctctctctctctctctctcaagcaacgcccgcctgcccgcccgccatggcgaccatagccacgatggccctgctgaagcccgccaggatcgtggcgcggtcggcgccgccgtccaccagcggcagcgtctcgctgcgcgtcccggcgcgggccaagaaggccgcggtgtccgcgtccgtgtcgtccgcgctggcgggcgccttcttctcggcgctggcgtcgtcggacgcggcgctggcggcgcatcgcgtggcggacgtcgcggcggcggccgacgccgggagcgacaaccgcgggcagctgctgctcttcgtggtggcgcccgccatcgggtgggtgctctacaaca

SEQ ID NO: 739 - DNA, 456 bp, Zea mays
  Clone ID: LIB3136-049-Q1-K1-E6
gcagatcttgaaagatgctgctgacaaatatcaaggactgaacttatatctcaagaacttggatgatagcattggagatgatcaacttcgtgaattgttctcaaattttggcaaaattacttcatgcaaggtgatgcgtgatcaaaatggtcttagcaaaggctctggatttgttgctttctcaactcgtgaggaagcatctcaggctttaactgaaatgaatggcaaaatgatatctggaaaaccattgtatgttgcatttgcgcagcgcaaagaagatagaaaagcgatgttgcaggcacagttttctcagatgcgccctgctgtaccaatgacacccactctagccccgcgcctttcaatgtacccttctatggctcctcagcaactcttctatggacaagcgccacctgctatgataccccctcagccaggatttggttttcagcaacaact

SEQ ID NO: 740 - DNA, 340 bp, Zea mays
  Clone ID: LIB3136-049-Q1-K1-E8
attcacatcaaccatgtgcaaatggtgggagaaatcaaactatttcatgtgctagtagtactcttatggtgaaccaacaaaactgttgcgcaggaaatgatgaaagctccaggcatgatgaagagctgatgatgaactctgctggttctgatagctcctcgtcatgcatgaaccagggagatagggaaagcagcttcagcagtacaacctctttcagcgctcaaaatccggaatcatcttctgagtctgaggaatcacccgagagaataaataagccagtatgtacacaatcattaagagctgctttacggtctttgcttgaagcatgtgcaaggtaaat

SEQ ID NO: 741 - DNA, 436 bp, Zea mays
  Clone ID: LIB3136-049-Q1-K1-E9
acccacgcgtccgggtgtactgggacgaccccaccatcctcgcgtgggagctgatgaacgagccccgctgcaccacggacccctcaggcgacacgctgcagcgctggatggaggagatggcggcgtacgtcaagtccatcgacaagaagcatctgctcaccgtcggcaccgaggggttctacgggccgacgagcccccaggagaagctggacgtcaatccgggcacgtggaaggacaacaactacggttcggacttcatccgcaacgccaagatcccagacatcgacttcgcttccatccacctctaccctgacacctggctgctgcagcagcacgccacggtggacgagaagctcaagttcgtgaagcggtgggtggcgtcccacatcgaggacggggacaaggagctgggcaagccggtcctcgccaccgagtt

SEQ ID NO: 742 - DNA, 448 bp, Zea mays
  Clone ID: LIB3136-049-Q1-K1-F1
gcccgcggagcatccggatgcttacgagtacgggtcaataatgtaccacgccaagaacctgaaagggaagctgctcctcatccatgggatgattgacgagaacgtgcatttcatgcacacggcaaggctcatcaactcgctaatggcagagggcaagccctatgaaatcctccttttccctgacgagaggcacatgccacgacgccttggtgatcggatctacatggaggagaggatctttggttttttcgagaggagcctttgagagggcgtttgtataaatttgttgcccacatctgggctgtgattgggatgtttttggcatatggattcaggttttctcattcacacctgtatttatcactagcgcagttatctttgattcttttgccagtcttggatggttatcagctgtttggctgcgtttacaggtttcagaataagcaaa

SEQ ID NO: 743 - DNA, 429 bp, Zea mays
  Clone ID: LIB3136-049-Q1-K1-F10
cgacgccgccggaaagaccaccatcctctacaagctgaagctaggcgagatcgtcaccaccatccccaccatcggattcaatgttgaaactgtggagtacaagaacatcagcttcactgtctgggatgtcgggggccaggacaagatcaggccactgtggaggcattacttccagaacacccagggtctcatctttgttgtggacagcaatgatagggaccgtgttgttgaagcaagggatgagcttcaccgaatgctgaatgaggatgagttacgtgatgctgtgttgcttgtgtttgctaacaagcaagatcttccaaatgctatgaatgccgctgagatcactgataagcttggactgcattcacttcgccagcgtcattggtacattcaaagcacttgtgctacaacgggtgagggattgtatga

SEQ ID NO: 744 - DNA, 435 bp, Zea mays
  Clone ID: LIB3136-049-Q1-K1-F12
agaacatgtcagttgagatatcgtcgccttcttcgtccaggctgggcgttcggcgtgaatccaacgtcttatcggcgtcatgcaaggtcgctgacaatggcaagctctactacgaggttgaggtgaacataaaatcctatgcgagcacacaacgagctggcggtgatgccacatgacacaggtgcagagcttggagtgggaccgtcgatacctgtcagtgctcggcgtttagaacaagcggctttactagctccggctgtagacgcccgaacatgtgttcatgcatgaagaggaggacctcagaagagtcatggactccttcagggtcatcaaggcggcgtaattttgtcatagtttagtgcacatgttctgttttagtttgcttggttctttctttagtacccgcagaaatgtactatatacttgttttttttc

SEQ ID NO: 745 - DNA, 129 bp, Zea mays
  Clone ID: LIB3136-049-Q1-K1-F2
ggcctcttgaattggctcgtcttccgttttaacgccacctcgcgacgcggcccccaacccccaccgttgcggtgctactgctaccgtgctacaccatcaggaatcggacgcgggacgctcacaccacca

SEQ ID NO: 746 - DNA, 392 bp, Zea mays
  Clone ID: LIB3136-049-Q1-K1-F3
cgacaggaccactgccactgtgaagcacagcgtcagcggcgacaagacgaaggggcggaagctgccaagccgatagatctacgcaaatggagaccaaggacgtgtcgccgctcgccgccgccaccaccaccaccgtggcgcccgtgcctgcaccgacttctcaaccgcctccgccgccgccggccccttcttctatggcgccgccgcagcaccagcaccagcaccatccgccgccgccgttcgcgcagcatgcggccccggttccgtcgcctgccgcgtccatgcccggcggcatgcggctctcgttcgaccagatgtccgggaaggcgcccggggagcagcaccaccactccgcgcccatgctctacacggtgccaccaccgcagtccgcc

SEQ ID NO: 747 - DNA, 457 bp, Zea mays
  Clone ID: LIB3136-049-Q1-K1-F4
caagtgcgctccctctctcgccatccatctcgtgcacgactgggcaaccgttgccgctgtcgaggtgcccaggtcttcatcggtccctcgtcagttcttctccggcccttcgccgccgacaagctccgccaggttgctgtgttaagtccaagcttatcacatggattcaacacaagattttcaacccaggacattttctataaagttgtggccaccaagtgaaagcacacggctcatgcttgttgagaggatgacaaagactatgtccacagagtccattttctctcgcaaatatggtcttttgggcaagcaagaggctcatgagaatgcaaaaaggattgaagaactttgctttgcatcggctgatgagcatttcaaaaatgagccagatggtgatgggagttctgctgtccagctatatgcaaaggaatcaagcaagatgatgttggaagttctg

SEQ ID NO: 748 - DNA, 126 bp, Zea mays
  Clone ID: LIB3136-049-Q1-K1-F5
gggaaattatctacttatattactttgatgataggcatacggttgaactgtttccagtagatttcctgacctcagttgctagctggtactaccaggatggtgaaaagatctgtatgcattttgccc

SEQ ID NO: 749 - DNA, 381 bp, Zea mays
  Clone ID: LIB3136-049-Q1-K1-F8
aaagatgagattcagcaactccgggaaggtcggtcttctctgtcagcatgagtggaggccgaaatctcttgttactctttcagctgagtatgatctgaaggtggtaagtgcgccttcaaaaatcggcatggccatatccctcaagccttgagctgggttaagtcaccttctataaaacagtacaagcataccgtctcccaagaacacaagcctttggagcgatacctagaacaaccctccattttaagccttttttaattttgtaaagagtccttttgctttgtcactttggcaggggagtttagactttgttttgtgggaacagtttccattaaaagcccaacttccaacacgaaggaattgaaaataacagaggttttg

SEQ ID NO: 750 - DNA, 301 bp, Zea mays
  Clone ID: LIB3136-049-Q1-K1-F9
tcggctcctcctgctggtgtccgccaaggcccggcggctcaaccagaagtggaacgacgtggtcgacgatgctcatccaagaacacgtgcagagcttgccctccggcgagagcgaggagagcgatgcggacttcatacacggtgtgctcttcatacaggaagaggacggcctcactactgacaatcttaaggccatctttgttgacatgttctaggcaggcatttatacactcttacctgacgctcgaatacggcatgggcgacctcattaacaacaatcacgccattgagaaactatata

SEQ ID NO: 751 - DNA, 440 bp, Zea mays
  Clone ID: LIB3136-049-Q1-K1-G1
tcgcagacgcgtggggttgtgttggatatgccactctctgtataatgtgtgcagcaatatgctgctgctttccatgcttgatttccgttttgcgtcttcaagaaaacttgcgtcaaaatagaagagctactcaagagctattagatgcattgacaacctacaaattcaaaccataacgtgtcaaaaactgggggattgaccatgcttcaagctcagagcaatcttgatgagggtggcattcttgtgccacgaactaataaggaaagagttgtttcagctgaagatgctgtgtgctgcatctgccttacgaaatatggagatgatgatgagcttcgtgagctttcctgcacacacttcttttatgttcaatgtgtagatatatggcttaagataaatgcggtgtgcccactctgcaaaacatagattgggggtgtggtttg

SEQ ID NO: 752 - DNA, 396 bp, Zea mays
  Clone ID: LIB3136-049-Q1-K1-G12
ccacgcgtccgtggacgcgtgggcaatacagaaagagcccgtgtgcgtgacgcacggacgccgtgactccgccgcatagagagggagagtccacgctctgaagaagcaacggcgacgcccccgacgacgagcacagctgcacagcaaactagcagcgccctcgtcagttccgtctcgttcccaacctctcccggattcgattcgattgacccgtccgctccaaatcgaatctaatcagcaattttggagttgcggaagggagaaagagagaggagaggggcatggatcacgggcttaacaaggtggggagctactgggtcatcaaaagggccagcaaggaaatcgacttcatcggcggcgacatcagctcgatctcaaacagcattggaggggcag

SEQ ID NO: 753 - DNA, 452 bp, Zea mays
  Clone ID: LIB3136-049-Q1-K1-G2
cgcacatggcctccatcgccggatcttcggccctctccttcgccaggcccgtcaaggcaatcaacacaaattctctagctttctcaccgttgaggaagggcaacatattcctccgcctgcaaccaatgcctatgagatctgtttcctgcgctgccaagaaggatacaacagacaaggtttgtgagattgtgaagaagcagcttgctcttcctgaccatactgaagtttgcggtgaatcgaaattctctgaactcggtgcagattcactggacacggttgagattgtgatgagtctcgaggagcacttcgatattagcgtggaggagtccagcgcacaaacaatcgccacagttgaagacgccgcggacctcatcgacaagcttgttgctggcaaagcgtagttctgtacctcctctatcgttgtcctaccactctaggtctatcccttgatc

SEQ ID NO: 754 - DNA, 443 bp, Zea mays
  Clone ID: LIB3136-049-Q1-K1-G3
gcacatcgctctctcgatctcagccatggcggaggtggagcagccccaggacgcggtgaagctcttcaaccgctggaccttcgacgatgtccaggtgaacgatatctcgctgaacgactacctggctgtgactgcggcgaagcacgcgacattcctgccgcactccgcggggcgctactccaagaagcggttccgcaaggcgcagtgcgccatcgtcgagcgcctcaccaactcgctcatgatgcacgggcgcaacaacggcaagaaggtcatggccgtccgcatcatgaagcacaccctggagatcatccacctgctcactgacgccaatcccatccaggtggtcgtggacgccattatcaacagtggaccacgtgaggatgccacccgcattggttctgctggtgttgtgagaaggcaggctgtggatatctcacccctga

SEQ ID NO: 755 - DNA, 443 bp, Zea mays
  Clone ID: LIB3136-049-Q1-K1-G4
ccaaatccgcagtccgcatacggtagcggaagcggggcacagacagagaagccaatggcgctgtccctctccctcgcgcgccccgcgcccctcgccgtttccgccggcgcaggagccaggaagctacccgcagccagcctagcattcccggcgaaatccttcttcggcgcgccgctggccgccaccgcggcctccgtcgcgtcgccgctcccgcgcaagccggccacctccaccacctcgctcgaggtcgtcgcggcggggaagaagggctacaagatgaagacgcacaaggcgtcggcgaagcggttccgggtgacgggaaggggcaagatcgtgcggcggtgcgccgggaagcagcacctgctcgccaagaagaacaccaagcgcaagaagaggctctcgaagatggtgcaagtcaacaagagtgactacgacaatgttac

SEQ ID NO: 756 - DNA, 412 bp, Zea mays
  Clone ID: LIB3136-049-Q1-K1-G9
cgccgtctccgctcgcctcccaaaccctaccaacaccacccgcctcatcttcgccggcctacctgcctcctccccggtccgcgccttctgccccagggcgcgcccctccccctgcacttgcgccgccttctcctccaccatggccgcctccgacaaccccctcctcgtcgccgacttcgacttcccgcccttcgaccgcgtcgagcccagccacgtccgccccggcatccacgaactgctaacacgactcgagggcgagcttgaagagctcgagaagggcatcgagcccacgtgggcgaagctggtcgagccgctagaacgcattaccgacaggctcgaggtgatctggggcatggtcgatcaccttaagtccggcaaggactccgctgatctccgcgccgccgaagaggaa

SEQ ID NO: 757 - DNA, 425 bp, Zea mays
  Clone ID: LIB3136-049-Q1-K1-H1
ctgacgcgtgggcggacgcgtgggcggacgcgttgtgcccgctaaaacccacgccaccgtcgtgcgccgtcggcggcgcaagggacgcacgatggccatgcacgtggtgcgcaacctcgacctggagcggtacgcggggcggtggtacgagatcgcgtgcttcccgtcccggttccagcccaagacgggcaccaacacgcgcgccacctacacgctgaacccggacggcactgtgaaggtggtgaacgagacgtgggccgacgggcgccgcggtcacatcgaatgcacggcctggcgcgccgaccctgccagcgacgaggccaagctcaagggttcgctttacgtgaccgcctttcttcccctcattcccgtcaccggcgactactgggtgctccacatcgacgccgactaccagtacgcgctcg

SEQ ID NO: 758 - DNA, 325 bp, Zea mays
  Clone ID: LIB3136-049-Q1-K1-H11
gggccacgcgtgcgccaggctctcctctggcaccaacgaaaacgtgctcgcccctagagcccaagctgtccgggcgccccttgctcccatccccgtggaggtctccccgtcgcagtgcgcggtggccgcgccatgcgcgagtcaaagcgacttctggcagcacctggaccgaggcaacggcgcgagagcataaagagcggaaaaaggtgcagagatgcgggggctcttaccgagacgaggggaacaaccgagcgcctgggcgcttcatgggcacgtgacaagggagaaagggctggtcttcctgaacgcggcgcaccaagggatt

SEQ ID NO: 759 - DNA, 378 bp, Zea mays
  Clone ID: LIB3136-049-Q1-K1-H2
cggcaatcaccacacgagagaagagaagctagcgttcaacagaggaagaagcgagagagctgacaagaatcgactgccatcaatggctctggcgccggcgcctctccagtgcttcctcacgagcagcagaccggccgtatgcacggcgacgccgcccaataagcgcgcgaggaggccgtcgaggatctcgtgcagggcgtccggcgatgacaaggacaaggtcccgtcgtcgggagggagcgatcttggggtcaagcagctcgggaagctggccatggtcgcgctggccgccggcgtgctggtgctcggccccgtcgacggtgccgtggcggccaagtccggcggcagggtcggcgggcaggcgttccggtccgcgcc

SEQ ID NO: 760 - DNA, 58 bp, Zea mays
  Clone ID: LIB3136-049-Q1-K1-H5
aaggtggtcgtgtttggcgctatctccaccacataaacatgaaaatgttttttttatt

SEQ ID NO: 761 - DNA, 367 bp, Zea mays
  Clone ID: LIB3136-050-Q1-K1-A10
gggcgacacgacatgcaaggcgaggaactcgagggcaccaatcatggccggcgtgaactccagcgtcgtcgggctcaagcccgccgtggcagtgccgtaagccgccgccgcctcattaacggcgaagagggtgcagctggccgcgcccgaaggccgccgcgccactctgctcggcctggcggccggcttcgccagtacggtcaccaccgggtcggccaagggcacgatcttggatgagtaccctcgagaagagcaagggcaacaaggtcggagctgaacgacaagaagaggcttggcaccaatggcgccaactttgcgcgcgcctataccgtggagttcggagctgccagtcccctaaacttcactg

SEQ ID NO: 762 - DNA, 212 bp, Zea mays
  Clone ID: LIB3136-050-Q1-K1-A11
agcttcgtggggagggggtccttcacctgcgggcgctgctgctgtaatgtgcggaggcccgtgaacgcggacaacctcgacgacgcgcaccatacgctgctggagatcgcggagctggccacgcctttcggcaccttgacccagcgcgtggccgcctactttcgcggatgccatgtttgctcgcgtcgttagtttctgcctaggcctgtacg

SEQ ID NO: 763 - DNA, 452 bp, Zea mays
  Clone ID: LIB3136-050-Q1-K1-A12
caaacatctctaggaggtaggagcataactaagaataccaagtttcttatttcgttaacttgtatcttgttaagaactcgatgattatggcatctggctctgtcccctttctgacaaaatgtttcagggacttgggcaactccaacgtctccggctccatcggccctgagctcggccgccttgtcaacctcaaatacctggagctgtacaggaacaaccttgacggcgagatccccaaggaattgggcaacctcaagaacctgatcagcttggatctgtacgccaacaagctcacgggaggaatccccaagtcactctccaagctcgactcactcagattcatgcgcttgaacaacaacaagcttacaggatcaattccaagggagtttgccaagctctccaacctgaaagtcatcgatttgtctaacaatgatctttggggactattcctg

SEQ ID NO: 764 - DNA, 436 bp, Zea mays
  Clone ID: LIB3136-050-Q1-K1-A3
cgacggacgcgtccggaagcagcagctccgggagctcgcgatgcttaatggcaccctgcgtgaggaagggatgcagaggttcggttcagcgtcccctttccacaacagccttggaatgaagagagccaagacaagggggtgatgaagaaagtcgcaagcatcatgaagggagaacttaaatcatcatctattctgaggccaatcctgtgtacgaatggggggttgccttgctggctactggcccaatacggtctcgcgccaccagcatcgcggcgcgggcggccgtgcacgataaaacatatatctggagttgtgtctactgggggagttgagtttggttatgcgccatgggttgttacgctatatattgggctgtgcaagcttttgtaacaatgtggtttgtgtaaatgctcattttgagcgtttggaagctctc

SEQ ID NO: 765 - DNA, 304 bp, Zea mays
  Clone ID: LIB3136-050-Q1-K1-A6
cgacgacagcagggcgcgtacgcagatgcatggagcatgggagactcagctctaggatacacaggggcgtatcggtccaggcgtcgacgattatggcatctggctctggcactgggtggacgagcagaagcggcacacggcggagctgatgtcggcgctccaggggcagcagacgtcgtcgacgtcggagctggagctccgcttgctggtggagacggggctcagcaactacgagcacctcttcaggatcaaggcggtggccagcaacgcggacgtgttccacgttatgtcaggcgtgtggaag

SEQ ID NO: 766 - DNA, 443 bp, Zea mays
  Clone ID: LIB3136-050-Q1-K1-B1
cacggagtctgcgtgactagggacagtggagaaaatcagcggcacagcgtgggtctcgcgacctccagcgaacgagatccctaagtttcgatccactgtcccagtggatttgggactgcgatggaggagcagttcatcctccgcgtgccgccatccgtcgcagagcggatcgagcgcctcatgaatgaattcgccgccttcttcttcaaccccgacgaggcctccctggacctctccttctcagaggatggaagaaatggcacatttatgatcggtaatgagagctttcctgcttctctcttggatctacctgctgtggtggagtcatacaaaacatatgatgattctgtactaattaaaactgctgatgttggtcagatgattatggtaagagaagaaaatgatcctgcttcagaaggagtcgagtacaagcatgggcttac

SEQ ID NO: 767 - DNA, 437 bp, Zea mays
  Clone ID: LIB3136-050-Q1-K1-B10
caaacatctctaggaggtaggagcatatctaataataccaagtttcttatttcgttgacttggatcttgttaagaactcgatgattatggcatctggctctgtcccctttctgacaaaatgtttcagggacttgggcaactccaacgtctccggctccatcggccctgagctcggccgccttgtcaacctcaaatacctggagctgtacaggaacaaccttgacggcgagatccccaaggaattgggcaacctcaagaacctgatcagcttggatctgtacgccaacaagctcacgggaggaatccccaagtcactcttcaagctcgactcactcagattcatgcgcttgaacaacaacaagcttacaggatcaattccaagggagtttggcaagctcttcaacctgaaaggcatcgatttgtctaacaatgatctc

SEQ ID NO: 768 - DNA, 417 bp, Zea mays
  Clone ID: LIB3136-050-Q1-K1-B11
gctggaagatcgacaagttcgaccctttctggaacgagggcggcatgctcgaagtcagctccttctccaccctctttgcccagtaccgagagaagtacctacaggaggcgtggccggtcgtgaagggcgcattgaaggagtacgggatctcgtgcgagctcaatttggtggagggatccatgactgtgtcgacgaccagaaagacaagggatcccttcgctattatcaaggccagggaactaattaagcttttgtccaggagcgtccctgcacctcaagcaatcaaaattcttgatgatgagatgaactgcgatattattaagattggtggtcttgtgagaaataaagagcggtttgttaaaaagagggaaccggcttttaggcctaactcgtctacactcaaaggaaatactgttg

SEQ ID NO: 769 - DNA, 317 bp, Zea mays
  Clone ID: LIB3136-050-Q1-K1-B5
cggacgcgtgggttcaagttggattcatacttggatccttcatttatgtcaataattaaagatccagatctgcggcgcaaggagcagtgggaaaaatccgctcaagctcaaaagggatttaattatgctaggttatttggatatggggatctaggttgcccttcattatctgcagcagaggaatactcacttcattcacgatacctcactaaagcaaattctcttaatctttcagagattgctgaaatgaaaataatttatcgtggtggagttgatattgaaggacgcccggttatggtggttgttggtgcacactt

SEQ ID NO: 770 - DNA, 282 bp, Zea mays
  unsure (1)..(282): unsure at all n locations; Clone ID: LIB3136-050-Q1-K1-B6
gtcgtgctggctggctggtgagggtacctgatccccaagggctggaaggtgttgcccctgttccggaacatccaccacagccccgaccactttccctgcccggacaagttcgacccctcccgattcgaggttgctcccaagcccaacacgttcatgccgttcggcaacgggacccactcgtgcccggggaacgagctcgccaagctggagatgctcgtgctcttncaccacctcgtcaccaaatacaggtggtccacctccaagtccgagagcggcgtgcag

SEQ ID NO: 771 - DNA, 306 bp, Zea mays
  unsure (1)..(306): unsure at all n locations; Clone ID: LIB3136-050-Q1-K1-B7
gcgttcacctgtttccttcctccccggcgccgccaccgtcggaaggagaaaaaaaatgggtgccgatggggaagaagcgtcgcggatagtcctgccaatggcggtggaggggacctcggagcagctggcgttcgtggaggaatcgaagcttgagaagcgcaaggagaacgcggactgggccgtcaggaaccgggagcgcanggcggtaaagcgccagcgcatccgcgacgagcacaaggtcaccgtaaggcggcccgaggacttcgttgcggcgttccggaacaaggaacgcgacttcctgcggat

SEQ ID NO: 772 - DNA, 402 bp, Zea mays
  Clone ID: LIB3136-050-Q1-K1-B8
gggtcatcgtcgtcggcgccggcatgtctgggatctcggcggcgaaaaggctgtcggaggccgggataaccgacctgctgattctggaagcgacggaccacatcggcgggcggatgcacaagacgaacttcgccggcatcaacgtcgagttaggcgccaactgggtggagggcgtgaacggcggcaagatgaaccccatctggcccatcgtcaactccaccctcaagctccgcaacttccgctccgacttcgactacctcgctcagaacgtctacaaggaggacggtggcgtctacgatgaagattacgtccagaagagaattgaactggcggacagcgtggaagagatgggggagaagctctctgccactttgcacgccagtggcagagacgacatgtcta

SEQ ID NO: 773 - DNA, 442 bp, Zea mays
  Clone ID: LIB3136-050-Q1-K1-B9
tggccatgccgcctctcctcttctcccttcgaccctcgccctgttcaggcttcccgctacgccgactcctattccgctgctccgcttcctccgcctccaccttctcgtcgctcgcctcttaccacgcctccttcgcccgccggatggccctcggcggcattcattcgcaccaccgcatcggggtcggggtctccggtggaccggactcgatggcgctgtgcgtgctcgccacggcctggaagaaggcagcggggaggaaagccggtgatgaggaggatcccgtcgcctcggcattcgtggacgggctcctcggagttgtcgtcgaccacggtctgcgccccgaaagcgccgacgaggcgcggctagtgcgtgaccgcgttcgtggcatgggtaatctcatgtacttaggccctatttgttcaaactatagattatataatct

SEQ ID NO: 774 - DNA, 288 bp, Zea mays
  Clone ID: LIB3136-050-Q1-K1-C1
cggacgcgtgggttccaggttgctgagagagtattatttttctggaacaatattcactgcgagaatttcgttaagcaaaacagtaaggtgatcctgcctatcatcctccctgcattggagaaaaatataaatgggcactggaatcaagtcgtgcaaagcctcagtctgaatgtccgaaagttactctcccatcgtgaccctcaaatgtttactgaatgcttgcgaaaatacgaggaagacaagggctgggagaacgaatttaaacttgagcaagagttggcattgaaa

SEQ ID NO: 775 - DNA, 306 bp, Zea mays
  Clone ID: LIB3136-050-Q1-K1-C4
ccgccaccaggtgcagagtctttcgtcatctcttctccggcgaagaacccccagtcgcccaccagatcacttgttaaactttgttgaggggtgatggcggcttctttcgcaaacctcaacaccgaggcagggcttaaaaagcttgatgagtaccttctcactcgcagctacatcactggctaccaagcttccaaggatgacttggctgtctacacttcgttttcgtctgctccctcgtccaagtatatcaacgtaacaaggtggtttaatcacattgatgcgctcgtgaggctgaacggaattact

SEQ ID NO: 776 - DNA, 179 bp, Zea mays
  Clone ID: LIB3136-050-Q1-K1-C5
tggcatgtaatagttcatcgatagagaggtgcaagtgacaaatagccacggctttgtaattctgagctaggattaactattgagaccctgtaattcgtctgggcagacctcaaactagaggtcaacaacgtagcctggcctattgtagaatgtatcttgctctacagtcttcatgattc

SEQ ID NO: 777 - DNA, 166 bp, Zea mays
  Clone ID: LIB3136-050-Q1-K1-C7
cgacgatccatgtctctgtatctgcgtctgttcatatgcctgatgccgacttgtgctgtatgtagtgcttgaattcagtcgtgttttgctaccgtacccaccccatgcatcatctgtcaccgcgacgcaataatcatagtaataacaagttcagataatcgaattc

SEQ ID NO: 778 - DNA, 420 bp, Zea mays
  unsure (1)..(420): unsure at all n locations; Clone ID: LIB3136-050-Q1-K1-C8
gcgcggcggcccctccttccttcctcccacttctctcgcgcggcgctcgcttacctcgcctcgcattccgttcgagcaggggagcggcagtgagaagggagggaattaaggcaagatgttcatcgagagcttccgcgtcgagagcccccacgtgcggtacggcccgacggagatcgagtcggagtaccggtacgacacgacggagctggtgcacgaagccaaagacggcgcctnccgctgggtcgtccgccccaagtccgtcaagtacaacttccggaccagcaccgcggtccccaagctcggggtcatgcttgtggggtggggaggcaacaacgggtccacgctgacggctggggtcattgccaacagggaggggatctcatgggcgaccaaggacaaggtgcagcaagccaactacta

SEQ ID NO: 779 - DNA, 398 bp, Zea mays
  Clone ID: LIB3136-050-Q1-K1-C9
ctttggcgtggctatgctctaagcaaggataccaggagtactgattttaactggagttggctctttgcaccttttccatatggtgcaagatacaaatgctttctccgcatagttctctctgctccgatgggagaagaattgcgtgactgggttggatgggtgaaatcacgattccgcaaccttcttctcaagctggagagtcttggtgtttactgtgaccctgatccctcagaacaagttgatcataccatcactgatccaaatgttgtattcttctggggtctcatctatagaaggaatattcaaatatgtataagttctctcaaagaagatttcatgaaaagtgtctgcaataacatctatggaaaggaaaaatgtgcccattcagacatcacaat

SEQ ID NO: 780 - DNA, 348 bp, Zea mays
  Clone ID: LIB3136-050-Q1-K1-D10
gacatccacaagagtgtaaaatacaatgtgtgggctagcacaaccaatggaaataagaagctcgatgctgcttatcaagaagctcagtcgaagggttctgcgtgccctatattcttgtttttctcagtgaatacaagtgggcagtttgttggtgttgctgaaatgacgggggctgtcgattttgagaaaaccctggggtattggcaacaggacaagtggaatggttccttctctgttaagtggcacattgtcaaggacgtgcctaacaacattctcaaacacatcatcctagagaacaacgaggaacaagcctgtcacgaacagccgcgacactcaagagatacacct

SEQ ID NO: 781 - DNA, 315 bp, Zea mays
  Clone ID: LIB3136-050-Q1-K1-D11
agctagccactctcaccaatcaagttttcatgtctgatctcgacattcagatcccaactgggttcgatcccttcgctgaggccaatgctggggactctggtgcggcagcagggtcaaaggactacgttcacgtgcgcatccagcagcgtaatggtcgcaagagcctgactaccgtccagggattgaagaaggagttcagctacagcaagatcctcaaagatctcaagaaagagttctgctgcaatggtacagtggtccaagacccacaacttggacagggcattcagcttcagggtgatcagagggaagaacgtc

SEQ ID NO: 782 - DNA, 438 bp, Zea mays
  unsure (1)..(438): unsure at all n locations; Clone ID: LIB3136-050-Q1-K1-D12
gagagggggagagaaaggttaaggaatccgagctaaggcgccgcttcttctcctcctgctgggttcttctcggcaccgtcactggagggagaggattcacgggacgaggcgacgcggaagggatttcgtcgcttgtgtgggcggcgcgtccgctggttgctttgcttccatggagagggatntcctgcgtgcgatcgacagggcgtggaagtgcggcgaggcggcgaaggaggagagccgatcggagccagacagcccggcggcgacgcggtggcagtttgcggcgaggtccggcgtcgcgccggcgttcatgtcgttcaggacggaggcgacgggcgagggctctgaggcgttctcggtctccgagctccggccggccggagacgccttcgacggcatcaagaggcagagctccatgctttcgatctaccagcagca

SEQ ID NO: 783 - DNA, 433 bp, Zea mays
  Clone ID: LIB3136-050-Q1-K1-D7
gaccccaagcaccaccgcggcggcggcgaccatggctgtcggaaagaacaagaggatctccaagggaaagaagggcggcaagaaaaagaccgtcgaccctttctctaagaaggattggtatgacatcaaggcaccgtcggtgttcagtgtgcgcaacatcgggaagactctcgtatccaagacacagggtaccaggattgcttctgagggtctgaagcacagagtctttgaggtttgcctagctgatcttcagggcgacgaggatcaagcttacaggaaaatcaggctccgtgctgaagatgtgcagggcaggaatgtgctcacaaacttttggggtatgaattttaccactgacaaactcagatccctagtgaagaagtggcagacattaatcgaagcccatgttgatgtcaagacaaccgacaactacatg

SEQ ID NO: 784 - DNA, 436 bp, Zea mays
  Clone ID: LIB3136-050-Q1-K1-D8
agataagaggactggcaaaactaaaggctatggatttgtgagcttttcaaaccctactgatctggctgcagcaataaaagagatgaatggaaagtatgttgggaaccgccctattaaattgcgtaagagtaactggaaggagaggacagatgttgaggctctggaaagacaaaagaatcatgtcaagaggaagcctaaaattcccaagaagactattcttcacaagtagaaatacaaaagccctaccgagggtgaatgccagctcatgtgctgccttgggatgatgctaccttctggaatctctttactctctgcaatgctcggggtggaatcacgcaatgctcggggtggaatcacacgcaagggcttgttgttaatgtgtagcttggaaacttaaattcttttgggatacctgtcttttatcatgatgagtaac

SEQ ID NO: 785 - DNA, 167 bp, Zea mays
  Clone ID: LIB3136-050-Q1-K1-D9
cgcacacgcgtctgaactgatgtataacgttgcatctgatatacatacgcactttaccggggagcattcctctgactgggcgaaccctggcattgatgctcattctgtcgctcttttgagggccaactattacactttggcttggatattggctagggggattatag

SEQ ID NO: 786 - DNA, 272 bp, Zea mays
  unsure (1)..(272): unsure at all n locations; Clone ID: LIB3136-050-Q1-K1-E10
cgcccgtgtacggcgcgccgtcgctggagcttccggngctcatcaagatcagctgcgacggtggcccgccgtgcgacccggacgcccgcgactggctcgcgggcgacgcggaggtcacgcaccgggtggccaggtggatccaggagggcatgccggaccacgtggaccccgcgggagggccggtcgtccggcagtcgtgcatctgcttcatgacccccgacgccgacttcgtcatggactttctgggcggcggcccggacgtggtggtcggg

SEQ ID NO: 787 - DNA, 218 bp, Zea mays
  unsure (1)..(218): unsure at all n locations; Clone ID: LIB3136-050-Q1-K1-E12
cgcgcccgngnacggnacgccgacactggagcttttgtagctcatcaagatcagctgctacgggggggggccgtgcgacccggacgcccgccactaactcgcgggcgacgcggaagaaacccaccgggggggcacgtgcatccaggaggccatgccggaccacataaacgccacgggaggtccggaaggtcaacagaccgtgcatgtggaacatgacc

SEQ ID NO: 788 - DNA, 195 bp, Zea mays
  Clone ID: LIB3136-050-Q1-K1-E5
tcgcgcccgtgtaccgggcgccgttgcttgagcttcctgggcttatataagataaactttgaacgggggcccccctgcgaacccgaagcccccgaattggtttcggggcaaaccgaaggtaaacccccggggggccagggggatccaggaggccttgccgaaccacttggaccccgcgggagggccggtcgtccg

SEQ ID NO: 789 - DNA, 54 bp, Zea mays
  Clone ID: LIB3136-050-Q1-K1-E7
ttcccctttttaagttttgccgctgttgttgccgctgccaccctccgtccgcgt

SEQ ID NO: 790 - DNA, 436 bp, Zea mays
  Clone ID: LIB3136-050-Q1-K1-E8
cgcaaaagcatcgatgctgctgcagaatgtgccacctgctctacttgtgcgatttttgagggagcatccgtctgaatgggctgatcctggcatcgatgcttattctgtcgcctctttgagggccaacccatacactgttccaagtttaagggctggtgggtttatgggcaaccaggttatactaccccttgcacgcaccttggagcatgaagagtccttggaggttattaagcttgaaggacatggctttagccatgaggaggtgcttatgtcccgggatatgtttcttctacagctgtgcagtggcgtcgacgaggatgcacctggtgcgtgtgcacagcttgtctttgctcctattgatgaatcttttgccgacgatgctaccgtgctgccctcaagctttcgtgtgataccgcttgatgctaagacggatgtg

SEQ ID NO: 791 - DNA, 259 bp, Zea mays
  Clone ID: LIB3136-050-Q1-K1-E9
ccgcgaatcacagacgcggctatataagcttgctgtactgcactaccctgccctgccataagatcgtacgtgagcccgggcgcgcgagagccttggagaggcatggatgatgctaaggttgtgacgctggctctggtcgtgctgctggaggggaccggggttgatccaacagccgcggtgcgcgcgagcaactctcgatccagcgtgtacagcaggctgatgccgtgcctggcgtacttcacatgggcggagccatgcc

SEQ ID NO: 792 - DNA, 401 bp, Zea mays
  Clone ID: LIB3136-050-Q1-K1-F5
caaagcaggatgatgatctgtctgatctaagcaacatactgacggagctgaaagggatggccggtgacatgggctctgagatcgagaggcaaacaaaagcaatgggggatgcagagaaggattatgacgagctgaacttcagggtcaagggagcaaacactcgagctcgccgtcttctcgggagataaaaaaatgcatatattcttgtctcttggatggtccataacacattaactatatgggggcatcaaattctgatgattttgtgcatcagattttgattagcattgttaccgtggacatgtcggcgtgtatggtaattgagacatattttatatgcttgcttcttttttctatttttttagcattgcacgagcttaagattttaggggattttacat

SEQ ID NO: 793 - DNA, 387 bp, Zea mays
  unsure (1)..(387): unsure at all n locations; Clone ID: LIB3136-050-Q1-K1-F6
gccccaacagggaatcccccccngccatcttttcccggtgcgcagccaccgaccccactgtggacgtgcccgacccaatgcaccgacccacacccgctgcgactgtcagcatcaaatatggcgggagcgaagggcgacctccagagagtaagaacgaggcgacacactatggacttgatatgactgagcaacaacatcttgagcattcgattccatggattgctgccaatgaagcatgtcggcgtgcgttatgtccttacagggctctgactgaatttaacgcaaaatctgcgtgacacacttccaatcgtggaacccagtcgtataccaaggatggagcggaagatcacctgtcctctgggaaaaccgaatggaagctagcactgg

SEQ ID NO: 794 - DNA, 179 bp, Zea mays
  Clone ID: LIB3136-047-Q1-K1-F10
tcgcttcatctccgtccgctcccggcatcgacccctttttcccgtcatgcggtcgccgcccacgggcggggattgatcatcttccggtgcttgagtcaagtaaagaacctttccctattctcggttcgatggattccaacgttcgttatgttcttcgtttaatccgatttttttccatg

SEQ ID NO: 795 - DNA, 429 bp, Zea mays
  Clone ID: LIB3136-044-P1-K1-E3
gcgcctcaggggaggcatgcagatcttcgtgtagattctgaccgagcaagactatcacccgggagggggtgtctgcagacacgagctacaacttcaaggccaatatccaggacatggagggcattcccccataccagtagtgtatgattttttctgaaatgaatcttgaggactttcttacgctttcctttattcattattcagttggttatcatcatttatttggttttaagttttatagttatgcattcttattttatgtaaaactcttatttgttatttgttttattttttcttatatcttatttttttgtggttgtttttattttttatttttattttatattatatacgtttattagtttattgttaatatctacatcttattttttatttttattttttctttttctactttttttttattat

SEQ ID NO: 796 - DNA, 439 bp, Zea mays
  Clone ID: LIB3136-044-P1-K1-E4
ttttgagactgtaagacaatgtttatatagttatttaccttatatagcatctactattcggatggggttttaatccactgggatcaataccttttcacccttttttcacctctatattctttttttaatctttacatcatttttccctttttttttctatatcttctttttttttataattttcatcttatcttttatttttctaattatttttattttcttcatattattttttttttttttatttttatttttttttttttttttattctttttatatttttttccttttatttttatttttttctttttttatttctatttttttattttatatttattttttttttttttatttctttttattttattttcttttcattctttatttctttttttttttaattttacttttcttttttattttatctttttttta

SEQ ID NO: 797 - DNA, 192 bp, Zea mays
  Clone ID: LIB3136-044-P1-K1-E6
gctcgtctcgctgctggccctccacggcaacgcccgcaaggtcttctgcggcctggccggcaccatcttctccatctgcatgtacgcctcgccgctctccatcatgaggctggtgatcaagacgaagagcgtggagttcatgccgttcctgctctccctggccgtgttcctgtgcggcacctcctggttcat

SEQ ID NO: 798 - DNA, 115 bp, Zea mays
  Clone ID: LIB3136-044-P1-K1-E7
cccacgcgtaccaaacgaaaagctgtccctcccccactttcatagcataccgcaagctgcgccgggggggggctttattctctaccataactgacctcatctcctgcttcttcct

SEQ ID NO: 799 - DNA, 216 bp, Zea mays
  Clone ID: LIB3136-044-P1-K1-E8
acgcggacgcgtgggttaccacacaagttcagatcaaggtcatgccccatgcagcagacgggggggggcgccttatacaggatccttcaggtcaagttaaccatgggcctgttctagaacctttacccagactctagcctatgcggccagcttgtgaagcaagaacatcttatactggcacgcgtagccggcaggaaatgcttgtttctttggaag

SEQ ID NO: 800 - DNA, 180 bp, Zea mays
  unsure (1)..(180): unsure at all n locations; Clone ID: LIB3136-044-P1-K1-E9
tcactaccaccaccactgtcccggatccataccagctgcttcagcagttctcgcgagctgtcttgggtcggtcgatagatcgatcgatcgctcggccatcatggcacggaaggagcaggcgctgctgtcgacggagatcgtgaaccgcngcgngtagccgtcgggcccggacgccgtctt

SEQ ID NO: 801 - DNA, 414 bp, Zea mays
  Clone ID: LIB3136-044-P1-K1-F1
ccggaaaggcggaaacccatcgcaactaattcccaaccccaaacctccaatccacccatgcggcctgggatccactccgggcggccatggcctgctccttcgccgccgcgaccgtcgtctcttccgcccccaccccggccgccaggcccctcgccgttgccccgcagtccgtctctgtctcccgctccgcggtcgccaccgccgccaggccgctccgcctcgtcgcctccagatccgcgcgggacaccagactcgtcgcccgcgccggcggcgtcgatgacttgccgctggtcgggaacaaggcgccagacttcgaagccgaggccgtgttcgaccaagagttcatgaacgtgaagctttttgatttcatcgtgaagaaatacgtcgttctgttcttttaccccttggatttta

SEQ ID NO: 802 - DNA, 227 bp, Zea mays
  unsure (1)..(227): unsure at all n locations; Clone ID: LIB3136-044-P1-K1-F11
gcgaggcaccacacctcttcctcctcttcctcctcctagcacagctagcgcctgctccccttcggctgtgatcatgtcttgcagcagcggcaagtgcaactgcgtctccagctgctcctgcggcagctcatgcaactgcatgtcccctgacgngganaccgccgccgccagcagcatcaagaccatggtcctcnctgtgccgaccaccaaggtcagcgccggtggct

SEQ ID NO: 803 - DNA, 382 bp, Zea mays
  Clone ID: LIB3136-044-P1-K1-F2
accacgccgacgcccgccttgacaacagccccacgtctaggtagtgtcgcaacatggacacgggggtcgcaatacctcttggagcaagtcctggtcaccctgcggtcacctctagatgctgagtagaagctgaacaccatgagtcccttgtctggtacaataggatctcatagatgaagaatttccatgctgatgctgatgatttctttgaagagatttgtaagtttgcttacacgaacagtgggagtatgtgcatagagtagaggagttgctgcattttgccactcttgaagtgagttagctctaaaccaaggcagcttttacctagtgcctgtttgtttagggctgttttaattggataattttattcgtttgtcttttg

SEQ ID NO: 804 - DNA, 393 bp, Zea mays
  Clone ID: LIB3136-044-P1-K1-F3
gggaccagttctacggcgccaaggccagcctgaacgtgtggtccgccaaggtggcgtcggcggcggagttcagcctctcccagatctgggtcatctccggctccttcggcaacgacctcaacaccgtcgaggccggatggcaggtgagccctgaactgtacggagatagcagccccaggttcttcacatattggacgaccgacgcataccaggagaccgggtgctacaacctgcactgctccggcttcgtccagacgaacaaccggatcgccattggagccgctatctcgccgacctcggtctacaacggccggcagttcgacatcagcctgctcatatggaaggacccacacccggggaactggtggctgcagctggggtcgacggggcagc

SEQ ID NO: 805 - DNA, 263 bp, Zea mays
  Clone ID: LIB3136-044-P1-K1-F5
acgatattcactatcaccaaacgcgtctgtacagtttggtccgccaaggtggcttcgggggctgagttcagcctctcccagatctggttcatctccggctccctcggccacgacctcaacaccgtggaggccggatggcaagtgagccctgaactgtacggagatagcagccccagggttcttacatattggacgaccgacgcataccaggagaccgggtgctacaacctgcactgcttcggcttcgctcagacgaacaaccg

SEQ ID NO: 806 - DNA, 442 bp, Zea mays
  Clone ID: LIB3136-044-P1-K1-F6
acggaagatattctcactgggttcaagatgcacgcacgaggctggcggtcgatctactgcgatgcctaagcggccggccttcaagggatcggctcccatcaatctctcagaccgtctgaaccaggtgctccggtgggctctcggttcagtggaaatccttttcagccggcattgccccctatggtacggctacggaggacgcctgaagttcttggagagattcgcctacatcaacaccaccatctacccgctcacgtccctcccgctcctcatttactgtatcctgcctgccatctgcctgctcacggggaagttcatcatcccagagatcagcaacttcgctagtatctggttcatctctctcttcatctcgatcttcgccacgggtatcctggagatgaggtggagcggcgtgggcatcgacgagtggtggaggaacgag

SEQ ID NO: 807 - DNA, 343 bp, Zea mays
  Clone ID: LIB3136-044-P1-K1-F7
cgagcacatcatgtcagccagacagtttctcctacaggccatcaccacaacacacagatgcttttcattgcaactcacacacattctcctctcccccgttgtgcaactcgctctccctcactttacccgccttgttgccatggttaaccttgctcttcctcttacgctccttctccttcttatcattttgttttacctttttattccatttttctttgtgcttcttctttctcttatttatctttgttttgtttatctttctttactttcttttttgcttattttttttctctttttttttttatattgtggcggtagtttttactttctttcttcttttttt

SEQ ID NO: 808 - DNA, 250 bp, Zea mays
  unsure (1)..(250): unsure at all n locations; Clone ID: LIB3136-044-P1-K1-F9
gcatggtgcactactgcactccgnatttnancacctctatacttatatcctactggcgtacgtggatcccntagtctccactcctacaaaatcctcttcttcnccaacttcgcgtccgccggcgtcggcatcctcaaccacaccgggcttcatttcgtacgtaacacactctatccatctcctgcctattcttcttgcactgntgatctcggagctctggacagctattcgcctatactaataatgcatt

SEQ ID NO: 809 - DNA, 287 bp, Zea mays
  Clone ID: LIB3136-044-P1-K1-G1
ccaggcggaccatctccggctgacgacgctgcagcagatgcacaagatcctgacgccgctgcaggcggccaggggcctcctggcgctcggcgactacttccagcgcctccgcacgctcagctcgatgtgggcggcgcgcccgcgggaggcggcggtcagctagattcctgtggcgtgtcttgccaaatttctctcttattggtttggctactctgttcttatgattctgcttttgatacgactaatacttaagttaggtggcatttttttattttctttttccccta

SEQ ID NO: 810 - DNA, 105 bp, Zea mays
  unsure (1)..(105): unsure at all n locations; Clone ID: LIB3136-044-P1-K1-G10
cacgcgtgcgggaaggtgcctgctaacgaggaacccancatgaanntantctttaatgtaggtttncctttaatagcgggtgctaactgtgaacaaccctgcatc

SEQ ID NO: 811 - DNA, 319 bp, Zea mays
  Clone ID: LIB3136-044-P1-K1-G2
ggtgctttcagatatttcaggctcttgcttacatgcatcagaggggctactttcatcgtgacctcgaacctgagaatctgttagttagcaaagatgtcataaagctagcagactttggtcttgcaagggaagtttcatcattgccgccatatacagaatatgtctcaactcgctggtatcgggcaccagaagtattgctccagtcatctgcttatgattctgcagttgatatgtgggcaatgggtgccataatggctgagtttgttacacttcatccttttttttcttggaaccaagtgaagctgtataggtttcacta

SEQ ID NO: 812 - DNA, 350 bp, Zea mays
  Clone ID: LIB3136-044-P1-K1-G3
ggaaaggtgaacggcaaaggttactacatttatgagaagggtgggaagccaaagccagatgctagtgttaagcatgttatcgaggagtaccgaaagcacgcaaacacaatgcctggtggaaagcctgttactttaacggatcaagatattttggagatgattttcttcccagttgtgaatgaggcatgcagggttatggatgaaaatgttgtaattcgagcttctgatcttgatattgcttctgttcttggaatgggctttcctaaatacaggggtggtcttgtcttctgggctgacactgttggagcaacctacatacattctaagctaagcaagtgggctgaaattta

SEQ ID NO: 813 - DNA, 289 bp, Zea mays
  Clone ID: LIB3136-044-P1-K1-G5
acggggtgcgacggacgcgtacggggacaccttggtaccaactactatatgtttttagaagatgctgcttaaccttggggcggggcattacataaacattgtccgaaagcactctaacacagtgtcgggtggtaagtctgaactaaacggatcaagatattgggagatgacattcttttcagtcgtgaatgagctgcactgtattgatgaaatttgtaattcgagcagtgatctgatatttgttatgtcttggaagggctttctaaaaacattgtggtctttctttttt

SEQ ID NO: 814 - DNA, 391 bp, Zea mays
  Clone ID: LIB3136-044-P1-K1-G7
gaaaaaccctcgaaaagcggcggcggcgcgacatggcggaggtcgaggctccagctgctggggttgcggcggcgacccctgaggtggcgacggtgaccgagggcggagccgctacggaggcgaagggtccgcataagctgcaccgccagtggaccttctggtacgacatccagtccaagcccaagcccggcgctgcgtggggcacctccctcaaaaaggcgtacaccttcgacaccgtcgaggagttttggggcttgtatgatcatgtttttcgtccaagcaagttgcctggaactgctgattttcacctattcaaggctggagtagagccaaaatgggaagacccagagtgtgcaaatggttggaaatggactgtcccatgcaacagaaa

SEQ ID NO: 815 - DNA, 313 bp, Zea mays
  Clone ID: LIB3136-044-P1-K1-H1
gacgccgatagtgatatatcacgctgcagtactattactactattacgtatttactccctttttgggaacgtaggattggattaggggctgcagttcgtggaggtttaattttccccacgaggtctagtttgggtactatagtaataactgagatcgaagtggattgagatgtattgaagagggatttgctctattagggatttaaacactcttaaatctctccaaaccacatccacacacgatccattgtggaaactgggttagctgtaaaaattaagactgccttcaacatgtgtctttaaacgctcctga

SEQ ID NO: 816 - DNA, 230 bp, Zea mays
  unsure (1)..(230): unsure at all n locations; Clone ID: LIB3136-044-P1-K1-H10
gcgctcttcctctcctttgctccgagctctgtctttccggtctgcttcctgcgacccgccgntgcagatcgacggtatcgtggcggcggagaaagccaccaggagctgcttcgaatgccgcgccaccaccacgcccatgtggcgcagcggcccnaccgggcccaggtcactttgcaacgcctgtggcatccacttccgaaaaaagaggaggcaagagcttggcctatacc

SEQ ID NO: 817 - DNA, 195 bp, Zea mays
  Clone ID: LIB3136-044-P1-K1-H2
gcgcgctggaaaacctgcctgttgaacagttcgttgacagaaatgttcctgacagagaaccgtgtaatgctggtgttttagaggatacaccatttacctggttcaagatcacaaaggcttaacagaattagctaataatgttaagagcgtaacttaatttgctgtacatctgtagcttatttattattggttatt

SEQ ID NO: 818 - DNA, 93 bp, Zea mays
  Clone ID: LIB3136-044-P1-K1-H4
gctgcctcggccggcacctacctcccccacttcgccgccggcgggtggagtcgggccggagcagccgctagctcgcctttgttaccccccccc

SEQ ID NO: 819 - DNA, 446 bp, Zea mays
  Clone ID: LIB3136-044-P1-K1-H5
ggcggcggcaccggcaggcggcggccctcgggcattgtcccagcgggagcaggacatccagatgatgctcgccgccgatgtccacctcggcaccaagaactgcgacttccaggtggagcgctacgtgtacaagcgccgcactgatggtatctacattattaaccttggaaagacctgggacaagcttcagttggccgccagggtcatcgttgccattgagaatccgcaggacattatcgtgcagtctgctaggccctatggccagagggctgtcctcaagtttgcgcagtacactggtgcccatgccattgctggcaggcacactcctggtacattcaccaaccagttgcaaaccttcttcagtgagccacgccttcttattctgactgacccgaggactgatcatcagcccattaaggagtttgcccttggaacatttccaccat

SEQ ID NO: 820 - DNA, 387 bp, Zea mays
  Clone ID: LIB3136-044-P1-K1-H6
ccctgcaccctgtagctatattgttgttaccactatttatgagtccactggcggtctggcttcatttcacaggaagcgcccttctactgcaaaggattcagctttattgtggcgagcttcttcttggcaatctccgttctgcctcgcttggatgcttaacccatgaatgaaggacaagggcacaaaagctgccgcttcagacagcgctgatgaggaagcagcgcaagcaccactactggcataatggaacagaccatgactccaggaaactgagctataaagctcatcttgagtgtgcgcaaatatgtaggatatgttaattagagtgccaacaacatatgtctttgcctgtacctgtaccctgagtatagtgtttggtcattcccc

SEQ ID NO: 821 - DNA, 203 bp, Zea mays
  Clone ID: LIB3136-044-P1-K1-H7
aatacatttgcattgtattgtatgcacaggttgtgctcaccatcattatttgggcgggccgtgtagagaatcttgcgcaaactcttctttctttaatagaaatgcacactatcttgtgccgttcatttcaaaaaaaggacttgctgatgcaatgttggatgatgcatagtcaagctggggcattccctcctggtaagaaaatc

SEQ ID NO: 822 - DNA, 391 bp, Zea mays
  unsure (1)..(391): unsure at all n locations; Clone ID: LIB3136-045-Q1-K1-A10
tcgcggacgcgtggggttcagtggcttcagtactggcaaggatggcttatctgagtaccgcagggatggtgaatatgttctgacttacgaggacaaggatggagattggatgcttgttggcgatgtaccatgggagatgttcgctgactcttgccgcaggctcaggatcatgaaaggatcagatgcaattgtacttgctccaagggcagctgataagtccaagaatcgcaactagaatggttgcttcttacagtccagagcaagagggaganatccagtgactgtatggatctttgtggaagccggaaaacgtctaacagttttaagaagaattttgccttatggtctgtaccacatgtttttgctgctacgcaagtaaagaactccacgt

SEQ ID NO: 823 - DNA, 313 bp, Zea mays
  unsure (1)..(313): unsure at all n locations; Clone ID: LIB3136-045-Q1-K1-A11
cgctagaaccgtcaatgggttctataggacnacccatagtctcatttatccncgagcggggcctacgcttgctgttcttcccgctcccgtaccagggccatattnaccccatgttccaactcgccggccttctacacttgacgcgcnnctccgtcaccgtcttccacaccgacttaaacgctccctacaagtcccgccaccctgcctacgacttcgtccccgttctcagccgcgactgcttgcctaatggcagctcggatgccttgcaagnaaccgtggaacgcattctctccgtgaaccgcgcctgcgatgc

SEQ ID NO: 824 - DNA, 390 bp, Zea mays
  Clone ID: LIB3136-045-Q1-K1-A2
atcttcctagttcttcacaagtttttcactttccggtttccgggggttatgtggtggtttttggcacggacggactttttgacaatctatacaataatgagataagtggtgttatcgtttaatcgcttatggttggacttgaaccttaagttgcgtcacaaaaaattgctgacctggctcgacaaagagccacagacaaaaataggcagtcaccatttgcatctgccgtccaagaagctgtgtaccggtactactgtgggaagctcgactacataactatttgtggtgtcttatgtgaaaactgcttgatttcgagcctttttttttattatatgtctttgatcctaactaaattgcacaatgtgtatttaatgtgtgaaattttcttat

SEQ ID NO: 825 - DNA, 432 bp, Zea mays
  Clone ID: LIB3136-045-Q1-K1-A3
ctgaaactgttgttgaagtgaagcttgctcaagaaattgttgttcctagtccaggtggtagcatagaagctaataatacttctaccatcagcgaagtatacaaagatacccagtctcgtgcatctggtgaagcatgcaatgatggtcagtctcatggtgatgaaaatatgaaacttggtgaagcttacactgaactgcagctggcaccttcctctggtgaggaggccatgacatgtatgtgtagtgagctgcccagccaggaagtggaagcgtccaagcagtgacccttttggagaataatgaagaaacgaaaaatgaagctgctgctcaaggatcagtaaatgaggattctgctcctcgtgctgaaaatgcaaagattgatgaagctgacacagaacaggaactgcttccatctggtgaggccacggtaga

SEQ ID NO: 826 - DNA, 423 bp, Zea mays
  Clone ID: LIB3136-045-Q1-K1-A4
ctgaaactggtggggaagggaagctcgctcaagaaacaggtgtttctagtccaggaggtagcatagaacctaataatacttataccatcagcgaagtgtacaaagatgcccagtctcgtgcatttggtgaagcatgcaatgatggtcagtctcatggtgatgaaaatatgaaacttggtgaagcttacactgaactgcagctggcaccttcctctggtgaggaggccatgacatgtatgtgtagtgagctgcccagccaggatgtggaggctacaagcagtgaccctatggagaataatgaagaaacgaaaaatgaagctgctgctcaaggatcagtaaatgaggattctgctactcgagctgaaaatgcaaagattgatgaagctgacacacaacaggaactgctttcatttggtgaggcca

SEQ ID NO: 827 - DNA, 330 bp, Zea mays
  Clone ID: LIB3136-045-Q1-K1-A5
gacacacgtgtggccggtcgatacagaacctgagcataccctagtgaggtagtctggttctacggacacttaccttcatcgaaacgggctttgttccagcatctaggatacagatcagaaggcgctggtcactcgcgtgcagaaattcttgcggaccatgctaggaacacaaggcgctctcatcatcccgttgacaattcacatcgagcttggtttcaagggcctaacggcgcaatgtattgaaattgttgaccccattgtctgctgcacctttggtttggctagctagattagtgctatatgagctatgctatgcacgggtatgttaga

SEQ ID NO: 828 - DNA, 430 bp, Zea mays
  Clone ID: LIB3136-045-Q1-K1-A6
ctgcttctaggcacgcttctgaattcggagttgccagcattcgctcgaggtgccggaccagatctcaccatcatgcaggctagcgatagattcaacataaactctcagcttgagcatcttcaagccaaatatgttggtacagggcatgctgatttgtctagatttgaatgggctgtaaacatccagagagacagctatgcctcttatattgggcactatccaatgctagcatattttgccattgctgagaatgaatctatcggaagagaacgttacaatttcatgcagaaaatgctgcttccttgtggtctccctcctgagagagatgaagattgaggagctgttgcatagtttcagtgtttccaatgaccatttatgagattgtaacctctatggtactatgtgccatttgtgttaaagctcgtatgcc

SEQ ID NO: 829 - DNA, 284 bp, Zea mays
  Clone ID: LIB3136-045-Q1-K1-A7
gtcaacacgcgtgcggggatatgccacaaaattctatgaacctttttacagcggatactcgaattatccatttaggccttcatacgtggtaccatgcaggagtcctctatctaaatcccaaaatagaatggttgagcatcgagtgcgagctatccgatctgaagtattcatttgtgtttcaataatgaataacaataacgttggcgttcctcagcttttgatgcttgaattatgctctctgatatgcttctctatattttctaacaaaagggcaaaacatattg

SEQ ID NO: 830 - DNA, 370 bp, Zea mays
  Clone ID: LIB3136-045-Q1-K1-A9
gaactcatcattcaggcaggaccttaagtttagatagcaaatgtgccatcgatcaagaacttaagaatgccatattgaagattcaagactttgttaagttacttgatcaagaagtctccaagtttcaaggccagtcatctgattataatgggctaagtgagaaaacacaacagttctctgcattggttgacaaagttctgtcaaacgatgatgtcctaaatgatattgtcatggcactgtctgttatcttgtcagaaactagccagattaagttgacactgttgagagacaacaacaatgaagcagaaagtaataacttagattgtgttgataaagtgactctacttgaaaataaggtgcagcctgagcc

SEQ ID NO: 831 - DNA, 426 bp, Zea mays
  Clone ID: LIB3136-045-Q1-K1-B1
gctagctctagcaaagcacttgccatctaccgaccgccgcattccaaacagcccgacgagctagcagagcggcaggcacctccctcctcaaggaacatggcccgcatgcagcagttggcagtggcgacggcggccgtggtggccttggtgctgctggcggcggcgacctcggaggcggccatcagctgcgggcaggtggcgtcggccatcgcgccctgcatctcctacgcgcgcggccagggctcggggccctccgccggctgctgcagcggcgtcaggagcctcaacaacgccgtccgcaccaccgccgaccgccgcgccgcctgtaactgcctcaagaacgccgccgccggcgtcagcggcctcaacgccggcaacgccgtcagcatccccttcaagggcggcggtagcaatccctacaccatt

SEQ ID NO: 832 - DNA, 450 bp, Zea mays
  Clone ID: LIB3136-045-Q1-K1-B10
acggcgagtacgagacaaaggccgtgagtgagatccaaagctccggagccttcagcgtcccactcgccgccgacctccacggcgccgactgccacgcgcagctccacagcgccgccaataacgcgccttgccctgggcaggagccgtccaggatcgcgcccatgtcaggcggcaccttcgtcgccgtgcctggcaagatgcactacccgtccgcggagtgcgcgtccgcgtttctctgctccccgatcaagaagcacttgttagatcacttccacaaggcacccctgccggtgccggagtaccacccggtgcctgaccacagcaagcccgcggtgccggagtaccacccggtgcctgagcacagcaagccggcgccggagtaccaccctcccacgccggaataccaccctcccactccagtgtacgggcagccaaagccaactccgatct

SEQ ID NO: 833 - DNA, 387 bp, Zea mays
  Clone ID: LIB3136-045-Q1-K1-B2
cggacgcgtgggcggcgcgggcgccgccgccgcgctgaggaagctcgtgggcgagctgcggcggaggcgggatgctgctgcccttgccacggccgtagcaccgccggaataaaaccagccagggatcctacgtagcgcgccaccatgcatagctgcctagtcagcttccattactttgatgctaggtggtttatttattgagtcgtgacggtgcaatgcgaagtgtcgtgtgtcaggtgtttcccttctcatttagtttgggttcgtgtttttgtgtcgtgctagtacgtacggatcccgtaggctaggcagccaataagccaataatggacgctgattacccaggcacaacaatactgttatatgacagagctcgcccattgcatg

SEQ ID NO: 834 - DNA, 421 bp, Zea mays
  unsure (1)..(421): unsure at all n locations; Clone ID: LIB3136-045-Q1-K1-B3
agctaccttgctcaagagcttatttccattgatcgactatctcctcaagcatggtgtgcagtgggcaattgctttgccttgagaaaagatcatgagactgctttgaagaattttcaacgttcggtacagcttgactcaagatttgcatatgctcacactctatgtggtcatgagtattctgcactggaggattatgagaatagtatcaaattctacagatgtgcactgcaggtagatgaaaggcactacaatgcttggtatggccttggggtggtgtatcttcgccaggaaaagtttgagtttgctgagcatcatttcagaagggcatttcagataaatcctcgctcttctgttctcatgtgctatcttgggatggccttgcattctcttaagaggaatgaagaggcactgganatgatgg

SEQ ID NO: 835 - DNA, 274 bp, Zea mays
  Clone ID: LIB3136-045-Q1-K1-B4
agctaccttgctcaaaagctaatttccattgatccactattttctcaaacagggattcgcagggggcaattgctttacctttataaaaattcataatatgtctatttataatttctaacgtattacccattcttgactaacgatttacatatgcacacactctatctggtcattaatattttgaaatggatgattatgagaataatatcaaattttacagatgctcacttaaggtacatcaaaggcactacaattctttgtatggccttatttg

SEQ ID NO: 836 - DNA, 401 bp, Zea mays
  Clone ID: LIB3136-045-Q1-K1-B5
cggccgcgacgacgccatgacggccaagggcggcgccacgccgtcccccggcggcgcgggccccgcggcggggaacggccgcctcttcaccgtcggactggtcaccgcctggtactcctccaacatcggcgtgctcctgctcaacaagtacctcctcagcaactacggcttcaagtaccccattttcctcaccatgtgccacatgttcgcctgcgccctgctctcctacgccgccatcgcctggctgcgcgtcgagcccatgcagctcgtgcgctcccgcgtccagctcgccaagatcgccgagctcagcctcgtcttctgcggctccgtcgtctgcggcaacgtatcgctgcgctaccttcccgtcttctttaaccaagcggtcggcgccaccacgcctt

SEQ ID NO: 837 - DNA, 415 bp, Zea mays
  Clone ID: LIB3136-045-Q1-K1-B7
ccgactccgcctgatccatccaagacagggatcgccatgttggactcggaggagcaccactgggaatcgaaggccgacgctggggcgtccaagacctacccgcagcaggctggcaccgtccgtaagaacggcttcatcgtcatcaagaaccgtccctgcaaggttgtggaggtttctacctccaagactggtaagcatggccacgccaaatgccactttgtcgccatagacatattcaatgggaaaaagcttgaagatattgttccttcatcacacaactgtgacattccgcatgtgaaccgtactgagtatcagctgattgatatttctgaggatggatttgtgagccttcttactttagatggcaacactaaggatgatcttagactcccaactgatgagactcttgtggccc

SEQ ID NO: 838 - DNA, 400 bp, Zea mays
  Clone ID: LIB3136-045-Q1-K1-B8
gggattcgaagggcatggtgtcatcccggacatagtcaccatggccaagggtatcgggaatggcatacccataggagctgtagtaacgacgccagagatcgctcaggtgttgacccgcagaagctacttcaatacctttggtggtaaccctgtcagcactgcaggcgggcatgcggtgctcaaagtgctggagaaggagaagctccaggagaatgcgtttgttgtgggctcctacctaaaggaacagcttaacaatctgaaagacaagcatgagatcatcggtgacgttaggggcaaaggcttccttcttggagttgagctggtgacagaccatgaaaagaaaaccccagccaaagctgacatctcacgtgtcatgaaccatatgaaagatatgggagtg

SEQ ID NO: 839 - DNA, 297 bp, Zea mays
  unsure (1)..(297): unsure at all n locations; Clone ID: LIB3136-045-Q1-K1-B9
cgtcgtgcccgtgggaccgccactgtggtctggtggtctcaacatcnnccgcccgccactcaggtttngcctccccgagtgggttcttccggcgtccgctgggggccgggggacgggggtcggtgccgcgactcagcttcggtcgtgctctgcaggagggtggttcaacgacttggaatgcagtcccggcttggcgcccgggcccgttgccgcctcttccacgggtcacctgcattcaagttcaaggctctacgcggctcgacggacgaggttgcacctcggcaaacaaggtgacca

SEQ ID NO: 840 - DNA, 281 bp, Zea mays
  Clone ID: LIB3136-045-Q1-K1-C1
gcctggtgcactggacaaccgggttcgtatgatctaccagcacgggctgacaaggaggatcggcgggcaggtgctcctcctcctacacccttacaggacactgctcgaccccgccctttgaacgggctgattgatgttaaccaacctcaccagctggtaggggttggttctaacttacaagaccgcaaactttgtgctcccaaaattccattttgagggcttgacatctttcatgggaaaaagctttgagatattgttcctttattacacaactgtgacat

SEQ ID NO: 841 - DNA, 441 bp, Zea mays
  unsure (1)..(441): unsure at all n locations; Clone ID: LIB3136-045-Q1-K1-C10
gtgaggccgatcaaatctgcggcgaatccccaaccctagcagcattttgcggccggaccgggacgggctgtatacggctccagcacgcaacgcatgcaggtttggccgtgcgaggcgcgagggctagacaggtgtctcggcgcccgncatccagttccagggctgcgtgggctcgaccagagcgagtctgcaatccgcccgtccttgtccccgtcggcggccgttcaccagtgtcaggtgctgatgtgacaacatttctgaaagaagtnagcaagcactaattatatggtgagtcatgtcaaaggcacgtaatgctgtatttgccactggattgctgctctttgctggtgctggcttatcatttccgttccttttcgtgaaatcaaagaacaagcctattattgattcgacaaaacctctggcaccacatgctacttttcg

SEQ ID NO: 842 - DNA, 457 bp, Zea mays
  Clone ID: LIB3136-045-Q1-K1-C11
gtgaggccgatcaaatcggcggcgaatccccaaccctagcagcagtgggcggccggaccgggacgggcggtagacggctccagcacgcaacgctgacaggtttggccgtgcgaggcgcgagggctagacaggtgtcgcggcgccaggcatccagttccagggctgcgtgggctcgaccagagcgagtctgcaatccgcccgtccttgtccccgtcggcggccgttcaccagtgtcaggtgcggaggtgacaacatttctgaaagaagtaagcaagcactagttatatggtgagtcatgtcaaaggcacgtaatgctgtagttgccactggattgctgctcttcgctggtgctggcttatcatttccgttccttttcgtgaaatcaaagaacaagcctattattgattcgacaaaacctctgccaccacaggctacttttcgaggaccatacgtgaat

SEQ ID NO: 843 - DNA, 251 bp, Zea mays
  Clone ID: LIB3136-045-Q1-K1-C12
ctcttccgcggtcttctcgcgctttcactcccaacgagatccatcacccccgacctgtgtaagcttcccttgacgtcgtcgtcgtcatccatggagagcaaggacggtacccacgatcccgccacgacggccgcgccaccggcctgcgcgccgtagcccgtgatgccttccgcggagacggcgcgtgtggggcacgcggcagatgggcccgccggcggcccccggtgcgctctccggagaaccaatatgct

SEQ ID NO: 844 - DNA, 243 bp, Zea mays
  Clone ID: LIB3136-045-Q1-K1-C2
ataactcataaagtgagaaggttcaagataattcttccaactgcaacttttgccttaggcattacattcgcccaatatatcacatgcatatgacaagacgctacaggtgaagaagtaatctttctttatacgattactacattgcattctcatctaggatatcctgagctcgtgataaagatgtatccttaatggagaatgtcacatcatttgcgcgagatgaaacgtggggattatttgtct

SEQ ID NO: 845 - DNA, 431 bp, Zea mays
  unsure (1)..(431): unsure at all n locations; Clone ID: LIB3136-045-Q1-K1-C3
atgaatagcatgaacaaatcagcttatgcatttatatgcactcattcacccagtaaaccaggtctcatttttgtgtcatcacgtcgacagacaagacttacagctcttgatatcattcagcttgcagcatcagatgaaaaaccaaggcagttcctgagcattgaagacaactccctagacatggttctttcacaggtttctgacagtaatttgaggcatactctgcaatttggcataggtctgcatcatgctggtttaaatgacagagacagatccttggttgaggagcttttttcaaacaataagattcacgtgctggtatgtaccancacattggcgtggggtgtcaatctttcagctcacctggtcataatcaagggcactgaatactatgatgggaaaacaaaaagatacatagattatgatatcaa

SEQ ID NO: 846 - DNA, 425 bp, Zea mays
  Clone ID: LIB3136-045-Q1-K1-C5
tccaagcaacaaacttggcattcttgcctgttcttaattattgccaggacaggagaaacaaagatgaggcctcagctgatactcgtcggcactctggctgttctcgccatcctcgcagctctcggcgaaggctcgtcgtcctggccctgctgcaacaactgcggtgcttgcaacaagaagcagccgccggagtgccagtgcaatgacgtgtcggtcaacgggtgccatccggagtgcatgaactgcgtcaaggtcggtgcaggaattcgtcccggcatgggccatggccccgtcgtcacctaccgctgtgacgacgttctcacaaacttctgccagagcagctgcccggaggcgccggcgccataggcgggtggccggtgtcttcttctgacgtacggcatgggacgccaagtcgagtttgcttc

SEQ ID NO: 847 - DNA, 431 bp, Zea mays
  Clone ID: LIB3136-045-Q1-K1-C6
caactcacaacccgagccccccaaacccgaagcagcaggagctcccctgaccttgctccgcctccgatcaaggaaaaggaagatgagctactacggccagcagccccccgtcggcgtcccgccgcagcaaggctacccggggaaggacggctacccgccagcggggtacccgccggccggctaccccccgccggcgcagggctacccgccgcagggctacccgcagcagggttacccacagcagggctacccgccgcagtacgcgcagccgcctccacagcagcagcagagcagcgggccttccttcatggaaggatgcttggctgccctctgctgctgctgcctcctggacgcctgcttctgacggatccatccgtgccggggttcaacacggctgcaagtgaagcaacaagcttacggaagaactggaa

SEQ ID NO: 848 - DNA, 430 bp, Zea mays
  Clone ID: LIB3136-045-Q1-K1-C7
cggacgcgtgggttccgccgcgggccttctcctttccgctcgcctcttctccacctgtctgtccgctctactgtatagaggaaggccgaaggccgtttccatttctcgaagccgcggcagcacgcgtcctgcttgcctcccggtcccggatcttgcccaccccgcaaccgcaacgcgccgccacctccgccaagcaagggcagcttgatcatattcaagatggggaaggacaaagaagctgccaatctgaaggaggaggagacagagatcaaggccaagtttgttgagaaggaagatgccaaagactcaggtggtggcgcagggtctgtgggaggaaagagtaaagaggggaagaaagacagagagggaaaggaggagaagtcggtggagcatgaatatggcgaaggcgatgagaaggcgatcaagaaga

SEQ ID NO: 849 - DNA, 433 bp, Zea mays
  unsure (1)..(433): unsure at all n locations; Clone ID: LIB3136-045-Q1-K1-C8
tgcatgcatggtgcacgactgcacgccgcaggtgagcacctcggcgcggagcccgtgctgccgtacctgaggccggagctcgacggcgacaagatgctcgtcggcgccaacttcgcgtccgccggcgtcggcatcctcaacgacaccggaatccagttcgtacgtaacacacgcgatccatcgccgccctatcctgcttgcactggtgagctcggagctctggtacagctaagcgcctaaactaataatgcatctgcaccgctgtccgctgcaggccaacatcatccatatctccaagcagctgcgctacttcgagcagtaccagaggcgccttggccgcgctgatcggcccggaggcggcgtcccgcgtggtgcgcggcgcgctggtgctcatcacgctgngcgggaacgacttcgtgaacaactactacct

SEQ ID NO: 850 - DNA, 131 bp, Zea mays
  unsure (1)..(131): unsure at all n locations; Clone ID: LIB3136-045-Q1-K1-C9
ctcacgactgtcgtatatctaggcatnacacttgccaaagtgcatgtctatcaatgaggacgggtagacgactatggagtgtctccccatgccccagatcgctcggncgctggcgctgctgatgcacgaca

SEQ ID NO: 851 - DNA, 316 bp, Zea mays
  unsure (1)..(316): unsure at all n locations; Clone ID: LIB3136-045-Q1-K1-D1
tggcgcccctgggccgcccggccgtggtggtctacatgctcatcatcgtcatgtctncaaccacgcacatcacgcgcggtcatttcgtcaacgtccaggttgtcgtcgcctccctcggcaacaacggcatccaggtcttcgcctacagcatcatgctgggtatgggcagcgcggtggagacgctgagcgggcaagcgttcagggccaggaagtacgagatgctgggcgtgtacctgcagcgctcgacggcgctgctcacgggcaccgggatgccccttgccgccgtgtacgcgctgtcggagccgctgctgctgct

SEQ ID NO: 852 - DNA, 437 bp, Zea mays
  unsure (1)..(437): unsure at all n locations; Clone ID: LIB3136-045-Q1-K1-D10
gtttttattcgtttgtcacataagcagngtttgtcggtcggccagcgacaatgagcggcggtgtgttcgtcctggccgctgccttcagcgtgcagcncaccacagccgccgtgtcctcgaggcccgtcctgactccgctgggnactagccgccctgctgccggcgacctgtccgtgtacttccacgcggactcgtgcccgcagctggagacgatcgtgcggtccagcgtggacgcggctgctccagcagaacgtccgtctgacggcggntctcctccgcctcttgttccacgactgcttcccgcagggctgcgactcgtccatcctcctggacaactgctagcgcggccttccgcccaacgtggggctgcagcaggaggccccgcagctggtggaggacatccncngtaaggtgcacgcggcgtgcgggcccaccgt

SEQ ID NO: 853 - DNA, 221 bp, Zea mays
  Clone ID: LIB3136-045-Q1-K1-D11
gtttttatacgtatgtcacataagcagcggtggtctaaacgccaaccacaaccagcgggcgagagttcgagctgggggctaaatttagactgctgcccaacccacacccagaatcatcaaagcccgagctgacttctgtgacggccagccgggatggtaactgagacgtacactggtacttatactcatactgcacctcatatatagagactagggtacga

SEQ ID NO: 854 - DNA, 443 bp, Zea mays
  Clone ID: LIB3136-045-Q1-K1-D12
cccgaaccatccaagccagaccctcgaccagattctaaaccccaacccgaaccatccaagccagacctccagccagggcccaaacctacactagagccaaaaccccaaccagaaccatcaaagccggagccaccatttggcacgggcgttgtggaagggaactgaggagcacaatggaaccgatcatcatcgtgcacgtcatctatagctttttggctatgactgataagtaataccctttgtgtaaaatcaagtgagctctctttttatatagggtacggtgtgtgtattgtgtgtagtactatgtttggacgatgtgtgtgtatccacctttaatttcccgtgtgtttccatcagcatgcatccatgatctatgtatatgccttgctaagtttgtattatcaatgaataaaagaagcatgccttgtatgtcttgtttcgat

SEQ ID NO: 855 - DNA, 382 bp, Zea mays
  Clone ID: LIB3136-045-Q1-K1-D2
ttatgccccaaacgaagtgttacccgtccgcttagggctgacgtgtgcgcttagtgactctggttagaacctaggcaattaagcagtttgaggttctcatatatctctttggagatgcatccacatctgactttacataggcatcctatgtgtgccgagattattgaagaatttcagacgagccatctggatcaccctgtcaagaagttcttcgctgagtgcgcacaccttagaatcaagctacatcgctgcttccgacaggagaaagctctgaagagaatggcaaacatcgaagagagtactagatgcaaagaccagtgcacggcttacaactggtcaatcgcagagaaaaactacgaatagtagcttggaagggaggaca

SEQ ID NO: 856 - DNA, 331 bp, Zea mays
  Clone ID: LIB3136-045-Q1-K1-D3
cgcgtccgaggcggaccatcattaaggccgacttcccgccctactgcaccgactttcataaccacataggggctttaagggtctgcaactgcaggatacccaccgactttattgtcttccgcctcggcattaaggagcttttgccgccctacctctcctccgagccgttcgacaagcacgacctcttcaccggcgtcagcttctcgtccggcggcacgggctttgacccgtttaccccgcagattgccttcgtgaactcacttccggaccagctcaccattgttcacgactacctgtgcaaaggtgcccgaacccctccgggaccccaggg

SEQ ID NO: 857 - DNA, 413 bp, Zea mays
  Clone ID: LIB3136-045-Q1-K1-D4
ctgatgggaggcggacagagatcacatgtactgcttgtggaggacacttggggcacatattcaaaggggaggggtttaagacgcctaccaacgagcgacactgtgttaacagcatctcgcttaagttcaatccgtcccccgaggaagcctgacggcagatgaactcccaatctgtaactcaacaacagaataaatttggactttgtttgttgctttcacattgtgtagagagctatgagatcgagtttgtcattcctcggatcatttcgaatatgatgtaaaaaatccaatcacaagtgctggtctttgttgataaatcaatgtacctcagttttagatgaaaaaaaaaaaaataaaaaaaaataattataaaaaatattatttaaataattattttttaaaaatatataaat

SEQ ID NO: 858 - DNA, 347 bp, Zea mays
  Clone ID: LIB3136-045-Q1-K1-D5
gccgtggctccggcgcgtggcgctcgcgacggctctggagctgcggctgctggcgcccctggccgcgccggccgtggtggtctacatgctcatcatcgtcatgtcgtcgaccacgcagatcgtgtgcggccagctcggcaacgtccagctcgccgccgcctccctcggcaacaacggcatccaggtcttcgcctacggcatcatgctgggtatgggcagcgcggtggagacgctgtgcgggcaggcgtacggcgccgagaagtacgagatgctgggcgtgtacctgcagcgctcgacggtgctgctcacggccaccggggtgccgctcgccgccgtgtacgcgctgt

SEQ ID NO: 859 - DNA, 402 bp, Zea mays
  Clone ID: LIB3136-045-Q1-K1-D6
gttccacacgcccctgggctctggcgccaaccaagctcaggtcatagacaacaagacgccgattggcatcggtgccaccgtagttaacaactgggcagtgtacgacgggccagggccgaacgcaaagctggttgcccgtgcacagggcttgcatatccaagccggcaactgggtcaactccttcagcctagtgttcgtggatcaaaggttcagtgggtccacgcttgaagtgaccgggatagtagttgaatccggggagtgggctattgtagggggcaccggtcagtttgtcatggcaaacggtgtcatctccaagaagttccatgagcagagaagcgaaaggaacatcatacagctcaccatccatgctttctgtccggtgctcggaccgacaaaacgctt

SEQ ID NO: 860 - DNA, 406 bp, Zea mays
  unsure (1)..(406): unsure at all n locations; Clone ID: LIB3136-045-Q1-K1-D7
atccgcaccatcatcaaggccgacttcccgccctacggcaccgacttccagaaccacagagccacgggaaggttctgcaacggcaggatacccaccgacttcatcgcctcccgcctcggcatcaaggagcttctgccgccctacctctcctccgagccgctcgacaagcacgacctcgtcaccggcgtcagcttcgcgtccggcggcacgggcttcgacccgctcacgccgcagctcgcctccgtgatctcgctcccggaccagctcaccatgttccacgactacctgggcaaggtgcgcgacgccgccggggacgccagggtgtcggatatcctgtcccggggcgtcttcgccatctgcgcccgcagcgacgacgtggncaacacctacttcaccctgcgagcgc

SEQ ID NO: 861 - DNA, 412 bp, Zea mays
  unsure (1)..(412): unsure at all n locations; Clone ID: LIB3136-045-Q1-K1-E10
gcagaaccttgccctcaacattgcanagaatgggttccccatctctgtgtacaacaggacggcctccaaggtggacgagaccgtgcatcgtgccaaggcagaaggaaaccttcccgtctacggcttccatgaccccgcgtcctttgngaagtccattcagaagccacgggtggtgatcatgctcgtcaaggccggcgcgccagtttaccagaccatcgtgactctcgcagctcacttggagcagggcgactgcatcatcgatggggggaacgagtggtacgagaacacggagaggatggagaaggccatggaggagcgcggcctcctgtatcttggcatgggtgtctctggaggagaggagggtgcccgcaacggcccgtccttgatgcccggagggctcttcgacgcttac

SEQ ID NO: 862 - DNA, 442 bp, Zea mays
  unsure (1)..(442): unsure at all n locations; Clone ID: LIB3136-045-Q1-K1-E11
ggctgctgctgagtatatggtatctgcgggccatcgtgctgtccatgcgagcggagagcatgcgtggcagctgtgcttcgggtgatgcccctgaccagagtagctgccgatgcattcggtgtgttgacgatcggactgttggcgctgcttgccgctctgggcctcttctgcatcttccaatcggtctacttcaggtgtcagatccggagaggaccctccttcctcccgctaggctactttaacggcccatgggtgacccgcgtcgctctggttctgatcaccatctggtggggagtaggcgaggtagcgagactgagcttcttgaagcaaaagctgttctccagcttgacatggcagaggaacatatgcgatgcgtacatactttccaacctagggttcgcggnncccgggatcttcttcgcattcgcttttctgctccatg

SEQ ID NO: 863 - DNA, 431 bp, Zea mays
  Clone ID: LIB3136-045-Q1-K1-E3
gctgataggctccagactggaatgaggggtgcctttggcaagcctcagggcacctgtgctagggtggacattggtcaggtcctcctttctgttcgatgcaaggacaacaatgctgcacatgccagtgaagctctgcgtcgcgccaagttcaagttccctggccgccaaaagattattgagagcagaaagtggggcttcaccaagttcagccgtgccgactacctgaagtacaagagtgagggtagaattgttcctgatggtgtcaacgcaaagctgctcggtaaccatggaagacttgagaagcgtgctcctgggaaggctttcctcgaggccgttgcttaagtccaatctacagttggaatgcgaatccagacgttttggtttagcctatcttattttgctttgtgcaacatgaattttaagtgtatggg

SEQ ID NO: 864 - DNA, 437 bp, Zea mays
  Clone ID: LIB3136-045-Q1-K1-E4
ggccggccgaggcgtacggctgatatgctccagactgttttgaggggtttctatggcaagcctcatggcaccttttctggggtggacattgggcaggtcctcctttcttttctatgcaaggacaacaatgcttcacatgccattgaagctctgcgtcgcgccatgttcaagttccttgtcctcctaaagattattgtgagcagaaagtggtgcttcaccaagttcattcgttcctactaccttaattacaagagtgatggtagaattgttcctgatggtgttaactcatagctgctctttaaccatgtaatactttatattcgtgctcctgggaaggcttttctttaggccgtttcttatatctaatctactttttgaatgttattacatactttttggtttatcctatcttttatgctatgtgcaacatttatttt

SEQ ID NO: 865 - DNA, 427 bp, Zea mays
  Clone ID: LIB3136-045-Q1-K1-E5
cggacgcgtgggaagaaagggaagggtcgacgaaaggaccatcattcaggaagctccgtgatggtgaatcccaggacgaagaacctcaacaatcaggatgcggtaccatcctccgatacatcaaaaccagtacaaaatgttcttaggaaaagagttgatcctgaaactgcaaagtactttatggagatctcaaacctctttgataacaaggagattgattttgaagagcgctcaactatatgcgctaatgccttagaagaaactagagggaaagagcatgaacttgccactgatgctgttataagccacaccttgcaggttcttatagaaggctgtgagttagagcagttatgcacattcctacgcaattgtatcgactattttttggtcattgccgtggacaaaaatgggtcgcatgtggctgaag

SEQ ID NO: 866 - DNA, 411 bp, Zea mays
  Clone ID: LIB3136-045-Q1-K1-E6
gccgcagccgcagcccaagatatcgaaggagtccaagctatagcagaagcccgcgaggtcgttctcctaggaggcgaagttacagcaggtcgccactgggatctcctgcacggagtctcagcaggtcaccgccgctgccgccgcctcctcccagaaataacagcaggtcaccacctggagcccgagaagtgagcaggtcgccgccgccacctcctcccagaaataacagcaggtcaccaccggcagcccgagacgtgagcaggtcaccaccggcagcccgagacgtgagcaggtcgccaccaccacctcctgatgccagaagaagctatagtggatccccaggacagcagccacaacgcgacgagtccccatatgccaatgacgcctgagattctcttagcttgccccaga

SEQ ID NO: 867 - DNA, 438 bp, Zea mays
  Clone ID: LIB3136-045-Q1-K1-E7
ggacaagattgtccatctagtgatgacaagctatctcactcccagaagagtgggtatgaacacaattttgccggtccagtccatctaccgaattttgcaatgatgccagccgctcaacctgctgtcagtcagagtgagaagaagttaagtgaccaccagcaccaccagcaacagcagcagccacaagtcagccgaggccagggtgtgaggattgatcttgcctcttctcagccttttgtgatgccctttggctccattggtcctcctggatctaccccaagtggtcttgacttttcggcattggcgcagaaccatgcagttttccagagccatcaagatgcagcaaggcatggttatccccagcttaattttgctgcaactcaacctgtgcaatccacgcaacagaagctccaacaccaaatgactggagaaacaaaa

SEQ ID NO: 868 - DNA, 430 bp, Zea mays
  Clone ID: LIB3136-045-Q1-K1-E8
gggtgcccgggcggtagataggataggtcattaactacggcacgaccgccgacgtagcagagggatctgtgggcctcccgtaccgagacccccctaccctttcgtcgacgactaggcttgcggcgaccgcccttggcttcgccgtcggcgagcatcaccagggactgacgattggcgggggagcgaatgcggagatgggctgatcagaactgcgacaaggtccggttttctctctaaaccgcggtctctggaggtgggtttgctttttccgtagtcacagatggacgacgactacggcagcctgggcattctgaactggggcttctatgacaccgtgaaaagcagcctcggcctgcagctcatgtcgcccatgccacctgatcggtacacgaaaccacttgttccgagagctggtttcttgcagtagcat

SEQ ID NO: 869 - DNA, 363 bp, Zea mays
  unsure (1)..(363): unsure at all n locations; Clone ID: LIB3136-045-Q1-K1-E9
cggtcgacgcacgcgtcggtccaagttcatcgtacgctcgcaaccccgtcctcttgtctagctatccgggaacgcgtcaaagtttaacggcccatcggaccacatctacgtgnnctttcctaatgaggcaaagcccggggtgaagacaatcaggaacntcttctggaagatgaagaacgtgaacgtctttgccggcatactcttcttgcagcaggcgctcagcgccttcgcacgcatctccttncatgaggtcttccagaagtaccacctttaggtcttccaggnagctgagcttcttgtcaacattaatgaccatgtcctagtgccagatcatgtgctcctgacacctgaagacaagaatac

SEQ ID NO: 870 - DNA, 274 bp, Zea mays
  Clone ID: LIB3136-045-Q1-K1-F1
cgctgaccacatcgctgacccagtcaacaacaacgcatgggcctacgccaccaacttcgtcgccggcaactaagctcaacggctatgctatgcaacttcattgtctttcggatcggagagggtgtacgtacgtggattgattgatgctgcgagatgcatgtgtgtcttttgtttcacgttgcattgcataggcaagtcgagatgatgagttggcgttgtacactaagatgaaccatgtttgtgcaatagtggtggtttttgtttcctgctggtt

SEQ ID NO: 871 - DNA, 452 bp, Zea mays
  unsure (1)..(452): unsure at all n locations; Clone ID: LIB3136-045-Q1-K1-F10
acctccgctacgtcgacgcccacaacgccgccgccgacgcgggcgtccactccgggcgcggggggctcaaccgcttcgccgacctcaccaacgacgagtaccgcgccacctacctcggcgtcaggagcaggccgcagagggagaggaggctcggtgacaggtacctggccggcgacaacgaggacctgccggagtccgtcgactggcgggccaagggcgccgtcgcggagatcaaggaccagggcagctgcgggagttgctgggctntctcaacaatagcggctgtggaaggcatcaaccagattgttactggcgacatgatctccttgtctgagcaggagcttgttgactgtgacacttcatacaaccaggggtgcaatggaggtctgatggactattgcgttgaggtcatcatcaacaatggcggaatcgacaccgaggaggattaccct

SEQ ID NO: 872 - DNA, 255 bp, Zea mays
  Clone ID: LIB3136-045-Q1-K1-F2
ctcagacgtgtatcacacgatagtatactacaattcgaagctctgtgtgatcgtattcatggggaaaaattaaccaaccgtgagcgccgatttcagtgaggtcttctagaaagccaggcgcaagcatgaagcccttatcgaagaaaatagctgagctccactaatgctacgtcttgcgtggcattctgttgggacattagacgtttagtttatgaccgcgcatctctttgcaactatgaagtgccaagtgcaact

SEQ ID NO: 873 - DNA, 423 bp, Zea mays
  Clone ID: LIB3136-045-Q1-K1-F3
gggaggcccctgcccaaggcagagaaaccgtgcgcgcgggagggaggaagggcagacgcagacgggcgaacaagatgagggagatcatcagcatccacatcggccaggccgggatccaggtcggcaacgcctgctgggagctctactgctcgagcacggcatcgagcacgatggcaccatgcccagtgattcctcggttggtgtcgcacatgatgccttcaaacgttcttcagcgagactggttccggcaagcatgtgcccagggccatcttcgtcgaccttgagcccactgtcatcgatgaggttcgcactggctcgtaccgccagctcttccacccagagcagctcatctcggggaaggaggacgcagctaacaactttgcccgtggccactacacggttgggaaggagattgtcgatcta

SEQ ID NO: 874 - DNA, 298 bp, Zea mays
  Clone ID: LIB3136-045-Q1-K1-F4
ccaccgcggcgctgcggtcgccggcggtggttggcagcgcgctgggccgcgccgcggccagggccacggcgtaccgtcacttgtgcacaagcgagaccgccgacgaggccgcggccgtcgagcgccgcctatggcgcgggggcatgggcgggatcctcgactacgggatcgaggacgcggaggacggacacacctgagaccgcaacgccgtcaggttcgcctccgccgtggattcatccggattgcttactacaggcttggctagcgtgagcattaagatcacgtgtgctctatacta

SEQ ID NO: 875 - DNA, 416 bp, Zea mays
  unsure (1)..(416): unsure at all n locations; Clone ID: LIB3136-045-Q1-K1-F5
gttccgaaaccgaaaaataactaaagtgaacgggaaaaaacagtattcggaccaggacaggactttccggtcctgtttcaaccctaaatatagtgataatttttacaatttcatacataaggatacaagaagttaacaggatagcttgtagctcgcctatggagcataagcctcctttgcaagggaacgaaggaacctcataagtggtttctttgctccagaaagcttcgcattagattcttccccatctttattttgtgtgctttcttggaacatgtgggctctcttcacaagcttccgcagctcctgacgatcaaattcaacactatggacagagtaaacttcattagtaactgaaatgtctttgcagaggaggccgtcaaaccatctatctgcaattntcatatactcttgat

SEQ ID NO: 876 - DNA, 430 bp, Zea mays
  Clone ID: LIB3136-045-Q1-K1-F6
caccagtcttgcttgcagcaggggagagagctgaactagcaactgaaaaatacatcccactgactccggtattagagggctttgtgattttgaagaagaacccggagtaccatgaagagtgaaacgctttagcatgccaaatagcatggtgtttcggaggctcgtgcacatggcagtcttcaagccctggcgcacccctcgtcgagaaatcgctcgccctttgctcaacccttcgcctggagttcatgttgaattcttaccagagttgtggctaactgaaagctgtcttcggttgtgctgatatacgattgtatctgtacgattgtagcaattactgggacagcttactctgtatggtgtggtgataacgtggcatagcatttttggcgctggtctaggttagtccttgtgttgacatggtgcaccatca

SEQ ID NO: 877 - DNA, 385 bp, Zea mays
  Clone ID: LIB3136-045-Q1-K1-F7
ctctcctgccccgccaccccaccagcgatggccctgtgcgccgccgcggcctccacggccaccgcctacgcgtcggcccgtctatcggcctccaccgctcgcccgcggggcccctcctcgacgtcgctgccgtcgtccttcgtcggcgcgttcccgtgcgcggtcgctgtgaggacgaggaggaggaggcgcgcggcgccggcggcggcccgcgccaccgtcacggtgcgcgcggaggccaggaagagcgtgctgatcgtgaacaccaacggcggcgggcacgccgtcatcgggttctacttcgccaaggagctgctcgccgccgggcacgccgtcaccgtgctcaccgtcggcgacgaggcctccgacaagatgaagaagcccc

SEQ ID NO: 878 - DNA, 436 bp, Zea mays
  Clone ID: LIB3136-045-Q1-K1-F8
agctaactacccccgcgctggctcgccaccaccgccgcagcaggcgtgggaatctgggcagcgccccgcggagaagaggaggcagcgcgctctccgtccgccatggcgggctcttccgaccccgacaagctcatgagcaaagccgacaaactaacaaaattgagttttacaagatggaatgctgattggaaaagcgctacctccttgtatgagcaagctgcaattgcgtataggttcagaaaggacaatgagaaagcaaaagatgcttttgagaaggcctcaaaaggacaggaaatgatctcctcaccatgggacgctgctaagcatatggaatctgctgctgctttagcaaaggagcttgggcgctggaatgaagtatctgatttctatcacagagcttcagaattataccgtgaatgtggaaggccacaaccct

SEQ ID NO: 879 - DNA, 379 bp, Zea mays
  unsure (1)..(379): unsure at all n locations; Clone ID: LIB3136-045-Q1-K1-F9
cttatatatatggcatgctaaggtttatgatatatgtttttctgtacacatccgggttttgtgtaatttgtaactttcacgcatgaaacttgaatgatgntatgcgtcctatacgggctatgttgatgtgagcggttgagcatnaaactattataattcaaacaagaaatgtatgagctgctgtaaggttatattcactttatcttgtattggtcaggagaaactaatgccattttttgcaaacagtgggaaacttttacagagcttggcngtaccaactagccaagggtcattcttgtcggaggatcagattatttacaatggaatcggctttacaattgctgcaacttccactgctgctatcactatttatgcaaag

SEQ ID NO: 880 - DNA, 341 bp, Zea mays
  Clone ID: LIB3136-045-Q1-K1-G1
attccgcgtggctttaaccttttgggggtataggaagcttaggcacgtattgctatttgtggtgctgaggttgcacaaacttaataactgatggcattatccgaacaaattcggccgcagatggatgatatttgtgctgtatatcctcagggtgacaccgaggggaaaattcaagacactgaagaacttgacaatctataagaacacaaggctgaacaacagcctaagatacatcttgaagctttaatacaagaccaggcttgcttaataaacactctttaaaacaccaatcaaacaagtacaccggtacataatgctgatacgtatgcacggacacaata

SEQ ID NO: 881 - DNA, 286 bp, Zea mays
  unsure (1)..(286): unsure at all n locations; Clone ID: LIB3136-045-Q1-K1-G10
caaggtctttgaaaaagctcttgtgacccattccatgacttagttaatncnccttctcggcgaacactataaccggttactctgctactcgacaagcntaaatgtgatgtgacgcatgctataccaaacactgatgaatagctcntnaagattgtgcgaaagaattggaaaacatccctacanactgctgcaagaatcggataccatcgtattgacaaagcacttatcatagagattcatgaattgttcccatcaatgattggacgntgcataactgcactttaca

SEQ ID NO: 882 - DNA, 221 bp, Zea mays
  unsure (1)..(221): unsure at all n locations; Clone ID: LIB3136-045-Q1-K1-G11
ctagttcatgacggatgctctggataaccaagttnagagtatggtttctgncnagggttgggtgcgcacctacaggttctgtgacaatgtttggacctncanctntacagacgcaagctttaagaacgaggaggccacggagcacgtncgcatggtgaatattgtggcatgttattccaaattgctcggacaatatgcccgtgtaccctctacgtcaatga

SEQ ID NO: 883 - DNA, 424 bp, Zea mays
  Clone ID: LIB3136-045-Q1-K1-G2
cgacgccgccggaaagaccaccatcctctacaagctgaagctaggcgagatcgtcaccaccatccccaccatcggattcaatgttgaaactgtggagtacaagaacatcagcttcactgtctgggatgtcgggggccaggacaagatcaggccactgtggaggcattacttccagaacacccagggtctcatctttgttgtggacagcaatgatagggaccgtgttgttgaagcaagggatgagcttcaccgaatgctgaatgaggatgagttacgtgatgctgtgttgcttgtgtttgctaacaagcaagatcttccaaatgctatgaatgccgctgagatcactgataagcttggactgcattcacttcgccagcgtcattggtacattcaaagcacttgtgctacaacgggtgagggattg

SEQ ID NO: 884 - DNA, 424 bp, Zea mays
  Clone ID: LIB3136-045-Q1-K1-G3
ggctgctgctgagtatatggtatctgcgggccattgtgctgtccatgcgagcggagagcatgcgtggcagctgtgcttcgggtgatgcccctgaccagagtagctgccgatgcattcggtgtgttgacgatcggactgttggcgctgcttgccgctctgggcctcttctgcatctttcaatcggtctacttcaggtgtcagatccggagaggaccctccttcctcccgctaggctactttaacggcccatgggtgacccgcgtcgctctggttctgatcaccatctggtggggagtaggcgaggtagcgagactgagcttcttgaagcaaaagctgttctccagcttgacatggcagaggaacatatgcgatgcgtacatacttttcaacctatggttcgcggagccggggatcttcttcgcat

SEQ ID NO: 885 - DNA, 252 bp, Zea mays
  Clone ID: LIB3136-045-Q1-K1-G4
tcggtccatgggagctggttacggcattggtcggactggtgtaggtgcaatggcacctcctaacgaaatgggtgccaggaggggcatggctataggtcctggtgccggtgccatttatggtggtggaatgggaatgaaccggacaatgggcatggtgatgggaatgaatcaacaacatatgatgatggggatgaaccaacaaccgatgggaatggggattgggattaaccaacaactgatgggagggaatca

SEQ ID NO: 886 - DNA, 423 bp, Zea mays
  Clone ID: LIB3136-045-Q1-K1-G5
cggacgcgtgggctcggaaaaaggaaagaaacgaaagaaaagaaaatcgaggtggaagaaggctatgtgatgtgaggggaaattacgtgggatataagccaaatccatttaattctatcgttagctggctgcttgagctgagttctttgattggcctccgtgctatactaatttctgaagacctcttggaggaattctctgcttcatttctcgagcggcccctagctcgcttcgccggttgccagatttgctgcgaagcagaagaggtgcagcctccagtcaaggaaatcgctgaagagagagctgcagattgccagattcgtagctccgcttctgcttcgacgcacctgttcggtgtggaatgatggaggtgagcccgtctccggagcaaggagtgatggcgggaagggagccgttcgggct

SEQ ID NO: 887 - DNA, 384 bp, Zea mays
  Clone ID: LIB3136-045-Q1-K1-G7
cgcgaatcacagacgcgtctatctcagcttgctgcactgcactaccctgccctgccatcatatcgtacgtgagcccggccgagcgagagcgagggagaggcatggctgctccgaagctcgcgacgctggcgctggccgtgctcctggcggcgaccgtggtggctcccccggccgcggtgcgcgcggcgatgtcgtgctccaccgtgtacagcacgctgatgccgtgcctgccgttcgtccagatgggcggggccatgccgccccagccgtgctgcggcggcatccgcagcctgctgcagcaggccaacaacacccccgaccgccgcaccatctgcggctgcctcaagaacgtcgccaacggcgccaacgggagcggcacctaca

SEQ ID NO: 888 - DNA, 310 bp, Zea mays
  unsure (1)..(310): unsure at all n locations; Clone ID: LIB3136-045-Q1-K1-G9
cgcgtacgctcttttcctagcggtcaaagccaaatcagnctcgagcggtggttgttatcgntaacgaggggcgcgcgctagctgaatcaggagcatggcccatggaggatagtggaaagccgccggcgagcagcaatgccttactgcgaggtgttctntgtcgcggacggcgacaagtgggagggcgtccgcctcttctaccgacgctacggcagcggcgccaccaaggtgctctctcgtatctgattgtcggggacgcacgactcgtggggcccgtatntaaaggggctgaccgggtcgttggagccct

SEQ ID NO: 889 - DNA, 422 bp, Zea mays
  unsure (1)..(422): unsure at all n locations; Clone ID: LIB3136-045-Q1-K1-H1
acgcggacgcgtgggagataactctgcgcagctgtcccaaattgacacggagcagctgctggcccatctagtaaaaacagaaatgataaagagaacgaaagaaggaaggtacaagggaaggaagttcagaacagtatgtcatttctatgcatatcaggcttcaggatctacaccatcaaatttcgactgtgactatacttatgctcttggacgtatattcatggatatgattacagtcggattgactggctacatggcaactgtggataatctgaaagaccctgttgagaaatggagatgtgctgatgttcctataactgctatgatgagagtgaagaggcatttacgtggccctggagcaatggctataaggaggcctttcattcacccttntgcaatttatctgaaagggaaagcttatg

SEQ ID NO: 890 - DNA, 374 bp, Zea mays
  unsure (1)..(374): unsure at all n locations; Clone ID: LIB3136-045-Q1-K1-H10
caatgaaacacagcatttttaatttctacctatacaagggcccctatcccaaggccatgggggcatattaaaaagctctcagtggataccaagccggctaatggcataatcatgcaactatgccttctgctgatgtcagcataacngactctagccatacgacagggaacctcacggagccaaaatcttactgtgaaaactatctaacacactaccaaaaacctattccaacaacttctttagaagaaatctccactggttgaacngacctggcatccctctatgagactatgaatgagcaagatacatcactcacgataatagaaaaacccttacaaatgtacaacattactggttgccaacagatcacaact

SEQ ID NO: 891 - DNA, 215 bp, Zea mays
  unsure (1)..(215): unsure at all n locations; Clone ID: LIB3136-045-Q1-K1-H11
gcgcagtatccaccgtcaccgccggaaacgtataccatcctggccactgtnacgatggacgtgccctagggggtcacggtcacggtcgcctccaatctgcttactgcggatgggccgcgcggtaagctaaccgccaacttttagcccctaaactttatttcaaccttcaggacggtggttcaagctaaaggtgattgcttgttttgttacccgcc

SEQ ID NO: 892 - DNA, 433 bp, Zea mays
  Clone ID: LIB3136-045-Q1-K1-H3
tcgcgtacaccggggtgaccacttcagtgtcggcggcacggaatgtgcagcagacctgcgtgtggggcgggtcaagtgggcacaacgtgcagaactgccctgcatgaacatacaggcagcaggcggctgcaagcgcagcaagctcctacggtacttcgcagcctcgcaatggactgtgcttcaaatgcaatcagcctggacactttgccaactcttgtccactactggctcctgctccccagcagcagcagcagtatcggagcggcggcgctccctcaagcggttatggtaggcagcagccctatgttggggctaccaactactgaaagtcattatctttgtcgagtcagtcgtgatgttggttttgcttagatgcctgtcctgaatggcatcgctgcgtccatgtgaagtaaatgcaaaccatttctttttt

SEQ ID NO: 893 - DNA, 400 bp, Zea mays
  Clone ID: LIB3136-045-Q1-K1-H4
cgaacggatatggaccagcctgattcagagttcaaagattgagagagactcgtcacgcagatccaaagggggcatgtgcagtcatgtagccttcagacagttggttcttcatcaccatagaaagatagcaaagagcaacagaagagtcctgattcttttattgcagcgctcgaagaaggaaaaaatatcacagagaaccccctacctgctccttgattagtttcaaatatatatatataggtcctcgttgacattttaatataatttgatgtgtgctgaggcgctatataataacacaaacgaaattttgttgtagacagggtagatcgatctcgtgtatcaacttttgtggtggtagaatgaaaggatataaataagttgatgtaagtttttgtttccc

SEQ ID NO: 894 - DNA, 358 bp, Zea mays
  unsure (1)..(358): unsure at all n locations; Clone ID: LIB3136-045-Q1-K1-H5
gcagcgtatgcaggagcagctgagtgcagcaaccgctgaaatggtgatgctgtccactgaggagactgagaagaagaaacatgcaacccacaaagatggcactgctaatggttcagcaaaggaaatacctgatgaaaagcctgccgtcattaagcctagtccctataaagaactgattggagacatcaaggctagcctgggaagtgctcctacacctacccagctcaaggctgtgctggcctcctcgacccttccttcccaggatgtgatgaatgctctcctcgaggctctctttgacagtgtgggcaagggatttgcaaaggaggtcttgaagaacaagaagtacctngcagttgct

SEQ ID NO: 895 - DNA, 389 bp, Zea mays
  unsure (1)..(389): unsure at all n locations; Clone ID: LIB3136-045-Q1-K1-H6
ggatatggaccancctgattcagagttcaaagattgatagagactcgtcacgcacatccaaagggtgcatgttctaacatgtagccttcacacacttggttcttcatcaccatagaaagatagcaaagagcaacagaagagtcctgattcttttattgcagcgctcgaagaatgaaaaaatatcacagagaaccccctacctgctccttgattagtttcaaatatatatatataggtcctcgttgacattttaatataatttgatgtgtgctgaggcgctatataataacaccaaccaaatttttttgtagacagggtagatcgatctcgtgtatcaactcttttggtggtagaatgaaaggatataaataagttgatgtaagttattg

SEQ ID NO: 896 - DNA, 315 bp, Zea mays
  Clone ID: LIB3136-045-Q1-K1-H7
cccaaaacgaactattaatgtgaactatgatggatttgctgaaaatgtgagagttggtgatgagctcctagcggatggctgcatggctaatgctgaggatatctataagatatgaccagatgataagacgccgctgcgcagatcctggctaattgatgccacatgccaatctcacattttcgcgtgacctgtgtatcggtcaccagagaaatactatgcttcctacaatttcatcaaaggattggctcgacatagactctatgattgccgaacgtgtacatttcatcacttgttcatatgtactgtgtgcagaag

SEQ ID NO: 897 - DNA, 298 bp, Zea mays
  Clone ID: LIB3136-045-Q1-K1-H8
cggaactgcaagcatacagctctactcttgttatggactgaacgcgcgaatcgaaacggtgagcgtgaaccatggtggacgaatacagccgcttctttaccagcatgccagggccggcgacaactacaacagaggcttcaacatcttgttcggcacttatgactacggacgaagctaacgtggataccactagctggtccgtgattacgactacatgtctatatgtagggactggtacaccatgtactgtagttacaactacgcgtcgggcacctgtagtggcggctacaacaagttc

SEQ ID NO: 898 - DNA, 397 bp, Zea mays
  unsure (1)..(397): unsure at all n locations; Clone ID: LIB3136-045-Q1-K1-H9
cagtggattgcatcattcgttatttcnacctctccttgggccggttttatnaggctgtgggggcttaccataaagctcttactgcattcaagaccagcnaatggtagaatcatgcaactgtggcttctgcttttgtgcgcataacggntccgtacaataagtcatggaatctgatggagccaaaatcttactgtgaaaacgctctcaatatttaccaaagacctattcctaggacttctttggaagaaattgccactgttttaacttanntttcatccatatattagactattaatgagcatgagcaagcactcangttacttcaaaaggccttaaaaatttacaacaattttgcttgccaacataacacaatttcttgtaattgaagctcatattg

SEQ ID NO: 899 - DNA, 285 bp, Zea mays
  Clone ID: LIB3136-046-Q1-K1-A10
tcgcacaaagcatgaggaagccggcggtgtatgcgacccatggctccacagacgaggagagagaggttggcggtggaggcgcggccgatctcttctgggctaacaccggcgaagccgggggcggtcgaggtgcagcgccgactggcgggcagcggttggacgagccgtcggatcttcatctacgccttccgagtctactttcttctcatcatgctccagattccgctctttaggggtccttgtagagctggcacatgcacaacttctattaaggtacatcatttc

SEQ ID NO: 900 - DNA, 212 bp, Zea mays
  Clone ID: LIB3136-046-Q1-K1-A9
ggcgcgtcgagcccacagtgcatgctagctgtgaccggatatcatctcaataccacaagtcatgcgcaaggagtagcagagttctataagagcgctcttcggtatctggcctacacaaccggggaggcgcgaacggagtcattcaagcgagactcggccgtttgatcctcacgagcagcactggagggtgatagcacttataaggttggaga

SEQ ID NO: 901 - DNA, 348 bp, Zea mays
  Clone ID: LIB3136-046-Q1-K1-B10
gggaggcgtccgggtccggtcttgtgtcagtgcatcttcggctaccattagaagagtcggctttgccagtggcttagggtgttttggacacccaagtgggtgatgccattagggcacctggatggctgaaccactagaaccatgttaaacgcgggtataaattaatataaaacacactggattctggctactcagatggcaatgactgaagatgggaatctgctgaaccaccagaggatatatcttgatcaacaaaaggacgcgtgaccttgcttatatagacaattctgttgaaaagtctgccacatctgattacagcccttctattccattttggactagatacat

SEQ ID NO: 902 - DNA, 425 bp, Zea mays
  Clone ID: LIB3136-046-Q1-K1-B12
gtcttgtatagtgtttcctgatcaacctgaaaaacgtagggcatcagagttgttcaagacagctatagacacgattgagggtgtaaccatcagctccctggatgatttacccactgaccctgtcaacagcttcttcaaatcaataagaaacaccctggattttgacttctcagatgacaatgaaggtagatggaaatctgatgaaccaccatcgttatatatcttcatcaacagcagcacgcgtgaccttgcttgtatagagaagtatgtggaaaagtttgccacatttgttccagcccttctattcaatctcgaactagatacattgcgttctgacctggggcttttggggttccccccaaaagatctgcactaccggttcctttctcaattcaccccagaatttatataaaacagcgtgacta

SEQ ID NO: 903 - DNA, 300 bp, Zea mays
  Clone ID: LIB3136-046-Q1-K1-B9
agcagaggaggtgcaaagggaaaagaggataaaggaaggcaaaaaaggcggatcaaaagctgcaccgaagaaacaacctaaaaaggctgcacctataaagctggaaagcagtacagaagacaatgctgctgaaccagtattcgcaaagcgtggagctcaacagatgaaagcacccaaaaaggctcccgtggacgaagaggaacttgatatgcctgcactgtgagaccgacaagctgccttttatataaatgactcatttcctggtgatcactctgctatggaaactgaaacaacataaca

SEQ ID NO: 904 - DNA, 230 bp, Zea mays
  Clone ID: LIB3136-046-Q1-K1-C10
gagaaaggacccaccggaggggaactaaagtggctcaacggtggggatgattttaaggaaaggccctcaatctagaaagccggtgggtgtggaaacaaaaggattaaattctttgaaccaaaacagcaaccataagacggcacaaacaaaaatcaaatccaagtgatttgtcaaacccggcagatctagaacataccggcgtagtcggcaaaacagaaaagtccaaaaca

SEQ ID NO: 905 - DNA, 334 bp, Zea mays
  Clone ID: LIB3136-046-Q1-K1-C11
aaggccgagatctgaaaatagttttcctgtagatgctcatactggtttaaataatcttcccagcggttatcataacttacctccgaaacaatcactaccacttcccatgatggatcatcatgtggttcccatgggtatcagggcacctactgataccattccttacggtgatcatatactaggtggtggaaattcaacttctgttcctggagatatgcagcaactcatagattttcctttctatgctgaacaagataagtttgttggcagttcctttgagggattgcctttagactatatcagtatcagtagtccaatcccagaaattggtgac

SEQ ID NO: 906 - DNA, 174 bp, Zea mays
  Clone ID: LIB3136-046-Q1-K1-C12
cggacgcgtggggttctagatcgccggacgcgtgggctgacgcgtgggcgacaggtggtgagaggcggtccttttcttacaatcagaccgctctttttcagatcatgcaagacgagtgctgtactcacttacggaagccaacaatgcatgatgagaccccagtgtcgaggcaca

SEQ ID NO: 907 - DNA, 236 bp, Zea mays
  Clone ID: LIB3136-046-Q1-K1-D11
ggcagtactgcactgcaacagctagctggtgtcttttgtgtatatatctggcgagctaggttgttaaagcaagcattagctattttaccagtacaataatgcatgcttgatactactgctatagtaatgcagtctagctctgtgtaccattgcctgcacggcccctgttggagtactctataataaatgtacccctagtaaaaaaaaaaaaaaaaaaaaaaaaaaaaaaaataaaa

SEQ ID NO: 908 - DNA, 209 bp, Zea mays
  Clone ID: LIB3136-046-Q1-K1-D12
caagagagcgcccgacagaaccaaagcaatgggcctagtgttaacaaaagcaagggatcgagcgggcgacagcgaggaaacgacccagcctttgatagcaacgcgccaggcaccagaagagcaggaccggagcccgaagaagcagagcacctgcctgagccagctaggcaagaagacaaacccaaaaggcaaccaccggccgaccaagc

SEQ ID NO: 909 - DNA, 333 bp, Zea mays
  Clone ID: LIB3136-046-Q1-K1-G11
cgtccggagaaagccaagccattgccctcccctcttgaaggcttggagcttggttctacatcctcttctcttcccctccgtctttctctctctctctctctatttggtttgcttgcttgcctctactagactctagtcgtcgggtccggccatggccaccatcctggagaacatccagaaggcgaggttcctgccgaccaggccgctcaaggacgagctgcccaccttccagggcggcggcggcggcaagggcaaggaggagagccacctcatgggcctgaggaagcggttgtccagcttcttcggcaagatccagcccatcttcttcgcgtc

SEQ ID NO: 910 - DNA, 215 bp, Zea mays
  Clone ID: LIB3136-046-Q1-K1-G12
gcgctgacagcccagctattcaagagaatagggttgctaccgtgcagtgcctatcggggactgggtccttaagagtcggaggtgaatttcttgcaaggcactatcacgagcgcactatctacatcccacaaccaacctggggaaatcacccaaaagtcttcaccccatctggcttgaacgttaagaggcaccgctattaagaacctgcaacaggc

SEQ ID NO: 911 - DNA, 432 bp, Zea mays
  Clone ID: LIB3136-047-Q1-K1-A1
cgcgtgggggttggcttctcctccccctccggttcgggttcgggttcgtgaggttctccggggttcggtttcgtgggtgagcggatcgagatggcggcgtcggatgttgagtaccgctgcttcgtcggcggcctcgcctgggccacggacgaccactccctccacaacgccttcagcacctacggcgaggtcctcgagtccaagattatcctcgatcgggagacgcaaaggtcccgcggcttcggcttcgtcaccttctccacggaggaggcgatgcggaacgccatcgagggcatgaacggcaaggagctggacggccgcaacatcaccgtcaacgaggcccagtcccgcggcggccgttgaggcggcggctgcggctactgtggtggccgtggaggcggcggctactgcggtggcgggcgccgtgatggc

SEQ ID NO: 912 - DNA, 346 bp, Zea mays
  Clone ID: LIB3136-047-Q1-K1-A10
cgcggctccccgaggacgacgagggcgtgccccccaccgcgatgcgggaggtctccttgctgcggatgctgtcgcaggacccgcacgtggtgcgcctgctggacctcaagcagggcgtgaacaaggaggggcagaccatcctctacctggtcttcgagtacatggacaccgacctcaagaagttcatccggggacaccgcagcaacaacgagaagatccccgcggccaccgtcaagatcctgatgtaccagctctgcaagggcgtggccttcgtccacggccgcggggtgctgcaccgggacctcaagccgcacaacctttctcatggaccgcaagaccatggcgc

SEQ ID NO: 913 - DNA, 244 bp, Zea mays
  Clone ID: LIB3136-047-Q1-K1-A11
tcggtggcgcgaggacctattcgagcaggtgatgtacgcggccgggacggtgggcttattctggctggtgaaccacggagtgccggaggagctgatgggccgcatgctccgcggggtgcgccagtttaacgagggccccttggaggcaaaacaggcgctctactttagggacctcgctagaaacctgcgcttatcctccaacttacacctcttgaaagctgttgctgtcgactggcccgacacg

SEQ ID NO: 914 - DNA, 427 bp, Zea mays
  Clone ID: LIB3136-047-Q1-K1-A2
caggttgtcccgctccctacacacccgcccttcggtgtgaacctccatgacgtccacaaccactctccggtatgaatcccgcgtgcgcttacacgaagattggtaatagtggcgacccagtcgcagccgtggaccttctcctcctcatcgcttgctcgttgtcgtcttttgcctacgtctgcacccgacgctgctacccttcgctcacctgttcatcatcctttcagatctgctgtcgtgacctcatccagccgtgctgtggcagtggatcgaagttcgctccagctctgattgggggaaaatgactagggtatcaagtggaaaaacataatggtccaggttctactgcggcacctctttcaggctaagcatctaaacaacaatatgtaaattatccttttccaataaaatacatgcttaaatcgtg

SEQ ID NO: 915 - DNA, 415 bp, Zea mays
  Clone ID: LIB3136-047-Q1-K1-A3
ggagtttccaaagcgctggacggtcgttctcctgtgcttctttgcgtttcttctttgcaatatggaccgcgtcaatatgagcattgcaatccttccaatgtcgtcagagttcagctggaatccaccaaccgttggtctaatccaatcatctttcttttggggtgaccttctcacacagattcttggaggtatttgggctgacaggtttggtggtaaggtcgtactaagatttggggttgtatggtggtcatttgctacagatcttacaccccttgctgccaagattggtctttcatgcttactcaccatgcgtgccttcatggggataggcgagggcgttgtcatgcctgctatgaacaacatccttttcaaatggatcccagtctcagagagaaacatatctattggcttggtg

SEQ ID NO: 916 - DNA, 415 bp, Zea mays
  Clone ID: LIB3136-047-Q1-K1-A4
cccacgcgtccggcacagccaatactgctggtccctctccaatttctgcaccatctacaccttccactcatacaccatgagacgtgatgtctgtgccacagctgcagcagaatggcggttcagctaaacccatggtaatgtttggctctgatggaactgggagcttgacatcttcagcaaacccattggatgatgttgaccgcttgctagaagatggctcattggatgataatgttgaatcttttctatcacaggatgacatggatcctagggacaacttgtggcgatgcatggatgctagtaaagggtttggtttttctgaggttgccaaagcacgcgcaagcacggccaaagttgtctgttgccacttctcagctgatggtaaactgcttgctactggtggtcatgataaaaa

SEQ ID NO: 917 - DNA, 428 bp, Zea mays
  Clone ID: LIB3136-047-Q1-K1-A5
aaagcggttacagaggagagagaaggctggtgctctgatcctcatgtccccccgtgcgctgggtttgttgaaataatggctccagttttctccagagatgcgtggagatgtgtctggcatatgattcaggtataacacagtttcagtgtctgcacttggcttggtttggttgatatcttgtcgttcttgcagaatgacttacttcatggatggggtctcgatttcgctctccggaaatgtgtggagcctgctcacgagaaaatcggtgtcgttgattcccaatggattgtacaccaagtgattccttctctcgggaaccaggtaaggaagaaaaaaaagaaacaaatgtgtacaatcagattctactgtagcgccttaatagcatcttcaaaatgcacaggggcagtcggagaatgggagggcgccat

SEQ ID NO: 918 - DNA, 410 bp, Zea mays
  Clone ID: LIB3136-047-Q1-K1-A6
gcagcgtcacaagcaaaccgaagctagtcagtcacacacagctctccagcttccatccacaaagaagaaggaaacaagctaaccatgatgatgagcgccaagaagattgctcatctcgccaagaaatggcagaggatggccgcgcaagggaggaagcgcctcaccttgggggcggcggcggcaaaggaagtcgacgagtgctgcggctctgtggcgagcaagggccattgtgcggtgtacacggccgacggggcacggttcgaggtgccgctggcctgccttagcacccctgtcttcagggagctcctgcagatgtcacaggaggagttcggcttcgctggcggcgatggcactggcaggatcacgctggcctgcgacgcggcggtcatggagtacgccatgtgtttgct

SEQ ID NO: 919 - DNA, 429 bp, Zea mays
  Clone ID: LIB3136-047-Q1-K1-A7
tcggcagcgtcacaagcaaaccgaagctagtcattcacacacagctctccagcttccatccacaaagaagaaggaaacaagctaaccatgatgatgagcgccaagaagattgctcatctcgccaagaaatggcagaggatggccgcgcaagggaggaagcgcctcaccttgggggcggcggcggcaaaggaagtcgacgagtgctgcggctctgtggcgagcaagggccattgtgcggtgtacacggccgacggggcacggttcgaggtgccgctggcctgccttagcacccctgtcttcagggagctcctgcagatgtcacaggaggagttcggcttcgctggcggcgatggcactggcaggatcacgctggcctgcgacgcggcggtcatggagtacgccatgtgtttgctcaggagaggagccttt

SEQ ID NO: 920 - DNA, 349 bp, Zea mays
  Clone ID: LIB3136-047-Q1-K1-A8
cccacgcgtccgaacacatcaaatcccagcgtcatgattggtgctggccttgtggcaaagaaagcctgctaattgggccttgaggtgaagccatgggccttacccctggatctgtggttgctaccgagtacttgaaacatagtggccttcaagattatctgaaccagcaagggttccatgtcgctgcgcatggctgcgccacttgtgtgggcaactctggtgacctggatggatctgtatccgctgctatcacagaaaatgatatcgttgctgctgcggtgctgtcggccaaccgaaacttcgaggggcgtgtgaaccctctcactcgggctaactaccttgcctcgcc

SEQ ID NO: 921 - DNA, 268 bp, Zea mays
  Clone ID: LIB3136-047-Q1-K1-A9
attgctcgaccacccactcgttcggttgacgaggacctattcgagctcgtatgtacgcggaacagactgtgcgcttcttttgggtggcaaaccacggactgccggaacaccttataggctatatgctccgagccgtgcgccatttcaacgaggggcccgttgaggcaaatgacgctctctactctaagtacctcggtcgtaatctacgcttagcctccaacttagacctcttaaacgctggtgcgcgcgactggcacgacacactttt

SEQ ID NO: 922 - DNA, 440 bp, Zea mays
  Clone ID: LIB3136-047-Q1-K1-B1
ggacgttgtctctgaagctgacatcttcgtgaccaccactgtcaacaaggatatcatcatggttgaccacatgaggaagatgaagaacaatgccattgtctgcaacattggccactttgacaatgaaattgatatgctcggccttgagacctaccctggcgtcaagcgcatcaccattaagccccaaactgaccgctgggtgttccccgagaccaacactggcatcattgtacttgctgaggggcgcctgattaaccttgggtgtgcgactgggcattctatctttgttatgtcctgtttattcactaaactagtcattattctacattgtacttgtttaaagtagaatgaggctctttttacgcttttacttagataagtgttttgttttttatttatggttggttatttgattatatgtctttgtttttttgcttatt

SEQ ID NO: 923 - DNA, 215 bp, Zea mays
  Clone ID: LIB3136-047-Q1-K1-B11
gccgtcgccaacgcaacccttgcagccccaatccctcacagcaaccatggctggcgcgcaggagtccctctctctggtgggcacgatgcgcggccacaacggcgaggtgacggcgatcgcgacccccatcgacaactagccgttcatcgtgtcctcctcccgcgacaagttcctgctggtgtgggacctgaccaacccggtccactccaccccgg

SEQ ID NO: 924 - DNA, 346 bp, Zea mays
  Clone ID: LIB3136-047-Q1-K1-B12
cggaggccttcgtgaacgggctctactactggacctggggcgacgtgctggccgcggtccggagctgcgagcccttcgccgcggcggccgacgcctcgggactcctggacaggctcatctccgcgctcttctccaagatcaccggcgccaccccgggcccgccggggacgccgaaccgctcctcgtcgtcgtgctcgtcgtcgcccgacaccgcgggcttgcgccggtcgtcgtcgtccgccaacaagacgccggagtcgatgcggccctgcgccggcagggagtggtggttcgacgacatgacgtcgctgtccccgccgaccgtcgagaaggtgatgcgcgtgct

SEQ ID NO: 925 - DNA, 409 bp, Zea mays
  Clone ID: LIB3136-047-Q1-K1-B2
ccttgctaaagtatttcaaggacataatgtgtaagtcgtccctatccttgtcggtgcacttagctcccaaaacgaagccttgtatggacagctgctctccaaatatgtggatgacccaaaaaacttcttttctgtgtcgtcggacttctgccattggggatccaggtttagctacacatactacgaaaagaagcacggtgccatccataaatctatcgaggccttggaccgtatgggcatggagatcatagagactggcgatcccgtagcgttcaaagaatacctgcaagagtacgagaacaccatatgcggacgccaccccatcagcgtcttccttcacatgttgaaacattgctcgacaaaaattaagataggctttgtccgctacgagcagtccagccagtgcaag

SEQ ID NO: 926 - DNA, 232 bp, Zea mays
  Clone ID: LIB3136-047-Q1-K1-B3
gcgacctgacagaatgccaaggaccatattgaggctgctagtactaaccttgtcggtccgctcagctgccacaacgactcctcgtatggacagctgctctccaaatatgtggatgacccaaaaaacttcttttctgtgtcgtctgacttctgccattggggatccaggtttagctacacatactacgaaaagaagcacggtgccatccataaatctatcgaggccttggacc

SEQ ID NO: 927 - DNA, 130 bp, Zea mays
  Clone ID: LIB3136-047-Q1-K1-B4
gcttgctaaagtattttaaggacatattgtgaaagccgtttttatccttgtcggtgcacgtagcttccagagcgaatctttgtatggacagctgctcttcaaatatgtgtatgacctaataaacatcttt

SEQ ID NO: 928 - DNA, 419 bp, Zea mays
  Clone ID: LIB3136-047-Q1-K1-B5
tgagagtgtgcttgttggccctgtcaatgttgggacctaccgttttgtcctccaggctgatccaccggatccctcaaagatccgtgaggaagacataattggtgtgactgtgctgctattgacttgctcttacatgggccaggagttcatgagagtaggctactacgtgaacaatgattacggcgatgagcagttgagagaggagccttcagcaaaggtgctaatcgatcgggtgcagagaaatatactggccgacaagccccggtttaccaagttccctatcaacttccatcctgaaccaagtacaggcacggggcggtagcagcagcagcaggagcctcagacggcctcaccagagaagcacgcacgcagcggtgagggcaatgtaagcaagcctgaggcttaccaatgaacacagt

SEQ ID NO: 929 - DNA, 331 bp, Zea mays
  Clone ID: LIB3136-047-Q1-K1-B7
cgtccggcactgcgcaggtggcatcaattaggcacaacttcaagcgcgggctgatgacgcacggttccaagagccaccggcagctgggttccatcggagccgggacgacgccgggccgcgtgtacaaggggaagaagatgcccgggaggatgggaggaaccaagaccaacatcaggaagctcaagatcgtcaagaatcgacaacaacctccgggtgctcatgatcaagggggccgtgccagggaagcccgggaacctcctccgcataacgcctgccaaaaacgtcggcaagaacattcccaaaaactagacttcttttttttatggggggg

SEQ ID NO: 930 - DNA, 154 bp, Zea mays
  Clone ID: LIB3136-047-Q1-K1-C10
acaccgtgcggtggatctttaaaaaaaaaaaaaagggcggcgtctaaagatcagcttactttccgtcttgcgacctatagtcttctataggcacctaattcaattattggccgtccttacaacgttttgactgggaaaccctgtcgttcccaac

SEQ ID NO: 931 - DNA, 442 bp, Zea mays
  unsure (1)..(442): unsure at all n locations; Clone ID: LIB3136-047-Q1-K1-C2
cgaaaggttcaatggatgacagatgttgccatggcaatcaacccagcagaccagatgatcgcggttcatgtgcggcctatctttgagcaagtctacaaccaactggcccaccagcggacactccccaccatgaccgcagcagatggcaccagcatccgtgtgatcatgcatgtaattaactcagttctgcttagctacaagtgattgtagctaagcaactgtggggagtatggcctattctatcttgtatagagaaattttgaatggccacaacccacaaccccaggagacattgtggccgagaatacttgcaagagggcggaggttactccttggtgtaaatttggcttctgtcgctcgtgaattcggactattgtagtaattgggcatcctcgaattcttcatttgtcatgatcactgngtctngtatttccgtcatacc

SEQ ID NO: 932 - DNA, 413 bp, Zea mays
  Clone ID: LIB3136-047-Q1-K1-C3
ggttcttcggcgcctctgctgcatctgatcactgtcgtttgctgacaagaaatggatcaggtcaccatgaactgattagacgacaccatggcagaccaagaagtgcgatcaggtgctgcagcaacacggcaaggggaaggaccagggactattactaccacgtgctgggtatcgcaattcattccacacctgagcagatcaaggaggcttacaggaaactccagaagcaacaccatccagacatcgccggctacaagggccacgactacacgctgctgctgaacgaggcgtacaaggttctgatgcgggatgcttccagttccatgcacgccgatggaaggggcaggagtagggtggggtcaggagccggttacaccggggacggatacagttcttgggaagggcccgtgaga

SEQ ID NO: 933 - DNA, 433 bp, Zea mays
  Clone ID: LIB3136-047-Q1-K1-C4
ctcttttgatccttggccttcaatatctaattttgcaaaagttttggttaagaagatgctgcgacattacccaaaagaacgcctgactgctgctgaaattttgaaccacccatggattatagaggatggagaggccccagataagccacttgacattacggtcattagtagaatgaaacagttcaaggcaatgaacaagctcaagaaagttgcattgaatgttgtggcagagaacttatcacatgaagagattatgggcctaaaagaaatgttcacatccctgcatactgataacagtgggacaattactcttgaagagctaaaatctcgcttaccaaaacttggtactaaaatttctgaatcagaaatcatacacttgatggaggcggctgttgttgattgaaatggtaccattgattactctgtatttata

SEQ ID NO: 934 - DNA, 443 bp, Zea mays
  Clone ID: LIB3136-047-Q1-K1-C5
acccacgcgtccgggggcgagcgacagaggcagtggaggggcgttgtgaggaggccggcggcgcgcgcgcgcttgcggcgccggcggcctggcgatgggggaggtggccgcgctgcgccagctcgtcggccaggtccaggagctctgggacctctacggcgccaacggcaaccccgtccccaggtggtatttacctgacttcgaacatggttcaatcaaggatgattattgtgggggaagctcaggatacaactcggaattactgaagatcatggaaactaaccaatctcccccttgcaagcgaccgcggagagatcgaaaccgtgaaaaggcaccctcctcaaacaaaattgaagtcatggaacaagagatatggagagatttccctgaagatcttttcgaaactgtcatagcaaggcttcctgttgctgcaatttttcgat

SEQ ID NO: 935 - DNA, 429 bp, Zea mays
  Clone ID: LIB3136-047-Q1-K1-C7
cctgcttccacctgcatctctctcctcggtcctcgctcgctcggcttccctctctccgccgagaccgagaggaggcatccctgacgtacggacggcggccatggggacgcaggcgccggagaactaccccgccgagaaggtacaggacgcgaggagcgcgcgggagaaggccatcgacgactggctcccgatcacctcgtcgcggaacgccaagtggtggtactccgccttccacaatgtcaccgccatggtcggcgccggcgtgctcagcctgccctacgccatgtccgagcttggctggggccctggcatcgcggtgctggtggtgtcgtgggtgatcacgctgtacacgctgtggcagatggtggagatgcacgagatggtgccggggaagcggttcgaccggtaccacgagctggggcagcacgc

SEQ ID NO: 936 - DNA, 353 bp, Zea mays
  Clone ID: LIB3136-047-Q1-K1-C8
cctgcttccacctgcatctttttcctcggttttcgctcgctcggcttcccggtcttttttgagaccgataggaggcatccgggacctacagacggcagccatggggacgcaggcgccggagaactaccccgccgagaaggtacaggacgcgaggagcgcgcgggagaaggccattgacgactggctcccgatcacctcgtcgcggaacgccaagtggtggtactccgccttccacaatgacaccgacatggtcagtgccggcttgctcatcctgccctacgccaagatcgaactaggcttggggccctggcatcgcggtgctggtggtgtcgagggtgatcactctgtacacg

SEQ ID NO: 937 - DNA, 350 bp, Zea mays
  Clone ID: LIB3136-047-Q1-K1-C9
ctttccctcgcgccgacgccaacgcaacccttgtaggcccaatccctcacagcaaccatgggtggcgctcatgagtccctctatctggggggcacgatgcgcggacacaaccgcgaggtgacgggcatcgcgaccccgatcgacagcttgccgtgcatcgtgttgtgctcccgggacaagtccctgctggagtgggacctgaccaacccggtccactccaccccggaatgtcggcgccaccggccactaccgcgtacccttgcggcgcctgaccggtcactgccacttggtacaggacgtcttccttagttccgacaggcagatagccctttccggctcctgggatggag

SEQ ID NO: 938 - DNA, 435 bp, Zea mays
  Clone ID: LIB3136-047-Q1-K1-D1
atgacctctgagcacttcgcatcatttctggtgttcataatccttcacgtggttgctcttgtgtattatatcaaagggcttttgactcctaggctgttcaaagttgctatgactcttgtcatatctgttggcttagctgtttgtttcgcagtagtagccatacttgtcgcattggtggcatctagtccaacaaaaggctggagtggccgcagtttgagtctgcttgacccaacttatgcaagcaagtacatccccatcattgctagtgtcagtgaacaccaacctcctacctggccctcgtattttatggacattaatgtgttggccttcctgattcctgctgggattatttcatgcttcttgcctctttctgatgcaagctccttcatggtcttgtacttagtcactgcagtgtatttttcttgagtaatggta

SEQ ID NO: 939 - DNA, 323 bp, Zea mays
  Clone ID: LIB3136-047-Q1-K1-D10
gaatggcaagctcactggtatgtccttccgtgttcctactgtggatgtctcggttgttgacctcaccgtcagaatcgagaagggggcctcctatgaggatatcaagaaagctattaaggctgcttccgagggtccactcaagggtatcatgggttatgtggaagaggatctggtttctaccgacttccttggtgacagcaggtcgagcatcttcgacgccaaggccgggatcgctctgaacgaccacttcgtcaagctcgtctcgtggtacgacaacgagtggggctacagcaaccgcgtcgtcgaccctgatccgcacatgt

SEQ ID NO: 940 - DNA, 439 bp, Zea mays
  Clone ID: LIB3136-047-Q1-K1-D2
gtcaccatgtccttttgcttatttctggacttcttcagcaatgccgtcttgctgctttcatagtgtggtgtggatgctcccctcagtgcagctcagatgattttggaagtggacaggttttttagtgtcttgctgcctttctgaagtatcactctgcagtgtcatctgggccaagatatcttgtaaatttcaacagccctgcagtcttatcagttatactttttattgcaggcttcttaaaccaggaggaacctttattttggtacgcacttttgtacatttgttctgaaagtagtgctgttggggacaattttgggtctgagttctagattatttctccattcctcttcttagtcatgggcctattggccttagtcacatacacagcccagcatcaacaatgttgaaaccctggtatgcattttgacccaattttcgt

SEQ ID NO: 941 - DNA, 363 bp, Zea mays
  Clone ID: LIB3136-047-Q1-K1-D3
ggcacgccctttcttttttttatttttggactttaagaacatttcctacgtgctgcattcagagacttttagggaaggtcttgtgactacaacacagatcattgttgatgtggacagggtgataaccgtcggcctacctgactgtaaaatgaatctaggctgtcttgtcgcccaagtgatctagagcatatcaacagccctgcgtggtcagggatgatactttgtatagccggcttctgcaagcaagtggaaccggttctttggtactcactttggaacccaagctccgacaatagggctgtttcggacacacataaatctgaggacctgattaattccccattgcattatttaatgatggtc

SEQ ID NO: 942 - DNA, 442 bp, Zea mays
  Clone ID: LIB3136-047-Q1-K1-D4
atcttatggaagcagggaaagtcaggatggctgagggaacattgaatgaggcatatgcattgttttctgaagccttttcactgcttcaacagattactggtcccatgcacaaggatgctgcaaattgttgccggtaccttgctatggttttgtaccatgctggtgatacagccggtgcaattgtgcagcagcatagggaactcatcataaacgagagatgtcttggtcttgatcatccggacacagcccacagttatggtaacatggccttgttctatcatgggctcaatcaaactgaactggcactgcggcacatgtcccgtacactgctgctgctaagtttggcgtcaggacctgatcatccagatgttgcagcaactctcataaatgttgcaatgatgtaccaggatgccagtaatatgaatactgctcttaggtatct

SEQ ID NO: 943 - DNA, 434 bp, Zea mays
  Clone ID: LIB3136-047-Q1-K1-D6
gcgcgatctgtggtgtacgtggcgttcggctaccgcagcgctgccaggctggaccagatccgggagatcgccgccgggctggaggacagtggctatcctttcctgtgggtgctcaagaccacgaaggtggaccgggaggacgacgccgagctggcggaggtgcttggaaacggataccttgagcgcgtgaaagggcgtggcatcgtgaccaaggggtgggtggagcaggaggagctgctgaaacacccggctgtgggcatgttcgtgagccacggcgggtggaactcggcgctggaggcgtcgtccgccggcgtgccgctgctggtgtggccgcagctcggcgaccaccgcgttaacgcgatggcggtagtgagggcaggcatcggggcgtgggcggagcactggagctgggacggtgaggacacgctggtgac

SEQ ID NO: 944 - DNA, 353 bp, Zea mays
  Clone ID: LIB3136-047-Q1-K1-D7
gcgcgatctgtggtgtacgtgtcgttcggctttcgcagcgctgccaggctggaccagttccgggagatcgccgccgggctggaggacagtggctatcctttcctgtgggtgctcaagaccacgaaggtggaccgggaggacgacgccgagctggcggaggtgcttggaaacggataccttgagcgcgtgaaagggcgtggcatcgtgaccaaggggtgggtggagcaggaggagctgctgaaacacccggctgtgggcatgttcgtgagccacggcgggtggaactcggcgctggaggcgtcgtccgccggcgtgtcgctgctggtgtggccgcagctcgtcgaccaccgcgt

SEQ ID NO: 945 - DNA, 287 bp, Zea mays
  Clone ID: LIB3136-047-Q1-K1-D8
ccacacggacgcagcgaacggcagggtacgtttcgggagctttctatgacgctgccacgctggaccattgggggtgttcggcggccgacaggatgacagggcctatgctcaccggtgcttgctcaagaccacgaatgcggaccgggaggacgaccccgagctggcgtacgtgcttggaaacggataccttgagcgcgtgaactgacgatacaccagaaccaacgtgtgcttgaagcatcaggcgctgctgaaacacccggctagcaggcacgttctcgagccacggc

SEQ ID NO: 946 - DNA, 370 bp, Zea mays
  Clone ID: LIB3136-047-Q1-K1-D9
cgcaccacaagcgagcgagggacccggggcggaagatagagagagaagacgtctctctcctctcggcgtcctttttccccaacctctcgtctgctgcctgcctgcctgcctgcctgcaaaaaggagtttgtcatggcgtctaagcgcatcctcaaggagctgaaggacctgcagaaggacccccccacatcatgcagtgcaggtcctgctggtgaggacatgtttcattggcaagcaaaacttatgggaccacctgacagtccctatgctggtggtgattctttagtgaacattcatttgccgccagattaccccgtcaaacctccaaaggcttctttcaagacagacgtcttccattctaatatcaaca

SEQ ID NO: 947 - DNA, 425 bp, Zea mays
  Clone ID: LIB3136-047-Q1-K1-E1
gtcgtcttccgcccatcactgtcttcttcgttccaccacacttgggaaacgcagcgatggatggccagccaggtgctgcggcgtcgtctagtcctggtcggagagtaaaagcaagcctggtcctaggatccgaatcgttcactatcaactccgagtccggtaccctgtcggagcagctggccacggtgaaggagaagagcatggcggtcctcaaggaacacatcgccaggcacaatgctccgaacgaggtccccgacgaggccgccgagggcgagtctgacagcgaggacgaagcggcgcttgtcgacaacccgccgaagaaacctaagaagcagaagtgaccgtctctagttatgcacttgagttgttttttttttttgccatgcgttgcttgtataacgccagactgttgtcagtcacaatag

SEQ ID NO: 948 - DNA, 155 bp, Zea mays
  Clone ID: LIB3136-047-Q1-K1-E11
tcgtgggctagagggaagagatggctgctttggacgttgagtaccagttctttgttggcggcctcacctgggccaccgacgaccacttcctcaacaactccttcagcacctacggcgaggtcctcgagtccaagatcatcctggatcgagagacg

SEQ ID NO: 949 - DNA, 381 bp, Zea mays
  Clone ID: LIB3136-047-Q1-K1-E12
tgcagccgtgggcggcagccctcagacttattgtccctggggtgggagcggcggcaccatatttgactacggcgtgtacactggcgtgtggcacatcaacttgacgcgcgcagtgggaatctcttctatcaaggttctgtatgatcggaacgggcaggccgtgtggggtaacaagcatggtttcagcagcggtgtcataccagacaagataatattcgacttcccgtcagatgtgctgactcacataaccgggttctacgattcagcaataatcatgggcccaaccgtggtcaggtctttgacgtttcacacgaacaagcggacgtactggccgtacggcgataagtacagtacgtactttttcacgagctttaccaatgg

SEQ ID NO: 950 - DNA, 441 bp, Zea mays
  Clone ID: LIB3136-047-Q1-K1-E2
aaagcctggaagaggcagtgagacgagaaacatgggaggaaactggtatcgaagttgggcaagtcgtttatcacagttctcaaccatggcctgttgggccaaatactatgccgtgtcaactgatggtgggcttctttgcttatgctaaatcattggagataaacgtggacaagcaggagcttgaagatgcccagtggcacaaccgcgaagacgtcaagaaagcgttgacgtttgctgaatacgagaaagcccagagaacaagcgctgccaaggtcgatcagatctgcaagggcgctgagaaagggcagaacccctctgccgacttcaaagttggaagcggcgagcctgctccaatgtttgtcccaggaccctacgccattgctcaccaccttatctcgtcgtgggctttcgagggagcaccgaagctgcctagttcattct

SEQ ID NO: 951 - DNA, 442 bp, Zea mays
  Clone ID: LIB3136-047-Q1-K1-E4
cggacgcgtgggacccggccaggcggccaccacgaccacggtcctgcgcccggcggtccttcactccccatgcgttccagcttgcgtacggccagtgcggcggtgccactgctgttccctgcaggtgagcaggtcgtagctcagatctgtgcgatcgtgcaccgccgccggcttcatagttcacacacaccactggcgatcgactgtcctcgtgcatctccattctccgccagctactcgcgacctctccacgtcaagcactgcgcatgaggatcagtcttctccacgtgaccatgttgagcactacgtcggacattgccagctcgcccaacaggtctaattttatattgctcgctgtatgccttaatgcatgtgttagatttgatttgttggacaaattttgtatggttgtatgtttttatcatatttaaatttggtggac

SEQ ID NO: 952 - DNA, 432 bp, Zea mays
  Clone ID: LIB3136-047-Q1-K1-E5
gagaaagtaaagatataacttcaactagccgatgggcaaaagttaaagaaaatttccgtagtgatccaaggtacaaagccatgaagcatgaagaaagggagactatatttaatgaatacatagtggaactaaaatctgctgaacaggaagcagagcaagctgccaaggccaaagtggatgagcaagccaagttaaaggagagggaacgtgaaacacgtaaaaggaaagaaagagaggagcaggagatggaaagagtaaaaatgaagatacgtagaaaagaggctgtgtcatcataccaagctttacttgttgaaatgattaaggatcccaaggcatcgtggactgaatccaaaccaaaacttgaaaaaaatccacaaggtcgtgctcgaaatcctgacttaggccaaggtgatgcagaaaagttgtttcgtg

SEQ ID NO: 953 - DNA, 433 bp, Zea mays
  Clone ID: LIB3136-047-Q1-K1-E7
cgacaaaggggaaaggttcgtttcttgtggcatcttgctttccttcgagtgccatggccgatccggcggaggagaacgttgtctcgccgccaccgacccctgcggccccagccgtgggcgcctcagacccgcccctgcagcctgctgctgacagcgcctcaacggagaaggtgtctgctccggcgccggaggtaaggtcccggggattcaggcttcttggagaggacacttccgtgcacaaatcccttgggggcggtaaaactgctgacgttctgttatggaaagacaagaaaacttctgctgttgtaataggcggcgcaactgtcatctgggttctgttcgaagtgcttgattaccacctcctgaccctgatatcccatgtactgattggtgtgcttgccaccttattcctgtggtccaaagcaaccacgtt

SEQ ID NO: 954 - DNA, 436 bp, Zea mays
  Clone ID: LIB3136-047-Q1-K1-E8
ctgaacctgtgatatgtcctgttacaaagatggccatgcagagcaagacactgaggagtaatcttccgttgaagagcacaattgcagagtggattacaaggaatgaagcgacacgggtcaggatcgcacgcaccgcgctctctatggcgaccacagaggctatggtgcttgaggccatacatgagctgaaggtgctggctaggctgaggagaaagaacagggatcagatgcacaagattggcatcaccaagttcctagcacggcttctggaccacaaggatgcacttattcgctgtgactccctcgacctcctctgcttgttggttgaggatgatacaggaaaggaaatcatagcgaaaaccagagccgtctcaaggacaataaagctgctatccagcagtagtactgatgagaggcatgcatctatatctttctt

SEQ ID NO: 955 - DNA, 363 bp, Zea mays
  Clone ID: LIB3136-047-Q1-K1-E9
gttggcttctcctcccccaccggttcgtgttcaggttctggttcgtgggcgagagggaagagatggcggcgtcggacgttgagtaccgttgcttcgttggcggcctcgcctgggccaccgacgaccactccctcaacaacgccttcagcacctacggcgaggtcctcgagtcgaagatcatcctggatcgggagacgcagaggtcccgcggcttcggcttcgtcaccttctccacggaggacgcgatgcgcagcgccatcgagggcatgaacggcaaggagctcgacggccgcaacatcaccgttaacgaggcccagtcccgcggcggccgtggaagcggcggtggcggataccgtggcgggc

SEQ ID NO: 956 - DNA, 405 bp, Zea mays
  Clone ID: LIB3136-047-Q1-K1-F1
ggccgcccttttttttttttttttagattccttatccaaccttctatttcaaaaataatgcattagtcacgccacaacgccaacagccggtgaaaaacaatgaaggccttgcaaatgaaagaataattaaaaaaaacacaggaatttctcacatgaacaatctcagagcgctatgtgcgtcctgatactgcaattgtcagctgttaatcaggtggcccagggccacgaatgcatctttggcaaggcatttacaagagctgtcgtgtaaaaaaatcttaaagctgttgcagaacggcagcatagttgcaggccatgataatcaacactgactacggccatggccgagtcataagaactgcttaagaattcagtggccactagccggccacgagtgttactgacagc

SEQ ID NO: 957 - DNA, 338 bp, Zea mays
  Clone ID: LIB3136-044-P1-K1-E2
caccccctcctgccgtcctcgatctcgtctcctcctccctacccaatccctcgcggtgggcgagcgtggaagcgagtgacgatggcggcgctggaggcggcgagggagtgggcggtctccttatacctccggtgctcgctcttttgtttggttcacttctttcggtttcctttttttttttggtttttttttttgttttcttttttcttttttttttattttgggttttcttttttttttttttggtttgggttttttttttttttttttttttttttttttttttttttttctttttttttcttttttttattttttttattttttttttttttttt

SEQ ID NO: 958 - DNA, 277 bp, Zea mays
  Clone ID: LIB3136-040-P1-K1-C9
gcgagcacctggcaatggcggcctccgccctgtcgtccacctcccagatgtcctcaagctgcctgctttcttactgagctgagccaccacccgccacgcccccgactcccacgaactcctccgcctacccacccctaccctacttctctcgcccgccggacgcggggctctgctccccggttcttggggccggaggatgcgaccgcgtacccgcccccgaaatcagctgcccggcggtctcatagcgtatccgggatctaggccctgagcaatggca

SEQ ID NO: 959 - DNA, 195 bp, Zea mays
  Clone ID: LIB3136-040-P1-K1-D1
cgagaatctcattgctctcgcgacaaaaggtctccagacgtccttgcttgctctacagttgagaccctgcaggcaggtgcaggtgcagagactctcctcgccagagggcagtcaaccgcccgagtatgccatggcggaagcggtgaggcggacgcttgcgctgatgaacctggcggacatcatggagcgagccga

SEQ ID NO: 960 - DNA, 434 bp, Zea mays
  Clone ID: LIB3136-040-P1-K1-D11
caaagatatccccaagaaagcctgtgaccgtcggatcaatgaatttgttaaacgtgctagggctgccaagatccatgcttatataataggtcatctaaagaaggagatgcctacaatgatgggcaaagcaaaagcccaacaacgactcatagacaatctgcctgatgagtttgcaaaggtgcaacgggaataccatcttccgtcgggagattttccttacgtggagcacttcaaagaggtgttgagcgggtacagctttgacaagtttgagaaggtgaagcccaagatggtacaggccgtggatgatatgcttggatatgacattcctgaacttctcaagaacttcagaaacccatacgagtgaacccatacaggcgggtgaaagatgactttcatctgcaacaaaatgaggggattgattgtcaagcgatgtg

SEQ ID NO: 961 - DNA, 320 bp, Zea mays
  Clone ID: LIB3136-040-P1-K1-D12
cagacgcgtaggctcaacggcatgggcactattcccgtcatccctgcgacgatgctcgagggcgatcttcttggcgctagtagcactgcctgcttctgcgccaccgacaccgacaccgacagctccattcgtttccccagcagctatggtgctgttgttctaccgtgggagagctgtgactatcacaccaaggagccctttatcaaaccgtctctgttgcgctacaacgacttggtggacaagagctcctccaactgacaatagtgctaggatggtacgcccggcaacggctttttcagccgtgactggatcgttaacac

SEQ ID NO: 962 - DNA, 400 bp, Zea mays
  Clone ID: LIB3136-040-P1-K1-D2
gccgagccagttgaagaggtcacgatctcaatcgctgccctgcccaaagacgaaggccacggccacatcgaggaacaacacaatggggagcactgcaggaaggcgaaagactgcggcggcggcggcggcgctgctcccaccgactgcgctgcgagcaagaactgctgcggcgtcaaaggtggagacgcctgctcgagcgtgcaggccgcgcgtgctagggagaccggcccgtgctgccggagctacgtgaagtgccccaggacggcggcggcgagcaggagcagctgctgcggccacagcatgctgaagctgcccgagatcgtggtagagtagtagtagtactgtagtagggtggaaattccaccgtgggagaagggtgtgcacatatgaacaagcaact

SEQ ID NO: 963 - DNA, 303 bp, Zea mays
  Clone ID: LIB3136-040-P1-K1-D3
ctcgccgtctgccttctgcgcctccatttctgtctctgtcccttgcaagttcaatctcacgtccaaccatgggtaaagagaagtcccacatcaacattgtggttattggccatgtcgactctggcaagtcgaccaccacaggacaccttatctacaagcttggaggcattgacaagcgtgtgatcgagaggtttgagaaggaggctgctgaaatgaataagcggtccttcaagtacgcgtgggtgctcgacaagctcaatgctgagcgtgagagaggtatcaccattgatattgctctgttga

SEQ ID NO: 964 - DNA, 433 bp, Zea mays
  Clone ID: LIB3136-040-P1-K1-D4
gagatgacaacgatctggagctgaacgcggtgtcccacttcctgagcttcgtgcagcgggggggcaagtcctacaaggacgccgacgagcacgcgtaccggctgtccgttttcaaggccaacctgcgccgcgcgcgccggcaccagctgctggacccgtcggcggagcacggcgtcactaagttctccgacctcacgccggcagagttccgccggacctacctcggcctccgcaagtcccggcgcgctctcctcagagaactcggggagtcggcgcacgaggcgcccgtgctccccaccgatggtctccccgacgatttcgactggagggaccacggcgccgtcggccccgtcaagaaccaaggttcgtgcgggtcgtgcttgtcgttcagcgcgtctggagcgctggagggtgcgcactacctcgcaactgg

SEQ ID NO: 965 - DNA, 447 bp, Zea mays
  unsure (1)..(447): unsure at all n locations; Clone ID: LIB3136-040-P1-K1-D7
ggcaaataaacccagacgtagttcagcttttcgcttctacctccctctccccccccgggtgcgcgctgccgcgagagctcgttcctgatggggaactgcgccggcgtggaggggaacgccgagatcaacccttccttcagtgcccccaattcctcagggaccgccggttctaagagcgtcagcaagaacgcggccgacaccagcaccttcggcaccaagacgtccggctcgtcgtcgtcggtgccgccaacccctcgtacggaggcggagatcctggagtcgtcgaatgtccgcaagttcagcttcggcgagctcaaaggctccacgaggaacttcaggccggacagcctgctcggngaggggggcttcgggtccgtgttcaaggggtggatggatgagcgcacgctcgcgcccgtcaggccgggcgccgggatcatcgtcggcgtc

SEQ ID NO: 966 - DNA, 392 bp, Zea mays
  unsure (1)..(392): unsure at all n locations; Clone ID: LIB3136-040-P1-K1-D8
agccgtcncccgccgtcgcccgcagctcttcttgcgtgcctccgccaaggagatcgcctggtaccagtgctcaagagccggccttcaggccggcgtcgagaagctcgccgccgcggtcggcgtcaccctcggacccagaggaaggaatgttgtcttggatgagtttggaacccccaaagtggtcaatgatggagttaccattgcccgcgctattgagcttgctgatcccatggagaatgctggtgcttccttgattcgtgaagttgctagcaagacgaatgactcggctggtgatggaactacaactgcctctgttctcgctagggagatcatcaaattgggcatgttgagcattacttcaggggcaaatccagcgtccgttaagaagggca

SEQ ID NO: 967 - DNA, 421 bp, Zea mays
  Clone ID: LIB3136-040-P1-K1-D9
ggaaactggagcacgacatatgctccctcttcgttctacatgacctcaaagatgagatctgggtacctcgaaggatacgagtactccatcttcgacctgacgagacctgacagggtgcaaattcagatttatggcaattcagtacagggacggatacttgacggcgactcaccgacggagctgctcaccagctacacggagtcaaccggaaggccgccggttcttcccaggtggatcacgttcggcgccgtcgtcggcatgcagggtggcacagacgccgtccgcagagtttgggaccagctcaaggactacgacgtccctgtctctgcgttctggctacaggattgtgttggccagaggaagacggcgatcgggtctcagctttggtggaacttggagctcgatgacgcccactacaatg

SEQ ID NO: 968 - DNA, 292 bp, Zea mays
  Clone ID: LIB3136-040-P1-K1-E1
tccacacatttaaaaattctcctcttttcctcttcctctcccgttgccactcattttgtttgcctacttttaccccttcagcactaacaacctccttgaaacctacacatctttccctccaagcccctccttcctcagcaacaacagcacctcccttttccttctccctttcctgactactcctgatgacaattatcctatccttaacctctcctagtcatctcctttaatttcaatcaactgcttcctcataatatatccctttcctcaaagactgtacctttttcatatt

SEQ ID NO: 969 - DNA, 392 bp, Zea mays
  Clone ID: LIB3136-040-P1-K1-E10
cgcctgcagtcttgcaaagcaggcttttgtttaggccatctcggaactggacaccctgatgtaggagtcctacaaggacagcactttcatcatgcagctccttcgtgataacttgaccctatggacctctgacatctcggaggaccctgctgaagagattagggaggcgcccaagcgcgactcgagtgaggggcagtaaagccggctttatgtgcctagaaactagtagctagtgtttgctgctgtcgaatgacactatgcaatgtgatctggaacctggtttcttgggtgcgacgcttgtagccgtgttatgactgtcgtccgtaaaatttgggggctccccggaagggatgctgcctgtcaaggcctcggtgtcctacctcgtctgttgc

SEQ ID NO: 970 - DNA, 374 bp, Zea mays
  unsure (1)..(374): unsure at all n locations; Clone ID: LIB3136-040-P1-K1-E2
tttcntttttttcttcttctttttttttttcttttctttttttaccttcttttatttttttttttttttttcttttttctttttttttttttttcttttttcttttttcttttttttttgacttttttttctttttctgttatctatttatttttttttttttttttttttttttttctcttttttctttttttttttttttttcttttttcttctttttattttgttttttttttttttctttctttttttttctttattttttttttttttcttttttttctttttttcttttttctttttctttttctttttttttttctttatttttttttttttctttttttttttttttttctttttttctttttttt

SEQ ID NO: 971 - DNA, 422 bp, Zea mays
  Clone ID: LIB3136-040-P1-K1-E3
catgggtccttttggtgtaataatgacagatcgtggcaccaatcaacctattgagaaagtggtggcatctgaagatgcagagtgttgtatttgcctatctgcttatgatgatggtgcagagttgcgggaactcccttgtgggcaccatttccactgcacctgcatcgataagtggcttcacatcaatgcaacatgccccctgtgcaagtacaacattcggaaaagcaacagtagcagtggaagtgaagaagtatgaatgcaaccgcttgacaatgccaatctgtttaaacttcgtgcctgtgtcgttgctaatgtaactccagggcttgagcagtgtaaattcttgtactaaaagaagtgctgatagagtcaattatgtattaaagttactcaaagtgctgtctatatgtcgtataagtaat

SEQ ID NO: 972 - DNA, 403 bp, Zea mays
  Clone ID: LIB3136-040-P1-K1-E4
gtcagcccctctcgtttttcatccgcctttttctccaaccgcgtgcgctccacgcctcctgggggaaagcgagagcttctgcataagaacaacaaatcaaaagcgtgatcagctcggtgccaacaaaacctcaacaaccaagtttcatgtctgatctcgacgtccagcttccatctgcctttgatccgtttgctgaggcaaatgctgaggactctggtgctggtcctggaacgaaggattatgtgcatgtgcgcatccagcagcgcaacggcagaaagagtctgactacagtccagggtctgaagaaggagttcagctataacaagatcctcaaggatctgaagaaggaattctgctgcaatggtactgtagttcaggacccagagctaggccaggtcattca

SEQ ID NO: 973 - DNA, 387 bp, Zea mays
  Clone ID: LIB3136-040-P1-K1-E5
gcccgacccacgcgaccgaaagcctcttccgcctccataaccacctattttctccccaaccaacatatctccaacatggctctttctaaagatacaaagtcccctcacttcctaatcttcttattattcacgtcccaacctccattaaactccctctttttcaccactaccactgaacctccatctattatatgctctacatcaatacaacattccccttctgcaccttcaacactcataaatacaacaatatccatttgaagtgaacaaacactaattcaactcgctttacaattccaaatcattttaaaccttctttccttcttcctatgctaaatctaacatacatttctttgtatcactttaaacccttttcacctaaaataa

SEQ ID NO: 974 - DNA, 175 bp, Zea mays
  unsure (1)..(175): unsure at all n locations; Clone ID: LIB3136-040-P1-K1-E9
catttacataanacttttttagaaacaaaaatgcactatataatctgcaaatttcttcaagaaacttccttcccctactaaaaaaccttcttcttaattaaaacctcatctccttcattttctctccctaacaattattattatccctagccatatttcttctactatttctctt

SEQ ID NO: 975 - DNA, 286 bp, Zea mays
  unsure (1)..(286): unsure at all n locations; Clone ID: LIB3136-040-P1-K1-F10
ggaaaaacnggcccgacgcacgcgtccgagaaaatttctcanaaaatgtgaaaacaatctttttccgaggacattagtatctattcagacctacttagatagaatctatggtttcnatatgcaagattcatttcactattgcaagtacagacgagatgaaaaccaactctatatattttctgatgacagtgttcccagttggctttacaacagcacaacacatatatttttgacactatgtttggatcaaatatatttggaaatatatatttttgctcctctttcc

SEQ ID NO: 976 - DNA, 499 bp, Zea mays
  unsure (1)..(499): unsure at all n locations; Clone ID: LIB3136-040-P1-K1-F11
cactacatggcgaagcagcagcagcagcagttcatggcggcagtggcactggtggtgcttcgcttgctggcggcggcggcggccgagacggcgtcggcggcttcgtgcaacgccgggcagctggcggcgtgcgcncnntnnattattttttttttttattttttnnnttttttnnttttttatttntttttttntttttttnttttttttttttatttttnttatataatatatatttattattattttaaatttattatttatttaattttttaataattttaattatttttaaataatattttaatttttattatttatttttttttttgtggggggtgttgttgtattttataattttatgtatttttattgtttttttatttttttttttatttattatatgattatatatttttttattttattatttattatgtttttttgtaatatttattaatttttattatgtttttttttttttttattttgatttttt

SEQ ID NO: 977 - DNA, 428 bp, Zea mays
  Clone ID: LIB3136-040-P1-K1-F12
cggacgcgtgggttttttgcatcgaaggattaagcaaaccaagcacatacacacacatatgatatattgtctacaaagtacaaactcgcaatgttcagagccatttttttgaagcaaagacaagaaaataaaaggtgcagacacatagctgttgtcacggatacatagtaaaataaggtacatgtccagcgccagattgtacttaaagaaagtgactgaacatctaagcatatatactaataccgcagctactacacgcgtgcctgcaggcacgcccacgcaagcgtttcttcatcttcagaacattattcctgaaacacgggggcggaagaaagagttgaagggatagaaattgcaagtaccagaaagagccaatctctgttactgcaggctcttaccctttgttcccccctatgtacacaagcacc

SEQ ID NO: 978 - DNA, 388 bp, Zea mays
  Clone ID: LIB3136-040-P1-K1-F2
cccgggcgtcaacgggcttggcatctctgcggccaggctcgacatcgaggtgggcggcgtggtgccgctgcacacccacccggcgggctcagagctcctcttcgtgacccagggcaccgtcgccgccggcttcatcagctccggctccaacaccgtctacaccaagacgctgtacgccggcgacatcatggtgttcccgcagggcctgctccactaccagtacaacgccggcaccggcgctgccgtgggcctcgtcgccttcagcagccccaaccccggcctgcagatcaccgactttgcgctctttgccaacaacctcccgtccgccgtcgtggagaaggtcaccttcttggacgacgcgcaggtgaagaagctcaagagtgtgctc

SEQ ID NO: 979 - DNA, 461 bp, Zea mays
  Clone ID: LIB3136-040-P1-K1-F4
cggagggaagccctgcggcgacaagggcttctacatcgagcccaccatcttcacggacgtgaaggacgacatgacgatcgcacaggatgaaatctttgggccggtgatggctctcatgaaattcaagaccgtggaggaggtgatccagaaagcgaacaacacccggtacggcctggccgccggcatcgtgaccaagaacatcgacatcgccaacaccgtgtcgcggtccatccgcgccggcgccatctggatcaactgctacttcgcgttcgacccggacgcgcccttcggcgggtacaagatgagcgggttcggcaaggacatgggcatggacgcgctcgacaagtacctgcagaccaagaccgtggtcactccgctgtacaacactccatggctctgaccgaccgacctcatccctgtccgatgaacagttcaacatcacaaaacaagaagaaacatgt

SEQ ID NO: 980 - DNA, 165 bp, Zea mays
  unsure (1)..(165): unsure at all n locations; Clone ID: LIB3136-040-P1-K1-F5
cgcgtccgaaccaaaccctcacgacacgacaccaagnctagtagctcgagggcaccaatcatggcctagcatgttctccagcgtcgtcgggctcaaccccgccgcggcagtgcctcatgccgccgccgcctcatcgccggcgaagagggtgcagctggccgcgcc

SEQ ID NO: 981 - DNA, 204 bp, Zea mays
  Clone ID: LIB3136-040-P1-K1-F6
gcaagcaccagaactcttttttccccaaacttgcaagtcgcaacggccatgtctccgctagcccgccgcctcgaggtcctcgtcctcctcgccgccgccgtcgcggccacggcgtccgccgcgttcctcagcggcgcggcgaacgacctgatgcccaagtacggcctcccgaaggggctcattctggacttcatcacctcatac

SEQ ID NO: 982 - DNA, 297 bp, Zea mays
  Clone ID: LIB3136-040-P1-K1-F9
gtcttgaaaggcgagagagagagagagaagtgagagagaagagagagagagagagaggacgccgagactccgctagaggctgccgagtacgtaccgtaaactcagcgactgcgaaggagggataaggggatggccgggatcggaccgatcaggcaggactgggagccgatcgctgtgcggaagaaggcacccaccggctacgccaagaaggatgagaaggccttcaacgccgcacgccgcgccggtgcggagatcgataccatgaagaagtacaacgctggtacgaacaaggcggca

SEQ ID NO: 983 - DNA, 331 bp, Zea mays
  unsure (1)..(331): unsure at all n locations; Clone ID: LIB3136-040-P1-K1-G1
gcccacgcgtncgcgatgcgacaaagacggttaccaatggatgtatctgtgcacgggcgctgtcaagcttctcagcacattcagaccggcaaggtccgcctactcatgctccatgctaaaacgcttaacatctgcgcgaaccacctcttggccttcaccacgaagatgcatgagcatgcggtcagcgacaagtcgtgtgtttggcacgctgctgactttgccgatggcgaacttaaggaggagatgtttgccatcaggtttggttcggtagaaaactgcaagaagttcaaggagttggttgaggagatagctgagtcgcttacaaagaacg

SEQ ID NO: 984 - DNA, 153 bp, Zea mays
  Clone ID: LIB3136-040-P1-K1-G10
ggaaaacccgggccgacgccacgcgtccgtaagtcttttcttacactctggaaatttgttaccttaccaccagcccttatatcatttaggtgtcatttacatgttataaacccatcatatcaccttcttgtcttatgataccaaaacaagaca

SEQ ID NO: 985 - DNA, 434 bp, Zea mays
  Clone ID: LIB3136-040-P1-K1-G12
gttgattttgtacacgagtttgcactgcataggcagataggctggaggatacgctaactgtgatatttgtgtcacagctcaaagcaaacatgatgctacataggctggaggatacatcaaagttggacctgttgtgaattatacttctttttgctcttgtgcgtgcgaggtttccattttcattatttgtatttcacagcagacagtttattaactaaatactgtaacgtcacagtaagttcagtttaacttcaaacattgtagttttgaggagattgcaaatatttcgggtcaatgcaattggtgcttttgatagccatgcaaaatgcctcttctggtcatgatcgtgtttgctttatgctgatgttcagccatcattcacgttaaactggcatgttaatgtaaaccgtgcaatcagctgggtttgatattgt

SEQ ID NO: 986 - DNA, 437 bp, Zea mays
  Clone ID: LIB3136-040-P1-K1-G2
aagaaagaaaagaatcaaggctagtggatattcaggaaaaagaggcccatatcagtgcagaaggtgttttcagtttggacatatagagaagggttgtactgctactcaagctgaattagaacaagagcttccaccacctcatccaaagaaaccaaaaaaacaaagaaaatccaaatctgaagctgttgaagtctctatggttgatgtcgagccatctcaaaccgacggtgttccaaaagtgatgtctagcccaggtgtaacaacaagaagcatgtcttctgcttctccaactagtccaggtcctacaacaaggaggaaggcatccatctcaccaggaggaattaatcggaggctcattattagctagatatagtagttgtcattctctattttgtgtgtgggcatggctgtgcaactattttgtgtaactatttttt

SEQ ID NO: 987 - DNA, 352 bp, Zea mays
  unsure (1)..(352): unsure at all n locations; Clone ID: LIB3136-040-P1-K1-G5
cggacgcgtgggcgacgaaaccctagaaattctccggcatgatgtccgccgccaatcctcgantcaagtccacgccgctgcctccgcccgcggcgcccaccgcggcgtcgcagaacccgcaggtcgctgcctccaaggcgtcgtcctcgtcgacgtccgccgccgaccccaacccaaacaagcggaccaacccgggcaacgccgctgccgcctccgcgcccccagagcctaccccgagcgtcaacggggaggccagccgctcgcctctggtcccctcgccgctccctcaccctcacgaacagcaccaccctccgcccggcgcgtcgcctcttctgccgcccctgcccccgtc

SEQ ID NO: 988 - DNA, 302 bp, Zea mays
  Clone ID: LIB3136-040-P1-K1-G6
tgcagaacgtgcaaagtctaccatgaacgttatgaggcggaatggcctttgtcctgatctgattagctggtctatactcatagatatttatggatcttctcaaaatagggatggagctgttcaggcactaaggagaatgcagcgagttgggatgagacttaatgtctctgcatatactgttgctattaaggcgtgtgttgaaaacaaagatttgaagttagcactgcacttatttgaagaaatgaaaacacaccaactgaagcccaatttggtgacgttcaaaactcttctgacagcacgca

SEQ ID NO: 989 - DNA, 395 bp, Zea mays
  Clone ID: LIB3136-040-P1-K1-G7
ctgactgttcattcagacctcataccagtttctacgacgagctgtgaggagagggcaatgaaacaatctctgtgaggaaggcggccatcgaaaggtacgaggtgatcaaggacataggatcgggcaacttcggggtggccaagctggtccggtacgtcaggaccaaggagctcttcgccgtcaagttcatcgagcggtggatgaagattgatgagaatgtccaaagggagatcatgaaccacaggtcactgatgcattcaaacatagttaaatttaaggaggttgtgctaacttccacacatttggccatagttatggaatatgctgctgatggtgagctatttgaaaggatctgtaatgctggaagatttagtgatgatgatgcgagatttttc

SEQ ID NO: 990 - DNA, 340 bp, Zea mays
  Clone ID: LIB3136-040-P1-K1-G8
gtgcgccatcaccctgagactgcgacagcatctctgtgatcgtcgcccatacggagaacaagttcgacgggagtggcgtcaggaggctactgtcgaacaagttcgagttcgacaagctgctggactctgtgtggagagaggtcccgaaagaacgcaaggacaagcaggcgtcgaaagagtacctccggatcgcgctcgacaggatcgccgattcggcgggcctgccgcctctgggggccgtcggtcaggtggatgccgtggtgaacgaggcgttcaagatggcgaaagccgacgacctcagggcggtggacgaggcggagttcaagaagctgctgaccga

SEQ ID NO: 991 - DNA, 455 bp, Zea mays
  unsure (1)..(455): unsure at all n locations; Clone ID: LIB3136-040-P1-K1-H1
caggcatgttcatggtaagagggttctggttttgaccaacacgaccgtcgcgccgctttagctggacatggtgacatgggcactcacccacaacaacctgaatgtatcagtggaaagcgtgatcctgcccgacggtgaaaagtacaaaaatatggacacgctgatgaaggtgtttgacaaggcagtcgagtcccgttttgaccgccggtgcacatttgtagcactgggtggtggtgtcattggggacatgtgtggttttgcagctgctgcattcctccggggcgtcaatttcatacagataccaactactctgatggcccaggtggattcatctgttggtgggaaaaccgggattaaccacccactaggaaagaacttgattgnngcattttaccagccacaatgtgttctaattgacacanatacactgaacacattgcctgacagggagctag

SEQ ID NO: 992 - DNA, 291 bp, Zea mays
  unsure (1)..(291): unsure at all n locations; Clone ID: LIB3136-040-P1-K1-H11
gtctgaccaactatgcagctgcctactgcactggacttctgttggctcgccgtgtgctcagcatccgtggtttggacaaggagtatgagggcaatgttgaggccactggtgaggacttctctgttgagccagctgatgagaggaggcctttccgngctctcttggatgttggccttatcaggactacatcagggaaccgtgtctttggtgccctcaagggagctttggatgggggcctggatattcctcacagcgagaagaggtttgctggattcatgaaggacgacaagc

SEQ ID NO: 993 - DNA, 377 bp, Zea mays
  Clone ID: LIB3136-040-P1-K1-H2
cgatgaggatgatcaaggcacggcttacatatcgaacctaacatgcaaaggagaatattagtctaacgacgagtatgatggggacgttagtacaagaagcaatgtaaatgacaaagataccactgaaggcgaaacctcatgcagaaattacaaggaagacaactgttgcaacattgaagatagtagcaaaacatacgagcagaatagtggagaagatgacaccagtagtctagtagatggaaatgagaagtatgagtctatgaatactaaagacgatgatagcagccctggaggtgaggacacatgcaatagatatgagccaaaggttgaaggcgatgaaaattgtgttctttgagctgagtgcattatcaacaatt

SEQ ID NO: 994 - DNA, 247 bp, Zea mays
  Clone ID: LIB3136-040-P1-K1-H3
atactttatacccaatagctctcaaacacttattcttgacattcttaaacctcatactaagatctcttttaatcaacattatgactatcatcaacctcatcacaaacacgcttccataaaccatattaaccaattcgaaaccctagtcggcatcataaatcacaacaccaaaatcatgacccacagaactaaaacacccagcattcgccatatgtacattcacctatcatccaccatcattacatat

SEQ ID NO: 995 - DNA, 223 bp, Zea mays
  Clone ID: LIB3136-040-P1-K1-H5
gaaaacccggcccgacgcacgcgtccggccgcatcttctatcagtaccctctggtgttctggtcccaggtggccgcccactacgctcgtttcttttaggcgagcaactgctaccctggatcattggacgcgcagaaggtggccgggaagatcgtggtgtgcgtaagcacggacccgatggtgtcgcggcgggtgaagaatctggtcgccgagggttttatctc

SEQ ID NO: 996 - DNA, 305 bp, Zea mays
  Clone ID: LIB3136-040-P1-K1-H6
ccgggcggacggacgcgtccgctggagaggctgcttgccagaggaaggactaaagtggggcttcttgatatggctgcttttgacttactgagggctcgcctgtattgcgtgtgtagctatcgggaagtggttacaccgaagacatgcacttcaacagagagcacaacaaggaattccagtctctgaacatggggttttggttgatatgatccgcgttcctgactgggcatttgaggctgttggcctggaaatgagagtgggttaagaaactgcatatcatcctgttctttattttactgatgctc

SEQ ID NO: 997 - DNA, 257 bp, Zea mays
  Clone ID: LIB3136-042-P1-K1-A1
gaccaccacccctttctttctcgccacctactctacttctccctgtcctttctctctctactagttgggggtctagggtcgccttgacggcagccataccacgcgcgcacacgctccgttcggccgtacccgttcttcatttcccactgcacacaaatactactgtgactccgttagggagcaacaggaggaagaagcaggggggagaggggaggggtggtttggccttcttactcctgtttttcttcccttctgta

SEQ ID NO: 998 - DNA, 462 bp, Zea mays
  Clone ID: LIB3136-042-P1-K1-A2
gcgagaagcccagaaggtgagaagatagatagagagagagagagtgatcggtacaaggatcaccgctgtgcctgcgcgtgctgcttcaccgaatcgagacagaccctgtccgaatccgagccaagggatggcaaccggtagtgaagcctcgaaggcagctgagactgtggttgactggcataaacaggacagcaagaggatgctccatgcggtttaccgtgttggggatctggaccgcacaatcaagtactacacggaatgctttgggatgaaactgctgaggaaaagggatgttcctgatgagaagtacaccaacgccttccttggctttgggccagagaacaccaactttgcagttgaattgacatacaactatggcgttgacaagtatgacattggaacgggctctgggcattttgcaatttgctatgatgatgtgtacaagttagctgagaatatcaa

SEQ ID NO: 999 - DNA, 419 bp, Zea mays
  Clone ID: LIB3136-042-P1-K1-A3
ggctgaaatcaggcgcttcttcgaggactacaagaagaatgagaacaaggaggttgctgtgaatgactttctaccagcgagcgccgcttatgaagccatacagcactctatggacctgtatgctacatacatcgttgagggcctgaggaggtaggattctgatggctaggaaaggtggggaggatgttgacgaaaaactgggagaccatttaccgcatggaacgagtaccgctattattttatttgtgtcgcgtatactgctagtagtgaaccctcaatcaaagaccgaaatcccctggggagtcggagtcggtagtaggtgaagctagtaacaaggttggcgaaatattattttttgggctgactgcctatatatgttgtaccggaatggtatcgaaaaattcattcgcttttgggat

SEQ ID NO: 1000 - DNA, 409 bp, Zea mays
  Clone ID: LIB3136-042-P1-K1-A4
gagatttcgacggcctatccgactgcatgactatgaggagcagcacatgagaaacccttcgaagttcgcaatactactacgagcaagaattccctagtgtcagccgtctccggcgcgttctctttgaggtaccagaggaggacggcatgggtcggcaagtgaaagaagaactcatggcgctggtggaagcgaaacatgctggggtggcatacatcatgggccattcttatatcaaagctaggaggagctcaagtttcctgaagaagtttgctattgatgttggctactctttcctccggaagaactgcagaggtccatcagttacgctgcacattccacacattagtctgatagaagtgggcatgatctactatgtttagcctaatgcccatggccatagttgacatgt

SEQ ID NO: 1001 - DNA, 343 bp, Zea mays
  Clone ID: LIB3136-042-P1-K1-A5
gaccaccacccctctcttccccgccacctactcttcttctccctgtcctttctctctctactagtactaggtctagggtcgcctcgccgccagccaaccacgcgcgcacacgccccgtccggccgtacccgctcttcattccccactgcacacaaatactactgtgactccgtgagggagcaacaggaggaagaagcaggggggagaggggaggggaggggaggcattcgtgctccttttttccttcctactgtacgagtacaggactgcgctgcctgtctctcctcgcctgctgccgacttcgcggcctcgtcgtcctgccatgtccaccatggacgaaggc

SEQ ID NO: 1002 - DNA, 356 bp, Zea mays
  Clone ID: LIB3136-042-P1-K1-A6
tcggccctgacgatccatcaaccgggaacatctcttttagcttggatccggcctcctcaaaccttcagatgttcatttggaatgggaccttgccgtatttccgttcctctgttgttaatgatgtctccgtatccggcggcacgtaccaggccaacaatacctctgtcacataccaagggatattggtcgacacaggggatgagatctactacacgttcacagtcttagccggttcgccctacatgcacttctcacttcactacacaggcaagatgaggatcctggcctgggaaaatagcacatcatcctgggtggtcatttttgagggccctagtgttggatgtgatctctacgcc

SEQ ID NO: 1003 - DNA, 228 bp, Zea mays
  Clone ID: LIB3136-042-P1-K1-A7
tcattcattcattgatagctgactggcgaggggctatatgctaacaacggacggaaaacacaccacaaatgggtggtttttcacgtgcttgtgggacttgacaaatgatatttgcatgcgagcacccacatcaaatctgtagaagagttcagcgtggattaaaatcagactgattgaaaaaactggtgctagggaagagatcgattcaaatgcataagctttgcagta

SEQ ID NO: 1004 - DNA, 363 bp, Zea mays
  Clone ID: LIB3136-042-P1-K1-A9
ggaacttcgtgtcatatttggctgtctaccaaagaagcggcaaacctttttgttttcagcaacaatgttagacaatctgagatctttgcttgaactttcggggaacaaatcatacttttttgaagcatacgaaggtttcaagacagtggagaccttaaagcaacaatacatccatgttcctccacagggaaaagagcttcatctttggcatcttttgtcagttatgaagggaaaaacggaagaccctattcgttcagccattgtatttgtctctacttgcaaagactgccaatatttagatctgctgctggaagaacttcgttatcctgcggttgctttgaactctcacaagttttaagcaca

SEQ ID NO: 1005 - DNA, 413 bp, Zea mays
  Clone ID: LIB3136-042-P1-K1-B1
ctcattgttagctgactggtgagggtctggttctagcaatggcggaaaacacccacggtagtggtcgccacgtgcttggggacttgacaaatgttatttgcaagcgagcagccacatcagatctggagaagagtacaggtgggataaagatcagacggattgaaaagactgggactaggaaagagtacgatgcaaatgcaaaagctagcagtattgggaaaggaattgtatttggccatttgtttgatgatgttgccagagagaaatttcaaagccattctatctttcagaatagtagggttcaacacatagctgccgaagcagctggactcttatccaaggaagccaatgactcgaagaaccactatgcatcaatcggtccattagatctcagtgattaggagcaggaatct

SEQ ID NO: 1006 - DNA, 432 bp, Zea mays
  Clone ID: LIB3136-042-P1-K1-B10
ggcgctccctcgacattgagaggcccaactactccaacttgaatcgccttgtgtctcaggtgatctcatcgctgactgcttctctgaggttcgatggtgccctcaatgtggatgtgaacgagttccagaccaacctggttccttacccgaggatccacttcatgctgtcctcctacgcaccggtgatctcttctgcgaaggccttccacgagcagctgtctgtggcggagatcaccagcagcgcgtttgagccggcttccatgatggtcaagtgcgacccacggcacggcaagtacatggcttgctgcctgatgtaccgcggcgacgtggtgcccaaggacgtgaacgccgcggtggccaccatcaagacgaagcgcaccatccagttcgtggactggtgcccgacggggttcaagtgcggcatcaactacc

SEQ ID NO: 1007 - DNA, 416 bp, Zea mays
  Clone ID: LIB3136-042-P1-K1-B12
ttccaatcttggtggtttcagaaacatggttgacaaaaggacagcactcgagaatttggatatgatcctattgtgccttgatgaaattgttgatggagggattgtacttgaaacagaaggaagagagatagctgaaaaggtgtctggacatggattggagggtgcttcatcagctgagcagactttagtcaacgccctaacgcaagcaagagagcattttgcgaagtctcttctcatgtgatgctatgctttatatattagggcgacgatggagtatctattactgtgtctggataacacaattttttttttttggttagcatggggtccaaaaaaaaaaaaaaatgtttttaaattttctgatatgtgttataattggctttgtttgtgtttcaataatttttattatttttaat

SEQ ID NO: 1008 - DNA, 345 bp, Zea mays
  Clone ID: LIB3136-042-P1-K1-B2
tcggtaaacaggagctgatgcgaggaggaaggtctctccagatgtggccagcgggtacgcgcacagcttgaccttcaaggatctgcttgtggcaactggctacttcaacgaggccaatttcatcggagaaggtggattcgggaaggtgtacaagggcaagatcaacggacagatggcggcagtgaagcagctcgctcgagacggcgtgcaggggaggaacgagttcttggtcgaggtgctcatgcttacagtgctcaaccatctgaaccttgtcagcttggtcgggttctgcgcgcatggggacgagaggctgctgttctacgagtacatgccgttcggaagcct

SEQ ID NO: 1009 - DNA, 419 bp, Zea mays
  Clone ID: LIB3136-042-P1-K1-B3
caccttcccagccgccacaaaacaaacgagccgcattgctcctgaccgaccgctcttacttcccttctctctctgtttcttcatttctactccacctgccccacagctactcggctgccagggagaaccagccgttagcttctctactccctctcttgtttcacgttccttcagcgcgttctggtggccagcgcatcgcagccaccgcgctcaactgtaaggcacgcgctagcggcttttcggtcgtctctatgcacagtgaaacgggcaccgcagacctcgccggcagcgagctcatcccttcgggcgggtgagctgctgtcggccgggaactgaccgcagtccgagcacgacaggttgggtgtctgtatcttgactgtctttaaactttaaaacctggatctagtcctcatttactc

SEQ ID NO: 1010 - DNA, 318 bp, Zea mays
  Clone ID: LIB3136-042-P1-K1-B6
gctaggtatgtggttgagagaatggatggtgatctgtgggataaagttcttcagcctgagaatgaatatagaaggcaactcattgaccaagtggtttcgactgcgttgcctgagagcaagagccctgagcaagtgtctgctgctgttaaggctttcatgactgctgacctgcctcatgaactgattgagcttcttgaaaagattgttcttcagaattccgctttcagtggaaatttcaatctgcagaacctgctcatcttgactgctataaaggcagatccatccagagttatggactatgtcaacagacttgataac

SEQ ID NO: 1011 - DNA, 464 bp, Zea mays
  Clone ID: LIB3136-042-P1-K1-B7
cttatgatcatgaagaacaaatacggaaacccacctatctacatcaccgagaacggaatcggggatgttgataccaaggagacacctctacccatggaggatgccttaaatgactacaaaaggctagattacatccagcgccacatcgctactcttaaggaatcaatagacttgggatcaaatgtgcaaggctacttcgcttggtctctgctggacaactttgaatggttcgccggcttcaccgaacgttatggcattgtctacgtcgaccgcaacaataactgcacgcgctacatgaaggagtctgccaagtggttgaaacagttcaacgccgcgaagaagcccagcaagaagattcttacgccagcttagaaatcgggggcctcatgatgtgggtgcagcccataaaaaactggtgtgtaggtttgaaaccgaaatttttttcttgttttgcgccacgagaa

SEQ ID NO: 1012 - DNA, 365 bp, Zea mays
  Clone ID: LIB3136-042-P1-K1-B8
caccgcttcccgtgcagcgccctccctctacgttcccccatttcctgtgttggcggcgatggcgcggcacttcgtgctcaacaccggcgccaagatcccctccgtggggctcggcacctggcagtctgaccccggcgtcgttggcaacgctgtctacgccgccgtcaaggcgggttaccgacatatcgattgtgccagagtttacggcaacgaaaaggagattggtttggcgctgaagaagctatttgaagagggtgtagtgaagcgagaagatctgtttatcacctctaagctatggaatgatcatcatgctcctgaagatgtgcctgaggcactaaatgacagcctgaatgatttgcagcttg

SEQ ID NO: 1013 - DNA, 439 bp, Zea mays
  Clone ID: LIB3136-042-P1-K1-B9
attttgaaaaaatggaagcagatggtcattctattgaagacaatgccaacctagtcgatgacaacacaaaagcaaataatgatgctgattggctacttggtattgaaggaggtgataccactgttgagcagattcttttaagcattcaagctgctcaagacagggtattcagtctgagatcaaatctcaagcaagcaatggctaggaagaataagggaataacccttaaaattaacacattcgtcattggtacacacaggtcaaattgctcaccaggaaagggcaaagttgctggactgcatgagagatctccccaggacacatcagaatgtgatatggatgattctggcatgcctgatagtgctctctcaagctatggagaaactagcaacatggatatttttgagagcaccatgagcctattgtctgaagggccaca

SEQ ID NO: 1014 - DNA, 433 bp, Zea mays
  Clone ID: LIB3136-042-P1-K1-C1
tcgccaagacactgagctggtctgtttagttggaaagccatctgtactgtacgtttttcgccgatcatggaggatgagaggaacacccatcatcaccagggcggtgagcatgcccaggaccaggagaacgaggtgaaggacaggggactcctggacagccttctcggcaggaacaagcacgacgaccagtagaagaagaaccagcaggaggaggaggagctcgcgaccggcatggagaaggtcacggtggctgagcccgaccacatggaggtgggacacgaggccgtcgagatgaaggacagccttctcgccaagctgcaccgcaccagctccagttccagctcgtcgagcgacgacgaggaagaggaggtgatcgatgagaacggcgaaattgtcaagaggaagaagaagggccttaaggagaatgtcaagg

SEQ ID NO: 1015 - DNA, 402 bp, Zea mays
  Clone ID: LIB3136-042-P1-K1-C11
gttgcgctggcctgcagtactccaagatgaagcttatgtctcttcagtaccatcccgagtctttccctggtccgcatgactccgacacagccttcggcgagtttatagagctcatgaagagcaacagattgtaagaaaggggatcaggggagtacttgaaaaggtcaataattgtattggtgctccctcgcaccaacctcaaaagaatttgttgtatctgtagtgtttttcttttggttttgggacgttcatgtgcttgaatttttgggtccagaggacatagcataagatgctctgcgcattgtaccatgaaatggcctggctggatttcgtgaagataacattgtattaaactgtacggttcctgtctactactttgacagtgctttggtgattttttaa

SEQ ID NO: 1016 - DNA, 271 bp, Zea mays
  Clone ID: LIB3136-042-P1-K1-C2
cggacgcgtgggcgcgaccatccgacgctgcagtgacggctatgcagcaacaaagttccttacgaccctaacctgattaccggcatccaaggcctgaatcagtactggtgcaacatcaggcgccccagcaacaacggtcagagcagctggaagaacgcctgtaagaaggccgcagcctgctccagcctgagagagaaagcctacttcgggactgtcctctccttacgcggccggatgaacccactcggtcgtctcaaagccacaagtatgg

SEQ ID NO: 1017 - DNA, 433 bp, Zea mays
  Clone ID: LIB3136-042-P1-K1-C3
ccatgacctactgctgcggtaacttcggtgttgacaagggtgccagggccattgtcaaagccttcttacacataaaatgcactgtgctggcccctcccaagatcattgccaccaaaccggccgatggagcgaagataaactatgtcgaaggtgacatgttcagtttcattccacctgctcaaactgtcgtgctaaagcttgtgctgcaccacctgaccgatgaggagtgcgtcaagctcctggctcaatgccggaaggcgattcctccacggtaggacggcggtaacgttataatcggtgatattatgattgaccactctgggcttatgctggaaactgacctgctgatggacatcggcatgatgaccatgacaaatggacggctgagagatgaaaaagaatggagcgagctcttcaccaaagcatggttcag

SEQ ID NO: 1018 - DNA, 175 bp, Zea mays
  Clone ID: LIB3136-042-P1-K1-C4
gtccaggacatcaggccccagaaataagtcctaacgcatctgtcctttctacttgtcttgtgacccaagtacgaactcggtgaactctttctcctcgcgcaggaccggtgcacaatcaaggattgcaggccagtcctgccaatgtagtgcgttttggacttggtgtggccgcgac

SEQ ID NO: 1019 - DNA, 458 bp, Zea mays
  Clone ID: LIB3136-042-P1-K1-C5
ccggcagtccgcggcgaggtccaaggagaggaagatcaagtacaccagtgagctggagaggaaggtgcagacgctgcagacagaggccaccacgctttcggcacagctcacgcttcttcagagggacacctctggtttaaccactgagaacagggagctgaaactccggttgcaggccatggaagaacaagctaaacttcgagatggtatgtccttgtctttctttggaaggtctaaagccactgtcatataaggcccagaaagagactccacttttcctgtttcaagaacattacgaggcaaatgctctaaatgatgccttgagggaagaagtccagcggcttaagatagccgcagggcaggtccccaacatgaacgggaatcccttcaatggaggactatcacagcagcagcaggtgccaagctattttttacatacacagcagatgcaatacttt

SEQ ID NO: 1020 - DNA, 356 bp, Zea mays
  Clone ID: LIB3136-042-P1-K1-C6
gctaatgttgatgatgtagggtataggcttgttgcaatttatacacctgtaagagaggatggagttgagggacaacctgtttctgtttcaacagaacagattgcagttgagcctgtactttacagggaagtgaaacagaagctcgatgatggttcagtcaaatttgaggttctgtgtgacaaggaccgaacacccaaaaaggcacaagtaatgggccatttggagcggtgggttttggaagtcaaccgaaagaggataaaagtagtgaagcctggatctaagacatcattcccgagtactgaagtacgaggaacctacgcttcaccgttccatgtcgagctgtatcgcaatgacca

SEQ ID NO: 1021 - DNA, 378 bp, Zea mays
  Clone ID: LIB3136-042-P1-K1-C7
tgcagcttctcaaccggataggtagcaccggagcaggttgaacgctgcacaatccccttcgccgccgtcaagatggtgaacgttcctaagaccaagaagacgtactgcaagaacaaagagtgcaagaagcacacactccacaaggtgactcagtataagaagggcaaggatagcctgtctgcccagggaaagcgccgttatgaccgcaagcagtcaggatatggtggtcagaccaagcctgtctttcacaagaaggccaagaccaccaagaagattgttctgaagctgcagtgccagagctgcaagcactactcacagcacgccatcaagagatgcaagcattttgagattggtggagacaagaagggcaagggcaca

SEQ ID NO: 1022 - DNA, 259 bp, Zea mays
  Clone ID: LIB3136-042-P1-K1-C8
tcgcggacgcgtgggggactgagaagtttgatgcatctaaaacaaaagatagcgagttccaccgtcttgatgggagctcagtccaagcacctttcatgtccagtacagacaaacaatatatcgtggcttacaacaacttgaaggtgcttaagctttcataccagcaaggtgcggacaagaggcagttctccatgtacattcttcttccagatgcaaaagatgccatctggagcttgtctgaaaagctgagctctgaacc

SEQ ID NO: 1023 - DNA, 355 bp, Zea mays
  Clone ID: LIB3136-042-P1-K1-D1
cgtcccacgcgttcgcaactgttcatgccatcactgtcacccagattaccgttgatggaccctcatccaaggactgcttaggtggcagggctgtcagctctaacatcattcccagcagcaccggtgctgccaaggctgtccgcaaggctcttcctgaattgaatggcaagctcactggcatgtccttccggcttgccacgcgtggatgtgtcacttgttgacctcactgtcagaatcgagacgggcgcctcttacgaggaaatgacgaaagctattaaggctgcttccgagggcccactcaagggtattatgggctacgttgaggaggatctgtcttacaccgacttcaccggtg

SEQ ID NO: 1024 - DNA, 294 bp, Zea mays
  Clone ID: LIB3136-042-P1-K1-D10
gggattctttcctgccttcattatgttggaggttattcgatcctcggatgttcgggtcaactttgcaggaagatatactgaaatttggatatttagactaacttcttggattataggcgattggatgttcactttgtacgatgtattagcgttgacattactggaagccctaattgtgagaagtagaaacatatcatgtgtgttgctacgggcattatggatgatttagaataaaattagactatataactacttatacgaaggaataaattgtggcatatgatgatgtggata

SEQ ID NO: 1025 - DNA, 283 bp, Zea mays
  Clone ID: LIB3136-042-P1-K1-D11
gaccaaacgaggtctggtgtgctcaacacttgtaaagcgttcagtgcccaacgaagacgaagacgaatactgcaccttacacaacatgcagacacggaaatataccaagaaagaatgggaggactttaaagaggaatcgaataggatggcgcatggggagtgcacagtaaccatagagtttgtccagagggtcggggacaacgcgcgtcgtttgcaagaagagaaagaggaggacaacttgccagaggaagagatcatggagagcttcagctcggcggaagaa

SEQ ID NO: 1026 - DNA, 233 bp, Zea mays
  Clone ID: LIB3136-042-P1-K1-D2
gcgcgtggacccggaggtgtcggtgacgtgcactgacatgaacctggtgcggaaggccttccagctcgcgctgctgtgcaccaagcgccaccccgcggaccggccgaccatgcacgaggtcgcgagggtgccgctctccctcctgtcggccgtcggcaagcctcccgcgtccaacgcggaggcggccggcgtctacacacgcttacttgcgacggcggccgacctgtggcgcg

SEQ ID NO: 1027 - DNA, 440 bp, Zea mays
  Clone ID: LIB3136-042-P1-K1-D3
cggacgcgcgggtggagctgcagtccgcgattatgcattgtagcgaggaacacaacgtcagaaaaggccactgttagttgaactgtactaccctgaacttcagctattcaaggatctgactgtgcaacgttcctcctgtttgatagatacaatttccaagcttgggttgcagatatcatccgtcctgcttcatatgactattgtgattgataaaatcttggagaaaggcactgttgcgtacttaatagtgcacacggccatattggagtactttacaatcgcagataagacctcagactcggatgctatttgtcaacttatcccccttcttactcaaggggcattaatcatagatggagatgaacctacatacgcttcagaactaccaaagaaagcataagcttagatgaaaaggttgtaagagccacttattgttcgga

SEQ ID NO: 1028 - DNA, 330 bp, Zea mays
  Clone ID: LIB3136-042-P1-K1-D4
ccggggtctgctgcgtctggtggtggtgaaggggagaaattcgtgagatctgttccggatcaggcgtgcgagctcggaaatcatgggtttcacacatagcttcgtggatttgaatttgatgtactaacggagtctatgggtggcaaaaagtctagcagtagtcgttccatgatgtatgaagctccccttggctacagcattgtggacgttcgacctgccggaggcgtgaagaagttccagcctgctgcttactccaactgcgcgaagaagccatgctgatattcgcttgggcttcctcattctagtagtttaggatctcttttctgacac

SEQ ID NO: 1029 - DNA, 444 bp, Zea mays
  unsure (1)..(444): unsure at all n locations; Clone ID: LIB3136-042-P1-K1-D5
gcacaaggccaccacccttgttctcatgttctgcctgctagcgctggggagagcggagtacctcaagtacaaggacccgaagcagcccgtcgctgttcgcatcaaggacctgctgggtcggatgactctcgctgaaaagatcggccagatgacgcacatcgagagggaaaacgccacggccgacgcgctggccaaatacttcataggtagcgtgctgagcggcggaggcagcgtgcctgctcctcaggcgtctgctcaggcttgggccgccatggtgaccgagatgcagaagggcgctctttctacgcgtctgggtataccgatcatctacggtattgatgccgtgcatgggcacaacaacgtctacaaagctactatctntcctcacaacgtcgggcttggagctaccagggaccctgaacctcgtaagagaattggagaagc

SEQ ID NO: 1030 - DNA, 327 bp, Zea mays
  Clone ID: LIB3136-042-P1-K1-D6
gggtggtgccaccatcgcgagcggaggtgttatgcctaacatccatcagcatctgctccccaagaaggctgcctcctccaaggccagtgtcgacgacgacgacaactgagactgcttcctgcagaaatgatccgaccaccgccttgttttgtaggaataggatgatgttgtcttcgatcggggaggagtcgggtatgctgggaaggagaattagattagtatctgtttttttgaatgggatgtgaacgtggctgtgaatctcaggattgtatgctcgttgagaaagaaatggaaggacttcgtgatgcacgatgttgatgccgcatc

SEQ ID NO: 1031 - DNA, 435 bp, Zea mays
  Clone ID: LIB3136-042-P1-K1-D7
tcgcggacgcgtgggtgctgctgctgtcgctggttggccaggagcacaccagctgcttgctgtgtcgccgtcgtagaagcagtcgcgcgctgtcgtccgtctttcttccgtgtcgcgaccactccggcgggtgctgctgcctttcatgctggccacgccaccgacgcttttgtgataccatacggagcgccgtgtcgggcaccgtggaggtgaccgtcctgaatgggggggttaatatggggtgtctttactaggcgcttgttttgtttttgttgatataccttcttttctcgtttttttgtttttctttgctgtttgtttattcttttgtcgttgtactgttttttttttttaggtgttactttttttgtgtgtctcttttgttcttgttttttacttttttttgttgtttgtttttaatttttttcttttttt

SEQ ID NO: 1032 - DNA, 256 bp, Zea mays
  Clone ID: LIB3136-042-P1-K1-D8
aaatattggtcatatggagacagttctgcacagcgttttgagtgccagtatgagctatatatatgttgcatttctacatgcttgggctcagcatgtaatagaaccgtaggaaggttgttgcgagacttgtatggcatgcttaaatttctggataaaatctagcatatactaagtctattacatgcttaaatgtttgaaaaaatatgtatcgagaattggatggaatgcttatattttttgataataaataaatatt

SEQ ID NO: 1033 - DNA, 442 bp, Zea mays
  Clone ID: LIB3136-042-P1-K1-D9
ctctgctctgcaggtcctgaagctccggccgtcttcaacgtcgtcgtggagatcaccaaggggagcaaggtgaagtacgagctggacaagaagacggggctcatcaaggtggaccggatcctctactcgtccgtcgtctaccctcacaactacggcttcgtgccccggacgctctgcgaggacaacgaccccatggacgtcctcgtgctcatgcaggaacccgtccttcccggcgccttccttcgcgccagggccatcggcctcatgcctatgatagatcagggagagaaggacgacaagatcatcgccgtctgcgccgacgaccccgagtaccgtcactacaacgacatcagcgagctcttccctcaccgccttcaggagatccgccgcttcttcgaagactacaagaagaacgagaacaaggaggtggccgtcaacgact

SEQ ID NO: 1034 - DNA, 427 bp, Zea mays
  Clone ID: LIB3136-042-P1-K1-E1
cggtgcccgtgcaccacccgctggagccgtacctggcgctgctgaagctggacggcaagctcgtgctgctgggcgtcatcggcgagcccctgagcttcgtgtcgcccatggtgatgctggggcggaaggccatcacggggagcttcatcggcagcatcgacgagaccgctgaggtgcttcagttctgcgtcgacaaggggctcacctcccagatcgaggtggtcaagatggggtacgtgaacgaggcgctggagcggctggagcgcaacgacgtccgctaccgcttcgtcgtcgacgtcgccggtagcaacgtcgaggcggaggcggcggcggcggatgcggccagcaactgatggcaccgcgtcgttgagtcgaaccacgtctgtgcgccgcgtgcaacgttcggtcggatcgagtcctcgtgcaa

SEQ ID NO: 1035 - DNA, 260 bp, Zea mays
  Clone ID: LIB3136-042-P1-K1-E10
cggacgcgtgggagcagcaatgcggacgaatgtctagcgagacacacacaacacaacagcgacgctagctttcaagctaatagaggcagcagagcagaccatagagagtggagatcagccagcagcagcagcaaggctgagccgccgcccccacgagtggagtggaggcagcagccagcgacaaggctgaatccgggaggtccgcgcgccgcagccgtggctgtcatcgcaggcgccgtcgtcgccgtcgcttgtgagaa

SEQ ID NO: 1036 - DNA, 162 bp, Zea mays
  Clone ID: LIB3136-042-P1-K1-E12
ccacgcgtccgcgatctgcaagtctcgctacgtagcagtgcaatacaaaaaaagcagccgcaatggcgagcagcaccatggccctcttctccacggccttcgccggcaaggccgcgaacgtgccgtcgtcgttcgccttcggtgaggcccgcgtgacgatgc

SEQ ID NO: 1037 - DNA, 336 bp, Zea mays
  Clone ID: LIB3136-042-P1-K1-E2
ctaaagactctaggtgtctcatccacatgtttgccgcggtgatcttcatgcaccgcttgctactgtctagcgcgatccggactttaaatccagaagaagccgattggttctatactccggtatacaccacgtgtgatctcacaccatggggtcatcccttgcccttcaagtcaccacggataatgcggagcgcgattcagttcattttcaaccggtggccatactggaacaggacagagggagcagaccacttctttgtcgtgccacatgactcttgctcatgcttccactaccaggtagagaaggccattgtacgaggcgtccttccgctgcttt

SEQ ID NO: 1038 - DNA, 327 bp, Zea mays
  Clone ID: LIB3136-042-P1-K1-E3
accccagcgtcatcgccgggggcgccggcatttgtgggatctcggcggcgaaaaggctgtgggaggccggtataaccgaccggctgattctggaagcgacggaccacattggcgggcggatgcacaagacgaatcttcgccggcatcaactgtgagttaggcgccaactgggtggagggcgtgaactgctgcatgatgaaccccatctggcccatcgttaacttcacccttaagcttcgtaactttcgctccgactttgacttaccttgctcagaacgtctacaaggaggacggtggcgtttacgttgaatattacgtccagaagag

SEQ ID NO: 1039 - DNA, 251 bp, Zea mays
  Clone ID: LIB3136-042-P1-K1-E4
tcggcactatctggtacaggaaagacagcaaccttctgttctgggatcttgcagcagctggactatggcctggttgaatgccaggccctggtccttgctcccacccgtgagcttgcacagcaaatcgagaaagtcatgcgcgcgcttggtgattaccttggtgttaaggcccatgcatgtgtgggaggaacatccgttcgtgaggaccaaaggattcttggcagtggtgtgcatgttgttgttgatacacc

SEQ ID NO: 1040 - DNA, 206 bp, Zea mays
  Clone ID: LIB3136-042-P1-K1-E5
atcccatcctgtggaatttgcttcctatttccactactgccattctctgacatttgatcagcgtcccgattatatgtttcttgaggcatgtctttcgagaatcgtttgagcgcgaaggctatcaatttgattatgtgtctgactggactctgttgaagtagcagctatccgaccagtgtagtgcttaacatgtgcgttctcatggt

SEQ ID NO: 1041 - DNA, 398 bp, Zea mays
  Clone ID: LIB3136-042-P1-K1-E6
cagaggtccaaaaggccacaggagtgccctggaggtccggagggccttaggaccttgtcctctggcgtggaggctataagaggccggaagagcccaggaggtccggagggccttaggaccttgtcccctggcctggagggccttgggaacatgcggttggcatcaaccgggcactcgttgagttttgttttgctgatgggatcttcggaaggcgtcttgtgagtatcatcttcggaaggcgtattgtcagtacctagacgtatgacttttcccagatgccgataatattgtatcatgaaaggattctggctggacataatatatgttcccagtttacgtttttcttccacaatttctgatgtaacatactgtacagagtgatattatagagcaatagc

SEQ ID NO: 1042 - DNA, 325 bp, Zea mays
  Clone ID: LIB3136-042-P1-K1-E7
gccccagggtcatcgtcgtcggcgccggcatgtctgggatctcggcggcgaagaggctgtcggaggccgggataaccgacctgctgattctggaagcgacggaccacatcggcgggcggatgcacaagacgaacttcgccggcatcaacgtcgagttaggcgccaactgggtggagggcgtgaacggcggcaagatgaaccccatctggcccatcgtcaactccaccctcaagctccgcaacttccgctccgacttcgactacctcgctcagaacgtctacaaggaggacggtggcgtctacgatgaagattacgtccagaagag

SEQ ID NO: 1043 - DNA, 185 bp, Zea mays
  Clone ID: LIB3136-042-P1-K1-E8
cttctccctccctagtcgctccccaaatcggatctccaggccggcagaagttgagcggactgactggtcactgtagttcgatcgaatccgagtagggctgatacagttcgattcggcgggaggcatggcgtccgaaaagcacttcaagtacgtcatcctcggcggcggcgtcgcggcggtgtacg

SEQ ID NO: 1044 - DNA, 281 bp, Zea mays
  Clone ID: LIB3136-042-P1-K1-E9
cgccacagcaacagcgtcaaggacgaggaagggtacccggtcttcgcgctcgtcaacagggtcaccggcgaggccattaagcactcccagggcgagggccacccggtcaagctggtgccctacaaccccagctaccaggacgagttggtgctgtggacggagagtttttacgttggtctctgtttttgttttgttttcatgttgtattttattttacttttacttttacggttttttaattgttctttggttcatttgtgttgtgttttttctttttttct

SEQ ID NO: 1045 - DNA, 318 bp, Zea mays
  Clone ID: LIB3136-042-P1-K1-F1
tcggccccagggtcatcgtcgtcggcgccggctttgctgggatctcggcggcgaaaaggctgggggaggccgggataaccgacctgctgattctggaagcgacggaccacatcggcgggcggatgcacaagacgaacttcgccggcatcaacgtctagttaggcgccaactgggtggagggcgtgaacggcggcaagatgaaccccatatggcccatcgtctacttcaccctcaagctccggaactttcgctccgacttcgactacctcgctcagaacgtttacaaggaggacggtggcgtttacgatgaagatttcg

SEQ ID NO: 1046 - DNA, 398 bp, Zea mays
  Clone ID: LIB3136-042-P1-K1-F10
cttctcttttgtggaaaggacattgaaccagtatggggccgcaaggaattcttgaagttcattatttttatcaactccatctgtggcattcttgcattttgctttgctattggactctactacgtcactggaaaggagagcttccttgtcacaccactttctggtttccacggttgccttgctggctttcttgtggccctgaagcaactcttaccaaaccttgagctttctatgtgctttttctggaaaataaaggcaaagtggatgccattctttgttgtatgtttctcaagtatcatggccttcatcgtgcctgattccattaacttcctgccaactttggtgtccgggatgtacgttagctggctttacctgagatactttcaaaggaacccact

SEQ ID NO: 1047 - DNA, 439 bp, Zea mays
  unsure (1)..(439): unsure at all n locations; Clone ID: LIB3136-042-P1-K1-F12
aggacacagggtaccaggattgcctctgatggtctgaagcacagagtctttgaggtttgtctagctgatcttcagggtgacgaggatcaggcttacaggaaaatcaggctccgtgctgaagatgtgcaaggcaggaatgtgctcacaaacttctggggcatgaattttaccaccgataagctcagatctctagtaaagaagtggcagacattgattgaagcccatgttgatgtcaagacaaccgacaactacatgctgcgtttgttctgcattggctntaccaagaggcgcccaaaccaggtcaagagaacctgctatgctcaggcattccagatttggcagattcgccgcaagatggttgagattatgatcaaccagtcttctacatgtgaccttaaagaacttgttttttaagttcattcccggaagttattggcaa

SEQ ID NO: 1048 - DNA, 374 bp, Zea mays
  Clone ID: LIB3136-042-P1-K1-F2
gcgagccatcgtagatgaaactaatggcgacgaatgggcctgcccatgcccgtgtcccggtgcccgttcccgcaaccctaatcccctaccaccgtcggctctcgccggcgaagaagagggagccgcgcggcgtcgccagggagcacgcgccccctcccttcccggctccctccgcgccgtggggaggcgcgttcacccggatccgccctcaccgcgaggcagaggggaggagagggagccaggtccggcgcacccgctgtcgttcgcgccgataagcgtttagagacttcccacaggcttggctggtggaaacttgtgctctgtgcatctgggtcactacttcaccatttaccaagtcttgtagtattgtttcg

SEQ ID NO: 1049 - DNA, 229 bp, Zea mays
  Clone ID: LIB3136-042-P1-K1-F4
acacgagctggacgcttcgtattacttctgccgcacctaggtctagccctatcccgcagtggccggtgcccggttctcgaaccctaatcccctaccaccgtcgggtctcgcctgcgaagaagagggagccgcgcgtcgtctccagggagcacgcgcccccttcctttccggatgcctccgtgccgtggggaggagcggtcacccgtatccgtccttaccgcgaggcaga

SEQ ID NO: 1050 - DNA, 362 bp, Zea mays
  Clone ID: LIB3136-042-P1-K1-F5
gagaagcttgggtctcctatcctccccacccctctctcggtctcttccccaccgcgtcttcgtcgtctcgtcttcctgcctccttcgcccgagaaaggagagaatggggagcagcgagaagaccgttaccgcttacggcgagtacacctacgctgagctggagagggagccctactggccgagtgagaagctgaggatttcgattactggggctggtggtttcattggatcccacattgctcgccgtctgaagaacgagggccattacatcattgcctctgactggaagaagaacgagcacatgaccgaggacatgttctgccatgagttccacctcgttgatctcagggtcatggacaact

SEQ ID NO: 1051 - DNA, 393 bp, Zea mays
  Clone ID: LIB3136-042-P1-K1-F6
agaggagctggccgcgtcgtatcgactcctgccgccgaaaggccgagcccgagcccgtgtcccggtgcccgttcccgcaaccctaatcccctaccaccgtcggctctcgccggcgaagaagagggagccgcgcggcgtctccagggagcacgcgccccctcccttcccggctccctccgcgccgtggggaggcgcgtccacccggatccgccctcaccgcgaggcagaggggaggagagggagccaggtccggcgcacccgctgtcgtccgcgccgaagagcgttaagagtctccccacaggcttggctgagggaaacttgtgctctgcgcatcttggacactacttcaccatttaccaagtcttgagttattgcttccgtgccagacaaaaa

SEQ ID NO: 1052 - DNA, 72 bp, Zea mays
  Clone ID: LIB3136-042-P1-K1-F8
atcaacgttggaagccagcataaatcccatgtaggcgacttgttgttgatccagcaaggcctgcacggactc

SEQ ID NO: 1053 - DNA, 360 bp, Zea mays
  Clone ID: LIB3136-042-P1-K1-G1
ggatgccctgaatgctacaaaggcagcagtcgaggaaggtatcgttgtaggtggtggctgtacccttttgaggcttgcatcaaaagttgatgcaattatagagacccttgagaacgatgaacagaaggttggggctgaaattgtaaggaagtccttgagctatccacttaaattgattgcaaaaaatgcaggcgttaatggcagtgtggttactgagaaggttcttgccaatgagaacttcaggtatgggtacaatgcggctacaggggagtatgaggacttgatggctgctggtatcattgatcccaccaaggttgtgaggtgctgcttggagcatgctgcatcggtggctaaaacctt

SEQ ID NO: 1054 - DNA, 354 bp, Zea mays
  Clone ID: LIB3136-042-P1-K1-G11
gctgaagaagctagaggaaactataaaaaatatacatgaagagatgctttatctgcgtgaaagggaagaggaaatgcaggacgtgaacaggcgaacgaactcaaggatggcttggctagggttcctctccctcggcgtctgcttatcagtggcaggtttgcagctgtggcacctgaagaccttctttgaaaggaagaagttgttgtagactgtagttggcccatggttcacggtagacctcagcgcaggtgtaacctatttttgggtgaactgccgatctgttacggagcttggaatcccatgtaacaaacggtatgtcgtacttgagaaaatatgcttcagcctgtccagttg

SEQ ID NO: 1055 - DNA, 233 bp, Zea mays
  Clone ID: LIB3136-042-P1-K1-G12
gttccaacttatgtccccacagcagcaacaacatatacttagcacaggcccaagcacaagggaaccttggaaactcaactaattatggggatattgatccccgcagacttacagcattgaccaggggtagtttgaatggtaaagatagtcagcctgcatgaacggatggttgtattagttcccttatgcaattcacttcacccaaagtcagaccagaccaagagtattttatg

SEQ ID NO: 1056 - DNA, 125 bp, Zea mays
  Clone ID: LIB3136-042-P1-K1-G2
gcgcaggcggcctagcagaggtgcaaatggtcttgcacaaacgtgactgcatcctgtagctatagatttaaccggatcatttaggctctataagcgagacgctctggaagatctatattcctcat

SEQ ID NO: 1057 - DNA, 75 bp, Zea mays
  Clone ID: LIB3136-042-P1-K1-G3
gcgtcgccgagacgtcgatccgtcgcagcgtacgaagttgaccgtgaagaacatgcattcgatcggatgacggag

SEQ ID NO: 1058 - DNA, 235 bp, Zea mays
  unsure (1)..(235): unsure at all n locations; Clone ID: LIB3136-042-P1-K1-G4
gcatggacgaggcagaggagatgcaggtggtatgtaggctgcacgaggtaggccgatgcggtgggagccatcacatgacaagcatcagntaccatatattcttgatcctacgagagcaagtgcctgctagtatttacgcgaatgtacgtgctcaaacgtgactagtctctggtgcttcatattttaacgtctcatataggctttattagcgtgatgtcgctgtcagacttaatct

SEQ ID NO: 1059 - DNA, 121 bp, Zea mays
  Clone ID: LIB3136-042-P1-K1-G5
ccttaatgctacaaatatcataaattaggaagggaacgtattaggtgggggcatgtgccctttttagggatgcaccaaaagttgatgcaattatatattcccctgagaacgattaacagaa

SEQ ID NO: 1060 - DNA, 379 bp, Zea mays
  Clone ID: LIB3136-042-P1-K1-G6
ctcaccatccaaaatacttgccaagctttattaggaagtttatggaaactggagctgacattgtaactggcacacgttatgttaagaatggtggtgtccatggttggaatatcatgcgcaagctgactagcagaggtgcaaatgttcttgcacaaacgttactgcagcctggagcttcagatttaaccggatcatttaggctatataagcgagatgtcctggaagacttaatctcctcatgtgtcagcaagggctacgtgttccagatggagatgattgttagggctacaaggaaaggttatcacattgaagaggttccaataacgtttgtggacagagtattttggaatttcaaaaccttggcgggtccgagatagtt

SEQ ID NO: 1061 - DNA, 369 bp, Zea mays
  Clone ID: LIB3136-042-P1-K1-G7
gaaccaatcaagctcccctcgctccattgtttcggcaatggggatggtcatgataggcagatagcgaacagggcaagcgctgaacttgctggtttgttcgagcaggattgctgctccgttgttgagcatgatatgggccacataatccccacccggtcgccctacatcgatcggataaaggattttctttccagcttcctgtgaaatgttttgaactgactattgcgttgtaagttggtatacacaagttgggttctgaatggcattgactgtgtttgctgatcattagtattttgcgtctgattgtgctaaacaaaatgggattctcctctctcgccgactcttagaggactacttgtgccacgacat

SEQ ID NO: 1062 - DNA, 134 bp, Zea mays
  Clone ID: LIB3136-042-P1-K1-G9
ccggaaaaccggacgacccacgcgaccggctagaaaaggcagagaggctactcatgaaacaccccgaagcaccaggcagggggcaggcggggaagcaacggaggacggagacgaacaaggaacgtggacgggac

SEQ ID NO: 1063 - DNA, 223 bp, Zea mays
  Clone ID: LIB3136-042-P1-K1-H1
ctggcacgcattcctgctctcctctcctcttctccctcgtcggtgcggcgtggcgcggctcggcgttcggtgagaaaccactcggggatgaggatctgctgctagagtgagaggagctacggtcagtatcctctgccttcgtcggcggcggaagtggaggggaggaagcgatggaggcgtgcgccgttctgttggccgtctcccacaaccgcaacgagctcgt

SEQ ID NO: 1064 - DNA, 261 bp, Zea mays
  unsure (1)..(261): unsure at all n locations; Clone ID: LIB3136-042-P1-K1-H10
gccaagcttgagctcccaagtcccaaactgctgtctgccctccagccgngcagggcttcaggccatccgggctccggcttccggcatccatcaggcgtcctcataagatggtgtagggcagcgagcgccgagcagagcagcaaggcagagcagcgagcagccgagcagcgaggcagcgggcgtcctcagaatccgggctgccgagccgccgagcagagcagccgagagctgcgaggcattgagaacggcccacgagaaggc

SEQ ID NO: 1065 - DNA, 419 bp, Zea mays
  Clone ID: LIB3136-042-P1-K1-H11
gcgtccgttccaatcttggtggtttcagaaacatggttgacaaaaggacagcactcgagaatttggatatgatcctattgtgccttgatgaaattgttgatggagggattgtacttgaaacagaaggaagagagatagctgaaaaggtgtctggacatggattggagggtgcttcatcagctgagcagactttagtcaacgccctaacgcaagcaagagagcattttgcgaagtctcttctcatgtgatgctatgctttatatattagggcgacgatggagtatctattactgtgtctggataacacagtttttttttttggttagcagtggaccaaaaaaaaaaaaaaaggtttgaaatctttgaatgtgtagaatggcatgttgttgtcaaaatttttatttgtaagccttcaaagt

SEQ ID NO: 1066 - DNA, 427 bp, Zea mays
  Clone ID: LIB3136-042-P1-K1-H12
cccagacccagcagctattgtggtcgtccttcagccgcgtcgcaccgcatcgcattctacgattcgaagctctctctgctcgcagccatggcgaagaattacccaaccgtgagcgccgagtacagcgaggccgtcgagaaggccaggcgcaagctccgcgccctcatcgccgagaagagctgcgcgcccctcatgctccgcctcgcgtggcactccgcggggacgttcgacgtgtcgtcgaggaccggcggtcccttcggtactatgaagtgcccggcggaactggctcacggcgccaacgcggggctggacattgcggtgcggctggtcgagcccatcaaggaggagtttcccacccctcttctatgccgatttctaccagcttgccggagttgtggccgttgaggtgacccggtgggcctgttat

SEQ ID NO: 1067 - DNA, 215 bp, Zea mays
  Clone ID: LIB3136-042-P1-K1-H2
cggacgcgtggtccgagtcctacgagcagtctcacgcaagtgtcaagagacgaaacggtcgacatgtctcgcacgcaatctgccgtagcggtcgccgtggtggccgtggtgctgctgctgtcagcggcggcgtcgacctcggaggccgccatcacctgcgggcaggtgagctccgtcatcgtgccctgcctcttctacgcccgtgtctcggtgtc

SEQ ID NO: 1068 - DNA, 218 bp, Zea mays
  Clone ID: LIB3136-042-P1-K1-H3
agcagtcaccactcccaagccagtaccgagtcctacgagcagtcgcacgcaagtgtcaagagacgaaacggtcgacatggctcgcacgcaatctgccgtagcggtcgccgtggtggccgaggcgctgctggtggcagcggcggaaacctcctatgcggccgtcatcacctgcgggctggtgagatccgacatcgagcggtgtctctactacgcccgcc

SEQ ID NO: 1069 - DNA, 429 bp, Zea mays
  Clone ID: LIB3136-042-P1-K1-H4
gactggtttgcctcacccttgacgccgagctccttctcatcgtcaatatcaccgacctttcgcaccttcgagaccacctcctcatcgacctattacggagaaccctcagtgctggtaagctgacagagaaagttatgaagttgtcactagcaaccggctgtgaggatatcacatacggctgcgcggttgctcaacattaagcagacactcgtaccagtccttcccacagggtgctcagagagattctagatctagtgccggccacatcgattagattccctgagaagatgcctttggaaactcaagatcgtgagcgtgtcatagcgattgcggcacttcagcccaacctgaccactttctttgaggcatggcgaccatcattctgccgcttccacatcattgtcgtcaaagatccagacatggcagagg

SEQ ID NO: 1070 - DNA, 390 bp, Zea mays
  Clone ID: LIB3136-042-P1-K1-H5
gaagaaggccgtctcatagcatttaaagggaaaacaattcacgttctaaacaaaaatgagcatgccttggacatggctgctccagtgcatggcaatccgggggatccaaacggatttatggatgactattcattggtgaagaaaaggaccaatgtgctgctacttggcgatcacattggggacttggggatgtctgatggtttaaactatgacaacaggatcgctgttggattcctgaacgccaacatcgagaaatctttgaaggattactctagcgcgtttgacattgtatatctgaacgatgctccgatgcatggagttgtgcaacttgtgtctgaattatgtccataatccagtgatctccgaatcgcccctcagaaaaaattagat

SEQ ID NO: 1071 - DNA, 402 bp, Zea mays
  Clone ID: LIB3136-042-P1-K1-H6
aaacaaggccgtctcatagcatttaaagggaaaacaattcacgttctaaacaaaaatgagcatgccttggacatgtctgctccagtgcatggcaatccgggggatccaaacggatttatggatgactattcattggtgaagaaaaggaccaatgtgctgctacttggcgatcacattggggacttggggatgtctgatggattaaactatgacaacaggatcgctgttggattcctgaacgccaacatcgagaaatctttgaaggattactctagcgcgtttgacattgtatatctgtacgatgctccgatgcatggagttgtgcaacttgtgtctgaattattgtcataatccagtgatcttcgaattggcccttagaaaaaattagatctttccatcaac

SEQ ID NO: 1072 - DNA, 483 bp, Zea mays
  Clone ID: LIB3136-042-P1-K1-H7
tcggcgagaagcccagaaggtgagaagatagattgagagagagagagtgatcggtgcaaggatgaccgctgtgcctgcgcgtgctgcttcaccgaatcgagacagaccctgtccgaattcgagccaagggatggcaaccggtagtgaagcctcgaaggcagctgagactgtggttgactggcataaacaggacagcaagaggatgctccatgcggtttaccgcgttggggatctggaccgcacaatcaagtactacacggaatgctttgggatgaaactgctgaggaaaagggatgttcctgatgagaaggacacccaaccccttccttggctttgggccagagaacaccaactttgcagttgtattgacatacaactattgcgttgacaagtatgacatttggaacgggcttttgtgcattttgcaaattgctaatgatgatgtgtacaaggttagctgagaatatcaaaattcaagggggg

SEQ ID NO: 1073 - DNA, 376 bp, Zea mays
  Clone ID: LIB3136-042-P1-K1-H8
cggtccaacactttcacgctcagcttcagcaatggctgcctccaccatggcgatctcctccacggcgatggccggcacccccatcaaggtgggttccttcggcgagggccgcatcaccatgcgcaagaccgtgggcaagcccaaggtggcggcgtccggcagcccctggtacgtccccgaccgcgtcaagtacctcggccccttctccggcgagcccccgagctacctcaccggcgagttccccggcgactacggctgggacaccgtcgggctgttcgccgaccccgagacattcgccaagaaccgcgagctggaggtgatccactcccgctgtgccatgctcggcgcgctcggctgcgtctttcccgagctgctc

SEQ ID NO: 1074 - DNA, 246 bp, Zea mays
  Clone ID: LIB3136-043-P1-K1-A11
ctaagaacaggtcttcgtctcaataatggaaggcaaaacagggcagctcaggtgctgtttcgtcgccatcgtgctcgtcctgggtcttgtccttgagcagtcccagcaggctgaagctagaggcaaatggtgctgcgaaaccgccaccggaaaataccattttaatcgctgcgttgactcgggttgggtcgacaatattgggttctgtgcgagtaatgctgaatgcatcattatggaggacagatg

SEQ ID NO: 1075 - DNA, 409 bp, Zea mays
  unsure (1)..(409): unsure at all n locations; Clone ID: LIB3136-043-P1-K1-A12
gncttgtatagtgtttcctgatcaacctgaataacgtagggcatcagagttgttcaagacagctatagacacgattgagggtgtaaccatcagcttcctggatgatttacccactgaccctgtcaacagcttcttcaaatcaataagaaacaccctggattttgacttctcagatgacaatgaaggtagatggaaatctgatgaaccaccatcgttatatatctttatcaacagcagcacgcgtgaccttgcttctatagagaagtatgtggaaaagcttgccacatctgtttcagcccttctattcaatcttgaactagatacattgcgttttgacctggggcttttggggtttcccccaaaagattctgactatcgggttcctttctcaattcaccccagtatttta

SEQ ID NO: 1076 - DNA, 297 bp, Zea mays
  Clone ID: LIB3136-043-P1-K1-A9
cattttaccagaactagattctccaaactcctttagaaaaattgtttcttctccatcaatgtgaagattggactcggtctccacctcacaaggaagtcctgtgtcaactgagagctctatattcgagatcagtaaaaacctttggaggtccagtgcaccaacaactgtatcatccaattttctgactagtacagaggtgaaaatggctggcggagctgctggagaggatagagtccaagctgtgtgctcagagaaaaatggatggctgatttgtgggatatatgatgggtttaatgg

SEQ ID NO: 1077 - DNA, 271 bp, Zea mays
  Clone ID: LIB3136-043-P1-K1-B11
gcgatcgactacgaggagtttgagcacatgatgactgccaaaatcggagagagggatagtaaagaggagctttcaaaagcattccgcattattgatcaagaaggaaaaggaaagaatgctaacaatgatatccaaaggaatggcaaaaagctggggggaaaactgaacctcgaagagaaccaaaacatggggcaagagggtggatgaaaagggggccgggaaaaaaaccttggcgaggtcaataaggagaagaggggggcccaccttgggt

SEQ ID NO: 1078 - DNA, 261 bp, Zea mays
  Clone ID: LIB3136-043-P1-K1-C10
tcgccgtgcgtcaggcagaggcctcagcctctctctcgtctttgcgttgcgccgctgctttaaacaaacgtcaggtgaaggctgcggcacgcgtcccctcctccgcctccagtcttcgcccatctcaaaaccctagcaaccgcgcctgcacccctacccgaatcccaatccaggtccgatcccccggcggcgaggacacccggcgccgattcgtccccgcagaacggcgggcaggacagattcagattcgggttcggggac

SEQ ID NO: 1079 - DNA, 429 bp, Zea mays
  Clone ID: LIB3136-043-P1-K1-C11
agcagcactagcagtgacaaactcgaagcttgccttctagcttgtttacaccccaaaactaaaactagagtcggcggcggcaacaagcggtacgtagaggatgaagagcaggagcagcactctgttggtgatcctagttctccaggcccttctgctctctgcggctgtggccaaaggacctgcagggccgaagaagcagtgctggtgcggcgagtgcaccagctggtcgggcgtgtggacctgcgacgaccttctcaccaagtgcgccgccacctgcaagaactgcgtccccgtctccacggacaagggcgccaccaagtacagatgccgcgacttcctccccgaaaactgcggctgcaagatccactagagactcattcaatcaaccatggccacagccgatggacccttcttccatatgcatgctct

SEQ ID NO: 1080 - DNA, 358 bp, Zea mays
  Clone ID: LIB3136-043-P1-K1-C12
ctgctcagttggaaccgtacccaaaagcaactgagatatttgaagcgatcgctcgtcagtcaatcaacaacaatcttcttaagtatagtgtcagaggaattcttcttaatgctggcatctgtcaactatgtagaggtgatcctattgccatcacaaattcattggagcgataccaggaaattgacccgactttctctgtgacacgtgaatacaagcttttagctgatcttgctgcatctatggatgaaggggatgtggccaaatttactgatgcattcaaagaatttgttattatttcacttcttggattctttgtaaattactctggtgcttatggctgtataatgagctgattaaa

SEQ ID NO: 1081 - DNA, 119 bp, Zea mays
  Clone ID: LIB3136-043-P1-K1-C9
ctttgtctattctctggactacgcccgtacgcttttggccaatgatgccaaggctgcaaagaagggtgttgagaggcagatcaatggactcgttgatctgtaccgcatgccccttgcca

SEQ ID NO: 1082 - DNA, 421 bp, Zea mays
  Clone ID: LIB3136-043-P1-K1-D10
gttggctccaagaccgtcatccatattaggagtcatgcacaaaagtactttttgaaggttcagaaaaatggaaccagtgaacatgtcccacctccacgaccaaagcgaaaagctgcccatccatatcctcagaaagctttcaagaatgaaccaaactatggcctcaagacagattcatcttccatacataggaactctggcatgaatgtgtcttgttcttcatggcctcataagtctatcccgcaagctgttgcttcgtcgatggtgaaagatttaggtgctggaacaccaggtccaaacaatttttgctcaagcagtactgaaagcccttcaagaacttggcaacctggtgaaacaaatgggccaataaattaaatttcggcactccgccttatgccggattttgcgggagtgtacagct

SEQ ID NO: 1083 - DNA, 385 bp, Zea mays
  Clone ID: LIB3136-043-P1-K1-D11
aagtgcagagcatgttgacaatggcttcctgttcaggtcagaggtaacccgagaggagcactctttaagccttgggaagaccagtgcttggaattagtatttagagtacttagagattatggagcatattgacctgtatttaaagttgacccactttgacatgcaattttttcttgtgtgatttgtctttttcaatggcctattaatgattttttatatattgactgttaattttttttcaagctttatgttttattttgatattttcatgtgttgatttgttatatgttacctcttctttttttgtttttatattattctttgttttttatatttctttttgtttttttttttgttattatatatttttttatttttttttttt

SEQ ID NO: 1084 - DNA, 393 bp, Zea mays
  Clone ID: LIB3136-043-P1-K1-D12
tactccatagatgaagcttatgtctctccagtaccatcccgagtcttccccttgtccgcatgactccgacacagccttcggcgagtttatagagctcatgaagagcaacagattgtaagaaaggggatcaggggagtacttgaaaaggtcaataattgtattggtgctccctcgcaccaacctcaaaagaatttgttgtatctgtagtgtttttcttttggttttgggacgatcatgtgcttgaatttttgggtccagaggacatagcataagatgctctgcgcattgtaccatgaaatggcctggttggatttcttgaacataacatgttatcaaactgttcggttcggtacacttactcggacagctcctttgcgaaatttctttaactgt

SEQ ID NO: 1085 - DNA, 439 bp, Zea mays
  Clone ID: LIB3136-043-P1-K1-D9
atttcagttgctttttcccattgccgatagtcatttcctcattaagatggggactagaagccagcaggaaaaccgtggtggctactgttttactgctattcacattatctggccctgtaaaagcgtcaacttatctgctaatgcatggagtagttggtctcatcatgggtactgtttggagattggagaccaactggattgtctccatcatcctctgctccattgtccgtgccctgggagcttgtggttacgtgctagtgtcatcgtttctgataagagaaaatattctcgcgctgataacggttaacattcatgcttcgttgacatacattctgacggcagctggcgtgaacacattttcttccatgggcacaatatatctacttctttgggacacctgttttacttaattggggggtctttggctttcttcttcatg

SEQ ID NO: 1086 - DNA, 177 bp, Zea mays
  Clone ID: LIB3136-043-P1-K1-E11
ctcctcgccatcacataaaaccagtgcaagcagaagcagcgcaatggcgagcagcaccatgggcctcttctccacagccttcgccggcaaggcagtgaacgtgccgacgtctcttttcggcgaggcccgcgtgacgatgcgcaagacggcggtgaaggcaaagccggcggtgagcta

SEQ ID NO: 1087 - DNA, 189 bp, Zea mays
  Clone ID: LIB3136-043-P1-K1-E12
ggcctgtggctgaacatccctgactatgatgctcccacacagctggtcaagcccaaggagaggaatgagaggtatgtcgatgctgacatgacaatcccaaagggaacctcggtccccacgtgagggaagaacctagccttctacagagaattcattggacctgatatgtacattggtctaatgggtgaa

SEQ ID NO: 1088 - DNA, 97 bp, Zea mays
  Clone ID: LIB3136-043-P1-K1-E9
atccggcaaggagctggagaaggagcccaaatttctcaagaacggtgatgctggtatggtgaagatgttttatactatgcccatggtggtgcatacc

SEQ ID NO: 1089 - DNA, 332 bp, Zea mays
  Clone ID: LIB3136-043-P1-K1-F9
ctccccctatggcagccatcctccattgctttttcccccaagatctccccctacgcagcatggatcgagaaaaggaggggcacgttgaattgaagaggaagagaggatcaaggagatgttcttccccatctcctcttgaagatttcttggggaaaccctaggtggctacactccacatcatgtctagtacatttcttcttcttcgatgaaggtgcttcgtgctcatcaaggggagtgggaagttgcatcacatccaccttttttctcataataatgcttcccatactcttatcatttttttattataaacttcttttttaatattatttttt

SEQ ID NO: 1090 - DNA, 147 bp, Zea mays
  Clone ID: LIB3136-043-P1-K1-G10
cgcgtccgtgcaagggtgccataagaactatccagatcatgacagaaagaagacagggcaacaagaagatgactcggctttctgggctcgagtgtttcctgatgcaacctgattcattggcttctgagcttcagaaaaaatttgctt

SEQ ID NO: 1091 - DNA, 368 bp, Zea mays
  Clone ID: LIB3136-043-P1-K1-G9
tctagtaatggcagagaggctactcatgaaacacctcgatgcaccaggcacgtggctggcggagaagcatcggaggacgttgatgaacaagtattgtggacggtacctgcgggacaagcacctgcagcactacattatctacggggagacagtgcaagacagattcgaacacaatcgacgtctaaggaatccttcaacgacctctgtccagcaagcgctacatgggcttgcatactgtgtgtatggcaaacctgacgtgcggcgcttgatgttcgaggtgtttgacttcgaacatggtcagcctaaagcaagctgtggatcttctccattggaaccgttgctagagttgctgtatgtcttccaacaag

SEQ ID NO: 1092 - DNA, 204 bp, Zea mays
  Clone ID: LIB3136-043-P1-K1-H12
cggaaaaaccgaggcgacccacgcgaacggctgcacaacatcgcgggcgcgctgaaccgccacccgcacccggccaaggcccgcacgccggcgccgccgaccaccccaggggacgccacagacgccgcgcccgacagcccggacaaaaagcgcgcgcgcgagcaccacggcaagcacgcggccagacgagacgggcaggagcac

SEQ ID NO: 1093 - DNA, 334 bp, Zea mays
  Clone ID: LIB3136-043-P1-K1-H9
cgcgcgcttgcgtctacaaatacatacccatgcatgctcctcacacaccttgccaagaaatagagatgagaggggctcggccgggagaaagaagggggaaagatatgaagctactagcttctgcgtggaatgttgtctgcttcaaggtcttgctttgcgatttgaggatgatccatgcttgcatgtgtagttcttttgttccttagatctacaagatctgggaccaggcttcattccgctcaggaatagcttcaaaataataccggcggagagttattaggaggagctactagtactacataaacttgggttcttggtctttcgattctgaaat

SEQ ID NO: 1094 - DNA, 328 bp, Zea mays
  Clone ID: LIB3136-044-P1-K1-A1
aaatgttaggagatctcccagaatacgcacattctggagaaaaccaccaaggctggccccacgcctccctccaaatgaaatctacaaaaataattctctgcttcagcagtctccatctgagtggacatcgaggcagaagaaagttaaagaagcatttgaacatgcatggtctggttatcaaaagtatgcaatgggttacgatgagcttatgcctctgagccacagaggcacagatgggttaggtggactaggagctactattgtggattctctggatactgcgataataatgggtgctgatgacgtagcttctgaagcataaaaatga

SEQ ID NO: 1095 - DNA, 339 bp, Zea mays
  unsure (1)..(339): unsure at all n locations; Clone ID: LIB3136-044-P1-K1-A11
ggcggcgccatggtgcccgtccgcgtgcacaccgngctcatctccacccagcacgtacnaggccgtgagcaacgacgagatcgccgccgacctcaaggagcacgtcatcaagcccgtcatcccggagaggtacctggacgagaagaccatcttccacctcaacccgtcggggcgcttcgtcatcggcgggccccacggggacgccggcctcaccggtcgtaagatcatcattgacacctactgcggttggggagcccacggctggttgcgccttcttctcttggaccccaccaaggttgaccgcagcggggcctacgttgacaggcatgccgtcaagag

SEQ ID NO: 1096 - DNA, 264 bp, Zea mays
  Clone ID: LIB3136-044-P1-K1-A3
acgcgtccggagatctcgcggggctctcaacgggcggctacgggcaaaatcctccgccggcgggtgatgtcggataggatccgcagctctcgaataatgcgaagaagagagaggagaagtgttagaagctttaagaggttcttttttttattgatgattttttttttatttttgctttatcttttttttgttattttctttatatttcttattttttatattttttttttttattttctttttttatatttttttctatttttt

SEQ ID NO: 1097 - DNA, 410 bp, Zea mays
  Clone ID: LIB3136-044-P1-K1-A8
gccgaagcgcggaaggtcgaaccgatggctgctcctccgccgccgccgccacagggggctgccttcgtgccggctccggtggccaccagccctccgtcagaggggacgtccagcgcgtcgtctgatgactccggcagcccgatcaaccacggtgcgatgccgttcagccactccagccagcaccagcaccctcaccagcaccagcagcacatgccgcctgcctacgcgtccgggggctggtccctctcggtgcaccagcagaacaggcatgattctgacatgaagatgatgtcgaactaacaggtgccccacttgttggtttgggctggagaggaaggaaaggaacctgctgatggttaggctggtactgctgctatgaaacggtcctcttgcgcgccgactgtgctttg

SEQ ID NO: 1098 - DNA, 284 bp, Zea mays
  Clone ID: LIB3136-044-P1-K1-B1
tgattttggtggtgcatatggtcgttactatgcaggattaggagggggatatggagccgcgtctgcgtttggttatcctggtcgctttgggttatatggaggaggttttggtggatcttatgctggtgctgacttaagtggctatagacgtggtggaggtgatgagagcttcagcgcccctggtgttaatcctgggtttgtaggtgatgctgaagagagctatgttggtcctagtaattctggctttagtggtaccgtctatgttggttcatatgaacctacac

SEQ ID NO: 1099 - DNA, 393 bp, Zea mays
  unsure (1)..(393): unsure at all n locations; Clone ID: LIB3136-044-P1-K1-B11
cgacccacgcggccgcgctctcgctctacctccccgtcgtcacgcgctcgcctgtgcccctagcgtttcgccaccgtctggggccgcaccgcctccggctccggctccgcctcgcctacgacgactccccatcccgggcgtggcccctcggcctcggcgcccgcccgncccggccccacgccgcaccccttggctacggagggagaaggccgagtggtggactggaccacagagccatgtcaagttccacaaattcaacagtggccacggagttgtcggtgtctgagaanatcanggaaattgagccgctatcttttgtgaatgacaaacatggaggcgtcatcattgagatgaaaactccaatgggatcctggagtgtgtttcagcttactt

SEQ ID NO: 1100 - DNA, 231 bp, Zea mays
  Clone ID: LIB3136-044-P1-K1-B12
gctgcctgctgcaggtacggccctgatcgccccaagtatcttggcccgttctccgagcagacgccgtcgtacctgaccggcgagttccccggcgactacgggtgggacaccgcgggcctctcggacgacccggagacattcgcgcgcaaccgggagctggaggggatccaatctggtggggcgattgctagggcgctgggctgcgcgtttccagagatcctgggcaagaac

SEQ ID NO: 1101 - DNA, 112 bp, Zea mays
  Clone ID: LIB3136-044-P1-K1-B2
cgcggcggattttggtggtgcatatggtcgttactatgcaggattaggagggggatatggagcccggtctgggtttgtttatccttgccgctttcacctatattgaggaggt

SEQ ID NO: 1102 - DNA, 332 bp, Zea mays
  Clone ID: LIB3136-044-P1-K1-B6
gcaaaagcaggggctgctaagcgtgggaggctcaagaaaggagaagacatctgaaagtggggacttgttagttgcacagatgactgagggtcggcatgaagctctgcctgcacaagctgtagaccaaactgggcctgtgcaaaatgaagttgaagctatgactttgcaatcccttgctactactcctttgatggagaagaggagtcttggtctgtttataaagaggtcatcggtaacttgaaactgttttaaccctcctttgttgtatctggggagatttgttgtcttttaattgttatgtaggtgagttctttctctattctttttttctt

SEQ ID NO: 1103 - DNA, 222 bp, Zea mays
  Clone ID: LIB3136-044-P1-K1-B7
ggccatgccgccccagccgtgctgcggcggcatccgcagcctgctgcagcaggccgacaggaccctttaccgccgcaccatctgcggctgcctcaagaacgtcgccaacggcgccaacgggagcggcacctacatcagccgcgccgccgcgctgcccagcaagtgcggcgtcgccctgccgtacaagaacagcacctacgttaactgcatcacgattaatta

SEQ ID NO: 1104 - DNA, 217 bp, Zea mays
  Clone ID: LIB3136-044-P1-K1-B8
agctagctggccgttcattcgattattatttttcgctctgctgtggtagcagatggacctagtcgatcttgtacgacgaagaagctggctagctagccgtctcgatcgtatatgtactgattaatctgcagattgaataaaaactacagtacgcatatgatgcgtacgtacgtgtgtataaaaaaaaaaaaaaaaaaaaaaaaaaggtaagttgttt

SEQ ID NO: 1105 - DNA, 222 bp, Zea mays
  unsure (1)..(222): unsure at all n locations; Clone ID: LIB3136-044-P1-K1-B9
gttcttctgcctcacagagcacatcgcatcaaaccgncgtttgcagtgaaccngcgaaaaagcaaggatagacagttgcgagttgccacactgtggtgcgctctanacttgatatacccaaaatgtgaagcctcatctggtagagccgncagactacaaagtgctgtagtgatcctacaagtgancagaatgataaatcgcccctgcttggattgcaagctt

SEQ ID NO: 1106 - DNA, 181 bp, Zea mays
  unsure (1)..(181): unsure at all n locations; Clone ID: LIB3136-044-P1-K1-C10
ggctgatgaaatcctcttctcgtctagatctgagcctcctcctgtctttcggatcagatggttggtgcgatcgaacaacggtgagtcttgctctgttatttgactgttctaaacgcatggttttgtttttgtgatgatgtgcaggttcccanccgtttcgtttgatcgattagttgactca

SEQ ID NO: 1107 - DNA, 420 bp, Zea mays
  Clone ID: LIB3136-044-P1-K1-C11
tgaagttatcattccttgcaattatataggctttgtctgtggaaacaatggcagtgaaatggaagagatagagaagatgtcaggtgcttcaattacagttcatgatcctaaagctggcgacgcaaactcaaaagttgttatatgcggggatcccgaagaaacaaagaaggcacagagcctgattcatgccttcatattctgtggtctgtatcaaacataattgatgacttgatcactgtgcagtaccatcgtcgtttatgttcttgaatctagagcagttcccatgggcagatttcaggccttgattggatgtacatgtaccgacgctaccggggtggatgtatgtagggctgatgcatgccttgtacaaacaacgccgatgtacatttctgtaggaccgtgttttagtttgggggaatg

SEQ ID NO: 1108 - DNA, 438 bp, Zea mays
  Clone ID: LIB3136-044-P1-K1-C12
gtgagctctatgctgcagtgcgctagcgaggtgaagcatctagtgattaagatagagttgtgtggcgacctggacgcactccaaccgttcccggaagtccattcgtttgacttctttgacaaccaccccaaacttcggaaatttgagatccatggtgccatgttcgatgccctgtgccagaaaaatagcctgaaaaatttgaattcaaggttgctcatactttgtttggaagaggttctgatcactgtacgctccccactcaatgctggacagaagctgaacactctcgagtcgcttacgaagtacagagtgaagctgtggacgattatcatcagaatctcacagatgaagaattgccacgaggctgctgatgagttctttggggatatatgtaagttcaagtacatgaactacacaaaagtgagaattgaataagtg

SEQ ID NO: 1109 - DNA, 220 bp, Zea mays
  Clone ID: LIB3136-044-P1-K1-C2
aaaacataaccattttttccattccatacttccttaacctatttatctttttctatttttacctcatattttatctcattttatttcctttttttctattttttattcttatcttttttttattaattattttatatttttattttttttttttcttttttttattttacttatatttattattttttttattatttttatttaatcttatattttattc

SEQ ID NO: 1110 - DNA, 274 bp, Zea mays
  Clone ID: LIB3136-044-P1-K1-C4
gtcttccttccgactcccacccaaaaaaactctcgaaggaggtttcgatcgcgaaaccgcggagtgttcgtcccgcaagtgcatggcatttagcttcctggccaatgaggtgtcgtacctgtgcatctgcaagctcgccgttaggtcgctttcttgttttgtcgtcattcggtgtctttttttacttcgcttctttttttttggtcttagtatgctttttaatgtttagttttttttgttgtatttttttcttttattttattcttttttattt

SEQ ID NO: 1111 - DNA, 278 bp, Zea mays
  Clone ID: LIB3136-044-P1-K1-C5
cggacgcgtgggcggcgacgaagccagccggtggtgccattattacagaggccaagatcacctgctacgagaacggcgtcgacgagggcttcccgtacgcacggccgccggtttgtgagctagccggcgacatccgtgtcagtcctaaggagaaaaccatgtacttcgttaacccgtccggcgccggcccgttcgactccaacggggagaagaagatccgaccgttcgcccgcaaggacgacttcctcctccccggcgtcgtggaggtcacgatcaag

SEQ ID NO: 1112 - DNA, 224 bp, Zea mays
  Clone ID: LIB3136-044-P1-K1-C7
cggacgcgtgggcggcgacgaagccagccggtggtgccattattacagaggccaagatcaggtgcgatgagaacggcgtcgacgagggctttccgtacgcacggccgtcggtttgtgagctagccggcgacatccgtgtcagttctaaggagaaaaccatgtacttcgttaacccgttcggcgccggccagtttgacttcaacggggagaagaagatccgacct

SEQ ID NO: 1113 - DNA, 324 bp, Zea mays
  Clone ID: LIB3136-044-P1-K1-C8
ctccctcctcctcgctcgctcgatcgctcccacgtcctcgcctccctccacaaacgaccagcaccatccaggatcgcagcgcggcgcgcgagagaggggtgagcaggtcgggcaagatgagggagatcctgcacatccagggcggccagtgcggcaaccagatcggcgccaagttctgggaggtgatctgcggcgagcactgcgtcgactccacgggccgctactcggggacctcctcgcagcagctcgagctcgagcggatcaacgtctactacaacgaggctgggggtggtctctttgtgtccggcgccgtgcttatggacc

SEQ ID NO: 1114 - DNA, 436 bp, Zea mays
  Clone ID: LIB3136-044-P1-K1-D1
atctttttgctgtgttccagggactcctcaaggtcatagctggtgtagacacgagcttcagtgtggcatcttatgggtggagactacgaggagttctcaaagctgtacacattcaaatggacgacccttgtgatacctccgacaaccctgctcctactgaacttcattggagtggtagctggcatctccaatgcgatcaacaacggatatgaatcatggggccccctgttcgggaagctcttctttgcattttgggtgatcgtccatctttacccgttccttaagggtctggttgtgaggcagaacaggacgtcaacgattgtaattgtctggtccattcttctggcttttatcttctcgctgttttgagttcggttctacccttttctttcgtaggatgatggtcccttgtttggagggtgtggtggttttgatt

SEQ ID NO: 1115 - DNA, 344 bp, Zea mays
  unsure (1)..(344): unsure at all n locations; Clone ID: LIB3136-044-P1-K1-D12
gcgcccaacaatctcggtccctccctccctcctccctaaactccccagcaacccgcggccgagcgccggagtccgtgcaccagttgtctcgcgtcgtcgtcgncgccggggctgcagcctgcaggcagcgacctagctaggaacgggtgacatggcgcgtgcggcggcgtcggtggccgcggcgctgctcgtcgtgctcggcgtggcagcgtctgtggcgacggcgcagatggagacctgcagcgtcgacctaccacccatgctggtcggcaactatttcggcctcgcgctggcagactgtctggaacaacttcgtgctgctgtaccaccaggacaaggacaac

SEQ ID NO: 1116 - DNA, 412 bp, Zea mays
  Clone ID: LIB3136-044-P1-K1-D2
ctcgtgtctgccctgctcatactgcttgccctcgccgtatcgtccacccgcaacgcacagggggattccatggccaacaacaccgggacgttggtgggcggcatccaggacgtgccggggagcgagaacgaccttcacctccaggagctcgcccgcttcgccgtcgatgagcacaacaagaaggccaatgctcttctggggttcgagaagcttgtgaaggccaagacacaagtggttgctggcacgatgtactatctcactattgaagtgaaggatggcgaagtcaagaagctctacgaagctaaggtctgggagaagccatgggagaacctcaaggggctgcaggaattcaagcctgttgagagggtgctagcgcctaaggatgtctctttttcatgtgcgagcctgaagc

SEQ ID NO: 1117 - DNA, 304 bp, Zea mays
  Clone ID: LIB3136-044-P1-K1-D4
gtctgtatttgagctttctttgtttgctgagtcattcagtgaaatgcttcaacacagaaggggttgtgtcatcctagtcttttcttgagaacactgaacaggcgacatattgtgaataggaattaacgaacacgccagcaagtggatgatttaattaatgaagagaagaaatctcttaaagaagcgatccaagaccatgcatgagactataatttaaagagttgataacctacgatgcagggttgtattgtctaattaggttgtataaaagatgatcatagttcaatcagtaatattttatttc

SEQ ID NO: 1118 - DNA, 303 bp, Zea mays
  Clone ID: LIB3136-044-P1-K1-D5
gcagatattgaacatgacaagctggttaaggatggaccggaagtagcaccaaacgtgcgaggctggaggtattagtggtgtggtcgatatcaacatgagatgggcaatacagttcgtggtgagtgtatcatgctctaggatatcactctacaaggtaatgtcccattgattctgggggctgcaggagaggatgatgcatggatcgggtattgacttctatctaacggggtgaagccttcaatggtcaaagaaaaagtttgttaaactctgctgtataatcgtatgttaaagttccattttttt

SEQ ID NO: 1119 - DNA, 441 bp, Zea mays
  Clone ID: LIB3136-044-P1-K1-D6
cttcccttccttccccttctccatgttacatctggtatcagaggtccgatcttgagtttgctgccgatctggagatggctgcatcacacgggtactacaccaggctacagcgacgtcagggcaagatggatccgtcgtccaagttcttgttggatgagatcgagaagaagtttaccgccctcgacctcaagtgggagcaacacttcctcgacttcaactgtaccaaggaggagcgcctcgtcgccctggagcaatcgagcatagatctggagcagtggcgtcccaaggttgaggcatccctggaggacgtcaagctggaattatgcaagatgaacaagcaatgggatcagacgatgctggactgggcgaccgcagatcagggcatcctcggcatacctgaaccctgttttggacttcatcgtcaacacacacctgccttca

SEQ ID NO: 1120 - DNA, 411 bp, Zea mays
  Clone ID: LIB3136-044-P1-K1-D7
ctcccgaaaaccctcgtcgtcttcctcccaaatcactcactcgcttgatctctcctctcggaacccttcaacccctagaactagggttccagcgacccaatgacggacggcagcgacgagtacaagcgcgacgagtcggtgatcctgctggtcatcgtctccctcgccgcgctctcgctcctatccctcatcgccgccttcgcctactactgctacattacgcgcaaggtctcccgccgccttcagtcactccatctccccaagcgttccagctctcctcctcctcctcctcctcctccccgggccctgccgccgccgcaacagcaggggaaggacagcccgttcagcagctccggcagcgatggggccgctgcggcggcggcggcgatgtcggttgtggttgctggggag

SEQ ID NO: 1121 - DNA, 485 bp, Zea mays
  unsure (1)..(485): unsure at all n locations; Clone ID: LIB3136-044-P1-K1-D8
gcaagacgggcggtcgtccacggcgaacggtggcacggcggcgaggcgcaaggaggcttcgctcgaatcaggtggtgcggtaccgcgagtgccagcgcaaccacgcggcgtccgtcggcgggcacgccgtggacgggtgccgctagttcatggcgttcagcgcggacggtacgtttttacttttattttctatttgttttctttttctttattttttttttcttttttttactttgtttttttatttcttctttatttttctttatttatctcattttgttctagttttattatttttttttattatttttattcttgttgtgttgttnttttttttatatatttttttttgttcttgcctttttttttatttttcttttgttttttttgttatttttttattttattttttttattttttattattgtctttctcgtttttattttcttgatttattttattttattatttttatttttttttt

SEQ ID NO: 1122 - DNA, 69 bp, Zea mays
  Clone ID: LIB3136-044-P1-K1-E1
cgcgtccggttctggatcgacctcttgctgaccgtgcctgggtactatccggggatcatctacaccggg

SEQ ID NO: 1123 - DNA, 403 bp, Zea mays
  Clone ID: LIB3136-037-P1-K1-C4
ccggcggcgttgggcgctggtttaggagaagaaaaggcggcgcgcggcggaaaaccgtaggttagctcctctccggcgtcaagtgctctccggtttgagggcgcgatgagggtgaaggtgatttcgcgttccaccgacgactacacgcgcgagcgcagccaggacctgcagaaagtattccgcaactatgatccagcgcttcgtagtcaagagaaagctgttgagtatactcgggcactcaatgctgccaagttagagaagatatttgctaagccatttatcggagctatggatgggcatattgacgcggtatcgtgcatggccaaaaaccccaatcatttgaaagcaatattttctgcttcaatggatggagatgttcgcctttgggatattgctgcgagga

SEQ ID NO: 1124 - DNA, 317 bp, Zea mays
  Clone ID: LIB3136-037-P1-K1-C5
cggccgaatcggcgacgccacgcgtcgatgggattactgatatctggcttgggcagggtgctgcacttgtggcagaactacatttgtgtgccttgggcttgtggctctgatctatctttagagctatatgaactgactattattcaacaggaggcatataacttactttataatgaataatctggcattggattacctatgctgatatttgccacatggggttgtttggtttttatggattggctgtgcagactattggtggggaccacggctactaactataactcaagcaacgacattgctgggtgtgatcttgt

SEQ ID NO: 1125 - DNA, 356 bp, Zea mays
  unsure (1)..(356): unsure at all n locations; Clone ID: LIB3136-037-P1-K1-C6
gttgtaggggtgtgttccttgcccaggtctttgtgagcctgtcgtgagcggngaaggtgggccctccctgttcaaacctgtactttntactgctttctctcttaattgattggtagagctcatgccttttcgttcaaaaaaaacatacatgacaatttattgtgacaacagagggtaacatctacaaggaacaaggtgaggataactgacaggatgtgtgcgaggctgctgtcttcaacaaaccaaccgagtttcctgagccagaaagacatctacgcggccagagaagccgacaaggcggtcaaccgcacgaagagcatagaggatgctaagaaacaatctacaccagtgttggc

SEQ ID NO: 1126 - DNA, 347 bp, Zea mays
  Clone ID: LIB3136-037-P1-K1-C7
gacaatgtcaacttgaattgactaattcagttccgcctattccacattaatggccagacatttatgtttctgcttcacgaatatgatattttttggacatttctaataatagcaagccttattcctattttggtattttggatttcaggacttttagccccagttagtgaatgaccacagaagccttctagttatgtatcgcttatagaacccatggctggggctttatgacaattccattactcgttttcacatatagttacttttagttttgcacaaaataaacaaacatttttgggttcttttttaccactcatttttatgcccctgaaaaaaagttttctttt

SEQ ID NO: 1127 - DNA, 402 bp, Zea mays
  Clone ID: LIB3136-037-P1-K1-C9
gtttgtttcttttcttttttttgcagggatcgccatgtcggactcggaggagcgccggttcgaatcgaaggccgacgccggagcgtccaagacctacccgcagcaggctggcaccgtccgtaagaacggcttcatcgtcatcaagaaccgcccctgcaaggttgtggaggtttctacctcaaagactggtaagcatggccatgccaaatgccactttgttgccatagacatattcaacgggaaaaagcttgaagatattgttccttcatcacacaactgtgatattccgcatgtgaaccgtactgagtaccagctgattgatatatcagaggatggatttgtgagccttcttacttcagatggcaacactaaggatgatcttagactcccaactgatgagac

SEQ ID NO: 1128 - DNA, 399 bp, Zea mays
  unsure (1)..(399): unsure at all n locations; Clone ID: LIB3136-037-P1-K1-D1
cagccattcatcaagaatgacaaggtcacaataagtgagtggctgaagcaaactatagctagaactggagagaatatgaaggtcaggagatttgcccgatacaacctaggtgaagggctggagaagaaaagccaggattttgctgctgaagttgccgcccagacggcagcgaagccgccaccatctgctcctcccaaggatgacaagcctgctgaaacaacagaatccgccgagaagaagccggctgttgcagtttcagcctcgttggtgaagcaactccgagacgaaaccggcgctggcatgatggactgcaagaaagctctggccgagtctgacggcgaccttcagaaggctcaggagtttctgaggaagaagggcctctcatncgcagacaagaaa

SEQ ID NO: 1129 - DNA, 401 bp, Zea mays
  unsure (1)..(401): unsure at all n locations; Clone ID: LIB3136-037-P1-K1-D11
atgaccgtccagttcgccagcaccgggacgaccggcgccaagttcctcccgcggggcgaggccgaggccatcccgttctcctcgcagaaggtgcccgagatcctcgcccgcctctcggtggacccggactccgtcgaggcggcggagatggcgcagacgctgcgcgactgcgaggcgcccgcggccaagggcgagaagaaggcgtgcgccacgtcgctggagtccatggtggacttcgccaccgccagcctcgggaccaggcacgtgagggccgtgtcgaccgtcgtggcgaaggagggatcgccgaagcaggagtacacgngtgaccgcgtggagcgcgcttgccgcggcaccgacgacgacggtcgggccgtggtctgtcacgcggagccgtacgcgta

SEQ ID NO: 1130 - DNA, 413 bp, Zea mays
  unsure (1)..(413): unsure at all n locations; Clone ID: LIB3136-037-P1-K1-D12
cgcaaacgcaagctcccaagcagctaccaaccagccgggagagggagcgcacgcgctgcgacaatggccacggccggcggaggggccgggcatctgaagctgctgggcgcgtggccgagccccttcgtgaaccgcgtacgcatggcgctgcacctcaaggggctggagtacgagaacgtggaggaggacctcaccaacaagagcgacctgctcctcgccttcaaccccgtccacaagctcgttcccgtcctcctncacggcgacaagcccatctncgagtcactcgtcatcgtggagtacctcgacgacgccttccccggcgcttgccaggccgtnnctcccgncgacccctatgaacgcgccgtcgctcgcttctggccaaatacgtcgacggcaacgtgcacggcatgatg

SEQ ID NO: 1131 - DNA, 419 bp, Zea mays
  Clone ID: LIB3136-037-P1-K1-D2
agcccagccaagtcagcagagacactattcagatacatcgcaccggaacaagttccggtccaatttggaggccttttcaaggaggatgaccctgagttcaccacctcggacactgtcactgagctcactatcaaaccatcgtctaaagaaaccattgagatccccgtcaccgagaactccgcgattgtatgggaactccgggtgctcggttgggaggtgagctacggcgccgagttcacccctgacaccgagggtgggtacactgtcattatacagaaaacaaggaaggtgcccgctaacgaggaaccgatcatgaagggaagcttcaaggtaggcgagcccggcaagcttgtgctaactgtgaacaaccctgcatccaagaagaagaagctcctttacagatcaaaggtcaagagcat

SEQ ID NO: 1132 - DNA, 418 bp, Zea mays
  Clone ID: LIB3136-037-P1-K1-D4
ccaaatcctcagctccggtgttctctccaatctccatccatccatcctcctcgcggggcgcgccccgaaaaatggcgccaacccctccggatggaaagtgatgttgatggcactaccctggcttgtattgcattttcctgcccaagtttaagaactctcgagattaccatggctgctgatgctgtcaacaggatgactggggaggatctaagtcgttttgtttcggagaagtcttctctctcagccctcaaaattggtggttgctctaatttggatattcttaatctgtgctcttcaagcctttcaattctttggttgtcagatctttgttccctttcgaaatcggttatgaactgtcctaatatgagcgagctatcactgtgcttcacagaacatagtaatgattgtaccaatctga

SEQ ID NO: 1133 - DNA, 419 bp, Zea mays
  Clone ID: LIB3136-037-P1-K1-D5
gccagaagttgatgcaggataagaggtcgaaacagcagcagctccaaaagcaggtcggggacactaggacccccgtttctgtcaccggtgagcgaccgcaggaacctgctaatgggaagcccaatccgtccgtaccagatggtgtcacggcagaggtgaaggcggtgaaggctcccgcagagaacggcatcactgctcctgttgtttcctatgcagcaaaggtggcccagacagcaccagagaagcccgtcctctccaacggagtcgccaagaccggttaactcgatcgtgcaaccagagcttcatagccaggatgcggtgcaagggaactggtgaccaaccaaggcaggctgtggaactggcagcatggccccataagcgttgctcgatctcctcatcgctactggatggagagcagt

SEQ ID NO: 1134 - DNA, 201 bp, Zea mays
  Clone ID: LIB3136-037-P1-K1-D6
atttattatttacgaggatacggaaaatatgtggcaggcctggattaaaaaaaggcgatgtttttctcattctcgacagatatgggacttgatgtttgttctctagtttggttaggaaataaacattctttttcgtcttaatgttgaggctcatttaggtgtttgatgtccatcaatggaagtctgatgtagtctgtagct

SEQ ID NO: 1135 - DNA, 239 bp, Zea mays
  Clone ID: LIB3136-037-P1-K1-D7
atcgtgctctgcgccttcctcgtcttcctgttgggcaccccgacgtaccgcctttagacacccacgccggaagcggagtcccccttccgccgcctggcacgcggcctggccgccaacgccaacaaaacaggaggcctctccgcctcgcattcggaggaggaggaagcggcagcagacgcgcggtgcgtgctgcacctgctgcccatctgggcggagagcctcgcgtacggcgtgtttta

SEQ ID NO: 1136 - DNA, 407 bp, Zea mays
  Clone ID: LIB3136-037-P1-K1-D8
cggacgcgtggggtgttctttgtgttttcatgtgcttcaaggtgctaggtaagaatgcggacgaggaaaccataaagacaacctacagccaagttctatcaccctgatggcccagaactcatgttttgctaagtcttctccacctaagtcctcaaaaatttgaacaaggccatattatcagataaaagcagatgtagctttcataggacttagttccagcaaagcaaaggttgacattgcaccaaacaatagcgtctatacttcattcttatggcttggagaagcctatgcaacatgacaagccagatgacatgtatatgagaaggttctgcatcaagagaaaccaaagcaaaatctttgcatcaagagagcaccgatgaaaagctgatgtagaggccagttgacaa

SEQ ID NO: 1137 - DNA, 408 bp, Zea mays
  Clone ID: LIB3136-037-P1-K1-D9
gacgacttgtttcattgattcttgaagagatcgagcttcttttgcaccacaaggtcggggatgtcttgcaactgcggatcaagctgcggctgcggctcaagctgcaagtgcggcaagaagtaccctgacctggaggagacgagcaccgccgcgcaggccaccgtcgtcctcggcgtggccccggagaagaaggccgcgcccgagttcgtcgaggccgcggcggagtccggcgaggccgcccacgcctgcggctgcggtagcagctgcaagtgcgacccctgcaactgctgatcacatcgatcgacgaccatggatatgattattatctatctagcttgtggtggtgcgtgaacaataataagcgaggccgagctggctgccatacataggtatcgtgtggtgtgtgag

SEQ ID NO: 1138 - DNA, 412 bp, Zea mays
  Clone ID: LIB3136-037-P1-K1-E1
cgctgcatatctttcctttgccgcttgctgtctccctcgcctctctccagtcttcttgaggaccctgcttcctccctcttcctcttttgtttcatcagagagaaaaaaaactagatttagcgagggcggaccgacgacgcagtagaagcaaccgagacatggagcggcggaggaaggcaatgtggctgtaccccaaggtcgtcggcttcaacccgccggagaggtggggccactccgcctgcttcttcgaaggcttcgtctacgtcttcgggggatgctgcggcggcctgcacttcggcgacgtgctgaagctgaacgtggagaccatggcgtggagtcttgtggccacgacggggcagtgcccgggcacgcgggacaggcacggcgccgcgctggtggccaccggatgctc

SEQ ID NO: 1139 - DNA, 370 bp, Zea mays
  unsure (1)..(370): unsure at all n locations; Clone ID: LIB3136-037-P1-K1-E11
acaattagctagcttcttctagctctagctaggctcgtctgctgcaagaaggtgacggtaacagcaggcatggaggggaaggaggaggacgtccgcctgggcgccaacaagttctcggagcgccagcccatcggcacggcggcgcagggcacggacgacaaggactacaaggagcccccgccggcgccgctcttcgagcccggggagctcaagtcctggtccttctaccgcgccggcatcgccgagttcgtcgccaccttcctcttcctctacatctncatcctcaccgtcatgggcgtctccaagtccaccttcaagtgcgccacccgtcgcatccagggcatcgcctggtcctttcgcggcatgatct

SEQ ID NO: 1140 - DNA, 413 bp, Zea mays
  Clone ID: LIB3136-037-P1-K1-E12
catgtatccatacttctccaaatggataagaagccaccgagacttacccttgaggtgtaatcaatggtgtaatgttgttagatgggagtttagcaatccaactcctttcataaggagccgtgaatttctgtggcaagaggggcatactgcttttgcgactaaagaagaggcagatgaagaggttctccaaatattggaactgtacagaaggatatacgaagaatttttagcagttccagtttccaaagggagaaaaagtgagatggaaaaatttgcaggtggcctttataccaccagcgttgaggccttcattccaaacactcgtcgtggcatacaaggcgcaacctcacactgtcttggtcaaaactttgccaagatgtttgatatcacttttgagaatgagaaaggtgtta

SEQ ID NO: 1141 - DNA, 397 bp, Zea mays
  unsure (1)..(397): unsure at all n locations; Clone ID: LIB3136-037-P1-K1-E2
catagtcacctgcctatctatctagcgagagagagagaggaaagctagctagctagcatggagtgcggcagcaagaaggcagcaggcggtgtgttggcgctgctgcttctccagctggtgttagctccgacgacggcgacggcccgcctcctgcaggcggatacctccaccgtggttggcctggacatcatcgcgagggagtttggccatccagtgagaggcatcctctgtggtgaaacctgtgtcttcctaccatgctatacggcagccatgggttgccaatgcattggccaaatctgcatgatgtgatatctggactagcgctatttgaatttgtgttgggagaacacanggacggtacggggtgttcacttattgcatgtgtatgggatctaat

SEQ ID NO: 1142 - DNA, 330 bp, Zea mays
  Clone ID: LIB3136-037-P1-K1-E3
cggacgcgtgggttcagaagattcagtatgtcttgctgaagcttgaggaagagcacgggtgcagaatgctcaaagtctctgataagcgcactcgcgtgcttttgagggactatctgtatgggaggaaggaccgcggtggcgggcagaataaaaagaagagggtcccgttctgtggttgtgttcgtccgaaatcaagaacagagccatagcctctctttttgttcgacctgcacctccaagaggtagccgtagtccgaaatcaagaaataaaacaaaatcgacctgcaccttcaagtggttggctaagtgtcacctatgcattggaagagg

SEQ ID NO: 1143 - DNA, 383 bp, Zea mays
  Clone ID: LIB3136-037-P1-K1-E4
caagaagtatcctaacgggtctaggacaaatcgtgccacaccaaatggttactggaacgcagtggaaaggatagaataattatgcttaactcccgcaccgttgggatgaagaaaacattgatatttcatgaaggcaaggcccctaagggtgacagaactgattgggtgatgtatgaatacagaatggaagatgaggatttggtttctgccggtttctcaaaggatgcttatgtactctgcaaaattttcaagaaaagtggccttggtccaagaatcggagagcaatatggggctccatttaatgaagacgaatgggataatgcagaagtcgaaactttctctgttttctttggtttggttaagaagtgaattcaacataggga

SEQ ID NO: 1144 - DNA, 420 bp, Zea mays
  Clone ID: LIB3136-037-P1-K1-E6
gcggcacagtcatccacactaacgaacgaactcttgctccgatcacgagctagctgaggtgcgggatggcggctgtgctgaacagcaggaagacgccgcaggcggtggtggccgtgctggtggcggcggcgctgctggcttcgtccgcttcggcggcgatcacctgcgggcaggtggggtcgtcgctggcgccgtgcattccgtacgcgacggggagggccagcgcgctccccgcgtcgtgctgcagcggcgtcaagagcctcaacagcgcggcgcggaccagcgcggaccgtcaggcggcgtgccgttgtcttaagagccttgtcaacagcgttaagtgcaaggcatgggctggtccttcggcggcatgagccttggccttcgtctactgcaccagccggcatttgcggcgggcacatt

SEQ ID NO: 1145 - DNA, 397 bp, Zea mays
  Clone ID: LIB3136-037-P1-K1-E8
gatgctcttggcctgctacgacctcatcacacacctctgtcccgtcccactatacgggggagcagctagcacctcttcccctcgcacccgccccctatccgagagcgaccagcatggcgcactccctctccgactccttctcgccggctcgccgagcggcgccaggtgacaaatgtgatttcaagcccgagctcggcttccttccacagccacaggatgacttctgtatccatccgttcaagaccaagctctcttcgtttcaagacttgctgttcggctaagaaggagacagtcgacaaggtctgtagtatagtgaaggagcagctggctcttcccgatgggactgctatcactggcgaatcaaaattcgccgaacttggtgctgattcactgcata

SEQ ID NO: 1146 - DNA, 353 bp, Zea mays
  Clone ID: LIB3136-037-P1-K1-F1
gccaacaactaaaggcaggcgcggcacatcgcgacaccgtaccggcctagacacttggagagaggagaagcagcgcagcggcatgggcaccagtcccgtcatccctgcgacgatgctcgtcgtcgctctccttgtcgctagtagtactgtctgcttcggcgccaccgacaccgacaccgacggcgccattcgtctccccagcagctctggtgctgttggtcgaccgtgggagtgctgtgactatgtcaccaaggagccgtttatcaggcccgcccggtggcgctgcaacgacgtggtggacaagtgctccgtcgactgccaagagtgcgaggagtcgccggccggcgacggct

SEQ ID NO: 1147 - DNA, 319 bp, Zea mays
  unsure (1)..(319): unsure at all n locations; Clone ID: LIB3136-037-P1-K1-F12
aaaaaattatactactctcttctgtccagtccagccgcggacaccaaggcacaggcgcaggcaggcggacagggtaggcaagaggcgagctcggcgaaggcgcggagaggggagacagccagccgctgcattgcgctacattgggcaggagggctcgccgccgggggaggctcggatcttgcgtctctggccgtggctgccgcgtgcttgcttcgtttggtggcgctgcgcccattggcgggcggcctcggtccagcgcggcgtgatctggcgcgcgccgtcgactccactcgcgtggngaggcctgcatcttgacgct

SEQ ID NO: 1148 - DNA, 414 bp, Zea mays
  unsure (1)..(414): unsure at all n locations; Clone ID: LIB3136-037-P1-K1-F2
cttcacgccagtctcggtctcttccgaaggcgtcgcgcgcggttgtttgagaggagaggaggaagatgagggagtgcatctccgtccacatcgggcaagccggcatccaagtcggcaacgcgtgctgggaactttactgcctcgagcacggcatccagcctgatggccaagtgcctggagataagaccgcgggacatcacgatgatgccttcagcaccttcttcagccagactggtgctgggaagcacgttccccgtgcaatcttcgttgatctagaacccactgtgatcgatgaggtgcgcactggcacgtaccgncagctcttncaccctgagcagctcatcagtggcaaggaggatgccgctaacaatttcgcccgtggccactacacaattgcaaggagatttgtgatct

SEQ ID NO: 1149 - DNA, 276 bp, Zea mays
  unsure (1)..(276): unsure at all n locations; Clone ID: LIB3136-037-P1-K1-F4
ggacgacttcatcgacatcttcctctacagatacgaggagtacggcttcaccatggataagggcaagtccctcctcatgaacgtgttcaaggcagccatcgagacctcatatctggtgctggagtccgtcatggccgagctcatgaaccacaggcgcgtcatgaagaagctgcaagcggaggtacgggcgtacggagcggagaagaagctggacatgatcagggaggacgacctgagcagcctgtcgtacctaaaggcgtncatgaaggaagcgct

SEQ ID NO: 1150 - DNA, 345 bp, Zea mays
  Clone ID: LIB3136-037-P1-K1-F6
cggacgcgtgggtccgcgctcgcatcccacctcaagtccctaccggcgacttggcaacgcatgacattggcccttgatcaaaagcgatggaagaaagcttttgagaaaaaacggcagcaaccttaagctcattgttctttccaacttcttgggccagttggatgagcactgtgtctggtcatcaattgtggcgcatgaagcttcaaaattctctctatatacatatgatgtattgactgaggttctacttttggttttcttgtttagcgttacaactttctcagcttgtgtatttgctccatctcagatcatcagatgacattcagaatgatttggctattcttt

SEQ ID NO: 1151 - DNA, 141 bp, Zea mays
  Clone ID: LIB3136-037-P1-K1-F7
attcccgggggacgccacgctcgcccgaatgtccaagctctccgtgctggctctacgcgctttggggctggggcacgcgcagtcccatatgaaccagcccggccgcacataaccgtgcgtccggccgcgggccatcactca

SEQ ID NO: 1152 - DNA, 415 bp, Zea mays
  Clone ID: LIB3136-037-P1-K1-F8
catccgcacctctctccatctcccttctcctccgcctccttcttgatccagccgggggagggatcgccatgtcggactcggaggagcaccacttcgaatcgaaggccgacgccggagcgtccaagacctacccgcagcaggctggcaccgtccgtaagaacggcttcatcgtcatcaagaaccgcccctgcaaggttgtggaggtttctacctcaaagactggtaagcatggccatgccaaatgccactttgttgccatagacatattcaacgggaaaaagcttgaagatattgttccttcatcacacaactgtgatattccgcatgtgaaccgtactgagtaccagctgattgatatatcagaggatggatttgtgagcctttctacttcagatggcaacactaaggatgatct

SEQ ID NO: 1153 - DNA, 221 bp, Zea mays
  Clone ID: LIB3136-037-P1-K1-G1
cgtattgacagactaaacccttgcgtgcagccaagctgaaaggagaacagtactgaacatattggaagccatctgaccgtatgcaggcagaggaaaataactcacattttgatatagatcaatgatcgggatggccaagcctgtgtgcacaagtacgagctgttggagcttctaccaagctaatgtatgcattgctgcatgagatgcgcacctattcttga

SEQ ID NO: 1154 - DNA, 313 bp, Zea mays
  Clone ID: LIB3136-037-P1-K1-G2
ggaaattctgatgtcccattgagcttgtttcctatagttcataggagctagaggctgagctagttgcttgtgtttggtgatagtcatggtctgtgttctggcgtgtcaggtatttaggaatagaaggatgattaactgggttttgcaatgatggatcatgggttttgaggctgtatttttcgtttatttgcctttcctctctggattctagttcctctctctctctctagattctggacaagtgtagtagtgcttattttatgttggttggtttaagaacctgaaatgaacatgggaattctatcaagcattt

SEQ ID NO: 1155 - DNA, 401 bp, Zea mays
  unsure (1)..(401): unsure at all n locations; Clone ID: LIB3136-037-P1-K1-G3
cggacgcgtgggctccaagaggtggtgctcttgcagctcacccggttccggtgtggcgccgtcgccatcgggttcacgtccaaccacgtcgcggccgacggccacgccaccagcaacttcctcgtggcctggggacgcgccaccaggggccttcccacgggcctgccgccttccgtgtactaccagccggggcagttcaagccgcgcccctcacccggacccggccgcgtcgtcgacgacgactttgaccaccgcagcagggagtactaccacctgccgtcgcctgctgctgacaacaaccacggctacggctacggcgacgaggacgtgatcgacagcatcgtcatccacaaggcgcacttcaccaaggaattcatcgcggngctccgctccagggcgtc

SEQ ID NO: 1156 - DNA, 318 bp, Zea mays
  Clone ID: LIB3136-037-P1-K1-G5
cagaaccctccttcctgctgtcactgtcattggcgctgcgctcgctacctagcttctgatgtgcattccaaaagaggggaggaatggcaatattttcatcgagagctttcgcgtcgagagcccccacgtgcggtacggccctatggagatcgagtcggagtaccggtacgacacgacggatctggtacacgagggcaaggaccgcgcctcacgctgtgtcgtgcgccccaagtccgtcaagtacaactttcggaccagaaccgtcgttcccaagcttcgggtgatgcttgtggggtggggaggcaacaacgggtccac

SEQ ID NO: 1157 - DNA, 252 bp, Zea mays
  unsure (1)..(252): unsure at all n locations; Clone ID: LIB3136-037-P1-K1-G6
cttgtcggtggagcttctttgaagcctgagttcatcgacatcatcaacgcggccaccctgaantccgcttaagatgctacgctgaagaccaacatactttttttttgctcaactgtgctatgtaagctagtagcttttgcgcaggagcagagactgttttgcctgcccccaacttctagcttgagcttgctaataatgtttacctctggacgtatcaataatggtgcttatgtatcccctttcttttgtgcc

SEQ ID NO: 1158 - DNA, 260 bp, Zea mays
  Clone ID: LIB3136-037-P1-K1-G7
atttttacaaatattttttatctcatcatccctccttcttccagcccggcttttatacataaaaaagccctccttcctttatttaattaaccatccatccctacttactcaccctaatttctttctcaatcttccctactcactatcaatatccttacctctccatcccccaaaatttacctaatttctacataacttcaaattttctttcattaaccaatcaatacttctcatatatccattcccttaatctttttttc

SEQ ID NO: 1159 - DNA, 405 bp, Zea mays
  unsure (1)..(405): unsure at all n locations; Clone ID: LIB3136-037-P1-K1-G8
cggacgcgtgggtgacgacacaagttcagaacaaggtcatccccatgagcaggggccgcgacgccgtctacaggatccttcgtgtcaagttcaccatgggcctgttcgagaacccttaccccgactctagcctcgccggcgagctcgggaagcaagaacaccgggaactggcgcgcgaagccgtcaggaaatccctggttctcctgaagaacggcaagtcctcctacgctccgttgctgcccctcccgaagaaggccggcaagatcctggtcgccggcagccacgccaacgacctgggcaaccagtgcggggggtggacgatcacgtggcaaggaagcagcggcaacactactgccggcacgacgatcctnttcgggatcgaggccaccgtggaccccagcacgc

SEQ ID NO: 1160 - DNA, 404 bp, Zea mays
  Clone ID: LIB3136-037-P1-K1-G9
ggcgagagggaaaagatggggcttacgttcaccaagctgttcagccggctgttggccgagaaggagatgcggatcctgatggtgggactcgacgccgccggaaagaccaccatcctctacaagctgaagctaggcgagatcgtcaccaccatccccaccatcggattcaatgttgaaactgtggagtacaagaacatcagcttcactgtctgggatgtcgggggccaggacaagatcaggccactgtggaggcattacttccagaacacccagggtctcatctttgttgtggacagcaatgatagggaccgtgttgttgaagcaagggatgagcttcaccgaatgctgaatgaggatgagttacgtgatgctgtgttgcttgtgtttgctaacaagcaagatct

SEQ ID NO: 1161 - DNA, 315 bp, Zea mays
  unsure (1)..(315): unsure at all n locations; Clone ID: LIB3136-037-P1-K1-H1
cggaaaanccggcgcgagccacgcgtccgcctgctgctgattgcccccaggcgggcctcactcattccgctgctgatatttcgtgccgctcttctttccgtcttgtgcgtcaccaaggccttccgctcgctccccagctccagcaggcacatcagatccatccaaccacgaacaggaaggaaggtaggaggaggggctgaagttgaaccatgagtgccgtcccggtatcgtcgtgccttaaacccaacgcgcccctcgtcatcccgacgactctgatccacctagaagacttttctaccaactgtcgggacctga

SEQ ID NO: 1162 - DNA, 227 bp, Zea mays
  Clone ID: LIB3136-037-P1-K1-H11
cgcgtgcgcccaacgcccgcagttctcgtcattcatccatcgccggaaaactaacccctaagacgtctgtatccccgaggaggacaacaaaccctcgagggcggcgcccacatcaaccttaagtaaaggacagatggcaagaggtgtctttcgataaagaggtcacccactgaaaagctgataaccttattgtgaccccagtctgggacatgaatgccattgccgtt

SEQ ID NO: 1163 - DNA, 403 bp, Zea mays
  unsure (1)..(403): unsure at all n locations; Clone ID: LIB3136-037-P1-K1-H2
agaacctatctcttttcatactcgtcttcgtacgagtccttaagccttaaccagctgacgaccatgtttgatctcagcgagcagcatgcccacagcattgttagcaagatgatgatgcatgaagagcttcatgctagctgggaccagccaacaaagtgcatcgtattccatagtgtggaccaaactaggcttcaggggctactcttccagatggcagataagctctcggtcctggtggagatcaatgagagggcatacgaggcaagaactggtggtgctctcgagggggtacccgccaagcgcaagggcgagggtcaggataatatgggaaaagggcaggataactttgtctcgtcacaggggccggagggtggtggcaacaagtttggatactncggcagag

SEQ ID NO: 1164 - DNA, 284 bp, Zea mays
  Clone ID: LIB3136-037-P1-K1-H4
accgccacttccccggcaagcccaagctgcccgcacccacctcctgctccctctcccgccgcctcctcgctgccccccttgccgtcctgccgcggcgcccgcgtgacgtgtcggcggcgtacggcgacggcgacatggacgacgacttcggcgacttcgaccccgacgacgcggacggcgtcggcgaggacgacgacgtcgacaacgagcaggactacgacgtcgactacgaccgccttctagctcccgtcgtcaagccgccgtcgccgtcgggcgcgtcggcg

SEQ ID NO: 1165 - DNA, 290 bp, Zea mays
  Clone ID: LIB3136-037-P1-K1-H5
cggacgcgtgggctgcatccaagtgcctaagatgccgcctgatgaatgcttcatgtggtctgacaaggaatcacttgcagtgggcactgaactgcttgtgtttgggatggcacgtattgtcttcagatacagcatcctaaccaattcatggaccagggctcatccaatgaactctccgcggtgcctgtttggttcaacaagtgttggggaaaaggccttcgttgctggaggcactgattctattggcaacatactgagctctgcagagatgtatgactctgagacacata

SEQ ID NO: 1166 - DNA, 150 bp, Zea mays
  Clone ID: LIB3136-037-P1-K1-H8
cacaaaatttgtaccgttggtttttcttcgcgtctcctatggacatcactcgagagcctattaaatgaagagcatcaccctttctacttacatttccttaacctctatttccttcttctacatctactcctccgtccaaacccaatcttc

SEQ ID NO: 1167 - DNA, 76 bp, Zea mays
  Clone ID: LIB3136-038-P1-K1-A1
tcgcctcgcggtcgatcggcaaggacgttaccgatttgaattgaaacataccattggtgtacgtggacaaggagac

SEQ ID NO: 1168 - DNA, 168 bp, Zea mays
  Clone ID: LIB3136-038-P1-K1-A11
ttcaattcctcgatcctactccaagcattataataccttcagaacttcctgtgcatgatgctgggaactcatactcggccccagatgctgctatacacttctgtacatacaagcatgtatgtcttaagggcaacacgaaaagtttccgaacttgctgaacctgcttat

SEQ ID NO: 1169 - DNA, 131 bp, Zea mays
  Clone ID: LIB3136-038-P1-K1-A12
gagacgggcaggggagaggaaaaaaaaatctaaccctagcatccgcagcgctagggttcgggggttgcgatggcggcggcggcgagacagcgggggacggtgaagtgggtaacgacaccaaggcttgggtc

SEQ ID NO: 1170 - DNA, 447 bp, Zea mays
  Clone ID: LIB3136-038-P1-K1-A4
cacaagcacaagcgcactctagcaatggcttctgaggttgtccgccctagcgacgccgagctactaaaggcacaagccgacatatggcggctcagcctctcctacctcacgcccctgtcactgaggtgcgccgtggagcttggcatccctacggcgatctaccgccatggcggggctgcctcagccgctgagctggtcacggcgctgtctctcccctccactaagctgccgttcctccgccgcctgctgcggctcctcgccgcgtcgggcgtgttcaccgtcgacaagcagagctcggaggaggagcggtaccgcatcagccccgtgtcctacctcctggtggacggcatccctcacgaggaccacatgaaccacaccgctctggtgctcacctgcacctggacgcgctacattgaggcggggatagggctggcggagtggttcaag

SEQ ID NO: 1171 - DNA, 395 bp, Zea mays
  Clone ID: LIB3136-038-P1-K1-A5
gtcgaggccctagatacgtgattgaagatcctttgtggtgatgaaggtgaaatcagcatagcactcgccaagcattctacagaagagctcccaaaataaagagtgaagatttaagatgaagtggttgctgaagaggagtctactccagtgcctgttcatcaagtggatggagccatctaactaatcatcgtgttagaagtatctagaacctcttctctgcaacaaaggagaagttttattcccttatcttttggttagttacttcatgtggaggccttgaagcttagaatgtttatgtgtatctcttatggaaaggcttcacccttccaattattgtaataagttatgcactttgggtactatcaggacttgtaataaatacatctctttctacc

SEQ ID NO: 1172 - DNA, 145 bp, Zea mays
  Clone ID: LIB3136-038-P1-K1-A6
cgccgagctgatcgcggccgaggagctggaggctgacgccaacatccaccccgacgacggggactcgccaagcaatttacacgatacctcctaaattaaaaagtgaatattcaagatgaattggttgcttattatgagcttactt

SEQ ID NO: 1173 - DNA, 243 bp, Zea mays
  Clone ID: LIB3136-038-P1-K1-A7
cgaccgcaacgcccctcatctcccttgaccccgacatccccgacccgatggtgcccaaggcggagaagaagccagcggagaagaagccggcggccgaggagaaggcggagaagacgaccgcagggaagaagcccaaggccgagaagcggctgcccgcgtccaagaccttcggcaaggagggcggcgagaagaaggggaagaagaaggcctagaagagcgttgagacctacaagggctacattc

SEQ ID NO: 1174 - DNA, 237 bp, Zea mays
  Clone ID: LIB3136-038-P1-K1-A8
ccaccatgtgtcttctttgggcttatcttcactcatggatggtcaaagatctctccggaaaataaatgtcgcacacagcttgcatgagatagaggcttgtgttctgagcaagttatcaacaataggagaaaccttgactgttttaagactcgacggcctcgaaatctttgcctcgaatcttcaggcagttggttccacctgcaagaatttgtcgagatcgggcttaacaaatgcaat

SEQ ID NO: 1175 - DNA, 83 bp, Zea mays
  Clone ID: LIB3136-038-P1-K1-A9
ccaaaaactacgactcctcctgtccctctccgcgtccaagggtggcagtcatccgcattcaccggaccccaccgggaatggcg

SEQ ID NO: 1176 - DNA, 195 bp, Zea mays
  Clone ID: LIB3136-038-P1-K1-B1
gctggagctaaatctcttcgtacaacagaaactgctagtgtaaaggaaaccaacggtaacatctcaaggatgaacagcagcgacgataatgtggtggttgagaagaccgttgtgatgctcgaagatgaggcggtcattctacattctggaagaaatgcagcaaaggaaacttgtggtgatgacaggacagagaag

SEQ ID NO: 1177 - DNA, 362 bp, Zea mays
  Clone ID: LIB3136-038-P1-K1-B10
gcgaggccgaaagagcagcaacggtgcggaggcagggaagcaaagcaatcccccacctatatacgcgccccgcccagtaggagagtaggagctgcaaggagtccggtctccgaaaaccgacaagacgatagcaaatcgaaggaggacacggctgctggtggccgcattcggtcgggggaggagcacgaggagccatggcctgcctgcacgaccacagctgcgaggatcacaactgcgccgtcgactggtcgctctacaaccacatcgacgtgcccaaggtggtggctcttaacgaatcggtggccgggagcgtcaagttcggctttaaacccttgtgagcagcggccttggccaccttttgg

SEQ ID NO: 1178 - DNA, 249 bp, Zea mays
  Clone ID: LIB3136-038-P1-K1-B11
gtacacaatgggcttatatgggaaatatgtttgatcggttgtttacgaccttctacgtggggccggaaagctttcctgggctttgggtcctgaattaatgggctggggcatcgtatagtgtgacgggaagcgttgatgggacggatgaggattcatgtaataattgttctcaaaagactgatgcgcggactgtgcggatactgacccggaccgcccggggttatatgcggaccgaccgtctgtggatgc

SEQ ID NO: 1179 - DNA, 217 bp, Zea mays
  Clone ID: LIB3136-038-P1-K1-B12
gaatttggctgctgctttctggagatgtatggctagttcagaagctgatgatgaagctgatgattctggtgctttggcagctgttggttgcttaccagcaattagcacaattcttgagtccataagcagccttccacatctttttctgcaaatagaacctacattgttacctataatgcgcaggatgttgacatctgatggccaagatgtgtattga

SEQ ID NO: 1180 - DNA, 403 bp, Zea mays
  Clone ID: LIB3136-038-P1-K1-B2
cagggactcccatgttcctatccttgcccctttgccaattgggttcgcggcgttcctggtccaccttgccaccatccccattactggcactggcatcaacccagctaggagccttggcgctgccatcatctacaacagggatcacgcctggaacgaccattggatcttctgggtcggtcccttcattggcgctgccctggctgccatctaccaccaggtgatcatcagagccatcccgttcaagagcaggtcttaagctgccgtggcctggccgagacatgccagtccgaagaacgggccgtttcctgtgatgacttcttgtctggccacgcctagtttttttgttgatcctattcgtcgattcttaaggctggtgctcactggtgctccggtctgttaaccg

SEQ ID NO: 1181 - DNA, 211 bp, Zea mays
  Clone ID: LIB3136-038-P1-K1-B4
ctcaggtggcacacatccccggtgcgctattcttcgacttagatggcatagttgatcggacaactgatttaccacacatgctgccatcagaagaggcttttgcagcagcaatttctgagctggatataaaaaaccaggataaagttattgtctatgatggaaagggattcttcagtgcgcctcgtgtttggtggatgtttagagtgtttgg

SEQ ID NO: 1182 - DNA, 399 bp, Zea mays
  unsure (1)..(399): unsure at all n locations; Clone ID: LIB3136-038-P1-K1-B5
cggacgcgtgggatcgtgctgtacagtatactgctgttggttgatccgttggtgccccggtgcacgctgttgcactgaactgtacaatgtactttgctcatttgttggtttgtctggagagtttttagtcttttagatattcttggtctgcatggagcaggacttggtggtatattgttgcattcgttgtggacggtacgaataagaattcgggcttgcctcggagtctagtccattttgcatgctcgcctgcagcagtgcagctgtcgatgtactctatgactgtatatggaaatggaatgttctctgtttcctttcacatggntgcagccttgcctgagtctagttgattcatgtgattgaggtgtttggttgggccccaagcagcttgcctggtgc

SEQ ID NO: 1183 - DNA, 334 bp, Zea mays
  Clone ID: LIB3136-038-P1-K1-B6
ccctcactcttcactagccctctgctcctctgaaatggcggcggcgacttcctcttccacctacctcgccatcggccgcaaaaccctaaaccccgccccctccgtagccacagccgccacctccgtctccttccccgccacgcagcacccatgcctcgtcgccgcctccgcggaccgccgccgcgccgtggctgcgaaggtctcgtcgccgtcggtcatcggcaccgccatgccgtcgctcgacttcgagacctccgtcttcaagaaggaaagagtgtccctggccggccatgaggagtatattgtgaggggtgggagggatctgttcccgctg

SEQ ID NO: 1184 - DNA, 281 bp, Zea mays
  Clone ID: LIB3136-038-P1-K1-B7
ttcaagctctgcaaggtgaggtccgttcagtttggccagaagggcatcccctacctgaacacctacgacggccgtaccatccgctaccccgacccgctcattaagggcaacgacaccatcaagatcgatctggagaccaacaagatcatggacttcatcaagtttgacgtcggcaacgtggtcatggtgaccggcgggaggaacaccgggcgtgtaggtgtgatcaagaacagggagaagcacaagggcggctttgataccattcacgttgaggacttcat

SEQ ID NO: 1185 - DNA, 244 bp, Zea mays
  Clone ID: LIB3136-038-P1-K1-B8
cccacgcgtccgtgccctgcctgtgcgctgacgacgacgaactgaataatcaagtactcgctggtggctccatgggcggtgcgcagcacgtacaggttcgtgaggagcgggagcggggagcggaacctgctctccttcgccaggctgccggagctccttcttcggcttctgtacaaacagttctggatcaccgagtgctgccaccagacggtccggagcatgcacaggatcggtaacaagagcc

SEQ ID NO: 1186 - DNA, 86 bp, Zea mays
  Clone ID: LIB3136-038-P1-K1-C10
ctggcttctcctccccctcttaccaagtcctcctcgggttagggttccttagggttttgtggaggggcgatggcggcggctgatgt

SEQ ID NO: 1187 - DNA, 335 bp, Zea mays
  Clone ID: LIB3136-038-P1-K1-C11
gctgattaccctgaaaaggggatccgttttttctctgaaaaggtcagtcatcatcctatggtcatggcatgtcactgtgaggggaaaggttggaaaatttggggagacagcaatctgaagagcaaattctggggacaatccattcaattggatcctaatggtgtgctaactttagagtttgatgatggagaaattttccaatggagcaaggttacaacaacaattaacaaccttatcctttgtctagtatattgtcttcaccatggcacaatgaacataatttgggaattgaccatttttaatgcatgctgactcttaatgatcattcttttctt

SEQ ID NO: 1188 - DNA, 331 bp, Zea mays
  Clone ID: LIB3136-038-P1-K1-C12
cttctcctccctcctgccgggtccttaataaagagcagcagcgcaagaggttggtagagcgagcgagaagaaggcaatggcggcggagagctttctgttcacctcggagtccgtgaacgaggggcacccagacaagctgtgcgaccaggtgtcggacgcggtgctggacgcctgcctggcgcaggaccccgacagcaaggtggcctgcgagacctgcaccaagacgaacatggtgatggtgttcggcgagatcaccaccaaggcgagcgtggactacgagaagatcgtgcgcgacacctgccgcgagatcgggttcaccttcgacgacgtg

SEQ ID NO: 1189 - DNA, 156 bp, Zea mays
  Clone ID: LIB3136-038-P1-K1-C3
atttgctgaccattgctcaagtcaaaatccaattgatgtcccacgaagttggatttgggacctcccaagacgaactgtttactttggaacctcagttcctacaatattcagaggtttaacgactgaagagatacaacgatgcttttggagaggatt

SEQ ID NO: 1190 - DNA, 161 bp, Zea mays
  Clone ID: LIB3136-038-P1-K1-C5
ccacgcgtccggttcaatttaatatgtgaacttccagaaacagtagccagaactttggttccaaggatgagagttgtaaaaggaagtggaaaggcaatcaattacttaacaccaccaaggatcttgcttgctctggttactgcatgggttcggcggggtag

SEQ ID NO: 1191 - DNA, 93 bp, Zea mays
  Clone ID: LIB3136-038-P1-K1-C8
cttattttgccttttcatctctccttgtggcacaatactatggcccacctttgaacctatggcgccaacactcttagctaataactcaactaa

SEQ ID NO: 1192 - DNA, 245 bp, Zea mays
  unsure (1)..(245): unsure at all n locations; Clone ID: LIB3136-038-P1-K1-C9
ccacgcgcccgnggacgacggggggctagagcaaaacccnggcaaagaggagcggcgacagaaaaaccaattgagtgtcagtgcaagtaagatgtaggggcaaaacagaggagaataccttgccgcgcaaggcgatagatacacaaaaacaaaaaagagcacctacaccgggtgggagccggggaagaattaaagagagggagatcccaaatgaggggcttgaactcgggaacaagaacgacaag

SEQ ID NO: 1193 - DNA, 223 bp, Zea mays
  Clone ID: LIB3136-038-P1-K1-D1
catgcttcagttggttcaggaactgatgcttccttgcatggttgctgatgcttcagctggttcagcagctgataggtgccgttgaagatttggatgaaccagtgccgatcgaatcattttcacatgagctgtagtcccatcgggtcctccctggtgggataatggggggagcaggacggccaaacttgctttgaaagctgggtcaatatttgagccgttctgc

SEQ ID NO: 1194 - DNA, 318 bp, Zea mays
  Clone ID: LIB3136-038-P1-K1-D10
attttacaatgctcggataaacaaatggctacgagctccagatatgctgcaaaaacggcacttctttggttcttgtgtcataaacaactgcctttatgttgctggtggagagtgtgtagggatacagagaattctaagatccgctgaggtatatgatccgaacaggaatagatggtctagcattgctgaaatgagcacaggaatggtgccctctattggagtagtacatgatggcaagtgtgatctaaaagggctaaattctcattgccaggtcgtgagtgaggtctatcttccagcatccaaaaagggggaggcacc

SEQ ID NO: 1195 - DNA, 210 bp, Zea mays
  Clone ID: LIB3136-038-P1-K1-D11
cgcgacttgctttgagaatttaactgcgtgaaactactgagctgttgctgcttgatgagccacttactggtctagattggaaggctcgagctgatgttgtgaatctcctaaaggacctgaagaaacatcatactatactggtgtgaagtcacgatctaagggaactatatccactagtggatcgctcatggcgaatggaaatggggggaa

SEQ ID NO: 1196 - DNA, 293 bp, Zea mays
  Clone ID: LIB3136-038-P1-K1-D2
cttgacactgaggagtcctacccttaccaaggtgtcaacggaatctgccagttcaaggctgagaatgttggagtcaaggttttgaactcggttaacatcaccctgggtgctgaggatgaactgaaagatgttgttggtctggttcgcccggttagtgttgccttcgaggtgatcagtggtttcaggctgtacaagagcggagtctacactagtgaccactgcggaactacaccgatggatgtgaaccacgctgttctggctgttggctatggtgtcgagaacggtgttcccta

SEQ ID NO: 1197 - DNA, 235 bp, Zea mays
  Clone ID: LIB3136-038-P1-K1-D3
gcagagcgagcgagctgtccggccaaacctttacggccgcctccacaatgccgcgccatctcgcgctgctcctgcccctgctcctgctggcctcgccggcggccacgcgcctggcgtccgccgcctgcgcgggcgagaagttcccggcggggcgtgcgtacgcgtcgtgcgaggacctgccgaagctgggcgcggcgttgcactggacgtccgacgcgttctagagctttccctg

SEQ ID NO: 1198 - DNA, 436 bp, Zea mays
  unsure (1)..(436): unsure at all n locations; Clone ID: LIB3136-038-P1-K1-D4
gaattttcctccctgccgtggtaggttgtgaagaacgaggggtgggagcgcctgtatggcgggcttatgccctctctcgtcggcaccgctgcctcccagggtgtctactactacttctaccaaatattccggaacagagccgaggcaagggcccttgagcgatccaggagagggcttggcgatgggtctgtcgggatgctccagtctctcgctgtcgctgccctgtctggatgtgtcaatgtactgctcacaaacccgatttgggttgttggtacacgaatgcaaactcacagaaaggcaaacaaacagcaaagacctcanggtttgaattgtgctcttgataagccccttgaagctgctacagctgaaaacgctccatacaaaacgattgatgtttttcaggaactctacaaagaatctggagtttttggctttt

SEQ ID NO: 1199 - DNA, 239 bp, Zea mays
  Clone ID: LIB3136-038-P1-K1-D6
ctcttaccaccccaacgtgatggcggtgagcaacaacatcacggcatgcgtgacgctgctggcgctgatctgcgcggtgcccgtgatcgcgtcgggggtgtggttcgcgtcggcgcagggcgaggagtgcgcgcgcctggcgcggtggcccgtggtcatcctgggctggctgattctgctggtcgttctggcgggcttctttggcgcttactggaacctgctcggactgatgttttttt

SEQ ID NO: 1200 - DNA, 120 bp, Zea mays
  Clone ID: LIB3136-038-P1-K1-D7
caaaattgtatgataaagatttagaactttatagttaaaacgctcttattatatgtatatagcggccatgcatgagcaacaatcaggtatagcaattccaaaaaaaatgtttattatatg

SEQ ID NO: 1201 - DNA, 289 bp, Zea mays
  Clone ID: LIB3136-038-P1-K1-D8
ttttatttaagtacaaaataggcatctaaatatttacaccaaagagaacttgaacctagattgtctaggcacgcattcacgcctcgaccaactgagctagttcggctttctaattttagctgtttgttccaatctgcctaaagatgtatgaagttaggtttttgctgatgcctgcaccctgcaggtttgtgcaaatactccatatacagaagagggggtctctttctttgaaatttgacgtttgctacctctggtatcttctgttcataacaaacttcttttcattcct

SEQ ID NO: 1202 - DNA, 99 bp, Zea mays
  Clone ID: LIB3136-038-P1-K1-D9
cggacgcgtgggaaaaaaaaaaaaaatatattttttaataaaaaaaaaaacaaaaccttttttggcaaataaacaaaaaaaaaaatagggaaacttttg

SEQ ID NO: 1203 - DNA, 74 bp, Zea mays
  Clone ID: LIB3136-038-P1-K1-E10
ctcagctcgccgcacccggagaaggagcagctcggcgcggtcagcacggagtacactttaccggacagcggtta

SEQ ID NO: 1204 - DNA, 233 bp, Zea mays
  unsure (1)..(233): unsure at all n locations; Clone ID: LIB3136-038-P1-K1-E11
gacccacgcgnccgngcaggcatcaacataggaagggacggaaaaaaatgcttcgcggacgcgagcgaacggcagggcctgatcaaggagaggagcaaggcggccgggaacaagaagaacgccgccgcaatcaccaagaactgcgaggagctggccaagaacggggaggagatcgaaggaggactaggccacacagggacactgccagacagacaggaaattaagaaaaacac

SEQ ID NO: 1205 - DNA, 105 bp, Zea mays
  Clone ID: LIB3136-038-P1-K1-E4
gccgaacatttcatctgcagggaaaacaattttttctcatgaaggcaggaagaaggataaaactttacaaaagggaagggcgggttaggcatgatgaagacattt

SEQ ID NO: 1206 - DNA, 155 bp, Zea mays
  Clone ID: LIB3136-038-P1-K1-F12
cgacccacgcgaccgggctgaggagcgcaaccacacggcgggccacgttataaatctaatgagaaggaagactatgagtcatgtgataccgcgtgccagcgcatgggaaatgaaatggagtacaccaaaatagacaagcctattttactccacag

SEQ ID NO: 1207 - DNA, 137 bp, Zea mays
  Clone ID: LIB3136-038-P1-K1-F2
ctttttctctgcagggtgctgccagtaaaattaagatctacatggcgcttggagtagggaacggcggcgagctgttcgacaagatcgttatcaaggggaaactgctcgaacacgagggcaggaggctcttacagcac

SEQ ID NO: 1208 - DNA, 137 bp, Zea mays
  unsure (1)..(137): unsure at all n locations; Clone ID: LIB3136-038-P1-K1-F3
catggggcggcaagaaaccgcnagcnctactggcgcagaggagcngaaccancangagggggggcagaacggagcggcgagggggaaggaaccgggagcagaagacaggncggggcaggaagaggggcaagaagaca

SEQ ID NO: 1209 - DNA, 180 bp, Zea mays
  Clone ID: LIB3136-038-P1-K1-F6
gcggcgccgacgccgcgcagtgggtcgagctgctgcacctgctggccgcgcggcccgagggcccgccgcacctccgccttaccgccgtgcacgagcaccgggacgtgctgacgcagacggccgtggcgctgaccaaggaggcggagcggctggacgtgccgttccagttcaaccccgtgg

SEQ ID NO: 1210 - DNA, 112 bp, Zea mays
  Clone ID: LIB3136-038-P1-K1-F7
tgtacagcgcagttttatgctccaatgcaatcatgcatgtttggacaacagttgataccttcctcagagaaaacttggaatggtttgggaggtgaaccaactgggctaagtt

SEQ ID NO: 1211 - DNA, 220 bp, Zea mays
  Clone ID: LIB3136-038-P1-K1-F9
ggcgtacaccgcgacgcgctctcctgtccgtgcccaccttcacgactccaccttcgcagcgcccgcggtaaccttcccacgccacgccacattgcgtgcgagccccaaccgtcgccggccttccaattaagccgcccccgcggcgcgatccggtgtccaccgctgctccgccggaggagggggaaggggaagaaaagggagggggggagcacagggggat

SEQ ID NO: 1212 - DNA, 165 bp, Zea mays
  Clone ID: LIB3136-038-P1-K1-G1
ccagaacgaggaggcgtacgctggaactggctgcgggaggatacggcgctcactatggtggtggccccgccgtcggtcacaagcaaggctacaggcagggcatatacgagagcgagagcgagagcgaaagtcagagcgactagagcgactgtgaggaggcgtttc

SEQ ID NO: 1213 - DNA, 112 bp, Zea mays
  Clone ID: LIB3136-038-P1-K1-G11
ggaaggaaaggggggggggggggaggggaagggggaagggaggggggaaaagaggcggggagggaaaagggggaggaggaaggggagaagagaagaggggggggggagagaa

SEQ ID NO: 1214 - DNA, 399 bp, Zea mays
  Clone ID: LIB3136-038-P1-K1-G3
cggacgcgtgggcgctgggccaccagctttgaccgccgcctcccttcccctccgctactgctcctcctcaccccactcccccgcaggagcggcggcggcggcggcgaggtcgtaccccacatcggcgagcggcggcggcaccgccggaggcaaaggcaagatgttcgggcgcgcgccgaagaagagcgacaacaccaagtactacgagatcctcggggtgcccaagtcggcgtcccaggacgatctcaagaaggcctaccgcaaggctgctatcaagaaccaccccgacaagggcggtgaccccgagaagttcaaggagctcgcacaagcctatgaggttttgggtgatccagagaaacgtgagatttatgatcagtatggtgaagatgcccttaaaga

SEQ ID NO: 1215 - DNA, 233 bp, Zea mays
  Clone ID: LIB3136-038-P1-K1-G4
cgaattctgtccaaagataactgaagggtgttgtggcgcatgtgttcctgctagtattaatcttctccccagtccctagatcgatttgcttaagctggtatgtgccaccccctgtgctggtgaccacgcgtgcagttctcccacctcgccatggctcggacgttcttaggagttgctggcccgtatgaagcttgctccgtattcatctcagagctcgcaaaataaatgagctg

SEQ ID NO: 1216 - DNA, 293 bp, Zea mays
  Clone ID: LIB3136-038-P1-K1-G6
caagcggtggggcgagcaaaatctgcgccagttcgcctcgcctacttatacaccccgatcgcccccggtagttactcgacctcgctccctttgcctcctcccagctccggccccggctccggtttcacacagtaagcaaagatggcaccaccatccatgtgtcttgcggcaaagggggtgcttcccttctcggcacttatttcgagtggtgttacacaaaggccagtgtcagtgaccgctttcttggagcacaaaaccagcgatgctagaaggaagtttctaaaacttgcgct

SEQ ID NO: 1217 - DNA, 221 bp, Zea mays
  Clone ID: LIB3136-038-P1-K1-G9
caagggggggcaccacatttggcgatcaattgtgacacacaagaagatggtgacaccaatgaatgtgaagtttcaccggtcagtccaaatgacaagagaccgccaagggttaatcaaaataaaggccttatcagatgacgctggctggatggaggagaagccaagccaccaggtgctgatgaatgatgatatgcctgcgtgcctgcctgcacaacgcgacg

SEQ ID NO: 1218 - DNA, 371 bp, Zea mays
  Clone ID: LIB3136-038-P1-K1-H1
ccaccaccaccacctgctccggtccccaacctctgtcgcaccgcagccgccggccatggcctgcctcaccgacctcgtcaacctcaacctctcggacaacaccgagaagatcatcgcggaatacatatggatcggtggatctggcatggatctcaggagcaaagcaaggaccctctccggcccggtgaccgatcccagcaaggctgcccaagtggaactacgacggctccagcacgggccaggcccccggcgaggacagcgaggtcatcctgtacccgcaggccatcttcaaggacccattcaggaggggcaacaacatccttgtgatgtgcgattgctacaccccagccggcgagccaatccccaccaac

SEQ ID NO: 1219 - DNA, 154 bp, Zea mays
  Clone ID: LIB3136-038-P1-K1-H12
ctcactcactcacagtcgccgccgctgcccattgcccactgctcgccgctatgaggaatttgagagagagaggggaaagggcgaagtgcgcgcatgcaagcatgggctgcccttccttcctccccgccgcggagtctcttgtgcttccttgtcc

SEQ ID NO: 1220 - DNA, 268 bp, Zea mays
  Clone ID: LIB3136-038-P1-K1-H5
ctcaccagcaaattgccaagccgccccttttctccatctctttcgcgacccatttgattgattcctgatggcgcccaaggccgagaagaagcccgcggagaagaagccggcggaggagaaggccgagaagaagccaagggcggagaaacgcgtgccgagtaaggggggctgcgagaagaaaggaaagaagaaggcgaataaaagcgttgagacgtacaagatctacatttttaaggggtctaagcaggtgcacttcgtacttttggct

SEQ ID NO: 1221 - DNA, 104 bp, Zea mays
  Clone ID: LIB3136-038-P1-K1-H6
ctcgcaacttgcagtaggtgacaggtgttaacaggagctggctgagcttctcttgcttctgcaagtagtagctgtagccgccctgtatgcatagagaggagaga

SEQ ID NO: 1222 - DNA, 426 bp, Zea mays
  Clone ID: LIB3136-038-P1-K1-H7
ccttattaggcctccatctcttgaaacttcagtcaaaatccttggaaatcctcgatggtatccttactttgagaattgtattggcgcaattgatggtacacacatacgagctagtgtccccaagtctcgtgaggcagcttttcgaggtagaaagagtttcacaacccaaaatgtgatggccgcggtagactttgaccttcgcttcacatatgtgctagctggttgggagggttcggcacatgatgccgtcgttctagctgatgccttacaaaggcagaatggtctcgttgtacctgaaggaaaatattacctagttgactgcggttatggtgcaaagccagggttcttaccaccttttcgtggtgtccgataccacttaaaaagaggggtgtaatgataacaagccagaaaatgagaaggaattat

SEQ ID NO: 1223 - DNA, 394 bp, Zea mays
  Clone ID: LIB3136-038-P1-K1-H8
actggtgctgggaagcacgtgccccgtgctgtttttgttgaccttgaacccactgtcatcgatgaggtgagaactggcacctaccgccagctcttccaccctgagcagctcatcagtgggaaggaggatgcagccaacaactttgcccgtggtcactacaccattggcaaggagattgttgacctgtgccttgatcgcatcaggaagcttgccgacaactgcactggtctccagggctttctcgtcttcaacgctgttggtggaggaacgggctctggccttggttccctccttctagagcgcctgtctgttgactacggcaggaaatccaagcttgggttaactgtgtacccttccccccaagtttctacttcggtagttgagccatacaaca

SEQ ID NO: 1224 - DNA, 438 bp, Zea mays
  unsure (1)..(438): unsure at all n locations; Clone ID: LIB3136-039-P1-K1-A2
agggctgtttctctgcggcggcgcagcaggctctgatcgtctcggtcctgcgttagctcggcgacgctcgcgcggatgctcgnnnnnnggcattcgtcctcggcggcgggctggggttcggcacctccttcctcaaatggctggccttcctcgccgcagtgtatctcttgatattggatcgcacaaattggaagaccaacatgctgacagctctcttggttccttacattttcttcaccctgcctaatgtgctgttttctctgatcagaggagaggtggggaaatggattgcgattattgctgttattctgcgtctattctttccacgacacttcccagattggttagagcttcctggttccatcatcctgctcacagtggtcgcccctagcctgttcgcggacagcttcaggggaggacctcgtggtgtcttcatat

SEQ ID NO: 1225 - DNA, 445 bp, Zea mays
  Clone ID: LIB3136-039-P1-K1-A3
cactgccgctgctgtcacctcggatctaccaacttctcctccacagacacctaccaactgttttggagcttgctggtatggatcattgcgaaacttgctacaaagtaccaactgtttgcatactcaagattagtgtgcattttgagaaggataaggctttggctcgcagattccagccagtattggtgaatgagcctagccaggaggacgctgtcaagatattacttggtctgcgtgagaaatatgagacttaccataaatgcaaatacactttagaagggatcaatgcagcagtttacttgtcagcaagatacatccctgacaggtatcttcctgataaggctattgatctgatagatgaagcattcatttttatttatatggaatcatttaaattgtagaatgtagtactttgctctttttttcctattacctttcttttttt

SEQ ID NO: 1226 - DNA, 236 bp, Zea mays
  Clone ID: LIB3136-039-P1-K1-A5
gtgcaatgcgccagctcctatatatactatatttgcattataccatcacgcctactgctgtactgaccgaaccgatactcctattgtgcgaaacttcaaccgctctcgggcgattgcggatcgagctctaggtgacatcgatagcaggaggcggcgtcaggggcgctgcggctgcggctgcgagcgctctagcgctggcggctctagtgtgctcgctgtactgttgtcttttgcag

SEQ ID NO: 1227 - DNA, 241 bp, Zea mays
  Clone ID: LIB3136-039-P1-K1-A6
acagagcaagatcgacttggacctcaggctctgatggggggatgtgcccgtgcatggtcagttcatctgctgaataaatctggtctggagatatgatcaggttcagctcactgtcaggtgaaaacccatagagttttggacatattgagtcgcttagaattgttttgatggtactggaattatgcatttctgtagctggaaactgtactttagatctattgacagacatcagttttcttgc

SEQ ID NO: 1228 - DNA, 436 bp, Zea mays
  unsure (1)..(436): unsure at all n locations; Clone ID: LIB3136-039-P1-K1-A8
aacgcttcttctacctttttcttcttcgagcccatccacaatccgggctcgcttcttttgaaccaccagcnnnnnnnnccaccggcatccgcgtcggcttcgcctccgcttcgtcagcgtgcagtgacgcctgcgacgcccacgacgactccgaccaccacgccccgcccaaggccgccgtctcctccgcggcgcagcaggtgccctcgccgccgcagttcctgccacagggctgggccgtcgacgagctcctgcagttctccgactgcgagtccagcgacaagctgcacaaggagtccccgctcgggttcaaggagctggagtggttcaccgacatcgacctcttccacgagcagacgccgaaagccggcaggagattggccgaggtaccggagctttccggaacccaggccgcgaacgacgcggcgtactacag

SEQ ID NO: 1229 - DNA, 435 bp, Zea mays
  Clone ID: LIB3136-039-P1-K1-B1
gtgccctgggagcttgtggttacgtgctagtgtcatcgtttctgataagagaaaatattctcgcgctgataactgttaacattcatgcttcgttgacatacatcctgacggcagctggcgtgaacacaattccttccatgggcacaatatatctactctttgggacactgcttctacttaattgtgggttcttcgtcttcctcctgcatgtgatgtatacggtattcctggcgaagcttgggataaagccgtcgctgaggtcaccaagatggctggacagagtgatgtgaaaaatttaggagtagggcatcgtacgtagtgactgttatgctgttttagccttgctgtttgtcgcccctacctatactgggaactgtaaccatggggtgcatctgtgcatgcaaacgcgacaagcaaaattcgggattatcaatc

SEQ ID NO: 1230 - DNA, 337 bp, Zea mays
  Clone ID: LIB3136-039-P1-K1-B2
gagattagcgatggcgaggtggcggccggcggcgctgctggtagtggctctggcggcggttctatcggcggcgtggcgggcggatgcgctatcggttacggtgaccgacaccgagtgcatccacgagttcgtgccctatgagggcgacaccgtgtccgggaacttcgtcgtcgtcgaccacgacatcttctggagctccgaccacccaggaatcgacctcacggtaacgtcaccaggtggcaacactgtgtacacattgaagggaaaatctggtgagaaatttgagtttaaagctccaagaggtggcatgtataagttctgcttccataacccatat

SEQ ID NO: 1231 - DNA, 349 bp, Zea mays
  unsure (1)..(349): unsure at all n locations; Clone ID: LIB3136-039-P1-K1-B3
cttaggaatattaccttgtcacctatgatgacattggaggagtaacttgtcgacgatttagggagacacagagccaaaactctnnntactctcctgttttttggacaacagatactacatttcttgaaccaccattctctgagcaagagctgggtaattatgccagccgcgatcatatccaaggggttacttccaatcatgcaggcgctgagaacagggttgtctcaaggatattacgcatcaattccagttatgatgtggttgatactcatctctcaactcccttggatgatgggaggagcgtggagggaaggatttggctatatgaggagggaaccttcggtattgg

SEQ ID NO: 1232 - DNA, 205 bp, Zea mays
  Clone ID: LIB3136-039-P1-K1-B4
ggccgcacgggctggatcggggggctgctgggcggactgagcttggttagggcggaccgagcaaggcagtcaagtggctcatctggcagctccacctgttggtcatgctaggtctacccatggtgcaggaggagccgctgctacacacggatcacatcctgtaattgctagttaagggcgacatacaggacgctgtacatgttct

SEQ ID NO: 1233 - DNA, 438 bp, Zea mays
  Clone ID: LIB3136-039-P1-K1-B5
gttctgttgaatctccggacgacaagtttgaagtattctatattgactatggcaaccaagaggtggttacctacagtcgttttcacctgtagacccatctgtttcctcgtctcctgctcttgctcagctatgcagccttgctttcataaaagtgcccagtcttgaggatgactttggtcaggaagcagcagagtatctaagtgaatgtttgctcagtagctcaaagcaataccgggcaatgatcgaagaacatgatacttctggggggaaatcaaaaggacaaggaaccggaaatgttctcattgttactcttgttgatgcggagacagaaagtagcataaacgctaccatgcttgaggaagggcttgcccggctcgaaagaagcaagagatgggacactagggagaggaagacggctctccagaacctggaacagtt

SEQ ID NO: 1234 - DNA, 318 bp, Zea mays
  Clone ID: LIB3136-039-P1-K1-B6
atcggcgaggcctacttcggcgtgcgcccctcggcgaccgagctcggcaagggcgggccgagcaaggcggccaagtggctcatctggcagctccacccgctggtcacgctcggcctccccatggtcctggaggagccgctgctccacacgttccacctcccgcctttcctcgtcaagggcgactacagggcgctgtacaagtacttctccacggtggcgaagcaggcgctggacaccgccgagggcctgggcctgtcgcgcgaggaggcctgccacaacctcctctttgtcaccaccttcaacagctacggcggcctc

SEQ ID NO: 1235 - DNA, 348 bp, Zea mays
  Clone ID: LIB3136-039-P1-K1-B8
ccttccttcacggccgcgcccgctcgcgcagtggtcagcaggaggtccttcaccgtgcgtgcctctctccgcaaggccactgccaccgccgccgtggccgttgccgccagcgtcctgcttgccggcggcggcgccatggcccaggaggtgctgctgggcgcaggcgacggcgggctcgtcttcgagcccagccagttcaccgtcaaggccggcgacaccatcaccttcaagaacaacgccggcttcccgcacaacgtcgtgttcgacgaagacgaggtgccgagcggcgtcgacgcctccaagatctcgcaggaggagtacctcaacgcgccaggcgagacctacttc

SEQ ID NO: 1236 - DNA, 439 bp, Zea mays
  unsure (1)..(439): unsure at all n locations; Clone ID: LIB3136-039-P1-K1-C1
agcagtttcactggacctgcttctagtgaagctcctaagaaaatggaaacatcagatgtggtgctggttactggtgccacctttntttttgggcgacgggtggtggacgtcctgcagaagaagggagtacctgttcgagtattggctagaaatgtagacaaggcaaggagcatgttggggccggatgtacctctgatcataggagatgttacaaaggaagatacacttgatcctaagctattcaaagggataaaaaaagtagtcaatgcagtctctgtcatagtggggccaaaggaaggtgatacaccagacaggcagaagtacaaacaaggcatcaaatttttcgaacctgagatcaagggaccttcacctgaaatggttgagtacctcggaatgcaaaacttgattaatgccataaagagtagtgttggactgagtg

SEQ ID NO: 1237 - DNA, 447 bp, Zea mays
  Clone ID: LIB3136-039-P1-K1-C3
cgtttctcgtcctcctcatcccgccgcatggagatttattttcattagacatcttcgtgaagctgaaatgtctcctaaatcttcccctgccaagaagggtgatgccaagacccaggccttgaaggttgccaaggctgtgaagtctggggcagccaagaagaagaccaagaagatccgcacgtctgtgacatttcaccgccccacaaccctgaagaaggctagggaccccaagtacccacgaatcagcactaccggaaggaacaagcttgatcagtaccaaattctcaagtacccccttaccacagaatcagcgatgaagaagattgaagataacaacactctggtcttcattgttgacctcaaggcagacaagaagaagatcaaggctgccgtcaagaagatgtatgacatccatgcaaagaaggtctactccttgatcaggcctga

SEQ ID NO: 1238 - DNA, 147 bp, Zea mays
  Clone ID: LIB3136-039-P1-K1-C4
acgcagggcgtggagttcggctcccgcacccgcaacgtggtgttcgacatcttcacgggcaaggggcaggacatggtgatcacggaggacggtgaccactggtgcaagaagcagcgcatcatgaccgtccacttcttgaccaacaag

SEQ ID NO: 1239 - DNA, 417 bp, Zea mays
  unsure (1)..(417): unsure at all n locations; Clone ID: LIB3136-039-P1-K1-C5
acaccggggacggtgagtgaacaccagcctttttggcctgctcctcccctgctgcagccatggcgacctccgcggcgctntnnntcggcgccaaccccacccagctctgccggtcccgcgctgcgctgggcaagccagtgaaggggcttggcctggggatgggccgggagcgcgcaagccagcggagcatcacgtgccaggcggcgagcagcatccccgccgaccgcgtccccgacatggagaagcggaagctgatgaacctcctcctcctcggcgccatatcgctgcccaccgtcggcatggtcgtcccctacggcgccttcttcgtccccgccggctccgggaacggcggcggcgggacctacgccaaggacaagctgggcaacgacatcacggtggaggagtggcttaacacgc

SEQ ID NO: 1240 - DNA, 291 bp, Zea mays
  Clone ID: LIB3136-039-P1-K1-C6
tggaggctacgaagcgtaagctacaggagggttaccaagaattcaacaacgcgaagaagcagcggacgatccagatggtggatccacaggacctgccgaagcaagggagccggaacctggcgctgagcggcaagccgaggaacaacagtagcattaggaaccggctggccgttcggcgttgacgctgatcccggtcaccccatgcatgttttttactaggtctggagacccgacctgcttgtatactataacctggatatatggaacagtctagcggtttttttttttggg

SEQ ID NO: 1241 - DNA, 214 bp, Zea mays
  Clone ID: LIB3136-039-P1-K1-C8
gggagctcacaaagctacgcgtgctcaacctcagctacaacaggatttcgcggattgggcatggtaagcacgtgtctccatacttgaggttactgctgcttgtatgcacagtgcacatgcactcataaagatgcgatctgagtttatcatcttcccggccggaacagactgtcggtgtggatcagagacttcgaatcattgtacaggacaggac

SEQ ID NO: 1242 - DNA, 451 bp, Zea mays
  unsure (1)..(451): unsure at all n locations; Clone ID: LIB3136-039-P1-K1-D1
gtccgatcgtaatgatcatcagaaaacacaaggagatgatactcttaaatatgagatattacttcataagagaaaagcacttgcctttnnnaagaagggaagatggcagaagctagagaagaattgaaactggcaaaacaattagaaaagcaccttgaaggtgctcaacaagacaccatggatggtgtgggtgactccattactcctgctgtggaacagaacagtttggtccaacaacctgctagctccagcaatcacactgacgacataacttctccccctcctgcacaagcgagcaagcggactcaacctcagaaagcaatgtccagccgggaccgtctcaaaatccagcgtgaatccctggctcacaagcgcaacgccctcaagttgcggagagaaggaaagactgcagaagcagatgcagaatttgaactggccaaggagctagaga

SEQ ID NO: 1243 - DNA, 335 bp, Zea mays
  Clone ID: LIB3136-039-P1-K1-D2
gcgaaaaacccaaagaaactagctgaagctgtggacaaggtcattggtccggatttccatccaaagcagggtgttaagatagagatagatgagaaggctactagcctatcctctgcatctgttgatgatgctgctgtcattgaagagcttattgcaaagctggaagcaatttctaaaacattgccaccaggattccatatgaaccctatacagtttgagaaggatgatgataccaatttccacatggacttgatcgctggctttgccaacatgcgggctaggaattacagcattcctgaaggtgacaaattgaaggcaaaagtcatagctggaag

SEQ ID NO: 1244 - DNA, 259 bp, Zea mays
  Clone ID: LIB3136-039-P1-K1-D3
cgagccgctcgctgactggttacttattactagttgcctctctggtcctggtgcatcctcgcggaactcatcacaaggctccacctccaccctcctgcgcgcatggtgactgcagcagcagcagcagcctcctctccccgcagcatgctccgcttcgcattgaccgcctcgtcgtccggccgccaccgaacgtgagtacgtggctctcgtccaccgtcaccgccagcggccggatcgccgcgacgtctagagccccccc

SEQ ID NO: 1245 - DNA, 333 bp, Zea mays
  Clone ID: LIB3136-039-P1-K1-D4
ggacggcctgtggcatctgggggacgagctccgcgggcagcccaaggtggtggaggaccgccagtggtcgctcatgacgtccaagctggcagagatcaccaggtccaggggcgagaggacgaacgacctcgactacgccaggatgaacgccgcccccgacgccaagcggtggggcaaggcggcgtcctaccagcaccatgacgagggcaggatggaccaccacgtcggcctcagcctcaagatgaacgatctcaagatgaacgaggccgccgctgccgccgtcatgaagcttcccttccgcggcgtgccctacaacgtcaacccgatgtaccc

SEQ ID NO: 1246 - DNA, 393 bp, Zea mays
  unsure (1)..(393): unsure at all n locations; Clone ID: LIB3136-039-P1-K1-D5
gtggacttccccgtcagtgtgtggtcgaagatttctttttgcagatgtttcgtgcccatatttcttttttcaatttttgtncctttgtagatagaaacaaggggagaaggggaaaaaaagtacttgtatttcttttgttccatggtggtggtggtggtgggcggctcagcctcgtgagtgcagtattgggcaaaccggaggctgcggcaaccttgtgcagttcggccacgaatatactatggaagatcgcgaccaatcaatcaatcgatgaccgagttcaattgttcagcattctttattagttttggtgggtggatacttcaatcggtgagccttacagacagttgttttgagtatgaattgcttttcttctgcaaagttgttgctttgtca

SEQ ID NO: 1247 - DNA, 288 bp, Zea mays
  Clone ID: LIB3136-039-P1-K1-D6
gccgcggtcgaccgccggccccggaccgagatggacgctcggtgggcggtgctgctcgcgctgctggtcgccagcggcggcgtccgtgtctgcgccgccgctggggccaagggcgccaactggctgggcgggctgagccgcgcgtcgttccccaaggggttcgtgttcgggacggcgacgtcggcgtaccaggtcgagggcgccgcgtccaccaacggccggggcccctccatctgggattcattcgcgcacgtcccaggaaatattgcagggaatcaaaatggagac

SEQ ID NO: 1248 - DNA, 300 bp, Zea mays
  Clone ID: LIB3136-039-P1-K1-D8
gccaaaggcaagccgcgaaccggatcacgcccgccggccggtcgcgggcgtcgtcgtcgccgcctcccgcgccgccgccccgctgctcgctcccgcattggatcgcgctgcggttggcgactcggcgtggtctgctgctggtgactgcgcggctgcgcctagccggcccacgcggagacggcatcaacgttctaacaatttgaagtatatcccgaaatgggcgcaagagataacggggaggggagagatgagaagagggggactgcgtcagattacgtacctgctagagactccctttca

SEQ ID NO: 1249 - DNA, 435 bp, Zea mays
  unsure (1)..(435): unsure at all n locations; Clone ID: LIB3136-039-P1-K1-E1
gacgagccgtggttcccagtatttgacgccgacttttcctccaaggctcgggacgtggacttcgacttctggtaggtctanttttatttgtgaaacaaaaggaacgcatgcagtccacagttcaatttcacagcgtgcagatgatgctgcacagcacagacccgtcaaattcgaggtctttttgagccccgcacccccgtaagacgcaatccaaaccgtatatttgcgttttgaccgcgtgcgtttccacttgagttcaatgggtacagttgcaattgcacaactaacggtcgcaaatgtagcatacttcgaccccttctcgttccctgagctcttcttggttccatggtgtttgaaaccctactactcttgtgtgtgttccaacatgtattctttggttagctggcgctcatgaaagttcagaaattggtgaag

SEQ ID NO: 1250 - DNA, 301 bp, Zea mays
  Clone ID: LIB3136-039-P1-K1-E3
gccaaggccgccgcggcgttcgcgcacaagaaggagctggccgcgccggcgcagcgccgcgcgggcttgacccgccggaccaagccgtgcagcgtgcgcgccgtcgctttgcccgggcgcgccctgtcgtccaccgggtcggtgaagagcgcgatgacgatgacggagaagatactggcgcgggcgtcggagcgcgcggcgctggagcccggggagaacgcgtggggcgacgtcgacgggcgcatgacgcaaggacgtttgcggggccggcggctatgaaaacttaaagaaggaggtaggg

SEQ ID NO: 1251 - DNA, 313 bp, Zea mays
  Clone ID: LIB3136-039-P1-K1-E4
ctcctcttcggtgaaggcacactggacgacgtgctcgccaactttgacgcaaatcttggcattccattcagttcagtcttcgacgacatagtgcgagtgagctatgcggcacatgtcatgctcgtctttcccattgtcttctttgccctccggctcaacttggatgggttgctcttccccacatcaaggcacatctctcgtgacaacaagagattcgccatcatcaccgtctctctcctcgcagtaatttatcttgctgccattctcataccaagcatctgggacgcgttccagtttactggtgccacagctg

SEQ ID NO: 1252 - DNA, 284 bp, Zea mays
  Clone ID: LIB3136-039-P1-K1-E6
ctcatccagtcagaagccgaacactgaaattgagcgcaagttactgatgggtggatttgctgaagtgcaatcttctgctgcgaactcgcaagatagcgtgcaatctgttacagttaaggcaaagaaggctagctggagcatgggctcttctcttcccctaaagaaaacaacaaaagcccttcccaagagtcaaattgacgacgactctgatctgattgacgaagacagactcttgactgatgaggacctgaagaaaccacaactttcatttgttggggactggg

SEQ ID NO: 1253 - DNA, 181 bp, Zea mays
  Clone ID: LIB3136-039-P1-K1-E8
tattacagagttcatgaccaaccggtacgagaatagagagtcctctgccccactgggacacatcgttctgagggtgacatgagagcacggttctaaataatcgaccaactgcaagcgtaggctccttccgcaagaaaaggggtggcgatctcatcaagctcatcagtcggggagaccagca

SEQ ID NO: 1254 - DNA, 448 bp, Zea mays
  unsure (1)..(448): unsure at all n locations; Clone ID: LIB3136-039-P1-K1-F1
tgatctaactacccccgcgctggctcgccaccacctccgcatcaggcgtggtaatcttgtcagcgccccgcgtataagatgaannannccgctctccgtccgccatggcgggctcttccgaccccgacaagctcatgagcaaagccgacaaactaacaaaattgagttttacaagatggaatgctgattggaaaagcgctacctctttgtatgagcaagctgcaattgcgtataggttcagaaaggacaatgagaaagcaaaagatgcttttgagaaggcctcaaaaggacaggaaatgatctcctcaccatgggacgctgctaagcatatggaatctgctgctgctntagcaaaggagcttgngcgctggaatgaagtatctgatttctatcacagagcttcagaattatatcgtgaatgtggaaggccacaacctgcatctgatgc

SEQ ID NO: 1255 - DNA, 365 bp, Zea mays
  Clone ID: LIB3136-039-P1-K1-F2
ccggctgccgccgacgggggcgacgacctcgaccagctcctcgacagcgcgctcgacgacttcaccagcctcgacctctccgcctctgccgcccccaaaaggatatggactccattgttgaaacaatgatgcggcagcttttgtccaaggagattcttcatgagcccatgaaggacattgtggagaaatatccaaaatggctggaggataataaaaacaagataagcaaagaagaatatgagcgttataataatcagctagaactcatggtgaagcttattgaggtctatgaaaatgatcctgagaacatgactaagatttttgacatcatgcaaaacatgcaagaatgtggtcaggcccccagg

SEQ ID NO: 1256 - DNA, 258 bp, Zea mays
  Clone ID: LIB3136-039-P1-K1-F3
cggacacgggggagcggtgcgccagcacctgccagcactgcgagcaggtggaggagggcggcccccgccgctaccgctgcctcgacacgcaccgcggcgacccggggccaaggtgcggcgacggcgaggacgatggtggggagtggtcgtcgacgccgaggcgtgcgaggggccaccgcgtctagcgagctatgctatgcgaggcatagacagcggggactggtttgtagcgggcaagatggaggtacgtacgtgtct

SEQ ID NO: 1257 - DNA, 315 bp, Zea mays
  Clone ID: LIB3136-039-P1-K1-F5
cacagggccaagctccaggtatccaggacacacaagggcaaaaattggaaccagaagtgcaatacttaccagcaagacccccagcacaagatgttccggtccatgctccatcccaaccacctcaggctggaaaccaaacacagccacagccttaccctccttaccagcagcagtggcaccagcaatccttccagccagctcctgcaccggtggcccagacacagcagactttcttacagacattttcttcacccgcacaggagccttagttatcaaacgggcagcagtttccaccgcaaccaggacagcaggccc

SEQ ID NO: 1258 - DNA, 393 bp, Zea mays
  unsure (1)..(393): unsure at all n locations; Clone ID: LIB3136-039-P1-K1-F7
tttttcgacaagttgctttagatgcagataaccttctctggttagctgagatcttagctaacaggaatgccnnncacgagttcgcggtcatatgggctagccaacgtgagctggctgggctgcactctaggttgccagtcaagtcgcgccaccttgtcagctgtgtcacggcgaggctgttcgtgggcatcgggaaaggggagatgcttccttcgaaggacacgaggcggcttctcttggacgtctggttgcagcctctcatggatgactacaactggttgcagcacggctgcaggtcgttcgaccggaaagtggtggaggaaggtgttgggcggaccatcctgacgctccctttggaggatcagcagacgatcctgctctcgtggcttggga

SEQ ID NO: 1259 - DNA, 301 bp, Zea mays
  Clone ID: LIB3136-039-P1-K1-F8
ggggagcgaaaaaaaggttgccttttcgaagccgccggacggagcgtaagcgtagcgctagctagctcccccaggccggagaggaggatggtggggcgacgcacaggaagaggaggaggaggaggaggaggagcggcgacggccctcgtgtgggcggtggtggcggtcgcggcggcggtgtcgcgggcgcagcagcagcagcagcagctgcaggtggggttctacgacacgctgtgcccggcggcggagatcatcgtgcaggaagaggtgagcaaggcggcggatcgcaaccccggcggct

SEQ ID NO: 1260 - DNA, 443 bp, Zea mays
  unsure (1)..(443): unsure at all n locations; Clone ID: LIB3136-039-P1-K1-G1
acacaatatattctgttaatacatcacattacaaatgagaattacttcttatctgtgttcttttagcttaaaagnnnnnnnnttgcaacatgttgcgctgcaaaagatatagctgtttctgtttttgtgagttactgatcaatttctgcattgagttggatcttggatgagtcactgatgcacttcgattttccttagctagtctaatttatgtggtaaaagcttagagttgggagctactgctgcctccattatattgatgatggaaccaatcttatattttgtatatctctctccatcatattgatggaagcaaccctatactttgttttcttgttggtgtattctgaattattattataaaacattgctgtttggtgatttgtgccagcctacttaatggatttcagaaacatggcaattctgatacatttagttttttt

SEQ ID NO: 1261 - DNA, 329 bp, Zea mays
  Clone ID: LIB3136-039-P1-K1-G2
caaagaagccacttgccgctattgttggtggatccaaggtctcaagtaagattggcgtcattgagtcgttgctggcgaaggtcgatatcctcatccttggtggtggtatgatctacacattttacaaggcacaaggatattctgttggaaaatctctcgtggaagaggataaacttgagctcgcaacttctcttattgagaaggcgaaagcaaagggggtgtctcttttgcttcccactgatattggagtagcggacaagtttgcagctgatgctgagagcaagattggccctgccactgctattcctgaagactggaaggggccttga

SEQ ID NO: 1262 - DNA, 294 bp, Zea mays
  unsure (1)..(294): unsure at all n locations; Clone ID: LIB3136-039-P1-K1-G6
gtcatattatagggttnccgatggagccctcaccaacctcctcctcgccggctgtggcgcgccggttgtcgccggaggtaaggagggtgccgaagcgggcgctggaggagttgttggagcaggtccagcgggctgttgagatgctgcgcgatgccgacgctgatctcgccatctctctctcggaggagaccgcagcagcctcgccggaggccgaggaccgcaaggacgatgttggtgtcgatggagatggcatggcgacgtcgtcggttgcgagtgactccgattacgagacga

SEQ ID NO: 1263 - DNA, 248 bp, Zea mays
  Clone ID: LIB3136-039-P1-K1-G7
ggcaaggcagtgaacgtgccgtcgtctctcttcggcgaggcccgcgtgacgatgcgcaagacggcggcgaaggcaaagccggcggcgagctccggcagcccgtggtacggccccgaccgcgtgctctacctgggcccgctgtccggcgcgcccccgagctacctgacgggcgagttcccgggcgactacggctgggataccgcggggccgacggcggacccggagacgttcggcaagaaccgggagct

SEQ ID NO: 1264 - DNA, 350 bp, Zea mays
  unsure (1)..(350): unsure at all n locations; Clone ID: LIB3136-039-P1-K1-H1
cacttacattaacaacaattatgttttcaagtaatacaaannaaacttatggaccctaacctaggaaggagtgtctgctacgtccagcttccccagagattcgatggcattgacaggaatgatcgatatgccaacaggaacaccgcgtttttcgatattaacttgagaggtcttgatggcattcaaggaccagcttatgtcggaactggctgtgttttcaaccgaacagctctatatggttatgagcccccgattaagcagaagaagggtggtttcttgtcatcactatgtggtggtaggaagaaggcaagcaaatcaaaagaagaagggctcggacaagaagaagtcac

SEQ ID NO: 1265 - DNA, 419 bp, Zea mays
  unsure (1)..(419): unsure at all n locations; Clone ID: LIB3136-039-P1-K1-H3
ttcaatgactgttctgtacgagctcctttccatctcgatcgaaatggctaatagaatcntnnnnnnttatggaatttcacgaaccccggcgtggtgagccacaacgagatactagagatgtacagagactacatcgatccaggcttctcctggaaaaacttcaacctggaggagcaggcaaaggtcatagtcgcaccgaggagcaacaatgagcttgaccagaccaaactgaagagagagttcccggagcttttgtcgatcaaggagtcgctgataaaatatgttttcgaaccaaactgtaaggcgtccaaagcttgacaagtggaggtgcgcacagctgtatgtttacgctatttgttccaatctgaattgacgttactctctctccgggaactctcaataagcacacccnctgtttc

SEQ ID NO: 1266 - DNA, 330 bp, Zea mays
  Clone ID: LIB3136-039-P1-K1-H5
caagggaaagaagggtggtaagaaaaagaccgtcgatcccttctctaagaaggactggtatgacatcaaggccccatcggtcttcagtgtgcgcaacattgggaagactctcgtgtccaggacacagggtaccaggattgcctctgatggtctgaagcacagagtctttgaggtttgtctagctgatcttcagggtgacgaggagcaggcttacaggaaaatcaggctccgtgctgaagatgtgcaaggcaggaatgtgctcacaaacttctggggcatgaattttaccaccgataagctcagatctctagtaaagaagtggcagacatt

SEQ ID NO: 1267 - DNA, 343 bp, Zea mays
  Clone ID: LIB3136-039-P1-K1-H6
gcccatcatgcagtccttccgcgagattgagacatgcattgagtgctccgctcttcggcagatccaggtgcctgaggtcttctattatgcccagaaggcagtacttcacccaactgctccgctcttcgatcaagagttacaagctctgaagcctcgatgtgtgagagcgttgaagcggatatttattatatgtgataatgacaaggatggtgctctcagtgatgtggagctcaatgaattccaggtccgatgctttaatgctccactccagcctactgaaatttcaggagttaagaagagcgttcaggagaagatgcctgaaggcgtaaatgaaagcgggctt

SEQ ID NO: 1268 - DNA, 382 bp, Zea mays
  Clone ID: LIB3136-040-P1-K1-A10
cggacgcgtgggatttaaaactgtcagctctcataaacagtgtatcagaaataatggtcctggcattttggttttgcaggcgttgttctatttcctggagctaccctgcctctcagagtaattcaggatagattagtagtaactattgacaaagctttgagactggtcgatgctccatgcacaattggggtggttctcatgcgacgactcccaaatcatcgacattatgctactgcttcagttggaacaaccgcagagatacgtcaatttggaaggttggaagatggttcattaaatgttgttgcccgtgggcagcaaagatttcgtttaaggaggcaatggattgatgttgatcgggtggtgtggggtgagggtcaaaatt

SEQ ID NO: 1269 - DNA, 447 bp, Zea mays
  Clone ID: LIB3136-040-P1-K1-A11
cggacgcgtgggtacacaacagctatgctttattttctactaccaaccaaagttctaattggaagtctgaaactaatttgagactaactagaacatgccctcttctcctacatcttttttcacgcaatttcacttgacgtggttgatcgctgctcgcagatgatgaagaagaggcacaagatcgagcgggacctgagtatcggcgaggaagtcggatggtcaaagaaccagcaggtggctaaatccaaccccaccctcgctgcaatgaacaagaagtttgggatgatccacgggctgtcatcactggccaacatcatgtcgtttggcagcttggccatgcactcctggtacctggccagcaagctagagctgtgaagaaggtgagacaagacgacacctttcttcgccttgttgtgaatcttgtcagttgtcacgattgtggtgctt

SEQ ID NO: 1270 - DNA, 271 bp, Zea mays
  Clone ID: LIB3136-040-P1-K1-A12
ggaggtgaagcatgagctggacgacattgatggcctgaccggaggaaaggctgaccaagggggtgacaccttccttccggaacttcaaggccgcccccctgaattcccgcggttggccgacggagttcgccgcgtccaaggtggccaaggccgccctgacctcttactcaggggtcctggcaaggcggaaccccaagttggccttaaactggccccacccggcttccttaagaaccaccttaaccagccaaacgggcttgttacacccccg

SEQ ID NO: 1271 - DNA, 452 bp, Zea mays
  Clone ID: LIB3136-040-P1-K1-A2
gccgaggttgctggtcgacggcccctactgttcccccgcgcaggacttcaggaactacgaggtgctgctcctcgtcggcctgggcatcggcgccacgcccttcatcagcatcctcagagacctcctcaacaacatcaagctggccgacgaactgatggacctggcaatggagaccggccgggccgaggacagcgccagcaacctgagcgcgtcgacggcgagcggcggcggcaacaagaggagggcgtaccgaacgacctgcgcccacttctactgggtcacgagggagcctgggtcgttcgagtggttcaagggggtgatgaacgaggtcgccgagatggacaataagggtgtcattgagctgcacaactacctgacaagcgtgtacgaggagcgagacgcgaggacgactctgctgtccatggtgcaggccctcaaccacgccaagcatg

SEQ ID NO: 1272 - DNA, 413 bp, Zea mays
  unsure (1)..(413): unsure at all n locations; Clone ID: LIB3136-040-P1-K1-A3
gcgtncgggagggataagaaaatggtcgcggcggcggtggaggtgtcgacggcggcgacggctagcagtagcccttcggcggaggagggggagcggcgggacgagagcgagagcgacggggagatggcggggctggcggccgtgctggacttcgacatgctgtgcgcgtccgtggcgctgtcggcggagaggaggaaggccggcgcggcgctggcgggcgcggccggcgactgcggcggtggaggcggaggggtgcagaggatgtgggagggcgacgtcgtgctggattgcctagacgaccggcgaatcgcgctcgagacgtcctgctgcccatgctaccggtttggtaagaacatgcggagagccaatctcggatcttgcttnctttaaggaatggtttactgcattctggt

SEQ ID NO: 1273 - DNA, 400 bp, Zea mays
  Clone ID: LIB3136-040-P1-K1-A4
caacaactgcgagatggccacggtggagacattgggcacggcgatagggtcctccgggaggtgggcactacacggcaagacagccctcgtcaccggcggcacccgcggcatcgggcgtgcggtagtggaggagctggcggcgctgggggcggccgtgcacacatgctcccggaaggcggaggagctcggcgagcgcatcaaggagtgggaggccaggggattcagcgttaccgggtccgtctgcgacctctccgagagggaccagcgggagcggttgctccgcgaggttgccgaccgcttcggcggcaagctcaacatcctcgtaaacaatgtaggaacaaacataaggaaaccaactactgagtttactgcagaggaatactcgcttctgatggctact

SEQ ID NO: 1274 - DNA, 250 bp, Zea mays
  unsure (1)..(250): unsure at all n locations; Clone ID: LIB3136-040-P1-K1-A5
gacgcacgcgtccggncgaggccgccgcccataccgcctcctctttcccgcctccggtgcccaaggccaggccgacagtttttaaaaaggaatggcgccccactctaaccaacccactgtccttcataagctaggtggccagttccaccagatctccatcttcttttaatgtgcaccgacccgtaacatctgctcctactttctcaccttattaaaagagatttgccatcttcaactacattacccaaaa

SEQ ID NO: 1275 - DNA, 325 bp, Zea mays
  Clone ID: LIB3136-040-P1-K1-A8
ctgtgctgatgtttgtcagtggaaaaaccttgtcaccacattgctggtccatgtgctctgtattattcttaagctctatccagaccttatcctgccaacaattttcctctacatgttcttgatagggctgttgaattaccgcttcctgccactcttcccaccacacatgaacacaagaatatcttacgcttatgttgctctcccagatgagcttgatgaggaattttacacattcccaacctcaaagagcccacatctcatccggatgaggtacgataggttacgacactttgctgggaggatacagactgttgttgttgacatt

SEQ ID NO: 1276 - DNA, 376 bp, Zea mays
  Clone ID: LIB3136-040-P1-K1-B1
ccaacacctacttctgcattgggtcttccaatcggacagcatataagctgcagaggacatgatgcttctggcgaggaagtgatcaagccttatactccaactactctggactctgatgttggatcttttgagcttgttataaagatgtatccccaaggaagaatgtctcatcatttccgtgagatgaaagttggtgattatatgtccgtgaagggacctaagggccgtttcaagtacctacctggacaagtgagagcattaggaatggtagctggaggatcaggcattactccaatgttccaagtcacaagggcaattcttgagaacccaaaggacaacacgaaagtacacttaatctatgcaaatgtcacgtatg

SEQ ID NO: 1277 - DNA, 444 bp, Zea mays
  Clone ID: LIB3136-040-P1-K1-B11
cgggccgacggacgcgtgcgccagaccctcgaacccgagaggaaccctattaccaaaacgcccccggaggcagctaggatgtctcgtatcaccagccatgtgggagcaccacctcacggcgctgatggcggcgcagctggaccgccacctggtgttccccctgctggagttcctccaggagcggcagctctactcggagtcggagatcctggaggccaagatccgcctcctcagcggcaccaacatggtcgactacgccatggacatccacaagtccctctacggcaccgacgacgtgcccgaggacatggtgaagcgccgcgccgaggtcgtcttcaggctcaggtcgctcgaggaggccgcagtcccgctcgtcgccttccttcagaacccgcagctcgggcaggagttcaggcccgacataccggaccacatccacatgct

SEQ ID NO: 1278 - DNA, 432 bp, Zea mays
  Clone ID: LIB3136-040-P1-K1-B12
ggcaaaaagtctagcagtagtcgttccatgatgtatgaagctccccttggctacagcatgggggacgttcgacctgccggaggcgtgaagaagttccagtctgctgcttactccaactgcgcgaagaagccatcctgatatcccttttggcttcctcattctagtagtttaggatttcttttctgacactttgattctgaccaatctctctggcctgctgcttcctgataatcgaccagttccccagtcttgctccttgcactcctccctcctccatctccagcattgtgttctgattcacctgctccaatggctgttctttctgctgctgatgcttccccggtctcagctatcgggtttgagggctatgagaagcgccttgagatcacatttctttgggcacctgtctttgtggaccctcatgggtgtggt

SEQ ID NO: 1279 - DNA, 441 bp, Zea mays
  Clone ID: LIB3136-040-P1-K1-B4
atgcatgctacttacatggacttcaacacggtcatgaagtctacacggcgtcagctagaaggggagctgttaattgaagatattcagaggattgaggacatgccatcatacaggcttctggcccggtagctagaagaaactgaaaccttaacacggctacatattgcaaggcggcttgagatgctaatggatcgcaacttgtgtgtccacgtcgggcgacaatgttgaaatgtagatgacatgtatccttgtgtgttaggtacttgtggtctctggtaacctgatctctgaagattacaaggtagggtttttttcctggtgatagaatgccacgtagggtaactgaagtgtctgatcagctcccatggcaaaaaaaaaaatgtaaggtgtgttattacaatctggtcggtggccatcataccacgaaaggaagtattccta

SEQ ID NO: 1280 - DNA, 373 bp, Zea mays
  Clone ID: LIB3136-040-P1-K1-B6
gacagccactactaggaattgccgagcgatcgagcttgcgccgtgcgcgatggagggttgcaagaagtcggcgggcggggcccctgcttactggggcctgggcgcgcggccctgctacgcgtgcggcgccgaggcggcgcgcctctactgccgcgcggacgcggcgttcctgtgcgtcgggtgcgacgcgcgggcgcacggcgccgcatcgcgccacgcgcggttctggctctgcgaggtctgcgagcacgcgccggcggcggtcacgtgccgtgcagacgctgccgcgctttttgcctgctgcgacgccgtcattcactcttggaacccgctcgcgcgccgtcacgagcgctttcaaattgccttccttttt

SEQ ID NO: 1281 - DNA, 402 bp, Zea mays
  unsure (1)..(402): unsure at all n locations; Clone ID: LIB3136-040-P1-K1-B8
cacctccctcactcgtgaagaaccagagatctccacccaccctcctctacctcctacatccgangtccgttctctcctgttcctcgtcctcctccccgctcccctcagcactaatctccgcacagcaacctcgctcctccgtttcggttttcctctgtgtgccatgggcgacgccgtggagcacctcaagagcgggttccagaagttcaagaccgaggtgtatgacaagaagccggagctgttcgagcctctcaaggccggccaggcccccaagtacatggtgttcgcctgctccgactcccgcgtgtgcccgtcggtgaccctgggcctgcagcccggcgaggccttcaccgtgcgccaacatcgccgcatggtcccagcctacgacaagaccaagtacac

SEQ ID NO: 1282 - DNA, 213 bp, Zea mays
  unsure (1)..(213): unsure at all n locations; Clone ID: LIB3136-040-P1-K1-B9
cctgtatcaccccacctcgtctcgtcgcctttcctcccaacccgcattcgcggcgcggncgcnttttttacataattacccgggccccccactaactttttacttaacccccctaccctcacttagctgttactgtttacacgttaaccaacatgtttggcagcttctttcctgggacgtttgctttccacgacaagcgcttctttaataaac

SEQ ID NO: 1283 - DNA, 288 bp, Zea mays
  unsure (1)..(288): unsure at all n locations; Clone ID: LIB3136-040-P1-K1-C1
gcgttcgaaagcattcccanncagtccctacctcctgtccttgtacaacgcacgcacggtccccgttgctaagtttccagactctgtccgccgcctcctatctggccaccctgaagcgcccgttcggcatcgacggcttcggcgatggcagcaacaacggcagcgcgaccggcgagaagcccaaggcgcggtttctttaggcggaccctgctgctgctcttgccgttgtgctgcacgagttcggcgagcacggctgctttaacatgttcatccatgcgttttcgactt

SEQ ID NO: 1284 - DNA, 282 bp, Zea mays
  unsure (1)..(282): unsure at all n locations; Clone ID: LIB3136-040-P1-K1-C10
ccgacgactggggcgcctacgcccngcccgtgatcaccgagctcgccgcgccgctcgantgcctcaaggcgctccacctccgacgcatggtcgtcacagacgacgacctcgccgagctcgtccgtgccagggggcacatgctgcaggagctgaagctcgataagtgcaccggcttcttcactcatggactccgcctcgttgcccgctcctgcagatcactgaggactttatttttggaagaatgtcaaattgatgataagggcagtgcatggatccacgatt

SEQ ID NO: 1285 - DNA, 416 bp, Zea mays
  Clone ID: LIB3136-040-P1-K1-C11
agctcgtcctcggtttggctgcatcacctactgctactacctgtcgtatttccgggcgaaggatgaacgcactcgaacagctcttgggatcaagaagggaacagtgggcgagtgggtgaggtgtcacgacgcagacctgccgtacacgatcgacctcaagagcgccatcaagtaccaccggaacctgacgtccagaggctaccgcgccctggtgtacagcggcgaccatgacctgctggtgccacacctgggcacccaggcatgggtcaggtccctcaacttccccgtcgtcgacgactggagggcgtggcatctcggtggccaagccgccgggttcacgataaattactcaaacaacatgacgttcgcgacgatcaaaggtggcgggcacacggcgccggagtacgaagccgaga

SEQ ID NO: 1286 - DNA, 389 bp, Zea mays
  unsure (1)..(389): unsure at all n locations; Clone ID: LIB3136-040-P1-K1-C2
cggctgaaaaccggccgacccacgcgtcgacaagccccctcaccgtgcctgttttcccgatccccgagcaaagctgcgactgtcaaccttcgcatggcgttcgagaagatcaaggtctccaacccaatcgtnagatgacggtgatgagatgaccagctattctgcagtctatcaaggacaagcttatctcccattttggacctggacataagtctatatttggggatactgcaccggagcactgatgaaaggtacagtgaggctgcaaggctctctaagtacaacggctattagtgtgcacatactcagataaactcggttaggagtcaatctgaacacatgtggagagcccaatggccaataggacatttaatggcactggttcagag

SEQ ID NO: 1287 - DNA, 193 bp, Zea mays
  Clone ID: LIB3136-040-P1-K1-C3
cgcgtcgagcagcagtcgcgaggaggcagatgaccaaaccgacctgcggggctgggcacgtaacggaccagacccgaaaattttaaattctttcttgccggccggcccgtgccggtgaacccttcgtttttgccggccgggcccaacttcggccttttcttcttcaaggggattggatacgccacaagctgcg

SEQ ID NO: 1288 - DNA, 342 bp, Zea mays
  Clone ID: LIB3136-040-P1-K1-C4
agcatctgatgacctgttccaatctcttgctcatcttgatggataacccaatcaacaccatgctggtcatctacctacactagcttccaccaaagaatcaccacaccacgaataccattcatccgaatctcaaacactaaatcatgaacatacccagattgcagaacactccctcacccacttgaacctcaaatcacaaccttcaacaattatttaactgtcaccttcttaccaaccagaaattccacaaagatctactcagaactcatttcaaaatatatcttgccttcctttcgcacttccctttcttaatcatataacatttccatttttttttaattt

SEQ ID NO: 1289 - DNA, 406 bp, Zea mays
  unsure (1)..(406): unsure at all n locations; Clone ID: LIB3136-040-P1-K1-C6
gaaaacccggccgaccgcacgcgtccgagaagtgcntgcccgtcaccaagctcgggtgtctcgtgaaggagaaccgcatcaacaaaagttaggttatctacctgcactcgctgcccgtcaaggagcaccacatcgtggagaccctcgtcccggggctcaaggacgaggtgatgaacatcacgcccgtccagaagcagacccgcgccgggcagcgcacgcgtttcaaggccttcgtcgtcgtcggcgacggggacggccacgtcggtctcggcgtcaagtgcgccaaggaggtcgccaccgccatccgtggcgccatcattctggccaagctctcggtcgtgcccgtcaggaggggctactgtggaaacaagatcggtcagccgcacactgtgccctgcaaggtcac

SEQ ID NO: 1290 - DNA, 408 bp, Zea mays
  Clone ID: LIB3136-037-P1-K1-C2
cttgttcctacaataacttgcacctcttctaatgttgttccaactatactacaggcagtttgccaaataccaaatgttaatgtctggtatggtcctgattcatatatgggtgcaaacatagcagatttatttcagagaatggctacaatgtcagatgaagaaattgcaaaaattcatccagaccacaacagaaaatctttgagttcattactgccacgtctacactattatcagagtggtaactgtatggtacatgacatgtttggccatgaggttgtggagaaaataaaggaacaatattgtgatgcatttctaacagcacactttgaggtccctggagaaatgttctctttggcaatggaagcaaaacaaagaggaatgggagttgttggatccactcagaatatc

SEQ ID NO: 1291 - DNA, 176 bp, Zea mays
  Clone ID: LIB3136-034-Q1-K1-D4
gccgtttatttttgcaaatgatgccctgcttaaagaaccatttagcgatgtgattgcttgagaggatttcatgaagtacttggctgctgagttcttcaatgatacaaaactacgtgagatggatgatggtgcaaaggaattcaatgtacccgcattcagagaacatcgcatattga

SEQ ID NO: 1292 - DNA, 231 bp, Zea mays
  Clone ID: LIB3136-034-Q1-K1-D6
gttggattgtgtataaagttgcacttatattcagctgtggtgtgcacacaagctctgtgagtggtgagtaggaagggaggaagaaagcggatccatggcgtataagcggatactgagggagctcaaggacctgcacaaggatcctgccacctgttgcataccatgccctgatgacgaagatctgtgtctactggcacgcgacgattatggagacatcagatagcccatacg

SEQ ID NO: 1293 - DNA, 310 bp, Zea mays
  unsure (1)..(310): unsure at all n locations; Clone ID: LIB3136-034-Q1-K1-D7
cggacgcgtgggcggacgcgtgggcggacgcgtgggcccgtcacgaagcggatccacgggtgcgcgcggctcttcatcgccgaggccttcgccaagggcctcggcgacaagctgcaggtcttctccaccgacttcatcgacggcgacttcgtcgacgcctgcgccggagtcaccaaggcgcgcgtcgatggcaccgcgtgacgtgacggcttcgatcgacgagcccgtacgtacgtacgtgtgccagtgttgcggccgtactgccatngcagtgtatgtactgtgtagtgtacactccagtcgtgcagta

SEQ ID NO: 1294 - DNA, 277 bp, Zea mays
  Clone ID: LIB3136-034-Q1-K1-D8
ctcctactatttagaggcgagcattgagattgattgcttgtatgaggacatcgacttctacgtcagccatcacccgtgccaggtttgaggagctcaacatggatctcttcagaaagtgtatggcgattgtggaggactgcctcagtgatgcgcgttatgtacgttcagttcatgatgtcgtccttgtcggtggttcctctagaattccaaagatccagcagcttcttcaggagctctgtgacgggaaggagctttgcaacagcatcaaaccccaatg

SEQ ID NO: 1295 - DNA, 325 bp, Zea mays
  Clone ID: LIB3136-034-Q1-K1-D9
ggcagcacggccacggcgccacgggccatgtcgaccagtacggcaacccagtcggcggcggggagcacggcaccggcggcatgaggcacggcacgggaaccggcggcatgggccagctgggtgagcacggcggcgctggcatgggtggcgggcagttccagcctgcgagggaggagcacaagaccggcggcatcctgcatcgctccggcagctccagctccagctcgtcggaggacgacggcatgggcggaaggaggaagaagggaatcaaggagaagatcaaggagaagctgcccggaggccacaaggccgaccagcacgccac

SEQ ID NO: 1296 - DNA, 321 bp, Zea mays
  Clone ID: LIB3136-034-Q1-K1-E1
gggaggacaagaagtgccccggcgagtcgcgctttcctgcgcaggtgcgggtggcaacggggaagatctacgacccgctggaggaggacgccttccgccccatcctgcaccactacgacgggcccaagttccggctcgagctctccgtcaccgaggccctcgccctcctcgacatcttcgccgacaaggacgacgcctgatccccatcggatctgtcgtcgggccactcgaagctcggatgcacgaatgaatgaacaaacaataataacgaatggatgggcatgtatatcgtcatgcgcatgtcccacgacgagacgggag

SEQ ID NO: 1297 - DNA, 368 bp, Zea mays
  Clone ID: LIB3136-034-Q1-K1-E10
ctcccccacgagtccactctccgaccgcacgctccgcgacgcgatggccgcgctccgcctggcctccttcaccctccgccccgccgccgccgccgcctcttccggcgcgaccccatcggctccccggtccgcctccttctccagcgcggcgcgggggctcccctccctccgcctggccccgccccgccgccgccgcggggacctcgccaggccccgcgccgcggccgaggccgcggcggagagctacgcgtccgcgctgtcggaggtggccgtcgagaacggcaccctcgagcagacggtctccgacctcgagaagctggagaagatcttcgccgacgaggccgtcgccgagttcttcgacaacccca

SEQ ID NO: 1298 - DNA, 440 bp, Zea mays
  Clone ID: LIB3136-034-Q1-K1-E11
acgcgtgcgcatgaatacaatgatattgacagtgctcactacgcggcacatggtgacaaggaagacgggggccatattggcctaattctcctggaggtgatcacaggcataccaacagattcccaaagccaactggagtccctgagagctcagctaagtgaggcgctgactgaagacccatgacaggctgaacgacatggcatacccggcgatacacggtacttttgcagtggactcactgagcacagtcgccgagatagccctcaagtgcacggctggcgacccaagcgaccgaccttgcatcgacgacgtgctctggaacctgcagtactccatgcaggtgcaggatgggtgggcgagcatctagagcttaggcttgagcgtcaaatctcacgtttagataaaggcacagtgattcggttcctatgcaaatgatgatt

SEQ ID NO: 1299 - DNA, 288 bp, Zea mays
  unsure (1)..(288): unsure at all n locations; Clone ID: LIB3136-034-Q1-K1-E12
gacccacgcgttctctttattacaattatattttcanacctcttattccnccacaacattacatctatcacaagaaccattttcaccttattctccctcatctcatcccactctaaccaacataccacctaatccatactgatttccttctacctcatctaattcagtcccctactatacacccacacattcccaatcatatttactaccctacaattcactatacttctccccttaactcactcatcacattactcttaatacccctcactttcacatctttccacc

SEQ ID NO: 1300 - DNA, 368 bp, Zea mays
  Clone ID: LIB3136-034-Q1-K1-E2
cgcgttcgtgcccgcgccatgaagtgctggtgcgtgcacgcgccaaggggagcaatggggacgccgctctccagccccttggctcccaccgccctccgctcccctctccggcaccgcgccctgctgctgctgctgccgttccctccccgtgcggcctcctccggcgaggacaccgccgcagcagccgaccaggagccggccccggcggccaccaagacggccaccgcggacgacgacttcgaggagcgcgtgctacggatcaagtcccgcgtcgggcccaagaagcgcggcgcgcgcaagaagaaggccgcggcgtccgcgtcagccagcgccgtgacgctcccgcccgtgccgctgcgggagccccg

SEQ ID NO: 1301 - DNA, 374 bp, Zea mays
  Clone ID: LIB3136-034-Q1-K1-E3
aaagattctcaagaaaagtttcctgcaggggaacaagcggtaaagaagaagaaaaagagggggccacgtgttcctggaaatgctgaagagcaatggaaaaattttcaagattttggagctgaaaatttttcggggatgcccttgggtccaactggagcattcaacccttactggggcggagtgccattgccaatggattacatgagtgcaccgtttcctggtcccatgccttacatgggttatccaccaggtccatttgacccttttggtgggggtgttctcccacaagatccatttatgcccccaggatacatgatgccaggagttcctagggatctttctgaattggcagttaacgctatgggaataaacat

SEQ ID NO: 1302 - DNA, 389 bp, Zea mays
  unsure (1)..(389): unsure at all n locations; Clone ID: LIB3136-034-Q1-K1-E4
ggaaaacccgggcggaggcaggcgtccgcacgtttcaaatgtacagacaaggactgtttatcgacattaagtttggtgtggataatcaagttgattactatgctgtttctgttgtgaaacatgctcaagttgtccacgaactcaaggattatctaaaaagttgcaatgctgacatacatgttatcgtaaaaatagaaagtgcagactccatccccaacttacattcaatcatcacagcatctgatggggctatggttgccaggggtgaccttggagctgagctgcccattgaggaggtgccgctgntgcangaagaaattatagaatgtgcngagcatggggaggctgnttatgtgtacaatatctcgaagatgatgtcatcactcacc

SEQ ID NO: 1303 - DNA, 380 bp, Zea mays
  Clone ID: LIB3136-034-Q1-K1-E5
gccaggtgaagccgccgggaacgtgcccgtcggcgccgcggaagccgcgggcgcccgcggcgtgccggaagcgcctgttcgaggtcgaggtgctcagcctgcggctggaggagctggagcagctcttctggcgcccgcgccccgcgccgtcgccgcccgcccagaagaagaagcgccggagggtggcctgcccggggcccaagaagagcagctagatagctaggactagtagcttcgtgtactgtacgtgccagtagtggagatcgagtagcagcggtagctaggtgcagggccaagtggtcttggctggatgagatgagaggacgtgcatcacgtcatgcatggtataaggggtggtaggagtactgcgttttttactg

SEQ ID NO: 1304 - DNA, 333 bp, Zea mays
  unsure (1)..(333): unsure at all n locations; Clone ID: LIB3136-034-Q1-K1-E6
cggagtgcgagtccgggaggtcctcgccgtcccacgccgcgtcgccggagttcgagttgtggatggtgggcaggaacccgtccccggcgctgctcaccgccgacgagctcttctccggtggcgtcgtgctcccgctccacaccctccaggcgccaggcgctccggacggcgacggcgcgcctcagctccaagccgacgcggacgcggacgccgcggcgctcccgctgcctgacgcgcangcgcaggtggaaggggaggccgcgcagccgctcgcggagtccgccatcgcgccgacgccggacctccccgcggtcacgttcaagtggaaggaca

SEQ ID NO: 1305 - DNA, 403 bp, Zea mays
  Clone ID: LIB3136-034-Q1-K1-E7
ccgtcacacccactcgctgctgaaccaggagttccatccatcgccgctcactcccacgaggagcgtcgtcgcttatccgcaaatatctctcttcctctttgcagtcggcaccatgggttccgacttcaaatcgatccccttgatcgatatcggcccgcttgtcgaaaagattgatgatccaagcatggccaacgataaggatttactgcaggttgtccggttactggatgatgcttgcaaggaggccggattcttctatgtgaaaggccatggtattgatgagtcactgatgagggaagtcaggaatgtaacccgtgaattctttcagcttccttatgaggaaaaattaaaaattaaaatgacacctcaaagtggatatagagggtatcaaaggataggggaa

SEQ ID NO: 1306 - DNA, 323 bp, Zea mays
  unsure (1)..(323): unsure at all n locations; Clone ID: LIB3136-034-Q1-K1-E8
cgccatcccggcgctgcccacggtcgccactcgcccaggacctcatcgccaaggccaactgcatcatggccgcacgcccgccgttccaccacgtcactgtcccccgccgccccgcccctcgtcgtcgacgtcctcggtttcggttcattaggtagatcgagtcttagcgtccgtctctgcgcctctacgctgagacggtttgtttgggttaattaagttagctttcgtggagatttcgccccggggcatcaataaaatgttggcatgcgtggtgggatgcccannanaaaaaaaataaaaataaaaaatttaaaaaannnngg

SEQ ID NO: 1307 - DNA, 336 bp, Zea mays
  Clone ID: LIB3136-034-Q1-K1-E9
ctatagatgagagcagtgctttggccttggcaattcttccgacaggtattgataactgaagagcaactacacagcaagatagtggatttgatccaacaggatgggaacttgctcttgttactacaagcagcaatgcgattccactgtctatggagagtaatttgggtggtggatttgacaagctcacattggacagcctatacgatgatggaacctacaggcagatgcagcaacaacagctatacggatcagcccctcccaatccattcatggcaagcgatcccttagccgtatcaaatcaagtgggctccccaccgtcagttcaaatggcgggca

SEQ ID NO: 1308 - DNA, 436 bp, Zea mays
  Clone ID: LIB3136-034-Q1-K1-F1
acggaggccattgtcgctgccgcccttccgcctcatcctttccacgcccactactctgggcccctcccacgacctcaactctgccatggcacctcttcgcgaagtattcctcctccacgacgcccttgccctccagtggtcgacgcctccacctcgagcacacctgcctcatgcccgcggcctaatctgctcaactgagggagagcgaggtggtggtagcacatcgacaattcggtcgggagtcgacactcgggctcggggtatcgtctcgcttgcccgcagcccctttgtttctttccatccggcttctcggcggcggagaggagggggatggtgcaccgactgttgtgggacgtgcaggcgaacgggtgggagcgatcaaatttcaccatcgtctgcgagtcatgcctcggcgacaaaccctacgtccagatga

SEQ ID NO: 1309 - DNA, 326 bp, Zea mays
  Clone ID: LIB3136-034-Q1-K1-F10
cgagccctccgccgccggcgccatggtctcttcctccttccctgacgccgacgcctacgggaacggtgactccgacggcctcgacttccccgtcgaccccaaccccaaccccgtcttctcctccccggccgctgccgcggcccccgggtccgctggcgcggccggggagcggcgccagctgttccagcgcctgtggacggacgaggacgagatcgtgatcctgcgcgccttcgcggagttcacggcgcagcgtggcacctccttcgcgtcgcaccagtacgacaccacccccttctacgaggacatgcgccgtcgcctcaacaccg

SEQ ID NO: 1310 - DNA, 240 bp, Zea mays
  Clone ID: LIB3136-034-Q1-K1-F11
gacccacgcgtcctacctacctcccttctcccttatccatctatttttaatactctccactcatccccttcccggagcactcttactaagtgcttcatctctcccacctacaagctaacacattccaaatccacctcatctacattctcccttcccatcttgtacctcttcctctgccttacaaggttctcactctatcctctatcctcattacatctcttctccaatctaaccactctt

SEQ ID NO: 1311 - DNA, 417 bp, Zea mays
  unsure (1)..(417): unsure at all n locations; Clone ID: LIB3136-034-Q1-K1-F2
tccgcgtccagtgtgtccgctccccctcagtcctagcggtagcgtgcgcgcgggagacggggatggcggcttcggcggcggcggcggcggcggcggcgacaccggtggcgccgacagaggggacggtgatcgcgatccacagcctggaggagtggagcatccagatcgaggaggccaacagcgccaagaagctggtggtgattgacttcactgcaacatggtgtcctccgtgccgcgccatggctccaatttttgctgatatggccaagaagtccccaaatgttgttttcctgaaagttgatgtcgatgaaatgaagaccattgctgagcaattcagcgtagaggccatgccaacattcctgttcatgagggagggcgacgtcaaggacagggtcgttggcgcagcanaggaagagc

SEQ ID NO: 1312 - DNA, 386 bp, Zea mays
  Clone ID: LIB3136-034-Q1-K1-F3
caaatgcagctgcagcaagcagttcaggagctggtgctccgtcagctgtaactgcaatgagtggggataccagaagtttggttgatgtaaaacctagaatagctgatgagtcactggacaagtcaaaggcgtggaagcttatggagataactgagtcaactcagtgcagatcaattaaactggcagacaacatgagaacgagcaagatctcgagattgatttacacaaattctggtcttgctatcttggctttaacttcaagtgctgttcatctactctggaaatggccacgcagtgatcggaattctggaaaggcaagcgcgagtgtgtctcccacactatggcaaccaccaagtggcattttgatgactaatgacacgactgac

SEQ ID NO: 1313 - DNA, 425 bp, Zea mays
  unsure (1)..(425): unsure at all n locations; Clone ID: LIB3136-034-Q1-K1-F4
cgctcaccctctcaccaaatccttctcctccgcgccgccacagccgggcgcgcctccccggtcgagatccaggagatatgcctcgttatgatgatcgccatgggaatacacgcttgtatgttggaagattggcccctcgcacccgttcccgcgacctagaatatcttttcagcaaatatggaagaatacgtgaagtggagttgaagcgtgactatgcattcattgaattcagtgacccccgtgatgctgatgatgcgcagtacaacctagatggcagggaagtcgatggaagccgtattattgttgaatttgctaaaggagttcctcgtggttctggtggttcacgtgagtacatgggaagaggacctncaccaggaacagggtcgtgtttaactgtggaatggatggtcactgggcaagggact

SEQ ID NO: 1314 - DNA, 368 bp, Zea mays
  Clone ID: LIB3136-034-Q1-K1-F6
gccatttatttctgcaaaagatgccctgtttaaagaaccaattagcgatgtgattgcttgaaaggattccatgaagtactttgatgctgagttcttcaatgattcaaaactacgtgagatggaagatggtgcaaaggaattcaatgtacccgcattcagagaaaatcggaaattggttgcgatggagaatggtgggttgcacaacccttctgttttactcttcaaatcatcatggagtagtggcagtatgacaagtgagactagaagtttcgagtaccctcatgcgtcttctgtacatcgtccaactaatgatgaagatattgcatttatgtcggtaatcgagcttggagagcttattaggacaaagc

SEQ ID NO: 1315 - DNA, 408 bp, Zea mays
  Clone ID: LIB3136-034-Q1-K1-F7
tcgaattgctccactgctactaatctctatactactactgcttgctcctgtttcaatcgggcaatcatgccgcgcgtaggttttttccggcgcaaagggttagggtttgctgtcggcgatgtcggatcggcagccgtcggaggagccggaggagcaggtggacctggagggggacgacgacggcatggacgacgacgacgccgggtaccgtcgccgcggaagccgggacgactcggaggagcccgaggaggatgacgacaatgacgagcgccacggcgacgccgaccaccacccccggattgaacccgagcccgcccgaagtaaaagcggggatgacacgggcaaagggcccgacgtcgcccgtggcgggccccaagacgaagaagaaaagaacaagtgggatgacat

SEQ ID NO: 1316 - DNA, 246 bp, Zea mays
  Clone ID: LIB3136-034-Q1-K1-F8
gctggaggtgggcctggacatgggctccgacgggcacgacatgatgggcttctgcccgggcatgcccaccgactgggagcgctcgctcatggagagggtcaggcatgagctcaagatggagctcaagcagggttacaagtccagaatagaggatgtgcggcaggagatgctgaggaaaaggagggccgggaagctgcctgaggacaccaccagcatcctcaagcaatggtggcaggagcactccaa

SEQ ID NO: 1317 - DNA, 340 bp, Zea mays
  Clone ID: LIB3136-034-Q1-K1-F9
gcagagcgagcgagctgtccggccaaaccctcacggccgcctccacaatgccgcgccatcgcgcgctgctcctgcccctgctcctgctggcctcgccggcggccacgcgcctggcgtccgccgcctgcgcgggcgagaagttcccggcggggcgtgcgtacgcgtcgtgcgaggacctgccgaagctgggcgcgtcgctgcactggacgtacgacgcgtccaagagctccctgtcggtggcgttcgtggcggcgcccgcggcggccggcgggtgggtggcgtggggcctgaacccgacgggcgagggcatggccggcgcgcatgcgctggtggcgctggc

SEQ ID NO: 1318 - DNA, 370 bp, Zea mays
  Clone ID: LIB3136-034-Q1-K1-G1
gtgctcgccccgcgacccgcgaaagatctgtgctggttcgctcgctcgctcgctcgcgcggcgccgccgcgtgggggtgccgatgagctgcgcggggcaggccggcgggtggctgctcgactacgcgctggtggaggaggagatccagggctccgagttcatctacatggtcgacgacccggccgtctccagcgtgatactggggtttgatgctcccaggaaggaggacggcgtccaggacaaccccggcgccaagaagagatcccggccggagtccagcgcgccacccggcaccaaagcttgccgtgagaagctccggcgagacaagctcaacgaaaggttcaacgagctctgtgccatcttggaaccc

SEQ ID NO: 1319 - DNA, 377 bp, Zea mays
  Clone ID: LIB3136-034-Q1-K1-G11
atcttgttgggcaaacatttttgctttgctggaaaattggggagggaggttggtgggggggccctgcagtttcaaggcaacaacctcatcagtcatcaacggtcgactccatttgtgttctgattgatccttagggggatatctgttattcaattgtgcgcaaattttggggctgaactgttaatgtttggctgctatttctttgttaaatcttggaagcgcaggctaccaattccatcacacaactaagatcatggcatgtagctttcaagttctgctttctcatcagcatggtgttctgtagttgtgttgccattcttggtgcatcttgggaggaatgatccgtgaccttgaagcatggatacttgtctttttgt

SEQ ID NO: 1320 - DNA, 317 bp, Zea mays
  Clone ID: LIB3136-034-Q1-K1-G12
caactcttttctattgactttacactatgtgtttcatgataacttacttatcatgtgtcgtacatacatatactgagttttatattaacttatatatatcatgtttctgtatattttaaggtcctgcaatctaatttgacatcgcacatcgcgcgctggacgcgcgacatacactagtaatacaatccatattcctttgttttcaattttatgaccttatcactaggtgcataatattcatacaagccaccttgcagttttttgcgtggttaataatgcaccttttaactcaattaattttgggccgacagaaaatt

SEQ ID NO: 1321 - DNA, 343 bp, Zea mays
  unsure (1)..(343): unsure at all n locations; Clone ID: LIB3136-034-Q1-K1-G2
catccatccccgccccgcccgcagaaccaaaccagcctccctagtccctccctccccagcggctcacgactcacgagagagcgcaagtattactgcgcaccgcctcgcccgcgggcgtcagcgtgaagctgccgcacagctaccccgcgaggcatggggatggacgccggcggcgggaagctgccgtacagctaccccgcccaccaggacggcaagctggtgaagagcttcagccgcgtggagccccgcaagttcggcctcggcctcgtcgcgggcttcctgctcgtcacctgcgcctacttctncaccgncaagttcgacgccatccacgtcggcatgatca

SEQ ID NO: 1322 - DNA, 318 bp, Zea mays
  Clone ID: LIB3136-034-Q1-K1-G4
aaaacccgggccgccgacgcgtgcgctacatttcttctctctctgctcctccgtcttcgcctgatccatccaagacagggatcgcgaggtcggactcggaggagcaccacttcgaatcgaaggccgacgctggggcgtccaagacctacccgcagcaggctggcaccgtccgtaagaacggcttcatcgtcatcaagaaccgtccctgcaaggttgtggaggtttctacctccaagactggtaagcatggccacgccaaatgccactctgtcgccatagacatattcaaggggaaaaagcttgaagattttgttcctt

SEQ ID NO: 1323 - DNA, 318 bp, Zea mays
  unsure (1)..(318): unsure at all n locations; Clone ID: LIB3136-034-Q1-K1-G5
cgcgggggaaaaaaaaggaggctcactgtacaccgagctcacgcagggcgtagcaaatcaggtaggcgaaatcggagcagaggccagggacgcgccagcgcgagcgataaggcacactgacatggccgccacggcgtactccaccgcgctccccggcggggcgcgcctccccgctgccggagccgccgcaccgccctctgccctcctcctcccgcggcgtaataaactgtctccgctccctctccggctccaagatgcgccgaggctgtcgttgctccgggtgaaggcctnctccgacgactcctgggccgcaagcgg

SEQ ID NO: 1324 - DNA, 342 bp, Zea mays
  unsure (1)..(342): unsure at all n locations; Clone ID: LIB3136-034-Q1-K1-G6
tctgatctgaagattgtggccgaaaattttgaagaaaacctagagattacaggcacatggttggaggctcgtaagctggtcgttgaaatctgtgacattgtggcgacaagagcagcccggctggctgctgcggggcttgcagggatcctcatgaagatcgggagagatcacagcgtcgaggaccaacggtcagtcatcgccatcgacggaggactgttcgagcactacaccaaattccgccggtgcttggagaccacanctggtgagctgctangagacgaggcgtncaangcggtggccatcaagcatgccgatgacngctcangaataggtgctgccctg

SEQ ID NO: 1325 - DNA, 335 bp, Zea mays
  Clone ID: LIB3136-034-Q1-K1-G7
cagagctgctcgctgagagtgtgctgtgctttgcccatcgaccgaccgatcgatctcgggggggcggactgggggccagtgctgatcgggctggtgctcttcatcctgctctccccgggcctgctcttccagatccccggcaagggccggatcatcgagttcggcaacttccagaccagcggcctctccatcctcgtccacgccgtcatctacttcgccctcctcgccatcttcctcctcgccgtcggcgtccacatttacctcggctagctagtcgccggcgggcggccggctgagcgaggctagctgctggcgcgcggcggcccggcccggct

SEQ ID NO: 1326 - DNA, 415 bp, Zea mays
  Clone ID: LIB3136-034-Q1-K1-G9
cttcctcccttctcacttttccttccatttattaatatactccactcaaccccgtcccgcgagattcttttttatttcttcatcttcccctcctacattctccctcattccaaatccaccttatctactttctccctgcccatctttcacctctccctcttccgttacttttttcttctctccatcctctaatccttcaattacatcttcttcttccacgtacttaaccactacttctccctttattctattcattacatttattacttattccattatttctttcttcttccttcgtattacatgtctcttccttactcttattacacttttatatcaaccctaatctacttcttctccattttcaacacgtacgccttatatttctatccctacttccttccccttccttttt

SEQ ID NO: 1327 - DNA, 354 bp, Zea mays
  Clone ID: LIB3136-034-Q1-K1-H10
gggtgatgtatgaatacaaaatggaagatttatatttggtttctactggtttctcagggggtacttatgtactctgcaaaattttcaagaaaagtggccttggtccaaggattggggagcaatatggggctccgtttgacgaagccgaatgggacaatgcagaagctgaaacctctatatttcctttgatgacctcttcagaagtagtgaacccaacagagggaccacacactcagcctattgcccctgctggtgctcttcaggaacctctacataattcatctgctacttgtgctgtagagggatcgtcatttgataatgccactgcaaatacttgtgctgagggtgtaacat

SEQ ID NO: 1328 - DNA, 379 bp, Zea mays
  Clone ID: LIB3136-034-Q1-K1-H11
gctcattcatcaatgcagggtcctctgccattacttttgcaattctctctggcgttcagaggttggttttgtgcttgttgcgaaggctacgtggcaaggatgacattgtcaatgctggtatagctggttgttgtactggcctcgctttgggctttccaggggcgccacaggcattgctccaaagctgtgccaccttcgcagcattctcatgcatcatggaggggctcaataagcagcaggctgcaatggctcgcacgcttggagggactgccgcgatggccgtgcatgagaaatgtggtgttctgcccccgttcacgctttcacctattcttgatgcatctgatgctttacttcatgctgcttagcgttagtaaagcct

SEQ ID NO: 1329 - DNA, 441 bp, Zea mays
  Clone ID: LIB3136-034-Q1-K1-H12
gaattgaatctcggggtcgaccgcacgcgttcgatcatacctggagtcgtcttttcttgcggtgtcgatagctcttcctccttccgcttctggtggacagaaaactagggttttgctcttggaatctctctccccgctgccgccgccgccggacagtgcaccgacgatacgacctcctccttcctccgatctggcctttttaatccgcggatcccgtacaagatgcttcccctctcgctcctcaagaccgcccaggggcacccaatgctcgtggagctgaagaatggtgagacgtacaacgggcatctggtcaattgcgacacgtggatgaacatccaccttagggaggttatttgcacctcaaaggatggtgacaagttttggaggatgccagagtgttacattcgtggggacaccattaagatcttcgagttcctgatg

SEQ ID NO: 1330 - DNA, 271 bp, Zea mays
  Clone ID: LIB3136-034-Q1-K1-H2
tcctgagaccaatgggttcaagtttcttggtccagtgcagatcgcctgtggagctgcccggactgttcttgttgctggtgatgggtataggatgtgggcatggggcagaggccgcagtggtgtgcttgggagaggccagactgctgacagttacataccatgcgttgtgatgtggcctcctcttgatgagaactttcatgaggaccaaatgggaggatcaatatcaagagtgaatgatcgcactagcactgagttggaacagaagctatct

SEQ ID NO: 1331 - DNA, 364 bp, Zea mays
  Clone ID: LIB3136-034-Q1-K1-H3
gtcgaagagcatagcatctgacagaaaggttgcagaatttgcattgtcagcgctgatgtgaatccctacacagtacaaagcggcaattgatctccaactcttaggccgtcgccaaagaataaccccaagaattgctctgccaccaccaacaaggaccgcgtattcgcggtccagtagctttagccaacagtctggtgtttattcgcgatcaagtagctttgaccaacaaacaagtggcgcctctcagcaacgttctgagagcttgaaacagcagaagaaacctgcagccccgaagagacctgacacttatgcttcagaaagagctttggaagacagaattctgtgccccatctgcatgtataaa

SEQ ID NO: 1332 - DNA, 267 bp, Zea mays
  Clone ID: LIB3136-034-Q1-K1-H4
gtcatgaccgtgttgcaaatatttcaacagttctgcaaccaggagataccctcaaggttgtgatactgagccatgaccgtgaaagaggccgagtcagcctttccactaagaagcttgagccaacacctggtgacatgatccgcaatcccaagcttgtgtttgagaaggctgatgagatggctcagatattcaggcagcgaatagctcaagcagaggctatggctcgtgctgacatgttgagattccagccagagagtggattgaccc

SEQ ID NO: 1333 - DNA, 261 bp, Zea mays
  Clone ID: LIB3136-034-Q1-K1-H5
gaactcacgaagcaagcaagactactgctatagaaagcagtagcaaggtctagtcggctgtgtctaggcgcctagctatatgcctatatagtaaacggtatccagcatggacgagtacatctaccagtcgctcttcctctccgtccttgctgtggcactgctgcagctggtgaagatggccctcaagccgaggccacggctgccgccagggccttggaagctgcccgtcatcggcagcatgcaccacctcgtgaacgtgct

SEQ ID NO: 1334 - DNA, 315 bp, Zea mays
  unsure (1)..(315): unsure at all n locations; Clone ID: LIB3136-034-Q1-K1-H6
gttgccttccctccccagccccccggcctgtcggcggtacgtgaccctgacgccgcaggggtagctagctcgccggaacggcaggtggcggctcgcgacctgagagcacagcagcaccggaccggctcaggcaggcgaccggcagaaaagatggcgggagcagcagctgtggaggcggcagcggcggcggcggtggcggccaacggaaaggcgtgctgccacgccgccaggggcccggtacgcacgccgtggaggcatgagaanggcccaggagagctcgctactactgcttacacgactgaatacagcgatact

SEQ ID NO: 1335 - DNA, 311 bp, Zea mays
  Clone ID: LIB3136-034-Q1-K1-H7
aacaaatcgagctgatgttttggatcctgcccttaggcgacctgggagatttgaccgtggggttatggttgaagctcctgataggtttggaagagaatcaattctaaaagttcatgtgagcagaagagagcttccactgagtaaagatgtagatctagccgatattgctgcaatgacaactggttttactggagcagaccttgcaaacttggtaaatgaagctgctttgttggctgggcgattaaataaagaaattgtggaaaagattgacttcatccatgcggttgagcgatctatagctgggaatagag

SEQ ID NO: 1336 - DNA, 278 bp, Zea mays
  unsure (1)..(278): unsure at all n locations; Clone ID: LIB3136-034-Q1-K1-H8
tttattatcacgctctactcccacacggcggagtacttccgcgncgccggctttcactgcgtgctgggccaccgctaccccgacgccggcagcagcgccgtcatgggcgcgcacatcgcctacatgatcacgcaccaccagaagatcgtcgaggtcgaccacgaaatgccggcgaagcgcatcgaccgccgtcgcatcctcagcttcgtcggcgtgcttgacctctgcgacggccgctacgacacgcatgtccactccctgttccggactctggatac

SEQ ID NO: 1337 - DNA, 413 bp, Zea mays
  Clone ID: LIB3136-035-Q1-K1-A10
cgtcgcgtgggttcaagcttccagcaagtatgctgaaagttgaaccgggacaagagcaacacttatgatcatgaagaacaaatacggaaacccacctatctacatcaccgagaacggaatcggggatgttgataccaaggagacacctgtacccatggaggatgccttaaatgactacaaaaggctagattacatccagcgccacatcgctactcttaaggaatcaatagacttgggatcaaatgtgcaaggctacttcgcttggtctctgctggacaactttgaatggttcgccggcttcaccgaacgttatggcattgtctacgtcgaccgcaacaataactgcacgcgctacatgaaggagtctgccaagtggttgaaacagttcaacgccgcgaagaagcccatcaaga

SEQ ID NO: 1338 - DNA, 393 bp, Zea mays
  Clone ID: LIB3136-035-Q1-K1-A11
cccttcctgtgggtcgtccgggccacggagaccgccaaggtgcccaggggcttcgccgacagggcccatgccaccagggggctcctggtgtcgtggtgcccgcagctggaggtcctggcgcaccctgccgtcggctgcttcttcacgcactgcggctggaactcgacggtggaggcgctcagcgccggcgtgcccatggtggcgatgccggactggtctgaccagacgaccaacgccaagtacatacaggacgtgtggcgcgtctgcgtgcgggtgcgcccggacgcccgtggcgtggtgaggagcgaggaggtggagcggtgcgtgcgggacgtcatggagggggagatgggcgatgagtttagggccagggcttcgcactggagcagcaag

SEQ ID NO: 1339 - DNA, 406 bp, Zea mays
  Clone ID: LIB3136-035-Q1-K1-A12
ggttaacctaattatggacactttgggtgcccttgcattggcgacagaaccacctacgggccatcttatggagagacccccagtagggagaagggagccattggtaacaaatatcatgtggagaaacttgattatcatggctacgtttcaagtttcagtcctccttagtctcaacttcaaggggataagcctcctgcagttgaaaaatgatgatccagcacatgcagataaagtgaaaaataccttcatattcaacacatttgttctctgccaggtgttcaacgaattcaattcacgtaaaccagatgagctgaatatattcaagggcatttcagggaaccatctttttattggcatcatagtaataacagttatactccaggcgcttatcgttgagttcctcggc

SEQ ID NO: 1340 - DNA, 446 bp, Zea mays
  unsure (1)..(446): unsure at all n locations; Clone ID: LIB3136-035-Q1-K1-B10
cgagggtgggaggtgccgccgtcccgtcccggtgtcgcatctgcatcgtcccgtgtcgggcggtggacgtcgggtgcaggtcgatgcgatcatctatgctataaaagaacctnctccgccgcactgtcgatctgggtccgctgtgcatagcataagtcgcaagggccgactctgggggttggaggggccggccatggntgaaatgatgcaggtcgtggcctcggcggcaggcctgctaccaggtgagcggtcatggctctgcctcaacagtggtggcggcggtcatcggtggtcgctcgtcaagggtggccatggacggcggcatgataaccgctcgtggatcgtcatccctgcatgcagctcatccgccgttcgtcgttcctcgcgcccaatcgcattcttcaagggagaggaagtcgagggcccaaagctgacgcttggagatc

SEQ ID NO: 1341 - DNA, 415 bp, Zea mays
  Clone ID: LIB3136-035-Q1-K1-B11
ctttcccctcgctccagattccagtccccatacgagcggttggagcttgggcgtgcgggttccatttcctgccctgctctgattgccgtcgccgaagtggcgatcgagattctcccgcatcagcagcagcagcagccgccgccgccgccgcgggaaccggcggtagtgcctccgaacctctccgtgccgagagtgctccagtatctgtacctcttgagcgcgtgggtcgcctgcgcgggcgtggctgccgggaccgtggcgcgcctggccttgggcgactcttccccgttggtctacgggttcctcaaagtctcgatcggagccctcgttttccccgcgctgctcatcctcgtcttcgccctgcgggtcttgcgcgccatgcttgccgtggggttcagacggtcactccgcactc

SEQ ID NO: 1342 - DNA, 350 bp, Zea mays
  Clone ID: LIB3136-035-Q1-K1-B12
tctccaaccaagctcaggttttatacaacatgacgccgattggcatctgtggcgactaggaacaactgggcagtgtacgacggtccacggcccaacgcaaagctggttgcccgtgcacagggcttgcatatccaaaccgtcaactgggtcaactccttcagcctagtgttcgtggatcaaaagttcagtgggtccacgcttgaagtgaccgggatagtacttgaatccggggagtgggctattgtagggggcaccggtcagtttgtcatggcaaacggtgtcatctccaagaagttccatgagcagagaagcgaaaggaacatcatacagctcaccatccatgctttctg

SEQ ID NO: 1343 - DNA, 405 bp, Zea mays
  Clone ID: LIB3136-035-Q1-K1-B9
aaatgatattaattcagtcgagttgagttcagttcctaatggtaactggggtcttacagaatgcgtaggcaagcgacccaacagccaacacattcattgcacaatacgcaagatacatgtccatattactcagtcccctcaccatgatgatgctacatcctgcattcaacagtgacccatccatccagtccacatattacccaaagacatactcggacctcagtgaataacaggcttcagtgggtgcgcccttagcttcgacatatccaatcttgaatccagctcttcatcaacctcgcccacaacgcttatgttgtcacccctgataatgtacagaccaagaacaagttgttggactccctcctttctagaatagaccctctcatgggactcgtcgagtataat

SEQ ID NO: 1344 - DNA, 395 bp, Zea mays
  Clone ID: LIB3136-035-Q1-K1-C10
tccgaagtctcggacttttttctatcctagctcctgggggcggacagggggtacctcgccaccagattgatgggaacgtttggctacttggcgccagagtacgctagcaccggcatgctgtacgagaggagcaacctgtacagctgttggatcctcatcatggagatgatctcctgacgaagccacgtataatacgccaggcctgccggagaggtaaaccttgttgagtggctcaagaacaaggtgaccaacatggactacgaggtcatcgtggacccgaagcttacggagaagccgaccttcaaggtgctcaacaaagcgcttctagacacgctgaggtgcgtagatcccgactcgcacatacaggccaagatggggcacgtcatccacatgct

SEQ ID NO: 1345 - DNA, 421 bp, Zea mays
  Clone ID: LIB3136-035-Q1-K1-C11
gcagaccagaccctggaggacgtcgagtgccacttcgaggccgtgtcggggcttccggtcgtcgacagcggcctcagatgcgtcggggtgatcgtcaagaacgaccgggcaagagcctctcatgggtccaagacgaagatatcggaagtgatgacatctccagctatcacactatcgtctgacaaaaccgtgatggatgctgctgttctcatgctcaagaagaagatccacagattaccagttgtaaaccaggacgaaaaagtaataggtatagttacccgcgctgatgttcttcgcgtgttggaaggcatgttgaagatttaggagcgcagatacccatgctcggaagccacagcctcttgtaaatatgtagatgtgcccgggcatggtgtttctgagtagcagcaaagagatctaccat

SEQ ID NO: 1346 - DNA, 455 bp, Zea mays
  unsure (1)..(455): unsure at all n locations; Clone ID: LIB3136-035-Q1-K1-C12
tcggcgtccgcagccgcggctttccatccatggtcgccgctagcttccatcaatncgacagtcgcgccgctccacaatncccagaaatcatgcgccaatttgattggttgaccagagagttntgcaagggatgatggtgtcagcgtgcagaacgccgtggaggtgcggttgtggcaccgcgcgtgtggagggctggcattagcatcgccaggaatgactggctagtcctttcgtaccttcgataccctacacgatcacagtcgattggcctgcaaatctcgatccatagcgcagagggatcntgtttggtgcacacatcctatgagcgcattgactgtccgggttcattccacaccgaatggaccaagctggcgaggaggagcaatggcgcagccatttgaggaattggttggtatgagcagggatgttttctgctttgggtgatttctctctgg

SEQ ID NO: 1347 - DNA, 422 bp, Zea mays
  Clone ID: LIB3136-035-Q1-K1-C9
ttgaagatgaccagaggttgcttgtgtatgaatttatgccccgtggaaggtgggagagtcatctttttagaaagtcattgcctctaccatgggccattagaatgaaaattgctcttggtgctgcgaaaggcctcgcttttcttcatgaagaagctgaaagaccagtaatctatcgggacttcaaaacctccaatattcttttagatgcggactataacgcaaaactctctgattttggacttgctaaagatggccctgagggtgataaaacacatgtgtcaactagggtcatgggaacatatggatatgctgcacctgaatatgtaatgacaggtcacctgacatcgaagagtgacgtatatagctttggagttgtactactagagatgatgactggtagaaggtcaatggacaaaaacaag

SEQ ID NO: 1348 - DNA, 253 bp, Zea mays
  Clone ID: LIB3136-035-Q1-K1-D10
cgacccacgagtacaaactactaccgcaagttcttttacaagctcttctatggacagttcacactggcccatgtggatgagttaatggacgaggctcttaccattgattactcatgtgattcagccatgcctttcttacagcaaagataccttcttgaagcgtctgaaactctgttaccgacaagaacttcactctacgacgattatgactaataagaacaagacaaggaggaactttctacggaaattgatg

SEQ ID NO: 1349 - DNA, 416 bp, Zea mays
  Clone ID: LIB3136-035-Q1-K1-D11
catcccatgcagatgcatcttatgactttaagtatggagttagagctgtgcagggaggtggaaggtcatcagccagagaaaccattggcagggtggctgcaggagctcttgcaaagaaaattctaaagctcaaatcaggagtggagatcttggcatttgtttctaaagtgcaccaagtcgtacttccagaagatgcagttgattatgagactgtaaccttggaacatatagagagcaacatcgttagatgtcctgatccagaatatgcagagaagatgattgctgccattgatacggtacgagttagaggagattcaattggtggggtcgtcacatgcattgcaagaaacgttcctcgtggtcttggctctcctgtttttgacaaacttgaagctgaactggcaaaagccatgctt

SEQ ID NO: 1350 - DNA, 427 bp, Zea mays
  Clone ID: LIB3136-035-Q1-K1-D9
acgctccggcagcccgatcaatctatcggtgctatgccgttcagccactccagggagcaccagggccctcaccagcaccagcagcacatgccgcctgcctacgcgtccgggggctggtccctctcggtgcaccagcagaacaggcatgattctgacatgaagatgatgtcgaactaacaggtgccccacttgttggtttgggctggagaggaaggaaaggaacctgctgatggataggttggtactgctgctatgaaacggtcctcttgcgcgtcgtctgtgctctggtcagtgacgacgtgtcgatctgctacttaagctaagctagctaggagagttagggttcatggtctcaccccccgctgttgtgcccctgagtaagattaatttaaatttgaattagtcgctctcataatgctgcgagttg

SEQ ID NO: 1351 - DNA, 208 bp, Zea mays
  Clone ID: LIB3136-035-Q1-K1-E10
ccaaaaccctcctgaagcttctatacatcccactatttttacggatccgagctatctagttcaccacccatgcatcaagtacaatacgtgtgcactccacatccgatacgctatagcgcccactaccactgctagccgcaaaaaaagagaagcagcaccttaggacgtgcagatgcataacctatgatagataaggacttgatctccc

SEQ ID NO: 1352 - DNA, 405 bp, Zea mays
  Clone ID: LIB3136-035-Q1-K1-E9
agaagaagctgaaggagatggagacagagagggaaaggctcctggagtctggtatggtggacccaaaggagcgtgcgcctatgccgtgagtggacatacaggtggtgcatgacgaggtccttgtacgagtgatgtctccaatggagaaccatccagtcaagaaggtcttccaagcgttcgaagaggcagaagtccgcctgggcgagtcaaaggtgacgggcaacaacaacaacgggacagtggtgcattctttcatcatcaagtgtcccggcactgagcagcaaacgagggagaaggtgatagcggcgatgtctcgtgcgatgagcagttgagcagagcagcgtaggatcagattggcgcggtagagatgtggcagttgatcctgtttggttgcgagcaaaaaca

SEQ ID NO: 1353 - DNA, 400 bp, Zea mays
  Clone ID: LIB3136-035-Q1-K1-F10
tccgaatctttgcagacgttgaagaggaattatgactccatggttacggagcttgaaaaacttcgtgctgagttgagggacacatctaatcttgacaaaagtggttttttctacaatagcaccacccaaaaggccgatggtatatctagccatctttctgttggacaaattgcttatgatactggctatggaagtacacaggcaagggcaactcctaccggtctggcagacttaagtggagtccctggaggcgctggccttcgttctggatttgacccatcaagaggcaatgcatatgatggttctcatgttgccaatctcagctcttcaaaaactgggacccatgatgcatcaaggggtgccactggctttgactctctgaaaggttctgggtatgatg

SEQ ID NO: 1354 - DNA, 380 bp, Zea mays
  unsure (1)..(380): unsure at all n locations; Clone ID: LIB3136-035-Q1-K1-F11
tcgaggcaggtcgatacccgtacctgagaggagtttatagctgnatgaaagaatgggcggggcgtctacggagaagcatgtctggagtacgtatctccatagaagtctgtccgcagtacccccaaggtagtgtgttctccatgtctggtccgtgcctcatccgcgtgggtctccagtcgcgtcctgggtacgtccgggttgtggcatccgtgccaggtccgtcatctagcatggtcggagcatctacgagagcgtggtggctgactgacgtgagcgaggggcatgcttcggcacgccatccgcgcactccgaaggttgcggtatcctccacatccccggagcaccttctcggaggacgaagctggttgtcgctggtcggc

SEQ ID NO: 1355 - DNA, 361 bp, Zea mays
  Clone ID: LIB3136-035-Q1-K1-F12
gaccaacctgaatgtggatctggtttttttctccatagcaagagatatgagagcaaaggcgttctgaatctgattcaaagccagaggatcgcacgatcagtattaacagacctgatggcacgtgaggcttcagcttcacaaaaatcagctagctgcggatcgtgagggggttacattgtcacaacgaagataaatagcgtgataccatgcttgtaatttacccttctacctttttatctggcttaatcgtccacttctaacttttaattgcaattccttgcattcacacttctgtgttgtaatgtgaacaattttacgtgctcccccccgttagcattgcaagtgctcgtaagtcaatgca

SEQ ID NO: 1356 - DNA, 418 bp, Zea mays
  Clone ID: LIB3136-035-Q1-K1-F9
gagacaggagacgccaatttcatagcttgagcctagagcagcagcagagggttgacctgaagctccacccgccatggcattcacgcccgctacggcctgctgcaaggcttccctggcgctggcaccgcgggcgtcaccccgcggcccggcggcctgcgcgcaggcggcgctcctctgcacgccctccacctccgtgttccgcggcctccgggcgcccgcatccgccgcgccagccccgcgccggcgccgctcggcggcgtccacgggcatagtctgcggcaaggtcgccaagggcagcgtgccgccgaacttcaccctcaatgaccagaacggcaagcccgtgtcgctgaacaagttcaagggcaagcccgtcgtggtttacttctaccccgtcgacgagacgcccggatgcacaaag

SEQ ID NO: 1357 - DNA, 293 bp, Zea mays
  Clone ID: LIB3136-035-Q1-K1-G10
ttgacctattaacaattgtttttacattctgcaatctcattaccaacagggcgcttggggcaatttctaacatctgtaagatgcttgaatgtttgtggttggaatcatgctctttgctaaatgagaaggaactagcgtgaattacaactctttgccgcaacctttagtagatcgacctcactgtctggggaattgatcacgcaccgctctattactttgctacattatatcaactgcgaatattgaaattaggcctatgctcacttatttctgacatacgcattgcatttatc

SEQ ID NO: 1358 - DNA, 416 bp, Zea mays
  Clone ID: LIB3136-035-Q1-K1-G11
aagaggagcccggctccttacgcgggatctagaggatcgccggcgcaggaggtggtgcgcatcgtgcttggcgtccgcctgcgcgggctgcacctgcaacctatgcacgtctgcggcatctgccgtgtgccaccgctccgctcgcctagcttactgcggcctcttcgccgcctcccttatcctatccttcttgctaaggcagttcttcgcgccgctcctcaagcatatcccatggataaatgcgtttgatcaaacaccaccagaagaatggtttcaaatgaatgctgttcttcgtgtaagcctggagaacttcttgttctttgcaatattttctctcgcgatgattggtgtgaaagaccataatgaccggcgagatgcctggcaccatggtggctggattgcaagattgctgtatg

SEQ ID NO: 1359 - DNA, 387 bp, Zea mays
  Clone ID: LIB3136-035-Q1-K1-G12
gtttaatgtggcagaattctttgggacactgtgtcttgaaagcagactgtcccaaaggcaaaaaggaactcgcggtgtcattgtttcagagtgtggttttgatgttgttcaatgacgcacaaaaattaagcttccttgacatcaaagattccactggtatcgaggataaagaattgagacggacactgcaatcgcttgcatgtggtaaagttcgggttctccaaaagataccaaaagggagagatgtagaagataaggatgactttgtattcaatgaagattttagtgctcccctctatcgcataaaggtaaatgcaattcaaatgaaggagacggtagaagaaaacacgagcaccactgagagagtgtttcaggatcggcagtatc

SEQ ID NO: 1360 - DNA, 390 bp, Zea mays
  unsure (1)..(390): unsure at all n locations; Clone ID: LIB3136-035-Q1-K1-H10
ncgctcgcgtctctccgccggtttttcatccacttccgacaacaactacttgccccgggcttctcgcggatccaccgtgtgtgcttggcgctctatctttccactgtcgctgtacgatgttagcccaatggctctgctcgccagttgtacgtgggacaagtcgctgtccctctgttccatgatcgcacttggagctacatgtgccatcccggtgttccggaccctcgtggaccgcatcgattggggagcggcggctttctccgtggcggtctactgctatgtcgtgcttatctagcacctgctttcaatgctggagaacgcggtcccatcgccggagttcctctactagttcttctactactacacatgatgcttaagcgctgctcatca

SEQ ID NO: 1361 - DNA, 236 bp, Zea mays
  Clone ID: LIB3136-035-Q1-K1-H12
cttcgcagtccgcgcggcagtcggcatcactcaacgacatccggaatcgcagttcgccaacagtcatacatatcatccaagcagcgtgcgcttacttcgagcagtaccagaggcgcctggccgcgctgatcggcccggaggcggcgtaccgcgtggtgcgcggcgcgctggtgctcatcacgctgggcggcaacgacttcgtgaacaactactacctggtgccctactcggcgcgg

SEQ ID NO: 1362 - DNA, 399 bp, Zea mays
  Clone ID: LIB3136-035-Q1-K1-H9
cttggatttaaacctcttccaaatgaagttgtgaaagaagtggatccacagctggagggggttaacaagaaccttgaagcatactctgatgcttgggacaggttcatccagtcatggattgttattaaaataagagaacccggtagcgtttaccagtggagactgcaggcagaggtcgctatgagagcagatggaaagcctggaatgtctgatgaggaggttatggattttgtatgacgctacctaccggcataccatgcatatctgcccacactgtacaaagaggggccgaatggttcgaatccacatcatctgctggtcatcgacatagacgaaaatatgaaccctatctgtggtggatcatgggacatctcatgtttgtgaaactacttttatgat

SEQ ID NO: 1363 - DNA, 258 bp, Zea mays
  Clone ID: LIB3136-036-Q1-K1-A1
agaagattgtcagggagacctgccgcaacattggttttgtgtcaaacgatgttgggcttgacgccgaccactgcaaggtgctcgtgaacattgagcagcagtcccctgatattgctcagggtgtgcatggccacttcaccaagcgccccgaggagattggagctggtgaccagggacacatgttcgggtatgcgaccgatgagacccctgagttgatgcccctcagccatgtccttgccaccaagctaggtgctcgtc

SEQ ID NO: 1364 - DNA, 349 bp, Zea mays
  Clone ID: LIB3136-036-Q1-K1-A10
caaaggatggtttaaaagagggggtgtaacggtctgtgctgcttacctcgacctgccgatgcgaggactgcacataatttatgatctaaaaaaagcatcaacgccttgccgatcacctgaacaagcagcattatgggaaataaaaaagagctgagatcctggtctcccctctaccctgttcgacgttcaagaaccgaaccagcgatggatacctaccttgttgcatactggcaccaggtcctgaaagaccttcattctctggctgatcctcttccttctcacctgttacaatacacgagaccgttcaacgagacacctccaaagagtttgactggctgggtgggtagga

SEQ ID NO: 1365 - DNA, 445 bp, Zea mays
  unsure (1)..(445): unsure at all n locations; Clone ID: LIB3136-036-Q1-K1-A12
gcaacgccagggcgcaaccatgggtcagcagcagcaagggccggcggccaggcggatgggcgcgctcgcctcccacctgcgccatccctccgtctctcaccctcagatggaagatgttcccctcttgaggggatccaattgccgtgcaaaaggtgcggcgccaggcttcaaagtcgcgatcttgggtgcagcaggtgggattgggcagccacttgcgctattgatgaagatgaaccctcttgtttcggtgctccatctatacgatgtcgtcaacgcacctggtgtcacagccgacatcagccacatgaacactggtgctgtggtacgtggcttcttgggccagccacagttggaaaatgccctggctggaatggatcttgtaataattcctgctggtgtccctcggaaacctgngatgacaagggatgatttgtcaacataaatg

SEQ ID NO: 1366 - DNA, 410 bp, Zea mays
  unsure (1)..(410): unsure at all n locations; Clone ID: LIB3136-036-Q1-K1-A2
cggagcacgacgagatcgacttcgagttcctgggcaaccggacggggcagccctacatcctgcagaccaacgtgttcaccggcggcaagggcgaccgcgagcagcggatctacctctggttcgaccccaccaaggagtaccactcctactccgtcctctggaacctctacatgatcgcgtaagcacccgcatcatatccatcgcattgcgtttgcgtccgtcacacatcatcactctgcatctgcaatgcaatgcaatcctccgctgctccgtcctctctggaacctcacatgaaccaggtaggattccctaaaatttaccgcggtaaaagctcactgctctgctcaccggcgccggngagggtacaactgcagcacgacggcagcggcactacagtcgagtactgaaaa

SEQ ID NO: 1367 - DNA, 357 bp, Zea mays
  Clone ID: LIB3136-036-Q1-K1-A3
cggagctctacgacatcgccttcctactctttggcggcccgactaggcagacctacattggggaaagcatcgtgatgctcggcggttatgtcgaccgctagcatccgatgtacctcttattcgaccttaccaaagtttaccgctcctactacgaactctgtaacctatacatgagcgcacctgcactcgacttatattcataggagtacgttggcgtgcctcacacatgatgacttgttatcagacaagcattgcaacattacgatgctacattctctttggatcctgacatgaaccacactagactaaatcaaatttaccgcagtctaagctcaatgttatgtttacctgttacca

SEQ ID NO: 1368 - DNA, 276 bp, Zea mays
  Clone ID: LIB3136-036-Q1-K1-A4
ctcgtggccagggtcgccctgcagagcgaggatgtcgagctcgtcgccgtcaacgaccccgtcatcaccacggattacatgacctacatgttcaagtacgacaccgtgcacggccaatggaagcacagcgacatcgccctcaaggactcgaagacgcttctcttcggcgagaagccggtcaccgtctttggcatcaggaaccccgaggagatcccgtggggtgaggctggtgctgagtatgtcgtggagtccaccggtgtcttcactgacaaggac

SEQ ID NO: 1369 - DNA, 367 bp, Zea mays
  unsure (1)..(367): unsure at all n locations; Clone ID: LIB3136-036-Q1-K1-A5
tgcatattatgtggctcccgaggtattgaagcggcactatggggcagaggctgacatatggagtgctggggttattctttacatccttttatctggtgttcctcctttttgggcagagaatgaggatggcatatttgatgctgtcttgcacagtcacattgatttctcttctgatccttggccttcaatatctaatggtgcaaaagatttggttaagaagatgctgcgacaagacccaaaagaacgcctgactgctgctgaaattntgaaccacccatggattagagaggatggagaggccccagataagccacttgacattacngtcatcagtagaatgaaacagttcagggcaatgaacaagctc

SEQ ID NO: 1370 - DNA, 355 bp, Zea mays
  Clone ID: LIB3136-036-Q1-K1-A6
cggacgcgtgggttggatcaatggtgagcaggtctttgagaggctcggaccaagcttatgtgattttctgcgggaaaacagctaccgctcattcccaattgccctacttcgggagattgccaaacaactgttggaatgtatagcatttatgcacgaattgtgtctcatacacactgatttaaagcctgagaacattctccttgtttctacggagtacattaaagtgcctgattacaaagtttcatcccgatccccaaaggagggatcctattacaagcgggtgcccaagtctagtgctatcaacgtgattgattttggtagcactacctatgatcaacaggatcagagttatgtt

SEQ ID NO: 1371 - DNA, 325 bp, Zea mays
  Clone ID: LIB3136-036-Q1-K1-A7
cggacgcgtgggtgctgttaaagaaggtccctatgaaacatatgaagggagccctgttagcgagggcattcttcaacctgacatgtggaatgtagtgccatctaccaggtggaattggccatctctaatggaaaccatttctaaagctgggataagaaattctcttctcgttgctccaatgcccactgctttcactagtcatattcttggcaacaatgatggctttgaaccctacacatttaatattaacagccgacgggttctaagtggggaatttgttggggttaacaagcatcttcttaatgatttgacggaaatgggcatt

SEQ ID NO: 1372 - DNA, 361 bp, Zea mays
  Clone ID: LIB3136-036-Q1-K1-A8
gccttataattgttaaaagcaaggaggccaggccaaaggggagcttggttagtgggtaaaagacactttcttggaactttgatggacccttgggatttcaaccttccaagccaacattttaaaggaagatgttgtgtcaaagctcttggactttattgctgaacctcactctgcagccgaatcttggggctctgatgaccacggatcaaattctaaaaaacgcaagagaggaggtgaaagtgcaagttatacgcctgatgacacacctattaagtctaggaagaaatttgtcgatgaccgtacttttagtaaaaggcagaataaagcgcttcagtatgatactgatgaggattaattcatg

SEQ ID NO: 1373 - DNA, 368 bp, Zea mays
  Clone ID: LIB3136-036-Q1-K1-B1
aggctgccttaaatgactacaaaaggctagattacatccagcgccacatctcaactctcaaggagtcaatagacttgggagcaaatgtgcatggctacttcgcttggtctctgctggataactttgaatggtacgccggctacaccgaacgttatggcattgtctacgtcgaccgcaaaaataactacacgcgctacatgaaggagtcagccaagtggttaaaagagttcaatactgcgaagaagcctagcaagaagattattacgccagcttaaaaacatgggacctcgtgatgtgggtacggtgccacccatgaaataaaaacctagtgtgtggtttgaaacctaaatttttctttttcttttttg

SEQ ID NO: 1374 - DNA, 354 bp, Zea mays
  Clone ID: LIB3136-036-Q1-K1-B10
ccaaaacgttcgcccgcttgagacactcactcgtttcaccacacgtaagccgtcccacatcagccgtgcaccttcacgcctgcgcacgcctcaccctccttatcgaccgccgctccctgtccttctgcccccgtatccggcgggtgcacacacttatacgcagctaggctccctacctgagctctccatttatccccccagcagcgcccccaattccttccacatcaccaagcccgtcgcggaaagctactactaccatttgctctgctgtatcaagaacaccagccagacgctcatcacaatgatctactatgggcttgcaaagaagctccatccagacacaaataaaggtta

SEQ ID NO: 1375 - DNA, 354 bp, Zea mays
  Clone ID: LIB3136-036-Q1-K1-B11
ggcaaggacgccacgcgggcgttccccaaggtcgcccccaacgccgtcccgggcaagccgcgtggctactacgcgctgcgcgaggaggtccagaagcagctgcagaagcacccgaacgccaacgtcgtggtcaccggccacagcctcggcgccgcgctggcgaccatcttcccggcgctgctggcgttccacggggagcggggcgtcctggaccgcctgctctccgtggtcacctacgggcagccgcgcgtgggcgacaaggtgttcgcgggctacgtgcgcgccaacgtgcccgtggagccgctccgggtggtgtaccgctacgacgtggtcccgcgcgtgcccttcgacgcg

SEQ ID NO: 1376 - DNA, 415 bp, Zea mays
  Clone ID: LIB3136-036-Q1-K1-B12
gggaggagggtggtgcaggaatcctgatgagtgtgctgtccgcaagggcaacttcaggggggcctccaaatttatgaagccactctcgttttcagggatattaggcggcaaccaaaaatccaatcctgatttctacaactggaatagagtaaagatcagatactgtgatggttcatcatttactggtgacgttgaggctgtggacactgtatgttctgaactgaacttatggattcattgtacgatcagctctgcagaaacaaaaaaaaaaaaaagaggagagattaataccatgttttcaatttaggcgaaagatctccgttacagagggttcagagtctggcgtgccgtcatcgatgatctacttactgtgaggggaatgagcaaggcgcaaaatgctcttctttctggatgc

SEQ ID NO: 1377 - DNA, 342 bp, Zea mays
  Clone ID: LIB3136-036-Q1-K1-B2
gctgtcctctgtgctatccgctagggtttatctgctcgaggaatggcgtcggtgcaggtctccggcgcgggggtcggtgccgcggccttctctgtgaaggggaaggcctccaccggtgcgctccggcttcgctctacgttgaccttcggcgaggtctgcccggcgcggcgggcgttccgcggcctcgtcgtcagggccgctaccgtcgtcgcccccaagtatacaacacttaagcccttggctgatagagtgcttgtaaagattaactcttccgaggagaagacaactggtggaatcttgctccctacgactgctcagtccagacctcaaggtggcgaggta

SEQ ID NO: 1378 - DNA, 298 bp, Zea mays
  Clone ID: LIB3136-036-Q1-K1-B3
caaccatggggcaccaggcgcagcacggcacggacgacaccgaggagctgcttgcagcccaccggcagctgtggtgccatgccctgggctacgtcaagtccatggcgctcaagtgcgccctggacctgcgcatccccgacaccatcgaccgctgcggcgggagcgccaccctgggcgagctgctcgccgcaagcgagatcccggcgtccaaccacgactacctccggcgggtcatgcgcacgctgacagccatgcgcatcttcgcggccagccacgaccccgccaaggccgacgacgc

SEQ ID NO: 1379 - DNA, 359 bp, Zea mays
  Clone ID: LIB3136-036-Q1-K1-B4
gataaacatactgaagaccatgtatccgtcttacccttatcccaaaaattttgtggaagatgatgtcaactctgtatacagctctgagaaactgcagaagctggggtggagcttcaagcctatagaggaatccctccgtgacactgttgaatcctacaaggcatttggcatcctgaattgaacatcgaactaggattgtttccatctgctgttgcctccgaactcctcctgaataatgtaggcgcagtgacagcagcactgccgttctctttatttttcaacactattatgtagtggttcaggccaaataagtaggcccggtgctgactgttgtatggcttgtggcctattgtcgttgc

SEQ ID NO: 1380 - DNA, 445 bp, Zea mays
  Clone ID: LIB3136-036-Q1-K1-B5
gcggaattttgaggtaattggttcatgggagacaagctcctcgtctcaagtttcttccatggtaaccttccaagtacaggatggtagggtgacatgtgataggtgcaagattgcgtctttgtcaataccattttgctccatgcttaatggaccgttcaatgagtcacagcttgagcttgttgatttgtcagagaatggtatttcgttggagggcatgagagctgtttctgagtttagttctacatgtagtttaggggatcttcctgtggaaatcttattggagatcctggtgtttgcaaacacattttgttgtgacaggctaaaagatgcttgtgataggaaactggcttcatttgtttcaacaaggcaggatgctgttgagctcatgccgttggcatttgaagaaaatgcgccagttcttgctgcttcttgcttgcaaattttt

SEQ ID NO: 1381 - DNA, 439 bp, Zea mays
  unsure (1)..(439): unsure at all n locations; Clone ID: LIB3136-036-Q1-K1-B6
gcaggatgaacctttctacattgaaagaaggaacaccaacatttctactggttttggaggaacaaaaggatccaagagagtggtagcacctaatgtagaagaccaagttggtagagtaactaggcagaagacaaaggaactatccttagttgagaaagatatacatggttcgactgcaaatacagatgagcacacattgatttctgccaattttcctgcacaccatgatgacgagattcagatgtgtgatgaaggtcaaatagatgtcaacaacaacaacaacaacaacaacaaagcctttttgtcccaagcacgttggggtaggctagagatgaaaccccgtatgaaaacctcagagctcaacccccanagaacagaaaaggggaaacaaaggcaaggagaaccgaaaacacgaacgggngaacacataaagagataa

SEQ ID NO: 1382 - DNA, 388 bp, Zea mays
  Clone ID: LIB3136-036-Q1-K1-B7
cccagaccacagcgcgacagtgagtacagcagcagcagctgagagcgtgagagcgtgcgaagcaggagggaggacaagaagaagccgatggcggttgtgagcggcagcggcgggaggctgaacccctgggcggagcccttcgtgccttccggggcgcggtaccgcggcctgcggaccgtggaggcgacgccggagcaggaggtggaggacttctcccccgagtggtggcgcctggtgtccgcctccccggccttccgcgaccgctggctgcgcgagtacggcgcgctcggcctactcgacgccgaggacgacctggacgacgacgtcgacagcttcctccccgacgacttcttctcgcctccggccccgcgctacgagagcgagcggg

SEQ ID NO: 1383 - DNA, 356 bp, Zea mays
  unsure (1)..(356): unsure at all n locations; Clone ID: LIB3136-036-Q1-K1-B8
cacactacctcttccgaagcgagaatcacgtggaaacagtcgcggcaagtgctgccgagcggcnctgacaaacactgctagtcatataccgatctcgactcaatgtattttgctgaattcccaaaagcaactttacctgcatcttctaacacatcattgaccacagatattggtgcctatgctgcgggctcttaaacgctttctcgtgcgttctcaaatcgaacttactgctacgagaattcaactgctactcggagctcttaatgttatatcagatacaaagactgcaacatcttatatctgcaccatctgctcaacaaacacaccagatttgccacatgaaaagaagcaattta

SEQ ID NO: 1384 - DNA, 219 bp, Zea mays
  Clone ID: LIB3136-036-Q1-K1-B9
accaaacaccttaatacctgttctatttcaactatttcttgcccaaccacaacaataaacacttctactacatatcaaattcacacaactacccttttcctctaatcaaaactcccatcacacacttaacaaaacgcacattatccttctataccatctttttgactacacaatttcctttccaaattcccacttccttctttaaaaactccccaaaca

SEQ ID NO: 1385 - DNA, 201 bp, Zea mays
  Clone ID: LIB3136-036-Q1-K1-C1
gccgtggcctgcgccggcgatattttccgtggccgggaccgggagcaggggacaaggcggggcaaactgcgcaagggacctgcatgctgtacgtgcacgccgggaccaaccctttcgaccaccataattaaggcggtcaaggtggtggaaaggcacatgcaaactttccataacaggaagaaaaaaaagctgccgtcgttc

SEQ ID NO: 1386 - DNA, 399 bp, Zea mays
  Clone ID: LIB3136-036-Q1-K1-C10
aaacgggcgaaaggatccagcagcaccctttgcgcgcggcggttaactcgtcgcacatctcggggcggcgcggcgcctccctcccggccctgccggcgagagcgcggtccgatgaggcggcggccgttcctggaccagcgacggccgtcgttcaagcgccggtggcagcagcggccgtggtgggtgcgcctcttgctctccctcctcctcgccctcgcatgcgtcctcctcctcgctgtcctcctcggctcccccgaccccgacacctcgccgtccaccttcgccgcgttctccagatccgaggccacctcctcccctcttctcagtcagagaacttacttggagggaatcacggatgcgctcaacatgactgacgaaatgctgagcgcaggctcgttc

SEQ ID NO: 1387 - DNA, 124 bp, Zea mays
  Clone ID: LIB3136-036-Q1-K1-C11
cggacgcgtgggcgccgacgacccggacaccgccgccgacctcaaggtgaaggacctcaggaacggccgccttgccatgttctccatgttcggcttcttcgtgcaggccatcgtcaccggcaag

SEQ ID NO: 1388 - DNA, 432 bp, Zea mays
  unsure (1)..(432): unsure at all n locations; Clone ID: LIB3136-036-Q1-K1-C2
gcgaacaaatattacagaactctgggggctgtcagacatgataccactgtgatgctttcaaatgcagaatcttacttttcaaagagcagtgaaatgaccaaaaagatccgcaagctctctgagttgctcgaccagatcttttcatcactgtagggaacattgcttgatgcctgattgacaatttcccttttcgtttctgcaaaaaaaatttggccttaggcatcgagatgatttttactggtcctactgaggcattagagaattagccaaagtagttctcaggacagaaagggtttccggtgtagctccaaccagttaaactagttgctgatacaaagtgctcgttgctaacacatttgaccgtttgatctgttgtcaagatacaatggttcatcctattggacatgaaatattgnggttttgttagagaag

SEQ ID NO: 1389 - DNA, 439 bp, Zea mays
  Clone ID: LIB3136-036-Q1-K1-C3
ctggcatccctccatggtcggatccccctgcgatggacgccgcgcaggaagccaacgacgcggtccccacgctctccttcctcctcctaccgtacagcacctcgacactccttccatggcgcccagcaggccaagctcctccaacggcgtcctcccctccgctgctcgacacccacagctcctttctcccatggcgcagcagcaaacctccatggccgcccatctgttgcataccagcgcccctgcccctatctccaacccctcctcgctgttctccgtggagcatgccggctattcgacgaaatgtccagctgctgtcgcagggccccctgcctttcccctcgcgactgtagcctcgacgtcgtcgtcgaaccttccttgctgcgccttgcaccgtcgacattccttgggcgttcgataaaatgcctaaccgagcagc

SEQ ID NO: 1390 - DNA, 113 bp, Zea mays
  Clone ID: LIB3136-036-Q1-K1-C4
aaaaaaaaaaaaaaaaaaaaaaaaaaaaaattaaaaaaaaaaaaaaaaaaaaaaaaaaaaagaaaaaaaaaaaaaaaaaaaaaaaaaaaaaaaaaaaaaaaaaaaaaaaaaag

SEQ ID NO: 1391 - DNA, 366 bp, Zea mays
  Clone ID: LIB3136-036-Q1-K1-C5
ccgagctcaaggtgaaggagctcaagaacggccgcctcgccatgttttccatgttcggcttcttcgtccaggccatcgtcaccggcaagggcccgctcgagaacctcgctgaccacatcgctgacccagtcaacaacaacgcatgggcctacgccaccaacttcgtccccggcaactaagctcaacggctatgctatgcaacttcattgtctttcggatcggagagggtgtacgtacgtggattgattgatgctgcgagatgcatgtgtgtcttttgtttcacgttgcattgcataggcaagtcgagatgatgagttggcgttgtacactaagatgaaccatgtttgtgcaatagtggtggttttt

SEQ ID NO: 1392 - DNA, 409 bp, Zea mays
  Clone ID: LIB3136-036-Q1-K1-C6
gtggacatggcaaatgcattgctgattcttatgtaatcacccaagtcattgaggagaaggtcccgactccttctctggtcacccctccagaatatgcatcagtgggatcaaaggttttcccagcctttgtcaagttcttgaagagcaaggatgctagtgatgggtcagagaaggcgcttctggatgagctgcaggcactggatgatcatctcaaagctcatggcccctacataaatggggagaacgtgtcagcgactgatcttagcctggggccaaagcttttccacctacagatcgcactgtagcatttcataggctggaagatcccagataacctaaccaatgtgcatgcctacaccaaggctctttttaaccgtgaaatctttgtcaagactaatccatccgagga

SEQ ID NO: 1393 - DNA, 439 bp, Zea mays
  Clone ID: LIB3136-036-Q1-K1-C7
gccagctgccatccagcgccaccaggaaagccgcccaggcgccccgcctctgcatccgggcgccaggagcagcgcccctgcaacccgcgctgaagactcgacgcccagagccgcgtgcaaccccgttcgccgccccgccctccgtatcccgtcgcctcgcccctgcgctccgtcagctgcccctctccgtctacaggaatcagtggtcttctccgctacgctcctgaaatatttgagcagtctggagtggctagtttgttttcagacattggactttctcctcattcaacatcaattctcatgagtacccttaatgctttgctgatactcccttgtataactgccgcaatgctgttgatggatgtctgcgggagaaggtagaatctgagacaccatgaaaattagtgatgcagttgtggacttttgaacaatagctaga

SEQ ID NO: 1394 - DNA, 201 bp, Zea mays
  Clone ID: LIB3136-036-Q1-K1-C8
aacaaacttgccattctcgccagcccattatttttgccaggacactacaaacaaagatggtgccttatctgatacacgccggaactctggctgttatcaccatcctcgtggctctcgccgaaggcaacacacactagccctgctgtaacaactgcggtgcttgcaacaagaagcagccttcggagtgccagcgcaacgaca

SEQ ID NO: 1395 - DNA, 448 bp, Zea mays
  Clone ID: LIB3136-036-Q1-K1-D1
gttactattgattttgagccattcaagcctatcaatgtatcactctacctttgtgacaacgaggttccacactgaggctttaaatgagctcttggaatctgatgacaagtttgggttcattgttatggatggtaatggtactctttttggcacactaagtggcaatacccgtgaagtgcttcacaaattcactgttgacctcccaaagaagcatggtagaggagggcagtctgctctgcgttttgctcggcttcggatggagaaacgccataactatgtccgcaaaacagctgaacttgctacccagtttttcatcaatccagctactagtcagcctaatgttgcaggattgattcttgccggttctgcagattttaagactgagctgagccaatctgacatgtttgatcagcgactccaagccaagatacttaatgtggttgatgtt

SEQ ID NO: 1396 - DNA, 422 bp, Zea mays
  unsure (1)..(422): unsure at all n locations; Clone ID: LIB3136-036-Q1-K1-D11
cggacgcgtgggattctgcagcctcgcgaacgcgctgccgacgaggacagcgcttgggccgaggacgctagcagcaacggagatcctgaactggacggcgtgaggccgcatgggccgcgaggcagcaggtcatcctcctctaggcaggttgcggagaggagggagcgggatggcactgctgctggcacgggcaggagagaagggaaatgggagaggaagcagcacccgtgactattccctgcttgtgttgtgcctaagcctaacggaggcttcctcaatcgcgttgtaattgtactcgtatgggcattggatcaggtggctgcttagtcaacggtaccgtgcattgataaaaaggttggatcatcgtatgggaacactaccaantagctgnctgctcagtcaacagcacaattaccatcaca

SEQ ID NO: 1397 - DNA, 403 bp, Zea mays
  Clone ID: LIB3136-036-Q1-K1-D12
tcagtctcccagcatttaccggctcctccgcacctgctgctccagttccagctctcccaacaccaacatgctcggcctccggcgcctccccgctgtctccggccgcctcgcgccggaggtcacctccgtctctgcggcctcctcccacagcgccgtcttctttcgcaccctccaaatcctcgtccagcaggggcccgtccgcctccaaaagctctctgctccggacaccggtctgtctgtaccgaccccatctcaacgaaattttgcatttgcttgtaggcccagggattgtgtttcccagctgtgattcgttggttacagggatcgtggagctgaggctggagcggccggaggccaagaacgccatagggaaggagatgctccaggggctgcggagcgcgat

SEQ ID NO: 1398 - DNA, 435 bp, Zea mays
  Clone ID: LIB3136-036-Q1-K1-D2
cgatcccgctccgtctccccccaccgccaccgctgccgctgccgccttccccaccgaggtcttgtcttcggcgatccagccggagcccgcggcggcgacgatgtacgggtgggagatgctgtcgttcaacatacacgatgggttcctggaggccatcgtgctgggcaaccgctcgggccttctcaccgccgccgactacaacaacctctgacagtgcgagaccctcgacgacatcaagatgcacctcaccgccaccgagtacgggccctaccttcagaacgaaccttcacccttgcacacaacgacaattgtggagaagtgcactcttaaactagtcgatgagtacaagcacatgctgtgccaggccactgaaccactatctacgtttttgcagtatttaacttattggccacatgattgacaatgttgtcctta

SEQ ID NO: 1399 - DNA, 378 bp, Zea mays
  Clone ID: LIB3136-036-Q1-K1-D3
cacaaggaggccgaggaggccggcggcgagaagaagcaccacttcttcggctgattgatccctcccgtatcgtcgtccctccccgtgtgctacgcgtgcgtgtgtgagagtgatatcgagcgcccgccgtgttgtgcgcgcgtacgtatgtatgcgctcgtgtgatgcacgaataagcgtggctacgtaatctatcgtatgtatacgtgtgtgtatgcatgtgcttgtgtatgatcgtggtacgaggaccgaaaaaatgtatgcaactctgatttacttacatgtttagttgtttacgtttctccaaaagtattagtacccattatgttatattttactatattatattttattgattattaaactatgtatgggtgg

SEQ ID NO: 1400 - DNA, 288 bp, Zea mays
  Clone ID: LIB3136-036-Q1-K1-D4
ggtgagctgcggcgaggtgacgtcgtcggtggcgccgtgcctcgggtacgcgatgggcagcgcggcgtcgccctccgcggcgtgctgcagcggggtgcgctcgctcaacagccgcgcgtcgtcgacggcggaccggcaggccacctgcaactgcctcaagagcatgacgggccggctcggcggcggcgtcagcatggccaacgccgccaacattccctccaagtgcggcgtctccgtcggcgtgcccatcagccccaccgtcgactgcaccaagatcaactgatcgat

SEQ ID NO: 1401 - DNA, 393 bp, Zea mays
  unsure (1)..(393): unsure at all n locations; Clone ID: LIB3136-036-Q1-K1-D7
cggacacccaaaggtcagccaggagctcaggtccatctggatagacctcctcgccaagtgcgacgcgtcgctggggatgaagattgccacccggctcaacatgaagccaaacatgtgatgcttctgctgaataataatgaagacacgcatgcatgtcgtcgtcaggaacaagagaaataatacaagaccaccacgcatgggcatactccatatatatatgtatagcccgtgcccgtgtccgcctttgtaccaatacaagccaagactagtggatgtattattattattattattgcgctatcacatacatgtacccctgctacctgaagatggatgtgtatcgagttatcaaattaagacacctgcagcaaaaaactatatatgttgcatnng

SEQ ID NO: 1402 - DNA, 290 bp, Zea mays
  unsure (1)..(290): unsure at all n locations; Clone ID: LIB3136-036-Q1-K1-D8
aacagacagaaactacaccggttggtgcatttagaaagtatatgttatccattgggtcagggtggaccggcatgcatctgttgaggaagcataccaagatggcaggtcccgactaaacatgttgctatctaaagtgcacaattccaatgtccccacactctctcctggatttgtgaagctgcacacacgcaagtttggtacacctttgaacaagtcgaccatgacaagtgatgagtataagaatgctgttctgcangctaaggaacatattatggnctgggatatctttc

SEQ ID NO: 1403 - DNA, 72 bp, Zea mays
  Clone ID: LIB3136-036-Q1-K1-E1
ctctccatcatccagtgctctctctttgcgattcgctcgtcgacctagcttccttgcagaacgcacgccatg

SEQ ID NO: 1404 - DNA, 75 bp, Zea mays
  Clone ID: LIB3136-036-Q1-K1-E10
cgggtccgacccacgccgtccgagatgatgtaatggtcacgggcgcccggcgggttctccggcgtatggcgttac

SEQ ID NO: 1405 - DNA, 296 bp, Zea mays
  Clone ID: LIB3136-036-Q1-K1-E2
agacaggacatctgggatacaaaatgcggcagagaagccccacgataccaaggtgatcaagcctcaggatccgtgcgtctccgaagagcaggctagcgaggccgagaaagagaatggacctcagggatgtcgttgcagcggcaatcagggccaagaggaggcagcgaaaactgcaactaaccacccgccagcttcaggcttgaaggcggcaggtgtggaggggaagcagcagcagcgctggaagaaggtcgaaaatccaaagcagcatgcggacagcgtccctgcccagtgctcac

SEQ ID NO: 1406 - DNA, 446 bp, Zea mays
  Clone ID: LIB3136-036-Q1-K1-E3
aacaggacatctgggatacaaaatgcggctgagaagccccacgataccaaggtgatcagaggctcacgatccgtgcgtctgcgaagagcacgctagcgaggccgagaaagagaatggacctcagggatgtccttgcagcggcaatcagggccaagaggaggcagcgaaaactgcaactaaccacccgccagcttcaggcttgaaggcggcaggtgtggaggggaagcagcagcagcgctggaagaaggtcgaaaatccaaagcagcatgcggacagcgttcctgcccagtgctcacaggaggaagcacctgagaagcggttaaatggggtcagcggctgttcgagcgcagttcaagagggttgcgaggagcagagggccgctgccaaacttgcttctttcaagatcggttccagggcggcagtggaagctgaccgtaaaactagcg

SEQ ID NO: 1407 - DNA, 339 bp, Zea mays
  Clone ID: LIB3136-036-Q1-K1-E4
gcctgacgcgcacgtgcgagccacgctgccctctcctgtcaaaaccctagtttcccaacagcgtcggctcctctctttcccaccgccttcttccactactcttcaccctcccctcctcccccatcgcgaactcacaagagaaccaagtagacgagggagaaggagatggcgaagaagaaggagaaggcggtgaacgtgtcgggcaagccgcggcactcgaacgacgtcaaccgccccaatgacaagaagggcgcgggcggcggcgccggtggcgggagccggtccgcggctaccgtgcggcggctcaagatgtacaagacccggcccaagagggaccgc

SEQ ID NO: 1408 - DNA, 388 bp, Zea mays
  Clone ID: LIB3136-036-Q1-K1-E5
gccgccgccgcctgctctctgctgccgtcgtcatggggagaaggcctgcgagatgctatggccagatcaagaacaagccataccccaagtccaggtactgccgtggtgtccctgaccccaagatcaggatctacgatgttggcatgaagagaaagggtgttgatgagttcccctactgtgtgcaccttgtctcttgggagaaggagaatgtctccagtgaggctcttgaggctgcccgtattgcctgcaacaagtacatgaccaagtctgcaagaaaggatgccttccaccttctggtccgggttcaccccttacatgtccttcgtatcaacaagatgctttcctgtgctggggctgataggctccatactggaatgaggggtgcctt

SEQ ID NO: 1409 - DNA, 347 bp, Zea mays
  Clone ID: LIB3136-036-Q1-K1-E8
agacggcacaacccttgctgccgtcctggtcgccacacggccacaccaacccaacacctgtgcttcctccgctctcagcttaccccaccacaggcgagggaggcgactccttcctcgcggctacccgctccggccccgatcgcatctcctttgcacgccacggcccgcgcgcagtgtccaccggcacggccgtcctccgtgtgtgggggcgcatctggtgctagcttgccgggctagggtttggcttggcctcgtctaccgccccgtctcgtctgataggcacaggttccgcgcacgcgatcgtcgactctccatacgttgtgactgcttgccgtcccccgcttgct

SEQ ID NO: 1410 - DNA, 365 bp, Zea mays
  Clone ID: LIB3136-036-Q1-K1-E9
aacagcttatggaagtcatttcacagatgattctgaagtgtccacaagaagatgctaagtcgtggtacatattttattttcggcttgaagtttttttgcatttcaataagccatttccttttgaagaagcagcatctccagagcatgtcatacttgctgagtctatttgcaagattttgaggacgttttatcgcgttattgaagtcatttctgcctctacttctccgacagcaaacatgtacttcaatgagatatggaaagtgagaacagtcttgcaagaagaagcatcaagtgagcatgcagaaatcactgcgattgtctcataaatgcacgaaacattcaatgagtactgggcacattcatac

SEQ ID NO: 1411 - DNA, 330 bp, Zea mays
  Clone ID: LIB3136-036-Q1-K1-F1
tttacacgtgattatttcttgaggggtctcttagcacgagctctcgtatcaggtctctcgccccgcgcgccgccggcggcttgcttcgccgctgcccgtgcgccaccgtcctacccgtcgcggcatcatctcgactcgaggcgatgcacatcggaggtggatttggttgagcagcttgcgaggcatttctctaggcctctgaccaaggaacaaatggaggcaattatggagctggcaactcacgggaaggaaaaggaagggatcaagaagaagggcagcacggtgacacctctcaacgctcctatcattgaggctgctgagatgctctga

SEQ ID NO: 1412 - DNA, 419 bp, Zea mays
  Clone ID: LIB3136-036-Q1-K1-F12
cgaaagcgagccatgtggaggagggctttagttttggtcctgttcatggctggcgccgcgcgggtcgtttggctgccggcgccggctctcatcatggcgtgtggagcatcatcacccggcccatgttccagagcatgctgagccaccgtggcgacagcgggtgccagggcgccttctacacctacgacgccttcatcgaggccgtcagcaagttccccggcttcggcaccaccggcgacgagcagacgcgcaggcgggagctcgccgccttcttcggccagacgtcccacgaaaccaccggtggatgggcgactgctccggatggaccgtttgcctggggatactgccgggtgaaggaacagaaacagacggacccacccttctatggacgaggacccattcagctaactcataagtac

SEQ ID NO: 1413 - DNA, 387 bp, Zea mays
  Clone ID: LIB3136-036-Q1-K1-F2
agacaatttataaggcggcaaccatcagataggggtttccccagaattatatcttcatcaacgatggatacacggagtgatctctctgccattgagaatcaggttcggaagctgattgatgatttgaaaagtgattccatagatgttcagagatcagcagcatcagatcttcgttctctagctaagcacaacatggagaataggattgtcattgcaaactgtggggctgtaaacgtgctggttggtcttcttcattcaccagatgccaaaacccaagaacatgctgtgacagctcttttgaatttgtcgatcaatgacaacaataaaattgctattgcaaatgctgatgctgtcgaccctctcattcatgtccttgagactgggaac

SEQ ID NO: 1414 - DNA, 350 bp, Zea mays
  Clone ID: LIB3136-036-Q1-K1-F3
gcggtgattgctgagactggtgactcctgtttcaactgccagaagcttaagctgccagaaggctgtgggtatgaattccaaatgcagtatggttcgattggatggtcagtgggtgcattgctcggatatgctcagggtgcgaaccacaagcgtgtgattgccttcattggtgatgggagcttccaggttacagcacaggatgtgtcaactatgctgcgatgtgagcagaacagcataatcttcctgatcaacaacggtgggtacacgattgaggtggaaatccatgacgggccatacaacgtcatcaagaactggaactacactggctttgtggacgccatccacaatgg

SEQ ID NO: 1415 - DNA, 261 bp, Zea mays
  Clone ID: LIB3136-036-Q1-K1-F4
cgcgctttgtaacgcctacggtgcaatcagtccccgcggcgagcttgccctgcccctgacccggagtgctagttctcgacgttacgtaaggcttcttggccttgcgtcctacagacttcgttgctgatacatcgaggtattaaagaagctgcctgatttcgggtagcagaggtcgacgccgcctgcaacaatggacgacttctactggctcacggtgcttggcttcctattcactcacattcaactcaagcatggcgattt

SEQ ID NO: 1416 - DNA, 263 bp, Zea mays
  Clone ID: LIB3136-036-Q1-K1-F5
ggctcagtgagtggattgatgagtgtgagcgtgtcaacactgttgaaggcgacgatgatgcgtgagcttgccccatgcgatgaaactgttacctacaatcgtaatgtaatgtgctggtattctcgaatgccatagcccatagtcagccatggcttggaataacgtagtggctgactgatatgccagtaggcacctgtctagtacttacagaactacaaaaagtttgtactatacatatatggacaaccttataagtggcttac

SEQ ID NO: 1417 - DNA, 373 bp, Zea mays
  Clone ID: LIB3136-036-Q1-K1-F6
cggacgcgtgggtcatcggcgactccggcgtcggcaagtccaacatcctctcgcgattggggcgcaacgagttctgcctcgagtccaagtccaccatcggcgtcgagttcgctacccgcaacctgcagatagacgggaagactgtcaaggcacagatatgggacacggcagggcaggagaggtaccgcgccatcaccagcgcctactacaggggcgcggtcggagcgcttctagtctacgacatcacaaagaagcaaagcttcgacagcgtccagaggtggctccgagagctccggggtcacgcagacgcgaacatcgtcgttatgatggtcggcaacaagtcggacctgaaccacctcagatcggtccccga

SEQ ID NO: 1418 - DNA, 249 bp, Zea mays
  unsure (1)..(249): unsure at all n locations; Clone ID: LIB3136-036-Q1-K1-F9
cggacgcgtgggctttgagcacagatttttgttggtggtcttgaccctaatgtcactgaaggtatgttgaaacaagttttcaccccttatggggacgtagtccatgttaagattcctgttggcaaaagatgtggttttgttcaatatgctaacaggttggtctgatgatcccttattgcctgggtggattttaaatatccattcaacacgtttactcatgtatcacttctngtatatgcatttagatct

SEQ ID NO: 1419 - DNA, 348 bp, Zea mays
  Clone ID: LIB3136-036-Q1-K1-G1
cccgccgcgaggacgatccgccagcactggctgcgtcgctgtcgttgccgtcgtcactgtcggaggacgatggcgacgccatgccgcagccatcttcatacgcggtcttgccgcgccgggaaggcgagctggtgtctgcggaggagctgctgctggtgccgccgctcaacttcgccatggtggaccacggcgtgtaccgctccggattcccggacgcctccaacttgccgtttcttgagacgctccgactccgctccgtcctgtgcctgtgcccggagccatacccggaggctaatctggagttcctccgtgccccacgggatcaagctcttccagttcggaatcgac

SEQ ID NO: 1420 - DNA, 467 bp, Zea mays
  unsure (1)..(467): unsure at all n locations; Clone ID: LIB3136-036-Q1-K1-G10
ggaaaaaccgggtcgacggacgcgtgcgcctggtccaatcagggagagagctcaaacatggcactcgaacccgtcgctctcctgctcagcngcctcgtcgccgcgccgctcacggtcctcctcctcctcctcttcctcgtcgccggcaacaagaggcccgctcgtgctgcttctcccacgccgcgccactgcttgaggctgccgctgccgccgtcgccgcggggcctcccgctgctgggccacctgcacctgctgggctcgctgccgcaccgcgcgctggcgtctctggcgcgcgcgcacggccccgtgctgctgctccgcctgggccgcgtgcccaccgtggtcgtgtcctccgctgccgccgccgaggaggtgatgcgggcgcgggacctggcgttcgcgaaccggcccgcgagcgccatggccgagcgccttctctacggccgcgacgtcgcgttcgcgcccta

SEQ ID NO: 1421 - DNA, 281 bp, Zea mays
  unsure (1)..(281): unsure at all n locations; Clone ID: LIB3136-036-Q1-K1-G11
tctatatctcaacgccctcctttttttttttcttccttcaccttatctaacacggggctttaaaaaagaaccaaatctctttctcaaaacacttatcctttatttttaccaacccaatttcattttttttatcataacacacattagccatattttttttttttttatccatcacgnaaacccccaaaatcatctatttgtatcctattcattcaaactcccctttttaaagacgcttcttaccctactcttttatttttaacaaatctctatacctttat

SEQ ID NO: 1422 - DNA, 448 bp, Zea mays
  Clone ID: LIB3136-036-Q1-K1-G12
cgtcgacgtcaaggtgaacggcgccgtgcacaagggcatgccgcacaagttctaccacgggcgcaccggtcgcgtctggaacgtcaccaagcgcgccatcggcgttgagatcaacaagcaggttaatggccgcatcatcaggaagcgtatccatgtccgtgtggagcatgtgcagccctcccgttgcacagaggagttccgcttgaggaaagccaagaacgatcagctgaaggctgatgccaaggaccgtggtgaggtgatcagcaccaagaggcagcctgtgggacccaaacctggcttcatggttgagggtgctacacttgagacggttactcctattccttatgatgtggtcaatgatctcaaggggggttactagagagaattatgtatcttgagcagttcaagcgagctggcataaatacctatctgaatctttttgacaact

SEQ ID NO: 1423 - DNA, 429 bp, Zea mays
  Clone ID: LIB3136-036-Q1-K1-G2
ggctatcagagccgtacaagggtattgctgattgcttcaaacgtaccatcaaggatgagggtttctcttccttgtggaggggtaacactgctaatgttattcgttacttccctactcaggctttgaactttgcgtttaaggactacttcaagaggctgttcaacttcaagaaggacagggatggttactggaagtggtttgctggcaacctggcctctggtggtgctgctggtgcttcctctttgttttttgtgtactccctggattatgcgaggacaaggttggccaatgatgccaaggctgccaagggaggaggcgatagacaattcaatggtcttgtggatgtctaccgcaagacactcaaatctgatggtattgctgggctttaccgtggatttaacatatcttgtgttggatttattgtttatc

SEQ ID NO: 1424 - DNA, 360 bp, Zea mays
  Clone ID: LIB3136-036-Q1-K1-G4
gggttgttgaaggagcatgcaaggggaagcaaggacccgtggaacacatacacaaggggatgctgtttatttatgacaggcatcaccttgaacatgcaggctttatttgtgcaaaagcgcaatcttgccttcttgttggtggatcaaccggtggccatcgaggaaatggtatggacacagttgatgcacggcttggtgctttgagatcttcagcaagcattctgcaatctccaggaaggctgcccccaagaggacctaatatgaattatggcggaaggtttggaggcggccgtggttgtaggtgtgatgccttggtgggtaaatgtatcaaaattaaatctggaccttataaaggatatc

SEQ ID NO: 1425 - DNA, 435 bp, Zea mays
  Clone ID: LIB3136-036-Q1-K1-G5
gcaaggggtttgagattggcagtgggttcgctggtacggactttactggaagtgagcatggggatgagttctatatggatgaggctggaaatgtgaggacacgaactaatcgctcaggcggtgttcagggagggatatcaaatggtgaaattatttacttcaaagtggcttttaagccaacagcaactatcggaaagaagcaaaatactgtgtcaagggagcatgaggatgttgaacttttggcaagggggcgccatgacccctgtgttgtccctcgagctgttcctatggtggaatccatggctgcgctggtcctgatggaccagctcatggcgcatattgcccagtgtgagatgtttccgctgaaccttgccctacaagagcccattggctctgctagcaatgcatctgaactggcaccaaacctatcataat

SEQ ID NO: 1426 - DNA, 377 bp, Zea mays
  unsure (1)..(377): unsure at all n locations; Clone ID: LIB3136-036-Q1-K1-G7
ctgcgcctctacatttcttctctctctgctcctccgcctccgcctgatccatccaagacggggaatccgcctggtcgacctccgaaggacccccatttcaaatcgaaggccaaccctgggccttccaaaacctacccgcagcaggctggcaccgtccgtaaaaacggcttcatcgtcatcaaaaaccgcccctgcaaggttgtggaggtttctacctccaagactggtaagcatggccacgccaaatgccactttgtcgccatagacatattcaatgggaaaaagcttgaagatattgttccttcatcacacaactgtgacattccccatgtgaaccgcactgagtatcanctgattgatatttctgaggatggatt

SEQ ID NO: 1427 - DNA, 156 bp, Zea mays
  Clone ID: LIB3136-036-Q1-K1-G9
accctaacaaaactttgtctgcactttacttatctttcaccgagaaacgtaactaagaatactatagtttttatctctttttctcaacctttaaaagccaacttttaaacatttcttttttaaaccattttataatttccagaccaaaaaacatta

SEQ ID NO: 1428 - DNA, 198 bp, Zea mays
  Clone ID: LIB3136-036-Q1-K1-H1
cagaagccgcgcatcgtcatgggcaccatccgcttcgacaacttcatcatccaggccggcgccgacgcgtcgttcgtgcccaccgacatggccaccaccaactccaccgtgagattcacctaccgcaacaggggcacctttttgggaatacacgtcaccggagacccgttacatctcttatagagacatcacactctc

SEQ ID NO: 1429 - DNA, 307 bp, Zea mays
  unsure (1)..(307): unsure at all n locations; Clone ID: LIB3136-036-Q1-K1-H10
cgtctatcatctctctgttcctctctcgtttacttcctcgccttcctcagcgccggcgnagctgctgttagctgacaattggtatcaaaggtagttcccatcgagggcctagctcacttgtactacacacgccgcgccaaacactccggagccatggagccgaacctcaagttggcgattgaggagcagcccagcatcttgcgtgacatctctgaccgcctctcggcgcaagattcgcgctgggcagcgctggaatccgtcgtcgcccggcaaacgtcttccatctaacaactggagaccgccgcac

SEQ ID NO: 1430 - DNA, 358 bp, Zea mays
  Clone ID: LIB3136-036-Q1-K1-H11
aagagcgtggatcaccgggtgccggctaacatgagcagtgacacggcgagggtctcggtaggtgccttcttcaaccccgacgagaagagaaccgagaggctgtatggccccattccagaccccagcaagcctccgctgtacaggagcgtcacgttcccggacttcatcgccaagttcaacagcatcggactggacggccgcgtgctcgaccacttccggttggaggacgacggccctactcgtcttgctgctgctgcacaccacgtctagtcttgttttcgttccatcgaacaaacagttctcgtcgtcgtctcttttatttttcctgcaatctgaatttcgagttctccaaataaat

SEQ ID NO: 1431 - DNA, 200 bp, Zea mays
  Clone ID: LIB3136-036-Q1-K1-H12
cttgatatcaaaaaatctataccaacaacacaattcaactggtggaacaaactttaaccaaccgtatttaatcatcctaaattaatttcatagccctaaacatctaattatactgaacaaaaaagattttgaatatatctcatatgtttccaacttcaaaactccattaattacttataaattcactacacaaccaaatt

SEQ ID NO: 1432 - DNA, 392 bp, Zea mays
  Clone ID: LIB3136-036-Q1-K1-H2
cgagtgctccaaacaaatagagttttccttcaccgagccagacccagaagaaggggagcgcggaggtagaaagaccagagaagatggcgaccaccgagccggcggcggtgaggctggtgggctccttcgccagcccgttcgtccaccgcgccgaggtggccctgcgcctcaaaggggtgccctacgagctcatcctggaggacctggccaacaagagcgagctgctgctggcacacaaccccgtgcacaaactcgtgcccgtgctcctccacggcgacagggccatctccgagtcgctcgtcatcctcgagtacgtcgacgaggccttcgacgggccgactcttcttcccgcggaaccccacgcgagggcggacgcgcggttctgggcccac

SEQ ID NO: 1433 - DNA, 259 bp, Zea mays
  Clone ID: LIB3136-036-Q1-K1-H4
cgttctcgagtgctataaacaaatatatttttcctttattgacccacacccataacactgggagccggcggtacataaaccatacaagatgtcgaccacccagcctgctgacgagatgctcatggtctacttaatcagtccatacatccaccgctccgacgttgtccttctcctcaaaagcataccctacgagcttatcctttatgaccttaccaacaacatctatctacttcttacacacaaccccatacacaaactc

SEQ ID NO: 1434 - DNA, 320 bp, Zea mays
  Clone ID: LIB3136-036-Q1-K1-H5
ggtgttgcttgcaacttgaaggaagtggaatgagatagtggacgactgggtgcgcctgggcaatttctgcggtgacggccgtgcctctgttatgacagctgatggtgactccccacataaaatccaaggcagaagccaccaaagccctcgggtttcggggtttcagtattcttcaagcccacagaggtttaatggttcaacttcagagatggctaacaatgggtttgagtcaacaatggatgcgaaacgtagggccaaccctgtaccagcacatcataacttcaggcagatgaacaacaatcatcattctactactatta

SEQ ID NO: 1435 - DNA, 331 bp, Zea mays
  Clone ID: LIB3136-036-Q1-K1-H7
gaaaaaccgggcggacggacgcgtccgcccacatgctttcagtgcggaactgctttattaggggctcggtggtgcggtacgtgcttgtcccgctatgacggcgtggacatctacatccttcacgacgccaccaggagggaggcgcgcggaggctgatcctgatgctcacccgctcccttacctgctggctgctgcttcatccccgattgtacgaagcatgcatgtacggtgtgtggtagacagatgccccagcttagttctttggtgcttgcctgacatagatattccaggttggatgatgacctgaatcacctcatatattattgtcata

SEQ ID NO: 1436 - DNA, 438 bp, Zea mays
  Clone ID: LIB3136-036-Q1-K1-H8
gcgagatggagtggacgacggtggagacgagggacggcgcgaagctgagcgtgcggctgtgcaagccccccgcgtccggaacggggttggagccggagccgagggaggacgtggcggtggtgctggtgcatccctacaccatcctcggcggcgtgcagggcctgctgcgggggatggcggagggcgtcgcgcggcggggttacaccgccgtcaccttcgacatgcgcggcgcgggccggtccacggggcgggcgtcgctcacgggctccaccgaagtcggggacgtcgtcgccgtctgccgatgggtcgcagagaacatcaagccgcgcggcatcctcctcgtcggatcctcagctggggcaccaattgccggatctgcagttgataaagtggatgaagtgattggttacgttagcatcgggtacccctttggtctga

SEQ ID NO: 1437 - DNA, 328 bp, Zea mays
  Clone ID: LIB3136-037-P1-K1-A11
gtccgcgtgggcgtgcagtacctcgcggcgtggctggccggctccggctccgtcccgctggacaacctgatggaggacgcggctacggcggagatcagccgcgtccagaactggcagtggctgcgccacggagcggcgctggacgccggcggcgtggaggtgcgcgcgacgccagagctactcgcacgcgtcgtcgaggaggagatggcgagggtcgaggctgaggtcggtcccgacaggttccgaaaggtgcggttcgcggaggcgggcaggatcttcatctcgcagtgcaccgcgccggagcttgacgacttccttacgctggacg

SEQ ID NO: 1438 - DNA, 213 bp, Zea mays
  unsure (1)..(213): unsure at all n locations; Clone ID: LIB3136-037-P1-K1-A2
cggacgggggaccaggancagaagcggaaaagagatgctgcgcagagcgctgaccctccgaggggggaggcgaagacagggagggatatgaagaatgggccctccaccaggcaggagagagcaccgaggggaaccaaacgacggtctgagacgagagaggcatggcggccacgggcattcgggcagcacaaggagcggggaaatgcgggggaa

SEQ ID NO: 1439 - DNA, 404 bp, Zea mays
  unsure (1)..(404): unsure at all n locations; Clone ID: LIB3136-037-P1-K1-A3
tcgcggacgcgtgggttcggttttaggagacctgcgccgctcctccggccacgcgagcacgcgcggaatggtcgcccacaggttccatcantaccaggtggtgggtcgcgcgctgtcgaccccgaccgatgagcaccccaagatctaccgcatgaagctctgggccactaacgaggttcgcgccaaggcgaagttctggtactttctgagaaagctgaagaaggtgaagaagagcaatggccagatgctcgccatcaacgagatcttttagcgcaacccttccaccatcaagaactacggcatttggctgcggtaccagagcaggacgggggtccacaacatgtacaaggagtaccgggacacgaccctgaacggcgccgtggagcatatgtacaacgagatgg

SEQ ID NO: 1440 - DNA, 406 bp, Zea mays
  Clone ID: LIB3136-037-P1-K1-A4
cggacgcgtgggcgaaaaaggaacggagaaggcgtcctcgacgactgcccatggccggcggccggacctagccagggattgttgtctcctgagtcccgacctaccaaggcggaaagggagagggggcgctgtggcgtcaggaaataactggaagccgagggctgagggcgagcgcagagtcgggtggttatcgctttctttttcgttttctttttccggaggggagagtattagggatgccggttgctaggccggagccgcaggagccccgggtgatcgcccatgtcgacatggactgcttctatgttcaagtcgagcagcggaggaacccggcgctcaggggacagccgaccgccgtggtgcagtacaacggctggaaaggcggcggcttgattgccgtcagcta

SEQ ID NO: 1441 - DNA, 412 bp, Zea mays
  Clone ID: LIB3136-037-P1-K1-A6
gtgtgtttgtgcgtcttgtgccttctgaagttccagtcagcttcattcattcgcaaggtcggtgtctggagagaagaagagaaaatggcggcgctagagaggagaggaggccaccacactgctgctttcatcagagcagcgaaggcctccagtcctcctcctccagcgaggcagaggcagagccagaggtgctccaagagcggcagcggtttggacgacgacgacgacgacagagatgccagggccgcgccgcgttctccgcagaaggcgtccagacagaccaagctgcaagagcagaaacgcgaggccgagacggaagttcagcggcggaggagcgaggcacacaactcccctgggaaagagattcagcagctggagacgcgccctcaggatcagcaggtggtgcgcggcg

SEQ ID NO: 1442 - DNA, 326 bp, Zea mays
  unsure (1)..(326): unsure at all n locations; Clone ID: LIB3136-037-P1-K1-A8
gcagagcagaccagaggaagcgngcgngaaagccgcccanggcggccaccggggaggggacagccaccaggcgcgcgcgcgccggccccaccccacaccggcacgccacccccgccgcacccgcgcgccgcgcccagccggccagcggaccgccgacccggcaacagggagccgccgaggcacgcaaggccgagcgccagcagagccagagaccggccccaacaggaggaggaggaggaggaggaggacgcccgaaccggcgaggagaccggcgacaaagccgggcccccccgggacccccacgccgagggcgccaggacacccaa

SEQ ID NO: 1443 - DNA, 154 bp, Zea mays
  Clone ID: LIB3136-037-P1-K1-A9
tcctctagtcccaactcaccggattttttctctcctccaccgccccttcctcacgaggttcttctactactcctcgggacacacacccaatcaccaagcgaccaaacgcgcgccaccttgattgaactctaagcaagcaaggaaaggccctaat

SEQ ID NO: 1444 - DNA, 374 bp, Zea mays
  Clone ID: LIB3136-037-P1-K1-B1
ctccaatacttcatctagcagccgcttggttctgagatcaggccctgtaaagctcagggccggggcgaagcatatcctgataccaaatgagaatacggaggacgacaattctgcaccaatgtactcttgtgtgtcctttggcagcagtggtgggaatgtttcggcagcttatcagaataaaggagcaggttcccataggcatcagaataaaggagcaggttcccgtaggttctgatccaaaagctggattatcttgctcgttcgttttctggacagctgctgggcaagaggctgcatgttttgaaggaactgaagctgatgacctaggcaatgctgagatgaagatgcaatgcgcagttcggaggatacctgag

SEQ ID NO: 1445 - DNA, 409 bp, Zea mays
  Clone ID: LIB3136-037-P1-K1-B10
cggacgcgtgggcggacgcgtgggcggaggtgcaagcgggcaggccctagatgtagaggtccaagcgaaggagatattgaccaacaagaggaatgtcattcgcatcgtatcaggcttcacaggccgcactcctgagcaggtagagaaagacattgacagagatcgttacatgggccctctcgaggctgtcgattatggactcattgatggcgtgatcgatggagacagtattatcccacttgagcctgtcccggagagggtgaagcctaagtacaactacgaagagctgtacaaggatccacagaagtttcttacaccagatgtcccagatgatgagatatactagtcgaaaacgtgtattttgtgcgaatgttacgtctgttcttcagcaagcagatgtttttcgtcg

SEQ ID NO: 1446 - DNA, 286 bp, Zea mays
  unsure (1)..(286): unsure at all n locations; Clone ID: LIB3136-037-P1-K1-B11
gaaancccggcgcgagccacgcatccgttctaccttctccttacaagcctgttttccaccacctcctttaaccctatcggggcgctctttcataccgacattccctatcactatccacattctacgtaaaaaaaccatctttccaccttctcccaccccctccggacccatatatgccaccgtcatttgtcttgctattgcttgacccacatctgcatgcattcggcatttctcgtgcgtacatctctcgtgtaccgtttacctcttttccctcaccccgttcatc

SEQ ID NO: 1447 - DNA, 361 bp, Zea mays
  Clone ID: LIB3136-037-P1-K1-B12
gcaaaactcgggtgcacaaccgctgcccaacttgtcgacaagagctaggtgacgtcaggtgtctggcattagagaaggtggctgaatcacttgagctcccctgcaaatactactctcttggatgttcagaagtcttcccatactacagcaaactcaagcatgaatcacagtgtaattttaggccatacaattgcccttatgctggttctgaatgctcagttgttggggatatttcttttcttgtggcacatctgcgagatgatcataaagtggacatgcactctggatgtacatttaatcaccgctatgtcaagtccaacccaagagaggtttgaaatgcaacttggatgctaactgtttt

SEQ ID NO: 1448 - DNA, 454 bp, Zea mays
  unsure (1)..(454): unsure at all n locations; Clone ID: LIB3136-037-P1-K1-B2
ntccgcggacgccgtgggtcggacgccgtgggccggacgccgtgtggcggacgcccgttgggtgggaccggtggcctgtgcacatttcaaaagatggagaatcacatttaactttctcttcagcacgaatgaggaacccctgcaatgtnggatgcatcggagctacgttcatcgagggatgcccccaccttgcagccagtaccactgtatgtgctatcaaagggccagagtcattcaggccggccccttcggcagggcccaactacccttcacacatttggcttctgcgccttgggcacgtcacaagcccaggcccttgggccctgaacaaaccgaaaccctagcgatagtaaccctaagtggcgctgctcaaggctaaccaaatgtnggccctactcgatcccatccnccttgtcgacttctgtggaggggcggtccttgtgtgtgtgcaacg

SEQ ID NO: 1449 - DNA, 406 bp, Zea mays
  Clone ID: LIB3136-037-P1-K1-B4
gcgaccggaaagaacagcatccaatgtcttcagcgctccaagcctggaacaatattggggaggcctagaccagagatagaggtatagtagagcacacgcgccttgatatgttgtgtcttaatgatgatctgtcttgatatgttgtgtcttaatgatgatctgttaacgtggaacacttataaacaatataagaagatccaagatgatgattgcgtgcaactctagaagaattaataccctaatttccatagtttctttacccagtgaagtgttggcagcggcttagtgagaacggaggacatcattgtttttttcccttctttcgtcagctcggctcgagtgatggaactcatttttcctgtaccatgtgtaaaagcctgtgctatgtacacgttgttgtgcgata

SEQ ID NO: 1450 - DNA, 406 bp, Zea mays
  Clone ID: LIB3136-037-P1-K1-B5
aaatcccgcacccccaggaacgaagctgtcgggcaaccaccttcatccacgcgaggggccggttgacccaccaatccaccattgctcgctataagactccgtggtgccgcacggctccgccgccggcgaggcctcatctcggtttactataagagtataagtacgtctccgcaacaagctaatcttttttttgccccctccttccacgtccccaccctgccgtcgtcgctactcgcatagagattcgcgcggccgtgtcttgctcgcgcctgcccccttcctttcttgtcgtgccagcgcccagatctctcgctcgccggcgctcgggccagatctgggtgggggctcggaggcggagccgggcgcaggtttggtttgacccaaaggcgaggaggagagggaagaa

SEQ ID NO: 1451 - DNA, 154 bp, Zea mays
  unsure (1)..(154): unsure at all n locations; Clone ID: LIB3136-037-P1-K1-B7
ccggaaaaaaanncccgacgcaacccacccctnccncnntaactcactccaagcccgctttctctttccccccctccctcactcactcacgccctccttttaaatacttttcgacctccacacccaaattccaaaccctaacacccccaccata

SEQ ID NO: 1452 - DNA, 201 bp, Zea mays
  Clone ID: LIB3136-037-P1-K1-B8
gtggtttcggcggaggcgcccgttgtgttttcggaggaggcaaacgtcgtgcttttgccggtttcaaaggaggtggtttcctctcatgttctctttgtggctttgtaggacgcaatcttgttcgttttttttctttttttcttcctcgtctttttttattatcttctattcttccttttctttctttttctattttttctt

SEQ ID NO: 1453 - DNA, 415 bp, Zea mays
  Clone ID: LIB3136-037-P1-K1-B9
gcaagaaccaaagtggaatgaaaagatgaatcaattagcttgttgcaagaaacagaaggtaacttaaatggtgatgcaactccaaagggtgatgcacctacaagacccattggcaggaagaaggctaagcaactattacgccgaggtggtgctgatggttacattgaggcattggacaatttgtgggagaaaaagaaacaagctgatgtagacaaagaactgaagaagaaagattcaacgaatcactagaaattgagaaggagagacttgagatagagcgcacaaggattgcaaatgaacaaaaatgtatgcatatgaagagaatgctagagcctagaggaagaataatgaaagtgggcattagcggaatggatgcagatcagcagtcgtactacagaagcctacgaagtgagat

SEQ ID NO: 1454 - DNA, 416 bp, Zea mays
  Clone ID: LIB3136-037-P1-K1-C1
cggacgcgtggggtcgcagtgaaactacttgattggggagaggatgggcatagatcagaacgagacattgcagcactaagagcagctttttcacaagaggtctctgtttggcataagcttgaccatccaaatgtaaccaagtttattggagctataatgggtgcaagggatctgaatattcaaacggaaaacggccacattggcatgccaactaatatctgctgtgtcgttgtggagtaccttcctggtggtgcactaaaatcatttctgataaagaacaggagaaagaagctagcttttaaggtcgttgttcaaatcgctcttgaccttgccaggggattaagctatctccattccaagaagattgtgcaccgtgatgtgaagactgaaaatatgccttctgaccaaacgagaac

SEQ ID NO: 1455 - DNA, 389 bp, Zea mays
  Clone ID: LIB3136-037-P1-K1-C11
tgatagacttaagtttggtctttcatctatgcaaggatggcgagcaaccatgggagaggctcattcagcattgctagatcttgatagcgagacagcattctttggtgtttttgatggtcatggaggaagagtcgttgccaaattctgtgcaaaatatctgcatggtcaagtcctcaaaagcgaagcctattcaactggtgacctaggcactgctgtccatagagctttcttcagaatggatgaaatgatgcaaggacagagaggttggcgagaactatctgcacttggagacaaaataaacaagtttagtggtatgatagaaggattgatttggtctccaaggggcagtgattcaaataatcaacaagatgattgggcttcagaggagg

SEQ ID NO: 1456 - DNA, 410 bp, Zea mays
  Clone ID: LIB3136-037-P1-K1-C12
gccgcaaagagagggagagtccacgctctgaagaagcaacggcgacgcccccgacggcgagcacagctgcacagcaaactagcagcgccctcgtcagttccgtctcgttcccaacctctcccggattcgattcgattgacccgtccgctccaaatcgaatctaatcagcagttttggagttgcggaagggagaaagagagaggagaggggcatggatcaggtgctcaacaaggtggggagctactggttcagcaaaagggccagcaaggaaatcgactccatcggcgacgacatcagctcgatctcaagcagcattggagggtcagccaaatggatggtgaacaaaattaaagggaagatgcagaaagcactgccagatctcctcaaggaatatgacatgccagcagggc

SEQ ID NO: 1457 - DNA, 319 bp, Zea mays
  Clone ID: LIB3136-034-Q1-K1-D3
ccaggagcgcgagttctgtgcctgagcctctgctccacctgccctgcccgtgcgccccagcgccacgtccaccactcaggactcacgctgctcgctcgctcgctcgtacacgcgcccgcttcgcgcaggtgcgtgtagaacgacggaggcattccatttccgactgagccgtgtgtgtttggatcggacaacccctgccaaaaccgcgtgagccagcgctggtctgcctctgatcgagtgtgctgctgttggatttggttctggttttggattggctagggaaggaaccgtggtggggggagcggacggacatgatgca

SEQ ID NO: 1458 - DNA, 366 bp, Zea mays
  Clone ID: LIB3136-032-Q1-K1-A6
attcccaggcaggcaggtcggcgaggagggcatgaagaccgaagaccgagccgtgcgggggctggggacgggaacgggacaggaccccaaaatctcagatccttcctgcccgcccgcccgtgcccgtcgacgcgtcgttcttgccggccgcgccccacctccgccctctccttcttcaggggaatcggatacgccacaggctgcgcgatggtgctgtgggtcttcggctacggctccctcatctggaaccccggcttcgacttcgacgacaaaatcctcggcttcatcaagggctacaagcgcacctttaatctcgcttgcattgaccacagaggcacaccgggacattccggcgaggacctgcac

SEQ ID NO: 1459 - DNA, 255 bp, Zea mays
  Clone ID: LIB3136-032-Q1-K1-A8
gaggaaatggccaacctatctcagcaccatacttaccttcccatccaggccaaacacaacatcaacttcatcatgaccaccatcaaacgaaacatggatgtgcaaaactacgcctacgccaagcatatgctgcacctcatctactccaaggctcccattacaaaacaagactagctcactatcctcatccacatgaacatacagactagccttacaaacaaattcatcgacacgatagatgacccctcgcaattc

SEQ ID NO: 1460 - DNA, 303 bp, Zea mays
  unsure (1)..(303): unsure at all n locations; Clone ID: LIB3136-032-Q1-K1-A9
gcgcgcactcacacgcgcgctgacnaggtcttatgcattgcgcgtgggtaccacctacagccgcacgagccatattacaccccccgatggggtgccttttcttcccagactaggaaaccaaactatccagacgacatccattcccaacttcaactgcgcctggactcctatcccgaaccctagccaccaaaccggacgctatagaccagccatcgctccatacctcgcgctcatgctcctcctcatactcggactctacaacgtccactaccactacgacacgctcttcatccacaagcacaa

SEQ ID NO: 1461 - DNA, 416 bp, Zea mays
  Clone ID: LIB3136-032-Q1-K1-B1
gcggcttggtctcaaaaaacgttgatgtattctcttttgggattgttctctgggaactgctaacacgagaagagccatatgcagatttacattatggtgttataataggtggcattgtgagcaacactctacggccgccagtgcccgactcctgcgaccccgagtggaggtcactgatggagcaatgctggtcaacagaaccatctgagcggccaaacttcacagaggttgcgaataggctgcgctccatggcggcatcccagaaggtacaacaacactaagggaccatcggcacgcagaagttgtaccagggcagcagtcagtcaaacttgcaggttacatccatgggccgccaattcacgccatccgccatatatgcctaggatctgttcataacccttcatttgttcgtatat

SEQ ID NO: 1462 - DNA, 232 bp, Zea mays
  unsure (1)..(232): unsure at all n locations; Clone ID: LIB3136-032-Q1-K1-B10
cggacgcgtgggccgcaacaaaccaaacccaaccgcaactgcaacacagaggcatntgggtncgcctgcacgccgnncgccccaggccccataccctcctcgatccagcagtgattcgccgggctcccggcccggccatggatttgctggcgtccttggccgccgaagagcggtggctgttcccggcctttctcgccatgtacgccgccatctactgcgccggccagctcgt

SEQ ID NO: 1463 - DNA, 371 bp, Zea mays
  Clone ID: LIB3136-032-Q1-K1-B11
cgactcttatgtcttatctgagtcgagcctgtttgtctacccatacaagattgtgagcgagagctgtggaactacaaagcttctgctcgctattccgaggatccttgaacttgctgaagagctcctgttgccactcgctgcagttaaatactcccgtggaacgttcatattccctgaagcacagcctttcccacacaagaacttcgctgacgaggttgccttcctgaatcgcttcttcagtggcctcaagtccggtggcaatgcttatgtgattggtgactctgcgaagcccgggcagaagtggcacgtctactacgccgctgagcaccctgaggagcctgtccttactctggaaaatgactgggctggac

SEQ ID NO: 1464 - DNA, 414 bp, Zea mays
  Clone ID: LIB3136-032-Q1-K1-B2
agtgtcaagacaaagcttttattaagagatggttcattcacgcgttgatatctgtcataagtatcatagaaaatctcatctacataaccaagtagatcaatctcaagctttagctcagactggggattatcagtctttgcttctgcagacacaaatccaatgaacttccctcttggtgcaacattgtgggtgtatgaacataaaacatacctagaaagagaataccgacagaaatatcataactctgtcaagaatagtgatatgttcgataaaagtgtttaagtaaatagcatgagagaaggcctcatatgtctgatttgcgtccaagttgcttatgaggcacaatcattcgaatcgagtcggactcatttgtattaaggattgggtagctcatgatagcaattgacaaacaac

SEQ ID NO: 1465 - DNA, 460 bp, Zea mays
  unsure (1)..(460): unsure at all n locations; Clone ID: LIB3136-032-Q1-K1-B3
cacgcgtgcgntcttctttacctgccgcacccgcacagccactttcaatcacacaccccacatcacaacagctggctgtgcatctccgcctcgtcgccgtcgtctgcctgcacaaccttcttcctcatctctcttcttacgctgccaccctcccagcaccgagggaagggaagcccaagaatctccgtcccgctcccggccgccgtcccttctcataatcgcatcggatctgtattgggttttcagtaaggagcagaaaacgccttacggaatgcagaaagatgtgcttgcacgtcgaagagctactttgtgagggacttggcaggaaagcacgccatactcttcattctctgccagctcttgatgacttcgaagctcaagagtacacgtatctncacctcgtgctttcgcacaatggggttcgacgtggcggctcaaccgtcttcttagatcaccatct

SEQ ID NO: 1466 - DNA, 425 bp, Zea mays
  Clone ID: LIB3136-032-Q1-K1-B4
gactgtcggattccccactcgccggcgacaaccgccgcgcccgatccgtctgctaggtcttgcaccggcgggctctggccatggctgccgaagctggcccaatctccaaggtcctcatcgtcgtagcgatgcagacggaggcgatgccgctcgtccacaagttcaagctcgtcgaggcgcccgcccacgaatccacatttcctaaaagtgccccatgggttaggtaccatggcaactacaaaggcctccacattgaccttgtattgcctggaaaggatgctgttttaggagtcgacagtgttggtacggtatcggcagctcttttgactagtttttccattcaaacattgaagccagaccttatcattaatgcttgcactgctggtggcttaaggccaaaggggcaagcattggagatgtattcc

SEQ ID NO: 1467 - DNA, 187 bp, Zea mays
  Clone ID: LIB3136-032-Q1-K1-B5
gcccaacatgctcatgtggctgccagaacccaagtgggtcaaactgtgtgaatgaggattcaggtaatgtacaagctgcaattgatggtcctggcaaatggactggtcagccccttgtacaatgcacttcccacatgtgcccgataagaatccactggcatgtgaagctcaactacaaagattactg

SEQ ID NO: 1468 - DNA, 386 bp, Zea mays
  unsure (1)..(386): unsure at all n locations; Clone ID: LIB3136-032-Q1-K1-B7
tataacttccctttttcgttttttcacaacaaacngcaaacacgagaaggttcatattcaaatttacattatccacttataataagtagcattctaaacaacactctacggccaccagtgcccgactactacgaccccgaatttatgtcactcataaaacaatgctcgtcaacacaaccatcttaactgccaaacttcacaaaaatttctaataatctacactacatcgcctcataccataaagttcaacaacacttaaggaccatcttcactcaaaatttttaccaaatcaatatacaatcaaacttgcaacttacattcactttccctcaatttactccatccaacatatataactaacatctgctcaataccctttatttttt

SEQ ID NO: 1469 - DNA, 458 bp, Zea mays
  unsure (1)..(458): unsure at all n locations; Clone ID: LIB3136-032-Q1-K1-B8
gaccacgcgtncgggagcattgggtctacttcttctgcatcgttcttgaatgggatgcctatgacccatggcgagagcgctggatccaagtgcctaagatgccncctgatgaatgcttcatgtgctctgacaaggaatcacttgcagtgggcactgaactgcttgtgtttgggatggcacgtattgtcttcagatacagcatcctaaccaattcatggaccagggctcatccaatgaactctccgcggtgcctgtttggttcaacaagtgttggggaaaaggccttcgttgctggaggcactgattctattggcaacatactgagctctgcagagatgtatgactctgagacacatacctggacgcccctcccaagcatgaatagggcaaggaagatgtgttctggggttttcatggatggcaagttctatgtgataggtggtgtggctaacaacaac

SEQ ID NO: 1470 - DNA, 408 bp, Zea mays
  Clone ID: LIB3136-032-Q1-K1-B9
tgtttttaatcatatttatgtgatggttataactcgagttttcacaagtcgtgcttgtgccgggtatatgggggtgaggcctctacctcctgaaaaaggtgtgttcccattggatcacttacatgaatgcgacttggagaaaaaagattatcttggctgcctgaaatctacaggattccagtctgaaaaatgtccgcagttatcaaaaaagtatttggagtgtcagattgagagaaacttgatggccaaacaagacatgtcagagcttgggttcagaactgtggacgaagcgggtacatgtcctgacaagaacagcaaactggagagcccttctaatcagccaaaagattaaaaaaatacttcgttggctttgatgtagcttttgtatgtatcttcatcccggagatc

SEQ ID NO: 1471 - DNA, 385 bp, Zea mays
  unsure (1)..(385): unsure at all n locations; Clone ID: LIB3136-032-Q1-K1-C10
gcgtgtatatacacatatctctttctatgcttttttatatatacactatgnctatnntcccgcccgactatttatttataaaagccaaaactccttataatttttaaattggtaaatatttcttaacttttaactcttcctctttttcacgaaacaaactaatacacacatttcaatgttattaaagatttatctacaaaatcattaattaattaaaaccaaaacccattttacttttacttaattaaactaaattctactattctcttttctacacataacctttaatcttttaaaatacttaataaatttaacctcattcctttataaaaaattatttctttttttttaattaacattcatccctttttttattataaatttt

SEQ ID NO: 1472 - DNA, 162 bp, Zea mays
  Clone ID: LIB3136-032-Q1-K1-C12
ttttccctttgtattttggtgctactgatccgcttctcaactctgatcatgacaagggttacttctatggaatgcccatttataaatgaaggcaacttagacgacatggagatattattcacatgactttctgcgcttactatatttttcattgaaaggcgg

SEQ ID NO: 1473 - DNA, 418 bp, Zea mays
  unsure (1)..(418): unsure at all n locations; Clone ID: LIB3136-032-Q1-K1-C3
acaacagacgtncttnctcgtactccaggtctttgacatcgtctacacgaccttcaatgaacagcggggcgagcccggaccatagccaccaccgatggctagcatcgacctgaaactgataacgctgttcaccgaggtcgacagacgcgaccagatcagccagaacagaagtgcgctctatcagcctggctttacggcgccatcgtggagaggctgcacagatggatgaagcatgaccacaaccctacgcgagacgtagtggcggcttacgatatccgtgcgttccctcgccgacatgtccatgcgacgaatgatgtgcacggtgatcatacctgtggctcaactaaacagagggctccggactaccatgcaatagactggagcgcattctctaatagtacttccgactgtgtttaca

SEQ ID NO: 1474 - DNA, 335 bp, Zea mays
  unsure (1)..(335): unsure at all n locations; Clone ID: LIB3136-032-Q1-K1-C4
aaaagattcgatgtantcactgactgtttggatcatcattttgtgaaggaaaatggccatgagagtgtgacaagaggttggttgaagaaagtgcgactggaatggaacatcctgcaaaatgacctaccagatggtattcatgtgagagtttatgaggaaaggatggatcttctgagggcttgcatcgttggggcacctggaacaccttaccatgacaatctttttttcttcgatattttctttcctcctgattacccccatgaaccaccttctgttcactatcactctggtggtctccgcctgaatccaaatctgtatgagtcgggaaaagtgtg

SEQ ID NO: 1475 - DNA, 309 bp, Zea mays
  unsure (1)..(309): unsure at all n locations; Clone ID: LIB3136-032-Q1-K1-C8
cggacgcctgggttgagcctttgatgattgaatctcttgagaagattganaaggacagtaagggaccacttttgaggagcgacaagaaaaacatggccaccctcttggcagagtttgacaagattaacaaaaagcttggctttcggaaggaggatctttccaagatcgaagaagagcttgaattggaaattgccaaaagtgagctgactgaacttaaaaaagaatgcgttgaagcaatggagactcaactcaagaaggaggagtttcaagatgaagaaatgcctgatgtcaagaaattggacattaaaa

SEQ ID NO: 1476 - DNA, 436 bp, Zea mays
  Clone ID: LIB3136-032-Q1-K1-D11
cggacgcgtgggaatcaagatcatcgtttacacaaatattgatgtggaatcagctgagggggagactgaaggtttggttgcgaaggacaagtttcatgtaagttacagaggtggaaaactaaacagctccttatctcaggcgctgaccaattgcctgcgttattacctccgaaagcctgagacagatgaagacagctattgattgttgtgtttgtcgaaccttcctatagtgcattagaatcagaaactttggcttcagttccttcgctatgggccccttgtactgctgcaaatggagttttccattgtagctgataaagtgccgacaaggtgcatccatatgtgcataggtggcactgaatcggggctcactggaccagtttgatattgtaataatatatatacagctgggagcaacataatttacgtttcgatc

SEQ ID NO: 1477 - DNA, 384 bp, Zea mays
  Clone ID: LIB3136-032-Q1-K1-D12
cggacgcgtggggtcaactcggacttttacatggtgaaggccacgctgaaaggatcggggagggcaagggtcgagaggtccgacgatccacttgacaggatgaccacatcggaggccatcaggaagttggttgcatcctacagcaggtcccagtactactacgccgcaagggagaaagtgaatgacatctcgcgaatgaaaggaaccgtgctggattccggtggcagccaggccagcttcctgatgcaggcctgcaccctgaccaagcgctccttcatcaacatgtcgcgggacttcgggtactactggctcaggctcctcatctaccttctcgtcaccggttgcatcggcacgatctaccttgacgtcggcaccaaatacaca

SEQ ID NO: 1478 - DNA, 445 bp, Zea mays
  unsure (1)..(445): unsure at all n locations; Clone ID: LIB3136-032-Q1-K1-D3
ggattttggagtgcaatggcttcaaatgtaaccttccagtcaaggaatgtgctaagcaagaaacttatggtgaagaaagaggaatctctcgacaacattaatctattttcgataattacagtcatgtcattcttcctgttggccccggtaaccttacttacagaaggtgttaaagttagtccagcagttttgcagtctgctggtttgaacttgaaacagatatacacaaggtcattgattgctgcatgctgcttccatgcataccaacaggtgtcatacatgatcctcgccagggtatccccagtcacacattcagtgggcaattgcgtcaagcgtgtggtggtcattgtgacctcggttctgttcttcaggacccctgtttctcccatcaactcactcggtaccgggatcgctcttgctggagttntcctatactcgcaattga

SEQ ID NO: 1479 - DNA, 420 bp, Zea mays
  unsure (1)..(420): unsure at all n locations; Clone ID: LIB3136-032-Q1-K1-D4
attgaatcanataatcccgacgccgtccccttgcacatgcaacatccatggcgactgcccgcgtgcctgtcgctccctcctggtcccggctcaacaatcctatccacggcttnccgcctncgtccgcctctgcctctctcatcacgaggcaacctccaccggccccaagcggcaccgacgcgccgccacttctcatcctgccttttctgcagccgcgcggggtcgtgccaagaagattcccatcgcggacaccgatgagcccgccgccggagtccgcgtcaccgatcacggcatctcttaccgcctcgatggcgcgccatttgagtttcagtatagctacactgaggccccacgcgcacgccccgtagcgctccgtgaggccccgttcatgccgttcgggcccgaggccacgccacgccc

SEQ ID NO: 1480 - DNA, 261 bp, Zea mays
  Clone ID: LIB3136-032-Q1-K1-D6
atgttcatttctggtttcctgctctactcgataataatactctacttctcaagcctgggttacattgatgttatttgggaagaggcacttcgtaagctggcgcttgttgcactagcagcaacactagtggagtgcgttcctgtgaccgaagttgtagatgacaacatatctgttcctttggccaccatgctcgtagctattctcttgtttagctccaaccgcacaataattaattaatactactagtgcattatttaagac

SEQ ID NO: 1481 - DNA, 472 bp, Zea mays
  unsure (1)..(472): unsure at all n locations; Clone ID: LIB3136-032-Q1-K1-D7
ccgggnccgacccacgcgntccgacttganggctgtgaaaacacttgatagtacagtttttaatgctaanntgaccaatacttgcccggcatgtgtgtatatgttgatgacacgcgcgcaaaacttgttgggcctgtatttagatggtgatgccagttgtcacttatctaacttccgggctcgatcgcatggttatgcttgctaaagcactagagtatgcagattttaacaattttgaccgtgtacgtgtccccaaaattcgatatgctgggatgcttcagtatgatggtgagttgaagcttccaagtcgctaccttgttttcccaccagagatagatagaacatctggggagtacttggtgaaaaatggcatccgcacctttgcttgcagtgagacagtgaaatttggccatgtcacatttttttggaatggtaaccgctcgngatactttgatgaaactaangaagagta

SEQ ID NO: 1482 - DNA, 304 bp, Zea mays
  Clone ID: LIB3136-032-Q1-K1-D8
gggaaattgaaaaacaatggtcttcaatataattttttttttaaacaaagcgcaaaacaacaaccccccgcttaatttatataaatctctccacaacattaatctattttcaataattacaatcatttcattcttcctctttgcccccctaaccttacttacataatcttttaaacttattccaacacactttacattcttctacttttaactttaaacagatatacacaaactcatttattccttcatgcttctttcattcataccaacacctgtcatacattatcctctccattgtattccc

SEQ ID NO: 1483 - DNA, 303 bp, Zea mays
  unsure (1)..(303): unsure at all n locations; Clone ID: LIB3136-032-Q1-K1-D9
ggtcnttttagtattaaagatgttttctatatttttatgaccccgcaccacaaacgccggcgggtttacattcaaaagttctacaaccttctttattgacgagctgcctgccaatgttgctgaccttctttcatcaatttcaagaaaaaacaaatcaaaaaagggttgtaaggaacctcgtaaagcttgattttgtcgaaatacccttggaaaaggggttataaagaccgttgggtttctatttttaaatccttgtcatccacaatttgtgattttttatcctttataccatgttttggaatt

SEQ ID NO: 1484 - DNA, 239 bp, Zea mays
  Clone ID: LIB3136-032-Q1-K1-E11
tttacatagacttacattcacttcttatgttagggggcattccagcccttcagacggctggctttttatgcactattccatactcaacctccaatttcctgagcccttctgataacgatttccccttgaatcaaccgctacgcaacgcttgctgcttaaatgaatccgattatcttccatgtgcaaaaaatgcctaacaggcaaattaacaatttgcaacctttgttaaagtttacaaa

SEQ ID NO: 1485 - DNA, 452 bp, Zea mays
  Clone ID: LIB3136-032-Q1-K1-E2
gcgcttgcccacaacaagtcggatattgaaagaatgttcagagctgtgattgacaaatttgctgagcgtggggtgcgagcacttggtgtggcttaccaggaagtgccagatggtaggaaagagagtcctggaggaccatggcagttcattgggctcttgcctctttttgaccccccgcgccatgatagtgcagaaactatcagaagggcactcaatcttggtgtcaatgtcaagatgattacaggtgatcaacttgctattgggaaggaaactgcacgtcgtttgggaatgggtactaatatgtacccttcttctgctttactcggacaaaataaggatgagtcaattgcttctttgccaattgatgatttgattgagaaggctgatggctttgctggtgtctttccagaacacaagtatgagatcgtgaaacgcttgcaagcaaagaaaca

SEQ ID NO: 1486 - DNA, 403 bp, Zea mays
  Clone ID: LIB3136-032-Q1-K1-E3
gcgtgcggatgtgccaaggaaatgacaaagctctctgtatctctgaaatcatccccgagatggacatgtgcgaggttgactttgaaccctgtggctactccatgaatgcgatccatggctctgcattctctacaatccatgtgacgcccgaggacggtttcagctatgccagttacgaggttatgggcttggatgccactgctctatcttatggtgaccttgtcaagagggtcctccggtgctttggcccctcggagttttccgttgccgtgaccatcttcggcgggcgtggccatgccgggacatggggaaaggcactaagtgcagaggtctatgactgcaacaacatggtggagcaggagctgcctggaggcgggctcctcgtataccagagcttctgcgc

SEQ ID NO: 1487 - DNA, 498 bp, Zea mays
  unsure (1)..(498): unsure at all n locations; Clone ID: LIB3136-032-Q1-K1-E5
cggaannnnccgggncggacccacgccgtccgatcgacatgagcgatccgcgtccgagggcggcggttaagactgtcgcacgatctaccgccatctcgccggggccggggccaaggggnctcgtcgcctactatccagaagtaccgtcgacgaggcccgccaagaaggaggtcaaggacatcttcacccggtacgaccgcacccttctcgtcgccgaccccaggcgctgcgagccgaagaagttcggtggtcgtggcgcccgcgccaggttccagaagtcctaccgttgagcgctcggctgcccgctcttgccggacagttgcctgtgttgtcccaacttgccagatcgatgcctgtacccgtggcttaattttctatcatcggagctacttatgtggttctataactagatgctgttttaccttcaacttgtgctgttgtaccttcatatttggactttttaagccttgtgtcggacgcctttggcattgaaatatg

SEQ ID NO: 1488 - DNA, 401 bp, Zea mays
  unsure (1)..(401): unsure at all n locations; Clone ID: LIB3136-032-Q1-K1-E6
gactacaaaagctggattacattcancttccatctctctcttaaggaatcaatgaccccgcatctaatatgcaaggctactctccttcatctctactggacaacttttaatggttcgccggcttcaccaaacattatttcattatctacatccaccctaacaataacttaactctctccattaatgaaatatccaacccctttatacataccaacactctctaataaacctctctataaaatttttaccccaccttataaatctgtcgcctcatgatgtgggtgcaacccataaaaaactctcgtgtggtttcgaaccgaaaattttcttttttttttcctcaccataggttctttaggcatactcttcatcacccgtgctaataacacattttttcattt

SEQ ID NO: 1489 - DNA, 354 bp, Zea mays
  unsure (1)..(354): unsure at all n locations; Clone ID: LIB3136-032-Q1-K1-E8
cgcgtgcggaaacactanaaatttttcctccanttttattttcacggacgcacctacttcnnagagcagccggcgattcttatacacatgccatctcccaaaaaaantattccaaaatccagaatgactaccattcttttagccacttaactgaatctttcccacattcaaccctccaatctttaaatcttattatactcattgaatgtacaaaaagcaatgaattgacatgtaaaatattcttcaatacccactttctgtcttatattaaaaacaacccaaacccatattagcaacctatatctattattttaaagacactttcagccattgatgaaaaaaatcttattcccc

SEQ ID NO: 1490 - DNA, 379 bp, Zea mays
  unsure (1)..(379): unsure at all n locations; Clone ID: LIB3136-032-Q1-K1-E9
gggcgacagcgtctctgttgaagcttttatgccgaccagtggtgctgccatggatacgattcgtactgctttggaggggcgcggggcaagcgaggatgactcancagttgatgtgagtggtggcttggatgaggcggcgacttccggtttggaggactccgaagccgcatcggaaggctccactgcacaggatttctacaccgacgttgaaacggagtccagcggctccagcagcgacgagcagagagctgagttcggcttttccttaccaccaccggaacaagttagcaacaaagcggattggaaaaatgacacttcagaggtgaaaagttctgataggatgattccaatagctcaacggacacgtgtgttatcgtca

SEQ ID NO: 1491 - DNA, 322 bp, Zea mays
  unsure (1)..(322): unsure at all n locations; Clone ID: LIB3136-032-Q1-K1-F1
ttgcataccattccactcttaaattataccaacctttattactcncctcgacacgctctattaaataccaactcccaacccaaaccnnatcccaaatcntcacatcncacccactccgctcggacccttcgttcaccccccatcatccatccatccatccatccagccatttgcctcaaagactttcttaaccacccccaggacaaccttcttccgtcgttcccgctcctactaaccatccttctaatccttgccctcatcatgggcctcatcacgctcatcatatacctattggttcaacccacacacccgcgcttatacc

SEQ ID NO: 1492 - DNA, 317 bp, Zea mays
  Clone ID: LIB3136-032-Q1-K1-F2
cggacgcgtgggtgccactacgctgacctcgctcaggctcgtcaccagcagcagaacctgggggccctggggtgtcgagaacgggacgcgtttctccgtcacggcgcccatcggcagcagcatcgtgggattctatgcgcgggcgggaaccaggctcgtcgatgctatcggtgtttacttgcgtcagatttaattcgaataatagcaggggagctactgctagctacgtacctgctccatcctccattatcctttatttcaattcgctcatcatcgtcgtgtgtaaattaaataaataaagctcttgtgcccatatt

SEQ ID NO: 1493 - DNA, 249 bp, Zea mays
  Clone ID: LIB3136-032-Q1-K1-F3
gcgcgacaacttcggcatcaagatacctatgccgtttttcattgactcgatcgaggggatccagtcgaggagctactgctgcagtaacttccgtcattacaaagatgccacggccattgtcaaagccttcccacacataaaacgcactgtgctggccctttccaagatcattgccaccaaaccggccgatggagcgaagatatactatgtcgaacgtgacatgttcattttcatttcacctgctcaaac

SEQ ID NO: 1494 - DNA, 432 bp, Zea mays
  unsure (1)..(432): unsure at all n locations; Clone ID: LIB3136-032-Q1-K1-F4
ggcgaccacgcgtgcggcggtgaagcaagccaattcggtcaagccggatcagggatttggagctttccacggtgtgaagggcagtgtcgctgctggatttgggagcttccacagtactgatgctggatctggtggttttcaaagcgctggcacgaccacaccttctaactttacaccaccgccagcaccagcttcaatgcctactcctgtggctgcagcagttaactcaagcatggatcctctggataatctttttgcttcaaccacaagtgcaccgactgcagctgccgctagtaatggtgacagtggcggtgacatgtttggtgagatggatggttgggtcnatgtggaagcacaatttgctggtggtgatagtggtggcacaaccacaaagctggatgggctgccacccccaccattcggattgacaat

SEQ ID NO: 1495 - DNA, 313 bp, Zea mays
  Clone ID: LIB3136-032-Q1-K1-F8
gctagctctaacaaagcacttgccatctaccgtccgccgcattccaaacagcccgacgagctagcggagcggcaggcacctccctcctcaaagaacatggcccgcatgcagcagttggcagtggcgacggcggccgtggtggccttggtgctgctggcggcggcgacctctgaggcggccatcagctgcgggcaggtggcgtcggccatcgcgccctgcatcttctacgcgcgcggccagggctcggggccctccgccggctgctgcagcggcgtcaggagccttaacaacagccgccgcaccaccgccgacc

SEQ ID NO: 1496 - DNA, 433 bp, Zea mays
  Clone ID: LIB3136-032-Q1-K1-F9
gcggcgccaaatcggacaacaagatgtgcttttattgcaacgccaagaacccgacgtggccgtccgggacctacggcgtcttcctctgcatcaactgctcggcggcgcaccgcagcctcggcgtccacgtctccttcgtcaggtcaacaaatttggattcatggactccagaacaactgaaaatgatggtctatggcggaaataaccgtgcgcaagctttctttaagcagcatggttggacagatggtggaaaaattgaagcaaagtatacttcaagagctgctgacttgtaccgacagttgcttgctaaagacgttgctaaaagctctacagaagatggaaacaatagttggccatcttccccagttgcagcatcccaagctccaaatcaagctgctgcattttcacatctcaagctgacagacgtgtcaaa

SEQ ID NO: 1497 - DNA, 173 bp, Zea mays
  unsure (1)..(173): unsure at all n locations; Clone ID: LIB3136-032-Q1-K1-G2
cggacgcgtggtccnncgccgccgaaggactgtatgagaagagggtacggccgtcttctcgccgccatggtccacgagaagaagctgtccaaccctatgcgggagatcaaggtgcagaagctcgtcctcaatatctccgtcggggagagcggcgaccgtctcacccgcgccgc

SEQ ID NO: 1498 - DNA, 281 bp, Zea mays
  unsure (1)..(281): unsure at all n locations; Clone ID: LIB3136-032-Q1-K1-G4
gcngggacgcctnggcggacgcgtgggcccgtgctttgctctgctctcgcctcgcacggactcgcgctaagggatggagaccatgtcggctctcncnaggaccgcnccnccccttgctgggaccattcgccggccgtcctgcgcgctgcggccgacggcgtccctctccttcgccgccgcttcaacgacgccccgcggccggctcgggctggggctgagcacggcgcccgcggggagcgggaaggcggccaaggctcgcgccgtcccgcagcgcatcgtcg

SEQ ID NO: 1499 - DNA, 407 bp, Zea mays
  unsure (1)..(407): unsure at all n locations; Clone ID: LIB3136-032-Q1-K1-G6
gcgcaataagcntgaaccatggcggacgagtactgtcgcagcggctacggcaggtccggcgccgcggacgagtacgacagcggctacaacancaantccngcactgatgactacggccgtggcgaaggtggctacaacaagtcgggcggcgatgacgactactgccgcagcggcggcgatgggtacggcaggtccggcggcgacgactacggccgtggcaccggcggcggtggctacaacaagtccggcggcggcgatgggtatggcaggtccggcggcgacgactactgtcgtggcaccggcggcggcgggtacaacaagtgcggcaacgacggctactacagcgggtacaacagatcggacaccaccaacgacgacgaatacggtcgtggcaccggcggcgggta

SEQ ID NO: 1500 - DNA, 243 bp, Zea mays
  Clone ID: LIB3136-032-Q1-K1-G9
atacatataaaccttatccaattcccaaacaaaaaaactttcaatacaaaataactattaccaaaataatcccatctacggaaaactcttcaaataacattactttctaaaaaaacaacaaatcatactctttacaccttcaccatctccccaattacatcctatttagcatactatcacccttgacattcaaaaaattcttacaaattgactcattgtttctcatacctgcatgcaatattt

SEQ ID NO: 1501 - DNA, 342 bp, Zea mays
  unsure (1)..(342): unsure at all n locations; Clone ID: LIB3136-032-Q1-K1-H1
cgcgtgcgcgcgaaggcacctatcagcctccactcgcccatctgtataacacgccaagcaactgnatacaccgccggctctcccctctatgcccgacacgacaacgccctgcacatgcagataaacctgttccaatggccaaacaaaaagacggtctagacaaaagaactgctacgaacatcatccgatctacggaaggctctgcaaagagcattactttctagaggaacaacatatcagacgctgtgcatcttcaccatctgtcgaatgacatcctatgtagcatactatcactgttgacattcagagaatcctcacagattggccttgtttctcatacct

SEQ ID NO: 1502 - DNA, 260 bp, Zea mays
  unsure (1)..(260): unsure at all n locations; Clone ID: LIB3136-032-Q1-K1-H11
tggtcctctttaacgtctgcgacagctacgtgcggcgaccggaccaggcagaccgtgtcatcggcaccctccttggatccctcctccccgatggcaccgtccacgtccgcaactcctacgtggtcccccacagcgagtcggccgaccaggtcgncatcgacattgactaccaccataacatgtacgcctcgcaccaaaaggtgaaccccaaggaagtcatcgtcggatggttctcgactggatttggtgtttctggggga

SEQ ID NO: 1503 - DNA, 375 bp, Zea mays
  unsure (1)..(375): unsure at all n locations; Clone ID: LIB3136-032-Q1-K1-H2
ctacaaattcaaaccaaaacgtgtcaaaaactgttggattgaccatgcttcaagctcanagcatgtggatgagggtggcattctcggcccaagaactaanaaagaaagagttgtttcaactgaagatgctgtgtgctgcatctgtcttacgaagtatggagatgatgatgagcttcgtgagcttccttgcacacacttctttcatgttcaatgtgtagataaatggcttaagataaatgcggtgtgcccactctgcaaaacagagattgggggtgtggttcgatctttctttggcttgccatttggccgccgccgtgtcgataggatagcggcaagaggtgtaactagctcaagattcagtgtatagaacaatgc

SEQ ID NO: 1504 - DNA, 409 bp, Zea mays
  Clone ID: LIB3136-032-Q1-K1-H3
gcgccggatgccctttccagctccgatccaacccattatctgtaccgcgccgcgcgagcacctcccgggccggtgcggcaggcgaaatccgaaagcactcctcccccgctacgccgcaccgtccatggccgcagctagccgcagatagagagaggcgcatgcgagggcgtgcacatccacatccggtgggcgggaaggacttgatcgcccccaccaccatggccggcgcggtgtcggcgctcttcctgctggacatgaagggccgcgttctcgtctggcgcgactaccgcggcgatgtcttcccgctccaagccgagcgcttctttaccaagctgctcgacaaggaagggcgattcggaagtgcactcgcctgtggtctacgacgacgctggcgtcacttacatgttca

SEQ ID NO: 1505 - DNA, 311 bp, Zea mays
  unsure (1)..(311): unsure at all n locations; Clone ID: LIB3136-032-Q1-K1-H5
cttcgtcgcgccgccgtancacgactccgactcggccatggcgacacccccagctctcctattcccttggccctcttcggcatcttctccgccgtcatccgcgcacgtagaggcggtggtcctcttcaacgtctgcgacagctacgtgcggcgaccggaccaggcagaccgtgtcatcggcaccctccttggatccctcctccccgatggcaccgtccacgtccgcaactcctacgtggtcccccacagcgagtcggccgaccaggtcgccatcgacatcgactaccaccataacatgtacgcctcgcacc

SEQ ID NO: 1506 - DNA, 244 bp, Zea mays
  unsure (1)..(244): unsure at all n locations; Clone ID: LIB3136-032-Q1-K1-H6
gcgacacggcacanacccgtttcgcctcttcnaccgcgactccctccgaccgagctgcantgcgcgggctgggtgcctttcactgttcctgcttccagacatggcggcgaggccggtcgctctggctctgccgctgctggccctcgtctgcgccctggcagcgtcggccgacgcgacgcacttcaaggtgggcgggcagagtgggtggagcgtgccgggcgccggctccgaccctacaacacct

SEQ ID NO: 1507 - DNA, 275 bp, Zea mays
  unsure (1)..(275): unsure at all n locations; Clone ID: LIB3136-032-Q1-K1-H7
gacccacgcgtgcgagacgatctaagcgcacgctangaactttaattacgttgattacctcatcttcaacacgtacagctgttgtatgaacaccgccgacatcaaagtcatgaaaccgaactcgaagtattggtctgagaacgacaaggttcccaggattgaagcgtatggtcaggtgttcaagacgtggtctgattggctcaataacaacatttattctgcccgcacgtacgtcttcttcatgacgatttcttcaattcacatcaacccacata

SEQ ID NO: 1508 - DNA, 304 bp, Zea mays
  Clone ID: LIB3136-032-Q1-K1-H8
cagtgattttcatgaaccaaaagtgcttatcattggcaacgctttctattcatttcctggcctggttcaaaataaaaagcggataacattcatttaatggaaccatccaaacatgccctgggataaatcacaactcttggttggttacttcgccgaaagcggagacttgaccaaaccggtctgtatttcccgtggcaatcggctgctgattgaatctcctagtgaacctaaatggtcaccgaaaagagaactgttttttgttactgacaaaaggagtggattttggaatatttataaatgggtt

SEQ ID NO: 1509 - DNA, 374 bp, Zea mays
  Clone ID: LIB3136-033-Q1-K1-A1
gaacaatctggacttcagcctgcctatggacgggcagaggtccatcgccgagctgatgaacatgtacgacaccaacttcatgacgagcaagaccatgagcagtagtgacagcgtcaccatcatggagaggccgaacgcgatgccccagaggatccagatggacgagggcttcttcggacagggcaacggagtcttcgacgacgtcaatagcatgatgcagcaacaacagcagcaggcaccacccgtggtgcagcagcagcagcagcagcagcagcagttcttcatccgcgacgacacgccattcatgagccagatgggcgacatcaccagcacgggcgagttcaggtttggctctgctttcaacatgtctagca

SEQ ID NO: 1510 - DNA, 431 bp, Zea mays
  Clone ID: LIB3136-033-Q1-K1-A10
gtcaggaacagcagtataatgtgcctcaagtcaagggtcatcgacttagaggtgggccacagatgattcagctgagcttggatggcaagaggatatacgtgacaaactcacttttcagccgatgggatgagcagtttttcggtgatgatcttgtcaagaagggctcccacatgttgcagatcgatgtcgacaccgagaaaggaggcctggctgtcaaccccaacttcttcgtcgattttggcaccgagcctgatggtcctgccctggcccacgagatgagatatcctggtggggactgcacctctgatatatggatctgaggtcaaggattcggcgtaattaaaaggctgctggagaatccctgttgtatgcactgtaattaaaatggtatccgtgcggtgttccgtcttgtactgcgactgttgccagtg

SEQ ID NO: 1511 - DNA, 366 bp, Zea mays
  Clone ID: LIB3136-033-Q1-K1-A11
cggacgcgtgggtagtgttctaggtgaaggagggttcggctctgtctataaaggatgggtcggggagaacacattatcaccttgcaggcctggcactggaattgctgttgctgtgaaaagactaaatcatgagggtttgcaagggcaccgagagtggtgggcggaagttaattacctaggtcagttctgtcatcccaaccttgtcaagctgattggatactgcttagaggatgagcaccgactgctagtgtacgagttcatgccccgcgggagcttggaaaatcatctgtttaggagaggctcatatttccaacctctgtcatggaaccttagaatgaaggttgcactaggagcagcaaaaggact

SEQ ID NO: 1512 - DNA, 303 bp, Zea mays
  Clone ID: LIB3136-033-Q1-K1-A12
attcgtccaggaaagtaaaaaaactcccccattcgcgagggacaggagggaggagtcaccgcgtgagctcaggaggaagagggagaaggagaggccgccggcggcggcgcggcagaccgggaaccgccgtgtagcactggggtggtggacccgcgcgcccatgcgtcggtgaggtggtggggcccgcttggcgctcgagttggaatggcggcggcagggaggtggtgggcggtggtccttgcggtcgcggtgctgctcggtgccggccgggtcgtcgccaacaccgagggcgatgctctatac

SEQ ID NO: 1513 - DNA, 333 bp, Zea mays
  Clone ID: LIB3136-033-Q1-K1-A2
gcttcggttctccgtagcgactgcgttgcaatcaggtcgtcgtacgtaggtaggtgttagccacatacgcatcaggaagctaacgagaagatcagatcggaggtaacggcaatggcaatggccaaggccaccatcctcgccaccttcgcggacgtggcagctctggcggcggtgcagctcgccgcggcggcggaccaccccgtgggaggcgacggctcctgggacgccagcggcaccaccggctacgacgcctggtccgccaagcagacgttcaagcagggcgacaccttgtcgttcaagttcgcgccgtcacacgacgtgactgacgtgagc

SEQ ID NO: 1514 - DNA, 347 bp, Zea mays
  Clone ID: LIB3136-033-Q1-K1-A3
cggacgcgtgggcggacgagtgggctcgctcaccaagccaacaaccaaatcgaatgcgccgacgactctctttattcctcccgctcgccgacgccgccaccgcctgagggcaagaagcgagcgagcgcaccgcggatctccctcccggccccgccgcgcgcaccggtgaagacgacgagcccctcgtgaatggtgggagcccgcgcgacgtacgtcgcctcgcagccgcagccggaggaggcctccttccgcggcttcggttactgcatgcagggctggtaccaccgctgcatcggtctcgacccctgaaccccgccgccacttgcttctttgatttgatttcattc

SEQ ID NO: 1515 - DNA, 272 bp, Zea mays
  Clone ID: LIB3136-033-Q1-K1-A4
ggttcatttctacgttctatttcactctctaacgtagcttacaacatcaacaagtgggtgggacattctctttatgcatgtaactataataccccatctccatgtgcatacatacataatgcaaaagaaactaagatctaactccttaccatggcgaatgaaaaagagatatctattacttacactatattggaggcaacaacacgatggaacttatgctattatatacaactctgttatgcatcacaaacgtcgtcccgagaaaggataca

SEQ ID NO: 1516 - DNA, 379 bp, Zea mays
  Clone ID: LIB3136-033-Q1-K1-A5
gacaacaacaggattgctaaagcttgtggggcagttatagtgaacaggcctgaggagctccaagaatctgatgtgggaacaggagctggcctgtttgaggtcaagaagataggtgatgaattctttgcctttattgttgactgtaaagatcccaaggcatgtactgttctgttgaggggagcaagcaaggatgtattgaatgaagttgagagaaacctgcaggatgccatgtctgttgcaagaaacattttgaaaaatccgaaactccttcctggaggtggtgctacagagctgactgtatcagcaacactgaagcaaaagagttcttcagttgaaggcgtggaaaagtggccctatgaagctgctgctctagcatttg

SEQ ID NO: 1517 - DNA, 415 bp, Zea mays
  unsure (1)..(415): unsure at all n locations; Clone ID: LIB3136-033-Q1-K1-A6
ctttaatgagccccancatttacttccttttcctacggaactggggtctttgccccagggcggtgctcacctggactagactgtgcctacccaactgggaattcactcgtcgagccttacactgctggccataacattctcctagcccacgctgaggctgttgatctttacaacaagcattacaagcgcgacgacacccgcatagggcttgcgtttgacgtaatgggtcgtgtgccatacggaacatcgtttctggataaacaggccgaagaaaggtcctgggacatcaaccttggatggttcttagagccagtggttcgtggtgactaccccttctccatgagatcattggctagggaacgactacccttcttcaaggacgagcagaaggagaagctcgccggttcctatacat

SEQ ID NO: 1518 - DNA, 290 bp, Zea mays
  Clone ID: LIB3136-033-Q1-K1-A7
gttactacagaagccatgatagagcacatgaacaaccttctcaaaataagaggatcgaaggttctgtttggtggtgaaccgttagggaatcactcaattcccaaaatttatggtgccatgaagcctactgctgtatttgttcctctagaagaaattctaaaaagtgggaacttcgagcttgtgacaaaggagatatttggtccattccaggtagtcacagaatactctgaggatcagcttgagttggtcttagaagcctgcgaaaggatgaatgcgcatctgacagcttg

SEQ ID NO: 1519 - DNA, 385 bp, Zea mays
  Clone ID: LIB3136-033-Q1-K1-A8
ggcagctgggcgatcccaccctgccccctggcggtgaagcctccccgttcgccggggtctctggggatcacccagtgccggagatctcatcgccgacggctgtccgagtgcgagtcgcggcgaccagcctcaacttcgccacgttcctccaggtgcagggcaagtaccaggagcggcccccgcttccgttcgtgcctggatccgactactctggcgtggtcgacgcagtcggtcccggcgtgcgtgggctccggcccggcgaccgcgtctgctcctttaccggcctcggttccttcgctgacttcatcgtcgccgaggagaagcagctgtgctacttgttcttggagctgctggtggtgtcggggcatctgctgtgcaaatagga

SEQ ID NO: 1520 - DNA, 135 bp, Zea mays
  Clone ID: LIB3136-033-Q1-K1-A9
ctgcgcctcaagtccatggtcttcgacttagacgtcagcctgggatgacggacctgctcttggatggcgaccggatatacctcacacactcactattgagccgatgggaccagccttttttcggtgatgatcttg

SEQ ID NO: 1521 - DNA, 332 bp, Zea mays
  Clone ID: LIB3136-033-Q1-K1-B10
cgaaatgaggtgaccagtgatggtttattttctgttggagaaatggagtgcatgggttgctgtgtgaatgctcctatgattgctgtggctgactactcgaaaggctcagagggttacacatataactactatgaggacctcactccaaaacgagttgttgagattgttgagatgcttagaagaggtgaaacaccccctcgaggtacacagcacccagagcgaaaaaactgtggccctgccggggggaacaccaccttgcacggagagccgaaacctcctccatgcagggatctggatgcctgctaggtttgcttcggagcattacgagcacg

SEQ ID NO: 1522 - DNA, 204 bp, Zea mays
  unsure (1)..(204): unsure at all n locations; Clone ID: LIB3136-033-Q1-K1-B11
cgtgcggacaaatgtgccacctactcaagtctattgaatgttaggaacaaggtctgattcatgtgtgctgattagtgttnagccgatggctgaaactgcacactcattcaggcctgagctgttctatggtgactaccggaatgagaccactgcaaggatactattgaagacacttgtgatcattggagtaataactgcatcgac

SEQ ID NO: 1523 - DNA, 305 bp, Zea mays
  Clone ID: LIB3136-033-Q1-K1-B12
atttcacaaagagcaacgagtggacaggcaaattctctttccatggacgcagtctacatcacatgagcaacacaccaaatccgtatgaacaagccatctcgattattgggcgaacactatcgaaattcgatgaagataatctgattccatgtttcggatttggagatgcatcaacacatgatcaagatgtcttctgtttctctcctgacgagaaaccttgtaatggatttgaagaagctctcgatcgatatagggaacttgtaccacatttgcgcttagctggaccaacatcctttgcaccaatt

SEQ ID NO: 1524 - DNA, 364 bp, Zea mays
  Clone ID: LIB3136-033-Q1-K1-B2
gttatcaagagattcattcttcacgcgaagaaaactgcatttattgttgagcatgatttcatcatggcaacatacttggctgacaaggtcattgtttatgaggggcgaccttctattgattgttctgccaatgcaccacagtctttagtatccgggatgaataaattcttatcgcatcttgacattacttttagaagagacccgaccaactataggccacgtataaacaagttggactctacaaaggacagggaacagaagtcggccgggtcctactactacctcgatgactaatgaggaagcacagattcttcttggagagccatatggcgcatagtctttggagggcgcccagcgtgcggaa

SEQ ID NO: 1525 - DNA, 374 bp, Zea mays
  Clone ID: LIB3136-033-Q1-K1-B3
ctcacggcgacgggagagcgcgagccaatgtggagcgattaattggtcgctgctggcaattgttctgcgtgcggcttgataatttatttcctctagactgtagaagtttcacttcctcttgaattttaggcccaggataaacaaaagctttccttttcactgcaaacaagtactcctaaccattggaattgacaacatgtaagctgtagacaaagcccaacctaacccacgactctgctttttgcttcgtgctgcgttacatcttgcactggctgctgctggtgacaagcaagaacaaccaaaagtatttttagtttatcactgtccatcagttgaaactaaaaatgccctgacctgcctcaaatgcttaactt

SEQ ID NO: 1526 - DNA, 330 bp, Zea mays
  Clone ID: LIB3136-033-Q1-K1-B4
cgtggacccggaggtgtcggtgacgtgcacggacatgaacctggtgcggaaggccttccagctcgcgctgctgtgcaccaagcgccaccccgcggaccggccgaccatgcacgaggtcgcgagggtgctgctctccctcctgccgcccgccgccaagcctcccgcgtccaaggcggcggcggccggcgactacacgcgcttcctcgcgacggcggccgacctgaggcgcggcggcgtggccgacgacgacaccggcgacaacagctcctccgacgagcagtggttcgtgcggttcggcgaggtcatatccaagcacacgctgtcatgatc

SEQ ID NO: 1527 - DNA, 293 bp, Zea mays
  Clone ID: LIB3136-033-Q1-K1-B5
gagctagccgacgttctcctcccacttaaagcgacggccttctcgcagcgggatgcgtatgattcgctactgtacacaacacacctgcctgctatggactctactccttgctcaccgatgtaagctcatactccgatgctctcgacagctgtgctcatcgctatcaccagaaccgaaaaggtcattgccttacaagtacgacaaagctatgctactgactctacaacactgacgcctacaaaagatacggacgtgtagcgcctcttcgtgctccttctacatcaagccattgt

SEQ ID NO: 1528 - DNA, 182 bp, Zea mays
  Clone ID: LIB3136-033-Q1-K1-B6
gtctgtggtcgggggcggctttgactggtcgcaacatggccgccatggctccagggtacgacttgaccaaggtcacccgtatcgggttcgccatcgagtacgctgtgtgcgctttgatggtggaggtcatcgtggacattggacatatctgatgacgaggcatcaggacgctcctatgcctg

SEQ ID NO: 1529 - DNA, 381 bp, Zea mays
  Clone ID: LIB3136-033-Q1-K1-B7
ctcgctggcgcgcctcgcgctgggcgggttcaggctccgcgccgtcccgggcggggtagcggagggtctccgctcgctctccctcagccacgccgacgtcacagacgaggcggtccgggacatcgtgtccagctgccgggcgctggagctcctcagcttgaggagctgcaacctcctcagatcggttaggatcgccggcgagacgctgcggtccctggagatcgtgcgctgcttgggcgtgcgggagctccgggtcaacgcgccctcgctcgagtcgttcgccttccacggcgacaacgtctactcgacgagcgacgacgacgaggaggacttgtcttctgccgtcgacctgggatccacgccggctctgcgggacgcgta

SEQ ID NO: 1530 - DNA, 268 bp, Zea mays
  Clone ID: LIB3136-033-Q1-K1-B9
cgggcgcgaaatgaggtgaccagtgatggtttattttctgttggagaaatggagtgcatgggttgcgaagagaatgctcctatgattgctgtggctgactactcgaaaggctcatagggttacacatataactactatgaggacctcactccaaaacgagttgttgagattgtagagatgcttagaagaggtgaaacaccccctcgaggtacacagcacccatagcgaaaaaactgtggccctggccggggacacaccaccttgcacg

SEQ ID NO: 1531 - DNA, 368 bp, Zea mays
  Clone ID: LIB3136-033-Q1-K1-C1
gcaagccgcctcgtcgcctcgtcgggactatctctggtgagcgtgctggtgatcaggtaccttggaggcctggcttgcttggacgctccattgcttcgacttcgaagtcgtcgcgggtttggatcctgtgttgagggggtaacaccgtgtagctcaactgtcccctagcgccgccgcgcgaaactccctaccggtccattttgtttgtagccattaagctcttcggaggtggagatctgggctgtcgtttccaggaccctggccgcatcggctgtgatgggtcgaagcgccttggcggttcggttggcttcccttcttgcgtttggtttggtgctcgtctccgtcgaggccagcctcggggatgttga

SEQ ID NO: 1532 - DNA, 69 bp, Zea mays
  Clone ID: LIB3136-033-Q1-K1-C11
gcctgctagttcatttttgaactaaaacgcgacaaataaaaaaaatcggaggggagtatgatggatgag

SEQ ID NO: 1533 - DNA, 425 bp, Zea mays
  Clone ID: LIB3136-033-Q1-K1-C12
cggacgcgtgggcttgctagcctcggcgaatttccctgcacgctccattgcgccatcgctggggccagccatggacgtgcgtccctcgagcttgtccagcgagtcgcgcccaggcacgtcaagctcctcctcgggtcgctgtcttcgagcccgacctcaagcgagctttttgcgattatgatacgcccaacgcgtgacttcgccagtctggtatgccgaatcgcgtcctcaccagaatggtactgacatcgtcgttcgccttctctgttttggtctccgtagcttcatcctcggattaaggcctagtaataactcgttgcggacacttgtgcccttgccgttgtgcctcgttctcctctcgagccttctaagcctgtagttcttaacgctgtcgccggcaccgccatgactccgccaccgaatcc

SEQ ID NO: 1534 - DNA, 316 bp, Zea mays
  Clone ID: LIB3136-033-Q1-K1-C3
acgccaacaaacatcgccacaactcataaagcgttcgtacgctggcacgacagcgggcatggtagaatacgtgcttgcagcgacccgacaaaaaaaaacaaaacatgtagaagatactccatcatctgcgtttgatgaacccgcccagctaagccatctttactaataatagagccggcataaactatggtactgatgatgtgcatctgtagccggtgatgcttgggtaggggtgaaactgacgttgagcagaaacactagtgaccccccatgatgtatgagatcggagattcactggtcgacagcagaaacaata

SEQ ID NO: 1535 - DNA, 371 bp, Zea mays
  Clone ID: LIB3136-033-Q1-K1-C4
ctttaatgagccccagacatttacttccttttcctacggaactggggtctttgccgcagggcggtgctcacctggactagactgtgcctacccaactgggaattcactcgtcgagccttacactgctggccataacattctcctagcccacgctgaggctgttgatctttacaacaagcattacaagcgcgacgacacccgcatagggcttgcgtttgacgtaatgggtcgtgtgccatacggaacatcgtttctggataaacaggccgaagaaaggtcctgggacatcaaccttggatggttcttagagccagtggttcgtggtgactaccccttctccatgagatcattggctagggaacgactaccct

SEQ ID NO: 1536 - DNA, 315 bp, Zea mays
  Clone ID: LIB3136-033-Q1-K1-C5
ccacgcgttcggcggagcgcctgcttctgctactgtcccaatggaaggagtcggggagctaaaagcctctgcctgaagttctaaagtttgacagagagtatgcatgcttccgtccatagcgtatactggtgactgtaacagaccctcacccccaccagaaaatattgtctcaagctgcagatttttttttgaataacataagttattactgtatgctacgagtatagaatacgacatgtagaagactatacgttactagtcacaaagttgataaatcatttttgggtgaaaaaatgtaaacaccaatatggcatt

SEQ ID NO: 1537 - DNA, 360 bp, Zea mays
  Clone ID: LIB3136-033-Q1-K1-C6
atacagactagcaaagtatattcctgatgcttcaactgatgggaacaagaccgatgacaaagacccaggagatttgcttgccggacttgagggatcctctggattgcagatatctgaagccctcaaactgcagatggaggtccaaaagcggctgcacgaacagttagaagtacaaaggcagctgcagttacgaattgaggctcagggaaagtacctccagaagatcatcgaagagcagcagcgcttaacaggtgtgaaatctgaaactcctgctggaggtgcttctgtcactgtatcaagtgatcaattcccagactcggagcggactgagccctccacacctgcaccagcatccgagtc

SEQ ID NO: 1538 - DNA, 284 bp, Zea mays
  Clone ID: LIB3136-033-Q1-K1-C8
acgacccaaaccctagccatctccactcgtactgacaccgtcatggcctagaggcatgggtggtttccggcaccgtatacgacgtccgggcgccatcttcgttgccaccgatgctcgacgaagaggccgatgccatcgcgaaggacgaagcctcggtggtcgagaagatgtagtccgtatggcccggggacatcagagttcctgctggtggtgcctgtgctcataggcagaagcataatccggcgcatgggctagctcattattcgcctcgtagaggagaccaa

SEQ ID NO: 1539 - DNA, 358 bp, Zea mays
  Clone ID: LIB3136-033-Q1-K1-D1
gtgcggcagggcgtggtggtgatcacgggcgcgtcgtcggggttgggcctggcggcggccaaggcgctggcggagaccggcaagtggcacgtggtgatggcctgccgcgacttcctcaaggcggccaaggcggccaagggcgccggcatggcggacggcagctacaccatcatgcacctggacctggcctccctcgacagcgtgcggcagttcgtggacagcttccggcgcgccggcatgccgctcgactcgctcgtctgcaacgccgccatctaccggcccacggcaaggacgccgacgttcacggcggacggatacgagatgagcgtcggcgtcaaccacctgggccactttcttc

SEQ ID NO: 1540 - DNA, 359 bp, Zea mays
  Clone ID: LIB3136-033-Q1-K1-D10
cagagatcattgattacatgttcagctaccttgtgtgctgagttcagtaaagttcctcccagtgctcaagttccagcttttgttcattatttgcgtgagaattcccagaagaagaagatgaaattcaagaagtggtttctgaagaggagtctgctttagtgcctgttcatcaagtaatgggagccatataactggggtttaatagagggatttagacctccgtctctgcaacaaaggagaagtttcgttcccttatctttgggttaattacttcatgtggatgacttgaagcttagaaggtttttatatatctcttatggaaaggcttcacccttacaattattgaaataagttatgca

SEQ ID NO: 1541 - DNA, 394 bp, Zea mays
  unsure (1)..(394): unsure at all n locations; Clone ID: LIB3136-033-Q1-K1-D11
cgtncggntctnttgatctcagccatggcggaggtggagcagcaacaggacacgccgaagctcttgggcggctggaccttcgatgatgtccaggtgaacgacatctcgctgaacgactacctcgctgtgaacgcgacgaagcacgcgatgtacctgccgcacaccgcggggcgctactccaagaagcggttccgcaaggcgcagtgcccgatcgttgagcgccttacaaactccctcatgatgcacgggcgcaacaacggcaagaaggtcatggctgtccgcatcatcaagcataccctggagatcattcacctgctcaccgatgccaaccccatccaggtcgtcgtcgacgcgatcatcaacagtggcccccgtgaggatgccacccgtattg

SEQ ID NO: 1542 - DNA, 358 bp, Zea mays
  Clone ID: LIB3136-033-Q1-K1-D12
gttagaatttcatgtacagtcccagtgcagcagtaaaactctccggatcgtaagtatagttgggagtaacctctacaatttctttacattcggattttgatccataacctttgtaatcaatttgactgaatcatttatccctaagatcctatgattaaacaaccttcatcgattatagaatcccaaggagcatgccaaatttgtaggcaaattttaaatcaacagtgttggcaaggaatgataatttatagttcatttgaaatactacattaaatcttattaattgcggttacaacaaactaaagccctactcctaatctttgcatgtaacaaaaactacatgtattctatgtaatat

SEQ ID NO: 1543 - DNA, 364 bp, Zea mays
  Clone ID: LIB3136-033-Q1-K1-D2
tgcaaataattaatatgaagcacaagcacaagtccccacatccatctcgtcatccggaacagatgcatgctcagagcttcatgaaccagacgtggggacgggcccaagtgcggtaccagtctcctgactcgccatcctcatcttcctccgtgggctcgaacagtggtgatgactcttgaagctgtgcatagaacatagaacttccatgtggatgtcccagtacttagataggtagccttcacgttccggggtttcttggtaactaggaaccattgtcgtgtcatcgtgtgcttcaaactttgatgtgtaaatgtataatgtaagattaaaaccataacttttacgtaccccagttacgaatttg

SEQ ID NO: 1544 - DNA, 333 bp, Zea mays
  Clone ID: LIB3136-033-Q1-K1-D3
tggtgctggagtactccatgagcgagctgatgaacaaccgccacgtcctggccaagctccagaaggaggtgaggacggcgacacccgaccgccgcatggtgatggaggaggacctgagccggatgccatacctgaaggccaccatcaaggagtccatgcgcatccacccgcctgcgccgttcctcctgccgcacttatacacccacgactgcgagatcaacggttacaccatccccgccggcacgcgcgtcattgtcaacgcgtgggcgctcgtcacggacccgacgtgctgggacaaagccgaggagttctttctcgagcgctttctggaac

SEQ ID NO: 1545 - DNA, 346 bp, Zea mays
  Clone ID: LIB3136-033-Q1-K1-D4
ataaattctagggtttgcctcttccctctcggctctcgctcccaccaccaccaccaggcagacgcagatcggcggcgggataggctagcaatgatccccaattccgacttcctctagactgcctggcggtcgaattccgattcgattggagtagggaacgagaagggaacaaatacaccggcaccaccaccagaccagacagcacgtgcctccatactatggtttacgccccgtgccgctcatcgacgccgccgtcttcctcgccgatgctccacaagaacctccgcgccctcggacccggcttgaatcccttggctcccttcggcatgggcaactactcccgcta

SEQ ID NO: 1546 - DNA, 359 bp, Zea mays
  Clone ID: LIB3136-033-Q1-K1-D5
attggcaacaggacaagtggaacggctccttctctgttaagtggcacattgtcaaggacgtgcccaacaatattctcaagcacatcatcctggagaacaatgagaacaagcctgtcacaaacagccgtgacactcaggagatacgcctcgaacaaggccttcagatgctcaagatattcaaggatcatgtcagcaaaacttccatcctcgacgactttgccttctatgagagccgccagaagttgatgcaggataagaggtccaaacagcagcagctccaaaagcaggtctgggacactaggacccccgtttctgtcaccggtgaacgaccacaggaacctgctaatgggaagcccaat

SEQ ID NO: 1547 - DNA, 269 bp, Zea mays
  Clone ID: LIB3136-033-Q1-K1-D6
cgtcccctcctcctgcgaaggctcctccagcaccactagctagagctaaccccgtgctgctgctgctgctactacctgctgccgcgcgccgttcgttgccgtgcgggcgtgttgtggtccgctgatctcgttcgcgggacgccggggggtggtggtggtggcagcggtggttggtggtgcgcggcgtgaaagaaagaaagaaaaaaaaaaggcccgccgctttgcgctgctctgcttccgtaggtgtcacgagatttggccctagcctt

SEQ ID NO: 1548 - DNA, 379 bp, Zea mays
  Clone ID: LIB3136-033-Q1-K1-D7
cggacgcgtgggcgaagccttgattctggaatgctgtccagtcgaaggaacagcgggattatcctacgggaagggtcggttagggactggtccgagtccaacgatccctctccgtccccaaaaccgttgtactcgcagtcctatgtcgcagtgagaggattgctgtcctctgtggtctccttggactttttcctgctgtcgagcaagctaaagtcagtgtatgcggctatgacttcacagaggcatagccgatcgcaggagagatcaaaatcaaaggggttgagctgcaggagagttgcagtccgtctgctgttctttttcatgttaggcattttcattgggttcatgcctttattctctgtcgacgtctacaagaaaa

SEQ ID NO: 1549 - DNA, 325 bp, Zea mays
  Clone ID: LIB3136-033-Q1-K1-D8
gtggtggccgtggaggcggttgctactgcggtggcgggcgccgtgatgggggcggcggctactgcggtggcggcggctactgcggccgcggcggctactgtggtggtggcggcggctacagcggtggcaaccgtggctgcggctacggcaactccgacgggaactggaggaactgagcggtggggcccgcgcggccaagttatcctgttcgctgccgtgatgtttaccctagtccagagggtttatcttcgttcgtctcgtgtttgttgttgcccatcttgtgtttttgattgcaaagtcgctctgtgtcagttgttagtgctgt

SEQ ID NO: 1550 - DNA, 337 bp, Zea mays
  Clone ID: LIB3136-033-Q1-K1-D9
gcgtccgtgttctggatgcacttcttgtccactacctttcttttcggctgacgtcaaggtcagcctgtaagccgacatttagaatccagcgagatttttccgcatttgataacgaagcagccgagggtttacagtctgcgttggatcacatggaattgcctgaaacaatcaggcggaggatccaagcatccatgcctcttcttccaccatcccggcacccttctttgcaatgtcaaccttcgcacttgtcgttggctgcattaacaccactccatagcagtacatatggtgtacgtccgcaacacagaagttgttctgtgagctgggggcccactta

SEQ ID NO: 1551 - DNA, 377 bp, Zea mays
  Clone ID: LIB3136-033-Q1-K1-E1
gaaactcttggagaaggtgttgccagtggagtcgtatcatcaatcaagggtgctgcgtcacacctggagcagttgggatctgtggtggaagaggtttcactgccttcattttctcttggcttaccagcatattacatactagcctcatctgaagcttcttctaatctatcacgctatgatggtatcaggtatggaggacaggtctcggcggatgacttgaatgagctttatggagagtcccgggctaatggttttggtcatgaggtcaaaatgagaattttgatgggaacctatgctctttctgctgggtactatgatgcatactacaaacgagcacaacaggtcaggacactggttaagcaaagcttcaaagatgc

SEQ ID NO: 1552 - DNA, 336 bp, Zea mays
  Clone ID: LIB3136-033-Q1-K1-E10
tgctgcgtcttctcgtactgaagtttgtcctgatcatgtcagcaagcaaggatgtgcttggcggtgcttcacttgaggtggacctctccagtatcgagccagggaccacagtgaccgtgaagtggcgtggaaagccagtctttatcaggcgtcggacagaggatgacatcaagcttgccaacagtgtggatgtggcatccctgcgccacccagagcaggatgcatagcgtgtgaagaaccctgagtggctggtggtcattggtgtgtgcacgcacctcggctgcatcccactacctaatgccggagactttggcggctggttctgcccatgtcatg

SEQ ID NO: 1553 - DNA, 421 bp, Zea mays
  Clone ID: LIB3136-033-Q1-K1-E12
cttcttcatcgcctggtcaccggcggcgtcgaggatcagggccaagatcctgtacgcgacgtggaagcaaggcctgcggcggctgctggacggggtccactacgaggtgcaggccaccgacccctccgagatgggcttcgacgtcatcagaggccgcgcgcaatgaggcccccgctgcgctctgctcctatttacgtacttacctgtgcgtgggcgtgttctcctactactcactgctcagtagtcagtagtcatctgcgttcgtgtgtgtgtgtgtgtgatcggccggatgctaattggcgttggtgtgctcccgtagcgatcgatgctgccaatctgacgaggcttcgcgtgtgtttgctttgctattttcggttctcgggagaaatggtgcaagcgtggtgtgttgatgttgatgggt

SEQ ID NO: 1554 - DNA, 344 bp, Zea mays
  Clone ID: LIB3136-033-Q1-K1-E2
gggacgcgtgggtcgcaggaacattatcagaagtcccagtccacatcgcacggtggtaacagcaccaaacaatggaagaagcccatccaggagtggttcttctgatgggtcaccaaaacgcataagacgtggacggtgctttactcagaggtactcatacgcaagacaatatcgctcgccttctgctgatcgctcacatcgctatggtggaagaaatgaccgtgacagatacatggagtaccggggttaccgccatcgatcacctgctagacggtatagaagcccacccacaggaagagtgtcatcgtcaatgtacaggaggaggagccgaagcgcctcacgca

SEQ ID NO: 1555 - DNA, 341 bp, Zea mays
  Clone ID: LIB3136-033-Q1-K1-E3
cgacgcgtggggcggttgggtagttctgtgtacatagtttaactacaactgacggttgtagtatgtatagggtaaccggggataaccactgtgtacctggcggtggttccttctgcagcagtactgtaggcggttagcaagcacagcgaggagtttaggaagtttggaaatgcagtgagaaggatgttgtggtaatggagatttggtggatttgcatatcactgcagtttcagagtcacctttgttccttgtaccttgtagatgcctattagtagtccaatactccatttagatgttatagtatttgcatcttccctgcccatcattaaccagtagccaca

SEQ ID NO: 1556 - DNA, 222 bp, Zea mays
  Clone ID: LIB3136-033-Q1-K1-E4
ttgtatatttggactggggatatctcggactcatgagaaaccaccgagactgctactgcacggcggtgccctgacgtgttgctaacacgtgctaggtgactgagaatagttgggtattgcgttttttttaatatgttctgaacatgagaatgccctagtatttcattaggatgtgtacattttacaatgttttatggacaattactgttgtatttttacttt

SEQ ID NO: 1557 - DNA, 391 bp, Zea mays
  Clone ID: LIB3136-033-Q1-K1-E5
gtttttgtcgtaattactgctgggattgccatcatcaaactcttcaatggggctggggcgatgcccaaactttttccagaattagatggtcttaattctatctggaatctttttacagctgtccctgttcttgttacggcctatatctgccactataacgttcacagcattgacaatgaacttgaagacagaacacagatcaagccgattgtgcgaacatcgctgttcctgtgctccagtgtttacattgccacaagtttctttgcttatctcctcttcggtgaaggcacactggacgacgtgctcgccaactttgacgcaaatcttggcattccattcagttcagtcttcgacgacatagtgcgagtgagctatgcggcacatgtcatgc

SEQ ID NO: 1558 - DNA, 356 bp, Zea mays
  Clone ID: LIB3136-033-Q1-K1-E8
gcggcgcatcgcaacactaaccaaatgtgccgagccagggtgactgttccgaggggcgtggcgtggacccatggggaagaagggcaagtggttcggcgccgtcaagaaggtcttcagccccgaatccaaggagaagaaagaggagaggctaatgaggaaatcagcagctagcaacccagcaccggtagatctgaccccatctacctccctggaagtcaatgtttcggtgccaccccctccggctcctcctccagttcctcgccagaccgacgaggtcatggtccccgaagccgagcaggagcagagcaagcatgtcaccctggaggaggcccctgctgctgctgctgccccagcac

SEQ ID NO: 1559 - DNA, 245 bp, Zea mays
  Clone ID: LIB3136-033-Q1-K1-E9
tgcatgcatgtcgtcgccaggaacaagagatattatacaagaccaccacgcatgggcatactgcatatatatatgtatagcccgtgcccgtgtccgcctttgtaccaatacaagccaagactagtggatgtattattattattattattgcgctatcacatacatgtacccctgctacctgaagatggatgtgtatcgagttatcaaattaagacacctgcagcaaaaaactatatatgttgcat

SEQ ID NO: 1560 - DNA, 333 bp, Zea mays
  Clone ID: LIB3136-033-Q1-K1-F1
cgccagccgcctcctggctccggctccttcatcgcctgctccagcgtgcctgcgtgacataagcgtcgattgattggcgagaaaggggacgaatgcagccgccgttgcgggcgcagggagcaatggctaacgtcgccgctatcctcaccgtcccctgctccgcgggccgccgcccgaagcggagcagccagccccgcggatgcggctccgtctccgtctccgtccgtgcgtcctctggcgcaaacacggtgactctgctggactacggcgccgggaacgtacgcagcgtgcgcaacgcaattcgctacctcggcttcgacatccgcgacgtgc

SEQ ID NO: 1561 - DNA, 349 bp, Zea mays
  Clone ID: LIB3136-033-Q1-K1-F11
ctactaccctgtaggttcttttacgaatgcttccaaactattatgatcatgtccgtacctgtgagaacaccctcataactaagttttttggcctccacagggtgaaaccttctagtggtcaaaagtttcggtttgttgtaatgggaaacatgttttgcactgaattgagaatccaccggaggtttgatttgaaaggatcatctttaggccgttctactgataaaattgaaattgacgagaacacaactctgaaggatttggatcttaactattccttttatcttgaaccttcctggcgtgaggctcttcttaaacagattgaaacagacagtgattttttgagaacaca

SEQ ID NO: 1562 - DNA, 195 bp, Zea mays
  Clone ID: LIB3136-033-Q1-K1-F12
tccttactagcctctctttctttaccaaagctttttaactattaccataatcccactcctacagaaaactttactataactaactgtatcttcccttcaaccccaaacacaacctagtcttctactcccctgcctcttcctcttccccctattcctctttctcttcctttgatctactccatctgttccatctcc

SEQ ID NO: 1563 - DNA, 386 bp, Zea mays
  unsure (1)..(386): unsure at all n locations; Clone ID: LIB3136-033-Q1-K1-F2
gcagatctgtcccattgttctccgtcctccccgtcgtgtcctccttgatccttctgcgaggggcaagtgctgacctcgcctcctattcctccggtagccctactggagcgccgggcgcacagatctgcccacccctggacgctaggcgctgcccagctcttccctgccagccggtcgcggcggctgccagccagcacggcagggctgctgttgcctgctcttgtcctccggcacagcgcagggtgtcggngtcgctcccagctggccatcctctcggcccccttgttgcacagcgagtcagtgagtaactgagaattgattactgattgtcgtcgcatcacattttcgtttgatgaatgcctgtggctagtttttagtgctggcat

SEQ ID NO: 1564 - DNA, 349 bp, Zea mays
  Clone ID: LIB3136-033-Q1-K1-F3
ccacgaaaaccctaaaccctcgctacccggcggcggctacaagctcttcgtcggctgagcgccatgaggccaccggctagaggtaaaaaaccacgacactatccttgttttccatccatttccgcagtctgatgaagacttgctgcttcgttaaatcctgtaggaggacgtggtgggaggggaggcaggttccatggcggcggccgtgggggcggcggcggcggccgtgggtttggcggtggtagacgcggcagaggggacatgggagggagaggtggcacgacccccagaggcggccgtggcggtcgtggcaggggtggccgcggccgtggcatgaacggcgggagca

SEQ ID NO: 1565 - DNA, 417 bp, Zea mays
  unsure (1)..(417): unsure at all n locations; Clone ID: LIB3136-033-Q1-K1-F5
cagtaccatgcttcacaggatgagctgcacgctgtgagggagctccgaccgagccgggcgccgatcggtggctaccaagagcggtacgaggggtagcgggnttattattatggctgtggtgctttatatctgtatattatcttctgatgcatatgttgcaaactggtttatgctgatgtcttttttttccctccatatccattgatagttctttaataatgttgaatttttttttcatgtagtacttatataatttcattttttggatgttcaaggtcttccactttttggggtcttgcgtttgtttctttttgtttgtcatttttttcattaataagttcatcttttatctttttcattgggtttttttatcaaatgattttttttttgtttttttttatgtggattctttttttt

SEQ ID NO: 1566 - DNA, 394 bp, Zea mays
  Clone ID: LIB3136-033-Q1-K1-F7
acagggaaagattgcgcttgcgcttgcttgggcgccggccgcgccggtggcggtggtcttcgagagccgcggtcgcggcgcgcggtgaagagaaaaaaaggtgtgtgtgtgtgagagagagaggaggctccctgccctctcgcggtgacttggcgaggagggggagggactgggaaagcgaatggttttcgggaaggcgctgtgatttggcctggaaaggaggaacctttccttcctcttcccgtcctttgccggctcttgtaccgccctcagatcggcgacccggttgtttcttcggcaacgggcggaaatgaggctctcgtcgtcgtccggcagcgtcctgccggctcagccgggctcgccggaagctgtggaggagcacaagtgcctgaac

SEQ ID NO: 1567 - DNA, 398 bp, Zea mays
  unsure (1)..(398): unsure at all n locations; Clone ID: LIB3136-033-Q1-K1-G1
tcctgatctaaagagcatggaccaaatacgtaacattcctcgtcctgtggatgttcctgatgttggtctcctatgtgatctgttatggtcggaccctgataaggagattgataggtggggtgagaatgacaggggtgtttcctacacctttggagctgacgtagttgccgagtttcttcagaaacatgatctagatttgatctgcagggcccaccaggtcgtagaggatggttatgaatttttcgcaaaacgccagcttgtaacaatattctcagcaccgaactactgtggagagttcgacaatgctggtgcactgatgagcattgacaactccctagtatgctcgttccagatactcaagccttcagagaagaaaggaaaagcangaaatgggaaca

SEQ ID NO: 1568 - DNA, 340 bp, Zea mays
  Clone ID: LIB3136-033-Q1-K1-G10
atttttcgtggtcagccaaaaaggcatctactgtcgactggttggagtgtttttgtaagggcgggaagactagtagcaggggattctatcatatttatctggaatgataataaccagcttctcttgggaattcgccgtgcaagtcgtccacagactgtaatgccctcttctgtgctatcaagcgatagcatgcacattggtcttcttgctgcagcagctcatgctgcagccacaaacagtcgtttcactattttctacaaccctcgggctagcccttctgagtttgtcattccactggctaagtatgtgaaaagctgttaccacacgcgcgtatctggtg

SEQ ID NO: 1569 - DNA, 339 bp, Zea mays
  Clone ID: LIB3136-033-Q1-K1-G11
cgatttttcgtgttcagccaaaaatgcatctactgtctactggctggagtgtttttgtagggcagaagactattatcaggggattgtactcatatctatctggaatgataataaccagcttctcttgggaattcgccgtgcaagtcgtccacagactgtaatgccctcttctgtgctatcaagcgatagcatgcacattggtcttcttgctgcagcagctcatgctgcagccacaaacagtcgtttcactatattctacaaccctcggcctagcccttctgagttttgcattccactggctaagtatgtgaaagctgcttaccacacgcgcgtttttgt

SEQ ID NO: 1570 - DNA, 299 bp, Zea mays
  Clone ID: LIB3136-033-Q1-K1-G12
gtcccctgttactactttccttgtgaggctgttcagtgtgcattacagcagaaagtctaggtggttcctgtttgggatgtggttagccatgtggccttttttgtttgagaagattaacaagaccaggtttgttttctctggtgaaagtgtgccagcaaaagagcgtgttctgttaattgctaaccacaggaccgaggttgactggatgtacttatgggattttgcattgaggaaaggccgcttgcagtgcatcaagtatatccttaaaaaaagtttgatgaagttacctgttttaaact

SEQ ID NO: 1571 - DNA, 330 bp, Zea mays
  Clone ID: LIB3136-033-Q1-K1-G2
tcgtaaccttgaccaaatcgcgaggttaagccgcatcggtggcgcatggcaccgtgcttgggcgtctctgctaggcatgcccacactgtgccccaccggagaggtcacaggcagcgtgtggtcgaatccagttccggtggcgccacgtccgtcgacgaagctggtgaccttcctcgggaagggcggctccagctagactaccgctgccaccatcaccgctcagtattatgcaagtgaaggcttcaagacatgcctggttgttcagtcccaagatcctactgcggagcacttgatgggcagtaaaattgtgaattctttgaccgagtgtgt

SEQ ID NO: 1572 - DNA, 353 bp, Zea mays
  Clone ID: LIB3136-033-Q1-K1-G3
cgctactccactggtccattacttacgcagtcagttcagcgagtgagtagccatgtggcaggttcaattgcaagttgcaacgcgacgaatacggagccatggacgacggcgccgccaccacaatcatccaaggtggcgccgcgcacgtcctgctcctgccgttccctgggatgcagggccacgcgaacccgatgctccagcttggccggcggctggccttccacggcctgcgccccaccctggtggtctcccgccacgttctctccaccacctccacctccaggtcgagccccatacccgtggccgccatctcggacggcttcgaccacggcgggatcttctcgtgcccggac

SEQ ID NO: 1573 - DNA, 355 bp, Zea mays
  Clone ID: LIB3136-033-Q1-K1-G4
gccatcggcgtgcccaagcctctctctcgtgttcgtcgacacgtaccgcaccggcgggatcggcgacaaggagatcctcaagattgtcaaggagaacttagatttcacgcctggcatgatcatcatcaaccttgacctcaagaaaggcggctacgggcgctacctcaagacggcggtctacggccactttggaagggacgaccctgacttcacctgggaggtggtgaagccactcacgtcggagaaaccttctgcctaaggcggcctttttttcagtaataagcttttggtggtctgctgtgcttaatcatgcttttatatggcttctacatgttgtcggtctttcttgatctgc

SEQ ID NO: 1574 - DNA, 395 bp, Zea mays
  Clone ID: LIB3136-033-Q1-K1-G5
acatacaagccaacgccaacactagatggcgatatattatttgacaggttcttccaaatatagaagatccacgagagccttaagaaagcatccaacgtcatgtgctcagatccatggccatccatgaataccgcaagcacacccaccctctttatttatgacatcatcacgccaagccacgcaaggcacccacacacatacatatatgtatgtaaatatatatatatatctcacggatagacttcgaaggcaacacgagctccaaattccttcaggatcttgtattcgctgaaccctgctttggtgaagagctcgctccattctttatcatctctctgccgtccttttgtcatggtcatcatgccgatgtccatcaggaggtgagtttccagcat

SEQ ID NO: 1575 - DNA, 383 bp, Zea mays
  Clone ID: LIB3136-033-Q1-K1-G7
tttatattacatacaacccatcccttacactacacagcgaactatcacgggacatgttctttctaacatagaaaatccaccacacccttaaaaaagcatccaacgtcatgtactccaatccatctgcatacatcaataccccacgcacacccaccctttttatttatgacatcataacaccaagccacgcaagtcacccacacacatacatatatgtatgtaaatatctatatatatctcaccgatagacttggaacgcaacacgagctccacattcattcacgatcttttattcggttaaccctcctttgacgaatagcctactcaattctctatcatctctctgccatccttttgtcattgtcatcattccgatgttcatc

SEQ ID NO: 1576 - DNA, 421 bp, Zea mays
  Clone ID: LIB3136-033-Q1-K1-G9
gcgtgcgcacctacgtcccttctcccggatcctgcgattgttaagatgctccactcagccccggccgatcgcaggctcccggagtgcttcatgttccctgccgacaagctcccgcaggccaaggccacctcagcgacggtctccctgcccatcgtggacctctccctcggccgcgacgaggtgcggcgcgccatcctcgaggccggcatggagatcggcttcttccaggtggtgaaccacggcgtctccctggaggcgatgcatgacatggagacggtgtgccaggagttcttccggctgccgtcggaggacaaggccgggctgtactcggaggacacggtgagggcgacccggatctactccagcaccatgttcgacacggtcgcctagaagtactggcgcgactgcctccgcctggcct

SEQ ID NO: 1577 - DNA, 332 bp, Zea mays
  Clone ID: LIB3136-033-Q1-K1-H1
ctcaagcccagcaacctgctggtgaacgccaactgcgacctcaagatctgcgactggggggtggcgcgcccgtcctccgagagcgacatgatgacggagtacgtggtcacgcgctggtaccgcgcgcccgagctgctgctcaactccaccgactactcggcggccatcgacgtctggtccgtcggctgcatcttcatggagctcatcaaccgccagccgctctttcccggacgcgaccacatgcaccagatgcgcctcataaccgaggtgatcgggacgcccacggacgatgagctcgggttcatccggaacgaggacgcgcggaagtacat

SEQ ID NO: 1578 - DNA, 302 bp, Zea mays
  Clone ID: LIB3136-033-Q1-K1-H10
ggtggacggacgcgtgcgcctgggcatccccaccgtgtcgtcctgctacgttccggccctgagagccgacagcggcgggtgcggcggcaagaacaggcagggccccgggcacctgcagcggctgctgttctcccacttcccccggaaggcgtacgacgtggacacgggcatcaggttcgtccagtacgccagcctcgcgtggtccgtggttgacttggtaccggccatgttcgcccatctgaatctgtagccagctgcgtagaacttctgcttctcttttcgatgagctccaaatcgggccc

SEQ ID NO: 1579 - DNA, 244 bp, Zea mays
  Clone ID: LIB3136-033-Q1-K1-H11
gtacctcacatcccagtcaaacacggcacgatgtacacgattgctagaacgactgatactgcggggtgcggtcgatgcaccaggagaccacaatacgcattacggtgtatgtagaacactacgtgctaccaacaccaaaccacgttcgcgagaatgactatcacccgcgctatgacagtcctacgcggggaagacgaacggggcatcgtcggagggctggatgaacgtgagcctgttctgatgc

SEQ ID NO: 1580 - DNA, 399 bp, Zea mays
  Clone ID: LIB3136-033-Q1-K1-H12
ggtgactgttttggaatcgagagatcgtattgtcgggcgcattcatactgataactcgtggggatgcccaattgatatgggagcctcatggctacacggcgtgtgcaatgagaatccactggcaccattgataagctatcttgggctgaggttataccgcacaagcgatgataactcagttctgtatgatcatgatttagaaagctatgctctctttgataaggatggtaatcaggtcccaaaggagacagtcgataaagttggagaaacattcgagagaattcttgaagagacggtgaaagtgcgcgatgagcatgaacacgacatgccactgctacaggcaatttctattgtgtttgagaggcacccccatctaaagcttgaagggctagatgatca

SEQ ID NO: 1581 - DNA, 384 bp, Zea mays
  Clone ID: LIB3136-033-Q1-K1-H3
ctgacattgaacatactgtacctgaaagctgactcagataaatcaatactgaacgtgcacgggtaccacaccaacgtttacatcctacatcatatcacattcttaaggcattattaacttctagaaaaatgttccttgaagaactgaacaaaatcactggtgctattggtaagacagtacaggatttagatgttgctgactttaatcttgctaaatatgattcatttaatacatcaacatcttggctacctacttctaataaactgttccaccaaactggcaaaggactatgacacttggctgatactttacatgacttcttggagagacacaacgatattgttaaaggtacagatgattctttattgcatactctttcccatg

SEQ ID NO: 1582 - DNA, 238 bp, Zea mays
  Clone ID: LIB3136-033-Q1-K1-H4
cgttaccatattcaccaaaagcaagtacaggttaccggatgtcatcgtggaaacgcgaatgtgcggtatgcatggcttccttgctccaaaagcactgtgcatgtaatgatgctgaatggtgttttgcaagttgataagcctcccaataagtgtgcagcctatggagagggcactctccttacaccagcaaatcgttcggatgcctgtgtgaaatactctgatgttgatgaaaatggca

SEQ ID NO: 1583 - DNA, 379 bp, Zea mays
  Clone ID: LIB3136-033-Q1-K1-H5
gggagatagagagaggagagggagggtttcctcaaagagaacccgaaaccgaaccgaagcagagaacactagcgttccctcaccagggcgtccatcccagcagccatggcgatggcgtacaagatggcgacggaggggatgaacgtgaaggaggagtgccagcgctggttcatggagatgaagtggaagaaggtgcaccgcttcgtggtgtacaagatcgacgagcggtcgcgcgccgtgctggtggacaaggtgggcggccccggggaagggtacgaggagctcgtggccgcgctgcccggcgacgactgccgctacgccgtcttcgacttcgacttcgtgaccgtcgacaactgccagaagagcaagatcttcttca

SEQ ID NO: 1584 - DNA, 273 bp, Zea mays
  Clone ID: LIB3136-033-Q1-K1-H6
gtcggtggtgcactgggtgatgagcctgccccggcggtccgcgccgtcggagtcggccgaggcgcatgccggggcggggctcgagtcggagctcaaggcaatgcttggcggcagtggcgcgcggtgccggtggttccgctacgaggagctctacgactccaccaaccacttctccgcagagaacctgatcgggaacggagggaacagcagggtgtacaggggcagcctcgcctgcggccggcaggtggcgatcaagctgtgcaaggcgtcggc

SEQ ID NO: 1585 - DNA, 344 bp, Zea mays
  Clone ID: LIB3136-033-Q1-K1-H7
gctggagaggcgcgagacccgccgctacatcgaaatgttctacgccctgaagtaccgtagcctggcaagccaggttccgctgtccttcgattagtacggggaaagaagaagaagaagaagcccaggccggagaaccatcgcctgcatttcgatctgtttcaccgcaattcgcattgttagtcgtgtattggagttatgtgtacttggtttccaagaactttggttccttgcttttttttctttcttgtttgagcgtttttgggcagcgctggcctggttcctagtatggtgagaattggctgcaccttttgcttcgaataaaaatgcctgctcgttcacctgtc

SEQ ID NO: 1586 - DNA, 362 bp, Zea mays
  Clone ID: LIB3136-033-Q1-K1-H9
cgggagattgtacccctgacaactttcccaatgtattcatctccttttccgctcaggctcagacagacatggccaacaggcttggcttctctgcatggtatgaggcgggaaggatgatgacctggctaactctctcatgtggcttcgagataccgcaaatcctggctttcagtcgttaaattttggtggacttggtatgagcccttggatgcagccaaggctggatgctaccttacttggtctgcaacctgacatgtatcaggcgatggccacagctgcttttcatgatgcaacaaatcaagcattgtccacaatgctgcagtttcagcagccccagaacatatctggccgggctttccccg

SEQ ID NO: 1587 - DNA, 334 bp, Zea mays
  Clone ID: LIB3136-034-Q1-K1-A1
tcggttttgaccacggaaactgcagctgctgggttgtgcaagatacatctctttgaaaatggagagggaggaagagtacgatgcaaccctgtggcttgatagatctctcatacgtctttgttcaagatttggggattaccggaaggatgatccctcttcattgagcctgcattcaaatttctcattgttccctcagtttatgtataatcttctgcgttcacaatttgttcaggttgtcaattgcagtccagatgagacagcttatttcaggatgttactcagtcgtgagagtatcactaactcggctgccatgatgcatccttccttgatatca

SEQ ID NO: 1588 - DNA, 296 bp, Zea mays
  Clone ID: LIB3136-034-Q1-K1-A10
tttgacatcgacgccaacggcatcctgaacgtgtctgccgaggacaagacaacggggcgggggaacaagatcacaatcaccaacgacaagggccgtctctccaaggaggagatcgagaagatggttcaggacgctgagaagtacaagtctgaggatgaggagcacaagaagaaggtggaggccaagaactcgctggagaactactcctacaacatgcgcaacacgatcaaggacgagaagattgcgtccaagctgccggccgatgacaagaagaagatcgaggacgccatcgacgc

SEQ ID NO: 1589 - DNA, 380 bp, Zea mays
  Clone ID: LIB3136-034-Q1-K1-A11
catacctcactctcctccgaagccatcgtccccgtcccagcctccccggactccaggggcggaagctgcagcgtcgagatggtgaaggggcgcacggagcagcgcgtgaggctctacgtccggggcaccgtccttggatacaagcggtccaagtcgaaccagtacgagactacgtcgctggtgcagatcgagggggtgaacaccaaggaggacgtcgcgtggtactgcgggaagcggatggcctacatctacaatgccaagaccaagagcagcggcacccactaccgctgcatctggggcaaggtcgcccgcccgcatggcaactccggcgtcgtccgcgccaagttcatgtccaacctgccgccggaatccatggggcc

SEQ ID NO: 1590 - DNA, 404 bp, Zea mays
  Clone ID: LIB3136-034-Q1-K1-A12
cggactcgtgtgcggacgcgtgggcgagaacttcctgttcctcaataacaaggaggagggggcgctcaaggccacggacttcggcctctccgtcttcttcaagcccggggagacgtttaaggatcttgtgggaagtgcatattatgtggctcccgaggtattgaagcggcactatggggcagaggctgacatatggagtgctggggttattctttacatccttttatctggtgttcctcctttttgggcagagaatgaggatggcatatttgatgctgtcttgcacagtcacattgatttctcttctgatccttggccttcaatatctaatggtgcaaaagatttggttaagaagatgctgcgacaagacccaaaaaaccgcctgactgctgctgaaattttga

SEQ ID NO: 1591 - DNA, 302 bp, Zea mays
  Clone ID: LIB3136-034-Q1-K1-A2
ggatgaaatgggggttcatgagcacgcacgacgccgagacggcggagtacttccgcgggggcggcgtgcactgcgtgctctgcccccgcaaccccgacgccggcagcagcgccgtcatgggcgcgcagatcgcctacatgatcacgcaccaccagaagatcgtcgtggtcgaccacgaaatgccggcgaagcgcagcgaccgccgccgcatcctcagcttcgtcggcggccttgacctctgcgacggccgctacgacacgcagttccactccctgttccggactctggatacagcgcaccac

SEQ ID NO: 1592 - DNA, 463 bp, Zea mays
  Clone ID: LIB3136-034-Q1-K1-A3
caccccttcagctgttggacaagctgcatttgtcatgtgtttgggagagatggctactggggatgatgaaaaccgtgtaagaaaactgttcagtgccattggaaaagtctggacagctgaagagaaatattttgatgctgtaactggtctgagtggtagtggcccggcctatatcttcctagcaatagaggccatggctgatggtggagttgctgctgggcttcctcgggaccttgcccttggtcttgcatctcaaacagttcttggtgctgcaactatggtgagccagacaggcaaacatccagggcaactgaaagatcaggttacttctccagcaggtactaccattgccgggattcaggagctcgagaagggcgcattccgtggaacgctgattagtgctgttgttgctgccgcaaagcgctgccgcgaactgtcatagagttcgaaacaaggctgcatt

SEQ ID NO: 1593 - DNA, 289 bp, Zea mays
  unsure (1)..(289): unsure at all n locations; Clone ID: LIB3136-034-Q1-K1-A4
agaatattgggaaaatgtatcttctctcaactccagcagtttacaggcgggaaaaaagagagagaaaagaagaggcaggaaaaagcacaatcgtcgcaagaaagctaatttacaggattctccagcatcaactgctgctgataattctggtttggtgacgttttctgagaactgtacttcagcccttaaactagaggaacagaggaagaagcaagatcagaacaagacatccatgactaacttacttttaatcaacaatgcanagagatcagaaccatttgatgtgaat

SEQ ID NO: 1594 - DNA, 411 bp, Zea mays
  Clone ID: LIB3136-034-Q1-K1-A5
gttttgaccaggaaactgcagctgttgtgttggcaagatacatctctttgaaaatggagagggaggaagagttcgatgcaacccggtggcttgatagatctctcatacgtctttgttcaagatttggggattaccggaaggatgatccctcttcatttagcctgcattcaaatttctcattgttccctcagtttatgtttaatcttcggcgttcacaatttgttcaggttttcaataacagtccagatgagacagcttatttcaggatgttactcaatcgtgagagtatcactaactcggttgccatgatccagccttccttgatatcattttcttttgattcacctccatctccggtatttctagatgtggcatcaatagcagcagatcgtatactgctacttgatgcgt

SEQ ID NO: 1595 - DNA, 251 bp, Zea mays
  unsure (1)..(251): unsure at all n locations; Clone ID: LIB3136-034-Q1-K1-A6
ccgggcagngatgtccaacagagacgaggtgtctgttgttgtcaagtgcttgcggcttggggccgccgagtacctggtgaagccgctgcgcacgaatgagctgctgaacctttggacccatgtgtggcggcggagacggatgcttggtttgcccgagaaaaacttcttcaatgacaacttcgagttggtgctctcagaacctagcgatgccaataccaatagcaccaccctcctctcagacgagaccgacg

SEQ ID NO: 1596 - DNA, 305 bp, Zea mays
  Clone ID: LIB3136-034-Q1-K1-A7
gtcgccgtcaacgaccccttcatcaccactgattacatgacctacatgttcaagtacgacgccgtgcacggccaatggaagcacagcgacatcgccctcaaggactccaagacgcttctcttcggcgagaagccggtcaccgtctttggcatcaggaaccccgaggagatcccgtggggtgaggctggtgctgagtatgtcgtggagtccaccggtgtcttcactgacaaggacaaggctgctgcacatctgaagggtggtgccaagaaggttgttatctctgccccaagcaaagatgcacccat

SEQ ID NO: 1597 - DNA, 366 bp, Zea mays
  Clone ID: LIB3136-034-Q1-K1-A8
gcaaactcagaagccgcaagactgttcagctagaacaagcgggagtacaaccgcaaagtcggcgagattgtggagcagagctggacagccgactagtgcaggaggatgctcatcgtgcccgaaagggcacaataaggaaccatgaaaaaacatccttgtgtttgtggttcgccagacctgtcgaaacattgaagaactctagttctagtctgtcgttgtcatggttttggtctgatccagagcaccggttgctcatggtggtggctgtcgaaatgtagcgggtggtggtgacatatatcttcttaaaaaggacctggctgtggaccaaaacctatacgggggaatggtgggtccattgaaccgact

SEQ ID NO: 1598 - DNA, 363 bp, Zea mays
  Clone ID: LIB3136-034-Q1-K1-A9
tggacatggtgcatctggaactccatatgataacggagtattcaggatgaagctatgatggtcacgcgatttccctcaatctcccccaaaagggttcttcttgactaaaattttccatcctaacatagctactagtggtgagatatgtgtaaacacactgaagaaggattggaatcctggccttggattaagacatgttcttctggttgtgagatgccttctgattgaaccatttcctgaatctgcactcattgaacagcctgggaggtggttcctggaaaatattgaggaatatgcacgacatgcaaggttatacactggcatccatgcccttaaacctaagaatacgtccaaaaccggagc

SEQ ID NO: 1599 - DNA, 383 bp, Zea mays
  Clone ID: LIB3136-034-Q1-K1-B1
gagcgatcccactcccgatcagcagctgatcgctcactcttgcagctcgatcattctggggtgctctagctctagctctagctctagcctctagccctagcccctagctagtagctagccactcgatcgtgtagtcatcagccttctgatcgtcacccatggccactgccgaggtccagaccccgaccgtcgtggcgaccgaggaagcgccggtggtggagaccccggctccgcccgccgtcgtgcccgaggaggctgcccccgccgccgaggccaaggtggaggagccagctgccgccgctgagcccgaggcggcccccgtggcggcggaggaagagacgccaaaggaggaagagacggcaaaggagccggagccggccgcg

SEQ ID NO: 1600 - DNA, 425 bp, Zea mays
  Clone ID: LIB3136-034-Q1-K1-B10
cggacgcgtggggtcttgcctccagcaaccctcttgtgcccaaacatcttgcttcacaccgggcctaccatcaattccaaagcctcggaaacctaaatcctcccagaaaaggcttccacagcttgttgtagagcctactgatgcacgttctaattcctttgttggcacacatgagtaccttgcaccagaaatcatcaaaggggatggccatggaagcgctgttgactggtggacgtttggtgtcttcctttatgaacttctatacggcaagacacccttcagaggacctgggaatgatgaaacattggcaaatgtggtctcgcagaatctccggttcccagaccatccagctgtgagcagcaacaccaaagatctcatcagaggtttactggttaaggagcctgagaacagatttggatcgttga

SEQ ID NO: 1601 - DNA, 325 bp, Zea mays
  Clone ID: LIB3136-034-Q1-K1-B11
gcttccgcggcgccctcggcctcagcgagggagggccgctgttcgggttcaccaagtcgagcgagctgttcgtggggcggatggcgcagctgggcgtggccttctccatcatcggcgagatcatcacggggaagggcgcgctggcgcagctcaacatcgagacgggggtgcccatcaacgagatagagcctctcgtcatcttcaacgtcctcttcttcttcatcgccggcatcaaccccggcaatgggcggttcatcatcggggaaggaaaagaataggctggtggccctggacattaatcgggtgccgttacctttacccggga

SEQ ID NO: 1602 - DNA, 95 bp, Zea mays
  Clone ID: LIB3136-034-Q1-K1-B12
aaaaaaaaaaaaaaaaaaaaaaaaaaaaaatttaaaaaaaaaaaaaaaaaaaaaaaaagggagagaaaaaaaaaaaaaaaaaaaaaaaaaaaaag

SEQ ID NO: 1603 - DNA, 257 bp, Zea mays
  Clone ID: LIB3136-034-Q1-K1-B2
gaaaaatgtgttttcagattttttttgcttaaactgcttaacttcttaacttgaaacaagaacttatttttttcaacaattctaactgttaagtgaattcaacacagttggtttcaagatgacaagtaagaaaagtaacagatctacagtcacaccacacactgctctgcatatggaatgggacaggatttcttgccctatttgtatggagcaaccccacaatgctgttttacttatatgcagttcatacaagaatg

SEQ ID NO: 1604 - DNA, 461 bp, Zea mays
  unsure (1)..(461): unsure at all n locations; Clone ID: LIB3136-034-Q1-K1-B3
agcgaagccaaaacgcccattccccttcgccctcttcgaccctagcaagaaggtggcgggggagatggtgtactatgcgcttttggtgggcgcagagctggacggcctcaccaacctgcagcccagcggcggctgcgacgaccccagcttcccctactacctcaagctcaagtgcgagaactgcggggaggtcaccgccaagtccacctacgtcactctcagcgagcaagtcgacctgcccaagggacatggcaccgctcacctcgtccagaagtgcaagctttgtgggagagatggaacaattgtgatgattcctggtcaggggacgccacttactattgagcagagccagaaagaagagaagactngcttgatggtgtttgactgcagaggctatgaaccttgtgaagtttcttttggagctggctggaaggctgaatctgtgcatgggactccttttg

SEQ ID NO: 1605 - DNA, 364 bp, Zea mays
  Clone ID: LIB3136-034-Q1-K1-B4
ttccaagaacacttgtcatctttcaaacaaagttcaggcgcctctcgaggggtttatgtggtttctgagaacaacccgtatgttggtcaccctaatccaatgcaggaaggacaggagctcttccgcaagggcctcttaagtgaagctgttcttgctttagaggccgaagttttgaagaatcctgataatgctgaaggttggaggttgttaggcataacacatgcagaaaatgatgatgaccaacaggccattgcagcaatgatgcgtgcgttggaagctaatccgacaaaccttgaagttcttcttgctcttggtgttagtcacacaaatgaattggagcagggagaagcataaggtatcttta

SEQ ID NO: 1606 - DNA, 414 bp, Zea mays
  unsure (1)..(414): unsure at all n locations; Clone ID: LIB3136-034-Q1-K1-B5
ggagaaggaaggaggaggcgatggcggtggcgaggagaagaagaaggaagggggcaaggaggaagagaagaaggacggcgagaagcaggaggaggagaaggagggcggcggtggcggcgagaaggtggaggaaaaggagggagataaagacgctgccgctgccgccgccgccagcatgtacatgcactacccgaggttcccgttcccgggaggctactacgcgccgcctccggggtacgtctaccagccggtgtacccagcgccggcgtacgcggcgtacgcgccgncgcaccaccagcccatggcgccgcagatcttcagcgacgagaaccccaacgccttgctcgtcatgtaactaaaaaacagaangaccctgccagaagcanaagaggggaaaaagggggaaaaaggatt

SEQ ID NO: 1607 - DNA, 255 bp, Zea mays
  Clone ID: LIB3136-034-Q1-K1-B6
gacgtatatatatgtatgtacaggtggcgcgtgcgggtacggcaacctgtactcggcgggggacggcgcgagcacggcggcgctgagctcgacgctgttcaacgacggcgcggcgtgcgggcagtgctaccaggtgcagtgcgaccagcagaacagccggtggtgcaagccgggcgtggtcgtcaccgtcaccgccaccaacctgtgcccggccgactactccaagcccagcaacgacggcggctggtgcaaccc

SEQ ID NO: 1608 - DNA, 331 bp, Zea mays
  unsure (1)..(331): unsure at all n locations; Clone ID: LIB3136-034-Q1-K1-B7
ccgaccagcagccgagtgcccgattacaatcagccatcgccaccacctccctccacggctgccccntnccgcacgaacacgccgctgtctctaccccttctcctcctccttcagcaagatggcggagattgagataaaaacagcacctgctgacttccgcttccctacaacaaaccaaacaaggcattgttttactcgctatgtcgagtaccacaggtgtttgaatgccaaaggggatgatgctggtgtttgcgaaaaatttgccaagtactacaggtccctttgccctggagaatgggttgagaaatggaacgagcagagggagaacggg

SEQ ID NO: 1609 - DNA, 307 bp, Zea mays
  Clone ID: LIB3136-034-Q1-K1-B8
gtgaatgacgagtgcatgctcaagttcggttagctgcagtcgaagaggctgcaccgcttcgtaactttcaagatggacgacaagttcaaggagatcgttgtggaccaggtcggggatcgcgctaccagctacgaggacttcacaaacagcctccccgagaatgactgccgatacgcgatctatgatttcgactttgtcactgcagaagatgtccagaagagcaggatcttctatatcctatggtccccatcctccgccaaggtgaagagcaagatgctttatgcaagctcaaaccaaaaattcaaga

SEQ ID NO: 1610 - DNA, 399 bp, Zea mays
  Clone ID: LIB3136-034-Q1-K1-B9
cttcaagcttgcctaggtaccctccaagcatagagtttgatgcaaaacgtcgggaggagggagctcgaaggcaaggtgttactggaggaaagcagcataaacatgatcctgaaaggagaactagagaatcaagagcagtccctgcccctgatgcaaatgcagaattagtgtcatcattgcagaaaaggcgagcccaagctaataccaggagcaggagtgagatgttcaatccctgcaaagaagactctgcgtccggattccgaattgaaccaccccgtccgactcctggtaccgagtcttccgaagacccgcatcatgcccatccgaccaggatctttcattctgggcctttagttaatcagagcccagcatcaaaggctggaggtggcaaaaatgatg

SEQ ID NO: 1611 - DNA, 399 bp, Zea mays
  Clone ID: LIB3136-034-Q1-K1-C1
atcaactgcaacctcacgtgtcaagtggttaagggctgaggtaaaccatgctctgatgggggagattcaggagataaaccaacagcttatagatacagagctccatgtctctgaggatgatgctgagtccttcactacatctgaggggggcaaagggacggtcattagatgcacattcactgctgttgctgtttgccccagcttgaaatccgtgtttgcgtcagcgcagatgagtccaattttgccgttgaggttgcttgttcctgctagctacccgaaatgctccccggtgcttctagacaagtttcctgatgaacaatggaactcagacgacctgtctaccaaggccaagacagagttcagcgtattgctctcgggtctagctgaagccatgtcact

SEQ ID NO: 1612 - DNA, 388 bp, Zea mays
  Clone ID: LIB3136-034-Q1-K1-C11
gctttgggtaccatgttacgaatttttttgccccaagtagccgttttgggactccagagagcctaaaatctcttattgataaagcgcatgagcttggcttgctagtgcttatggatattgttcatagtcattcatcaaataataccttggatggtttgaatggtttcgatggcactgatacacattacttccatggtggtccacggggccatcattggatgtgggattctcgcctattcaattatgggagttgggaagttttgagatttctactgtcaaatgcgagatggtggcttgaagaatataaatttgatgggtttcgatttgatggggtgacctccatgatgtatactcaccatggattacaagtgacattcactgggaacta

SEQ ID NO: 1613 - DNA, 408 bp, Zea mays
  Clone ID: LIB3136-034-Q1-K1-C12
cggacgcgtggggcttctctggtttcagacgcaaccccgcgggtcgcgggatcaaggagcgagagagcgggacgcagcgagcgttccgccagagatcgagaccgtagctagggtttgaggcgccgggctgcggtggacgagatgtcgacgccggcgaggaagcggctgatgcgggacttcaggcgcctgcagcaggacccgcccgccgggatcagcggcgcgccgcacgacaacaacatcatgctctggaacgccgtcatattcgggccggatgatacgccgtgggacggtggcacgttcaagcttaccttgcagtttacagaagattacccaaacaagccaccaactgttcgattggtctctaggatgtttcatccaaatatatatgctgatggaagcatctgtttg

SEQ ID NO: 1614 - DNA, 330 bp, Zea mays
  Clone ID: LIB3136-034-Q1-K1-C3
atacaaaaaaagcagccgcaatggcgggcggcaccatggccctctcctgcacggccttcgccggcaaggccgtgaacgtgccgtcgtcgtccgccttcggcgaggcccgcgtgacgatgcgcaagacggcggcgaaggccaagcctgcggcggcgtccgggagcccgtggtacggccccgaccgcgtgctgtacctgggcccactgtccggcgagccaccgagctacctgacgggcgagttcccgggcgactacggctgggacaccgcggggctgtcggcggacccggagacgttcgccaagaaccgggagctggaggtgatccactccc

SEQ ID NO: 1615 - DNA, 427 bp, Zea mays
  Clone ID: LIB3136-034-Q1-K1-C4
aaattaccacaggaatcaccagaatcggtgattatgaactgcatgatcttgtccttttaggcaacttgtcatttggagtaattataagggtggaagctgaagcatttcaggttctgaaaggagtgccagatagacctgaagttgtgctcgtgaaattaagagagataaaaagcaaaattgataggcgctcatcagctaaagatcgttctaataatattatctctgcaaaagatgtcataagggttgttgaaggagcatgcaaggggaagccagggacccgtggaacacatacacaaggggatgctgtttatttatgacaggcatcaccttgaacatgcaggctttatttgtgcaaaagcgcaatcttgccttcttgttggtggatcaaccggtggccatcgaggaaatggtatggacacagttgatg

SEQ ID NO: 1616 - DNA, 367 bp, Zea mays
  Clone ID: LIB3136-034-Q1-K1-C5
ctgcctcgagcatggcattcaggctgatggtcagatgcccggtgacaagaccattgggggaggtgatgatgctttcaacaccttcttcagtgagactggcgctgggaagcacgtcccccgtgctgtttttgttgaccttgagcccactgtcatcgatgaggtgaggactggcacctatcgccagctcttccatcctgagcagctcatcagtggcaaggaggatgcagccaacaacttcgctcgtggtcactacaccattggcaaggagattgttgacctgtgccttgaccgcatcaggaagcttgcagataattgcactggtctccagggcttcctcgtcttcaacgcttgtggtggaggaacgggc

SEQ ID NO: 1617 - DNA, 312 bp, Zea mays
  Clone ID: LIB3136-034-Q1-K1-C6
ggcgccagcagcacggcgcgtacggcgtggtgaggaggagtcgcaccgccggcggcgcccgtggacccgcgcgtcgctgcgttcgagctggagtacgcgcactgggtggaggagcagagcaggcaggcgacggagctgcgggcggcgctgcagtcgcacgcgccggacgtccagctgcgggtcctcgtcgacgccgcgctggcgcactacggcgcgctgttccaggccaaggcgagggcagcccggtccgacgccttcttcgtgctgtccggcgtgtggcggtcccccgcggagcgcttcttcctctggatc

SEQ ID NO: 1618 - DNA, 376 bp, Zea mays
  unsure (1)..(376): unsure at all n locations; Clone ID: LIB3136-034-Q1-K1-C7
gcggcggcgcggacggacaaggagcaggcgtaagaggagttgtgccaaggcacaatgggtgtctcgcgtgactcgatgcacaagcgccgagccaccggtggaaagcagaaggcctggaggaagaagcgaaagtatgagcttggtcgccagccagccaacaccaagttgtcaagcaataagacagttaggagggtccgtgttcgtggaggtaatgtgaaatggagggctcttcgccttgatactggtaactactcatggggaagtgaagctgttacccgcaagacccgtatcctcgacgtggtctacaatgcgtcaaacaatgagcttgtgaggacacanacccttgtgaagagtgccattgtgcaagttgatgctg

SEQ ID NO: 1619 - DNA, 257 bp, Zea mays
  Clone ID: LIB3136-034-Q1-K1-C8
ccctccctcccctcccaagaaacacaagagtcagccagcgcttgcgaggctcaagcgccgcggcaatgtctctggccccgtccatcccttccatcaaggtgaaggtggggcccgtctcggtggcgcccccgcaccgcgcatgccgatccttcgcggtggtcaggagctccaaggcggagggccccatccggagacccgcggcgcccccgctgtcgccaccgccaaagacgccggctctgtccactccttccaaccct

SEQ ID NO: 1620 - DNA, 368 bp, Zea mays
  Clone ID: LIB3136-034-Q1-K1-D1
cggacgcgtgggggatagcttacctcacatcgacggtcggtgagccgttcgtgagtggggaggcagtgcgtgcgctgcagcctgcagggcaagaacaggcgacgaagaagatgagcacgctggacacgcggacgctcaaggacgagctgacgagcatggacaggaagtgcctcgtggacctcggccacccgctgctcaaccgcgtcgccgacagcttcatccgcgccgccggggtcggggcggccagggccgtctccagggaggcctacgtcgtcaccgtcgaagggctttcaggagactcgtccgggctggacgccgacggcggcaagcggagccacttcttcagcatcagagggcgacgacggcaa

SEQ ID NO: 1621 - DNA, 411 bp, Zea mays
  Clone ID: LIB3136-034-Q1-K1-D10
cacgcacgtctcgcaactgccgcggcacaccgcgccgcttctcctcctcctcctcctccggcttccgagccgagagaaaggctgctgccagagggacgagggcgagcgaggatccttccgagcgatggagcagtacgaggtggtggagcagatcggccggggcgcctacggctccgcctacctcgtcctccacaaggccgagcgcaagaggtgacgatttccccccctttttcgctggtcgtcgccgactccctcctgctctgctccggttcctcatccttccctgtctgttgctttgcttgccgccgccacggcgccggcgcaggtacgtcatgaagaagatccgcctctccaagcagaacgacaagttccagcggaccgcttaccaggagatgtccctgatggcaagcc

SEQ ID NO: 1622 - DNA, 422 bp, Zea mays
  Clone ID: LIB3136-034-Q1-K1-D11
ctgctcttttaacataacggattgtggtggtgggcttgaccccaatgtcagcgaagatgaactgagaaaagcctttgccaaatatgatcttgcctctgtgaaaattcctctaggaaagcaatgtggctttgttcaatttgttagcagaactgatgctgaagaagcactacaaggattaaatggatcactcattggaaagcaggcagttcgcctttcatgggtccgcagcccatcgcataagcagtctaggggtgactccgtcaacaggaggaacaacatgtactatggcacaccattctacggtggatatggctatgcctccccggtgccacacccaaacatgtacgctgcagcgtatggcacgtacccgctatatggcaaccagcatctagtgagctagagaggctcccttcgacgtgtcc

SEQ ID NO: 1623 - DNA, 323 bp, Zea mays
  Clone ID: LIB3136-034-Q1-K1-D12
acctccgctacgtcgacgcccacaacgccgccgccgacgcgggcgtccactccttccgccgggggctcaaccgcttcgccgacctcaccaacgacgagtaccgcgccacctacctcggcgtcaggagcaggccgcagagggagaggaggctcggtgacaggtacctggccggcgacaacgaggacctgccggagtccgtcgactggcgggccaagggcgccgtcgcggagatcaaggaccagggcagctgcgggagttgctgggctttctcaacaatagcggctggggaaggcatcaaccagattggtactggcgacatgatc

SEQ ID NO: 1624 - DNA, 233 bp, Zea mays
  Clone ID: LIB3136-034-Q1-K1-D2
agcggaccgagacggctgcttcgcatgttgttatccgatgcattcgtcctgagcgctgacggggccactggcgaccactccgttcgcaacgactccagcacctacggtgaggtcctacagtgcaacatcattctcgatcgggagacgcagaggtcccgaggctccagcttatacaccttctccacggaggaggcgatgccgagcgccatgaaaggcatgaacgtgagggagct

SEQ ID NO: 1625 - DNA, 427 bp, Zea mays
  Clone ID: LIB3136-032-Q1-K1-A5
ccttggcccaaaaggttctgaccctcacaaggcggctgtcattggtgacaccattggagatccgctcaaggacacgtctggcccttccctcaacatcctcatcaagcttatggcggttgaatcccttgtcttcgcccccttcttcgccgcccatggtggcattctcttcaaatggctctaagccagcgagagacgcaggataaaggccgtagttttgcaaggcgagtagagcagtatgtcagtaatacagcatctatggcatgtgcttttgctcgtccagttcatgagccccgttgtgtatttggtttccgttttcttggttggagtttttagttccaaggtccgatcatgttttgatcccataaattctcttccagccttcgagcaactgagtccatcttcctaagtcatcagccccagcgagaca

SEQ ID NO: 1626 - DNA, 275 bp, Zea mays
  Clone ID: LIB3136-028-Q1-K1-F4
cgatcaagtcggagacggagcgcattgagtacctcaagacggtgagcgactgctacacgcggacgatgaagctcctcgacgattccatggcggccaggaccacgtacgagcgttcgggcggaatgaggagcctcgtcgcccgggacatggacgactacgtcgtctacggcctcaacgcgtgcttgcagaacgtccgcaactgctgcgtgcgcctggacgccatcgacaagctgcgggcgcactacgacgccctcgccgacgccgtcgccgacccg

SEQ ID NO: 1627 - DNA, 356 bp, Zea mays
  Clone ID: LIB3136-028-Q1-K1-F5
caaggtcttctccctttcttcgctccacccgtggcttttccatttgtaccagctcctagtgctgcctttcccacagttgatgttccacgaccttcatagaaagacagagattgcccagttgaaaatgcacagaatgaatgccaagaagctcgaaaacaggtacagttcgaaggtttaagagttgctgcttcttcagagtctgatgggagtggaaaaggcgaggtgtctctccatacggagttaaagctatctcctgcccagaatgctgatgccacacctaccacaggagctggcacaaatgatgcattcaggaataagaaaaagcaggatcgctcttcatgcggttctaacacacc

SEQ ID NO: 1628 - DNA, 335 bp, Zea mays
  Clone ID: LIB3136-028-Q1-K1-F6
acgattcaagccaaatatcatgaaaacaagcagtgagatagtgaacaagctccgctcagaaggccatttcatgtcaattcatcttcgatttgagttggatatgcttgcatttgcagggtgctttgacatattcaaacctcaagagcaaaaaattctgtggaagtacagggaagaacattttgcagaaaaggaacttatccccatgaaaatcatgctcaaaggaaagtgccctttaacttcagaagaggtaggttttattctacgtgccatgggatttgacaatagaacacgcatttaccttgcctctggcgagctctttggagggaaacgtttca

SEQ ID NO: 1629 - DNA, 379 bp, Zea mays
  Clone ID: LIB3136-028-Q1-K1-F7
ctgctgtatattgtgcagaaggtgaaagattcagagctcaagacattgcttggtgataactggattcgcaagcgtcgtggtcagattaggcaatactctacagggtatcttccatcatcatggactagggtgttagcttgcctgagagatgatgggcttccgcacacgatgggttcatcaagcacactcaaagccgcattgaaggatagattcaaaaactttaacttggccttcgaggagttgcacaggacacagacatcatggaggggttgggatccctaattaaaaaaaaaactgaagaactcaatcttcgagaagggtctttcaacatacccgtcatttggtggaaaaattccgggacaacttgaaggaaggaagg

SEQ ID NO: 1630 - DNA, 343 bp, Zea mays
  Clone ID: LIB3136-028-Q1-K1-F8
cggacgcgtggggggtgattgaggaccagtgggtgccgatgtgggatgaggagttcacgttgcttctgacggttccggagctggccctcctgagggtagaggtccaggagtacgacatgtcggagaagcacgacttcggggggcagacagtgttgccggtatgggagctgaagcagggcatacgtgctgtgcccctgcacgatcgcaagggtgtcaggtacaagtccgtcaggctactcatgcgatttgattttgtgtagccgagccgagccgccattcagattcagcttctctttttttcccttcttgtgtgaattgaatgtattacttccttttctttcat

SEQ ID NO: 1631 - DNA, 257 bp, Zea mays
  Clone ID: LIB3136-028-Q1-K1-F9
gtctgatgcaagttcttgtgtggattagcgtaccacagcacatctcaaccccgtggcgacggggagtggtaagaatcaacgctctccaagtgtaaagaacaggtgcccggacacatgggttctgggagtgataggggctaagccactagcgcatggatagacctggtctaggctgacagtgtcctttaattaatgtcctgacaacatttcattaggctcttagcacctgctgttacaagcaagaacttgaacagggc

SEQ ID NO: 1632 - DNA, 234 bp, Zea mays
  Clone ID: LIB3136-028-Q1-K1-G1
cggacagggccggaacccagggatcgagactgaacagcagtccgagacgccatgaacgtggaggaggaggtcgggaggctcaaggaggagatccataggctgggccagcagcagcccgatggctcttacaaggtcaagtttggcgtcctcttcaacgacgatcggtgtgcaaatatctttgaagcactagttggcaccttgagggccgccaagaagaggaagatcttgacctac

SEQ ID NO: 1633 - DNA, 173 bp, Zea mays
  Clone ID: LIB3136-028-Q1-K1-G11
gaaatcgggtgtcgcgtcgtcgcacggtgttgctcgccatatccccttcccccctgctgcgtgcgttccccggctccggcgatccgacgtacctgaacccttctccacgtcacctcgccggttgcgttgaggtgagccgatcagatcccatcggggccggtccttgcgccact

SEQ ID NO: 1634 - DNA, 213 bp, Zea mays
  Clone ID: LIB3136-028-Q1-K1-G12
aaaatacatattcacgtcccaaactactgcatctcgagctacttcactcaacatcatcttcggaatccatcaggttaagaacaaccaccagtcctgtatgcacctctatctagaaacgctagctgactttaagcatgcccatctgatctcctaggatccacaacttgacctactgactgattgacctcatacccgatgagcatgtgatggact

SEQ ID NO: 1635 - DNA, 291 bp, Zea mays
  Clone ID: LIB3136-028-Q1-K1-G2
cctgaacccaagtgcagtgcagcagccatgggagcagcagcagcaggtggccacgcgctgcgcgccgtcggcgacgtcgtctcgttccccgcgaccgtcgccgccttcgtggaggcgctgctccagggctgggccgaggccagggccgggctgctggtgccgctgctccgcgccgcggtgctgctgtgcacggccatgtcgctgatcgtgctggccgagaaggtgttcctgggcgcggtcagctccgtggcgaagcttgcgcgccggcgtccggggcgggtgtgcaagtgc

SEQ ID NO: 1636 - DNA, 111 bp, Zea mays
  Clone ID: LIB3136-028-Q1-K1-G3
gcgtacgcgctcccttataaaacctacgtcctcaagcttcaaacacaatctaacccccacaacccggagtaggggacgcacctgttctagaatcctacatatcaaagaatc

SEQ ID NO: 1637 - DNA, 314 bp, Zea mays
  Clone ID: LIB3136-028-Q1-K1-G4
ctttgcttctccatctccccattcccttcccacccccggcccggcggcggtacgtgaccctgacgccgcagcgctagctagctcgccggaacggcaggtggcggcgcgcgacctgagagcacagcagcaccggaccggctcaggcaggcgaccggcagaaaagatggcgggagcagcagctgtggagacggcggcggcggcggcggcggcggcagcggccaacggaaaagcgtgctgccacgccgccaaggggcccgggtacgccacgccgcttgaagccatggagaaagggccccaggagaagctcgtctacg

SEQ ID NO: 1638 - DNA, 368 bp, Zea mays
  unsure (1)..(368): unsure at all n locations; Clone ID: LIB3136-028-Q1-K1-G5
cccactcgtggcgtcgcccgtcgcccgctgctcgctagcctactacgacttggaacttggagcccttccccttcctcctcctcgtgtcctcttccgttgccgtgccaaccaccaccctcaattgtcaaatcaggcctcctccttccggttccggttccaccaacgaccaagcacccatctctactcgagtctctgcgaatccgttgccggtagcctctctgcggtgagagttccgctgccgcctgctggagatgatggacgacngaagaagaggggtgcagtcgcaaggcgtcaacccggactgtcccaacgccgncaacccctttcaccggtgggccgcgtactggcccgttcccggcccgggcccc

SEQ ID NO: 1639 - DNA, 323 bp, Zea mays
  Clone ID: LIB3136-028-Q1-K1-G6
tcgcccacgcgtccgcattgataccgtacgagttagaggagattcaattggtggggtcgtcacatgcattgcaagaaacgttcctcgtggtcttggctctcctgtttttgacaaacttgaagctgaactggcaaaagccatgctttctcttcctgcaagcaatgggtttgagattggccgtgggttcgctggtacggactttactggaagtgagcataatgatgagttctatatggatgaggctggaaatgtgaggacacgaactacatcctcaggcggtgttcaaggagggatatcaaatggtgaaattatttacttcaaaa

SEQ ID NO: 1640 - DNA, 225 bp, Zea mays
  Clone ID: LIB3136-028-Q1-K1-G7
ccgcagcaccggcacgccgcaccgcctctcggagaatcgaagccgaactgggcggggggcgtaatggatctgctgaagcgggaactggagaagaagcggaaggcggcgacggccgacttcgggggcaagagcttcgtgcggcggtcggagctggagcagaagcagctccagaagcgccgcgacgagcaccgccagctcctcgccaaggccggcacgtcggcgccc

SEQ ID NO: 1641 - DNA, 282 bp, Zea mays
  Clone ID: LIB3136-028-Q1-K1-G8
tcgctgacgcgtgggaggacccctagacagagatgcgcgagggccacaactacgtgcggggcggcgagcagttatctgaggtgaagcaactcacgttcggggccaccacgctgcgctcccgcctgcacgcgctgctgtcagcgctgcgcccgctggtcataaacaagaaagatctgcgctttccagacttccgcgccatcgacgaactctacagcgaccgaatgccaatggcggtgcaaaccgggttcgacgccatgctcaccgacgtccctggcatggtta

SEQ ID NO: 1642 - DNA, 249 bp, Zea mays
  Clone ID: LIB3136-028-Q1-K1-G9
gccctgccttgttaagcaaagcaacccagctgcgagacacgagagctagctagagagagatggcggtcacggcttactccttcccggtggtgaacatggagaagctggagaccgaggagagggccacggccatggaggtcatccgcgacggctgcgagaactggggcttcttcgagctgctgaaccacggcatctcgcacgagctgatggacgaggtggagcggctgaccaaggcgcactacgccacct

SEQ ID NO: 1643 - DNA, 430 bp, Zea mays
  Clone ID: LIB3136-028-Q1-K1-H1
gcgtccggtcgtgggaagatttcaagtctgtcgtcgagtttcgccttgttggagactctgaatctgaggccgagccttctgttgcttctgatgttagctctgggcaagcaattgccaagctctctcttgaagcagatattgtacaagaagaggctcgcctgcacaccattgagaatgatggactttctggcgatttcacatcatcatcatcttacgattccaggcaaggatggaaaagcgtaaggttaaaaatgaaaattaaggattaagggtctacataatatggcaagcttgaaatccttggcctggttaatggaatatttatggttcgtttcaaaccttggaacataaaactgtatattttcggatttcacaccggtcaattccatggctggattccttctgctatatatatatattttgatcctcc

SEQ ID NO: 1644 - DNA, 286 bp, Zea mays
  Clone ID: LIB3136-028-Q1-K1-H10
ctcctatgccgccgtcaccgccccttcctttttcgcacccgcaccagcccgcgccgtggtgggaaggaggtccttcaccgtgcgcgcctctatccggaaggccaccggcaccgccgccgtggcaatggctgccagcgccctgcttgccggcggtgccatggcccaggaggtgctgctggacgcaggcgaccgcgggctcgtcttcaaacccagccagttcaccgtcaaggccggcgacaccatcacattcaagaacaacgccggcttcccgcacaacgtcgtcttc

SEQ ID NO: 1645 - DNA, 154 bp, Zea mays
  Clone ID: LIB3136-028-Q1-K1-H11
acggtagtggtctcatagatagcgctagcagctgtagaaaccgccaccactatgctaggagtggaagcctctgtcccgcagcagcagccattgcggcgttcctggcacctccctgcacttccttctatcggtcgtacacattccttaccccctg

SEQ ID NO: 1646 - DNA, 362 bp, Zea mays
  Clone ID: LIB3136-028-Q1-K1-H12
ccgccaacggctccgcctcgtctcccgcgtcgtctaatgccacggactactcccccgccggcacgcatgtcgcgtacgacagtaacggccgctccatctactacaccagcatgctcccccagtacccgtcggctgtcaatggcatgtcctcggcgggcgccgttctcgggacagagcccgtgaatccggtggccgtgaagccgaccgtgtcgtgaccaccccagcttacacctcgcctcatcaccaacaccaatggatcaaaattttctttcatcctcaccagtgtgcaatggactgtctagagttgcttttttgtgcctgctggtgttctgggttcatgatatgatgaccatgcaagtatg

SEQ ID NO: 1647 - DNA, 328 bp, Zea mays
  Clone ID: LIB3136-028-Q1-K1-H2
gcctcctgcaccgggccatccccgacggcgccaagtcgttcgagacggtggactcgctgagcgtcttccgggcgaagaactacgacgccaccatcgagttctactgggcgccgatgctggccgagtccaactccgacgacgccgtggtgcactccgccgacgaccgcctcatccgcggcgcgcccatggacaggcactccagcttctggaagggcgccgacgtcctcgtcttcaactcctacctctggtgggtcgccggggacaagatccacatcctgaggggcgccgacaacgacccgagcaaggacatcgtggagatgaagtcgga

SEQ ID NO: 1648 - DNA, 197 bp, Zea mays
  Clone ID: LIB3136-028-Q1-K1-H3
cacgatggacgagcatcacacaggaagggcttgttttccaccgaagtgcggctcctgtatggcggcggcggccgaagcaatcccgggagtgacagcaatggaatcttgggatgcgagtggtccgacttaatttccccgacctcagcgaagcttttggccttcaacgccacgatggacgagcatcacagaagagtgca

SEQ ID NO: 1649 - DNA, 122 bp, Zea mays
  Clone ID: LIB3136-028-Q1-K1-H4
aaattttgatgccattctgttaccgtgggcttcttatatacccgactccataaaggaaaggggggggtgacctcaagccaaccttctagcacctttgattcaagaagcaacttcgcatggac

SEQ ID NO: 1650 - DNA, 259 bp, Zea mays
  unsure (1)..(259): unsure at all n locations; Clone ID: LIB3136-028-Q1-K1-H5
gaaagagaaggggttcgctagtttttgactcgagcaagctgtgaaacataagtgttactgtgctacgtgatgttgcattgtatacatgcatcggacttcgcagttcccaagctattttggtagctttggtctgtaagattacctaaaataaactgagccacgttgccacgctgtagcttttggacatgttatgctttgatcggattgagacacgtgatatatgatcgttgcttacncaacaaaaaagataccaattaaa

SEQ ID NO: 1651 - DNA, 358 bp, Zea mays
  Clone ID: LIB3136-028-Q1-K1-H6
ttcaagtctcgctacgtagcagtgcaataaaaaaagcagccgcaatggcgagcagcaccatggccctctcctccacggccttcgccggcaaggccgtgaacgtgccgtcgtcgtccgccttcggcgaggcccgcgtgacgatgcgcaagacggcggggaaggccaagccggcggcggcgtccgggagcccgtggtacggccccgaccgcgtgctgtacctgggcccactgtccggcgagccgccgagctacctgacgggcgagttcccgggcgactacggctgggacaccgcggggctgtcggcggacccggagacgttcgccaagaaccgggagctggaggtgatcccactcccgct

SEQ ID NO: 1652 - DNA, 252 bp, Zea mays
  unsure (1)..(252): unsure at all n locations; Clone ID: LIB3136-028-Q1-K1-H7
cccctcttggcctcttctttccggcgatgggcgccggcgtcctcctcggcgacgcggccgggctgggggcccacctcgccgtacgccgacggaggacgcgcctctaccttcgcaactgngcctccaagcccctgcgcccctcggactggctcggcgtggccgcctgtgtttcacagaatcgcgaccgacgtggccacgtgaccagggtatccggctccggcttaagcgggagtgacaaagcccgggggagct

SEQ ID NO: 1653 - DNA, 437 bp, Zea mays
  unsure (1)..(437): unsure at all n locations; Clone ID: LIB3136-028-Q1-K1-H8
tgcacttctctgttgaaataagcaggaagcttacatggaacatccncgtaaggatggcacgaggcactgctcgagcacttgagtacctgcatgaggtgtgcatgccgtctcttgttcatagaaatttgaagtcttcaaacattctactagatgaggagcataatccacacctatctgactgtggacttgctgccttgactccaaatactgaaagacaggtttcaactgaagtatttggatcatttggctatagcgccccagagtttgcaatgtctggcatttatactgtaaagagcgatgtatacagctttggagtggtaatgttagagctattgacagggcggaagccactagacagttccagagagaggtcacaacagtctcttgttagatgggctacccctcaacttcatgatattgatgcacttgctaggatg

SEQ ID NO: 1654 - DNA, 244 bp, Zea mays
  Clone ID: LIB3136-029-Q1-K1-A1
cggacgcgtgggatttggcaagactcaagttctctcatctggtttcagaaaacatctgtcggttgattgcttggtctcctgtttctttgagtcttgccaaccaaagtttctctcagcatcagttgtggtctacgaactctttctgtgacttgaccaacatctctttttgtcctgtcaatcttgcaacactcccttccaaagactcgtctagaggctggattgccttgctctcttgctgcgctgc

SEQ ID NO: 1655 - DNA, 256 bp, Zea mays
  Clone ID: LIB3136-029-Q1-K1-A10
acccacgcgtgcgcaaaaacgttgttgggaaattcttccttgatgcaataattaaagctgttggatgctacaaaggctgttagtgcatatcctgtggatgatagctcaatggaaattgaatcctattccaacaaaaatatcatgaagagggctctacttttggattttgcagcttcattgatgcctgctttagcttcaaagtctatcaatgtgttgttcagttatgtgaaacctgcaattaaagacagcgactctt

SEQ ID NO: 1656 - DNA, 324 bp, Zea mays
  Clone ID: LIB3136-029-Q1-K1-A2
ggcttggtctccggtaacgcactcagtcgatggcctcacccacagccgcagcagcaccggcagagttcacgcagatggaagcccgcgccagtccctcatcgcgattcccagtcggtcccggaggtcggggcgcccgtcgtcagcccgcccagcggcggccgaggcatggatgagaatgggcacgaggacgtcgcggagcggaggtacagggcgaagcttatctccatctccaaccagtcgcccgacgcgcggcctacgacgtgccctcgcaacaacggcgccgcctaaagagccgcgtttgtgtattgtaacgtcgccgcatgt

SEQ ID NO: 1657 - DNA, 357 bp, Zea mays
  unsure (1)..(357): unsure at all n locations; Clone ID: LIB3136-029-Q1-K1-A3
ggttattagttgctcaggagatggcacattcaagggttcatggtagaaagggctcgactagctaggacgggtatggatgacgttggacatggagcctcgatttggagacatgaaaatggagctacaggccagaagacagagggaggctgctttggaagctgctttggcagagaaggagcttctcgaagaagagtacaagaaaaagtttgacgaggcaaagaaaaaggaactatctctggagaatgatctagcaggcatgtgggttcttgttgctaagttgaaaagaggagctttaggcatatctgatttgaatgtngacgaccgaactgttaacctagctgatataactacagcaca

SEQ ID NO: 1658 - DNA, 297 bp, Zea mays
  Clone ID: LIB3136-029-Q1-K1-A4
ctgggcttgggtttcctcacacgtctcattgccttgcgtctggcgacataatgatttcttgccttggggacaaggaggggaagcagctggcaatggcttcctgctttggattcagagtttaatgtcaaaggacgttgggaaaagccaggtcacagtcccttgtttggatatgacttctggtaccagcctcgccacaaaacgatgatcagttcgtcatggggagcccctgcagcgtttaggacaggtttcgatcttcaacatgtccaggatggcctgtatggaaggcacctgcatgtg

SEQ ID NO: 1659 - DNA, 278 bp, Zea mays
  Clone ID: LIB3136-029-Q1-K1-A6
cacaaaagctgctgttgagcatgtaaaggaaagctttgcttctgctggacagactggcttcagaacaagtgaagaatggcaacaggcttaaaactgccatcattccacccattctgtcaatgttgaaggggctggctaagggccatctgcctacacagaaatgcattgatgaagaaggcatattaccactgctccatgctctggaaggggtgcctggtgaaaatgaaattggtgcaagagcagaaaatcttttggatacactagccaataatgaaaat

SEQ ID NO: 1660 - DNA, 252 bp, Zea mays
  Clone ID: LIB3136-029-Q1-K1-A7
cccagagcagccgcatcgtactctacctgcctttctctcgtccctggcggcggcggcaggatggcggcttctactggaggacggtgaaggatgtgaaccccacgagtttgtcaaggcctactccgcccatctcaaacgctccggcaagatggagcttcctgagtgggttgacattgtgaagactgcgaggttcaaggagctccctccttatgaccctgactggtactacatcagggctgcatctgtagcaag

SEQ ID NO: 1661 - DNA, 407 bp, Zea mays
  Clone ID: LIB3136-029-Q1-K1-A8
gccagcacgcgttacccaaattctcccaccctactagaaatccccatatccgcggcggcgccgtgcatcggattagatctcctagcgagtcgactacatcgatcagtggagccggggcaccagccaccatgtgtgcggcatcgtgcctcgcgtcatgctgcgcggcgtgcgcgtgcaaggcgtgcctgacggaggacggcagcatcggccgccgatacgtgcgcatcgtctactgcggactattcgcgctatccctcttcgcatcctgagcgctccaagaggtcgccgcgcccctgctgcaatagattccatggattaaccacttccacaagacccccgaccgctagtggttcgagaccgacgcggagctcatggtcagtctctgcaacttcctacttttcaccatc

SEQ ID NO: 1662 - DNA, 280 bp, Zea mays
  Clone ID: LIB3136-029-Q1-K1-A9
acgctagggttttagcccggtacccctaatcctgctacttcgacgtctcgcgtacacccttggggttggggcgctcccatccaaaagatggccgtgccgctgctgacaaagaacatcgttaataagcgggtcaagcacttcaagaggccccatcttgaccggtataagtgccttaagccaagctgtctcatgccaaacggtattgacttccttgtcaggacgaactttaagggatgcacctagatgcccaacattgcttacggttctgacaaatcaacca

SEQ ID NO: 1663 - DNA, 278 bp, Zea mays
  Clone ID: LIB3136-029-Q1-K1-B1
acggcggcgagcgacccactaggtagtttctacacgggattgttgctccgtgctaatgtgcacttcctgtctaagccggttaaagatggaacaactggaactgtcatgttctaacaacgccggatgcacagcgtactatgcttgcgtatcagggtacttcgtcaactctgagttacgattcagacttggccagtttagtgtctaaatcaaatgtactaattgtggaaggttatctatttgagctgcctcacacaattgaagctatcaagcaagcgtgt

SEQ ID NO: 1664 - DNA, 281 bp, Zea mays
  Clone ID: LIB3136-029-Q1-K1-B10
gggcggcgtcttcgacggcgcgtccattaaccccgccgtgtccttcggccccgccctcgggagctgggggtggggctaccagtgggtgtactgcatctgccccctcatcggcggcggtctcgccggcgtcatctacgagctgctcttcatctcccacacccacgagcagctgccctgcaccgactactaaaagccgaagccgaccgacctatgggtgcgcagcgcatctagcgcatacagctctttttacccgctcgccgccgtttaatttctttcgtgca

SEQ ID NO: 1665 - DNA, 233 bp, Zea mays
  Clone ID: LIB3136-029-Q1-K1-B11
cacgcggagcagctcgccaaggtgctcgacgtgtacgaggcgcacctggcccgcaacaagtgcctcggcggggacgagttcacgctcgccgacgccaaccacgcgtcctacctgctctacctcagcaagacccccaaggccgggctcgtcgccgcccgcccccacgtcaaggcctggtgggaggccatcgccgcccgccccgcgttccagaagaccgtcgccgtcatcccctt

SEQ ID NO: 1666 - DNA, 285 bp, Zea mays
  Clone ID: LIB3136-029-Q1-K1-B12
cgcgtgcgctggaaatgatagaactatgacggccggcttcttttcagctgggccatgcaacaagttagggatgaggggactactcttcaagatatgttaccaaacataacaaaacgttgttctctgtccaacattcttgaacaatgcatgtattgtgcaatgggtcttgactcagacggataggatcttcgtggtcttattccaccgaactttgataatgccgttctaaacttattcttacagaatatgactacggaggacgtaacccttcaagtcatttttgat

SEQ ID NO: 1667 - DNA, 271 bp, Zea mays
  Clone ID: LIB3136-029-Q1-K1-B2
tgcttgcctgtctgctatcacctttcatgccctccttttctgatgaagtattacgtcaattaaatttatctccagaagaaaattgtcattaagtgaagaaaaggggaaattgcaaaggcaaaatctccttgggattttgtaccagcagggcacagaatagggaagcctgcacctctgttcaaggaattgaaagatgaagacgtagctctccatagagaaaaatatgcagggagtcaagctgagagaagctcaaaagcagcagctgatgctg

SEQ ID NO: 1668 - DNA, 61 bp, Zea mays
  Clone ID: LIB3136-029-Q1-K1-B3
gcgctgacaacgcgccccaaccccaacccagtcgagtgcccctgcgttctctctgcagttc

SEQ ID NO: 1669 - DNA, 291 bp, Zea mays
  Clone ID: LIB3136-029-Q1-K1-B4
gaacttggctgtctgccctgtctgcaagtacttcgtcttcttcctggagagaaaaagcagaagacaatacaaagatgtccaagaggcggaggagaaggcggcggcaggggcggactcggaggagccggggcggcggacgcggcgcagcagcagcagctggcagcaggggaggccgcggcggcgcgggtgcggcccgtggagacgctgcttcgcgcggcaccgctggggctctgcgtggccgccatgaccgtcatgctccgtaaccagcagagcaacgagtacggcgccgtc

SEQ ID NO: 1670 - DNA, 229 bp, Zea mays
  unsure (1)..(229): unsure at all n locations; Clone ID: LIB3136-029-Q1-K1-B5
ntttggagttctaccaaaagtgatcttaaatctttgttctttgactttccgctttgtgaacggaaggcccaatctgctagtatggtgtgttgatctctgtttctctggtgctgactgaactggtcatacaaaactcgttcaacaggcagaaatgctgactggcggccttctagattgcttctttgacgccgcagagagcacatcaaaaattgtgtttgtttcgaacgat

SEQ ID NO: 1671 - DNA, 265 bp, Zea mays
  Clone ID: LIB3136-029-Q1-K1-B6
caactgtcgaatgggaaaactattccgacacatagcaggaacaacttctgcccagttacaccagataacatagaagcactctaatggggatgccaagctcagtggtagtaactcgtatcaaactccaccaagccaaaggtgccacgcaactaatactagagctgttactgctgaaagcttgaagaaagagcagactggagcagctaagagaatgtttgcgcatgcactggggctgtctgcagctcgagaaattgtggtacgctgc

SEQ ID NO: 1672 - DNA, 387 bp, Zea mays
  Clone ID: LIB3136-029-Q1-K1-B8
cggacgcgtgggcggacgcgtgggctacaacaacggcctcccgtccaacctgtccggcgggcgcaaccccagcttggactcggcttcaagggcgccgagatcccatggcctcctactgctcggagctccagttcctgggcaacccggtgaccaaccacgtccagagcgcggagcagcacaaccaggacgtgaactccctgggcctcatctcgtccaggaagaccgccgaggcagtggacatcctgaagctgatgacgtccacgttcctgatcgcgctgggccaagccatcgaccttgcgcacctcgaggaaaacgtgaaagccccggtgaagaactgcgtgacgcaagtggccaagaagtcgcttagcctgaacgcccggggcgggc

SEQ ID NO: 1673 - DNA, 225 bp, Zea mays
  Clone ID: LIB3136-029-Q1-K1-C1
cgcgacgcgcacaccagctcgccgtcggacgcaagttctcacaggctgctgctgctccgtgggccgggcgccaactctgacccgtacgcgttacgtgaaggcaccatggcacgcgtgctctgctcccggtcagcggtcctggcgcgccgcctcggggcccagccccagccccagcccggcgtggttctgagccgtcggcacaaccacactcgccggcgcgcggtg

SEQ ID NO: 1674 - DNA, 361 bp, Zea mays
  Clone ID: LIB3136-029-Q1-K1-C11
accgtcgataccacacttctaaaggagaatgggaatgggatgaatgatggaaagcccacagaggaagaggtagaagctaaaatggcacaaatggtctgttcttttaacaaccgggaagagtgcctggcgtgtggaagctagattggagctccatctggacactgcacttatttgtgacctcaggccacagcattatatgccgccggctgatgactggagcccaataaccagaacgaaatctgatgtaggatgaggtagaaactccattcccttcccataatgggaacaataccttgcctctgaaatactgttaggactaagtttggtaactctatttttttcaagaagattcatatttttt

SEQ ID NO: 1675 - DNA, 455 bp, Zea mays
  Clone ID: LIB3136-029-Q1-K1-C12
cgcgtgcgcgacagagaagcttcaaggggatattaattaagacgttttaaacatcttgcacaaagactcaggcctggggtgttaaatcaaaagaagaattctttagtcacttttacgactgctttcaaattttaaggggcgtctgcatctcatttttttcttgtaaaaaaaatttttctctttgtttacctttaccatcctgttctttttttggaaccaacaaccttgaaaaattacatggttttatccattttattttttattccctaccacctttattattcccccttttgtttaatgtttcttaaaaaattcatttgtaatccttgctttttttccccctatttgtggctcggaaacttccaattctttacaccttttgttccccccctctcatttttacattgttaaatttacaatatttctccttcttaaagctttttttcaaatttttt

SEQ ID NO: 1676 - DNA, 332 bp, Zea mays
  unsure (1)..(332): unsure at all n locations; Clone ID: LIB3136-029-Q1-K1-C2
gattagctaccacggcaccgccagcccgggcggctataaagacgaggcccatctcgaaatcgacggcgatgaagaagaccagttccctctcctgatcgtcctgttcccacagcagcagccatggcggccgagccggagaagcaggcggcccccgcggcacaggagacggccgtgcacatcgtgtacgttgaccgccccgaggacgccgaccctgaggagttccacatccgcaccctcacccccgtcctcggcagcgaacagaaggccagggacgcagtgctctaccactacaagaacgccgncagcgggcttcttcgcaaagctcacccccc

SEQ ID NO: 1677 - DNA, 381 bp, Zea mays
  unsure (1)..(381): unsure at all n locations; Clone ID: LIB3136-029-Q1-K1-C3
ctcgcataccactgcatgggtgttggggttcttgtatccctgctagtgatgaccctctcccacagccaccaagtctgctcttccagagaatcaagtgccagtgtgaccatgctcacaattctttaccccaccatagccagaacattctagggagttgctggcctatatgaagcttgttccataatcatctcacgttctctggaggacatggttgctggagtgacttggccgtccatcttgccaccaggttggacagtcgagtgggaccctacctcggctgatgaggagcatgaagagtgatnggacagggcttcccatctctctgttatttatcggtagtttaattcggtgcaatttgacaatgagaatcctttggtaaac

SEQ ID NO: 1678 - DNA, 269 bp, Zea mays
  Clone ID: LIB3136-029-Q1-K1-C4
tttcagggaaaagcgagcctggccgaacgtctgctccatccgccaacgggattacctcgcacagtgagagtggaagcgagagtgaagcgaaggaagtgacgacaatttcaaaacgattcacactcaaaggacaatgatgggaaggaagatggcaattctcagaacggcatgtcttattcaggatcgcaaggagtggtaaaccaaaccatggcgatgcttccaatgcaaccgggtgcaatggtcggaggagttcctagctccacggcagc

SEQ ID NO: 1679 - DNA, 424 bp, Zea mays
  unsure (1)..(424): unsure at all n locations; Clone ID: LIB3136-029-Q1-K1-C5
aggatctgcaggaggacttcatgggtggtgttgaaattattgtttcccctcccgtcgtctccttccgtgaaacggtcttgagaagtcctgccgtactgcatgagcaagtctcccaacaagcacaaccgtctgtacatggaagcgcgccccttggaggagggtctcgctgaggccatcgatgacggccgtattggcccacgtgatgatccgaaggtgcgctcccagatcctctctcaggagtttgggtgggacaaggacctggccaagaagatttggtgttttggacctgagaccactggcccgaacatggttgtagatatgtgcaagggagtgcagtatctcaatgaaataaaggattctgttgtggctggtttccagtgggcatcaaaggagggtgcactggctgangagaacatgcgtggaa

SEQ ID NO: 1680 - DNA, 304 bp, Zea mays
  Clone ID: LIB3136-029-Q1-K1-C6
acggcccgggttgctgttcgtcatggcatgtggtgtgctgctaagaaacttcagtctggattgagagcataccagcaaatgaacacacagaaactaccctgtcaccagcgtcatcatggctcgaatgaccaccaagatatccatgacagcttcaaatggtaccctggaccatgacctctcggttgccgataaaatcagtgacgagaatgacagctccaatgcagttcagcatggttttgactggaagtggttggtggttcgtggtgcaaccgctggctgttgtgtgctaacacccgactggtag

SEQ ID NO: 1681 - DNA, 269 bp, Zea mays
  Clone ID: LIB3136-029-Q1-K1-C7
atctaatactggaatacattacgattttattttacagctacgtgaacactgctgagggaagggatgataataatgacttgataatatgtacgattatgagttatttaataaaaaatatgttactatcctgataatattgatgccagacatatgcatgcatacataggttttgctatctatatgcaaaagcttggaacagggattgatataaatggacgatttcagatatattaatacaactttgtttaaaacaatggatttgccccaat

SEQ ID NO: 1682 - DNA, 155 bp, Zea mays
  Clone ID: LIB3136-029-Q1-K1-C8
acgaggttctgcaggaatattttacgattttattttctaacaacgacatcacttctcacagatgatgtgctaacaagaatttctgcacatatgcttcaatattctcaaaatacttcatactttgccgaccatgatgattacgaagccggcctttt

SEQ ID NO: 1683 - DNA, 408 bp, Zea mays
  Clone ID: LIB3136-029-Q1-K1-C9
cgacgacgcccgcctcgcgcgcttcaagctcgtgctcaagtccggcgtcatcgacgacatggacgacggcgacatgaccgagggacagaccaacgacttcctccgcgacatgatcgagatgcgcaagcggcagaagtccgggagggacacctacgccaagggcaagagcaagcgtgtaggtgggggtgatggtggcgacgggggtgccgctggagacagtgcagatgatggggatgccaaggggagcggcgatgatgctgacgcagacaaggactccaagaggatgaggaccaagtttgaggagctttgcaatgaagacaagattttggtgttcttcaagaagctgcttaatgagtggaaccaggaattggatgagatgactgagctagagaagcggcagcaaagggg

SEQ ID NO: 1684 - DNA, 311 bp, Zea mays
  unsure (1)..(311): unsure at all n locations; Clone ID: LIB3136-029-Q1-K1-D1
tcggatcttgaagatgcaactgcaatatctgcaccagatgcccatgctgaagcctgggaaactcttaaaggttcatcatgattttgatacctggaggatttgggatcgcggaatttcagggatgatattggctgcaaaatatgctcgtgagaatagagttccatatcttggtatttgcttgggcatgcagatatcagtgattgagatttccagacatgtcctgggcctggaagatgcagacagtgaggagtttaacaaggatacaccgaatcatgnttgtatgtacatgcctgaggtttcaaaacacatat

SEQ ID NO: 1685 - DNA, 283 bp, Zea mays
  Clone ID: LIB3136-029-Q1-K1-D11
ggcagcgacacgatcgcgagcgcacgcacgtaagcacgttgtcggaagctcaagttagaagaagcacgagtgactgatcgatggcggcccatgctctcctctccggccggcagctgctgggccgccccgtgcagtcggccgtctctaggtcgtcggcgaggaaggcgcccttcgtcgtcagggccagctccagccctccagccaagcaaggtgccgacaggcagctgtggttcgcgtccaagcagtccctctcctacctcgatggcacgctgcccggcgacta

SEQ ID NO: 1686 - DNA, 256 bp, Zea mays
  Clone ID: LIB3136-029-Q1-K1-D2
agagcttgtaccccacaccactaggcactagtccactacctaacgctacctgccttttcaccgcgtcgtgcgctaccgccacgtttgctcgcgtccgtcccagatccgcgtgctcctccatcgctcgcgcaagatgaagatcacggtgcgggggtcggagatggtgtacccggcggcggagacgccgcgcctgctgctctggaactcgggccccgacctggtggtgccgcggttccacacgcccagcgtctacttc

SEQ ID NO: 1687 - DNA, 276 bp, Zea mays
  Clone ID: LIB3136-029-Q1-K1-D3
gatgctttcagggagggtaaccagaaagaagtcgattatcttatacaggaaggcaagcgctattatcagatggctcgactgctgatgagaaatctgctaggggattatcaagcccagggaaacagagtcaaaaaatgaattttgtcttgatctgcgcaaacaagatgcaggaaatgtatctaatctcttgagactccatcttaaacagttggcaaacattccatcttttgattacctgagagttattattggtatcgacgacagcagtttcaagat

SEQ ID NO: 1688 - DNA, 397 bp, Zea mays
  Clone ID: LIB3136-029-Q1-K1-D4
aagacgtcggcgcaggacatcatcaacctcaagccgctcatcgacaagaaggcgtggccgtacgtccagaacgacctccgcctccggcctcctacctgcgctacgacctaagaccgtcatcgcttccaagcccaaggaggagaagaagagcctcaaggagctcaccggcaagctcttcagcaccatcgacgatcttgaccatgccgcgaagatcaagagcacccctgaggccgagaaatacttcgcagcaaccaaagatgctctcggcgatgttctcgccaagctaggctagacgcaggggctataatgccatgtaattcggacctggggttgtcatatggacccggcagggcaatgtccaatttctggtgatattgtatcaggaagcccttactcc

SEQ ID NO: 1689 - DNA, 299 bp, Zea mays
  Clone ID: LIB3136-029-Q1-K1-D5
gtcgagggcacgcgtcaggcggctttcagggagggtaaccagatagaagtcgattatcttatacaggaaggcaagcgctattatgagatggctcgactcctgatgagaaatctgctagggaattatcaagcccagggaaacagagtcaaaaaatgaattttgtcttgatctgcgcaaacaagatgcaggaaatgtatctaatctctcgagactccatcttaaacagttggcaaacattccatcttttgattacctgagagttattattggtattgacgacagcagtttcaagatgggac

SEQ ID NO: 1690 - DNA, 265 bp, Zea mays
  Clone ID: LIB3136-029-Q1-K1-D6
gatggtacaatcccatccatctgcagtttgcttgtttcttgtctgcttgccagatcaatgattcagtggcccggcggatgtaaaaaaaaaagattccttcatctcatcaaattcgaggacaacggcaaggcgacgtgggacagccagagccagcacaaggcggcagctcccgcgaggtcgtcgtcgacgacgaccatggtagcggaggagcacgtcaagcgtgtcggcgtcacccggtggcgcaaacaggtggtgggccgcatgc

SEQ ID NO: 1691 - DNA, 372 bp, Zea mays
  unsure (1)..(372): unsure at all n locations; Clone ID: LIB3136-029-Q1-K1-D7
catccctgctgatccaggtcagcttgatttttatgagcgatctgtccctcgtgctggacaagtgtggttcccagttctgcaaccaagaccgctcaacattattagacttcaaccgtgaaggattgcctctgttcatcctggctaattggagaggcttctctggtggacaaagagatctctttgaaggaattcttcaagctgggtcaacaattgtcgagaaccttangacatataatcagcctgcttttgtgtacattcctatggctggagagctccttggaggagcttgggtcgtggtcgatagcaaaataaatccagaccgcatcgagtgtaatgctgaaaggactgccaaaggtaatgttctcaaacctc

SEQ ID NO: 1692 - DNA, 405 bp, Zea mays
  Clone ID: LIB3136-029-Q1-K1-D8
cccacgcgttcgcgccaagcccacctccgcctccgccgtcggcctagccggcccaggcgccgcggatgtgctgtcgtacgttgggcggatctcaagcgctccgcctgcgcgtcgtctaaaaagccaaaggcctgtgcacacaggcgagcgacgctgtgtttgaggcgctggagggggacgctaggaacgttctctgcgaggctgtctataggcacggggccgacatgctcgtcgtccgcagccatggttacggagccattaaaagggctgttcttggaagtgtgagcgactacttgtcccatcactcgcactgcaccgtgatgatagtgaagaaacccaagcagcacaagcactgatcaaagccgactgatcactacgtgtacttgaaataatttgtactactgc

SEQ ID NO: 1693 - DNA, 226 bp, Zea mays
  Clone ID: LIB3136-029-Q1-K1-E1
cctccgcgccccatccctgtaggtgcgatcctatcctcgaaatcctctccctccgagccagatctttgttcccatccgtgtccatgctgaaatccttccatgggaaaggcaccggcgaagacgcgattcccgctgaggtaacccctcacgcggcggtgaaaatgcaggcaaagacgccagacgcgactcctgcagagataagcacccttcgcaacatgtggatctc

SEQ ID NO: 1694 - DNA, 284 bp, Zea mays
  Clone ID: LIB3136-029-Q1-K1-E11
ggatgaaatgggggttcatgagcacgcacgacgccgagacggcggagtacttccgcggcagcggcgtgcactgcgtgctctgcccccgcaaccccgacgccggcagcagcgccgtcatgggcgcgcagatcgcctacatgatcacgcaccaccagaagatcgtcgtggtcgaccacgaaatgccggcgaagcgcagcgaccgccgccgcatcctcagcttcgtcggcggccttgacctctgcgacggccgctacgacacgcagttccactccctgttccggact

SEQ ID NO: 1695 - DNA, 350 bp, Zea mays
  Clone ID: LIB3136-029-Q1-K1-E12
cacgcgtgcgggatatactatccatggccagtgtgctatcatcatgtttgatgtaacctcaaagcttactggcaagaggtgtcctacgtggcatacggaccccttcaaggtctgttaaaacatccccattgtcctctgcggttataaggttgatgtgaataacaggcaggtcaaagccaagctcgttactttccacaggaagaagaatctgcagtactatgaaatttcttccaagagcaacttcaactttgagaaacctttcctgtaccttgcaaggaagctggctggtgatcccaaccttcactttgttgaagctgttgctcttaagccttcctaaattaccatctaca

SEQ ID NO: 1696 - DNA, 322 bp, Zea mays
  Clone ID: LIB3136-029-Q1-K1-E2
gccgccgtcgagtcgtcttaggaacgatgactcggcggaacggctgtacgatctacgtgggcaacctccccggcgacatccgcgaggggaagtggatgatctcttctacagtatggacgtatagtggaaattgacttgaaaattccaccaaggcctcctggttttgcttttgttgagtttgaggacgcacgtgatgctgaagatgcaatatatggccgcgatggatacaactttgatggccataggttgcgggtggaattagcccatggtggacgaggcacatcttcttttgatcgatctagcagctatagcagtgctggac

SEQ ID NO: 1697 - DNA, 139 bp, Zea mays
  Clone ID: LIB3136-029-Q1-K1-E3
gccgctagggagtcgccttacgaacggagattcacaaggacggctgagcgatccacgtgggagaattactagacaacatcagggagtgggaaatcgatgctgtgtccaccaggaaaagcggaccgtacacaatgactgg

SEQ ID NO: 1698 - DNA, 299 bp, Zea mays
  Clone ID: LIB3136-029-Q1-K1-E4
aacaaaccctatccgtctggcgcaggcggtttgggagcgagtaccgagcgccccaattcacacggggtatatcctaatctacgcagtcatgcctccttagcggtttcgttatttgtttgtttccagcggccgttgctgcggtgattttgcttagctacgctttggaccggcgttccttcgctgctagctagtaccttttggaagtcaaggagtgctgcctttcgcctgatctacctagacgccttttcttgcgtcagcgacttctattttggttaattagcaccgtgagatgtcagaat

SEQ ID NO: 1699 - DNA, 116 bp, Zea mays
  Clone ID: LIB3136-029-Q1-K1-E5
gggaatatacgtgtctatgtgagctttttgttctgatctgcactgtcctgccatcagatcgtgcgtgagcccggttagtgctaaagaaacgcaatggtatccgcacctcgcgaacg

SEQ ID NO: 1700 - DNA, 238 bp, Zea mays
  Clone ID: LIB3136-029-Q1-K1-E6
cgacccacgcgcatagctattacctgtgtgcctcccatgttcagttgatatggtgggagtctcaacgtatatcaggagagtagtgcttaatagtaacagaacctcattgctgatgcacacgcgaatctggatcatcacgtgctgtggttgtaccgcacaaaacatacacatgtcagctagtcgattggttgtgaagtatgaaactatcatcatgcgtgattatgagccgttgcgtgac

SEQ ID NO: 1701 - DNA, 335 bp, Zea mays
  unsure (1)..(335): unsure at all n locations; Clone ID: LIB3136-029-Q1-K1-E9
ccagcagctgccacagagacatcagagagcggtcctccttgtgagtctgagctgaagaggaggaggaggaggaggagaagcagcagcgcagccggaggagggagagcgaagatgcgccgcgtcgcgctgttgctcgtcgccgccgtgtgcgcgctggcggcgccggctgccgcggtcgtcactgacggtcttctcccgaacggcaacttcgaggatggcccgcccaagtcggcgctggtgaacggcacggtggtgtcgggcgcccacgccatcccgcggtgggagacgttcngcttcgtggagtacatcgagtcgggcacaagcaggggacatgc

SEQ ID NO: 1702 - DNA, 315 bp, Zea mays
  unsure (1)..(315): unsure at all n locations; Clone ID: LIB3136-029-Q1-K1-F1
cttcacactcctcgccatcacataaaaccagtgcaagcagaagcagcgcaatggcgagcagcaccatggccctctcctccaagccttcgccggcaaggcagtgacgtgccgtcgtctctcttcggcgaggcccgcgtgacgatgcgcaagacggcggcgaaggcaaagccggcggcgagctccggcagcccgtggtacggccccgaccgcgtgctctacctgggcccgctgtccggcgcgcccncgagctacctgacgggcgagttcccgggcgactacggctgggacaccgcggggctgtcgggcggacccgga

SEQ ID NO: 1703 - DNA, 392 bp, Zea mays
  Clone ID: LIB3136-029-Q1-K1-F12
gtctcactcgtgtctgccctgctcatactgcttgccctcgccgtatcgtccacccgcaacgcacagggggattccatggccaacaacaccgggacgttggtgggcggcatccaggacgtgccggggagcgagaacgaccttcacctccaggagctcgcccgcttcgccgtcgatgagcacaacaagaaggccaatgctcttctggggttcgagaagcttgtgaaggccaagacacaagtggttgctggcacgatgtactatctcactattgaagtgaaggatggcgaagtcaagaagctctacgaagctaaggtctgggagaagccatgggagaacctcaaggggctgcaggaattcaagcctgttgaagagggtgctagcgcctaaagatg

SEQ ID NO: 1704 - DNA, 228 bp, Zea mays
  Clone ID: LIB3136-029-Q1-K1-F2
gccataaccattacctgtgtgcctcccaggttcagttcatatgttgtatgtattaatgtatatcagaggagtcgtgcttagtagtagctgaacctagtcctgatccagacctgaatctggatcatcttgtcctgtggttgtaccgtgcagaacagacagatgtcggctagtcgtttggttctgaagtaagaaactataagcatgcgtgatttttgcccgttgcgtgac

SEQ ID NO: 1705 - DNA, 191 bp, Zea mays
  Clone ID: LIB3136-029-Q1-K1-F3
gccaaaagggtgtcaaatgacttaatgacagacaagatggtgtttgagtttgtcaacacgcagcctgggagcacaagttcacctcttggaacacagcgaagaggcactcgcaaacacatgccacaaagcagcacatgtatcaccaacatgagggtccgagtgagctcttcaccaccaggacctcctttcca

SEQ ID NO: 1706 - DNA, 344 bp, Zea mays
  Clone ID: LIB3136-029-Q1-K1-F4
cggagaacatggcactcttacagttgctgctggtttatctctagctctcttacttgttatgctcgtgggcattgcgaggatatatctggtatgcacagcttgaccgacatttcgctggaattggtttcggcatcggcatcctcgcattctggctggctgttcatgaccatgtcgacgcctttgttgtctccgggcaaaacgttgcaaccttctgggcaggccttgctctactgatgtgctttgcgtatcccaagccagaattacctaccccgagctttgaattccacacagcattcaaacgggtcgcttttcggaatcgtgtacggcattcagcaaacctactt

SEQ ID NO: 1707 - DNA, 193 bp, Zea mays
  Clone ID: LIB3136-029-Q1-K1-F5
ggcacacagtggcgcgcaacaacaacgtggtgctgcccgggtacattgtccgctcgcccaggggggaagacatgccctcatcaatagcgccgacatagactgcgcgtcctcgacggccgcggcggtccctggctgctggtgaagaaccactacctatccagcgacccttacatgcgcggcacgatgcagaatt

SEQ ID NO: 1708 - DNA, 384 bp, Zea mays
  Clone ID: LIB3136-029-Q1-K1-F6
tcgcggacgcctgggcggacgcctgggcagatgtacagctgataactggaactgctgtcagggggcactgagcaatggttcgtccttctcaataaccacagtgctaccaggatagccttacttatggagataatgatctaaactacatacaatggcctgtcattgacaattttgaggatgtcgatacattatttaggcgttctgattcaacatatcgtccgcggcagatggagaatgcagatgggttctctcggattacagcatcagatgctgcttactctaccgatcgtgctttgcagcaagggtttgattcgccttattcagattatgggactctggatgatctcttcgcatttcaatgtgcccaaagataatcactaccct

SEQ ID NO: 1709 - DNA, 302 bp, Zea mays
  Clone ID: LIB3136-029-Q1-K1-F8
tcgagagagcaccacgccaccccatgctctctctctgatcctgcgcatacgcatgtgcgcccgagccgttcaccgtactccattccaaactctctgcctatccagcactgtattcacgctcgtgctcgcatatcggtctgccgtgcagagcagacaattacatgctaggctgctgcttctgtacaaaaagagcttaatcactcgttctttcggcgcgtcagcagacagcgaaggcagatatgcgcggacttgccctctaatagacacaatcctaccaacacctgcatgctacgcccaaactg

SEQ ID NO: 1710 - DNA, 234 bp, Zea mays
  Clone ID: LIB3136-029-Q1-K1-F9
aaattaccacaggaatcaccagaatcggtgattatgaactgcatgatcttgtccttttagagaacttggcatttggagtaattataagggtggaagctgaagcatttcaggttctgaaaggagtgccagatagacctgaagttgtgctcgtgaaatttagagagataaaaagcaaaattgataggcgctcatcagctaaagatcgttctaataatattatctttgcaaaagatg

SEQ ID NO: 1711 - DNA, 351 bp, Zea mays
  Clone ID: LIB3136-029-Q1-K1-G1
gtcgaaagtggaccacacctggactcgaagcatgcgtatgttattgtcaggcatgtgaagtttgcaacaaagaaaggtgggaagaaagctagccaggccatggagatgcaggaaaaggtaccagcagtgctgtcccagagtcacccattgatggcagcaataccgaagacatggcagttggacatggtctcgggaaacctgatgatcgtaccatctcagatcgtgttaaggaaacagccacccgtctctccagagactcccctgcccaaaaggaggggcacgatagagaatttaaaagggagttcaattggccaaaatccaacccaggggctgggggaaacagaaatattc

SEQ ID NO: 1712 - DNA, 316 bp, Zea mays
  Clone ID: LIB3136-029-Q1-K1-G2
gattctttgtgacaccgtcggactctgttgccattatcgcagccaatgctgttcaatcaattccttactttgcttctggcctgaagggattgccaggagcatgccaacatcgctgcccttgatgttgttgcaaagaatttgaaccttaagttctttgaggtgcctactggatggaagttttttgggaatttgatggatgctggaatgtgctcaatctgtggtgaagaaagctttggcactgggtctgaccacattcgtgagaaggatggcatctgggctgtgcttgcatggctttcaattattgctttcaagaata

SEQ ID NO: 1713 - DNA, 140 bp, Zea mays
  Clone ID: LIB3136-029-Q1-K1-G3
gacccacggggaggccaacgggacggcgtgaggccatcggtgcatgcggtcctgaggaggaggaccaggcggctactcgggggaacatggggaagacaccgtgcagctggaaatggacgagggcgcgctgtccccctttc

SEQ ID NO: 1714 - DNA, 319 bp, Zea mays
  unsure (1)..(319): unsure at all n locations; Clone ID: LIB3136-029-Q1-K1-G4
gtttcttcagagcctgagccaaatctaaggggcttgcttcatctgctgtccgatcgtgggggggctgctcggggctggcacggtcaagactcacctgaattccaccgaaatctgcagtgccacggtagttcttgcctaggtgtgtcgttggtcgttgccttgtgacccttgcggattttcttgtttctttttgaggtgccatctttgcaggttaatctcncggtacaaaaaatttgcactgggttgatcacatatccctaaaaaggtacgttcggcgaggacaaccggatgctggtttacctctttttgagtctgagtc

SEQ ID NO: 1715 - DNA, 80 bp, Zea mays
  Clone ID: LIB3136-029-Q1-K1-G5
ggcagacagtggcgagtgaacaggaaggtggtgctgcgcgggtacatcgaaccggcgcccaggaggaagacatagctcat

SEQ ID NO: 1716 - DNA, 332 bp, Zea mays
  Clone ID: LIB3136-029-Q1-K1-G6
ctcagagaatccccaaccaaacaaacagggtagaggtcgagggagaggacaggagaggagaggagaggagaggttgggtctgggtaccatggctccgatgaacctgtcggggcgttgatgtcgtggaacgtgacaaggcgcgcaacggctctggaggaggcatggctccgactacgatatcgtgcccatcaacttcgtcaccgccgagcacaagagccccgagcacctcgtacgcaacccgtttggtcaagttccagctatgcaggatggtgacttgtacctctatgaatcacgcacaatctgtctgtacgctgctcgcacaaacaagccag

SEQ ID NO: 1717 - DNA, 355 bp, Zea mays
  unsure (1)..(355): unsure at all n locations; Clone ID: LIB3136-029-Q1-K1-G7
gtccgacacaaaggtacagctggagagccctgtcgcactcgcactcgcacccgcacgcagcggcggcagcgcagcgcgcagatcgccatctcgacccacccccacgctggccgctgcactgagcagcaaccaccagtccttctgtccgcaacctaccacacacgccacgcctngcctncggtcctacatggccggngaactgcgccaccggcgcgcgccgtcngaggacgagggcgtcgcctnctctcaaagactcgacttcgcccccgcaggcaacggcaaggctgccacttcttccgccggcgccaaggggccgaacccgcgggccggaaaaaggacccccctaggttgcttg

SEQ ID NO: 1718 - DNA, 367 bp, Zea mays
  Clone ID: LIB3136-029-Q1-K1-G8
ctttgctttatcacagtcaggagtatgtgctgcttttagtagagagacaaatcggagaatatgctttctgaacggaagtccagataagttatccgcagtttattttaaacaagaataatgattcactcattactgtatcagtatatggttctgaaaacttcagtgctctgcgatgcagaacaactcgaatagagtatgctttgtcattgcaattgctttttttatcatgtcatctttcttaaattttccccaaccattcaaggtacgttcggcgaggacaaccggatgctggtttccctctttttgagtctgagtccttgaaatggcctgcatttgtagagtttgatgatgtcaaatgaaggggttt

SEQ ID NO: 1719 - DNA, 68 bp, Zea mays
  Clone ID: LIB3136-029-Q1-K1-H1
ctaacgaacgagggctactacctctgacgctaactgtcgcaggggttgacaatcctgagcatgagccg

SEQ ID NO: 1720 - DNA, 376 bp, Zea mays
  Clone ID: LIB3136-029-Q1-K1-H10
caaaggctgcagcagcttcagttttggcatctaagcttggggaggacactggcttaaggttcatgtgggagaagaaccaaagctggatgctgcagtggctagaagcaatgatgttgagatagtaccatcagatggtttgagaaacaggaaacaacccaatgcaagaggaagcaggaccgggagccctactgctgataccccagcacggggaactgaatccagtctaactgctggtgcagacctggaaactgctccagctcctttggtggtagaacatcatcaaggcttatgggctaatgatggtggcggatggattgcaaagattgctgccttacttgtggcagaggacccatcacagtcatatgctttgatatgt

SEQ ID NO: 1721 - DNA, 265 bp, Zea mays
  unsure (1)..(265): unsure at all n locations; Clone ID: LIB3136-029-Q1-K1-H12
tggatccgctngcttacacttactttaccacttttggagaggcgtaatttcngatgattcgggatgttctaaagatggctcctcttactaattaggagataatgaatccaaagaccaaaaacatccgcatgtatgtcaaaagagtgttcatatcatatgactttgatggcgagcttgtttccagatacttgagctttgagaaaggtgtatttgacttaaaagatcatccttttaatgttatcttgcgagatccttcaagaaagtg

SEQ ID NO: 1722 - DNA, 330 bp, Zea mays
  unsure (1)..(330): unsure at all n locations; Clone ID: LIB3136-029-Q1-K1-H4
ggtggacggacggcgtccgctaacactgaacattgtacgcctcttggacgtatcgtccctgcatatgcattacaagttggattgacgtggctacatggcaanctgtggcttaatctgtagaaccctgtctgagaaataggagatttgcttgctgctcctttaacctgtaatatagatgtcanctgaccattgccttcaagaatcatgacgctgaaaggttactctatctatttatgttgacctagttgcacaatctgttgtgtctaccaggcgatgatgagtgtgaagaggcatttacgtggccctggagcaatccctatagggaggcct

SEQ ID NO: 1723 - DNA, 332 bp, Zea mays
  unsure (1)..(332): unsure at all n locations; Clone ID: LIB3136-029-Q1-K1-H5
ccaggacgaccacgcgtccggccaaaagtgcagtaccgctgtgtaattttacatcaactcttgccaaatttgtgggactcgggttgtttgccgcattatagctcangcagagtcactgctgatggaatgcggcataagccaaacatgcccttaacacaactgattttgttatgttcaaagaaggcatgaaccaactgattttgtttgccgcattcatagctcacgtagatgaagtaagggccattgatgatgaatactagtttcgactcgatggaccaactgtttaatgagtattcttcttgagggacatggtctcaacaacagcttctgca

SEQ ID NO: 1724 - DNA, 318 bp, Zea mays
  Clone ID: LIB3136-029-Q1-K1-H6
agactggcgcggagactcgcggagcagggccagcaacgagtcgccgctgtcaggcgggcggatcccttcgcagagggacagggaaacaactcctgctatataacccaagccggtctaggcgactgttgttgggcgatccgatcaggctgcgaggcaggcatgcatcacgggagatttcgttgatcaacaagtgtacagcagctgcaggctgcacctgaagctcgaaacccaccacaggatgtgtacagctctatgcttcagcctactagtactagcactgctggattttatttttttcaacgcgtctttggcacctca

SEQ ID NO: 1725 - DNA, 376 bp, Zea mays
  Clone ID: LIB3136-029-Q1-K1-H7
cgactggcgcggggactcgcggagcagcgccagcgaggagtcgccgctgtcgccgtcgcagatcccgccgcggagggcagggagaccagcgcctggtaatagccaagcccgctctaggtgactgttgttgggcgatccgatcaggcggcgaggcaggcatgcatcaagtgagatttcgttggtaaacaagtgtacagcagctgcaggctgcagctgaagctggaaacccaccacaggatgtgtacagctctttgcttcggcctactagtactagcactgctttattttatttttttcaatgcgtctttgccacctcattgattcacctactatatggatcgtttgactatgtgtaagcacaactgtatttggcgtc

SEQ ID NO: 1726 - DNA, 281 bp, Zea mays
  Clone ID: LIB3136-030-Q1-K1-A1
ggcccaaggacacttcgtcttcagccccagtcaacagagcacaagcgacggctggtctccgctcatggaacaaggtcaaactcagatagaagggaccatgggcattcttatggggcatactgacagggcctcagttgacttccttgaggatcattctactaggaagcggatgtccgctttctcccgaaggtagtatgatggtagatcggtggagatcgaaacggttccacgagtatgatgactcgtgaggaggacgcaagctaccaagaacgtaattttaa

SEQ ID NO: 1727 - DNA, 193 bp, Zea mays
  Clone ID: LIB3136-030-Q1-K1-A10
atccatcggaggtgctcttttcttacacttctttctttttccgatgcaagaaagaaaaaggggacctgttaacaccaagccgcagacattgctgctccctttgatcgttactcaggaccatcgatcccgatcgtcgttaatctatgcatcgaccggcgaactccaccgtatcccatctggaataccttctcgc

SEQ ID NO: 1728 - DNA, 158 bp, Zea mays
  Clone ID: LIB3136-030-Q1-K1-A11
cgaattagatagttattaatacaattagcttggctcgtgggctgcaacaacgacggaggcggttgattcatggacggaaaacaggctgacctctgcatggacgacaacgaggtctctgagcgtcactgcgatttatacatgtgctcacggcacggact

SEQ ID NO: 1729 - DNA, 253 bp, Zea mays
  Clone ID: LIB3136-030-Q1-K1-A12
acgcgtcacgaacacagcatgtgccaaggaaatgacaaagctatctttcatctctgaaatcatccccgagagggaggtgggtgattctgactttgaaccctgtggctactccatgaatgcgatccatgggtctgcattctctacaatccatgtgacgcccgatgacggattcagctatgccagatacgatgttatgggcttggatgccactgctctatcttatggtgaccttgacaagagggtcctacgatgc

SEQ ID NO: 1730 - DNA, 313 bp, Zea mays
  Clone ID: LIB3136-030-Q1-K1-A2
aagtacagttgtctgtgataggagggacagaacactagctctcgctcacgcgacttaccaacacgatgtcggatatacgaagcgaggagtaccgacgacgtctggctccggcacattgttcaccaggaagatgcttctagggtttcacaacgttcctcgtcgttacactactctcaaattatgtgcccctccaattctcgagatatgtgtggcagatttgcatgatacgtttgtttgtttccatcggacctgaagtcttcttggggataggctcccccctttgtatgttgtggctccaatccatgtgcgatca

SEQ ID NO: 1731 - DNA, 338 bp, Zea mays
  Clone ID: LIB3136-030-Q1-K1-A3
caagtctcaggagggatcccagttctgtagaggatttggtggcattggtggcatgttgcgctaccagctggatatacgatcttttgatgagctttctgatgatgacgatgtgtatgaagactctgactagcaatcagccaatctcatgccagtgctggcccatggaaggacgcaacagctcgacctcgccatacctacgcaggagcacacgaaaaggcaactatccaaggattaatgggcatgggccaacgtcatcctcttcaagaggagcttaagactaagatgattttgagtcacaatcatgggagtaacgtgacaagaagataccctactatatc

SEQ ID NO: 1732 - DNA, 145 bp, Zea mays
  Clone ID: LIB3136-030-Q1-K1-A4
gacgttcggagcgggcattttcacacagatctatcactatcctagacgcacttcatacactgcataggccgggtcctacgaacacacaaccgggcgctcggaaaactccatggagggcgaaggacgcgaaccaacgacgacatat

SEQ ID NO: 1733 - DNA, 296 bp, Zea mays
  Clone ID: LIB3136-030-Q1-K1-A5
atccatcggaggtgctctcctcttcggcttccttcggcttcggttgcaagaaagaaaaaggtcaccggttaacaccaggccgccgccattgctgctccctttgttcgtttctcggcaccctcgatcccgagcgtggttaatccacgcatcgaccggcgaacgccaccgtatcccatctcgaatacctccgcgctcagcgtcatggacggcttctccaaaacgatcggcggtggtggccctaacgttccggcgggatcccaccccgcgggcgggagccaggcggcggccaggggagg

SEQ ID NO: 1734 - DNA, 260 bp, Zea mays
  Clone ID: LIB3136-030-Q1-K1-A6
aacacagcatgtgccaaggaaatgacaaagctctctggcatctctgaaatcatccccgagatggagatctgcgattttgactttgaaccctgtggctactccatgaatgcgatccatggctctgcattctctacaatccatgtgacgcccgaggacggtttcagctatgccagttacgaggttatgggcttggatgccactgctctatcttatggtgaccttgtcaagagggtcctccggtgctttgcccctcggagttt

SEQ ID NO: 1735 - DNA, 367 bp, Zea mays
  Clone ID: LIB3136-030-Q1-K1-A7
cacacttgagccccacccgtgccgccgccccgcatcccttagcctgagtgcctgacgctggcgctgccgccgaccatgtccgccgccccgccccgccgcgtggtcatctgcggcggcggcgtggtgggcgcgtgcacggcctacttcctcgccacccacgccgcgtcccccaccgtaccgacgctcgtcgagaggtgcgccccggcgtgcgccgcctcggggaaagctgggggcttcctggcgctggactggtgcgactccaccccggcgctctgcaggctcgcgcgggcctccttcgcgctgcaccgacgcctggccgacgccctcggcggcgccgacgcctacggcttgcgccccgtacacaccc

SEQ ID NO: 1736 - DNA, 410 bp, Zea mays
  Clone ID: LIB3136-030-Q1-K1-A8
gatggtcactgggcaagagactgtcaggctggtgactggaagaacaaatgctaccgttgtggcgaaaggggccatatagaaagaaattgccagaacagtccaaggaacctcaggcgtgagagaagctattcacggtctgcatgcccacgccgaggacggggcctgagccggagctacagcagaagccggagctatagccgatccacatccccgactggatctactaggggtggacgccgagaccgtgatgagaggagatcaaggagtcttatctacagcaggagcgcaagccctacgcgttctgtgtcacctgcaaaggaaaaggagcgcagccgcacacctgatggcagtaggagccccatcccaagggacaaggtgagcccaccaccaaaggataatggtgcccacaa

SEQ ID NO: 1737 - DNA, 274 bp, Zea mays
  Clone ID: LIB3136-030-Q1-K1-A9
gcagagcagcaagagaacacactgcagtccctaagcagataaataaagcagaggaacccaaaaacaacgtgaacgcaaccagagatggcacaatactacaggatcgcacgaaactgtcactgaacggcgacgctaggctattagcggacatacagccagtgccagcagcggctcaagtgaaaggaagcgctcgtcacgctaagaacgaatcacgagaggaaatgcccttctgagggccactgagcgtcccttcctctagtggcttcgcatgggc

SEQ ID NO: 1738 - DNA, 207 bp, Zea mays
  Clone ID: LIB3136-030-Q1-K1-B1
gatgaacactactagttcgagatctgcgctcccgtgtaccatggatatgggcatatgcttggtaaccgaacgccctgccatatattcagacaaggaagtgtaaggtaaggtggtgacccgacgccagccagatgagacgagatccattgaatccgacagacgagggttgggagtaaaatatgggtgtggtgaccttgtaccgaggtg

SEQ ID NO: 1739 - DNA, 252 bp, Zea mays
  unsure (1)..(252): unsure at all n locations; Clone ID: LIB3136-030-Q1-K1-B11
naagaagtaccgcaagatgaaggagaggcttgtcggcgtctctgaggagaccaccacgggtgtcaagaggctctaccagatgcaggagaccggcgccctcctcttccctgccattaacgtcaacgattccgtcaccaagagcaagtttgacaacctgtatggttgccgccactcgctccctgatggtctgatgagggccacagacgttatgatcgccggtaaagttgcttgggtctgcggatacggtgatgt

SEQ ID NO: 1740 - DNA, 239 bp, Zea mays
  Clone ID: LIB3136-030-Q1-K1-B12
acgtcatgacaacactctggactttatagaggttttcacggcagacaatagaaacatctacgggtggtataagaagatacctgacatataatcaaagactgttaacaccgttttctgtccatatcgataaaactaggctgatgagaaactgacaccacgctattataacatcgatgtggacaccaaattcgactacttctaacacaaacggtaattgcactggacatgtatctactact

SEQ ID NO: 1741 - DNA, 135 bp, Zea mays
  Clone ID: LIB3136-030-Q1-K1-B2
gaggatcagaaagggattcttgaggggtgtttggcaagattcttgacggcatcattatgggttttggatgaaagccagatggtcaacgcagtggatgtgatggagcggaaaagcgttggacatcgacatcgggag

SEQ ID NO: 1742 - DNA, 196 bp, Zea mays
  Clone ID: LIB3136-030-Q1-K1-B3
ggccatgtcgaacgcccaggcgtagcacaaggtcaacctgcccaccgctggcttccacagccacacggtgtacccatccatcctcgtcggcaacggctgcggcggctgcaaggtaggtagcggtgctgatggccatgacacgaacggtctgctgcccacctatgacgtgcacatctacaaggctgctgcttaacca

SEQ ID NO: 1743 - DNA, 236 bp, Zea mays
  Clone ID: LIB3136-030-Q1-K1-B4
gccgcccgcccgcccgtgtgccggttaccggtgcacaacacaacgcggacccctcgcggcgtggagtggattgggccgacccctatcgagaggagaggataggagcgcggtcgggtagggtttgtctgggtgaggatttgagcgacagcgcaggacgagggaaggaagacgaggactgactccttgaggatgaggcccaccggtgcttgtattgtcgacgagcgctaccggatgtt

SEQ ID NO: 1744 - DNA, 238 bp, Zea mays
  Clone ID: LIB3136-030-Q1-K1-B5
ggcatacactaggtagcccggagaagcagacggcattgcttctgtcgtgtccacagaatggggtgatgcgagaacactcatatgaccaatgcgtatttgaaacaattactagtgcattttaacacaaggtcatctagctagacaaactacaggaccaggattaagctgcttaaccaagacatagactagtacactacactggaatacagatttgttgagcgatgtaccaaccaggaca

SEQ ID NO: 1745 - DNA, 331 bp, Zea mays
  Clone ID: LIB3136-030-Q1-K1-B6
cccagaccacagcgcgacagtgagtacagcagcagcagctgagagcgtgagagcgtgcgaagcaggagggaggacaagaagaagccgatggcggttgtgagcggcagcggcgggaggctgaacccctgggcggagcccttcgtgccttccggggcgcggtaccgcggcctgcggaccgtggaggcgacgccggagcaggaggtggaggacttctcccccgagtggtggcgcctggtgtccgcctacccggccttccgcgaccgctggctgcgcgagtacggcgcgctcggcctactcgacgccgaagacgacctggacgacgacgtcgaca

SEQ ID NO: 1746 - DNA, 399 bp, Zea mays
  Clone ID: LIB3136-030-Q1-K1-B7
ctttggttacagttctcaatccacaggagaaaggcaacctgcaaaatgaacctcgctcaatgaactccacaaaatcagttgaggttaggcctgctcctgttgaaccaatagttagccaaaatgtgaagctgtcacctgaattgattaagatgataaatttaaccacagttggactggagaaagggcacctgcctgtgatgtcagctgaaggttcaggaggtgtatatttcatgcgagatgcaacaggtcagaagaatattgctgtgtttaagcctattgatgaggaacccatggccaaaaacaacccaaggggtcttcctttgtccactgatggcgaggggatgaagaagggaacaattgtagggggaggtgcattcacggaagttgcagcttatattc

SEQ ID NO: 1747 - DNA, 330 bp, Zea mays
  Clone ID: LIB3136-030-Q1-K1-B8
gtacaagaaggaggagaaggagcacaagcacaagcagcacctcggcgaggccggcgccatggccgacggcgccttcgcactctacgagaagcacgaggcgaagaaggaccccgagcacgcgcacaggcacaagatcacggaggaggtcgctgccgcggcggccgtcggcgctggcggctacgtattccacgagcaccacgagaagaagaaggaccacaatgacgccgaggaggccagcggcgagaaaaaacaccaccacctcttcggctgaccgtagtaacggccggcacgcgaccgagctagctaagctcggcgcacacaaccacacac

SEQ ID NO: 1748 - DNA, 273 bp, Zea mays
  Clone ID: LIB3136-030-Q1-K1-B9
gtctgataaacaggagatttatgaccttctttcacagcaacctatggacgatgacaccctgggcaacacaaaaaacatcgcttgtgcaaccgacaataaaccttgcgaacacaactccgtcttctaagaacaacagaaactgggacctggccaccatcctaaccggtgctattgaccactccctataaccaaaccatcatgcgctcggtgagaatcacacacataagccccaaagacccttctgaagctgctttaatatcatcaatgaaccac

SEQ ID NO: 1749 - DNA, 219 bp, Zea mays
  Clone ID: LIB3136-030-Q1-K1-C10
ccacgccccacgcgtccgctaattatgcacatgctatccaatcatccctacatcacatttctgttgataattgggacggtgttagttcatcattaactcgggatccaaacacggacttaagggctactcactgtcattccaaatgaaattgctctgaatatacgcagctcatattaaggcacatgcaacgttacctgcattcatagagactactatcaa

SEQ ID NO: 1750 - DNA, 150 bp, Zea mays
  Clone ID: LIB3136-030-Q1-K1-C2
aactaatctgaactcttacatacgtaatgctggagtgtgattcgtaccgctatgagaatgtggacccttagctgcaagaattgctattgacctcatttcatcgggcttatcactgctactgtgaactaaagtcctggatgggccagagaa

SEQ ID NO: 1751 - DNA, 203 bp, Zea mays
  Clone ID: LIB3136-030-Q1-K1-C3
cattgctgcaccggacgttgtgtcgtgtatcattgaatgaagcacacctaggttagcaaaggcatgccagattctacatgttccaagaatgacaacatttagtccatcctgaaatacatcaagctcagtcatagattgaaaggggaaatggagtcttcggcgaagacaaggctttcactccactccatcgaattattcattct

SEQ ID NO: 1752 - DNA, 262 bp, Zea mays
  Clone ID: LIB3136-030-Q1-K1-C4
ggcaaactcagcggccggctgtcccccaaacaaggtcaacaccgccgccggctgcttctgctccacgatctactccaccaccaccggtttctcctcaaacactgtcaacaccgctgcctgccgctcccgctcccgctccacggtctacaccaccacctgttgttccccaaacaccgtcaagtacgctgcggccgactactccccaaacgccggtggctgcaactgtcccagcagcgaagtctggtgcggcaccttcatcaac

SEQ ID NO: 1753 - DNA, 267 bp, Zea mays
  Clone ID: LIB3136-030-Q1-K1-C7
gatggttcaatcccatccttatgcagtttttttgtatcttgactgctttccagatggattgttgagtttcccagctgctgtgaaaaaaaaaagattcctttatttccattaaattcgaggacaacggcctggcgacgtgggacatccagagccagtacaatgcggtagtttccgcgaggtctttgcaacaactaccatggctgcggtggaacacgtcaagcctgttagcatctatcggtggcccaaacatgtggtcggccccatgct

SEQ ID NO: 1754 - DNA, 199 bp, Zea mays
  Clone ID: LIB3136-030-Q1-K1-C8
gaaaaacggggccgacccacgcgttcgttaaccatacatacagtctcatactttttttttacatcacaccccaataacatatcgggcttgcagatgctacagcttctttatctatcacaaccatgaggccacttcttcaatacactaacccaactcgtacgacccccttattaccactaatgcaccaccaagactcaac

SEQ ID NO: 1755 - DNA, 116 bp, Zea mays
  Clone ID: LIB3136-030-Q1-K1-C9
tcaaccagacgcttcgatatcgattattcgttgaaggcaacgcgagagtagccatccgatcgcgggagactacacttcctaaactatacaacatcaattaccatatctaaaataca

SEQ ID NO: 1756 - DNA, 227 bp, Zea mays
  Clone ID: LIB3136-030-Q1-K1-D1
ccaccgaattccctgcgattcctctcccctttcctcctcgtctccccctaggggatcgtcggagaggaatcgcaaagagggccgcctcatccgacttaaggaagccatggagcacaaggaggctgggtgccaagcccccgagggacccatcctctgcatcaataactgtggcttcttcggcagcgcggcgaccatgaacatgtgctgcaagtgccacaaggagatga

SEQ ID NO: 1757 - DNA, 189 bp, Zea mays
  Clone ID: LIB3136-030-Q1-K1-D2
ttgccaccgagaatctgaggaggatccttaacctcaaaattgaggataactgaatggcggttgggtggttctgtgtacatagtttaactacaactgacctttgtagtatgtatagggtaaccggggataaccactgtgtacctggcggtggttccttctgcaacaatactgtaggcggttagcaagcac

SEQ ID NO: 1758 - DNA, 225 bp, Zea mays
  Clone ID: LIB3136-030-Q1-K1-D3
gcgagttgaagcatcaactggctgacgagtttttattagagggaagggttccatcaaagacacagaaaaggaggagaagcttaaaggaaaacctggctatgaacatatgaatgagccactgcatatattgatcgaagctgaattaccagcgaatatcgttgacacaagactgagacaggcacaagaagtcatggaagaattgctaaagccagtggacgagtcaca

SEQ ID NO: 1759 - DNA, 226 bp, Zea mays
  unsure (1)..(226): unsure at all n locations; Clone ID: LIB3136-030-Q1-K1-D7
ccaattagctagcttcttctagctctagctaggctcgtctgctgcaagaaggtaacagtaacagcaggcatggaggggaaggaggaggacgtccgcctgggcgccaacaagttctcggagcgccagcccatcggcacggcggcgcanggcacggacgacaaggactacaaggagcccccgccggcgccgctcttcgagcccggggagctcaagtcctggtccttct

SEQ ID NO: 1760 - DNA, 246 bp, Zea mays
  unsure (1)..(246): unsure at all n locations; Clone ID: LIB3136-030-Q1-K1-D8
tttgtcatccccaccggatccngtacaggttttgggacgagggcgagagggaagagatgggggcgtctgacaatgagtacagttacttcgacggcggactcgtctgggccaccgacgaccactccctcaacaacgccttcagcacctacggtgaggtcctcgagtcgaagatcatcctggatcgggagacgcaaatgtcccgcggcttcggcttcgtcaccttctgcacggaggacgcgatgcgca

SEQ ID NO: 1761 - DNA, 329 bp, Zea mays
  unsure (1)..(329): unsure at all n locations; Clone ID: LIB3136-030-Q1-K1-E1
gtcggcgacctctgaggcggcgacgtggaccccaacgccctcgtgtctcccagctcaaggccgccatgactaagaggctcctctgaatctctgatctgttgcaacggcgcgcctagggtttctcgccttgcctatactgtttgtggcggataagtcgtcctatcctagagggagacgccctggagcctggaatggctggctttgcagtgctcttccagcttgtgtggatgtncgtgctgcacatctaacagcaagggctgatgcctagagctaaaaatgggatgggtgaaaatgaaaaaaaaagtggctttgttaaaaaaaaaggattt

SEQ ID NO: 1762 - DNA, 256 bp, Zea mays
  Clone ID: LIB3136-030-Q1-K1-E2
ggcaggcaaggccaagagcccaagacggtcggtgcggagcgcgagaggcacgtgacgcgaggagaggaggcggtgctgtggtggcctcacctgccctgccatgattataaaaaataacggagcgcgacgcgggtagaaaccggaaggcccgccgctgcccgccccttctttcttcccgtaccacacacgccgacgacgccgccggtgcggctcgctttctacacactccccccggaccgcgcggggcgggcttgct

SEQ ID NO: 1763 - DNA, 282 bp, Zea mays
  Clone ID: LIB3136-030-Q1-K1-E3
gcgtggaagagatgggggagaagctctctgccactttgcacgccagtggcagagacgacatgtctatccttgccatgcagcgcctcaacgaacaccagccgaacgggccggcgacgccggtggacatggtggtggactactacaagttcgactacgagttcgcggagccgccgcgcgtgaccagcctgcagaacaccgtgcctctcgcgaccttcagcgacttcggcgacgacgtctacttcgtcgccgaccaagggggctaccaaggcgtcgtctactacc

SEQ ID NO: 1764 - DNA, 225 bp, Zea mays
  Clone ID: LIB3136-030-Q1-K1-E7
gtggccctgaggctgtctggttcaagaccggcgcgctgctcctggacggcaacaccctcaactacttaggcaacagcatccccatcaacctggtggtggccgtgatcgcggaggtcatcctcgtcggcggcgccgagtactaccggatcaccaacggactggaccttgaggacaagctgcaccccggtgggcccttcgaccccctgggcctggccagggaccccg

SEQ ID NO: 1765 - DNA, 276 bp, Zea mays
  Clone ID: LIB3136-030-Q1-K1-E8
gcgggcatgactctaagatgctgcgtcgaggattgaccggacccgctgaggacaccactgctggtgtggggatgctcgacctgacgcagctctccggcgcccacgtgctgcttgggattgacccgaccgagatctgcacgatcaggcaggtcaaccacgcgtatcgctgcggccactcggttgactatgggtggaaaagcaacactgacgagaactacagctacctggttgatgtcgtcgggagctaccacgatgggaagcaggggcgggccccta

SEQ ID NO: 1766 - DNA, 206 bp, Zea mays
  Clone ID: LIB3136-030-Q1-K1-E9
aaaataaaacaaaaactaaaaaaaacaaaactaaaaaaaaaaaaggcgctgacaccggtggaggtccagtctcaaaggcacaagcatacacaccgcctgataataatacaagcccgctctaagtgactgttgttgggcgatccgatcacgctttaaagtaggaatgcatcaagtgagattttgttgataaacaagtgtacaatagc

SEQ ID NO: 1767 - DNA, 309 bp, Zea mays
  Clone ID: LIB3136-030-Q1-K1-F1
ggcaaactcagcggccggctgtcccccaaacaaggtcaacaccgccgccggctgcttctgctgcacgatctactccaccaccaccggtttctcctcaaacactgtcaacaccgctgcctgccgctcccgctcccgctccacggtctacaccaccacctgttgttccccaaacaccgtcaagtacgctgcggccgactactccccaaacgccggtggctgcaactgtcccagcagcgaagtctggtgcggcaccttcatcaacgttctggacagtgtgctcggctgctgcacatcaccagtcactgcata

SEQ ID NO: 1768 - DNA, 304 bp, Zea mays
  Clone ID: LIB3136-030-Q1-K1-F2
cttgaagaattttgtacttacggatgatgctcctctgttctttttcacagacagctgcctcattcttggagaagctatgatcccatgcattttacttgctgttgggggcaatcttgtcgatggccctggtgaaggaagtaagaggcttggcgtgcgaaccactgttgctataatttttgcacggttggtcttggtccctcttgctggggttggcattaccatgttagttgataaacttggtttcattcccgaaggtgatagaatgttcaagtttgtcctgctactgcagcattctatgcccaca

SEQ ID NO: 1769 - DNA, 243 bp, Zea mays
  Clone ID: LIB3136-030-Q1-K1-F3
cttggacaatcctgtactaacagacgacactcgtctgggtttttgcacatactggtaggtaactctggaacaagctataagtccatgcctgatactggctacggggctgactgttgtcgaaagcgctgcaaagacgatagaagatgctaaactggcgtatcaatgatattataatctttgaacaagtggtttaggaccactgtgctcccgtttgcagaaccatgtcagttgatgcactttgtt

SEQ ID NO: 1770 - DNA, 257 bp, Zea mays
  Clone ID: LIB3136-030-Q1-K1-F7
tgaagttatcattccttgcaattatataggctttgtctgtggaaacaatggcagtgaaatgggagaaatagagaagatgtcaggtgcttcaattacagttcatgatcctaaagctggcgacgcaaactcaaaagttgttatatgcggggatcccgaagaaacaaagaaggcacagagcctgattcatgccttcatattctgtggtctgtatcaaacataattgatgacttgatcactgtgcattaccatcgtcgttt

SEQ ID NO: 1771 - DNA, 415 bp, Zea mays
  Clone ID: LIB3136-030-Q1-K1-F8
cgtacgcaacatccaggccgggaagcagatcggactccacacggtgctggtgggcaaatcgcagtgggtgaaaggcgcggaccacgcgctcgagagcatgcacaacatcagggaagcgctgccggagctgtgggaggaggccgagaaggcggaggacgtgctctaccccgaacgcgttgcgatggagacctcagtcaccgcgtaaaacccctgaatgccttcggtgcaccgtcagccgaactttttcgacatttccaggaccgcatgaacgatcacatgttactcgctccccgagccagggccggtgatgatctggcgctggaactgaatccaccagcaatggccgggccgaggatcgatttccgacagcaggaggggtgcagcatgtaaagggggaacagatgatatcatgttt

SEQ ID NO: 1772 - DNA, 258 bp, Zea mays
  Clone ID: LIB3136-030-Q1-K1-F9
cataatggtgttgcagagttgttggagatcctgggcagtattatcaatgggtttgcccttgggcttaaggaagagcacaaattattccttgttcgtgcattgatccctcttcacaagccaaaatgtgtatctatgtaccatcagcagctatcatattgcatcacacagtttgttgagaaggattgcaaacttgctgacacagttattagacgcttacttaaatattggcctgtgacaaacagctcatacgaggtgatg

SEQ ID NO: 1773 - DNA, 302 bp, Zea mays
  Clone ID: LIB3136-030-Q1-K1-G1
gacgaccagaggcacgattccttggtgactccggtggccaatatctacgggacagtgagatctcacaaaaagagttggaggatgctcagaaggctgtaggagagtttggaggtgacaaccgtgcaggaattgaaggtactttacataggatatctgctataaggagtaggaaaggaatggttgttggtttgacctgtcgagtcggccgagctgttactgggcatgttgacatggtccgtgatctcctaaattacaaagaaagtatcctatttttgggaaggccttgggtcggcaagactact

SEQ ID NO: 1774 - DNA, 315 bp, Zea mays
  Clone ID: LIB3136-030-Q1-K1-G2
gtggagtcctcagacaccattgacaacgttaaggccaacatccaggacaaggagggcattccaccggaccagcagcggctgatcttcgccggcaagcagctggaggatggtcgcaccttggctgactacaacatccagaaggagagcaccctccacctggtgctccgcctcaggggtggtatgcagatttttgtgaagacattgactggcaagaccatcaccttggaggtggagtcgtctgacacaatcgataatgtcaaagccaacatccatgacaaggagggcattccaccggaccaacagcgcctgatcttt

SEQ ID NO: 1775 - DNA, 319 bp, Zea mays
  Clone ID: LIB3136-030-Q1-K1-G3
ggacatttggaagtccaaggtgttgcccaagatcaagctcgtcttcgtcaagagcgccggcaagaaggccgccgccgccgccgagctcgtcaagtccttcgacgagtccaaggaggggatcgatggcgagttccaggagaagaaggctgatctccagcccaaggtcgtcgagatctacgagtctgcccctgcaccactcaaggtcctgatcaaggagaggagcaaggtgtccgggatcaagaagaactccgccgcaatcaccaagttcttcgaggagctggccaagatcgaattccctggagccaagcaagtgagcgac

SEQ ID NO: 1776 - DNA, 248 bp, Zea mays
  Clone ID: LIB3136-030-Q1-K1-G7
gcggatccagagagggtttacccgatggagcacctcttctgaaactagctgcgaagctgttcgggagacctgtgtcgcactctttgagagactgaagcccatcaaggagaatctgctagctgaggcaggcaccgcggagtgatgttccttcatcgctcacgcacgtatagcgagtgtgaacttatttgaacatgcatactggaccccagaaccatctttcataaggtctttaaactacggaccttgca

SEQ ID NO: 1777 - DNA, 183 bp, Zea mays
  Clone ID: LIB3136-030-Q1-K1-G8
gtgaggaacattgttgaacacgctgaccgaatagatgtgcacgaagcctgcctacatgatggatatcttctacccaaatcgtatgcaaagcttcatcactgtgtctgatgcgcaatccatgcgcacattggacgagtacgctctcgtgagaacaagaggaaccgagagctaccacagtgcttc

SEQ ID NO: 1778 - DNA, 221 bp, Zea mays
  Clone ID: LIB3136-030-Q1-K1-G9
gagagtgaaccagggtatagtgaagattatagttgagcttatgaggaaccatgacagccctgaagcgttggtgatactcgctagtgcctccaaccttctacttaatgctaccgatggaatgctagtcgatggagaaacttgtactttgctacagcttgagcttttggaagtgaccgctcgggcttgccatcttatgatggaatgaggagaatcacgattat

SEQ ID NO: 1779 - DNA, 332 bp, Zea mays
  Clone ID: LIB3136-030-Q1-K1-H1
atcgagccgagcgagcagggagagacacggcaccgagtgaggccgccgcatcctcctcctctccgatccgtacgtttcctcctccctagcaatcgcaacccgttcagccaatcattgccgtctccaccaactccgttcccctattacctagttagtccagtccgcctgctgcctgcctcaacggatcgacgcgacaggagggagggaggaaggagacggtcgatcagagtctgagacggaggccgatccaccaccgcagcgaacgagcggaaggagaataacatcatcattgacacggatccccgcatcgatgacagcgtggccatcctgat

SEQ ID NO: 1780 - DNA, 55 bp, Zea mays
  Clone ID: LIB3136-030-Q1-K1-H2
gactgattgatcgtgatgcatatggaatgctgctgcgacatgcttacccacatga

SEQ ID NO: 1781 - DNA, 273 bp, Zea mays
  Clone ID: LIB3136-030-Q1-K1-H3
agcgctaaaaaattggtcgcctggtggaacctaacatatctgaacactttgctacgcggtattatagggcgtcgtgaactaatatttggagctacggagtataccactgcaatcgatatctggtctgttggctgtgtaatggctgaccttctgattggtcaacctttgcttcctggagaaagtggtgttgatcaactggtggaaatcataaagattttgggtactccaacaagagaggaaatcaggtgcatgaatccaaattattctgaattc

SEQ ID NO: 1782 - DNA, 400 bp, Zea mays
  Clone ID: LIB3136-030-Q1-K1-H7
cggacgcgtgggggctcgccgggcaagcgcttaacctgaacctggtgggcgacccggaccgggtggcgagagaccccgtgttagccttcaagacggccatctggttctggatgacgctcgaaacgcccaagccctcatgccacgccgtgatgaccggcgactgtaggtccttcgacaccgaccgcgccgcggtgaggctccccggatacagcctgaccacgaacatcatcaacggtggcctagagtgcggcgaggaccgctccaccgacggcgccaaagacgccaaagaccgggtcggctactacaagatgtactgcagtatgctgcgagtggggtacggggacaacatggcatgcaggaaccagaagccttacggaggatgatgacactaggggctgat

SEQ ID NO: 1783 - DNA, 321 bp, Zea mays
  Clone ID: LIB3136-030-Q1-K1-H8
acgactacgcgtccgaaaaattgatacctgtttaacctaacatattttacatttactcgccggattattgggctcgtgaacttacatttggagctacagaatataccactgccattgatatctagactgttggatctgtaaaggctgaccttcttattagacaacctttagatcctgtgaaaagaggtgtttaacaaatggctgaaatcataaaaatttttggttcttccacacgaaaaggaaactagggcgtgaatccaaaacattttttattcaaagttccttacataaaaacccattcattgcacaaacttttttgta

SEQ ID NO: 1784 - DNA, 197 bp, Zea mays
  Clone ID: LIB3136-030-Q1-K1-H9
aagacctgcaagttttgctacgttttatagtaataaaaaaagcagccggaatagcgggcaggggcattgccatatcctgcacggccttcgacgacaaggccgtgaacgtgccgtagtcggccgacttccgagagaccttcttaacgatgcgcaagacggcagtgaaggccatgccagtggtaacgtgctggagctcg

SEQ ID NO: 1785 - DNA, 339 bp, Zea mays
  Clone ID: LIB3136-032-Q1-K1-A1
acgacttctacttccacggcctggccggccagggcaaaataaacccactcatcaaggccgccggcaccccggccttcgtgggccagttcccgggcgtcaacgggcttggcatctctgcggccaggctcgacatcgaggtgggcggcgtcgtgccgctgcacacccacccggcgggctcagagctcctcttcgtgacccagggcaccgtcgccgccggcttcatcagctccggctccaacaccgtctacaccaagacgctgtacgccggcgacatcatggtgttcccgcagggcctgctccactaccagtacaacgccggcaccggcgctgccgtgggcc

SEQ ID NO: 1786 - DNA, 324 bp, Zea mays
  unsure (1)..(324): unsure at all n locations; Clone ID: LIB3136-032-Q1-K1-A11
gaccacgcgtncggataaaggtatggctcttatctctgtttttgttttattactacagaacttgaagaatgggcgaggctgatgcaataacgctagcaatccattgaggccttgcattccctgttaaggacttcactgaactataagagttgttgataaaaaaaaaagcccagtctctatagttctttggacaaagccactgatcaaaatggggtaccaacctcttctgtgcatgaactgttgaatataaattggtactatcaggaccttctacttgaactttacattttggaccgcccgctacatcacaaattctatttttaa

SEQ ID NO: 1787 - DNA, 328 bp, Zea mays
  unsure (1)..(328): unsure at all n locations; Clone ID: LIB3136-032-Q1-K1-A12
ctcctcgctcctcgccaccgnggaggcttagcttgccaagggcggcaaggccgagttgagcaggcggaacgacgtgacctccttcgacttcatcggcgaggcctacttcggcgtgcgcccctcggcgaccgagctcggcaagggcgggccgagcaaggcggccaagtggctcatctggcagctccacccgctggtcacgctcggcctccccatggtcctggaggagccgctgctccacacgttccacctcccgcctttcctcgtcaaaggcgactacagggcgctgtacaagtacttctccacggtggcgaaacaggcgctggacacc

SEQ ID NO: 1788 - DNA, 335 bp, Zea mays
  Clone ID: LIB3136-032-Q1-K1-A2
agttgctctgctgcaggaaattgctcgtctgcaaagggttcaaggagctggtgctctcagtgcgaaggaggaaatggccaggctatctcggcaccttgcttccctgcccatccaggccaagcacaggatcaactgcatcaggaccgccatcaagcggaacatggaggtccagaactacgcctacgccaagcagatgctggacctcctctactccaaggcgcccccgacgaagcaagacgagctcaagagcctgatcgacatgtgcgtccagaggggcctgacgaacaaatccatcgacccgttcgaggacccctcgcagttctgctccgtgaccc

SEQ ID NO: 1789 - DNA, 455 bp, Zea mays
  unsure (1)..(455): unsure at all n locations; Clone ID: LIB3136-032-Q1-K1-A3
attatgcgggaccganaattgatggggaagaaataacgatagagtttgtcaaagcaatgttgggggaatggaagaagcagaaatgcatacataaaaaatatgcttaccagattgtgctaaaaaccttggatttgctgcgatcgatgccttcccttgttgatgtggatgttccaaacggtggacattttacagtttgcggtgatgtgcatggccagtactttgatttgctcaacatatttgacctcaatggccttccatcagaagaaaatccttacctcttcaatggcgattttgtggaccgaggatctttctccgttgaagtcatactcaccctttttgctttcaagtgcctctacccaaaagctatgtaccttgcaagaggaaatcatgaaagcaagagcatgaacaaaatatatggctttgagggggaagtgaggtcaaagctgggtgagaag

SEQ ID NO: 1790 - DNA, 410 bp, Zea mays
  Clone ID: LIB3136-032-Q1-K1-A4
atttcagtgtgtgccaagaagttctcaagctcaaactgagcaatggcagctcactttgcagcggcaacgggagtcttcctgagctgccttcttgctcttgcagcacttgcaagctgcaacactgaaggtgacatcctgtacaagcaaagggcgacatggaaggacccaaacgatgtgctcgtgagctgggatccgactcttgccaatccctgcacctggctccatatcacttgcaacaacgataacagtgttatccgtgtagatttggggaacgcaggcctatcaggcactctgattccagatttgggaggactgcagaacctccagtacctgatgttgtatgggaacaatctgacagggcccatacctgaatctctgggcaatttgacgagccttgagaggctggagct

SEQ ID NO: 1791 - DNA, 264 bp, Zea mays
  Clone ID: LIB3136-028-Q1-K1-F3
ggaacgggctttgggcatttcgcaattgctaatgatgatgtgtacaagttagctgagaatatcaaatccaagggtggtaagatcacccgcgaacctggtcctgtcaagggaggatccactgttattgccttcgcacaggatcctgatggctacatgtttgagcttatccagagggctgacacacctgagcctcttttgccaggtcatgcttcgtgttggtgaccttgagcgttctatcaagttttatgagaaggcccctaggat

SEQ ID NO: 1792 - DNA, 385 bp, Zea mays
  Clone ID: LIB3136-026-Q1-K1-C11
ctacagccaagtacacctttggtttgacgactacgttccttggcctggggctgcttttggacagatccgcattgatgagttcctggcgacatctgccatggacacaaatatgaatgcaaccttctccataccaacagccaaatgcccttaaattcagagatttgaacagataagcttcattgtgcatgtgtatcgattctttggtgtttatttttccttttgccacgtacagtattggagctggacgcattatctccatgaagctttgagctggcggatagtgcgtaatttagaccactaggcttgaatagtttagaatttggggcgacatgctctgtatagagtgtacatcatagtaaggtgtggaacttcgacttgcattgta

SEQ ID NO: 1793 - DNA, 407 bp, Zea mays
  Clone ID: LIB3136-026-Q1-K1-C12
ctacagccaagtacacctttggtttgtcgactacgttccttggcctggtgctgcttctggacagatccgcattgttgagttcctggcgacgtctgccatggacacaaagatgaatgcaaccttctccataccaacagccaaatgcccttaaattcagagatttgaacagttaagcttcattgtgcatgtgtattgattctttggtgtttctttttccttttgccacgtacagtattggagctgtacgttttttttccctgaagctttgagctgccgtatagtgtgtaatttagaccactaggcttgaatagtttgtaatttggggcgacatgctctgtatagagtgtacatcatagtaagttgtggaactccgatttgttttgtatcgtcggggtgaccttgcttaa

SEQ ID NO: 1794 - DNA, 312 bp, Zea mays
  Clone ID: LIB3136-026-Q1-K1-C3
acccacgcgtccgcggcgcggacgagagcggcgagagctctctcgccggcgatggccggcgtgcatcgcgaggtgtactcgaagaagggcgtgatgcggcggctgatgcggtggatccggccgcggtgggccgcggctgatcatgctgagtgcgcggtgtgcctggacgagttccgcgcgggcgacgtgctggcgcacctgcgctgcggccaccgattccactgggcctgcgcgctgccctggctcgagggcacctcgcggtgccccttctgccgcgccgtcgtggacgccggcgccgacgtcgccgccgac

SEQ ID NO: 1795 - DNA, 396 bp, Zea mays
  Clone ID: LIB3136-026-Q1-K1-C5
ctcctgcgctgtctagccgtcccagtttcacaccccttgctcacccacccgtcccggggtgctcgcccatggctcccatcgctgtcagctactccctcccagacagccagctcgggtggttcgacgagaacgaccagctgcagcacgtctacgtccacagcgctcgccgacggcaagaaggtcatcctcttcggcgtacccggcgccttcaccccgacctgcagcaaccagcatgtgccaggcttcatcacacatgctgagcatctcaaagccaagggtgtagacgagatcctgcttatcagcgttaacgaccccttcatcatgaaggcgtggtcgaagacctaccgcgagaacaagcacgtgtaagttctcgccgactgatctggagcgtacacc

SEQ ID NO: 1796 - DNA, 335 bp, Zea mays
  Clone ID: LIB3136-026-Q1-K1-C7
agctgggggacgtactgccctggcgagttcccaagccctccacctgagtatgacacttgcttgggagacctgtatagtgttgcttggatggaagacagtgatttccacaatctgcgaactgaatctctcaagcagcaatacaacttggtcaaggataggacagcggttcaggatacattcagctatggctcccatgtgatgcaatatggttcattggagttgaatgttaagcatctgttttcgtacattggcacaaaccttgctaacgatgacaacacgtttatagaagacaactcgttgccatcattctcaaaggctgttaatcagcgcgacgc

SEQ ID NO: 1797 - DNA, 242 bp, Zea mays
  Clone ID: LIB3136-026-Q1-K1-C9
aaagcagacagctaacttcaccatggactgcaacggtctcaacgaaggggacgttatggggaaacagggccagtacatcgactaatactattgcagcaatggctacattaatggtgtcggctgaaccagagatggtggcattagcgcttagaggcttgttgatcgcatgagccggctcatccactttcactcgcatattgacaacgcctacataacccacatcgtcttagactaaccaatca

SEQ ID NO: 1798 - DNA, 416 bp, Zea mays
  Clone ID: LIB3136-026-Q1-K1-D1
acccacgcgtccgctctgaccagagcctgaacagggaagtccagaccaggccaaggccaagaggaatcagtttttggaaccaaagccatctagcatgtaaagcccatcccatcagttgcaggtttgggattccaagccctccaaggttcaatggcctggttattttctcccaagacatatgtcaacttccaccattcacttctttcctccctttctacaaaaaggcccttctcaatttatcaatagccttaaccacccatttccatttaggcacattcaaggcaatgaagtccttattttgaatcgattggtcagaattgaacttaataatattcagacctaaagctgtctggcattcccgatcaataaaattagtgtgcaaagtgagatccaaggatgcattaatgagtctgatt

SEQ ID NO: 1799 - DNA, 383 bp, Zea mays
  Clone ID: LIB3136-026-Q1-K1-D10
gtcctgtactgaccacctttcctccaactccgatcctctaagccatggggctactctaggggaactggtgctctaaacacccaaaccctaaccgcctaacctctgcgctaccggcgtcaccaccgtcagagctgcggccatgaacgccttgctgctcctcggatacatcacccacctcttctcggtcctggggctcctcctaaagatctacgccaccaattcctgctcacgcgtgtcgagggagactcatgagctgtacatgttggtcttcgcggcgagctacctctacctctgcacggactacgtctcgctctacaactgactgatgaagatagtgttcatcaccagctcggccgctattgtcatgtgcatgcgccaccacc

SEQ ID NO: 1800 - DNA, 398 bp, Zea mays
  Clone ID: LIB3136-026-Q1-K1-D11
ctcccggcacctgtaaattttgtatgccttcacgccgtgaagccacatttgcggccattggcaatggctgtatccactgtttcgatccatatatttggtgatgtcccttcttcacctcttgttgggctgcttcaggacaaaatcaataactggagggagacaactcttatattgacatccatccttttcgctgcagttgtgttctggttcattggtgtgtctgaggctgcacaagatgctcttgatcatcttttcaaccaaggccacaatctcgtaacagaaaatgagatttctgatacctttactaggctggttgaaaggctaccacaagtggtacttggaagcgaggagacaaccgcactttcacatgctaggatgttgttggctctgacctttta

SEQ ID NO: 1801 - DNA, 401 bp, Zea mays
  Clone ID: LIB3136-026-Q1-K1-D12
cgcctcgaccggatctcgtcggactcggatccgcccgaccaccccgcgccgccgcagatcaaagaagatggcagctgtcgacacattcctcttcacctcggagtctgtgaacgagggacaccctgacaagctctgtgaccaggtctcagatgccgttcttgacgcttgccttgctgaggaccctgacagcaaggttgcttgtgagacctgcaccaagaccaacatggtcatggtctttggtgagatcaccaccaaggccaatgttgactacgagaagattgtcagggagacctgccgcaacattggttttgtgtcaaacgatgttgggcttgacgccgaccactgcaaggtgctcgtgaacattgagcagcagtcccctgatattgctcagggtgtgcatg

SEQ ID NO: 1802 - DNA, 329 bp, Zea mays
  Clone ID: LIB3136-026-Q1-K1-D3
gcaagcaagatggaacgaaggacgataatggctctggtcgggcaggtggcgacggtggcgcagctggtgggcgtggacgcgttcagcctcatcacgatgatcgcggaggcggcgcaaacggcgcggcggaaccgcgccgtgtgccggcagctggcccggcgcgtggagatgatcggcagcctgctccggcggctgcgcgagcaggacgacaacgacgacatgcggctgctgcggcacgcggagacgcgcggccccgtggaggcgctggaggagacgctccggcgggcgtacctgctggtgcggtcctgccagcggcgcgggtacgcgta

SEQ ID NO: 1803 - DNA, 396 bp, Zea mays
  Clone ID: LIB3136-026-Q1-K1-D5
ctcactcacagtataccttgttcagatagaccactctatttttctctgcatacactggtctttttcttttccattgcgtgtgtgtgtccactaaagttatataacttttagcctacactttgtggttctgttttcttacttgatatctataattgtacaacacataaactgcatttccaattctgttccctttgaagatattaaatatctttcaactctttcggatcgtttttaatatatgtgagcgtatcaacattattataaaattcattatactgacaactactaggttggagatgacacatgtgtttccaaggtaaggttcctcatctagctcaacctcaatgagcagccataggagtgaaactgatgatgataggatgatttgcttggttc

SEQ ID NO: 1804 - DNA, 286 bp, Zea mays
  Clone ID: LIB3136-026-Q1-K1-D9
gtcccctaaggctttcgttgcagaggactcactctggcctaaggatcggggtaacttagagctcctgggcacgttggaaaggaagttggtcacacaagaagcatatgacacactgaacactctactaacactatatcacgcatgaacacagctccggatcgtattggacaagcttggtcagcggatcccacgaaaaacctggcaactgtaatatagcacacatgcttaacactgaatgactgatcgtcaatcaatataccaatatctctgcaagagcagctctcaa

SEQ ID NO: 1805 - DNA, 407 bp, Zea mays
  Clone ID: LIB3136-026-Q1-K1-E10
cgctgctataaaaccctccgcctccaccggcggctcgccaaactccggttcgaattctagggttttgctgctctaccaccccaaactccaaacgccgcagcatcaggcgcggcccccctcgcgtgtgaccgagatggccctgcctaatcaggggaccgttgattaccccagcttcaaactcgtcatcgacggcgatggtggaactggtaaaactacatttgtgaagaggcatctcactggagagtttgagaagaaatatgaaccaaccattggcgtggaagttcatccatgggattgcaccactaactgcgataagatcaggctctactgctgagataccgcaaggcaagagaagcctggcggccttagggatggatactatatccatggccagtgtgcgatcatca

SEQ ID NO: 1806 - DNA, 194 bp, Zea mays
  Clone ID: LIB3136-026-Q1-K1-E11
ccctggtatcaaagaattcagagaaagctgcggaggatcaagcttaggggtccatcctaggggaatgatgcaaaactaacaaaagcacataatgccagatgataaatctcatacgccatgtcgtgtaaccgagatggcactaccatatcagtcgacctatgcataccacatcttaaacctcttcaattgaagag

SEQ ID NO: 1807 - DNA, 407 bp, Zea mays
  Clone ID: LIB3136-026-Q1-K1-E12
cggacgcatgatcttctgcacccgatcaggatccacatcttgccgagcgagttcttgggtgacctctttccacttcggaccacctccaaggctcttggcgtatctagccactctcaccaatcaagttttcatgtctgatctcgacattcagatcccaactgccttcgatcccttcactgaggccaatgctggagactctggtgcggcagcatgatcaaaggactactttcacgtgcgcattcagcaacgtaatggtcgcaagagcctgactaccgtccagggattgcagaacgagttcagctactgcaagatcctcaaagatctctaaagagagttctgctgcaatggtacagtggtccatgacccagaacttggacaggtcatgcatctccagtgtgatcagagga

SEQ ID NO: 1808 - DNA, 305 bp, Zea mays
  Clone ID: LIB3136-026-Q1-K1-E9
ctgacctattaccttttcttctcctaactccactcgaactaaccacgggggtactccggggctaaaattacccaatccatcataccttaaccctaaataaattcttcatccacctccaacataaatcaacgtatagcaccgataacctcaactccaaatcgtatatgacacgctcggttcgcggttcacgcgactaggctgacgactggctacccgcctctcgagcgaaacccagcatgacagaatcacattgaaataacgacacgctctgcaacaatagctccatttcacgctgacgcagcagc

SEQ ID NO: 1809 - DNA, 400 bp, Zea mays
  Clone ID: LIB3136-026-Q1-K1-F10
tgcaatccttacatatgcattgcccagatatcccgaggttgtatatgctgtattgcatggacaagaggtttttgagccatttaaaaatcatccacgttttaatgaactgcttgagaacatatacactgtattgtatttcttcaatagtcgaatggacatgcaacaattagatggggaatggtctgtggataaagtgctttaagtcatcaataaaacttgccgttcatggcgcggagaagggatgaagatgtttactcagttgcggtttacatatgagcaataaagccaccctgaggaattctgtatcccatatgcatggcgccttgtcctgtcacggggattctgcttcaatcccagcgccataaatctcttacgtgtggagattcaccttgaagatgca

SEQ ID NO: 1810 - DNA, 396 bp, Zea mays
  Clone ID: LIB3136-026-Q1-K1-F11
aaaaaggagcacaaagctctctctccctaccccctctgtctctctctctgctgttccccgcgagagtcgctcatggccgcggcgaggaaaagcggcagcgcgtcacctgttcaatggcatacccgtcccttctgcgtgcaacctgtgcgcttctcgagtgctgaagctccctgtccctaagacaagcttgcgcgcgcgatggaggcgttttcgagggacttgctgtgcgggattggcaagggggacgcagccgcaccagagaagaggccgatgcagctgcgggaggagatggaggaggtggagcttagcctcgggctgtcgcttggcggtcgattcgggctcgacaggaaggggagcaagctcccacggtcgtcgtgcgtggcggccatgctgaca

SEQ ID NO: 1811 - DNA, 256 bp, Zea mays
  Clone ID: LIB3136-026-Q1-K1-F12
aaaaaggatcacatatctctctctcccttccccctctctctctctggcgccttttcccggccagagtcgctcatggccacttctaaaacaaccgccatcgcatcacctgtccaatgacatacacatcccttctccgtgcaacctgtgcgcttctcgaatgctgaagctccctgtccctaagacaagcttgcacacgccatgaaggcttcttcaagacacttcctgcacggcattgacaagggatacacaccgccac

SEQ ID NO: 1812 - DNA, 398 bp, Zea mays
  Clone ID: LIB3136-026-Q1-K1-F9
ctgccgccttcccttcgcgtctcctcgctccggccgcagcagccgccggggccctccaggcgcaaaattacccaatccatcatccccgaaccctaaataaatcctcgatcggccgcgcgcgggaatcaacggatgggaccgcggccggcggctccgtagcggattggacgcgctcggttcgcgggggccgcggttcggctgccgggtggcgcccgcttctagagggaaaccaagaaggaaggaaggagattggaataaagacaggcactgcaacgatggctccatctcaagcggcggcagcggctggccccacctttgaggacctcgagcgcgacctgcaggcagttctcatggaccaaaaccacatgtgcacagtggacgacctcggcatgtttcgc

SEQ ID NO: 1813 - DNA, 410 bp, Zea mays
  Clone ID: LIB3136-026-Q1-K1-G10
cctccgccctttcttgtgaccgccgccgcgggccctagcccgccgtgccctctccggcgccccgctcccgcacccgcaccggatcagtccgggccgcgtggtcgcccccacctaccgcctcgggtccactcgctcgcggttgcgtgtcccgcggggtggcccctcgggcctcggcagctcccggtttcgaatggggctctcgtcggccgccactggcgacggggtgcagctctgcgtgttcgacctccagagggggcagcaggagggccaggagctcgacaagatcctctacttctaccccgccgactgccccatcctgctccagctctctgtcatcggcctctgcgaggggatcgtcactttcactagaatattttccccagaagaggattgcgaggttatagaatcag

SEQ ID NO: 1814 - DNA, 412 bp, Zea mays
  Clone ID: LIB3136-026-Q1-K1-G12
ctccgtatcgagattcttgtggtttcgcaagaccagatcttcttgagctttcaagacgggttcttgaccttgtaagacccatctttacgatacatctcctctttgacctaatcttctctatctcacacctttctctccgttcttacttctcttctatgtctatcccttctgagctgtgttgagctacgctgataaagctaggtactatatataggttaagtgtttttaggaggcgtttctcatatgtgtaatgatgtgagcttgccctgtgggaaaagaaaatccatatatttgatgttgatggtagctatagagtgaggcacgtgacaaacaaaagtatgttcctgatgcgccatgagcacattatgctcggtcatgtgaagtaggctcctacatgcacgctaagctatac

SEQ ID NO: 1815 - DNA, 378 bp, Zea mays
  Clone ID: LIB3136-026-Q1-K1-G9
ctacaaggggctcggcgagaacccaaactgctatcggggcatatacgtcaagaggtccagcgacctggagcccatagagcactccgtcatccctcgcatgatcggcattagtagcatcaagcccgtccactgctggtcgctgcaccaccgatactccaccgagctggagcactcgcggagcttacccatgctcaccggctacccagccctgaacgacgccgacgtcgagaccacgagctaattctccagcccgataaaatacaccgtcatcactagcagcatgacccttcattcagatgccgcggataacgacaactcacacacccactcacataatatccgcgaggtccacagcactgtacaatacggcttctactc

SEQ ID NO: 1816 - DNA, 414 bp, Zea mays
  unsure (1)..(414): unsure at all n locations; Clone ID: LIB3136-026-Q1-K1-H10
gcaggctcaggccctggcgcaggaggttgctcgcgtccatggcgctgtcgtggccctgggccgtccgcctcgccgtcgccgccgtcctactcgccgccgtcgtcgtcgcgctcttcacgctccccgtcgagaagattttaaaggactttctactttggatcaaggagaacttgggtgcatggggtcctttggtgctggccctagcttacattcctctgacagtcttagctgttccagcatcaattcttacacttggagggggctatttatttggactgccagtagggttcgttgctgattccattggagcaacaattggtgcaactgctgcatttctgcttggcaggacgattgggaggccttatgttctttcgaaatgcanagattaccctaagtttcaagcagtagctattg

SEQ ID NO: 1817 - DNA, 414 bp, Zea mays
  Clone ID: LIB3136-026-Q1-K1-H12
tcgatcccactttactcctatccactgcggtctggacgcgtgcgagaggcttgaccaagcggcagcagcagcagcagcgatggcgcctctgaagctgtacgggatgccgctgtcccccaacgatacgcgcgtggacaccgaactcaacgagaagggcctcgacttcgagatcgtccccgtcgacctcaccaccggcgcccacaagcagcccgacttcctcgacctcaaccctttcggccagatcccggctctcgtcgacggagacgaagtcctcttcgagtcccgtgcgatcaaccggtacatcgccagcaagtacgcgtcggagggcacggacctgctccccgcgacggcgtcggcggcgaagctggaggtgtggctggaggtggagtcgcaccacttccacccgaacgcgtc

SEQ ID NO: 1818 - DNA, 398 bp, Zea mays
  unsure (1)..(398): unsure at all n locations; Clone ID: LIB3136-027-P1-K1-A1
cggacgcgtgggccagtccagctcaccagccgccctcccctncgctgctgactgcgaagtgcgaatcaaagccaccaccgcgcagaaaccatggcaccggtggaggcggagcagcaccggcggagggcgctggcgctcgcggggcacgacgcctccggggccgtttcccccatccgcatcttgcgaagggacactggagatgacgatgttgccatacagatactgtactgcgggatatgccactctgacctgcacaccatcaagaacgagtggaagaacgccaactaccctgttgtccctgggcacgagatcgtcgggctgatcaccgaggttggcaagaacgtgaagaggttcaacgtcggagacaaggttggcgtcgggtgcatggtcaacacatg

SEQ ID NO: 1819 - DNA, 225 bp, Zea mays
  Clone ID: LIB3136-027-P1-K1-A10
cgcgtccgcttgcatcctgatgctggaactgtgaggtgtagattcgagaacactgcaatgcttggtgggagagggaactgcaatctgccaggaattgtcgtggatcttcctacattgactgagaaagataaagaagacactttggcctgtggcgttccaaatgatattgacatgatcgctctatacctctaacgtaaaggatcatacttggtgactgtgagacag

SEQ ID NO: 1820 - DNA, 353 bp, Zea mays
  Clone ID: LIB3136-027-P1-K1-A11
cggacgcgtgggcggacgcgtgggcggacgcgtgggttttggcagatgtcatttccatccccaagacaatggagaactacaggctgctttatgacaccaagggccgcttccgtcttcacccaatcagggatgaggatgccaaggttaggccaattctcttacacatcatctctcattgttctagttgagcatgatgatcttggtagctgtgtgaggttgttgctttcattagtagatctgtgtaccttgtccttgctatactgtctatatatgttgtgtgcatggaagtcttgcattgaaaatgtcatgtgctacaatctgtaggattgttaatagatgttgctttggctatc

SEQ ID NO: 1821 - DNA, 182 bp, Zea mays
  Clone ID: LIB3136-027-P1-K1-A12
ttttgaattcgagcgacgagccacgcgtcccaacatataacatcatctgacttgtccaacctaccaaatacatttactcttagtggggctaggaatctacatttaaaccaacattcaacggttatcttatgacttaccctattctgataatttaaactacctcaacactgtccaacttactg

SEQ ID NO: 1822 - DNA, 398 bp, Zea mays
  Clone ID: LIB3136-027-P1-K1-A2
cgcctacgccgctcagcgacctagctctcctggtctctcgccggcgcgttcgcaccgcgctggcgacaaacttcgccgccgccacagcgactgtatccgaccatccgagggcgcggcagccttgcattccacacccaccagtgcccagcccttcgcctcggcggtgaccacgctggagaagaagccttgagcctgcacttaatctgagactagaaaattgggctcaatcacgggtcgtgtcgtcccgacggacggaggaggaccgccgctagagctcgtgttgtcgcgccaggtgctcccataacttcgttttatttactacgaaagaaacccttaatggcacccagcctaagccccccttttgaattccccacaccggaattcaagcccttagctgg

SEQ ID NO: 1823 - DNA, 291 bp, Zea mays
  Clone ID: LIB3136-027-P1-K1-A3
gcagccgacaactctctaccgtccgagaccccaagcaccagcgcggcggcggcggcggcggcgaccattgctgtcgggaagaacaagaggctctacaagggatagatgggtggcatgaaaaataccgtcaacactttctctaagaaggattggtatgacatcaaggcaccgccggtgttcagtgtgcgcaacatcgggaagactctcgtattcaggacacagggtaccaggattgcttttgagggtctgaagcacagagtcttttaggtttgtctagctgttcttttaggc

SEQ ID NO: 1824 - DNA, 316 bp, Zea mays
  Clone ID: LIB3136-027-P1-K1-A4
gccagacatgtcagaatgcgataaatgaagctgcccagaaaatctcgtccaaggatgcaggtttgacgagctacaccgggagtcccaagactgacagctgtaggaatgttgttctgagatggttgtcaagcaggcttgacccacggtccgcgaaggaaatgctgaggcagatttccaactgcaatgtcaatggagtttgtcctctaagctttccagacacaagtaaggtggcaaaagagtgtggtggaacaatgacgaacagtactgcatgttgcaaggcaatgttaacttatgtagcccatttgcaaaagaaaag

SEQ ID NO: 1825 - DNA, 360 bp, Zea mays
  Clone ID: LIB3136-027-P1-K1-A5
aacaaaaagcttggctttcggaaggaggatcttcccaagatcgaggaagagcttgaattggaaattgccaaaagtgagctgactgaacttaaaaaggaatgcgttgaagcaatggaaactcacctcaagagggaggagtttaaagatgaggggatccctgatgtcaggaaattggacatcagaaacttcctgtaggcctgatcgacgataatctttgaggcccaacgcacctctggttttggtttcaagttgatcggtgctccacacctatgaatgctgctccttccctttttgtaataaaagaaactgcacggttgggtatgagttggatttcctcttgcctttctgttgctctggact

SEQ ID NO: 1826 - DNA, 215 bp, Zea mays
  Clone ID: LIB3136-027-P1-K1-A6
atcccgaatcccgatcgaccggcggcgcgggaggcgatgccggacaaggcggtggacgacgtcatggaggccgcggtgggggcccacttcagcggcctccgcctcgaggcgctgcgcctctccacctctgcgccctcttccccttcctcctcccccgccgccgcggcgcacacgcactccaacggagccgtctacgccaacggcaccaccgagct

SEQ ID NO: 1827 - DNA, 86 bp, Zea mays
  Clone ID: LIB3136-027-P1-K1-A7
gtccagaccccacccgtcgccgtccaccttcgtgctgctgcgcccgccagcacgccaccgctcctcgcgcgtaggctggccggttc

SEQ ID NO: 1828 - DNA, 194 bp, Zea mays
  Clone ID: LIB3136-027-P1-K1-A9
aagatttcgaaggcttgaagaatgttctctgcatcagtgtacaaatatattgcagggctagtacaacaaagtagaatgtgatgttatgtttagctgcattgtgattgctttgtcagtatacatgtaacaactaaaaagatagctgttacgtaaaatagtactaccttcttgccaaaaaataataaataagatag

SEQ ID NO: 1829 - DNA, 374 bp, Zea mays
  Clone ID: LIB3136-027-P1-K1-B1
ctttaatcaaagtggctagctccaattcagaccctgatgatgactgcataattacagtttctgcgaaagagttctttgaagatcctgtatctccaacaattgatgctgcagttcgtttgcagcctagatgcagcgagaaaagtgatttagaatcagctgagcagtcatacacaacacgcttgctggtgtcaacatcacgtattgggtgcctaattggcaaaggtggttcaatcattactgagatacggagaacatccagagcaaatgtacgcattctttcaaaagaaaatgttccaaaggtagcagcagaagatgacgagatggttcagatcactggaggccttgatgttgcaagaaatgctcttgtgcaaata

SEQ ID NO: 1830 - DNA, 341 bp, Zea mays
  Clone ID: LIB3136-027-P1-K1-B10
gctgtggagccaagggctgtacaaagctttttcatgctcctgagtttgttcacaagcatttgaagctcaagcatccagaccttgtattagagtcaacgtcaaaagttcgagaggatctttattttcaaaattacatgaatgatcctaacgcaccaggtggtaccccagtgatgcaacagtctgcaccagacagaggaagacggttacctagcatggacagtcgtctgaaattggaccgtggcagtaccagagaccatgttaaagctgttagaaatggagtaaggtttggtgaagggaacaactttccaagccggattgggcctgttgtccaaatgtttgat

SEQ ID NO: 1831 - DNA, 357 bp, Zea mays
  Clone ID: LIB3136-027-P1-K1-B11
cctctcctctactctgcttcacgcctcgccggccgatctagctagctatcgcagaccccgccggcccggccctcatcgatctctcgtcgcggcaatggccatcacaccgcgcgctccccgatgattgatccactccggtcgccattcccgccgccatcatcagctcctactatatattagcccgacgaccccgttcatcttcctcttgtagttttgtccagcgcgctccgctgacgcaatgaccaacaacaacaacggcggcaatgacacgaacgccgcggcgagcggctggctaggcttctcgctgtctcctcacatggacgagcaccagctccagcagcatcagcagcagcagca

SEQ ID NO: 1832 - DNA, 265 bp, Zea mays
  Clone ID: LIB3136-027-P1-K1-B12
ttctagggttttgctgctctccgaccccgagctccgaaggccgcagcatcaggcgcggcccccctcgcgtgtgaccgagatggcgctgccgaatcaggggaccgttgattaccccagcttcaagctcgtcatcgtcggcgatggtggaactggtaaaactacattcgtgaagaggcatctcactggagagtttgagaagaaatatgaaccaaccattgggggtggaagttcatgcgttggatttaaccactaactgtgggtagat

SEQ ID NO: 1833 - DNA, 314 bp, Zea mays
  Clone ID: LIB3136-027-P1-K1-B2
ggaaactacagattacctcatgttgccacctgacagagaactgtcggctaatgattacatggaactaaacgatctccttgctcctgacccaagcttccccagtgaattttctgctcaggacaatcaatatatgcagcattctcttgctcagtacaatggacattatgatctgtcaggtccttcggagccaacaatgcctagcattttcgatgtttttcctcccaataatggagtcctcttaacagatgatccagccaactacttggacccagccatgcacgttcctttctcatgattggtcagcttttgtcatg

SEQ ID NO: 1834 - DNA, 288 bp, Zea mays
  Clone ID: LIB3136-027-P1-K1-B4
ctccgccgaggactccgccgccgtcggggtcacctggcacctggagtggagggggaggccgcttcccttcagcaggggatgcagcttctaccgcttgctcggttcttcggactcggagcagcagcagcggctgcagattgtgtatggtcgagactgcgtggagccggccgccaagcccggggatttggcactggtaatcatcaggggagtgacatggatcctcgaacgatttccgagccttgcaagcaggctctgatgaccccaaccgaggcaatagctacaggatac

SEQ ID NO: 1835 - DNA, 390 bp, Zea mays
  Clone ID: LIB3136-027-P1-K1-B5
cggacgcgtggggctcgccaggttctcgcgttgcccccgcgtctctcttctcgttgcgacgactgggcgatcgctgccgccccggcgcccccgccgccaggtgccaggttgtcgccgggcccttcgccggcgatgagcacccaacaggaggttaccgagaactacgcaaatcctaagacatgcttgttccatgttctcttcaaggcatcggcattggcgttctacatactgtccacactgttcgtgaacaacttcgtcatcatctttgtcatcactgtgctcctagcagcacttgacttctgcgtcgtgaagaatgtcagcggaaggatactggttgggctgcggtggtggaatgagattaacggtgagggagagagtgttggaagtttg

SEQ ID NO: 1836 - DNA, 134 bp, Zea mays
  Clone ID: LIB3136-027-P1-K1-B6
ccagattctaatcctcgtgaggagctgatcctgctgattctcctagaaaatcagaatgatttttaaaaccgcttggcacgtaaattgattcttgtcttttaaaaaaaaataataaaaaaaaataaaatatgcat

SEQ ID NO: 1837 - DNA, 446 bp, Zea mays
  Clone ID: LIB3136-027-P1-K1-B7
cgcgtctgtccgctacccctccccgaccagatcgctacgagacgccgcgcgatcggacccaggccgacgccgacgacccctctcgccgccggcggccatggcgtacggcgaccgcgtcaccaccttcgaggactccgagaaggagagcgagtacggctatgtccgcaaggtctctggacctgtggttgtggctgatggaatgggtggtgctgccatgtatgaacttgttcgtgtcggacatgataacctcattggggaaattatccgtcttgagggcgattcagctacaatccaagtttatgaggaaacagctggactgatggttaatgaccctgtattgagaacaagaaagcctctttcagttgaattgggacctggaattcttggaaacatttttgacggtatccagcggcctctaaaaaccatcgctattaagtcaggagatg

SEQ ID NO: 1838 - DNA, 225 bp, Zea mays
  Clone ID: LIB3136-027-P1-K1-B9
ctcatcccttactgcctacctgaggttcgatggtgctctgaacgtggatgttaacgagttggagacgaacctggtaccctacccgaggatccacttcatgctaccttagatcggtccatgcatctgtggtgcactagccttgatggaggagcattatgaatatgtgattacaaacatgcgcatgaacaggatgttgcaagatgttcactgagattccaatgccat

SEQ ID NO: 1839 - DNA, 349 bp, Zea mays
  Clone ID: LIB3136-027-P1-K1-C1
caaaaaatgacaactaacagagatggtcattattgcaaagcacccgcctttaggaattaggcaactattaacagacacggcgttttaagaggttcaactttacaaataattgtataaaaataattcataactttttatattaagctccataaatacgaacattatataaaatgtagttttccatgcggtctacaactttgtagttgggaagttattcgtcgaaaactgtttagcttagtatatatatatatatatatatatatatatatatgctaaaataatgtcattttaagttctcagacgatatgtacaatcaacctcaaatattgacatggactacagcaaagct

SEQ ID NO: 1840 - DNA, 221 bp, Zea mays
  Clone ID: LIB3136-027-P1-K1-C10
agcagagcaacgagtacggcgccgtcgcctactccgacctgggaggcttcaagtacctcgtgtacgccaacggcctctgcgctgcctactcgctggtatccgcgttctacactgccgtgccgaggcctgccaccgtgtcgcgctcctggctcgtcttctctctcgaccaggtgttcacgtacctgatcctggcggcgggcgcagcggcggcggagctgctg

SEQ ID NO: 1841 - DNA, 326 bp, Zea mays
  Clone ID: LIB3136-027-P1-K1-C11
caccaacacgtaggccaacccctccgctgagtcgctgaccgcctcgcacccgtcgttcccctccttccggcacaaccagcacgcgagcggcacgagaagactagggttccggcgaggcgacggcgagagccatggcagggattcgatggccgccagaggacccggagatcttcccttccaggatggtcagcggcggggcttgggtccccgtcgcgcccccaggagagatggcgtctgacgacgaccggtcggtggccgcggactcgtggtcgatcaagagcgactacggcagcaccctcgacgacgatcagcgttactccgacacc

SEQ ID NO: 1842 - DNA, 105 bp, Zea mays
  Clone ID: LIB3136-027-P1-K1-C12
acgcactaacacgtagggcaaccactacggtgagtcgttgaccgtgttgcacccgtagttccgggtcttgctatacaaccagtactcgagctgctctagaagact

SEQ ID NO: 1843 - DNA, 323 bp, Zea mays
  Clone ID: LIB3136-027-P1-K1-C2
cgcaacgcaagcgcagacacgagcgatccgatccgatccggaactgtgccggccagccatggcgactagggttttgctcaccgccctcctcctcgccttcctcctcgtcgccacccctttcaccgcccgagttgctagagctgattcggaggaagatgctgctgcagctgaggttgttgaaggggctgatctaggtattgtgggtgatgatacacaggtttccagtgatggacctttaagccctgctcctggtgtagagacagtagttgtattccccaaaaatgctggcaaaattgtactagcaggtgaagaaactgaattac

SEQ ID NO: 1844 - DNA, 273 bp, Zea mays
  Clone ID: LIB3136-027-P1-K1-C3
agctggtccaacgaaaggcacacagtccgacagccgccgctgtttcttcatcttcctcgcagcgccggcgctccttcttccgctccctctccgattcgcgctcggcacgcaggcgacggcggcggcgctcgtgctcgggctctcagcgacggcgggcagtcccagactcggtgtcggcgtcagcggtcccccttccgcctgtcaccaatcgccttgcgccctcgcctccggtcctccgaacaccgaccggggccctgcgtgcacgcctcccgt

SEQ ID NO: 1845 - DNA, 302 bp, Zea mays
  Clone ID: LIB3136-027-P1-K1-C4
gctatgcccacctgtcgtctggccttgcctgtggtcttgctgggcttgctgcaggcatggccattggcatcgttggtgatgctggtgtcagggcgaacgctcagcagccgaagttgtttgtgggcatgatcctcatccttatttttgctgaagcgcttgccctctacggtctcatcgtcggcattatcctctcgtcccgtgccggccagtcccgtgcagattagaggcacgtttcagatgtcaacaccgtgccgccgacagttgcctggtcgtagctgggtcatgttctatatccatgagac

SEQ ID NO: 1846 - DNA, 403 bp, Zea mays
  Clone ID: LIB3136-027-P1-K1-C6
gttcgaggccatggctaccattctgatggattgacatgcttatcgatgacttcggattcaggaacggttgttagcggctccaaggacagttctgtgcacattgtgaatttaaactcgggccaggtcgttggctcattagcaggccacaccaattctattgagtgccttggtatctcgtcaagctatggctgggtagctacagggagcatggatcaaaagctgatcatctgggacctcacgcaccaatccagccgatgcatttgcgaacatgatgagggcgtgacatcgctgacatggcttggttcggtaaggtacgttgcgtcaggatgcattgacgggaaggtgcgcatctgggacagccgttttggagcctgcgccagggagttcagtgggcatgcagatg

SEQ ID NO: 1847 - DNA, 340 bp, Zea mays
  Clone ID: LIB3136-027-P1-K1-C7
cttgcagttgccagacgaggtacctgataaaaatgagataattagattgagaaaggttgcgagcagtgttggtgttggcgacaaacatgatgctgagtgggtacactctattctggcagacgctggtgcagctaatgataattcttggatcctacttccatacctttgtgctgcattcatggtgtccaacatttggaacggtgctgtttatgatgtcaatataggtggactcagtaacaatttgcactgcctagcaaggtgtgtaagtgctgtgattgggggaagcgaatacactcgggtcgaaaggagcagcgaataacactctttaatgtgctcagat

SEQ ID NO: 1848 - DNA, 318 bp, Zea mays
  Clone ID: LIB3136-027-P1-K1-C8
aatagggaaaagattgaggtgccacgtcagggtaacgagtatgattgtggcctctttatgctttactatattgacaggtttattcaagatgcgccagagaggttgacaaaagagggccttggcatgtttggacgcagatggttcaaccatgaagaggcttcagcgtttcggggagggatacgggcgctactgattgatctatttcatagtgctctagacgacgatggaccatcggaggcagagcttgaagacaaggacattcagatggactgagcctgctgttgctgctttgattgaatatgtagtaacctcgttcac

SEQ ID NO: 1849 - DNA, 269 bp, Zea mays
  Clone ID: LIB3136-027-P1-K1-D1
gccggaagaagtgtggggggtgagctgtggaccatgagcgcgaccgggcgagccccgtgcggcctgccgcgcgtcggcctgggcacggcggtgcagggcccgcggccggaccccgtccgcgccgcggtgctgcgcgccatacagctcgggtaccgtcacttcgacacggtcgggcactacgccaccgaggcgcccatcggggaggccgccgtctaggccgtgcgcacggggcttgatgacttccgtgaggaccttttcgtgacgttcaa

SEQ ID NO: 1850 - DNA, 218 bp, Zea mays
  Clone ID: LIB3136-027-P1-K1-D10
ggctcgaagtctggtgcttcaatgaggtgccctgggtgccagggctcaagtatgaaagtgagcattcgtcagatggggccttgcatgatacagcagatgcaggagccttgcaacgagtgcaaggtgactggggagagcatcaacgagaaggaccgctgcccagggtgtaagggtgagaaggtcgttcaggagaagaaggttcttgaggttcatgttga

SEQ ID NO: 1851 - DNA, 291 bp, Zea mays
  Clone ID: LIB3136-027-P1-K1-D11
gtcttcgtggacaaggtggcgatccgtgtgtacccgaacgacgcgttcaaaccacccggcgcaggcggcggcttcttcccgatcgccaagcccatgtacatcttctccagcatctggaacgcggacgactgggcgacgcgcggcgggctggagaagacggactgggccaaggcgcccttcgtgtcgtcctaccgcgacttcgccgtcgacgcctgcgcctggccgccgacggccgcgggggtcgccccgttctcgccgacacccgcgtgcgccgcggtcacgagggacagc

SEQ ID NO: 1852 - DNA, 261 bp, Zea mays
  Clone ID: LIB3136-027-P1-K1-D12
gtcgctgccaactggcactttgagtgcgcaagctgcatgatggttcaagggtcctgcctgagcctgaacaaatgagcatccaaggcagcaacgcagttgtgagtcagaaacaatgccgtgcaaaggttgatgctttcagaagcggtgaaatctcagccggtggctcagtgctatgggagaaatgaaggctagctgctgttgcaataagggtagcgaatatgcatccggtctatgtatatgatgctgcgttggttcatttat

SEQ ID NO: 1853 - DNA, 348 bp, Zea mays
  Clone ID: LIB3136-027-P1-K1-D2
cggacgcgtgggcggacgcgtgggcggacgcgtgggcggacgcgtgggcgcgcccgctcatcgccacctcggcgtggcgcgtcgccgctccgtgacgtgcccaccgtccggcacagcacagcacagcacagcacagtggaagctaagacgtcagtgaacgctgctgaactgcagatagcgactgtggggccacaacggtcctcgccggagcgacgagatggacacttggagtccgaccggatcggcctgtgttcgttcctgtttccggtccccctctctctttcccgttgttcctttaacccgtcaactatggtagccctgctacgtttaaatgtgtattactaatac

SEQ ID NO: 1854 - DNA, 319 bp, Zea mays
  Clone ID: LIB3136-027-P1-K1-D3
cggacgcgtgggcgaattcccaggcaggcaggtcggcgaggagggcaggaagaccgaagaccgagccgtgcgggggctcgggacgggaacgggacaggaccccaaaatatgagattcttactggccgcccgcccgtgcccgtcgacgcgtcgttcttgccggccgtgccctaccttcgccctctgctacttcagggggatcggatacgccacaggctgcgcgatggtgctgtgggtcttcggctactggtccctgatctggaaccccggcttcgacttcgacgacaaaattctcggctttatcaagggctacaagcgca

SEQ ID NO: 1855 - DNA, 283 bp, Zea mays
  Clone ID: LIB3136-027-P1-K1-D4
ctgggaacatctatcagctcgctcattggccatctttggcttccatggagaggctcattgccggcctacttggcttcctattggttgcatcggtaggaagccatgcagctcgtgctccggatcagtactggaagtctgctctttccaacactcccatgccgaccttcctcttccaactcctcgacgccgctccagccggcggcggcacgaccgtcaacgtcggctggggcggtgtccacgtcgatgctgggtacggtaagcccgcgggtacgacagttgacgt

SEQ ID NO: 1856 - DNA, 444 bp, Zea mays
  Clone ID: LIB3136-027-P1-K1-D5
cccgctccgatccgccagagcaaaccctagtcaatggacgccgccgccgttcacaagcgcaagcgacctgaagaggccgacccaagcgcgggggagctcgacctctccgacgccgacgccgtcgagactccgagatcgcgctccacgccgagaccgaccgccttcgcctacttgccggcgcgcctgagctcttacccgacctcgtacccatcggcctcgcctcttccctcgcctcccttctcacccacgacaatgtcgatctcgcagctgccgccgcatcactcctcgtcgaccttaccgacttcgaggacccctccgacctcgccgctgtccaggcccttgccgacgcgctcgtcgacgccaacccgctcgaccttctcgttcacaatctcttccgctttttcgagaccgaccccgatgaggccgaggccgtgcacaacaccc

SEQ ID NO: 1857 - DNA, 320 bp, Zea mays
  Clone ID: LIB3136-027-P1-K1-D6
gtccggccggcatcggcagtgcaggatggctctgaggatgtgggcgagctcagccgccaatgcgctcaagctctcggcgggcggcggcggagcccgggctgctgctgccggcccggccttctctatctccaggttcttctccactgttcacgatgggttgaagtacactcagtctcacgaatgggtcaagacgacgggcgacgtcgccaccgttggcatcacggaccatgctcagggccacctgggagaggtggtgttcgtggagctgccggaacccggcacgaaggtcgccgcgggaggacccttcggcaacgtggaga

SEQ ID NO: 1858 - DNA, 406 bp, Zea mays
  Clone ID: LIB3136-027-P1-K1-D7
gccatttcttcttttatttattatatcaacgcagaagcttcattaaaaactgggtttcaattgggaagagcgcaaggttaagcacgaaagctgcagctggaaatatgagttttgacatacagcgcaaacattgtgaaaaggaatcaataaatagttctctgttgaacttgttaacatacccatggattgagaagagggtgaatgaaggcactttgaatcttcatggaggctactacaacttcgtcgattgcacatttgagaaatggacattgttgtaccgtgaagggtttgaaggtggaagcaagtatgccataaagaaccggtccaactggtgttgaccaacgaaagccgtgtttacttgggtaaatttcactctgccccccgcagttcagcatggcttcgcttt

SEQ ID NO: 1859 - DNA, 241 bp, Zea mays
  Clone ID: LIB3136-027-P1-K1-D9
acgcggacgcgtggggtgcgtcgagcttcgccctctggattcagccggtatacagcgccgtcggtcgggtctccgaccgtcgggtgaatgcggttcaagacgttctgtagtgtgatcgagcgcccaggcccggtggaactacagctagaacatacgacgactctacatgatcataaaagcggccgagcggaacagtgatctggtggacgccatattgctgatgaggaccacgacctacatt

SEQ ID NO: 1860 - DNA, 288 bp, Zea mays
  Clone ID: LIB3136-027-P1-K1-E1
cgcttctgttcgtgctggcttggtgagcaaagcggggggcaacagcagcgggatccccgtgctggtcgacgaagacgacccgctcgcgctcgagtcgtttctaaacatcactctggtgaacaaggcagggcgctccgtaagcttgaagatggatgtctccagagcctacttcgtggcttacgtagcagggcagcgctcgtgcctcctcaagagatcaggccgcacgttctcgtcggcgatctgttactacggtggcccgtggggaacaagttcggctcctgtcacgcg

SEQ ID NO: 1861 - DNA, 229 bp, Zea mays
  Clone ID: LIB3136-027-P1-K1-E10
cttctctccaagcggacaaagcccgtccctctcctacacctcccccaaagttccgttccgttccgttcagttccctcccggctcccgcaggtcaaaaccctcaacctcccacgcggctcgctcgctcgctcgctgggtgggtcggccatggctccccccgcgctcggatctcagggtaacatcactctaaactttcggaccaaaccatgcatcgggatggcattagcgt

SEQ ID NO: 1862 - DNA, 384 bp, Zea mays
  Clone ID: LIB3136-027-P1-K1-E11
gtggaaagggagcttgaccgggcaaagaggacgctgttgatgaaacatgaggctgagacaaagacgaacgcgtactggcttggtttgctagcccatctacaatcttcatctgtaccaagaaaggatgtatcatgcatcagggaattgacgacattatatgaaagtgccacaattgaggatctgtatcttgcatatgagcatctgaaagttgacgattcttctttgtttgcttgcattggaattgctggcgctgaatctggcgaagatacaaatgatgatgagcttgatgtggatctgcatggcatggctcccatgggaggtcggggtctttcaacaatgaccagaccaaccacatgatcaccattgggatggccagcccttcca

SEQ ID NO: 1863 - DNA, 201 bp, Zea mays
  Clone ID: LIB3136-027-P1-K1-E12
cgcgtccggcggtaagggagcttgaccagccataagaggtcgctgttgatgaaacaagatgcttaaacggggacgggcgcttactcgcttggtttgctagcccatctactatcttcatctgtaccaagaaaggatgtatcatgcatcatggaattgacgacatcatatgtaagcgccacacttgaggctctgtatcttgca

SEQ ID NO: 1864 - DNA, 305 bp, Zea mays
  Clone ID: LIB3136-027-P1-K1-E2
gaggccaccgagcaaggggagagagagaggttggaggcctggagccctggagggagcgcatgagctgacagaagagagcacagaggcacttcgagttggcacgcggtgctctgctttcccccgcctcctccctgttctatactctcgcaggcccaggccaagcccctcccccgccctcagacgcaccgcggcaagaaatcctccactccatcccggcttccccggagagattatgtgggattaggtagatgagggcggcgctgttcggtgccgagcggaacggtgctgcggacctcgtcggagac

SEQ ID NO: 1865 - DNA, 196 bp, Zea mays
  Clone ID: LIB3136-027-P1-K1-E3
ctcaggtggtgacaaaatctgtggagaagctctttggaagacaagtccggcatgtgaatctcgaaaattatttgagttcaagaatatccagcctgggtaactattcaaatgggcataagaatggggattcaaagttccgtctgttgctagcactttgtaactccatgatatcacttcacaagcagggattcaaaga

SEQ ID NO: 1866 - DNA, 303 bp, Zea mays
  Clone ID: LIB3136-027-P1-K1-E5
tcgagctgagctgagcttaccaccaccacacacgggagatagctatagctagcatagccagtgagcgacttagcagcagctagctagccatgctgccgtccttcgcgtcgccgacggcgagcgccgcggcctcggtgacgcctccgccgcggccgataccaggcagctactggccaccggtgctgggcccgatacgggaccggctcgactacttttggttccagagccaggacgagttcttccggaagcgcgcggcggcacaccgaaacaccgtgtttcgtaccaacataccggccaactttc

SEQ ID NO: 1867 - DNA, 347 bp, Zea mays
  Clone ID: LIB3136-027-P1-K1-E6
cccgcggcggccgtggaggcggcggctgcggctacggtggtggccgtggaggcggcggctacggcggtggcgggcgccgtgatggctgcggcggctacggcggtggctgcggttgctacggtggcggtggtggctacggtggtggtggtgttatctacatctttttttactgttttggtttctttggttaattttacttgtttctggtttttttattctttttttgacagtgttttcatttttttttttttttgctttcagttatttttgtttctttcttttttttgttttttttttttttattttattgctctgtattattttctttttttttttttatttttttt

SEQ ID NO: 1868 - DNA, 357 bp, Zea mays
  Clone ID: LIB3136-027-P1-K1-E7
tcgcttaatggctacacaaagggtgccaggaacgaaatttttgcaatgcagccagcacctatccaagtttcgtacatggggttccctggaacaacgggtgctgcatacatagattacttgggcacagatgaggttggttctccatctagctatgcacatatatattcagaaaagctcgtgcatttgccttcatgctattttgtcaatgactacaagcagaaaaaatcgagactgtctcactccagtatgtccacacaaaagatcttgatatggattacctgaggataaatttatttttgcttgcgttaatcagctttacaaaatggaccctgagatatttgacacatggtgcaatat

SEQ ID NO: 1869 - DNA, 353 bp, Zea mays
  Clone ID: LIB3136-027-P1-K1-E8
aagggcgacggttcgtctcgctgcgtgcactctctgtcactccccctctctctcctcatcagatccggccacttcctgctcgcctcgccgccggtcccgcgccccggagccctagagctctccccgcgacggggccgccggagtccccgggcgcgcggagagaatggaggcggcgctggaggcggcgcgcgccaaggacaccaaggagcgtctggccggggtcgagcggctgcacgaggcgcttgacgccgcggcgcggcgcgggctgacggcggccgaggtcaccgcgctggtggacacctgcatggatctgacgcgggacgccaactttcgcatcgcccagggcgggcttc

SEQ ID NO: 1870 - DNA, 285 bp, Zea mays
  Clone ID: LIB3136-027-P1-K1-E9
gcggaacatggaggtccagaacttctccttctcctagcaaatgctggacctcctctactcgagggcgcgcccaaccaatcatgacgagcgcattatcctgatcgacatttgcgtacagaggggcctgtctaacaaatccatcgacccgttggaggacccttatcagttccgctgcatgaccctcattccgctttctaccatcttccacttcgtgtgcgacctctgctgcgccaagttctcggcgctctccgcaccccgttgcgccatccgttgtatgggttgcat

SEQ ID NO: 1871 - DNA, 332 bp, Zea mays
  Clone ID: LIB3136-027-P1-K1-F1
attgtatttgactaaaaagactgggcctacgcatgggggctccaaaacagaggtggacttctgaggaagaggctgctcttagagctggagtagccagacatggagttggaaattggcgcatgatattgaatgatccagaacttagctccacattgcgctaccgctcgaatgttgacctaaaggacaaatggcgcaacatgaatgtaattgtcacttcatcgagtactcgtgacagggggagaactttcacgaggagaacccgagctgctcctaagaataatgaccaattgttggcaatgagcacaatcacttctgaggttgatgatgagaat

SEQ ID NO: 1872 - DNA, 334 bp, Zea mays
  Clone ID: LIB3136-027-P1-K1-F10
acgactggtttcattgattctcgaagagatcgagcttcttttgcaccacaaggtcgaggatgtctggcaactgcggatcaagctgaggctgcggctcaagctgcaagtgcggcaagaagtaccctgacctggaggagacgagcaccgtcgcgcaggccaccgtcgtcctcggcgtggccccggagaagaaggcctcgcccgagttcagtcaaggccatggcggagtccgccgaggccgaccacgcctgcggctgcggtagcagctcgaagtgcgacccctgcaactgctgatcacatcgatcgacgaccatggatatgagcattatctatctag

SEQ ID NO: 1873 - DNA, 171 bp, Zea mays
  Clone ID: LIB3136-027-P1-K1-F12
tcgtctctattaatatattctataatatattaatcgtttcctccactaacaaatcttaacagcctgtgatcagttctcaattctattgattcttctatagcgatgtttataacaaaactttcttctgcttacaaaatactactacattatcatccatgctctttttatttt

SEQ ID NO: 1874 - DNA, 266 bp, Zea mays
  Clone ID: LIB3136-027-P1-K1-F2
gcgagcgagagcagcacacactgcacgcagctagctaggagcagcagcagcggcggcgatggcggcctccatgatctcctcgtcagctctggcgcgtggcgcctcagggcctgccgcccctcggccgccgcgcctcctccttcgccgtcgtctgctccaagaagaagatcaagaccgacaagccctacgggattgggcgtggcctgaccgtcgacgtcgacgccaactggagaaagggcaagggcaatggcgtgtaccaacctcgt

SEQ ID NO: 1875 - DNA, 399 bp, Zea mays
  Clone ID: LIB3136-027-P1-K1-F3
ctttgtttttgttttattttctgtacacttttagatggaagggaaatttgaactgccaattttggggtacagctgaaacaaataaatgcatctttccagcggggaaaagtcttcctgtatacagccatttcacagccaggctctcattatcatcttcttggtactcatatggaggaaagaatagacactacaaactaaaagttttgaaacacgctattagcctctaaacccccataagaaaataatctcaaaattgacgtctcggctttgactccgcagccgtgactcgggtctgtctaccatccaaagccatgccctccagggttggtatgggcttgttggccccttgggcggggccctatgggaccaaaaccaaacccctttacccggcgctattcc

SEQ ID NO: 1876 - DNA, 339 bp, Zea mays
  Clone ID: LIB3136-027-P1-K1-F4
ctttgttttttttttattttttggacacatttagatggaagggaaatttgaactggcaatgggggggtacagatgaaacaaataaatgcttctttccagcggggaaaagtcttcctgtatacagccatttcacagccaggctctgattatcatcttcttgggactcatatggaggaaagaatagacactacaaactaaaagttttgaaacacgctatcagcctctaaacccccataagaaaataatctcaaaattgacggctcggctttgactccgcagccgtgactcggatctgtctaccatccaaggcgatgccatctaggtttgatatggcatttg

SEQ ID NO: 1877 - DNA, 345 bp, Zea mays
  Clone ID: LIB3136-027-P1-K1-F5
cactgcaggagcttggggcacaacggcttgtcggggccgatcccagcgggcatctcggagctgaagaagctggagatcctgcggctggagtacaacaacctgagcggcgagattccccagcagctgggcgggctggagaacctcctggccgtgaacatctcgcacaaccgcctcgtcgggcggctgccggcgtcgggcgtgttccagagcctggacgcgagcgcgctggagggcaacctgggcaattgcagccccgttgtggcggagcggtgcattgatgacctgcccaagcccgttgggccggaccccaaccaggtcaaccaccggggggggtgggacaaccac

SEQ ID NO: 1878 - DNA, 367 bp, Zea mays
  Clone ID: LIB3136-027-P1-K1-F6
caagtctttgactcgcaaggcgaagccgccggttgttggtgacaccatcaagccagacccaaacaaattgccaccggaatctgacgtgccacatgactcaaacaacaatgctcccgttgctgctgattatcaggactgatggatgctaacttggctcctaccttttctttcccctcttggatgtcggtcatgggaggcaatgcacgctccttgggacttgtaagagttatctgttttgttgcttcgcgggcccaaaggacgcttccctgcaccatctgcctttgtttggaacggcttggaccgccgtggtccttttacctgcagcaaggaaaggaatggctgggagggaatggatactggtatcgtt

SEQ ID NO: 1879 - DNA, 405 bp, Zea mays
  Clone ID: LIB3136-027-P1-K1-F8
cctcacttgactcctcagctaccacccccgtctcccccctccatgtgggcggcctcgagctctgcttaaatcacagctgtgttcgcttgttgggtgatccgcccccctgtcggattctttcacctccgagctctgggacagggagatctgtggtgtcgcagcctcgcctttgttgtacgcgcgcgtgtgggcactcagcagcaccttcagaaatggattctttcacagagtacggcgaggggagcaggtacaagatagaagaggtcatagggaaaggcagatacggtgtggtttgctctgccttggacactcatactggtgaaaaggtcgccataaagaagataaatgacatctttgagcatgtgtctgatgcgacaaggatactttcggaaatcaagttgctta

SEQ ID NO: 1880 - DNA, 309 bp, Zea mays
  Clone ID: LIB3136-027-P1-K1-G1
cggacgcgtgggttttttttgagagcagagagatgggtgattccactagtacgggcttcgcggcggccctggagctgtggcaagagcaccagctgagcatcctcgtcgtcgcgagcctcgccatccagtggttcctcttcgtcttcgccccgcttcgacagcatcggatcccaggtctgctcaggctctccatctggctggcctacctgggcagcgacgccgtggccatctacgccctcgccaccctcttcaactcccaccggtgcgacaccgacaccggccacccctgccgggagctgctgtgggcgc

SEQ ID NO: 1881 - DNA, 343 bp, Zea mays
  Clone ID: LIB3136-027-P1-K1-G10
caatgggtggatatgggataagagaagttctgatccccgatatgtatcttctgctagcattcaatgggaggatgtatataaaagtatccaaaatctgaatgttggtgaacagaagctcagtgttggactcctgaattttaacaggactgagttcgacgcttggacacacatgctcccagaaagtgatttctcaatcataaggctggagcatgccaatgaaagcattacctggcaaactctctatcctgaatggatagatgaggaggaagaaactgagataccatcttgcccttcgctttcagatccaagttttccaaagagcaacacacttttgatggttatt

SEQ ID NO: 1882 - DNA, 174 bp, Zea mays
  Clone ID: LIB3136-027-P1-K1-G11
gccctgccttgttaagcaaagcaacccagctgcgagacacgagagctagctagagagagagggcggggacggtttcctccttcccggaggcgaacatggtgaagctgtataccgatgagagggccacgtgcattgaggtcatccgctacgattggaagaactgcggctctttcg

SEQ ID NO: 1883 - DNA, 276 bp, Zea mays
  Clone ID: LIB3136-027-P1-K1-G12
gccctggcttgtttagcatatcaacccatcttcgacacactagagctagctagagagagatggaggggacggtttcctccttcccggtggagaacatggtgaagctggagaccgacgagagggccactgccatggaggtcatccgccacagctgttagaactggggcttctttctgctggtgaaccacggcatctcccacgagctggtggacgaagtggaacggctgaccaaggcgcactactccacctttcgggaggccaagttccaggagttcg

SEQ ID NO: 1884 - DNA, 317 bp, Zea mays
  unsure (1)..(317): unsure at all n locations; Clone ID: LIB3136-027-P1-K1-G2
tgtatannncatacaagtcactgtcantgggcattcacaaaacagagcggtaagagccttttcttgtcacgacattctaaaaacgacgatcggaagacgccttctgtcatcgacagttcataaaatgtgaaccgtgtattataccacatacgtgttgtatacccattatcgtattccttggcgtgcacgcngcgtatagcatnaaaaaaaannaaaaaagaggcggcncgcttctaagagcgatcnnncaagcttatcgtacnnngcgtgcgatagcgacgtnncatagctcnttctaatagtgggtcacctaaaat

SEQ ID NO: 1885 - DNA, 284 bp, Zea mays
  Clone ID: LIB3136-027-P1-K1-G3
gcacgattcaatctaatggacccattcatgtccagatgttgttcgaagtcatttacacggttgcaaggtttgctgatgctcttctgcatagccacagtcttagcttggttggtttcagggcattggatgctaaataacctactggggatttccatatgtatagcgtttgtcagccatgtgaggcttcccaacataaagatctgtgcactgcttcttgcctgcttgtttgtgtatgatattttctgggtgttcttctcagaaaggttctttggagcaaatgtcat

SEQ ID NO: 1886 - DNA, 378 bp, Zea mays
  unsure (1)..(378): unsure at all n locations; Clone ID: LIB3136-027-P1-K1-G4
gctcgacgctaccgaacggaaataagcccaccgagtagctggcttgccctagcaaaacggaggcgtggccctagccgaggagcgcccatggccgctgccatcgcggcctgaggcggcggggctcttaccatggggtgaggggatggaccctaccctgaaagaggaggtgatgaacgcgtgagacgaggcaacgtacacagctgcgccctggtgcctgccggcgcggatcattatgcacgacgaggacgccacctactagaaaggcaccgacgaccaaagataagaggcttctggagcccctcanaaggcatctaatcctgttcacacagtagcaaataagctcagcctgcctgcgttgcaattgattacaaagaagct

SEQ ID NO: 1887 - DNA, 426 bp, Zea mays
  Clone ID: LIB3136-027-P1-K1-G5
gggggaggtcgacgagacagagagagaaggccaagaggcttcctctccccattcctcccttgcgtgccctagccgagccagccgcgaggaaggaggcatcccgccgtctcgcctggcgcccgcccgtcggccgaccttctgccgcagcttccaattctaaaaagatcatagttttttgtgcaagagcgagtggatatggaaccatcccctcagcctatgggtgtcgctgccggtgggtcacaaggggatcctgcctttggctatcccccttgaacaaccgaaggctctgcttgcggtggatctggtgggttacagtcagggcagccattcccagccaaccctggtcatatgagtgctcagcaccagattgtctaccaacaagctcaacaatttcaccaacagcttcagcagcaacaacagcagcag

SEQ ID NO: 1888 - DNA, 259 bp, Zea mays
  Clone ID: LIB3136-027-P1-K1-G7
ggagtcaactaagtactctttcttgcagtatgctgatcagatgatggaactgtttttgagagttttcgcatgtcgaaatgccacagtgcatgaggaggctatgcttgctattggtgcattggcatatgcagctggtccaaactttgcaaaatacatggcacagttttatcagtatttggagatgggtcttcagaactttgaggagtatcaggtgtgtgccattaccgtgggcgttgttggtgacctctgtagagcactg

SEQ ID NO: 1889 - DNA, 343 bp, Zea mays
  Clone ID: LIB3136-027-P1-K1-G8
aagatatccagtctagctgagaagctaaaacatgattttggtaatgacaaggagttctattgcttttatgatcagtgttttgagaccaaggaagggaagtatacttacaaggtctgtgcatataagaaagcatcacaggctgaagggcacagttctaccaacctggggcggtgggacaaatttgaagattcgtacagagtgatgcacttttcaagtggagacaaatgctggaatggtcctgaccgaagcctaaaggttaggcttagatgtgggctgagcaatgagcttaatgatgtacatgagcctagcagatgcgagtatgtggctgtattgtcgacccctg

SEQ ID NO: 1890 - DNA, 164 bp, Zea mays
  Clone ID: LIB3136-027-P1-K1-G9
cgttagtttgctcttgttgtgctgatgctgctttggccctatcaagctctcgtgtgagggccgtggccacttccagcgttcctttgtatacatagagagacgacatatccttagtgctgccaaagccatggaggttaccctcctctccttctagaactgaaact

SEQ ID NO: 1891 - DNA, 267 bp, Zea mays
  Clone ID: LIB3136-027-P1-K1-H10
gagactgttatgagatattgagtgcctccccttcctttctatgactgatagcaccaggcttatcttgacaatctatgtttttagcattatcacgtcgatcattatgatctctctctgtaacatctaccatatgttatgcagcaacaaaatttctgctggaatacacattgtggcctcttcttggaaaggctcgagcacgaaatgcttttaatgctccaaaggcattattcacgagggcctatgtcaggtcacaccctctccaaactt

SEQ ID NO: 1892 - DNA, 226 bp, Zea mays
  Clone ID: LIB3136-027-P1-K1-H11
cagaagttctacaacgtgttgattgaggagctgcctgccaatgttgctgaccttctgtgatcaattggaagaaaaaacaaaacaaaaaagggtggtgggggaatttggtaaggcttggttttgtcgaaataccgtgggagagggggtgataaggacggtggggcttctatgctgaagtcatcttcatgcacaattcgtgattttctcttctataatgcatgtcttg

SEQ ID NO: 1893 - DNA, 189 bp, Zea mays
  Clone ID: LIB3136-027-P1-K1-H12
aagaaggtgtacataatatgaactgaggagatgcctgcctatgttgctgaccttctttggtcaattgggagtaaacacagaccaaatacgggcggtggtggaatttgacaaggctcggttatgtcgaaataccgtaggagaggacgtcatatagacggtggggcttctttgcgggacccagctcgagag

SEQ ID NO: 1894 - DNA, 401 bp, Zea mays
  Clone ID: LIB3136-027-P1-K1-H2
tgtctgttcggctatcgaccaacatacgggcgagaaggtagccatcaagaagatacagaacatcttcgagcacctgtccgatgctgctaggatcctccgcgagatcaagcttctccggctgctgaggcaccccgatatcgtcgagatcaaacacgttatgctgcctccgtcgaggagggactacagagatatttacgttgtgtttgagctgatggataccgatcttcaccaagttattaaggctaacgatgacttgacgaaggaacaccaccagttctttctctatcagatgctgcgtgcattgaaatatattcatactgctaacgtttatcatcgtgatttaaagccaaaaaatatattaacaaatgcttacttgcaactcaagatatgggattttgggc

SEQ ID NO: 1895 - DNA, 269 bp, Zea mays
  Clone ID: LIB3136-027-P1-K1-H3
catacagctagtatcggaatactccactctgtcgagctgtatatagagaggcttagggggtgtttgttttaaattataatctattcatattatattatctaacaactttttaattcagatttttttcaaaacttattttcttatatattaatattttgagcttttatttatttttttactttattttacatttttaccttttttttttattatttataatctctttatataccatttttttttattctctattatttacttatttcttt

SEQ ID NO: 1896 - DNA, 322 bp, Zea mays
  Clone ID: LIB3136-027-P1-K1-H4
atcgtatcgcgtttgcctcagcccgcctcaaggagaggtaagttcatgagacatcttcgaggagctggaatggctcctaaagctgcttctgccaagaagggtgatgccaagacccaagccttgaaggttgccaaggctgtgaagtctggggcagccaagaagaagaccaagaagatccgcacgtttgtgacatttcaccgacccacgaccctgaagaaggctagggaccccacgtacccacgaatcagcactaccggaaggaacaagcttgatcagtaccaaattctcaagtacccccttaccacagaatcagcgatgaaga

SEQ ID NO: 1897 - DNA, 266 bp, Zea mays
  Clone ID: LIB3136-027-P1-K1-H5
ctcccctgttcggttttaggagacctgcgccgctcctccggccacgcgagcacgccgagatggtcgcccacaggttccatcagtaccaggtggtgggtcgcgcgctgccgaccccgaccgatgagcaccccaagatctaccgcatgaagctctgggccactaacgaggttcgcgccaagtcgaagttctggtacttcctgagaaagctgaagaaggtgaagaagagcaatggccagatgctcgccatcaacgagaactttgagcgc

SEQ ID NO: 1898 - DNA, 430 bp, Zea mays
  Clone ID: LIB3136-027-P1-K1-H6
cggacgcgtgggtgaaggtgctggtaatctcaagtcacagatcggaccgcccattctctgggaaaatcatctcccgccgtcagatctaggtcacccggcagccatcctataaaacctctccatctctcctccttacttccgtccccgccgccacgccagagaggagaggaagagcgcgcggagagtgagagcccgggagaagcagcggctgggagcaagatggtgcagcgcctcacctaccggaagcggcacagctacgccaccaaatcgaaccagacccgcgtcgtcaagacacctggtgggaaaccttgtgtaccagtacaccaagaagcgcgcgagcggaccgaaatgcccagtcaccgggaagaagatccaaggaattccacacctgagacctgctgagtacaagaagtccagcgtggcaaggaac

SEQ ID NO: 1899 - DNA, 314 bp, Zea mays
  unsure (1)..(314): unsure at all n locations; Clone ID: LIB3136-027-P1-K1-H7
gccatgataaatcccagcgccgttcgcccgctccccgccacaagctcctcctcctctgctgcctacacactccagaggcagcacgtgctgccgtgctggagcaccactaggccgcagctgcaccaccatggcgggcgcgccgctgcggaggtcggaccttgacttcgccgacgtctttggtggcccgccgcgccgggtgtctgggaacgagcaccgctcgcagcgcggctcgcaggacacctcgtcgttcgagtccgcgacgagggcggngagcggcggacaggacacgcccgttttcggggaccggggggagc

SEQ ID NO: 1900 - DNA, 443 bp, Zea mays
  Clone ID: LIB3136-027-P1-K1-H8
cttccagcagccgttcgctcaaatccattgccgctcctgccccaacagcgcatgccctcacctcctcagccatggagctcacgagcatctccctctgcgcaccccctccgtacgtccctgctccctcgtcaccaggtgcacgcgcgcagcttcctgcgcgccgggatggccctccagccctagctcgcccctgccctcagccatggcgcctggccgccaccgcccctgctttccatggcggcacttcctgcttcatggtggtcggcgccctccccaacctctctgctggtggttgtctccatcccctccatggcgagctcgttcctgcattcctgctcgcccaagttccccttccctgttccagccacctcccatggacgctagccctcacctcatagtcgccccagctcgctcagcaccctctctgctggtggccagccatc

SEQ ID NO: 1901 - DNA, 99 bp, Zea mays
  Clone ID: LIB3136-027-P1-K1-H9
gcgatggcatggaaaatcacccaatctgcctaaccctattaagccctgtcgtaccctacagaccctggccctatctctccctacgcgccgcggagcgat

SEQ ID NO: 1902 - DNA, 340 bp, Zea mays
  Clone ID: LIB3136-028-Q1-K1-A1
gtggtttgcatgaccgaggagctgcaccgcccccttgctggccgctctttggattgaagggagctctgcatcctgatccacccctccattttttttgcttgttgcgtccttcctgggacctgagatctgaggcgcgtggtggctcactgtagcctcgctacacagttttcttctcctctcctctcctgtgctatttgctgcttctcctaagattctttaggccgtgcttatccgtgctggagtttaacgaagcagcacgttgctgctgctggtgctgccctcatgccctggtggtggactggtatcggtacccgtacttgcgtcgctttattatacccta

SEQ ID NO: 1903 - DNA, 205 bp, Zea mays
  Clone ID: LIB3136-028-Q1-K1-A10
aaaatataacatcgtttgacttgaccaacctaccaatcacatttgtgcttggtgggtcagtgaacgtcatggaagccaacattaaactgttagctaatgactcaccttatggagataatctagactacatgtacactgtgcttactgctgcgctgtctcatgtgcataaactctcgataacctcgggtctcttcgtttatgatca

SEQ ID NO: 1904 - DNA, 222 bp, Zea mays
  Clone ID: LIB3136-028-Q1-K1-A11
gcgacgcgttagcggactcgtgaggttacgcgttgcttttgacggatgtgattaccagtgggaagacgatcgtgtaccacaccctggtttatcactccatgctttctttgacgcttcactcaatttatgctgagaatgcctaccacgagccgctctctgtggatgtgatcaccaacagtgccttctagccatctttcatgatggtcaagtgcgacccacgcc

SEQ ID NO: 1905 - DNA, 401 bp, Zea mays
  Clone ID: LIB3136-028-Q1-K1-A12
ggcgggggagggcggaagacatggcctcggaggagatgacggcgacagacgtggctgcgctgctggacttgaagccgcacccggagggcggcttctacaccgagaccttccgcgacggctacatcacgctcaccacgtcccagctaccgccccactacaaagtaaaccgtgctgttagcaccgcaatctatttcctacttcccgcagggagcgagtcccgtcttcaccgcattccctgtgctgaaacctggcgcttctaccaagggagagcctttcacggtcttggagcttcacgacgaccgtcacattgaccttactgtcattggcccacaccttgaggcaagtcagcgcccccaatataccgtgccaccgaacgtgttggttgggtccgtccccacact

SEQ ID NO: 1906 - DNA, 223 bp, Zea mays
  Clone ID: LIB3136-028-Q1-K1-A2
ttccgttccaggtctcctgtttccatcctcttccacggttccacttccacccccatctcctcgccctcggcaagcccagcaaccccaatccccaatcccgtccgcttctttccccgtccccgaccttgccgaggaacctcccgctcccaaatcctagcctctcctccctcgccgctcccctccccatggaggacgaggacgccggcctcggcgacgggggcga

SEQ ID NO: 1907 - DNA, 253 bp, Zea mays
  unsure (1)..(253): unsure at all n locations; Clone ID: LIB3136-028-Q1-K1-A3
cactttgcaaggatgcttcttgagaatagccctcacgaggcccaagcaaagaaggctcgacaggtgctgcaagcctgccaggacaaggacgattctcaccaactgaactatgacttcagaaatccattcgttgtttgtggtgctacatatgttcctatctatcgtggccaaaaggacgtttcctgcccatactgaggatcccgatttgttccttccatcgaaaggcagctntttaccatatgtgagcttggtg

SEQ ID NO: 1908 - DNA, 407 bp, Zea mays
  Clone ID: LIB3136-028-Q1-K1-A4
accaacttctcgtcactgccatggctctgctctccgacctcatcaacctcgacctctcgggccgcaccgggaagatcatcgccgagtacatctgggttggcggctccgggatggacgtcaggagcaaagccaggacgctgtccggacctgttgatgaccccagcaagcttccgaagtggaacttctactgctccagcaccggccaagctccggtcgacgacagcgaaattcattctttgccctcgggccatcttcagggacccgttcaggaaggggcagaacatactgtccatgtgcgactgttactagccgaacggggggccgatcccaagcacaaagcggaacggggccgcgaaaatctttaccaaccctgccttcaaggctgtggacccttgttcgggaattga

SEQ ID NO: 1909 - DNA, 407 bp, Zea mays
  Clone ID: LIB3136-028-Q1-K1-A5
cggacgcgtgggcggacgcgtgggttggaactgtaccggttggtcgagtggagactggtgtcatcaagcctggtatggttgtcacctttggtccaactggcctgactaccgaggtgaagtctgttgagatgcaccacgaggcgcttcaggaggctcttccgggtgacaatgttggcttcaacgtgaagaacgttgctgtcaaggatctcaagcgtgggtttgtggcctccaactccaaagatgaccctgccaaggaggctgccagcttcacctcccaggtcatcatcatgaaccaccctgggcagattggcaacggctatgccccagtgctggactgccacaccttccacattgctgtcaagtttgctgagctcattaccaagatcgacaggcggtctggcaaggag

SEQ ID NO: 1910 - DNA, 404 bp, Zea mays
  Clone ID: LIB3136-028-Q1-K1-A6
cgacggagcaggagaagaaggacaagatcggcgagagggtcgcagcgctccagcagctcgtgtcaccgttcggaaagaccgacacggcttctgtcctgcaggaggcgtcggggtacatcaagttcctgcaccagcagctggaggtctctactattttcggcgaccaccgcaccgcaacgcttatccttcgtttttttcccgctagctgatgatgtccatgggaatccttttgctgcaggtcctgaagctcccttacatgcccccttctcccggccgtggcgctgcgcctgaagtattaactttcggcggccctcgtcttcgtcttcactgatgaattcttgacgcaagcctgtagaaccctaaacctcgtcttcatacatatatacctacaccatctactactt

SEQ ID NO: 1911 - DNA, 365 bp, Zea mays
  Clone ID: LIB3136-028-Q1-K1-A7
gctggtgggaccatgtcgagaaaggcaccctcggcgaggccgtggacatggagaccatcgataagctgaaggagtgaggggccgccggccggccggctccgatgacctcaccacctgttgatgttggtgctgctgctgcactgcatgtttatcaaaagttatcgctcctgctcgcggaaagtgagcttgactgttgccggggtggaagtgtcgttttggactgaagatgagtgccgcggaggggtttgttgtttgtttggttgcttgttcggtgaccgaatcgcgagttggacgcctgtttaatccgtgcttatacatcgtctgagttaacagcaataagagggacatccgtaagctcttttcgt

SEQ ID NO: 1912 - DNA, 433 bp, Zea mays
  Clone ID: LIB3136-028-Q1-K1-A8
tcttttcattgccctcactaaattttctattggagtagaatttttttctcaaccagcaaggggtctacaccattgtcattgggagccacatctcagccatctaccactacggcttcgcaaaccttatgatgcgcaggtatgttgaggccactcgtgaattcaacaagattcttctgtatatcctcaagtacaagcagtaccaccagaattcccctcagtatgatcagatactgaaaaaaaaatgagcagatgtatgcattgttggcaatttgcctatctttgtgcccacagaacaagctcattgatgaaaatgttagcacccagctgaaagaaaagtataatgacaagatgacaaagatgcagaagtatgatgatgaagcatacgctgcttatgatgagctattctcgtatgcttgccccaagttcattacac

SEQ ID NO: 1913 - DNA, 355 bp, Zea mays
  Clone ID: LIB3136-028-Q1-K1-A9
gtctgacgagccgtcatcactcggcgcagttcacggccgctgtgactgggagagtgggggcgatactctactactgcctagtgcatgacgacaattctactcactgtcaagactcgagagcagctgtggctaccgagctctgcgtgcgtggggagcaccggataaggcatcatacgagaggagggtggtagcgcgtggacgggctaggcgcagcagcatggacgccgggatcagggtcctggcggcgctctaggcggcgctcgcagcagacaccgccggcgtgactgcgcatctgcatgaggactactacgcggcggtgtgcccggacctggagagcatcgtgcgcgccgcggtg

SEQ ID NO: 1914 - DNA, 414 bp, Zea mays
  Clone ID: LIB3136-028-Q1-K1-B11
ctttgttcgtgttcatgggggaacttcgcaaggaggtcaaggagaataaccctaagaacaagtctgtaagtgcggtgggaaaagctgctggcgacaggtggaaatcactgagcgagtcgggcaaggctccctatgtagccaaggctaacaagctcaagctagagtacaacatggccatggtagcctacatcaagggcgagagcactgcagctaacaaggctcctgtcgaggtggaagaggacgacgacgaagaggagtctgacacgtgcacgtcggacggctatgtcctggattacgaagagggtcgcgaggaggatgaagatgatgacacgtgatggaaagctcactcgaaacaacggacggtgcttcatccaacaatggagctgctacacaacgtcctgttgcgatcaaaaa

SEQ ID NO: 1915 - DNA, 297 bp, Zea mays
  Clone ID: LIB3136-028-Q1-K1-B12
gtcgtcctgctagctcctctactcgccagtcgccatggacaagattaagatcggaatcaacggctgtagaaggatcggcaggctcgaggtcagggtcgccctacagagcgaggatgtcgagctcgtctccgtcaacgaccccttcatcaccactgactacatgacctacatgttcaagtacgacaccctgcacggccactggaaccacagctacaatccactctatgactccaaaacccttctcttacgtgaccatcccgtcaccgtccttggcataaggaaccctgatgaaatacc

SEQ ID NO: 1916 - DNA, 385 bp, Zea mays
  Clone ID: LIB3136-028-Q1-K1-B2
ccaagatcgccgcgctctctccaacatctcctgaccaaagcgaatccagcatcaccggggtgcaggaggcagcatggctgacgaccagcagccaccggcgcaacggtactggttcccgtactggaccgcgcctgctcctcggccggtcgcccgcccgcagctgtcgaggcgggaaactcgcccggcaccgtcacctactgcaacagcgtcggcgtcgcgggcggccgtcgcatccgcaacaaggcggcgaccccgcattcaaaaggccctggcggtgggtaccttaatcaacttgccaagccgaagccaagccggttgtcaagaaggccatggccgtggctttccgggcttaagcaattgtggccaataaaaaagcccacccttg

SEQ ID NO: 1917 - DNA, 320 bp, Zea mays
  Clone ID: LIB3136-028-Q1-K1-B3
ggggaagccggaaaccgcacggccggcctgcctctagtcgtcgtcgtcgtcgtcgactcgtcgccgtggtgcttgcggcagctccggagtccaggcagcacgctagtcggggggcgcgggagaggagggatggatcggtcgtatctccccgtggcggcggcggcggccgtcgccctggtcctcgtgtgctgatccggcctctgccgcggcgagcggctcggggcgagggagtgcgaggacctggggttcaccggcctcgccctctgctccgactgcaacgcgctctccgagttcgtcaaggaccaagagctggtggagga

SEQ ID NO: 1918 - DNA, 363 bp, Zea mays
  Clone ID: LIB3136-028-Q1-K1-B4
acttgttgaaactctagtggcaaagaccagtgcatgggaggagaaccgcggtctgtcttttatgtatgatggtgtacctcttctagctatgttggatgagtatgttatgctcaggcaggaaagggaagaagagaagaaaagaacgcgggaacaaaagcgctacgttgagcagcaattgaacactgatcatgaagggccattcggatcgcgagtgagtccaaaccgccctgccagttcaaaaaaggcctttgccccaaagttgaatggcagcgtctaaaacggaattcctccaaacaaaaggttttaaatcagtggccacaaaaacggtgttggcaatgcctccaggtctgaagggaaggttac

SEQ ID NO: 1919 - DNA, 386 bp, Zea mays
  Clone ID: LIB3136-028-Q1-K1-B5
cccgcacgcacacgacccgcagaccgcaccctgtcggcgagctcgctcccgttcccgtccgctgctctccgctcgacgccgccgtcttccgcgcagctagtgtctacactcccggcgacgatggcggaggacttggttttggacacggcgatccgagactgggtcctgatcccgctctccgtggttatggtcctcatcggcgtgctccgctactttgtctccaagctcatgcgctccccggcgacctctccgtctcccgaccccaagctcgttaaggaagggcaggtggtcatcaaggcgaggaacctgatgaccaacgcacagttcattccggccaaggcttttcaaaggcacgccaaggtttatttacaccaaacgagggaaaa

SEQ ID NO: 1920 - DNA, 401 bp, Zea mays
  Clone ID: LIB3136-028-Q1-K1-B6
cccatggccactgccgaggtccagaccccgaccgtcgtggcgaccgaggaagcgccggtggtggagaccccggctccgcccgccgtcgtgcccgaggaggctgcccccgccgccgaggccaaggtggaggagccagctgccgccgctgagcccgaggcggcccccgtggcggcggaggaagagacgccaaaggaggaagagacggcaaaggagccggagccggcggcggctgaaaaggtgaaggaggaaacggcagcgcccggttgccgaaacaaaaccaaaaccggcagccgttaaccccaaggttgttgttgccaagaagcccccgggggttaaccccaagcttgttgttgccaagaagcccaaaaaggccaacccggccgttaaggtggccaaaaagg

SEQ ID NO: 1921 - DNA, 384 bp, Zea mays
  Clone ID: LIB3136-028-Q1-K1-B7
cgacttgtttcattgattcttgaagagatcgagcttcttttgcaccacaaggtcgaggatgtcttgcaactgcggatcaagctgcggctgcggctcaagctgcaagtgcggcaagaagtaccctgacctggaggagacgagcaccgccgcgcaggccaccgtcgtcctcggcgtggccccggagaagaaggccgcgcccgagttcgtcgaggccgcggcggagtccggcgaggccgcccacgcctgcggctgcggtagcagctgcaagtgcgacccctgcaactgctgatcacatcgatcgacgaccatggatatgattattatctatctagcttgtgggggggttgaacaataataagcgaggccgagctggctgccatacat

SEQ ID NO: 1922 - DNA, 297 bp, Zea mays
  unsure (1)..(297): unsure at all n locations; Clone ID: LIB3136-028-Q1-K1-B8
cccacgcgtccggtcggatgggtccttccttgatgacgggcagcaggaggaagggtatgtgctgacatgcgtctcctacccaaagtccgactgcgtcatccacacccacaaggaaggcgacctgtactagggctagggctttccaatttggcgagggaccaaaaatgctctcgagtggtgtgttgtcaagcaaagctccatctgcgcgccctaccccgttgtgcgaactgttttggcatcnaaaaaaaaaaaaaaaaaacccccttttgaaatactccaaaaaaaccaacccaaagg

SEQ ID NO: 1923 - DNA, 308 bp, Zea mays
  Clone ID: LIB3136-028-Q1-K1-B9
ctcgggtagtgatctcaagaatctttgtgttactgacgctcatcgtactattagggagatgcttgaaaaggagaagaaggagagagcttcagcagaaacagaaaataggccattgcctctgtcgcacactagcaatgatgtccgtgcattaagaataagtgatttcatacatgcgcatgaacaggtgtgtgcaagtgtttactcagattccagtaacatgaacgagcttgtgcaatggaatgatctctatggagaaggcgggtcaaggaaaaagacaacgctgagctacttcatgtagctgatgttgc

SEQ ID NO: 1924 - DNA, 331 bp, Zea mays
  Clone ID: LIB3136-028-Q1-K1-C1
gtggaaatttatttgccaactgtaagcccgtcgtgatgcatagaacatttgtggtataagatttttctgttgatgtttgcaggttatttttccagcacttgacattcgagtgaaaaatgtcgcagggacatattctcttgaacataaaggagaaaatgatctcttcgcacatcagacaaggcttctactctttcagaagaaagtcatttttaggagaatcgtgaacaaaatgaccagatgtttaggcctggttggaaggacatttttcgaatgaatcagagtgagctcgaggctgagatttgaaaaagtctctcgagattctactcttgat

SEQ ID NO: 1925 - DNA, 204 bp, Zea mays
  Clone ID: LIB3136-028-Q1-K1-C10
atctgtatgcaacacctcagtcacagtgtgcagcttcacactggtacttgagttcaacaaaggcagactccacaacttgtactggatgaaggacggatgcggcgcttgctacgacaagagtatccaccaacgccgtggccatattacctacgtcatccagacccacagctggctgaaccaatggacccacgcctccagaggggg

SEQ ID NO: 1926 - DNA, 306 bp, Zea mays
  Clone ID: LIB3136-028-Q1-K1-C11
acgaagaaattccgaaggacagtcagggttcatctgacaggagtggaccgccaccagttttacgagcacaatccaaatctaaaccggaactagcagaatacgctggtccatcatgagaaggaacttgcaattgcattcatcttatagggcccagcgcccatccaaccgaagcttctgaaaacgtattggctaaatcaaagcagcgtgccagagccagaaaggagattggattttctgccaaccccagtggagctcacattgttcactgctgcggaaagttgtcaaaggcctcaccagaaaatgcat

SEQ ID NO: 1927 - DNA, 253 bp, Zea mays
  unsure (1)..(253): unsure at all n locations; Clone ID: LIB3136-028-Q1-K1-C12
cgctcgtgctggaatatagtgcgattttatgttcctgctacgttgcgactgctcatagaatatatgccaattttcatcttcctgctatgtccgtgtatcatgttttttgaaaaataatatctccatatccgcatcctcctgataccgcccatatccatgcatacatatggtttgcttgctatatgcaagcgcctcgaacccggattgctataatntgatgaattcgtgtctctcacttgatcttttttaaaaa

SEQ ID NO: 1928 - DNA, 204 bp, Zea mays
  Clone ID: LIB3136-028-Q1-K1-C2
gcttgcacgcatctacactgctgaaattgtatctgcggtcgcccacctccatgccaacggtgttatgcatagagatttgaagcctgagaacatcttactggatgctgatggtcatgctatgctgactgactttggtgtggcaaaagaatttgatgaaaacactagatcaaattcaatgtgtggtactgttgaatacatggcccc

SEQ ID NO: 1929 - DNA, 202 bp, Zea mays
  Clone ID: LIB3136-028-Q1-K1-C4
gtttcattaaggttgtgtcgttgaccgagaagctgcaagagaaggaggatgcgacggagggcggcgccaccgctgacaccgccgcgccggcggtggacgtcgaggctttcctggccgactacgtcgaagagccagcagagcctgcggcgacgctcgaggtgctgcaggaggtgaagtccgaggacaggctgagcaccggcag

SEQ ID NO: 1930 - DNA, 351 bp, Zea mays
  Clone ID: LIB3136-028-Q1-K1-C5
cgcgcaccgcgagctagttagctactgacatccggcgccggcgccgagtacaatacaaggaaagcagcatggtgttcgagcagcatgaggaggaggcggtggcgccgggcgcggtgcacgggcaccggctctccacggtggtgccgagctcggtgacgggggaggtggactacgcgctggcagactcggacctggccttcaagctgcactacctgcgcggcgtgtactactaccggtccggggacggtcttgccaccaaggtgctcaaggaccccatgttcccgtggctggacgaccacttacacgtggccggccgcgttcgtcgtgccaaggcggagggggacgccgtgc

SEQ ID NO: 1931 - DNA, 269 bp, Zea mays
  Clone ID: LIB3136-028-Q1-K1-C6
catttcttctctctctgctcctccgcctccgcctgatccatccaagacagggatcgccatgtcggactcggaggagcaccacttcgaatcgaaggccgacgctggggcgtccaagacctacccgcagcaggctggcaccgtccgtaagaacggcttcatcgtcatcaagaaccgtccctgcaaggttgtggaggtttctacctccaagactggtaagcatggccacgccaaatgccacttttgtcgcctaaaaatattcaatgggaaaa

SEQ ID NO: 1932 - DNA, 292 bp, Zea mays
  Clone ID: LIB3136-028-Q1-K1-C7
agagaaatatttgaagggttataaggcccgtttttctttcttgttcactgcggtcgcgtgcgattccttttggctgtgtccatgctcgctgcctacaatacgcagccacgcaggagtcctcgacttctgtaaattctgtaccaatgtaataccagttccagtttttgttttccacaatgttgctggcgctggctcaggcactcattttgaaatatgaccactccaaataaaacaagcaccaatgccattttacctataaggcggaccaaggcaagcaaacttgcattttttt

SEQ ID NO: 1933 - DNA, 244 bp, Zea mays
  Clone ID: LIB3136-028-Q1-K1-C8
ctgatctatcactggtgttgaactctagttcacctgattgtatttcacaggagatgaacctggaggcacctccagcattgggaggtggatgtgcagcccccatgctaggagattcgatggaaaaggctccaagctcaccttggatgcctttctccatgctgtttgcagcgatctctaccaaagtgtctcctgagaatatggacgtgattattggttgctatgaagagtttaagagcaagaaaat

SEQ ID NO: 1934 - DNA, 296 bp, Zea mays
  Clone ID: LIB3136-028-Q1-K1-C9
acgatccaatcgaacatgcatggtgagtcaacttgccgcctgcgagccgctgatcctgatgttgtggggcatctaccattcctgctggatcagaagagcatcctttggaggggatcataggcagatccaccatgtaccttagcatatgacctagttggcccagagaacctgcttgatggctcaaaagatggactccactgtaggtgctgaggcaggacacagaggatcatactgtcattacacctgacgatccaccacggcatcgcacttcgcgtgaggagatgtacatcatcatt

SEQ ID NO: 1935 - DNA, 128 bp, Zea mays
  Clone ID: LIB3136-028-Q1-K1-D10
gtacatgtgcacgcagtgtccttcgatacgtattcctggtacggacaacgggcgtatgggtagactcccacgcgcattcaaggagagcaggacgagagatctgtatggaggatcgagggcttggtact

SEQ ID NO: 1936 - DNA, 404 bp, Zea mays
  Clone ID: LIB3136-028-Q1-K1-D11
tcggagagacgaccgtctgctcagccgtcgttggagacggctcgtttcagggtcccgcactagtgatcacgaccctggcctctgtgggttctggtgcattgacattgccatcatacaccctgatgcatgtcggtgcaacgcccatgtgcatccactggtgcttataagaggaataatccggcttgcgttcctctgaggacatacttggccttgcagggcagctaccacgaaagccttctgcgcggggtgctttcctcgcagcatatattcctgccttatgcattacagctttgcaagatccttgacttgggcatatatattcggaggtctctatatatataggtggttcgaggtgatcggcaaaaccacacaggcaaagatggcgagcgtgcacaatgtcacca

SEQ ID NO: 1937 - DNA, 183 bp, Zea mays
  Clone ID: LIB3136-028-Q1-K1-D12
acgcgtctctgcaagcggacatagcccgtccctttcctacaccttccccaaagttccgctccggggcgatcagttacgcccccgctaccgggcgtgtaaaccactaacacttcacgcggatcggtcgctcgctagctgggtggaggggacattgatccccccccgctcggatctcatggtaac

SEQ ID NO: 1938 - DNA, 383 bp, Zea mays
  Clone ID: LIB3136-028-Q1-K1-D2
ggcaagcgttgcgccaagtactacgaggcaggtgcccgctttgccaagtggcgcgctgctggcaagattggccctaatgagccatcacagcttgccatcggcctgaacgctcacggtctggctcgctatgccatcatctgccaggagaatggtctggtgccaattgttgagcctgagatccttgttgatggccctcatgacattgatcgctgcgcttacgtcactgagaccgtccttggctgcctggtaccaagggcctaaacgggcacaatgttcctcttgaaggtacccttcttaagcccaacattgtggcctccagcttccaattcaaaaaggggaaccccgaagggaatggttaatacacaccgcgcaaccttcaaaag

SEQ ID NO: 1939 - DNA, 325 bp, Zea mays
  Clone ID: LIB3136-028-Q1-K1-D3
gtccgtgcattggatgcaggtccagtgattgcgtgtgaaaggttttctgttgatgaatgtgttaaggcaccacagctactttctatgctgtttcatttaggatccaagctattgattaatgaacttccatccattcttgatggttcggctaaagataaggcacaaccacaggatgactccaaagctacactggcaccaaagttaaattctgaggagtcatggctatcgtttgacgaagaagctaaagtgctgcataacaaggtgagtatctgattctcaatgtgtacaacaaagcttttgccaaccaactctggtaggtgcgggc

SEQ ID NO: 1940 - DNA, 400 bp, Zea mays
  unsure (1)..(400): unsure at all n locations; Clone ID: LIB3136-028-Q1-K1-D4
gcctttgttaaaacttcttgactcaaaaaatggatctctgcaacataatgctgcatttgccctttatggagttgcagacaatgaggactatgtatctgacttcattaaagtaggaggtgtccaaaagttacaagatggagaatttattgtccaggcaacaaaggactgtgtggcaaaaacattgaagaggttagaggagaagataaatggacgagtgttgaaacacttgctntatttgatgcgagtaagagaaaaatctgtgcaaaagcgtgttgctctaacctttggacaactttttggcccttgaaaataaaagttaagttttaatggatattaagggcttgaactggttcttgaacctcttaatttcattaagtcaaaacattaaccagaatggtta

SEQ ID NO: 1941 - DNA, 343 bp, Zea mays
  unsure (1)..(343): unsure at all n locations; Clone ID: LIB3136-028-Q1-K1-D5
gcagtcaccactcccaagccagtaccgagttctacgagcagncgcacgcaagtgtggagagacgaaacggtcgacatggctcgcacgcaatctgccgtagcggtcgccgtggtggccgcggtgctgctgctggcagcggcggcgacgacctcggaggccgccatcacctgcgggcaggtgagctccgccatcgcgccctgcctcttctacgcccgcggcactgggtccgccccctacgcgtcctgctgtagcggcgtcaggaaccttaagagcgccggcagcaccgtcgtcgacaggcgcgccgcctgcaactgcctcaagaacgccgccaggggcgttagcg

SEQ ID NO: 1942 - DNA, 292 bp, Zea mays
  Clone ID: LIB3136-028-Q1-K1-D7
gggaacttggcatcgaaattgtgaaggacacggtctattaccccaagttcaaggagttctgcgggcctagttgctactctgatgagcactatatccaaacaatgctctcaattgaaactccgcagagcctatctaacatgagtgtcacctgggtagactggtctagaattgctgcgcatccagcatggtttggcagggttgacatcacggaggaattcttgagggaagttcgagaggggcagacctgtttgtacaatgagcagaattcaacagtgtgcttcttggttgcttc

SEQ ID NO: 1943 - DNA, 251 bp, Zea mays
  unsure (1)..(251): unsure at all n locations; Clone ID: LIB3136-028-Q1-K1-D8
tcgggcctactgcattttcttcaaggatttttactgccgccgcgttncattcatacacgggggggggaagtacaagtacgcgataggctacatctgatttaatcaaaaagaaacattctaaaaaaaccttcaatacatgttagtctagctgatcatgtctacatcatttaaatgggaaaaaatttgtgatttcgatgaccacctttatgatattagcaaggattggtcgaacccaatccttctngactgaa

SEQ ID NO: 1944 - DNA, 266 bp, Zea mays
  Clone ID: LIB3136-028-Q1-K1-D9
tcggaacatgggcctgaactgtcccttgctggattatccttgaatgcacccaccttgtatgggacaacttccagtcgcttctcaagagaatatcacgaattatcttctccagttaccaagggcctggaactggaactagaacatactaatatgctatatgaagataaaagcaactgggagcaaaattatattggtgatcttcatattgctaatggaaaccacgaccttcattatgattctgaatctggtgtaagctattctgatag

SEQ ID NO: 1945 - DNA, 287 bp, Zea mays
  Clone ID: LIB3136-028-Q1-K1-E1
gtccagcgcttgtgttggcggcggcgatggcgacgtcggcgagcacgtccggcgagtggctaaagggcgcgctgcaggaacttcgggagcgtaagggcagctcgctggagttcgactcggatctcatctcgggcctcgtctccttctgcgagctcgcgcctccctccgacgccaccagctatctcgagaattttattgggaaagaagctgctcaggacatcattcaagagtacttgcggaggaggggtcacattggttcctcaaatggaactgagagctttcagtca

SEQ ID NO: 1946 - DNA, 319 bp, Zea mays
  Clone ID: LIB3136-028-Q1-K1-E10
tcgaggacatcgacatgcggatccgcgtccgaggcggcgggaagacgtctcacatctacgccggccgccaggccgccgccaaggggctcgtctgctactaccagaagtacatctacgaggccgccaagaaggagatcaaggacatctgtacccgctacgatcgcaccctcctggtcgatgacccctagcgctgcgaaccaaataaagtttgctgacgtcgtgcccgcgccgagttccaaaagtcgtaccgctgagcgggtgcctgctccatttcaagttttcaaaaccaggtgggggttgctcggcttatttcctatcc

SEQ ID NO: 1947 - DNA, 226 bp, Zea mays
  Clone ID: LIB3136-028-Q1-K1-E11
acagctgacgcatgggcgggcactagcctccgtggagaccacagccacaccagagagcgcttctgtctccgtccgactgctgctccgcgcgagatgtaccaccactgattctgcgtgactcgggtcagtggagaatatcagcgatacagagcgggtatggagagctccaacgaaggagatccctaagttgccatccaccgtcccagtggatgcgggactgctatgg

SEQ ID NO: 1948 - DNA, 249 bp, Zea mays
  Clone ID: LIB3136-028-Q1-K1-E12
gcgaatcgacgcgcctatctcagcttgctgcactgcactgcactgccctgccatcatatcgtacgtgagcccggccgagagcgagggagaggcatggctgctccgaagctcgcgacgctggcgctggccgtgctcctggcggcgaccgcggtggctcccccggccgcggtgcgcgcggcgatgtcgtgctccaccgtgtacagcacgctgatgccgtgcctgccgttcgtccagatgggcggtgccatg

SEQ ID NO: 1949 - DNA, 291 bp, Zea mays
  Clone ID: LIB3136-028-Q1-K1-E2
caagaagcttgaggaggccgtcaaggggaagttttctgatgcggtgattcagttacacaccagggattcatcaaaaagttggcgtcaggctggatcagatggaagcagtcagctgattctaaaagaaccttctaccaatgttgtcctagctgatcatgttacaacaaagaaatgggagaaaattgttgatttcgatgaccaccttgatgatattagcaaggattggtcgaacccaggcctccttgactgaattttcatgattgatctcgctatactgttttggaacttcgc

SEQ ID NO: 1950 - DNA, 360 bp, Zea mays
  Clone ID: LIB3136-028-Q1-K1-E3
cctcgccgtccgcgacctccgatccagcgattcctatgtcgtcgttcgcatcggcaaacagaaattgaagacacgggtggtaaagaagagtgtcaatccggaatgggacgaagaactcaccctctctatcgaagaccctgctgttcctattagactggaagtttttgacaaggacactttcgtcgatgatacaatgggtaatgcagaggtggacatccgcccattagtcgagattgtgaagatgaaactccaggacgttgccgacagaaccgtggtaaagaaactggtgcccaacaaacagaacttgctagccgaggagagctcgatatatatatcggaagggaaggggaaacaagacat

SEQ ID NO: 1951 - DNA, 321 bp, Zea mays
  Clone ID: LIB3136-028-Q1-K1-E4
gccaaataaaagacgccatgggatttgccttggataatgctgatgcagctggcgagattgttgaggttcttacagaatccttgacactcaaggagacgtctattccaacaaaggttgctcggcttatgctagtgtctgacatccttcataacagtagcgctcctgtgaagaacgcatctgcattccgaacgaagtttgaagcttctttgccagatgttatggagagctttaatgacttgtatcgcagtatcactggaaggattactgctgaagctctgaaggagagggttatgaaagttctacaagtttgggcagactggg

SEQ ID NO: 1952 - DNA, 429 bp, Zea mays
  Clone ID: LIB3136-028-Q1-K1-E5
gatctctggcggacgagcacaaccagctgatcgcagaagccatcgactcgtcgatagagaggcagtggcgcctccccagctcgtcgttcccgctctcgagctacccacagctcggggcgctgggcgacctgggcggccagaacagcacggtgagctcgctgccgaagatggagaggcagcagccaccctcgtccttcctagggaacgacaccggggccggcatggccatgggctccgcctccgcgaagcaggagggccagacgctgcggcacttcttcgacgagtggcccaaggcgcgggactcctggccgggcctcttcgacgagaccggcagcctcgcctcgttccccccggcgacccagctgtcgatgtccatacccatggcgttcttcgacttctccgtggccaggttccagtcgcccaacggtg

SEQ ID NO: 1953 - DNA, 200 bp, Zea mays
  Clone ID: LIB3136-028-Q1-K1-E6
ggcaggcaggaatgcatctgccagtggaactgtagcaacctgcacattatttatgtatgcctgttcattggagggcttgttcattacatgttcgtctatactagaaaaaacagaatattagcattaatctatagttaattaaagtatgtaaatgcgcctgttttttgttgtgtactgtaatcatctgagttggttttgtg

SEQ ID NO: 1954 - DNA, 309 bp, Zea mays
  unsure (1)..(309): unsure at all n locations; Clone ID: LIB3136-028-Q1-K1-E8
gagcttgcgagcatcataagaacattgcactctcttcagtgcgngcctgttccttcctgggtgaactggcaggaagagtggccaacaaaatgagattcgttagtgaaattgtgcagaagcaaatcgatcttctctaggctattttgccccgatccctgtggtcaccggatcagccgtctggcttcctggagtaggcttggcgtattgggactcgagcaggaagtagatgtgagttgcgaggattctagtgacagcggcgccatagagctctgggattcactgttatgtctcggcagttgcagaaagctg

SEQ ID NO: 1955 - DNA, 224 bp, Zea mays
  Clone ID: LIB3136-028-Q1-K1-E9
caagaagcgatgagctctatatcaccctgagaaatcttggccgcactaccgtgtcggtttgtgtccaaacagtcctgatgaagggtttctgtttaggcagtttcctgaaatggtgttttgctttaggacaatctcgtggttattgaaccttaatatatcgcgtccctgggatgtgttttttgacactttataagtaatttcatttggatgagacttattctgat

SEQ ID NO: 1956 - DNA, 118 bp, Zea mays
  unsure (1)..(118): unsure at all n locations; Clone ID: LIB3136-028-Q1-K1-F1
naaaaaaaaaaaaaaaaaaaaaaaaaaaaaataaaaaataaaaaaaaaaaaaaaaaaaaaaaaggaaaaaaaaaaaaaaaaaaaaaaaaaaaaaaaaaaaaaaaaaaaaaaaaaaaag

SEQ ID NO: 1957 - DNA, 134 bp, Zea mays
  Clone ID: LIB3136-028-Q1-K1-F10
gttgaatggaagcgataactaaatcaaggatgttctatttatatcggtctcaggtaattgtgagcagcagtagagactaagcagttctgtaattgcatttgttctaagatcattttctgtacttgcatggaagc

SEQ ID NO: 1958 - DNA, 216 bp, Zea mays
  Clone ID: LIB3136-028-Q1-K1-F11
gacgaaacggtcgacatggctcgcacgcaatctgccgtagcggtcgccgtggtggccgcggtgctgctgctggcagcggcggcgacgacctcggaggccgccatcacctgcgggcaggtgagctccgtcatcgcgccctgcctctcctacgcccgcggcacggggtccgccccctccgcgtcctgctgtagcggcgtcaggaacactaagagcgcc

SEQ ID NO: 1959 - DNA, 316 bp, Zea mays
  Clone ID: LIB3136-028-Q1-K1-F2
gggttttcgcgccgccgccgccgccgccgccgcagccgcaacaatgccgtcgcacaagaccgtccggatcaagaagaagctggcgaagaagatgcgccagaaccgccccatcccctactggatccgcatgcgcactgacaataccatcaggtacaacgccaagcgcaggcactggcgccgcaccaagctcggcttctgagcgtcgggattggccggctgctgcgtcggaaggctagggtctaagagctatcttccttcctgtttatcaatgtgtcagtttttctgtaagctagcaagtgttgctatgacgctttta

SEQ ID NO: 1960 - DNA, 409 bp, Zea mays
  Clone ID: LIB3136-026-Q1-K1-C10
acgccacgcaggcacgcacgcggaggggagcgccggccgtccgcggcggattgggatcgccctcgcccgcccgcccgtccactcgagactcgacggcacccgccgcatttgagctgagctgaggaggcgtgggggacggcgcggggatgtggcgcctgcggatcgcggaggggggcggggacccctggctccgcacgaagaacgcccacgtcggccgccaggtctgggagttcgacgcctccgccgaccccgaccccgccgtcgacgccgcgcgccgcgccttcgccggcagcaggggccacctcaagcacagcgccgacctcctcatgcgcatccagttcgccaaagaaaatcctcttgagcttgaccttccagcgatcaagctcggtgagcacgaagacgtaaccga

SEQ ID NO: 1961 - DNA, 187 bp, Zea mays
  Clone ID: LIB3136-023-Q1-K1-F12
gaatacaaagctttttaggaccacaatttaggtaggcacatgggtaatatctaattataaaatattcattacctccccaacactcacacactctacacaccccataacctgttactcgattccttaaaaaacaagccacaaatttcttttcatggcctgcacatttaaccttaattactatgcatgc

SEQ ID NO: 1962 - DNA, 201 bp, Zea mays
  Clone ID: LIB3136-023-Q1-K1-F2
gaccaccccgagcagaacttaaaaaactcttttcaacaacaaatattgattctataaccttcttccattctatagcgcattcttctaatgacctgacaaatcctgctcctgctactaccatatcccatcttcatgctacaactgcgtttatacagccgatcattaatctcagtacttatactccttatctaccactggatt

SEQ ID NO: 1963 - DNA, 327 bp, Zea mays
  Clone ID: LIB3136-023-Q1-K1-F3
gtgacatgccagccttttgtgtgtatgggtgtgggacgggccgagcgtgttggattacaattcttttactgacacatctctcaaatcagagcagcatcagctggttgctctgactcgtgccgtcgtgcgtcatgaaatgtacatagggtcgttagagcgagaaagagagtggtgtttcttggtgctgtatttattatgcactggttgggttgggtttttcgactgccattctcatactaagtattggttctttcttttttcggtcgttgggtttgcatatacttgtaccgacaacacagcttcggggtgattgggcgagtgctgttc

SEQ ID NO: 1964 - DNA, 353 bp, Zea mays
  Clone ID: LIB3136-023-Q1-K1-F4
ctaccgcgtccaccacaccaaaccgtttcacccggacctgcccccaacaccctgctctatcctcatagcaaacgcaccgcctgaattgggcggcaattgggagaggattcgcggcaggtagggcgctgatccgttggcgagatgattgcggctgtcaaccgagtgccggcaggctggggcgaggatgagatgtccgtgctgccgcggcacaccaaggtggtggtcaccggcaacaaccgcaccaagtcggtgctcgtgggcttgcacggagtcgtgaagaaggccgtcggtctcggaggatggcattggctggtacttactaattggaatagaggtaaagctgccagcggaat

SEQ ID NO: 1965 - DNA, 398 bp, Zea mays
  Clone ID: LIB3136-023-Q1-K1-F5
cccaggcaggcaggtcggcgaggagggcaggaagaccgaagaccgagccgtgcgggggctcgggacgggaacgggacaggaccccaaaatctcagatccttcctgcccgcccgcccgtgcccgtcgacgcgtcgttcttgccggccgcgccccacctccgccctctcctcctccagggggatcggatacgccacaggctgcgcgatggtgctgtgggtcttcggctacggctccctcatctggaaccccggcttcgacttcgacgacaaaatcctcggcttcatcaagggctacaagcgcacctttaatctcgcttgcattgaccacagaggcacaccggagcatccggcgaggacctgcacgcttgaaaccgacgacgaggccatatgctggggaat

SEQ ID NO: 1966 - DNA, 330 bp, Zea mays
  unsure (1)..(330): unsure at all n locations; Clone ID: LIB3136-023-Q1-K1-F6
gttcccagatgatggttacggcgtggtcgggatggaggcggacgcagacgcggacgcggacgaggagatgatggcgtgcggcggcggcggggagaagaagcggcgcctgagctccgagcaggtgcgcgcgctggagcggagcttcgaggtggagaacaagctggagccggagcgcaaggcgcggctggcgcgcgacctcggcctgcagccgcgccaggtcgccgtctggttccagaaccgccgcgcccgctggaagaccaagcagctggagcgcgactactccgcgctccgncagtcctacgacgcgctgcggcacgaccacgacgcgct

SEQ ID NO: 1967 - DNA, 149 bp, Zea mays
  Clone ID: LIB3136-023-Q1-K1-F7
cgagagacgggcaggggagaggaaaaaaaaaatctaaccctagcatccgcagcgctagggttcgggggttgcgatggcggcggcggcgagacagccggggacggtgaaagggttcaaccacaccaagggcttcgggttcaatctccccg

SEQ ID NO: 1968 - DNA, 329 bp, Zea mays
  Clone ID: LIB3136-023-Q1-K1-F8
cggacggagcatgggattgacccacatacccgccctccgacccgcatgccaaatacgccgcggcacgcgtcggctcgtagccatgccgtcacagtttcgcaccggccgcctcctactccctagtgacaggctgatcacgattctctcccctgtacgcttcgagtccatgtcacctgctcatcgcgccttccggctgccgccgacgcagcttgttcaccgggtcacacgccgccgcggaagcgccccccgtcgacgtgacgggagggggctctagagcatcatggaggctcagtctggaggatatagcctgggatcatatattcacacag

SEQ ID NO: 1969 - DNA, 450 bp, Zea mays
  unsure (1)..(450): unsure at all n locations; Clone ID: LIB3136-023-Q1-K1-F9
accggnnccggaattccgggtcggaccaagccgtcgggcctttttgcgccggggggagacgccgccgctgaaaacaacaaaatgaaagggactgagcgccgcctctggctgccagggtccgggtcgccggaccgccgcgtcgtggctgctaccgcgaccaccctggacctgctcccggccaagggcgccaagcgcgggttttctgacgaggcgcccccgccatcgactgttggcactgccggaaagggaaagaaggtggcggaagaggagtacgaccagaagaaggaggcggcgaccccacacccggccgccaaagcacaggtggtgggatggccaccagtctgcaactaccgcaagaacacgatgactaccacccagctggagggcagcaaggaggatggtgatgccaagcanggtcaggggttcctgtacgtcaaggtcagcatggat

SEQ ID NO: 1970 - DNA, 309 bp, Zea mays
  Clone ID: LIB3136-023-Q1-K1-G1
agagtcgtaaacttgatgaaaaaagacaagctgaaaaggagaaagcattacgtcttgcacgagcactggaagaacaggataatatcttggcagaaaatggcgatgacgatgatgacgataaagaggaagatacacaagtgggagatcacttatctggtgtcaaggtgcttcatggccttgataaggttttggaaggtggtgcagttgtcatgattctcaaagatcagagtattcttgccaatggggatatcaatgaagacgctgacatgcttgagaacattgagattggtgagcagaaacaaagagatg

SEQ ID NO: 1971 - DNA, 443 bp, Zea mays
  Clone ID: LIB3136-023-Q1-K1-G10
gagccgcaaaccctagagcgggcgcaggagctcttcgacaggggttccaaggccatcgaggatgaggacttcgtcgacgccgtggactgcctcagccgagcgctcgagatcagggcttcacattatggagagctcgcgccggagtgtgccagcacatacttcaaatatggatgtgccctgctatacaaagctcaggaggagagtgatgttttgggaaatgttcccaagagcttgccaaatgaagactcagtgaagagtacagctactaaagatgacagtggaacctcaaaggtctctggtaccaatgcggaggatgctgcgtcatcagaaaaagttgatgctgaagaaggtcaaaactcaaatggcaaaaatcaggagaatgggaatggtgaagttgagaaagatgatgatgacgacgatgatgatgagaagatgggagatga

SEQ ID NO: 1972 - DNA, 59 bp, Zea mays
  Clone ID: LIB3136-023-Q1-K1-G11
tcgcagccgcataccctatatatatcactctagttttttctcaagcttttcatatggac

SEQ ID NO: 1973 - DNA, 442 bp, Zea mays
  Clone ID: LIB3136-023-Q1-K1-G12
ccccatcaagctttttgacgatgatatccgacggctcgagcatgtggactcagctcgtagaactggtagacatgctgttgcctccatcttggatccttcaaagacgagggacatcgattacctgccgttcttctactccagagtgttcacgttgtcctggcaattctatggggataatgtcggggaagtggtccactttggagacttcacaagcagcagtccgaggttcggtgcatattgggtcaacaaagggcggatcgcgggtgcgtttcttgaaggcggaagtcgggaagagtacgaggccatatcgatcgtgttcggcgggaagctgtggtcacagacatgggtgaactcgagaaacaaggcctggcactcgccattcaggagagccagaaggaggtgcctgacagtgggcttgctgttgtcggaaaacctacttatg

SEQ ID NO: 1974 - DNA, 321 bp, Zea mays
  Clone ID: LIB3136-023-Q1-K1-G3
caggcgctgggtgccgccgcaggggaagggagccctgtacctccggcctctgctcgtggggagcggcccgatccttgggctggctccggcccccgagtacaccttcctcatctacgccgcacccgttgggaactacttcaaggagggcctggcgcccatcaacctggtggtgcatgacgagttccaccgcgcgatgcccggcggcaccggcggggtcaagaccatcgccaactacgcgccggtgctgagggcgcagatggacgccaagagcaaggggttcacggacgtgctgtacctggactcggtccacaagcggtacct

SEQ ID NO: 1975 - DNA, 295 bp, Zea mays
  Clone ID: LIB3136-023-Q1-K1-G4
tgatgtcaggactgaacctgatctgccggttaatccattggctgctagagcagccacaataagtgtatcagtgtttggaccatttggttgtggcttgttcaacggcaagggcgaaacggcgctcaagaaacccaacaatctagatcaatcccaccagaagaccaagacaccacatcagtatttcatgaaacaaaaaggagtcaacccaccatcacatgaggcattcagtgatgagtggttggaaaatggccagtgcccacttgcgcagtcttaccgggcaatgagaggtgttttg

SEQ ID NO: 1976 - DNA, 311 bp, Zea mays
  Clone ID: LIB3136-023-Q1-K1-G5
ctcccaccaatctttcaggatggtccacaacttacaggcattgctgacaacctgaattacaggcaccgaaatgcccagatggcaagcagagcatcagttgaactccacacccacatatatttcaagacaaggccaactgacactgaagctaggatagtaaagatcaaggcaaatggtttcatagtatttgtcccaaagtttggcatagaagggcccatctaccttactccgaagggcgacaaaggcggtgattgggttgttgacgaggtgcaccagagagtaaccaaaccccgaacaaaacatagctatgc

SEQ ID NO: 1977 - DNA, 446 bp, Zea mays
  Clone ID: LIB3136-023-Q1-K1-G6
tggcaaggtcgtatcatcatctcttcccggtaccaccgtttgatgaggtcacccctgtcccaaatagaattcaaaggggagggcagatctgtttcagctgccagcagagcctttataacccagacggccaatctaacctccatgtgcgctgcccaaaatgcaaccaacacttctgccttgattgtgatatttacatccatgagagcttgcacaattgccctggttgtgagagccaacgcagcatcgcttcatagagaccgtgttactgcgtgcattattcagctgtagagagaatctggctgtgagaagaatctgtgtatcgtgggaattacatgcggaggaagatgaagttgtccaaatggttcacgatctagaaagcgatggatttctactatcgcgacgattcaaccgattctgtgtttatgttgattttggacggtttttac

SEQ ID NO: 1978 - DNA, 366 bp, Zea mays
  Clone ID: LIB3136-023-Q1-K1-G7
cggacgcgtgggtgaacgtgcagaacaagaactcttcctacttcgtagagtggatccccaagaacgtgaagtcgagtgtgtgtgacattccaccaattggcctgaagatgtcctccacattcgttggcaactcaacctccatccaagagatgttccgccgcgtcagcgagcagttcacggccatgttcaggaggaaggctttcttgcactggtacacaggcgagggtatggatgagatggagttcaccgaggcagagagtaacatgaacgacctggtggccgagtatcagcagtaccaggacgccactgccgatgatgatgagtacgaggaggaggaggaagaaaaggaagagacctaagtcattc

SEQ ID NO: 1979 - DNA, 396 bp, Zea mays
  unsure (1)..(396): unsure at all n locations; Clone ID: LIB3136-023-Q1-K1-G8
gccggctcccgtcccatcgctcgcttccccctcccgcgaatcattcgattcggcccgcctggtctcgcccggcccaattcaattgggccgtaagggggatcggaacccgcgctaggggtaagggtcccgcgatccccatacctatggggcaacttgcgagctcggggaagcggcacgcggagccggccatggctccggcgcggcgcgcggcgaccgtcaagctagaggtggaggagctcggggccgacgagcgctgcccgctcagcaagcgcgccaaggcagctctgccgatgcccccgacgcctncgcagccgcagcaggatatgtaccacaatgtactcgatgaacctagcccattgggtctgcggctgaaaaaaagtccatcactcttggatt

SEQ ID NO: 1980 - DNA, 455 bp, Zea mays
  unsure (1)..(455): unsure at all n locations; Clone ID: LIB3136-023-Q1-K1-G9
ccggccggaancccggtcgagcccgcgtccgcttttacatgatccatcaaaggacactggctatgttggctgtgctttaacaagcaacatggggagatttttcaagaccgcggatggatcgtggagccatgaggttgctatctctgtgaaaccactgaaggtccgcaactggattctgccggaaatgccaggattgataactgatttcgtcatctctcttgatgaccgttatctctactttgtaaattggcttcatggcgatattaggcagtacaacattgaggatcccgcaaagcctttcttggctggacaagtatgggttggtggtcttcttcagaagggcagtgatgtcgtctatgttactgatgatggtcaggaacagcagtacaatgtgcctcaagtcaagggtcatcgacttagaggtgggccacagatgattcagctgagcttggatg

SEQ ID NO: 1981 - DNA, 215 bp, Zea mays
  Clone ID: LIB3136-023-Q1-K1-H1
gaaaacagcgaaaatgcatgcaaattgcaaaaaaggaaatgatcaagttttaattgttgggaccactaagtctgctggacggccgatgatgtcaaatggtgaagcagaaagcatcaagggacgcctgattgttttaagcttggaggccgttgaaagtcctcgtgagagcagttcgtttattccaacttttaagtttaatccctcttcacattctg

SEQ ID NO: 1982 - DNA, 432 bp, Zea mays
  Clone ID: LIB3136-023-Q1-K1-H10
catcttccttccgcggactagttttttctgaagattcggcgatggcggcgacgatccaatccgtgaaggcgcgccagatctttgacagccgcggcaaccctacagtcgaggtcgacgtgttttgctcagatggaacctttgcaagggcagctgttcccagtggagcatcaactggtgtatatgaagctctggagttgagggatggtggctctgactatttggggaagggtgtctccaaggctgtgaacaatgtgaattctgttattggacctgctctgattggcaaggaccctacagcacagactgagattgataacttcatggttcaacaacttgatgggaccaaaaatgagtggggatggtgcaagcaaaagcttggtgctaatgcgattctggctgtgtcattagcctgttgcaaagctggggctagca

SEQ ID NO: 1983 - DNA, 402 bp, Zea mays
  Clone ID: LIB3136-023-Q1-K1-H11
cgcacacgggccgaaactaaatttctccaagcgcgcaatcctgtcgccaaccccggccacggatcggggatgtcgtctgctgcgggccgcgcgccggcgccgacgccgatgggctccgccgatcgctgtaagatcgacgggatcgtggcggcggagaaagccaccaggagctgcgtcgaatgccgcgccaccaccacgcccatgtggcgcagcggcccgaccgggcccaggtcactttgcaacgcctgtgggatccggtaccgaaaaaagaggaggcaagagcttggcctagaccgcaagctgcagcaacaacaaaataatggcgaggcgaagacggatgaagcaaaagacagctctagcaacagcagcagcgggagcagcaacttgcaagtggtgcagaaa

SEQ ID NO: 1984 - DNA, 442 bp, Zea mays
  Clone ID: LIB3136-023-Q1-K1-H12
atgaatactcatctgtttgtatataacatgtaccagctgaaactagatatggctgcactggtccagcaaagcagcagcaagagcagctcccacatcagaagaacctcctcatccactcagctctaggctgctaccaataggaatatgtatgtgaatttaaagccatatatgaccaaggaagaatgggaggaagacgaacaaagctagctagactagactgcagcccctctaatccatggccattcgctgattaatacgataatatctcttatttgttggcttcttctagcttgcttcaatttcctagtacagcagtttatgtagtatttcctagattgttagcgcaaagctgcctttttcacccatggcatccactctagtggtgtccaggtagtgtcgatccaattttagtatagaggtcactcaaacctctctccatgac

SEQ ID NO: 1985 - DNA, 158 bp, Zea mays
  Clone ID: LIB3136-023-Q1-K1-H2
tcgggcatcatcccacctcgcgaacgaggacggcttgtagtaccttgcctaccccgcccccgaacctggcgtgtggcctaccaaccgcagcagcgacactagaatggccgcggggccggcattccttgcgttcttccaacttttcccaatcgcggggg

SEQ ID NO: 1986 - DNA, 318 bp, Zea mays
  Clone ID: LIB3136-023-Q1-K1-H3
tcgggcttcgctccagcgggttcccatatggacaacataagggctctaatgaaacgaaaagggcccagtgtacaccctgcagggatcagtgctactggttattatgttggaagttcttccaacactcagccatctaactctgtgcagccaaatgcaactccacttgctgagccctttcttcgtcaaatacctttaagcattgaccaaagtggttgggatgtccaacacttaattcaccaagaaggatttcagaggaatgtgagagcacgccacattcatagtattccattagtacccagatcagcttcaacataccca

SEQ ID NO: 1987 - DNA, 214 bp, Zea mays
  Clone ID: LIB3136-023-Q1-K1-H4
caaaagtttctgaaagtacagatatagttacatttgctgatgtggctggagtagatgaggcaaaagaagagcttgaagaaattgtggagttcttaagtaacccagaaagatatgttcgtcttggtgctcgccctcctcgtggtgtcttattggtgggtcttccagggactggaaagacacttcttgcaaaagccgtagcaggagaagcagaagt

SEQ ID NO: 1988 - DNA, 307 bp, Zea mays
  unsure (1)..(307): unsure at all n locations; Clone ID: LIB3136-023-Q1-K1-H6
ccgcgcgccggacctgtcgtctcatccaccccccgatgcccctctctgactcccactcgggcgctcgcaccaccaccccgtctcgtctcgtctcgtctcgccaatagaaaagcatgccgcagaaataatcgccaaagcccaaaacagatagggagaggggagagacgccacgcgaggggaggaagaggaaaaaaagcagaccagagagagagagaggtgggaagggaaaaggaaaagaaaaaaaaggaaatccaccgcccgcagngccgccgcgcgctgcacacacgggacttccttcctttccttc

SEQ ID NO: 1989 - DNA, 161 bp, Zea mays
  Clone ID: LIB3136-023-Q1-K1-H7
gggtatccgagcccttcatgggtgccctcctcgacggctacagcgccggcggcggttttcgcgggtcggcacactcgtagacgttattagaagctacggcgcctgcctcgtgaagatcattcgcaaggtgcccacaattaccgatggcattaactttgacc

SEQ ID NO: 1990 - DNA, 300 bp, Zea mays
  Clone ID: LIB3136-023-Q1-K1-H8
gccttggattgtttggccagggatagcacgccgaggaaggtcgacatgtcgtctccgccgccgccggtgaagctgatcggcttcttcggcagcccgtacgcgttccgcgcggaggcggcgctgtgcctgaaaggcgtgccgtacgagctgatcctggaggacctgttcggcagcaagagcgagctcctgctccaccacaaccccgtgcacaagaaggtgcccgtgctcctccacggcgacggcagggccatctccgagtccctcgtcatcgccgagtacgtcgacgaggccttcgacggg

SEQ ID NO: 1991 - DNA, 423 bp, Zea mays
  unsure (1)..(423): unsure at all n locations; Clone ID: LIB3136-023-Q1-K1-H9
caggcgcgtcaggaagcgctgggacgacctcctcgacaagctcatctacgaccatgcggccgggatggcaacccatcaggacgaggacgatgataaggacttcatatacgtattgctgtctcttcagaaggagtatggcctcaccagagaccatatcaaggctatcttgatagtaagtaaatagtgccttatttatttatatatatacatcatatatatatctttgtggttcgaggccgccgcccgccggaaccaatgaccaccattatatcgcaggacatgttcgaggccggaaccgacacctcgtacatgacgttggagttcgccatgacggagctcatacggaagccacacctgatgaagaagctgcatgaagaagtgcggcggaacgtgccggcggngcacgagatggtcaccgaggac

SEQ ID NO: 1992 - DNA, 339 bp, Zea mays
  Clone ID: LIB3136-024-Q1-K1-A2
aaagaataccaccaattggttcctatacttgaaaacacaacaaccctagtaggaaaaaactgggggcgagcacatcaagaataatgtgcaataaacgaaaggatgcacccaaaaatcaaatacaacgccattccttgatgggcttcaaacattattagtcttgtacaaggcgcaaaaggatgttgatgaagtgtggctataaattcttaaaaaaacatgacaacactcgcgaccgctggatgttcatgagaataaatgcaaaaaattactcaaacaaacccttatatcgggcctattaaatgtcaaattggacaaaactcaattccaagaactttgggg

SEQ ID NO: 1993 - DNA, 410 bp, Zea mays
  unsure (1)..(410): unsure at all n locations; Clone ID: LIB3136-024-Q1-K1-A3
gtcggataacgaaactgccaatagcttcagggtgagggttgccactatcttggacgagaaggtgaaggacctgggcgggagccaaagcgccagtgagggtgacgaaccgtctggcccaagtctggacgatcgtctaaccccgaccccgatgaagttcagcacagcgcagaagatggggagagccacggaactgaacgagctgctgggtaagctgacaggagcacggagcgaggacgatctgaagccttgccgtgatattgccgagcagctgtttgggaaggaggacggctcctctgttggcaattcgaacagagtggatacggagactgagccgggcgatcaggagtcagctgcagcagtagcacggcgctattccgtcccaacgctgtgcagcangatggaagtgggtg

SEQ ID NO: 1994 - DNA, 392 bp, Zea mays
  Clone ID: LIB3136-024-Q1-K1-A7
cgaaagatgaggtcctgcctgtgttcctcagtattgttaatcttccaatagacaaggttcaaagtaccatttcccgaatcttgcagggatcacctcggaatggcccttcacttgatccatcagaaattttaattgcaattcatgtaatagctcctgataaggaaggaataccactcaaaaaggttatggatgcatgctcttcttgctttgagcaaagaacaatatttacccagcaagttctggcaaaagcactaaatcaactggttgaacagattcctcttcctttgctattcatgaggactgtcatgcaagcaataggtgtttttcctgcattggtggattttgtgatggagatcatgtcacgccttgtgagcaagcacgtccttgattct

SEQ ID NO: 1995 - DNA, 407 bp, Zea mays
  unsure (1)..(407): unsure at all n locations; Clone ID: LIB3136-024-Q1-K1-A8
gttggattatcagctcccagagactaataaccataataaggtgacaaaggcagaagcgatgaaccagtcttggtccagaccagcagcagtaaggagcaatgcaggaaatcatcttgccaacgacctgaacccccgtgtacctgaccttgccgagaagctgtctcagttgtcaatgggccccaacagggtgtcgggtttgggttccgagaggtttgttagaacccatgagaacgctgccaagcgccccttgcccgtgggatccagggcgtggcatggtccagctgacccctttcggcgcccatacgagatgccaggtgatagaactctccttccaaggaatctcgttcgctgaggctgaagctctaagcaagaaacatgtccaacgctcgctctcttncgagctagtc

SEQ ID NO: 1996 - DNA, 420 bp, Zea mays
  unsure (1)..(420): unsure at all n locations; Clone ID: LIB3136-024-Q1-K1-A9
cggccgaantccggggcgcccacgcgtgcgtccgcccaccgnctgtgccgtccaaccgcagtaaggaggaaggagcaagaagatgccggcggggcacgggctgcggtcgcggacccgcgacctgttcgcgcggcccttccgcaagaaggggtacataccgctcaccacgtacctgcgcacctacaagatcggcgactacgtcgacgtcaaggttaacggcgccgtgcacaagggcatgccgcacaagttctaccacggccgcaccgggagcgtctggaacgtcaccaagcgcgccatctgcgtcgagatcaacaagcaggttaatggccgcatcatcaggaagcggatccatgtccgcgtggagcatgtgcagccctcccgttgcacacaggagttccgtctgaggaaagccaagaatga

SEQ ID NO: 1997 - DNA, 398 bp, Zea mays
  Clone ID: LIB3136-024-Q1-K1-B1
ggcgtaccatccgctcgatggccgcaatctggatggtaaattcatcatgatgcagattccaaagtacgcgcgtcatgctcagccaatgcggaaaagaagggtttaagatgtggttgacaaatcacaagacagatcaagaagccgcagtacaaggccaaggcgcagcgatagagatcatataaaccaaaggcacagcacgagcacagaacggcatgtcctggatagagacaggggctatcgacatctgagcagaagtagaaacctaagtcttagttcaagccctgacaacacaactcatcatagagcaagagatgatgataagcgcacagatcattagtcagatcacgatcaggaacacgaacacaagtagaatccaatcatactatagagctttacct

SEQ ID NO: 1998 - DNA, 412 bp, Zea mays
  Clone ID: LIB3136-024-Q1-K1-B2
cggacgcgtgggctcgcctgcctctcccccgccgcgccgccacttcccctctcccgtcaggtccggcttccgcgcgaggtcgagctagcgtttggagttctcgagacctgctgtgatggcgacagagcaagcggcggagaactacacggtggaggacctcgtggccctgaacccctacaaccccgacatcctcaacgacctcgagaagttcgtcaatgagcaggtctcatctcagacatataacttggatgcaaatctcagccttcttcgcttgtaccagtttgagccagaaaggatgagcatacagattgtggcccacatactgattaaggctctcatggcaatgccagcccctgacttcagtttgtgcttattcttaatccctgaacatgtgcaaatggaggagcaattc

SEQ ID NO: 1999 - DNA, 411 bp, Zea mays
  Clone ID: LIB3136-024-Q1-K1-B3
cgtcattgcaagtgagatcctactctatgtcaaacagtatgacaacttggtcaagacagggtcctttcttttgaatgagtacaagcagaaggatcacaaatctggctgcattaccgtcactgacaaatcagggacacaaatatctgcaaaaccaccggtgtttctaatgagctggcgcagaagaatcggcaagggtcatcaatcactcttcttcgacaggtgtgagaagacgggcctgcaagtgcagcacctgggtgatcttgtgtaccttattagcaataaacaagacgcggattttgtggaaacgaagtcagacggtggcagtagtgaggggatgattttttgagtaggttttgttaagtaatattttgttcaatttcccccaaactcttgatttttttggttctctga

SEQ ID NO: 2000 - DNA, 411 bp, Zea mays
  Clone ID: LIB3136-024-Q1-K1-B7
gtatggatgtacaggcctctagttcagcccaacctaagcaagatcttaatattgggaaatcctgttcaggacagaaaatttcagatagttctattatatggagaactcctgtggattttccagatgcaaaaccagaaatattgcggaggacgcggtcaatattacataaactgaaggaacagatcagtgacggtactccagttattggagctggtgctggcacaggcatatctgcaaagttcgaagaagctggtggggttgatcttatagtgttgtacaactctggacggtttcgaatggctggaaggggctcactagctgggctcttgccctttggtgatgcaaatgacattgtacttcaaatggccaacgaagtgttgcctgtggttaaaggagttcctgttcttgctg

SEQ ID NO: 2001 - DNA, 148 bp, Zea mays
  Clone ID: LIB3136-024-Q1-K1-B8
caagcagttgagaactacactgttgaagaccttttttcccttaaccactacaaccccgacatcctcaacgacctcgagaagttcgtcaatgagcaggtctcatctcataaaaaaattatgaagaaggtcttttccttcttctcttgta

SEQ ID NO: 2002 - DNA, 400 bp, Zea mays
  Clone ID: LIB3136-024-Q1-K1-B9
gtcatttaaggttgaagttggaaagaatgttgttgttcctgcccactcaaaagtttgattacttcctcagccttcaaatgaagatagcgatgaagaacttgagtatgctgacactaactctggaattgcagatagtccaccattttccagtatgaggagtaatggtgatcaagcaactgttccttcagaagaagatgagttgggaacatccgagactggcacctgtggtgttgtcggttacatatggacaagtgttgatagtgggatcatggaagaatggagacaatcaattgcccctattcctaaagaaaagcttgaagagctgcagcatgctgtgcctgatgatgataggtcagaagatgaatccaacaatccaactctaccagataaagatgattct

SEQ ID NO: 2003 - DNA, 258 bp, Zea mays
  Clone ID: LIB3136-024-Q1-K1-C1
gtgttttggctgcctttaaatgttaacgttgctttaaacacggagtttactgaaggggatcgtatgagtttctccacgcccgctagggtactagcattagcaaatgaaaaagcaagaatgcctgctagcatgctctgttagcttttcttttgctaacacacttgtgtcacaacctttctgtacctgcttcattgattaatctagtgactagtcagttattggttcaaaaaaaaacaaaaacaaacaaaaaatctgctg

SEQ ID NO: 2004 - DNA, 292 bp, Zea mays
  Clone ID: LIB3136-024-Q1-K1-C2
gaaaaaaacgcgacccacgcgaccagttttgctacctaaaacttaactatctctttacacacagtagaaaaaagggacggacgtttttttcacacgccaagtgcaccacatcagcccataaaaaaactcaccctgccaaatgctctgaaacttcacatactctaacaactctccccacaactttcactacccgcttcatttattaacgcagttcctagtcaacatataccttcccttctctctcatactgtcttctcttttgctgattattgagcacaaccagatctttatc

SEQ ID NO: 2005 - DNA, 399 bp, Zea mays
  Clone ID: LIB3136-024-Q1-K1-C7
ggatgactgactgaccacactagcgcagcgcgcacaggagcaaaggggggcatccgctatcgcgcgcgcgccatggccaccaggccgggccctttgactgaatggccatggcaaaggcttggaaacttcaagtacttggtgatggctcccgtggcggtccacggcgcgcggcgggtggtcgcgcggggctggggcgacatcgacctggccttcgcgctcatcctgccgtcgctgctgctgcggatggtgcacaaccagatctggatcagcgccgcgcgctaccagacggcgcgcagcaagcaccgcatcgtcgaccgcggcatcgagttcgaccaggtcgaccgggagcgcggctgggacgaccagatcatcctcaacggcctgctcttctacgttggc

SEQ ID NO: 2006 - DNA, 397 bp, Zea mays
  Clone ID: LIB3136-024-Q1-K1-C8
gatggacgagagcgtggtggctgagagtccaaggaacatggtcttgagcacaatcaggaagatgaacccacatctgttcattcatgggatcatcaatggctcctacaacgcacccttctttgcgtctcgcttccgggaggccttataccactactccgccatctttgacatgctggagacgaacatcccgagggacaacgagcagaggctgctcatcgagtcagcactgttcggtcgagaggcaatcaacgtaatctcctgcgagggcctggaaaggatggagaggcccgagacatacaagcagtggcaggtgaggtatcagagagctgggttcaggcagctcccgatcaaccaggacatcatgaagcgtgctcgcgagaaggtcaggtgctaccac

SEQ ID NO: 2007 - DNA, 410 bp, Zea mays
  unsure (1)..(410): unsure at all n locations; Clone ID: LIB3136-024-Q1-K1-C9
gcggcgcctacgtcagggacgtgttcgcgcgccggatgacgctcaccaccatgaagcgggggttctggatgacgggcgactacaagtcccacccggacgacaagtacgaccccaacgccgtccccgttgtcgccaacatcagctaccaggacgtggtggccacgggggtctacaaggaggcggcgcgccttcagggcattcagggcgcaccgttccggggcatttgcgttgccaacgtcaccgccgacctgtccaagttcaggaagtacccatggaactgcgccgacatcgagggagtgtcggccaacgtcagccccgcgccgtgcgacccgctacagggcgcgcacgacggcgcatgcccgttcccgaccgacacgctngccatcgaccaggtcacagtgcagcagtgc

SEQ ID NO: 2008 - DNA, 264 bp, Zea mays
  unsure (1)..(264): unsure at all n locations; Clone ID: LIB3136-024-Q1-K1-D2
gacccacgcgaccggcgcagcctactttattgaccttttctttccctatatgacgctcaccaccatnaaggggcgcttttttattactcgcgactacaatttctacccatactacaattactaccccaactcccttcccgatgtttccaacatcatcttcctatactttttccccacccgagtctacaattaagcagcccgccttcatctcattcataacacaccgttctacaacatcttcttttccaactttaccatctacct

SEQ ID NO: 2009 - DNA, 391 bp, Zea mays
  Clone ID: LIB3136-024-Q1-K1-D3
agggaggcgaatgtccttttgctcttgtgattaaataaatgcatggcgcgcgcgtgcagggtcgagcaggtggacctgagcaggaggcatgggctggccaaggtggtgggcacggtggtgagcatcggaggggccaccgtcataaccctgtacaagggcctgccgctgctccatcacagtgatgtgcacgtcaagtcgtctccggtgacgctgtcctcctccagcggcagccccatcctcaactggactctcggctgcgtcttcatcctcggccactgcctctcctggtccggatggatggtccttcaggtgccggtgctgaagaggtacccagccaggctctcggttctgtcactgacctgcatcttcgggctcctccagttcctggcca

SEQ ID NO: 2010 - DNA, 408 bp, Zea mays
  unsure (1)..(408): unsure at all n locations; Clone ID: LIB3136-024-Q1-K1-D7
ctttggtgtatgtctgtgtacttcggcaatcaatcagttgacgaaaggaaggaatgaggaggaagaggactcggagctgcanagcttggctgcagaggtactgctgaagaattacaagcagcaggctccatcaaaggcgccccttatcagcagcatgttgaagaacatgaaactcagctgataccaaccagctccacacattcagagtggcctgatttgatagatagttaagttaaattgatgtggcttaatatatgcttgtttttttatatataaaaaaattgtggcaccaacattgtgcaaggcttaaaagtagatgctcccaaggccatgggttgtacaacacctgcttgcttacctcgaaatatgcatggcttcttcagtggatgttctactatatagatcaac

SEQ ID NO: 2011 - DNA, 404 bp, Zea mays
  Clone ID: LIB3136-024-Q1-K1-D8
cgattctggtggcaatggcgaagagcgagggtccggcgatcgggatcgacctcgggaccacctactcgtgcgtcggcgtgtggcagcacgaccgggtggagatcatcgccaacgaccaggggaaccgcaccacgccgtcctatgtcggcttcaccgacaccgagcggctcatcggcgacgctgccaagaaccaggtcgccatgaaccccaccaacaccgtcttcgatgccaagcggttgatcggcaggaggttctctgatccgtcggtgcagagtgacatgaagctatggccgttcaaggtcatcccagggcctggtgacaagcccatgattgtagtcaactacaagggcgaggagaagcagttcgctgctgaggagatctcctccatggtcctcatcaagatg

SEQ ID NO: 2012 - DNA, 289 bp, Zea mays
  Clone ID: LIB3136-024-Q1-K1-D9
gtcattccaagcctttcatgaaacaagtagatagacaataggaagtaggaaaagcgcgggatatacccttcaacccagttttgggcgaagataaggcgcatcgtactttagctgtgacagtgaggagttcaatgtggtcattgggccaggaatctagtggttgctgtcggtcgctcgttctagatggattatgggctatggaacctggagtgccgtggtgctgcaaacatctcatgtttcattctgaaatctttttagatgtataatacgtagtagttgaattttctgt

SEQ ID NO: 2013 - DNA, 413 bp, Zea mays
  Clone ID: LIB3136-024-Q1-K1-E1
ggccgccctttttttttttttttttttttttttttttatacggaaccttttacataggcgagcagtacagtgggggtacacagtacaacataatactcaaattgacctaatttcaatagaggtaggaaatgtctatcttggtcttggacagttagtcataagtgaagaatagactgcttcagtctcacaagtggtaggtccaaaaaaatgatcatatgaattcttaatttcactataataattgtgaaattaacaatgaacataggtacacgttctgtggacctcacttgcccaacaatttgcctaaaaaccgcaaacttttggataaatcaacagtgaggtccttctatgtacaccattttacaaagtgaaatatagccaaacaacaacatgattagattcaacaaaactgg

SEQ ID NO: 2014 - DNA, 407 bp, Zea mays
  Clone ID: LIB3136-024-Q1-K1-E2
ccttcttctcccagctgtcataaagttaggctgggaccccaaggatggtgagagtcatctggatgtaatgcttagatcactgctcttgactgcgctggtcagacttggacataatgaaactataaatgaaggagttcggcgtttccacatcttctttgaagacggcaaaacttcccttcttccaccagatactagaaaggctgcatatcttgccgtgatgcgaactgttagcacctcaagcagatccggttttgatgctctccttaaaatctacagagaagcatctgaaccacaggagaaatcacgtgtcttaggctccctgtcttcatcaccggatcaggatattgttttggaggcattgaactttatgtttactgatgaggtgcggaatcaagattcattttaca

SEQ ID NO: 2015 - DNA, 403 bp, Zea mays
  Clone ID: LIB3136-024-Q1-K1-E7
gcgacgggggagttcttcgcaaatatatcccgcactggatacacgcggcgcggccaagcaagtaagcaacccaaaccctccctcccctcccattcgattcttgcctcccacgccgccgccggatcccgcgatggccgaccctcggctgtaccccacggagtccgggtccgacgaccggcgcgatgccgcctatcccggctccgagcgccgcctctacaacccgtaccaggacctcaacctcccctatcggcagctctacgaccttcccacctccccggagttcctcttccaggaggaggccgtcgcgcagcgccggtcctggggcgagaacctcacctactacaccggcgtgggatacctcggcggcgccggggccggggccgcgctggggctccgcgacgcc

SEQ ID NO: 2016 - DNA, 404 bp, Zea mays
  Clone ID: LIB3136-024-Q1-K1-E8
ccgactcccagccgtcgtctgctgcgtactccgcctccagtttggtctgtttcttgcaagttgctcttgcggtagttcccccaactgtcaccatgcagaacgaggagggtaagactgtggacctctatgttcccaggaagtgctcggccacaaacaggatcatcactgccaaggaccatgcctctgtccagatcaacattggccacttggatgcgaatggcctgtatgatggtcacttcacaacatttgctctctctgggtttgtccgtgctcagggcgatgcagacagctccttggacaggctgtggcagaagaagaaggctgatatcaagcagtagattttacatctagtttaccaagaattggacactgccttagctatgttttgaattcatgtcactata

SEQ ID NO: 2017 - DNA, 396 bp, Zea mays
  Clone ID: LIB3136-024-Q1-K1-E9
attatatcatgtagttttcttgttgagcaggtctggtttatgggggagctttctcatatctcatcagagtttgacaatgttgttcaagttgtgctggaaaactacaaaccttagaggatgcaaaatgatgatcagggtaccaatgatgctgacagccagttggtgcaggaagaccagaaggctgagcaccccccttcccctttcattatcactgcggccccctcttgggagagcatagttaatgttaaaggagaagtcagcctaccagaggaagatgctagagatcccaaattttggtccagaatctgtgtgcacaatatggccaagctttctagggaggcaaccacattccgccgcatcttgggatgtcagttattgagtccctctctttggata

SEQ ID NO: 2018 - DNA, 155 bp, Zea mays
  unsure (1)..(155): unsure at all n locations; Clone ID: LIB3136-024-Q1-K1-F1
gngaaatcttctgaacggccatgaaccgatgcaaagggaaatcatattctcagtccaccggagaataagcaacggtcattattcgagcccaaccccattatgtaccaacaatgagaagatccagatatatacatcctatgtctcctgatcttctc

SEQ ID NO: 2019 - DNA, 405 bp, Zea mays
  Clone ID: LIB3136-024-Q1-K1-F2
acttgttgaaactctagtggcaaagaccagggcatgggaggagaaccgtggtctggcttgtatgtatgatggtgtacctcttctagctatgttggatgagtatgttatgctcaggcaggaaagggaagaagagaagaaaagaacgcgggaacaaaagcgctacgttgagcagcaattgaacactgatcatgaagggccattcggatcgcgagtgagtccaaaccggcctgccagttcgaagaaggccattggcccaaagttgaatggcagcgtctcaaacggcactcctccaaacagaaggctctcaatcagtggccaacagaacggtggtggccatggcgtcaggtctggagggaaggatagcaagaaagacacggcgaagacagcatctcctgggaacagtgc

SEQ ID NO: 2020 - DNA, 400 bp, Zea mays
  Clone ID: LIB3136-024-Q1-K1-F3
caaaaagttttaccgacagccaactagaactgtttgattatcggcatggcgtcatgatcttgcatcttctaagcacactcatgtttgtgccttcacttgttgcctggctacagagaattggtatgggacaaaattttccctggttcattgattctgctatttgcgttggtgttatactgcatggactttttggatcccaaccaaatgtcagctgctgcatatttttcaagttacctggcaggagaggccgtgaaattggtctgagtttcctctacctcgtgggtggctattattcctttgtcagctccatggcgttggcaccttatagggccttgtatgccatggcgaccattggttatatatgtttcatttccagaattctcgagagaagaaatatggt

SEQ ID NO: 2021 - DNA, 355 bp, Zea mays
  Clone ID: LIB3136-024-Q1-K1-F7
ggaaagcttgccataaacattttatgattttattgggtgtttataaattctatgggtgcatgcctgaacctttccttctcgcagatgatatcacaatatttagcaggtcgtcttgatgtgaagttggacccccttcatttgagaaaggttagctgggatatttgtctcttgagccaaattgcaagaattgcttgtctgggcaaaaagtgatgatataggaagagagatattaaattgctaaagatgttattgatggctatgttgttatggtggataaattaccaatagatgacgggttagtgaggatagaggcctacagatcttgcatatatcatcctttgaccatgagaggtat

SEQ ID NO: 2022 - DNA, 404 bp, Zea mays
  Clone ID: LIB3136-024-Q1-K1-F8
attttgtatggaaaatagataattttgctgcaaacattgaaactgtgacaaatttaattaatgatagtttagagaagcccgcccatattaaataattttgaacgcaatgttattagtaccagattgtcaagccaatgtcagttactttactttgcagtttcaggcacagtgttccagaaactataataatttgtctgtgactctggtcattgatgattcataaactagttatttgctatttcattgaatgatgtcacatgcatgagcctggcaaagaattctaaccagcatgaagtttgtcaaactctacttctgttcaatatgaactcccaaattgtaccagacattgtttgttctgtgcagttggaggcttttaagaaacaattgatgaaatcattgagtga

SEQ ID NO: 2023 - DNA, 410 bp, Zea mays
  Clone ID: LIB3136-024-Q1-K1-G1
cggtcaccaagtcctctccggatggcaaggccttgtgaccttccgccggtgcggcgggcagcggctcttctcctggcatgcgcgcttgctctgctcgcggtgcagctgcggccgtgcagagcccagcagcagcagcagcctccgtcgccgggatactaccccagcggcatgttcaggccgctgggcttctccgaggcctaccgcacgctgtggggcgcgcagcaccagacgctgtcgccggacggcaagtccctgacgctctggatggacagcagctcgggcagcgggttcaagtctgcgcgggcgtaccggaacggctacttcggcgcgtccgtcagggtgcagccggggtacaccgccggcgtcaacaccgccttttacctgtcgaacagcgaggagtaccccgggca

SEQ ID NO: 2024 - DNA, 318 bp, Zea mays
  Clone ID: LIB3136-024-Q1-K1-G7
gcgtgcaccaagaagacagtcgcaagatgggtctgctgataaagtagtggtgatcatcgaagcaacctccccggtggtggggagccttcttggaccaccgacccctgttcctggcgcccaaaactcacccattgatgtggaggccatcgaagatgaagttcaggcagtatctccctcgcgagtgcccccaccgaggagggacaggagaaccaggaaggaacctataacagtggttgacttggaggttgacgctagccaggaagggaacaaacgccagacggttgtggcagtagatcacctctctcccgattggggagc

SEQ ID NO: 2025 - DNA, 129 bp, Zea mays
  Clone ID: LIB3136-025-Q1-K1-A1
accgcgaagatcttgcggggcctccttttcccaactcgtcactgagccggtcgtgccctccactcccgggccgcccaaccaattattcatgcatccatccagcagcaccaccccgctgcggcgatgtgc

SEQ ID NO: 2026 - DNA, 335 bp, Zea mays
  Clone ID: LIB3136-025-Q1-K1-A10
cggagcgccagcggcttcatccgatctccttctcacctcctcacctcaggcgcacaccgatgactctcttccctccggcagcagtccagctcacacccaccgccccaccccttccactcaaatccagggacatcgcagatccaccggctctccgatccgctcgcctccgcacccgcccgatcggatcccgcaggtgagccccctccccctccattgtccccggcgcgccgtgctccgctcgctcgcatctgctgctgctactcatgctgctggtagggtttgtgcccgccacgagttaaatgggttacgatggggcccgtgaaaggaccagggac

SEQ ID NO: 2027 - DNA, 107 bp, Zea mays
  Clone ID: LIB3136-025-Q1-K1-A12
attgttttgaagagctctgttctcttgtcgatatggatctttgttattcctgtgctgattggactcctttttgagctgctggtcatcgtacccatgaaggtgcctat

SEQ ID NO: 2028 - DNA, 284 bp, Zea mays
  Clone ID: LIB3136-025-Q1-K1-A2
atttccgtcacaactcacaacccgagccccccaaacccgaagcagcaggagctcccctgaccttgctgcgcctccgatcaaggaaaaggaagatgagctactacggccagcagccccccgtcggcgtcccgccgcagcaaggctacccggggaaggacggctacccgccagcggggtacccgccggccggctaccccccgccggcgcaaggctacccgccgcaaggctacccgcagcagggctacccgccgcagtacgcgcagccggcttcacagcagcagcag

SEQ ID NO: 2029 - DNA, 375 bp, Zea mays
  Clone ID: LIB3136-025-Q1-K1-A3
aagaaatagcactgttcttgaatgcatacatgtcgatttgcatggcaagggaatatcaaatggattgtgctacatagattcgacaacggtaaacttgcaggagctacctttggaggttgggcggttcaaagaagaactgttgttaggactccatgatatcagcaggaagactgaccttgttattgcggtgcataacctagcacaccgaattccacagtatcaacggtccaatacttctcagcctcagcctgctctttcacttctcttggatgaagctaaggcgctaagcattccttggattcttgcaataaccaacaaattctctgttagtgcgcatgagcagaacagattgatcagctcatctatggaagcata

SEQ ID NO: 2030 - DNA, 369 bp, Zea mays
  Clone ID: LIB3136-025-Q1-K1-A7
ctcgcgcgtgcagggtcgggtcgggtgtgcggcgcgcgcggcggagggcgccggtgggccccggtgcggcccgtcgccactgctgggcgcgttcgggatcgcggcgcggtgcaacgccacgtcgtcttcgtccgcggtgtccgaggccaccggcgtccacacagtgcccccgacggagcccgtggtgtcggccgagtggctccacgccaacctcaaggaccccgacgtcaaggtacttgatgcctcttggtatatgcctgcagaacaaaggaatccattacaagagtaccaggtggcccatatccctggtgctttgttctttgatgttgatggaatatccgacagaacatctaggttaccacacatgct

SEQ ID NO: 2031 - DNA, 431 bp, Zea mays
  Clone ID: LIB3136-025-Q1-K1-A8
ctcaaactgaggcctactggggcaatgttaacccgattggtgttaggagttgttatgatgagggtaagcgtgtagcagagacattgatgttcgactatcacaggcagcatggcattgaaatccggattgccaggattttcaacacctacgggcctaggatgaacattgatgatggccgtgttgttagcaacttcattgctcaggctgtgcgcggtgagcccctgactgtccagaggccaggaacacagactaggagtttctgctatgttgccgatatggttgatggtcttattaagctgatgaatggaaacagcactggaccgattaacttggggaacccaggtgaattcaccatgctggaacttgctgagaatgtgaaggagttgatcaacccagatgtgacagtgacgatgaccgagaacactcctgat

SEQ ID NO: 2032 - DNA, 275 bp, Zea mays
  Clone ID: LIB3136-025-Q1-K1-A9
ctcggccaccgcagcagcctggccctgccccggcccccgggcgtggtgtcaggtctcaaggtgtggtggcgctttctcctctccggcacggtggccgcgtcatcccagctctcccgcgcggcggcggcagccgtttcctctcctgcgctcctcctgccgcacacagccagaaaattgcagctgaagtttgtttgaggataagcgacagctttgcgagtccttcgtgttgaaggagaaattgtagctgaagtgaaaaaaaaaacagcagggaacaa

SEQ ID NO: 2033 - DNA, 225 bp, Zea mays
  unsure (1)..(225): unsure at all n locations; Clone ID: LIB3136-025-Q1-K1-B1
cggacgcgtggggcctgccagcctgcagataccatagaaaaaccgcagccagtcgatcgcgtagcggggcccactcgccgatcaaccagcangatggccaccgagacaacgaccgccccggcgccaccgggcgaccccttcttatcttcctccggcggaggcgggggccgccaccccaagccgttcaaaaccatcggggttcaagcagttgaacggccaattcaa

SEQ ID NO: 2034 - DNA, 319 bp, Zea mays
  Clone ID: LIB3136-025-Q1-K1-B10
gctccgcctccgggacccacgtccggtacagccgcttcgaggcgcagctgcgcgcgctccaggcggatccggccacgtggacgtccgatcccgaggacgccgaggacttcgccgcgtggagcaaggggtttatcctggacgagagggaggaggagatcgaggccctgtgctacgacagcgacgcgctggaagccatggcggacaggctcgttccggacgccgtgccccgcgaggtgttctggccgaggtacttttaccgcgtccatatgctgaagcagcatgaggacgccagggcgaatctcgtgcagcgtgtgattgc

SEQ ID NO: 2035 - DNA, 429 bp, Zea mays
  Clone ID: LIB3136-025-Q1-K1-B11
agacagtccttacctgaaaaatttccacatgtacaacccttagcaattgacctggtggaaaagatgctgacttttgatcctagacagagaataactgttgaaggcgcacttgcacacccttacttggcatcacttcatgacataagtgatgagccaggctgctcaatgcccttcagctttgacttcgagcagcatgcattgtctgaagaacaaatgaaggatcttatctaccaagaggctcttgcattcaaccctgattatcagtagccaaagttcaatttcagccggtgattggcttcattgacatggagattttttccccacctgatgtcagtgcaaaaagtcaccaactccgattgctagctgtaaataactgccttacctgaagatactccattcctctgattaaaagctggtgacggtgtcatt

SEQ ID NO: 2036 - DNA, 431 bp, Zea mays
  unsure (1)..(431): unsure at all n locations; Clone ID: LIB3136-025-Q1-K1-B12
gcgaagacactgggtcgtccgggtcaatcggcagcttgaacaagccatggcggcgcaccggccgaacgccgcggcgccgctgctcgccaagctcgacgccaccgccacgccgccggcgaagcgcaacaagtaccccttcttctgcgccgtgctcgcatccatgacctccgtgctcatgggctacaacgtcgcggtgacgagcggcgcgcagatcttcatggcggaggacctcgggatgagcgacgcgcacatcgaggtgctctcggggtcatcaacatatactcgctcgtcggcgcgctgctgcaggctggacctacgaccgtctcggccggcgcctcaccatcgtcctcgccaacgccttcttcctcgtcggcccgctcgccatggcgcttgccggcgggtacactntgctcatggtgggccgcttcatc

SEQ ID NO: 2037 - DNA, 445 bp, Zea mays
  Clone ID: LIB3136-025-Q1-K1-B3
cagatgactagaatgaacgaaaagattgatgagttgaagtcccagatggaggagctgaaagcagacttgaacaaagcaaagaaagggaagcctctaggctatgattcagaggggaagccaaagaggaacttggctcctgaagcgattcaaaagaaggttgcaacacttgaaggcaagatagagaagatggagatggataagaggataaaagaggatctgaagacagttgcacttggaacgtcaaagatcaactaccttgatcctagaataaccgtggcatggtgcaaacgccatgaagtccctattgagaagattttcaacaaatctctcctcgcgaaatttgtatgggcaatggacgttgacccggaattcagattctaggagaccattggctaccatgtgccagccagtttggtccagtttccagcccttctccctggacact

SEQ ID NO: 2038 - DNA, 440 bp, Zea mays
  Clone ID: LIB3136-025-Q1-K1-B4
ccgcaaacaaacagaatccacaagggaggcagaggcagacccgacccgaatcaccgccgtcgtcgtcgttgagaagagacaaagtggaggagtaggccatgtccaacgtgcccacctccctccgcgattcctccctcaccgtcttccgcctcgccatctccagctccgacccctggcccttctcttcctgcctgtaaccaccatcagcccccggccggccggcttcttcgtcctccttcctgatcgagcaaccaccacaagcaagcaaaaagaacaccgagctccttcctggtgaccatcatgcccggcaggcatcatcatcatcagcagcagcagcagctggcggcggtggcgcccaaagggtgcgtgacggtgcgcgtgggcctggagggcgaggagcagcgcccgttcgcggtcccgctgggccacctcaagcaccc

SEQ ID NO: 2039 - DNA, 448 bp, Zea mays
  Clone ID: LIB3136-025-Q1-K1-B5
ctcactgtccttgtcactctcactggctcaccgtcacgtcaccgcccggatcgcaccgtacacacaaaatgcgaaggccgcccaagcccaagcgagtggcggcggcggccaagcttcccctccccctcaccgccaccttcctgtccctcctcctcctgccgctcggcttcgtcgtcatccacagggcattctccggcgtcgtcttcgcggcctcgactcccgccgtcaagcgtgttcttcttgagtactacggccgtgccagtgccaatgtcattgccagtacttgtcgcttattctctcggtgtttttttattctttttttttcttgttactcttttttttggtcttttggttttttatttcttttttttgtatttttttatattatttgtgcttttttttatctttctctattttttatttattttatttctctcttttttttttt

SEQ ID NO: 2040 - DNA, 377 bp, Zea mays
  Clone ID: LIB3136-025-Q1-K1-B6
cattaatgttaccgacagccagatcccactgactgggccaaactcaatcattggcagagctgttgttgttcacgctgatcccgatgatcttggaaagggtggacacgagctcagcaagagcaccggaaacgctggcggccgtgttgcttgtgggatcatcggactccagggctgaactgaaacgaatggtcgttggacttcgggggcgcctgggagtgccgtcaccagcaggctacaataacatcccgaagacatcgtgaaataataataataagagcgcctgatatgtgatcagtggtgtacttgccattaagcacctgtggcaaccgatgagctgaactgtgttggactgttggataatgctggttcgcctgagc

SEQ ID NO: 2041 - DNA, 433 bp, Zea mays
  Clone ID: LIB3136-025-Q1-K1-B7
gccaaatttagataccagcccaaaagtgaagatcacggtcaggtcgcgaactaaaataggctaaaggcgatcgatcccttggcccatatctccgttgagttgctggttctgctattccactggcttctcctacttgttcaaaattaaataaggagatgattttagcccttataattttttctagttttgtggcttctggcccttagattgaagaaatttggtaaaatgggtcgctcgtatttattgctctgcaaaatacaccgcttcaaactgacctcgttaaaaaggatccttcgagtctgcgcgctcgtcaaaagagatcacgagtaattttagggcacctgacaggtgagtccgtgaatccttgtgccgattctaccttacggtctcaggctcaacgcatgccgtctgtttcccatttctcctccttctc

SEQ ID NO: 2042 - DNA, 435 bp, Zea mays
  Clone ID: LIB3136-025-Q1-K1-B8
cccacgcgtccgattcagaacactgttggtgctggtacaactttgcaaaagataaatgtggccaagtctgactttgatccaccttctcatccaaggaaagctgataaaaaagatgctgaatcaagttcaaagaaagccatttccggacagaagactgctgacaagtcaaatggaagtgctgactcaaagaaacccacaagagagcctcctgaaaataaggagaatcctactgctgcggggaacagcaaaacctctggggagaaaaagaaagtgcaagagaagtcagcaggaaaaacaacagagaaagctccagagaaaattgcagacaaggaatcagagtgcgatatcagtatcctgaatatacaggttggccttatccgtaaagcatggaagcatccatctgctgacagccttttagttgaggagatagatttg

SEQ ID NO: 2043 - DNA, 432 bp, Zea mays
  Clone ID: LIB3136-025-Q1-K1-B9
cgcaactatggtaagacgttcaagaaaccaaggcgtccttatgagaaggagcgtcttgatgctgaactgaagctggtcggtgagtatgggctgaggtgcaagcgtgagctttggagggtccagtatgcactgagcaggatccgtaatgctgcaaggcacttgctcacccttgacgagaagaacccccgtcgtatctttgagggtgaggcgcttcttcgccgcatgaaccgctatgggctgcttgctgagggtcagaacaagcttgattatgttcttgccctcaccgctgagaacttcctcgcaaggcggcttcaaacacttgtcttcaaggctggcatgggcaaagtccattcaccatgctcgtgtcttgatcaagcagcgtcacatcagggttggcaggcaaattgtcaacgtcccatcattcatggtgag

SEQ ID NO: 2044 - DNA, 405 bp, Zea mays
  Clone ID: LIB3136-025-Q1-K1-C1
gaaccagattccgttcccctggacccgatcgagatggagtcggaagctgacagagccgcggcgccggcgccggcagttgccgcggagaccagcgacgacgccatccaggaggagtctccagccacggccccttcctcagacggaaagcccggatcaggggcggcggcggccccggcgccggaggtggaggtgcagctgttccggcgcgggcgtccggtggccgtgttccggtcgcagctgggcgggtatacgcaggaccagctggaggtgggcgacatcctggagcagcacggcctcaagtccgtcttcgccttcgaccctgccgcccgcaaacgcggcgtcgccatccgcttcaaccctcgcaacggccgctccctcctcccctacgcccctggttccacgatc

SEQ ID NO: 2045 - DNA, 430 bp, Zea mays
  Clone ID: LIB3136-025-Q1-K1-C11
cggacgcgtgggcacagaggttgttcacaatgttatatatgacataattcagaaaggtggagatgctgggaaaaggacaaagggtgccaaaaagttgaaactggaaaaagggatccttttggataattatgttcagaggggttctagattagtggattcccaagcaagatctttgttgattcattcaaagcgatcaaaaaggcacatgtctctaaaacaacataagaaatgtggttcatttgatttagatggtacattccacaagtacgacctctataagccaatgcatgagatgtggaaggactatatcagagagcttatggatctgagcccgaaaaagaaatttactgagaaccttctttcagcagatcttcatggggcccttctaatagtggcagaatgcaaagctgcttcatataaaggtgtaaac

SEQ ID NO: 2046 - DNA, 347 bp, Zea mays
  Clone ID: LIB3136-025-Q1-K1-C12
cggacgcgtgggcgctcaccacccctgtctgccgtctgcttatccctggagcagaccggagtaaggccagccaaccaaattgtctatctactgaagggaaggaggaaaaaaaaagaggtaacttgaaactgtcagtctcggcattgcataatcgcattcccaggtcccttcctttcgattccgtaagctgttgtataggacgatggtagggtaggcagagttaggaacatctctattctctgtcggaaaaaaaatcttatttttttaccatgaactgttccgtcgatctaccaggaaactggagccttctgctgttctacttatacagaaattcaaaacgccatgtg

SEQ ID NO: 2047 - DNA, 421 bp, Zea mays
  unsure (1)..(421): unsure at all n locations; Clone ID: LIB3136-025-Q1-K1-C2
cgatctgcaagtctcgctacgtagcagtgcaatacaaaaaaagcagccgcaatggcgagcagcaccatggccctctcctccacggccttcgccggcaaggccgtgaacgtgccgtcgtcgtccgccttcggcgaggcccgcgtgacgatgcgcaagacggcggcgaaggccaagcctgcggcggcgtccgggagcccgtggtacggccccgaccgcgtgctgtacctgggcccactgtccggcgagccaccgagctacctgacgggcgagttcccgggcgactacggctgggacaccgcggggctgtcggcggacccggagacgttcgccaagaaccgggagctggaggtgatccactcccgctgggccatgctgggcgcgctcggctgcgtcttncccgagctgctcgcccgcaacggcg

SEQ ID NO: 2048 - DNA, 328 bp, Zea mays
  unsure (1)..(328): unsure at all n locations; Clone ID: LIB3136-025-Q1-K1-C3
gcggctgccgccagcgtgccgctgctggcgtggccccgcggcggcgaccaccgcgtgaacgccaaggtagcggtgagcggtggggttggggtgtggatggagcactggagctgggacggggaggactggttggtgaccggggaggagatcgcgaagaaagtaaaagaggtcatgtccgacgaagcggtcagggcaaggacgacgaggaccgccgaggaagcggccaaggcagttgcagagggtggcaccagctaccggagcatggaggagtttatttccagcgtcaaagcaaccgtggcgtcttgattgcgtcgtggngctcctgatt

SEQ ID NO: 2049 - DNA, 257 bp, Zea mays
  Clone ID: LIB3136-025-Q1-K1-C4
gaatggaatgaacagtacacctgggaggtttatgatccatgcactgggtcacaattggggtatttgacaactgccagctgaacgcggaaaagtaatggtgccgggataccagaatggagggtccgatcgctctgacctgaaactgatcggtgtatacccactcatacctttattgcctgacacctgtggcgttaaaaagggcgagggcactgctgtcgttcacgtgtcgtcactgctcaacatgatcattgtcacac

SEQ ID NO: 2050 - DNA, 118 bp, Zea mays
  unsure (1)..(118): unsure at all n locations; Clone ID: LIB3136-025-Q1-K1-C5
ccggttccgggaaaacccggcgcgagccacgcgaccgcgngcccagcnacanggcgaacacggagncgncgcgagccaaggcgcggggccagagggcgccaaggcagccgcggacacc

SEQ ID NO: 2051 - DNA, 394 bp, Zea mays
  Clone ID: LIB3136-025-Q1-K1-C6
ggtgggttggcttcttctccccctccggttcgggttcgggtacgtgaggggctccggggttcggtttcatggatgagcggatcgaaatggctgcgtcagatgttgagtaccgatgcttcgccggcggcctcgcctgggccacggacgaccactcattccacaacgccttcagcacctacggcgaggtcctcgagtacaagattatcctcgatcgggagacgcagaggacccgcagcttcggcttcatcaccttcttcacggaggaagcgatgcggaacgccatcgacgacatgaacggcaaggagctggactgccgcaacatcaccgacaacgaggcccagtcccgcagcaaccgcagaggcggcggccgccgctactaccaaggccgatgagg

SEQ ID NO: 2052 - DNA, 196 bp, Zea mays
  unsure (1)..(196): unsure at all n locations; Clone ID: LIB3136-025-Q1-K1-C7
cgnntccggccacaagcagcncnntccttcctcctctcaaactctcgctcgcgccctgcgctcgcgtgacctcgcgtgtcgcattccaaattcgaaaaggagggnngaggaaaggggcaagatgttcaatcgagaggcttcnncgcgtcgaggagcnccccacgtgccggtacgggnccggatggagaatcggagt

SEQ ID NO: 2053 - DNA, 445 bp, Zea mays
  unsure (1)..(445): unsure at all n locations; Clone ID: LIB3136-025-Q1-K1-C8
cgcgccgctgnctcaaggggacgagctcgacatcgtcgatccncgacgatcncgcaacgctcgacttcctggagatggtggcggcccttcttccagccctaccacctcatcatcgtgcaggacggcgacccgaccaagaccatcaaggtgcccgagggcttcgactacgagctctacaaccgcaacgacatcaaccgcatcctcgggcccaaggcctcctgcatctccttcaaggactccgcctgccgctgcttcggctacatggtctccaagaagaagtacatctacaccatcgacgacgactgcttcgttgccaaggacccatctggcaaggatatcaatgctcttgagcagcacatcaagaacctcctcagcccatccaccccgttcttcttcaacaccctgtacgacccctaccgtgaggngtgctgacttgtgcgtggat

SEQ ID NO: 2054 - DNA, 416 bp, Zea mays
  Clone ID: LIB3136-025-Q1-K1-C9
cggacgcgtgggtgcatatctcaaaaagcaagagttcaacagggaacccctatatgcaaaatgttcgcctccgtgggccttttcacaagccaatactaagttcagaaccatcaatcagtgtgcaaccactacaaccacacgaccagtttctcatatttgcatctgatggactttgggagcagttaaccaaccaagaggcagttgatattgttcgaagtagcccccgcagtggctgtgctaggaggctgataagagcggcactgcaagaggcagccaagaaaagagagatgaggtactcggacctcaagaagattgaccgcggtgttcgccgccacttccacgacgacataacaagcataggagtgttcttgactcggcctcgaaaccaggcgagcacacaccgaggtcactctttc

SEQ ID NO: 2055 - DNA, 412 bp, Zea mays
  Clone ID: LIB3136-025-Q1-K1-D1
ccttccctgggtttccagagagaatcaactgatgaacctctgagtgttgacacaaatggaatggcaaatggtggaatatctggaagtgatccggttaacagtgttgaaaatgttcctacttctgggaaggacttgacattggaagcgttattcggggctgcatttatgaatgagctccactcgaaagatgcaccagtttctattcgaggagccacaactggtggtcctactgagtttgcagagatgggtaaaactctgttgtcatctagccatgaaggatactaccctgttgaacagaccgtacacttcaacaatactaaagatgctgctgtccgtagagaaccaggtattgagcattcagcagtacctggtctaagtcaggggagtgctagttttgacaagaaaggaatgg

SEQ ID NO: 2056 - DNA, 410 bp, Zea mays
  Clone ID: LIB3136-025-Q1-K1-D10
ccctgacgctctcggtctctccctctctctccccaaaacctaaaccctagagccgccagacgccactgtccgtggagcagagcaggctgcagcaccgccgagccggtgtgcggcgtgccggcgtgtgccctccgtcgtctgcccgtctgcccgtctgttcttcgctgtctgctcaagacacggtgaacagtctgttcttcgccgtctgctcgtgttccccgacggcgccctagccctgttcggctgtccggcctccggcgcccacttgcccatcgccggtcggcggctcgcctccatggaagcccaagaaccggatgggcacgaaggtcattcacgtccgccaataccatgaatttctggatcaatgatcaagcgcacgagcacgaggaagaagcttgtgccagcagcta

SEQ ID NO: 2057 - DNA, 324 bp, Zea mays
  Clone ID: LIB3136-025-Q1-K1-D11
cggacgcgtgggttttttttttttggacccgacaccactacccatgctgattattctatcgcaacggtaccacacgcacacttggcatgccaagaggcgctctgcagtttgcaactatggaatggtagcacaaaagaggaggaaaaaaaaacgcatggaaaggcattgtgatacgagggggggtatgggttttgttcacgacgaggacgagttgttgagaacccacttccaccagggtggaaacgccgaacccggtggcggcccgcttcttgtcgctccacactggcccggccatgtcgatgtgcatccactggaccttgtcgt

SEQ ID NO: 2058 - DNA, 386 bp, Zea mays
  Clone ID: LIB3136-025-Q1-K1-D12
cccagttctctctctctcttgcccatcccccacctcggctggctcagctcagctcctaaacccgcacctacctctctgggtgctgccccggcccctgatcctgatttccccaatcgagagtccgagacccgagaggaggcacaggcacctgcgctagctgcagctgcaaatcgtcttccccagatccggcgccgcctagttcgctcctgctcgcgacagcgcccagagccgtccgcgtgcgcccgcagagatcgtttcggggacagccgaccagagcagagcatatcaaacctgactctgccgcttgttgcccgtccttggctgctgttgctggcgagagcccgcaggaggagcgcctgatttttgattctttctgaccttccttc

SEQ ID NO: 2059 - DNA, 442 bp, Zea mays
  Clone ID: LIB3136-025-Q1-K1-D2
agctgggggacgtactgccctggcgagttcccaagccctccacctgagtatgacacttgcttgggagacctgtatagtgttgcttggatggaagacagtgatttccacaatctgcgaactgaatctctcaagcagcaatacaacttggtcaaggataggacagcggttcaggatacattcagctatggctcccatgtgatgcaatatggttcattggagttgaatgttaagcatctgttttcgtacattggcacaaaccttgctaacgatgacaacacgtttatagaagacaactcgttgccatcattctcaaaggctgttaatcagcgcgacgctgaccttgtctacttctggcagaagtaccggaaattggcagacagctcacctgagaaaaatgaagctcggagggagttgcttgaagtgatggcccacaggtctcatg

SEQ ID NO: 2060 - DNA, 356 bp, Zea mays
  Clone ID: LIB3136-025-Q1-K1-D3
gtgcagatgtgccagcagctctgctgaacaacatcgcgcagatggcgtccggtgtgcgcgctattttcaacacgctaaacgtccgtcgggccatcattcctgccgtcaacggccactgctctgcccgcgcgctcgctcgatactacgcggcgctagcggccggcggttctgttcccccgccgcactcttcgggcgccatgccggccctcggcagccacgtgcacaccctcaagttcccgaccgcgccgctcaagaagaagaagaagggcgccggaaagaagaagggcgccggcggcggctccatgggagacctcaggtccaggatataatcggcggcagcagcgacaggaacgggt

SEQ ID NO: 2061 - DNA, 414 bp, Zea mays
  Clone ID: LIB3136-025-Q1-K1-D4
cggacgcgtgggcggacgcgtgggtagaattgaaaatttttccattatcgaaagaagaaaaaaacataatataatggatcaaccatctgatcgatcgtcctgttcgtcctctctctctcttttccaggtgcccttaaaactgtcacaccatgaatgaacacacaccccaccctccagctcgcaccaacacgaacgaaaaacaggaagaaaaaaaaaaaagcttactaccccgactttctccccttttaagcatgcaacgcaaaaggggaaaaagaaaagtgattgcaagaaaaaaaagaaaagtcgatcgagagataaagcaattagtagcacttagcggcactgctcgtttttctaacctaccgatacctacacccgatcatgcaaccggcaacggcggcgcggcggtggatc

SEQ ID NO: 2062 - DNA, 437 bp, Zea mays
  unsure (1)..(437): unsure at all n locations; Clone ID: LIB3136-025-Q1-K1-D6
ggacggagtcatggccgtggaggacctcagcctgtccaagacgacgaagctggtggacaaatgcgacacggcggccagtacggtcgtcgtggggaaggacaaggaccacggtggcaacaagggcgccaccggcagggtggcgaaaggtggcgctggcgcggcgacaccaaagaaggcgctcgggaaaacggtgtccggcaaagggcagaccggggagcgcagcagctcggactcatccgacagcgccgtcgccgtcgcagtcttgaccagccaggagcatcccaagaggacgacccgcgcaaggaacgccgccaagtcggctgctgcgtagcccttccgctgagagaaatgctcaaggagcactagctaggttttagcagtcgtctgttcttttgtattacgagtngtgcatagaagccaggaccatgtttttacac

SEQ ID NO: 2063 - DNA, 324 bp, Zea mays
  unsure (1)..(324): unsure at all n locations; Clone ID: LIB3136-025-Q1-K1-D7
ctggacgattggccgctggagacgacgcacgctcggccatggcgctcgctctcctatccccctccacgccatcccatcgtatactgcttcgtcctattccatttccatctctgccagtcgcgcgcgccactagtgccggtagcttcggcctcgcgttcttctgccccctctctcgcggttcctcctcgctgcagaggaccggcgcggcaggcggcgttattgatagtgccggagagggctcatcggaagaaccggtcgctggatggctcagcgcagacctgctcaggcggatatcangcgcggcggacgcggaccgggtcctgg

SEQ ID NO: 2064 - DNA, 415 bp, Zea mays
  Clone ID: LIB3136-025-Q1-K1-D8
ccatctaccagcgactcagcgagcgagagcagcacacacgcagctagctaggagcagcagcagcggcggcggcgatggcggcctccatgatctcctcgtcagctctggcggtggcgcctcagggcctgccgcccctcggccgccgcgcctcctccttcgccgtcgtctgctccaagaagaagatcaagaccgacaagccctacgggattgggggtggcctgaccgtcgacgtcgacgccaacgggagaaagggcaagggcaagggcgtgtaccagttcgtcgacaagtacggcgcgaacgtcgacggatacagcccaatctacaacgaggatgactggtctcccaccggcgacgtctacgtcggtggaaccactgggcttctgatctgggccgtcaccctcgctgggatcctcgg

SEQ ID NO: 2065 - DNA, 415 bp, Zea mays
  Clone ID: LIB3136-025-Q1-K1-D9
caaagtccaaaccctaaccctagcgcccccaactcgtcgccgggagatggccatggacgcggagcggctgcaagcggagctgatcgcgcagttctcctctcaggcggtggctctttcgtccgcgcagcagctcgccgctctggtgctcgaggccacctcccacccggccctcttcgccttctccgagctcctcgccctcccggccctctccatgctcgctggcactcagtactcgtcttcactggacttgctccggctcttcgcctatggcacgctgaaggactataagaataattcgggatcccttccaacattggtggctgatcaagtcccaaaggctaagcaactcattgggctaactctggcagagtcaacttagatactaccatatgatccgctcatgcaagaattggat

SEQ ID NO: 2066 - DNA, 396 bp, Zea mays
  Clone ID: LIB3136-025-Q1-K1-E1
gttctcaacatccatttcaggagatagaaaaggtataacggttgccctaggtgtatctatgtcattagtgaacttgcagcattgctcgcggcaaaattttggccatatgtactctctagtagataagctgacagatgttacagtaggggataagatccattgtctggcggtgagaatggctagtttgatttctcttccaaaacaaagtacaaaatgcaaatgggctcaatattcatctattgatgtggcttcatgggctcatcagtcatcattgcggcttcacagtgttgatctatgctttcatatgcctagctcggagtgtcagatgtgcttgttatttggattgaggcataaggacacgtatattggatggcatggagttggtatattggatgc

SEQ ID NO: 2067 - DNA, 191 bp, Zea mays
  Clone ID: LIB3136-025-Q1-K1-E10
cggacgcgtggggaatttatgtaattcttgttatgtctggagctggttagatggactagggacctcaactttttctatgtttacttggagaatcccataaaccatttttggtttcgcaattctgtctgttaaacgtaacatgcatccatgttttgtcgaaaaaaaaaaaaaaaaaaaaaaaaaaaataaaa

SEQ ID NO: 2068 - DNA, 338 bp, Zea mays
  Clone ID: LIB3136-025-Q1-K1-E11
gttcggcgacaccgccggggacttcgtgcccgaccgcttcctcggcgaggagggcagcaagctgctgcagtacgtgtactggtccaacggccgtgagaccgagaaccccagcgtcgacaacaagcagtgccccgggaagaacttcgtggtgctggtcggcaggctcctcctcgtcgagctcttcctccgctacgacacattcaccgacgaggtcggcatggagctgctcggcaccagcgtcatcttcaccggtgtcacgaaagctacctccggtccgggcagcgagtaaaccgcccggcggcgcgcgtcgttggatatatgatgagtggacgtgacag

SEQ ID NO: 2069 - DNA, 361 bp, Zea mays
  Clone ID: LIB3136-025-Q1-K1-E12
cgctcgaccacgcgtccgattacccgtcagcagatcatactcgcctgatgagtcacccatcgtcaccaaagcatatagggcttcatccatcaggaacaagaagctgtcaccggcttcatatagcaaagcgcgccaagcaaataattgtaactacaaagatgagatagctgttgctccggatgctacaccaatcaaagtggtgactgaggagaagctgctggaaggaggcaatgtgagaggcatactggaggctaggatggcactcttccaaggcagccaggataggtcggccaagctggctggacacaaagcagggtcacgagtcgttccatactagggtggtggtaatttggaagagatt

SEQ ID NO: 2070 - DNA, 281 bp, Zea mays
  Clone ID: LIB3136-025-Q1-K1-E2
tctgaggcaaggacagttggagaaggtgcaaaagatggactcctagttaccgtgggtgaagccagctaattaatgttttagagaaataattctctcttggagactactactactgttctacctcagcatcaccggtgctggtgcgtgtgtaacgtggtcactgtgggtatcatcactaccctaccctaagccctatcagaacataagcaccccttggagatttgtgccgtctaaatgaatatagttggttcagcgtcgtgactggatctgtggttgtgatt

SEQ ID NO: 2071 - DNA, 268 bp, Zea mays
  unsure (1)..(268): unsure at all n locations; Clone ID: LIB3136-025-Q1-K1-E3
cggacgcgtgggctcgtgctgaattcctgtacgttttcaagaacaagtttgctcggaatctgccaacaagcaagtgctctaatggaaagttgctatgcggaatcctagtgagttcagggtttccaatgtttttttttttttttctagagggatgggggatgtgacttcagctttccaggcagttgagacttaattgagatggagcagctgtgcctctggttcanaaaaaaaaattgaaaaaaaaaaactaatttatataaatgcccaa

SEQ ID NO: 2072 - DNA, 422 bp, Zea mays
  Clone ID: LIB3136-025-Q1-K1-E4
cggacgcgtgggaagacaggtccctgagcaggcttggtacatgaaccctgccttcaccattctgattggtggcatacttccgttcggagcagtcttcatcgagctcttcttcatcctgacgtcgatctggcttcaccagttctactacatctttggcttcctgttcctggtgttcattatcctcatcatcacctgtgcggagatcacgatcgtgctgtgctatttccaactgtgcagtgaggactacctgtggtggtggaggtcctttctgacctcaggatcatcagcaatctacctcttcctgtacgccgggttctacttcttcactaagctacagatcactaaggttgtgtcaggcatgctgtactttggctacatgcttcttgcctcggttgctttctgtgtgctcacccgtacgatcg

SEQ ID NO: 2073 - DNA, 344 bp, Zea mays
  Clone ID: LIB3136-025-Q1-K1-E5
ctaaaggcaacggtgctcgctgtggtgctcaaggtgcatatgcattgtgaggcttgcacacaagtgatcaagaagagaatcctcaagatgaaaggcgtgcaatctgtagaggcagacctcaaggcttctcaagtcactgtgaagggtgtgttcgaggaggccaagctgtctgattatgtgtataggcgcactggcaagcacgctgctatcgtcaagtctgagccggttgcagctgagaatgttgatgatggaaatgccaaagatgacaagaaggcagccgaaggtggggaggagaagaaggatgatggcaaggaggaaaagaaagatgaagacaagaaagaagc

SEQ ID NO: 2074 - DNA, 325 bp, Zea mays
  Clone ID: LIB3136-025-Q1-K1-E6
tcggctattgactgtaaaagttccagtccggcttatcctctcacctttactgagtctgtacgctcttactgcaaattgtggagatgcaagtcttacgttggcattcagcatgcttgctagtctagttggtacaatggaccggctggctgtaggaacttaccattcaaaaatatatgaacattgtttagcagctcttgatctccgtcgttaacaccctgactctttgaagaatataaatatggtggaacaaagtattattcatgccataatctctcttaccatgaaacttactgagggcacttttaggccactttttcttcgtact

SEQ ID NO: 2075 - DNA, 291 bp, Zea mays
  Clone ID: LIB3136-025-Q1-K1-E7
cggacgcgtgggttcccctggtgttcatcttcctcctgatagtgctctatgcgatccgtgccagcgcagcagtcttgctactgtacatccttatcacggtgctgttcgcgctcccctcgttcctgatactgtatttcgcgtatccgagcctggactggcttgttagggaaatctttgcctgagatttccttgttcggtaaaatctcaatgctgttgttgagtcccttgtataactgaaccttctctagatcttgttgcaagcgtggatgctattgcaaagttttggttttt

SEQ ID NO: 2076 - DNA, 215 bp, Zea mays
  Clone ID: LIB3136-025-Q1-K1-E9
atcagaacttggtgacatccatgtttcagcaagggaaggggcgactgatgacatagtgaagcttctggcagctggggttgaggtcaacgtgagagataccgaaggtagaagtccgttgcactgggctgttgatcgtggccatcttagtgctgtcgaggttcttgcaaatgcaaatgcagatctgaatgctaaggacaatgaagggcaaactgcac

SEQ ID NO: 2077 - DNA, 144 bp, Zea mays
  Clone ID: LIB3136-025-Q1-K1-F1
atccggagcagccgcagtcccaccgaccccgccgccggtcgccctccatcttctcgccgctgcctctcgtttctcttttcaataatcaagatgagccgtggtggtagtgccggtggtggtcaaagttctttggtttattttttt

SEQ ID NO: 2078 - DNA, 289 bp, Zea mays
  Clone ID: LIB3136-025-Q1-K1-F10
cggacgcgtgggccggcggcagattaccacggcgcggcgagggccatcggtggctgcccgaggtacgtcagcgacgggccggggaaccacaacttcgagctgctcaggaagctcgtgctccccgacggctccgtgctacgcgcgcagcttcccggccggcccacacgcgactgcctcttctccgacccggcgcgcgacggcgagagtttgctcaagatttggaacctgaacaagtgcggtggcgtggtgggtgtgttcaactgccagggagccgggtggtgccgcgtga

SEQ ID NO: 2079 - DNA, 255 bp, Zea mays
  unsure (1)..(255): unsure at all n locations; Clone ID: LIB3136-025-Q1-K1-F11
ccccaccgccctccgcgcccggcaggcgacgtcccgnnccagatccaggattcaaacaaacgggnacattaccacggtggttcttgattcattatcatcacctcacaggaggtcccaaaacacattcttcgtgtcatctgcaaaaaagcctcagtcatctcgtgacgacagttggtctgcactggttgagcgacaccggtttctcctgacgacactccttgttcttgccttcctgtgcactgtctatctgtactt

SEQ ID NO: 2080 - DNA, 314 bp, Zea mays
  Clone ID: LIB3136-025-Q1-K1-F12
gacccactcgtccgtcagaacactgtcggtgctcgtacaacttttcaaaagataaatgcggtcaagtctgacttgcatccaccttctcggcggggaaagctgataaaaaagattctgaatcaagttcaaagaaagccatttctggacagaacactgctgacaagtcaaatggaagtgctgactcaaagaaacccacaagagagcctcctgaaaataaggagaatcctactgctgcggggaacagcataacctctggggagaaaaagaaagtgcaagagaagtcagcaggaaaaacaacacattaagctccatag

SEQ ID NO: 2081 - DNA, 442 bp, Zea mays
  Clone ID: LIB3136-025-Q1-K1-F2
cgccgacacgcagcgctacaggctgggtcccaactacctgatgctgcccgtcaacgcgcgcgcgctgcgcgcaccacaacaaccactacgacggcgccatgaacttcatgcaccgggacgaggaggtggactactacccgtccaggcacgcgccgctgcggcaggcggcgccgcccacgccactgccgcccaggccggtcgcggggaggagggagaaggcaaccatacgcaagcccaacgacttcaagcagccaggggagaggtaccgctcctgggacgccgaccgacaggaccgattcgtgaggcgattcgccgactcgctcggacacccaaaggtcagccaggagctcaggtccatctggatagacctccttgccaagtgcgacgcgtcgctggggatgaagattgccacccggctcacatgaaggcaaacatgtgatgc

SEQ ID NO: 2082 - DNA, 338 bp, Zea mays
  Clone ID: LIB3136-025-Q1-K1-F3
caagaagccaggaaccagctcaaagttattcgtccaagaaccccaccccacccccacaacacatagaaatttcgtcttggagagccaccaatggcttgttccactgcatctttagcggcgacgctgctggcgttcgcgctgatgttccaggcctgcgtcgcggggaggaggaggctcaccgcgctcgtgcaggagccggccatcaccatgaagtaccacaagggcgcgctcctgtcgggccccatcgccgtcaacttcatctggtacggcgacttcacggcgccacagcgggcggtgatcaccgacttcgtctcgtcgctgtccgcggccccgcgggc

SEQ ID NO: 2083 - DNA, 108 bp, Zea mays
  Clone ID: LIB3136-025-Q1-K1-F4
ggccgacctccccgaggacatcgccgtagccgtcgcctcctgcctccaggaggccgacgtctgcgcgctcggcggctgctcgcgctcctggcgcagagcctgcgacgc

SEQ ID NO: 2084 - DNA, 433 bp, Zea mays
  Clone ID: LIB3136-025-Q1-K1-F5
gtggagggctggggttgggcgtggccgctgtggaggaatgattggaatgggtggaagaggatcgacgtgaccgtgataccaggttgtcaagggcgttagttcctagggtagctgaccctcgactccgcaactcgtagtctcggttcgtcttcgccggcagggttataccccccgtgccgtcggcttggtagagaaaggaggaagaagaccggagggctaaattcttgcttgccttcatcaagtgtcgattacagagataagtagccttggcttgctaaccgaatggaaacaaactcctcctaaactttaggatctaattccttctctttctattctagccactaatctgttcctggtttccttcctggggcgcgctggacctggacgcggcgtgcttagcagctcgtcaaacctcccttgcgcgccgtcttcg

SEQ ID NO: 2085 - DNA, 426 bp, Zea mays
  Clone ID: LIB3136-025-Q1-K1-F7
gccgcccttttttttttttttttaaagacaaatcccatttattcaggtccattcccaggttccccagagatcgagccgcttgcactggcatatcgatccatctgaaccagagggatcagatggtgtttaatattcttgcttgaatggcactagtagtatatacacgaacacgacacacacaagtccacacaggccatgcacgctcggaagcgcaagcgcgtcagtgcttgcggtggtggttgttggcggcttcggggccgtcgcggtcggcggcggcggccttgagatggtgcgtgggcgtcggcgtctgcatgagcgcgagcgcgcgctcgaactgcgcccagcgctgctccagcgtgccgttgtagccgacggacatgcggacgaggcctcgtgagatgcccgcgcgcgcgcggtcctcgggcg

SEQ ID NO: 2086 - DNA, 416 bp, Zea mays
  Clone ID: LIB3136-025-Q1-K1-F8
gacgaatctggtccgggcatagtccacatgaaatgcttctgaatttctggagcagtagatctgttgcttgcattttcagttagttgggatgcaagtttgtcccgtggtctcgctagcattcttcgttctttctggatattgaagagctgttggccatggagcattgtgcaaggtggtaaagtcgattgatggtactacatgaagaaacatgtgcagtacttcagcagtatagatcgtcaggtcagtttagtttttttttttcaacaacagtgccatattaggatgttcctgatgtgcgcagttggtctgggtttttacacaacgcatgggtgtcggctgtcgcccgtgcagtttgcgtctttgtgagatctgggtccgtttctgactccagtacgtggaacagggttcgcatttgg

SEQ ID NO: 2087 - DNA, 382 bp, Zea mays
  Clone ID: LIB3136-025-Q1-K1-F9
gaagtttcctggagaagcaaggacggtgttgaacaagttacttgaaatgggcattgttgctggagtggatattcggcaatgtcatggtccaggaggcaaaaatgtgttgaaggatgggaacataactgcgagtggcattcaatgccagtgctgtggtaccacattcacaatgtccaagtttaagtgtcatgcaggtctcaggcaagaagtcccatctctgaatcttttcttggatacaggcaaatcttacagtctttgtcagcttcaagcatggtctatagagcaaaaagtgaggaaagagcatgcaaaggatacaatgtcccttcaagcaaaacaaaacgatgatacctgtggatcatgtggcgattggggtgaactgata

SEQ ID NO: 2088 - DNA, 368 bp, Zea mays
  Clone ID: LIB3136-025-Q1-K1-G1
gcacgattcaatctaatggacccattcatgtccagatgttgttcgaagtcatttacacggttgcaaggtttgctgatgctcttctgcatagccacagtcttagcttggttggtttcagggcattggatgctaaataacctactggggatttccatatgtatagcgtttgtcagccatgtgaggcttcccaacataaagatctgtgcactgcttcttgcctgcttgtttgtgtatgatattttctgggtgttcttctcagaaaggttctttggagcaaatgtcatggtttctgttgccactcagaaggcatctaatcctgttcacacagtagcaaataagctcagcctgcctgggttgcaattgattac

SEQ ID NO: 2089 - DNA, 121 bp, Zea mays
  Clone ID: LIB3136-025-Q1-K1-G10
cggacgcgtgggcttctacccctccccaccgcgggccgagagggagttcgtccgccggcgccgcgcgactcaccgatgccgagccatgatgcctgctgcggcaccatgttctgggtgtacc

SEQ ID NO: 2090 - DNA, 218 bp, Zea mays
  Clone ID: LIB3136-025-Q1-K1-G11
cggacgcgtgggccgcttcacctccgtagcgctcgaccacagggactactctggcgcgctgggagcgactcttcggggctcactcaccatgctcgcgtccttatccctcgccgacaaccggttacacggtgcgctccccgcgggggtcccgctgccgtcaaccctccgcatcctctacctctcaggcaactcattctccggcaccataccggcgtctc

SEQ ID NO: 2091 - DNA, 166 bp, Zea mays
  Clone ID: LIB3136-025-Q1-K1-G12
cccactcgtccgatttatatggacatagatattggggccatgtttaagggcggaagctgttcctaccgcgtcaggaaggggagtcctgctggttctaccaagaagatccgttccacaacctctcaaggtcggatggcatctgacacaacgagggtaacgaaaacag

SEQ ID NO: 2092 - DNA, 106 bp, Zea mays
  Clone ID: LIB3136-025-Q1-K1-G2
gtgaattgccggaattccttggtggcacttgtacctgtcctgaatacggaggctgcctgtaagctgaaaagggaccatggaaggacccaaacatacttaagatagt

SEQ ID NO: 2093 - DNA, 418 bp, Zea mays
  Clone ID: LIB3136-025-Q1-K1-G3
cggacgcgtgggattttcgaattttgagaaagttttttttccttataaccttggtatgtctatctagaacctgtcatgtttaggcaataactgttttgtggttcatcgactgcaggatgagagggaattgaagcgcgaaaagaggaagcagtcaaatagggagtccgctagacgatcaaggctgagaaaacaggctgagacagaggagttggctacacaagtggagtctcttgcagcagagaacacgtcccttagatctgaaatcggccggctaacagagagctcagagaagctcagactagagaactcagctctaatggtgaagctgaaggacaccgcaaaaccgtctcccagcaaagcagccgcattcccattctatcccgtgcctcggcggagaacatcctttccatgatcgaca

SEQ ID NO: 2094 - DNA, 430 bp, Zea mays
  Clone ID: LIB3136-025-Q1-K1-G4
cccagattgaagtacccatggtggcccgtcttatgcgttactatgctggttgggctgataagatccatgggctcattgtgccggctgatggcccacaccatgtacagatcttgcatgagccaattggtgttgcaggtcagatcatcccatggaactttcctcttctgatgtatgcctggaaagttggccctgctttggcatgtggaaatactctcgtgctcaagactgctgaacaaacccctctatcggctttgtatatctccaaattgttgcatgaggctggactacctgagggtgttgtgaatgtcgtttctggttttggccctactgctggtgctgctcttgctagtcacatggatgttgataagatcgcatttactgcatctaccgatactggaaaaatattctcgagtggctgcaaagagcacct

SEQ ID NO: 2095 - DNA, 409 bp, Zea mays
  Clone ID: LIB3136-025-Q1-K1-G5
cagtgcgccacccgcacccaccaacgaggcaacgaaacccagtcggaagctagaccggcgacaagtgcagcgctcgccgcgatggattctgactacggcgtgccgcgcgagctgtcggaggtgcagaagaagcgcgcgctctaccagcccgaggtgcccccctgcctccaggggactactgtcagggtggagtatggtgacgccgcaattgcagctgaccaggcaggcgctcatgtgatcagccatgcgttccctcacacctatgggcagccccttgcacatttcctcaggaagacggctgttgtccttgatgctaaggtcatatctgaacacccggtggtcagggttggcattgtcttctgtggcaggcaatccccaggaggccacaatgttgtttggggactctatg

SEQ ID NO: 2096 - DNA, 299 bp, Zea mays
  Clone ID: LIB3136-025-Q1-K1-G6
cgctagctgcggctgtttgccatcgcgtgagctcacggagtgtttggacccctcggtgtgatgtttaagtgtgtggtagcaggatgcaagacgattctggtaataaactgattatgtttgtgaacggtgataacctgatgatgtatgtgttgtaaatttagagaacggtgataacctgatgatgtatgtgttgtaaatttagagaaataagtgacatgcttccttcaaataatataatcagacatgcattcactaacacctatgcgcagactctatgacatttcctcaagaagacggat

SEQ ID NO: 2097 - DNA, 423 bp, Zea mays
  Clone ID: LIB3136-025-Q1-K1-G7
cttctctcgtcgcttcctgcgtctctcggcgtcgaatctcctccagccaccgcgcacactctactcgacgcccggtggaaggagttctccgggatttgagctgtttctgccctcacctccgctgggccggcgtcgagtggagatccaatcgaaaatcgaactgacttcatcttctgttgcatccccatcaggataagccatgccaggagtgatcacaaagttcgcggttacatccatggtgatgtggatggccccggttgcgatcgtttatgggttctactaccaggcgtttccaggtgtgagtcggatgtcatcctcggcgcagacactcgccagcgggttcctggctgtcatatcagttaatctggtgatcggcttgtacatattcatggcgatgaaggagaatcgacaccaggagccaca

SEQ ID NO: 2098 - DNA, 441 bp, Zea mays
  unsure (1)..(441): unsure at all n locations; Clone ID: LIB3136-025-Q1-K1-G8
tgaggttctccggggttcggtttcgtgggtgagcggatcgagatggcggcgtcggatgttgagtaccgctgcttcgtcggcggcctcgcctgggccacggacgaccactccctccacaacgccttcagcacctacggcgaggtcctcgagtccaagatcatcctcgatcgggagacgcagaggtcccgcggcttcggcttcgtcaccttctccacggaggaggcgatgcggaacgccatcgagggcatgaacggcaaggagctggacggccgcaacatcaccgtcaacgaggcccagtcccgcggcggccgtggaggcggcggcggtgggtacggtggtggccgtggaggcggcggctacggcggtggcgggcgccgtgatggcggcggcggctaccgcggtggcggcggctaccgtggcggcggcngctaccgtggtggt

SEQ ID NO: 2099 - DNA, 397 bp, Zea mays
  Clone ID: LIB3136-025-Q1-K1-G9
ccgagtacccaacgcgctagctagttctattgccgcaccccagatctccaggagggactcggtctttcagctaactgcactgcacgcaatggccaccacggcgaccgaggcggcgccggcgcaggagcagcaggccaacggcaacggcgagcagaagacgcggcactccgaggtcggccacaagagcctgctcaagagcgacgacctctaccagtacatcctggacacgagcgtgtacccgcgggagccggagagcatgaaggagctccgcgaggtcaccgccaagcacccatggaacctgatgacgacctccggcgacgagggcagtccctgacatgctcataaagctatcgcgccaagagacatgagatcgcgttacaccgctctcctctcgcac

SEQ ID NO: 2100 - DNA, 58 bp, Zea mays
  Clone ID: LIB3136-025-Q1-K1-H1
gcgcggacccttcggcaacccacgccttcttttgtcttctactgccccttcacatcca

SEQ ID NO: 2101 - DNA, 429 bp, Zea mays
  Clone ID: LIB3136-025-Q1-K1-H11
gtcgacgatgaacatatacatcaagggagaagacttggaagtggagcagaattgcatcggcattttgctggaagggttcttgaagatcgagaacctgactctcatcacgcccccagcgttgcttctgccatggaatgctgacttgagcttattcggtctcgagtcctcagactactgccatactgcacgcaggtatcatgtggaagccagagcgcggatcatcttcttcgacgaggcagaggccgcccatcttcatgttcagacaagtgcgtcgctgccccaaggtgagccagcacggagcatgagcaaggagcacagcggcttgctcagctggcccgagagcttccggaggtctcgtggcagcctacgcttagcagctgagatgctgccggacggcttgtcttccatggccctgcaactgagcatgta

SEQ ID NO: 2102 - DNA, 158 bp, Zea mays
  Clone ID: LIB3136-025-Q1-K1-H12
acgcgttcgagctccaccaaattgagaatatcccatagggtatgaaaatccatgaggacccgaacagtgatggcaccctgaatatccagtacctaggaagtattagtaagggtatcctccaccgtcctattagctctttgtataggagctggaaccta

SEQ ID NO: 2103 - DNA, 303 bp, Zea mays
  Clone ID: LIB3136-025-Q1-K1-H2
gttttctgcaggaagggaaagaaagtggggctgaaggtggaaccagggaagcaaaggtctccctctgtgctgaaggaggtgagggcaacgccgccgactccacagcggtttctatccccatcgccaaaccgcattaagaatgttaaacctggagggatgtccacagcaggctcgccactcaaaaagggaccaaaggagaaggggacacctagtaaggacctggagagcaaaaaagatgctgtgaggcaaccctttggtcttaaagatatgaacaatacaagagcatgtgatgcagaaaggagc

SEQ ID NO: 2104 - DNA, 175 bp, Zea mays
  Clone ID: LIB3136-025-Q1-K1-H3
cggacgcgtgggctcactctttggcgcgacagtgagtacagcagcagcagctgagagcgtgagagcgtgcgaagcaggagggaggacaagaagaagccgatggcggttgtgagcggcagcggcgggaggctgaacccctgggcggagcccttcttgcctttcggggcgccgtacc

SEQ ID NO: 2105 - DNA, 351 bp, Zea mays
  Clone ID: LIB3136-025-Q1-K1-H4
ctaatttctctttgggggaccaggaatctacttggaacaacccaaggttcggtgacgatgacaatgcgaataatagaggtggatttggacgtggaaatcgaggcagagggagaggaaggaattttggggatggtggtgggtcatcatggaatggaggcaatagaaacgatgaatcaggtggcggaaggtctggagagccatggaacagaagggactttgatggtggcggaggaagaggcagaggtcgttttgggcgaggtgaccgtaaccagggcaacaacttcgggtcaagagatggtggcagcttgggctcttgcaagggaaatggtggccgcggtggttacaggaact

SEQ ID NO: 2106 - DNA, 428 bp, Zea mays
  Clone ID: LIB3136-025-Q1-K1-H5
cggacgcgtgggcaccgacgcgcacggaccggaccagcacagcccggaaactgccctacgccgacacgttttccggtccggcccagcagcagcagggaggaaggttcgctcggtcgctgggcctggctccgcgtgccgtccctcctataaatgcgagtcctcgccgagtccactgggcaccagaagctcactcactgctcgttgccggctgcccccgcggccccggccagtccatcccctcgctcgctccccaactccagcaggcagatcagatacatccatccattcgcggaccggaagtaatcatcaggaaaggaaagggttgaactatgagcgccgtggcggtttcgtcgtcgctgaacccggacgcgccgctcttcatcccggcggcgctgctgcaggtggaggacttctcgccgcagtggtgg

SEQ ID NO: 2107 - DNA, 296 bp, Zea mays
  unsure (1)..(296): unsure at all n locations; Clone ID: LIB3136-025-Q1-K1-H6
cctttctctctcttctctctctatcgcccacctctctccacctcctctgcccaagccgcgccaccaggagttcgccccggaggaggcccgacccggaggcagtgcggcggcatggctggtggtggtggagggccggggccggggcgggtgaaggcggggagccgcccgccgtgggtcgggctggcggcggcggtgtgggtgcaggtggctgcggngacctttcaccatgctcgtggaggcggcggcggtgttggtgcaagtggcggcggcggtgtgggtgcaggtggccgtgggtc

SEQ ID NO: 2108 - DNA, 436 bp, Zea mays
  unsure (1)..(436): unsure at all n locations; Clone ID: LIB3136-025-Q1-K1-H7
ggtggacatgatgtcgtcgatgcacgtgccgttcgcgctccggtcgctcagctccacgccgttcgccaaccacttcatcctgctcccgttctggcccgtcgccttcggattcatgctgctcatgtggtgctgctccaagaccttcgtcgtcagcttctactgcctccgcggccacctccaccagacttggtccgtgccccgctacggcttccagtacttcctgccggcggcgaagaagggcatcaaccagcagatcgagctggccatcctgcgggccgacaggatgggcgtcaaggtgctcagcctcgccgcgctcaacangaacgaggctctgaacggaggcggcaccctgttcgtgaacaagcacccggacctgcgcgtgagggtggtgcacggcaacacgctgacggcggccgtgatcctgaacgagatcccc

SEQ ID NO: 2109 - DNA, 284 bp, Zea mays
  Clone ID: LIB3136-025-Q1-K1-H8
tgttttgctgcctttaaatgttaagttgtttcaaacaggtgtttatgaaggggatctgttagtttcgcgatgtcgttagtttagtgcattagcaaagaaaaagccgaatgctgctagctgttctgttgcttttcttttgctaaccacttgtgtcacaactttctgtacctgcttcattgattaatctagtgactagtcagttattggttcaaaaaaaaaaatgaaaaaaaaaaaaaaataaataaaacaacaaaacaagcatagaaaaactgataaccaacaag

SEQ ID NO: 2110 - DNA, 385 bp, Zea mays
  Clone ID: LIB3136-025-Q1-K1-H9
gagatccggagcagccgcagtcccaccgaccccgccgccggtcgccctccatctcctcgccgctgcctctcgtttgtcttttcaataatcaagatgagccgtggtggtagtgccggtggtggtcaaagttctctgggttatctctttggaagcggtgagccccccaaaccagcagtggcaccagctgcaagtgctccacctgttgagaaaccatctgctgcaaagactgatgcggccaagcaggttgctgctggggttaccagccaaaccaataactaccacagggctgttggtcaaaccacctgcactttcttaccggacggccctcaaccaaagtccacgcctgctcctggcgggtgggctctttccctgggctaccttgttc

SEQ ID NO: 2111 - DNA, 275 bp, Zea mays
  Clone ID: LIB3136-026-Q1-K1-A1
cctctagagtcaacctgaccgcctatggatcaccatctatatttctcgacgcaactttacagggtgttgctgatggtggtctattgatgtgcactgccactgatttggcagttctttgtggtaccaatggagaagctcgttacgcgaagtatagtccatccccaaccaagggcatgtattgccttgaaatggctcccagaatcctccttgccagtatttatagccatgcttatcggttcaagccctttattgtgcctcgcctatgtctttttatg

SEQ ID NO: 2112 - DNA, 342 bp, Zea mays
  Clone ID: LIB3136-026-Q1-K1-A11
gtggagactctggttctgacatgcagcaattattgcaggtgcatttgatccgtcccggccgcctacacgatgtccaagtcgggagcgctggatcttgcttctggcctcggagggaagatcaacaaggtggaagtcaagtcggccgtcgatgagtatgagaaatatcatggatactatggagggaaggaggaagcaaggaagtccaactatactgatatggttaataaatactatgatcttgccactagcttctatgagtatggttggggtgaatccttccactttgctcacagatggaatggagaatccttacgtgaaagcatcaagcgacatgagcatttt

SEQ ID NO: 2113 - DNA, 381 bp, Zea mays
  Clone ID: LIB3136-026-Q1-K1-A3
ccacgcgtccgggcgaggccgccgcctgcggcgcccgccccggtgaggcttcgtctgcttttcgaaaacagtcgcctcctgcagcgtgtacagagggatgaaggccttcggcgctgctggcttctccttagcccggagctcggcaccgtcgccgaccttgccgctcatgtcgcagcccgtttccgcctccgccgcacctgcccgcgcggcgttgtgctctcgatggacgggtttaccttgccaccattcgagtcaacctgcatcttcagggataacgatattataagggttaaacaaaaatcctgcaggaagcaggatcaaagggatggccgtaaacaccaatgagaagaggcacatgatgatcaccagcttgaggaaaat

SEQ ID NO: 2114 - DNA, 399 bp, Zea mays
  Clone ID: LIB3136-026-Q1-K1-A5
cggacgcgtgggcgccgtcgtgctcggctcgccaccccgcgccagctcctttcaggcgcctaaccgttcgccgccgcgcattcgagcactcgcggaagcgcacctagtgccatggcgaagaagcggaagcgcaccgacgcccccgcagaggcgaccggcgcagagaagcctgacgactctgcgccggcgcgcccggagcgcacgctcttcggcttcaaggacccggtccccgacgccgagcccgcctccgcgggcgccgaggccgcggtggcgccgttccggaacagggagaaggtactcatcacctgctcccgccgaatcacgtataggtatcggcacctgatgcaggacgtgctgtcgctgctcccgcatgcgaagaaggacagcaaggtcgagtcg

SEQ ID NO: 2115 - DNA, 388 bp, Zea mays
  Clone ID: LIB3136-026-Q1-K1-A7
gctgctgcttgcggcggtagcggccaccgcggttcccgccgagccggcgtcgacgctgtccgggccgtcgcggccggtgacggtggcgatcggagacaggggccacgcggtggacctgccggacacggacccgcgggtgcagcgccgcgtcacgggctgggcgcccgagcagatcgccgtcgcgctctacgtctcgaccacctacgactgggtgtacgggatcacaggggactaccagatgggcggcgccttggagccggtggaccccggcgcggtgggcatcgtcgtgcggtacggactaggcgactacgccctcgaccactaggccaccggggagtcgctcgtgtacagccagctgtaccccttcgagggactgcagaactacacc

SEQ ID NO: 2116 - DNA, 177 bp, Zea mays
  Clone ID: LIB3136-026-Q1-K1-A9
tgaatgaacctttacttttgtttccgctttttctatacccgaaatgggagtccattaacgaggactatctgaaaggctacgctctacaccccacccagccgattgtgcacattacactgtcctccggtacctactcggatccagtgatgcatatgtacagccccaatatcttgttcc

SEQ ID NO: 2117 - DNA, 341 bp, Zea mays
  Clone ID: LIB3136-026-Q1-K1-B1
ctcttttttactcttaatttttaatttctaaaaaaaatattcttactagatttttacacactccagtcattattctttctccatttatctaaataattatttaaatcacaaatacatattaccaaataatctttatacttatcatattttttatcaaaacatactcttaccatttcaaataatctctattattcacaacattttttcaatttcactattctactcccattattacatcaaaactcaatcttaatcctcatatcattattcattaaaattacaaaaattattattctaccattcttccatttttaaaattttatcaatatatattttaaatt

SEQ ID NO: 2118 - DNA, 400 bp, Zea mays
  Clone ID: LIB3136-026-Q1-K1-B10
aaagctgaggaggcagttccaacaaattctgaatggctacaagggaagggggttgaaggcaataactgaacttaatagtgatgagtgttctagtttagatggtattgctgaaggatcagaatcaccttgttttgaagatgccaatgctatatgtgctcctgtttcactcgaggaggtgaagcctgaacagaatgaagctgaccaaccagacaacattctctgtgatgttgttgaatgcatggaagaagatgcagatgagttagcttatgcatatccatgcaaagcagagtcagaatcgtctgattctgaatcatctgatgaggatgaccctggagggatttctgtgtctggcgacgagaactgtgacccagatactaaatttaccatgagcaattcattg

SEQ ID NO: 2119 - DNA, 387 bp, Zea mays
  unsure (1)..(387): unsure at all n locations; Clone ID: LIB3136-026-Q1-K1-B11
attgcttttacatgcatggtgtatccagcattgatccttgcatacatgggacaagctgcttatctgtgtaagcatcataccatggaaagtgactataggattggattctatgtgtctgtgccagagaaaattaggtggcccgttatggcaattgctattcttgcaacagttgtgggaagccaagctgtcatcactggtacattctcaatgatcaagcagtgcacttctctgggctgctttcctcgggtgaagataattcatacatctgccaaagtacacgggcaaatatacatacctgagatcaattggattctgatgatactgtgcttagctgtaaccattgagttcaggaacacanaacacttggagaatgcatcaggattggct

SEQ ID NO: 2120 - DNA, 405 bp, Zea mays
  Clone ID: LIB3136-026-Q1-K1-B12
gcagctcgccggcggctggtacggcgagtccggcgagtacacggagggcacggtgacggaggtggtgtccacgggcgagaacgagtacgacgagtacaagaaggaggagaaggagcacaagcacaagcagcacctcggcgaggccggcgccatcgccgccggcgccttcgcactctacgagaagcacgaggcaaagaaggacccggagcacgcgcaccgtcacaagatcgaggaggaggtcgcggcggcggcggccgtcggctccggcggcttcgccttccacgagcaccacgagaagaagaaggaccacaaggacgccgaggaggccggcggcgagaagaagcaccacttcttcggctgattgatccctcccgtatcgtcgtccctccccgtgtgctacgcgtg

SEQ ID NO: 2121 - DNA, 355 bp, Zea mays
  Clone ID: LIB3136-026-Q1-K1-B3
ccactcgttcgcggagcggacaagagcggccagagcttctcgccggctattgtcggcgtgcagcgcgaggtgtactccaaggagggcgtgatgcgtcggctgatgccctgaatccagccgcagttggccgacgcatagcactctgagttcactgtgtacctgtactagttcctcgcgtgcgacttgctgacgcacctgcgctgcagacaccgattacactggtcctgcgcgctgccctggctcgagggcacataccggtgccccttctgtatctacggcgtggacgcctgttactgcgccgacgtctactgcgcatagaatcaggcgaagctctgttcttgctataacttgccct

SEQ ID NO: 2122 - DNA, 414 bp, Zea mays
  Clone ID: LIB3136-026-Q1-K1-B5
cggactcgtgggcggacgcgtgggtgcgatatgtgggaaggatattatgctgacgctgattgctagacgctccaggcattatgctggcaccaggtatctaaagaggggtgtgaatgaggagggcagagtagcaaatgatgttgagactgagcaaattgtttatgaaaacatgcttggaccatggcaaataagctctgttgtgcagaacaggggttcaattccactattctggtcccaggagacatcaaagctgaatcttaagcctgatatcatattgcatgaaaaggacaaaaattatgaggctaccaggcttcattttgaaaatcttaggaagagatatggaaatcctatcatcatcttaaacttgattaagacacttgagaagagaccacgtgaaatcatactccgttggga

SEQ ID NO: 2123 - DNA, 349 bp, Zea mays
  Clone ID: LIB3136-026-Q1-K1-B7
ggaacagtcatcagtgttgcattcaaggcccaaatcagcagttggaacgccagcatagattgcacctgaggtgctatcccgtcgcgagtatgatggaaagcttgcagacgtatggtcctgtggggtgactctttacgtcatgcttgtgggagcgtacccatttgaagacccacatgaccccaagaatatacgcaagaccattcatcatataatgcaagtgcaatacaagataccagatcatgtccacatatctacggaatgccagcaacttattgcccgtatctttgttgccaatccaatgaggagaatcacattgaatgaaataaagagccatccatggcttttgaag

SEQ ID NO: 2124 - DNA, 396 bp, Zea mays
  Clone ID: LIB3136-026-Q1-K1-B9
aaaaaaaacactaaattctcaacaaaaactaaaatcgcaacatgcctggggggccttggggatctttcatccaaggcctcgcacactttcatgccaccgtatgcctcttcaatggcgtcaactaaaaccaactaagtggccacatcgatacaacgacgaatctgagaaatctcgggcactaccgaagtaagtgccttcccaacagatacatattcgcgtaactagcttaataccgatacaaccctgtacctgcgccgtacgagattacatatatcacatattcacgaaccatacatgccacgaatccgtgcattaactgcgctgatatatctgtacacactcacttgtacacctacacttgtacgaaacctataaccatttcatccaaatacttac

SEQ ID NO: 2125 - DNA, 361 bp, Zea mays
  Clone ID: LIB3136-026-Q1-K1-C1
acccacgcgtccgggctatgatgatcaaggtgggtatggtggtggatatggctacaaccaaggcagatatggaaactatcaagaaaatggtggatataaccgaggtagaggaggtggtatgcgaggaagaggcaattggggttaccgtggaggctatgaaggaggcaggggtggtggctatgaaggaggcagggtcggcggcggctatgaaggtggcaggggtggtggctatgaaggaggcagggtcggcggcggctatgaaggtggcaggggtggtggtggtcctggtggaaggggatatggtggccgaggaaggggtagaatgggtggcggcggacgagcgaactaagtgcatgcagac

SEQ ID NO: 2126 - DNA, 410 bp, Zea mays
  Clone ID: LIB3136-023-Q1-K1-F11
gaaaacaaagtctaaaaaggaacgcaatctagctaagcacaaatgcaagaacgaattataaaattgttattacattgccaacacacacacacaccacacaccccatgaccggttacttccttgtataaaaaagaagcaacgaattgcattgcatgtcctgcaaaattaaccttaattactatgcatgctagcagctctctacgctagagcccctctactcgatcataccaaacaataacatctcaaaactgcagttgcaagctttacggagccttcaaacgagtacttgattactactacaccaagctttattgttctacgtaccttcttggagcagtagagatcagtgacctaatatcatccctggttgccggggtgaaggaagcttctagctgagctcagtgagagct

SEQ ID NO: 2127 - DNA, 219 bp, Zea mays
  Clone ID: LIB3136-021-Q1-K1-F8
gttaaaattatggtctcaaattggatttgacaagacataagttgtctggaggattgtgcagtgtaaacctgaaccttctatgatgtgtatgagtccagtattgatagcaagaacagattcgtttactgctgggagtgctgcagccactgatattttgtctatttaacttaaactatttgttgtgttggtgctctatcttgaagacatgtttcgtttgtt

SEQ ID NO: 2128 - DNA, 252 bp, Zea mays
  Clone ID: LIB3136-021-Q1-K1-F9
acaacatcatgtcatctgacacatatcgcgctgtgcgccagctcgggggctattcttcggataggggctctgactcagaatcacagtcatgaatgaagactagctcgtccagggatcataggcgtaagagaagaaagggatctccgcaggataagcgcaagctcacgaagaggaagggtaagcctacgcggaggaagagaaagaggaaaggatccaaaaagcgaggtagacggaactatgggagtcacattg

SEQ ID NO: 2129 - DNA, 366 bp, Zea mays
  Clone ID: LIB3136-021-Q1-K1-G1
atttgcgctgagcgatcagttcatccatagcgagcggagcggagctgagctgagcgagcttgtgttgcttgagagaccctgccatggcttcccaccaggacaaggctagctaccaggccggcgagaccaaggcccgcaccgaggagaagaccgggcaggcggtgggggcgaccaaggacacggcgcagcacgccaaggaccgggcggcggacgcggcggggcacgcggcgggcaagggccaggacgccaaggagaccaccaagcagaaggcgttcgacaccggcagctacctgggcaagaagaccgacgaggccaagcacaaggccggcgagacgacggaggccaccaagcacaatgccggcgaga

SEQ ID NO: 2130 - DNA, 422 bp, Zea mays
  Clone ID: LIB3136-021-Q1-K1-G10
ggcgctggacgaggtcaccgacacgggcgccttcgaccggtcgccgtccaccttccggaggtccgtttccagggacgggcggttccccgccgtggcggggcggtaccacctctacgtctcgtacgcgtgcccctgggcgtcccggtgcctcgccttcctcaagctcaagggcctcgaccacgccatcggcgtcacggccgtgaagcctatcttcgagcggaccaaggagagcgacgagcatctgggctgggtgttccccgccgccgccgacgaggagcccggcgccgagcccgaccctctcaacggcgcccggagcgtgagggagctatacgagatcgccagctccaactacgccgggaagccaaccgtccccgtgctgtgggacaagcagctgaagacggtggtgaacaacgagagctccg

SEQ ID NO: 2131 - DNA, 265 bp, Zea mays
  Clone ID: LIB3136-021-Q1-K1-G11
gactctcaccgacgtcactcacacggcggccttcatctcctcgccgaggacttttcgtaggggcgtttacaaatgacggggcgtccccagccgttgcggcgcagtaccaccaatacttctctcacgattgcctttgaacctgccagagcctcaaccatacacgaccactgcggcaactcattctatggggccatacggccgtatttctataccggatcctacccgctagaggaactatcatctggactgagcgtcccccgacgac

SEQ ID NO: 2132 - DNA, 290 bp, Zea mays
  Clone ID: LIB3136-021-Q1-K1-G12
caataatacatcaaaggaggctagcagaagtgcaggattaagaagctaagctagtagaaggtaagcaaagcataggcacagccatggctacctcctctggttcttgccttattattagcctgttggtggtggtggcggcggcggcgctgtcagcctcaacggcgtaggcacagctgacgtctacgttctacgacacgtcgtggccgatcgcgatgtccaccataagcagcgtcgtgaactccgccgtgacgcatcaagctcgtgtgggggcgtcgatgctccggctccac

SEQ ID NO: 2133 - DNA, 438 bp, Zea mays
  unsure (1)..(438): unsure at all n locations; Clone ID: LIB3136-021-Q1-K1-G2
cggacgcgtgggctgacgcgttggggttgaccacatgaggaagatgaataacaatggcattggctgcaacattggccactttgacaatgaaattgatatgctcggccttgagacctaccctggcgtcaagcgcatcaccatcaagccccagactgaccgctgggtgttccccgagaccaacactggcatcattgtccttgctgagggtcgactgatgaaccttggntgnactactggccatcctagctttgtcatgtgctgctcattcactaaccagtgcattgcccaacttgaactgttgaaagagaagagctctggcaagtatgaaaagaaggtgtatgtgctccccaagcaccttgatgagaaggttgctgctctacactgggcaaagcttgtgccaactgaccatgctcaccaagtatatgccgactacatcag

SEQ ID NO: 2134 - DNA, 432 bp, Zea mays
  Clone ID: LIB3136-021-Q1-K1-G3
aaaaagaaaccatatgaagggacttcttgttgctgcaactgactgtgaaccccagtagatcacgcgccttcttcagtcaaagatgaggattgggctagcagagaaaactgtccaaatggcgctagggcaagctgccgtatatgctgacaaaaatcctttgccaccaaaagttcaatcacctttcgaagaggctgcaaaaataattaaacaagcatattcggttcttccgatatatgataaaattgtcccagcgatactcgaaataggagtttggaagcttccagagacatgcaaactttccataggtgtccctgttggccctatgttagcaaaagcaacaaaatctgtctcagagatcatcgacaagtttcagggtcttgaatacacttgcgagtacaagtatgatggtgaaagggctcagatacattgcat

SEQ ID NO: 2135 - DNA, 417 bp, Zea mays
  Clone ID: LIB3136-021-Q1-K1-G4
tttaaggtgcaaaagggaggaagcaaagatcacagcttgggaaaatctacagaaagcggaagcagaggcagctatccgtaagctggagatgaaacttgaaaagaaacggtcatcatcaatggacaaaattttaggcaaactccgctctgctcagaagaaagcacaagacatgcgaagtgtagtttcttctagtgaaggtcagtgtagtgtgagggcaaccaagaagacatcttcctctgtcaaaactggcaggcctttcagctgctgctttacctaccgtgcttgctagttgtgatacacagttggtgcctgtggatacagcaatggatataggtctattcggtgagtcccactggcatttgtattatgtgtaatttaacatctaaaactcacactagttcagcattaatgctttac

SEQ ID NO: 2136 - DNA, 438 bp, Zea mays
  Clone ID: LIB3136-021-Q1-K1-G5
cgccgccgcagccatccgcttgttctcttcggttcagttctcgagtttccaggatgaaggtaatagctgcctatctgcttgctgttctgggtggaaacacttccccgactgctgatgatgttaagagcattctggaatcagttggtgctgaagctgatgaagaaaaactagagttcctgctcacagaactcaaagacaaggacataacagaagtgattgcagctggaaaggaaaggttatcctctgtgccttcaggtggtggtgcaattgacatgggagctccagcagctgtagctggcggtggcgcagcacctgctgaagaggcaaagaaggaagaaaaggttgaagagaaggaagagtctgatgaagatatgggtttcagctttgtcgattaaaacagcactaccagtttacagtttcttcgcgaatggtctcata

SEQ ID NO: 2137 - DNA, 436 bp, Zea mays
  Clone ID: LIB3136-021-Q1-K1-G6
cccacatctcgttccttgtcctccccatttcgagctcaagctcaatcacttcggattggcggcgggcacgcgccggacgaaatggaagcggcaccatccgcccgcgccttctccccgtcctcgtctccctccgcgggggctagacccagccttcccctcgcgggcctggcctcgcgctcgcggcgcgcccgggtgctcgcggcgccgcccccgccccgcgccgtcgcctcctcccgcgcgccgctggtggtctccagcccgccaccgccggaggactccggcacgcacaaccccgcgcacgccaaggtcgaccgctccggccgcttctgcagcccccgcgccgcacgggaactcgcgctgatgatttcctacgccgcgtgtctggagggaaccgatgtcgtccggctcttcgatcgcaggatcagcgcaagacgag

SEQ ID NO: 2138 - DNA, 431 bp, Zea mays
  unsure (1)..(431): unsure at all n locations; Clone ID: LIB3136-021-Q1-K1-G7
gcttcactcggttctgcttctacacatctatatatcgttagtttggtatgtactaacggctcgatctgcacaaggcaaagaaaagaggcaacgacgatggctgctgcggcggcgatgatggtctccggaggacgggcggcgctggtggtggcgggcgtgctctgcgcggtggcggccatggcggcggcgcagcaggcgtcgaacgtgcgggcgacgtaccacctgtacaacccggcgcagaacgggtgggacctgaaccgcgtgagcgcgtactgcgccacgtgggacgccgacaagccgctgtcgtggcggcagaagcacggctggacggccttctgcgggcccgccgggcagaagggccaggccgcctgcggcaagtgcataagggtgaagaaccgtgcgacgggcgcgtncatcgtggcgaggatcgt

SEQ ID NO: 2139 - DNA, 347 bp, Zea mays
  unsure (1)..(347): unsure at all n locations; Clone ID: LIB3136-021-Q1-K1-G8
ctcccggcggcggcgcaggagcagcagcaccagcacccgaggatggtgaagtgcctgagagcccggcaaggccgtgatcctcctgcagggccggttcgccggcaggaaggcggtgatcgtgcgcgtgttcgaggagggcacccgcgaccgcccctacggccactgcctcgtcgccggcctcgccaagtaccccaagaaggtggtccgcagggactcggccaanaagacggcgaagaagtcgcgcgtcaagtgcttcatcaagctcgtcaacttcacccacctcatgcccacccgctacaccctcgacgtcgacttcaaggacgtggccaccggcgggcccgacgcgc

SEQ ID NO: 2140 - DNA, 426 bp, Zea mays
  Clone ID: LIB3136-021-Q1-K1-G9
ggctgaagttagagagactatatcagaagatgagaggtacatgttgaggaaagttggattggagatgaaacaatttctgctgctaggtcggaggggagtttttgacggaactattgaaaatatgcatcttcattggaagtatcgagaacttgtgaagattatatgcaaagaacaccgccttgaagatgtggaatacgctgctcgaactctaaaggcagagagtggcggtattttggtggcagtggaaaaagtgagcaaagggcatgctataatagtatataggggaaagaactacaagagaccatcaaaactcaggccaaaaactttgttgagtaaaagggatgctttgaagcgttccctggaaaaccaacgttgtaagtcccttaaggttcatgtacttaagctgtcaaagaacattgactactt

SEQ ID NO: 2141 - DNA, 197 bp, Zea mays
  Clone ID: LIB3136-021-Q1-K1-H1
cacgcatccgcctctacctcacattttgctacgctctatcgattatcgagtgcttgctgaacaccgtgtcccgtcaatttatccgggcagcgcataaatcattttctactgctatttcttccggatatacatccaccctcgcttcgagcgtttctccttcatttaaacccttccctctgtcttctactcccacaccg

SEQ ID NO: 2142 - DNA, 343 bp, Zea mays
  Clone ID: LIB3136-021-Q1-K1-H10
gggtgcctcggcgtcgtcggctacgggtctcttcaaccttggctacatcgcaaacagtgcggacagctcaggtacttccagccatggccatgcaagccagggacacctgacaagtgatcagttcagcgaaggaggtggcggcggcggctctgagtcatcggccgcgatgcttttcagcggcggcgggaacttcgccggtggtgaccaccaagttgctcctggcgggatgtacaacaatgatccggccgtgatgctgccgcagatgtccgcgacggcgcttctgcagaaggcgtcccagatgggctccagcgcgagcgcgcacggcggcgtgtccgtgtttggg

SEQ ID NO: 2143 - DNA, 425 bp, Zea mays
  Clone ID: LIB3136-021-Q1-K1-H11
ccaccgcctcgccccatcctctccccctcccgtcgcgccagtcaacagcctgtctgcctcgggcctcgccacccatggccaccgtagcgcgcaccctcgtcgccgcatgcccggcacggtctctactccgcctccggtctaggcgcctcccgtcctactcttccatccgtcccgcgcggcaacgtgccggcgtcgggtctgttcgctgcatggctaggcgaccggattcctcctattccccgctgcgttcggggcagggcggtgaccgtgcaccgactgaaatggcgccgctgctccctggttgcgattacgagcactggctcatcgtcatggacaagcccgggggcgagggcgccaccaagcagcaaatgattgattgctacatccagacccttgctcaggtgctagggagtgaacaggaggcg

SEQ ID NO: 2144 - DNA, 403 bp, Zea mays
  unsure (1)..(403): unsure at all n locations; Clone ID: LIB3136-021-Q1-K1-H12
acggtactgaagatgtttacagtcctaagagagctcgagctgagaaggctcccatcatataaagagactgtgatatgggagaagctattggagaaaatgagccatgcactttgttgcctacagcctgtaacctactaccacgccaagctaatctgggtgaggtatcacgtgcccagcgcactattgaagccgtggagaagctgttgttgcaggggatgggttcagttattgaatccaaggatattattggaatctacaggactccattattggatgaccatggacaagtccgttaccataatcacgaaaagcatgtacagggtaccagatgtcatcgtggaaacgcanatgtncgttatgcatggcttcctttgctcaaaagcactgtgcatgaaatgatgct

SEQ ID NO: 2145 - DNA, 405 bp, Zea mays
  unsure (1)..(405): unsure at all n locations; Clone ID: LIB3136-021-Q1-K1-H3
tttaaggtgcaaaagggaggaagcaaatatcacagcttgggaaaatctacagaaagcagaagcggtggcatctatccgtaagctggatatgaaacttgaaaagaaacggtcatcatcaatggacaaaattttaggcaaactccgctctgctcagaagaaagcacaagacatgcgaagtgtagtttcttctagtgaaggtcagtgtagtgtgagggcaaccaagaanacattttcctctgtcaaaactggcaggcctttcagctgctgctttacctaccgtgcttgctagttgtgatacacagttggtgcctgttgatacagcaatggatataggtctattctgtgagtcccactggcatttgtattatgtgtaatttaacatctaaaactcacacttgttcagca

SEQ ID NO: 2146 - DNA, 440 bp, Zea mays
  unsure (1)..(440): unsure at all n locations; Clone ID: LIB3136-021-Q1-K1-H4
cgcgagcggccgctcgcgatctagaactagcccacgcgtccgcagttggggtgatcggcttgaaaagggtgggttttccatttatgcaactaaaagaaaacttacttcgtcactaatcatagggcctggatcagggtacaatttggtatccaaccccttggctgaagatagttccacaggtacaaaagggaagacgaataacgagaccaaaaaacggttcagtgaacaacttcgtgacgaaggtgaatccttcagggcagtttttgacaagacaaagcagcacattggagtttttgagaatggagatgaggaataatccttgactagaggttcttttagttgtttgcccttaagcgttttggatgctcangatgatacttcacacttacggaggggactagtgcagacagcttggagtccctttttcccccttccgcttg

SEQ ID NO: 2147 - DNA, 322 bp, Zea mays
  Clone ID: LIB3136-021-Q1-K1-H5
gagagcctggtggtaggtaggataggagtagcgccagccgccaagtgcgcgtgcgggctggctgcttcgacgagcaggagggagccgcaccgccgggctcccgcaatgtcgcctcctccgcccccgccgctgctgcgcaacgagctgtcgcgcaggacggcggtgctgggcctgcgcctgtgggtgctggtgggcatcgccgtcggggccgccttcgtgctgctcctcgtgctcatcttcctccacctcggcgcggcgcggcggaagcggcccaagaagggcgtcgcgcacgcgccggcgggggcgccgccgctgtccccgt

SEQ ID NO: 2148 - DNA, 436 bp, Zea mays
  unsure (1)..(436): unsure at all n locations; Clone ID: LIB3136-021-Q1-K1-H6
gcgaagaggaggagttcagcgccgcctccgccttcatcgcggcctccgccggctccggcaccagcgtccccgaggaagcgcagctgcgcctctacggcctctacaagatcgccaccgaggggccctgcaccgcgccccagccgtccgcgctcaagctcaaggcccgtgccaaatggaatgcttggcataagctgggtgctatgcctacagaagaagctatgcaagggtacatcacaattgttcaggacctattccctaactgggatgcaggtgcaagtgcgaaaaggaaagatgaagatagcattgcttccgcatcagcttcaaaggggcccatgggacctgtgtttagcagtttaatgtatgaggaagacgaaggaaatgaatcagaactnggtgacatccatgtttcagcaagggaaggggcgactgatgacat

SEQ ID NO: 2149 - DNA, 429 bp, Zea mays
  Clone ID: LIB3136-021-Q1-K1-H7
ggatactccacctggttttaattaagctcaaccagtccattcaactgaattcacagaggtgcactgttcaaagccaactgaatcagcagctgtagatgtcccaaatggaaacacatccattaccagcagctttgtggaaaagcttgttggtattcgtcctggttctgcaaacctcaatagctcaggggcaaatcaatcagcagccagaatacctgatccaattcatagtcatacagatgggcactcagatttttcgtcatcctttgggcacaataacatgactggcaaacatacttcaataagcgaacttctagaatttgaggggagtgctgatactggcaccaaaatatactcaactgacatgagaaataacgctgtgtctgcatcaagcttttcaagcattgcacaaaggtttcttgctaatacact

SEQ ID NO: 2150 - DNA, 384 bp, Zea mays
  Clone ID: LIB3136-021-Q1-K1-H8
ctttcgatgaaaacgaagaggatggaaacggtgaaagctgtagcaaagaggcctcatctgcggaggagagttccccagagaaaaagcagaaacgacttccaaaatggccaacaccgcgttcttcacctgcccgagcatgcaatgatgaggttgcttctgatgaaaaggatgatgtaggaatatccagggaaaatttcagcacatctcctctacgagcatggggaaagaatggcactcgcagtcagactcgccacagtagcttcagtggttcaaatggcaggatggtcaagggtgggcgcatgatcaagttggttgagtgcttgcgaaattctgacgacaatgaaggcgaggtgaacaccaaaatgcacgtgatatgtttccttg

SEQ ID NO: 2151 - DNA, 231 bp, Zea mays
  Clone ID: LIB3136-021-Q1-K1-H9
cggacacgaaccattcgctgtccccgtcgctgtcgacgactatgcccgcgaccgatctacgggcatcgctacgatgatcctgatctgcatcgaccacttccaacacattttgagcgtgatgaacacctacgtggatgggtagcacaagatcacgattcacatgacctccatacaggtcgtgctgctcagcatatcaacatcgtatgcaacaaagccgacatcgacatgaac

SEQ ID NO: 2152 - DNA, 453 bp, Zea mays
  Clone ID: LIB3136-022-Q1-K1-A1
gtccagtgcggctggtgaagcaattgagaaagtttaccagggtcaattggttggtccaaccggatgtgaagcaaaggtgcgggctcatattctttggagtcttggtcacgtgaaagagaacacttagagccagacacattaacttatagatgctcgagcaaaacctagatttgatggtgcacatcccgagccacgaaaggggattagaagtgggcatgtgcctgggagcaaatgtgttccgcttcctcaggttcttgacagctcacaaaagctattgcctccagatgagctccgtaaacggcttgagcaagaaggaatatcacttgatcagcctcttgttacctcttgtggcactggtgtgacagcatgtgtattagccttgggcctcatcgactgggcaaaccgatgtcgcactttatgacggatcgtggaccgaatggggcgcccatcctg

SEQ ID NO: 2153 - DNA, 416 bp, Zea mays
  Clone ID: LIB3136-022-Q1-K1-A10
cgccagccccgggcgcgccgaggaggtgccgttctttgaggagtacagccggccgctcctgggcacggtggccggcctggcgcccgaggagaaagtggtcctcgtcggccacagcttcggcggggtcagcctcgcgctggccatggagcagtacccggacagggtcgccgtcgccgtcttcgtcgcgaccggcatgccctccgcttggaaaccgatggcgttcgtcttcgaacaagtttttgcagaagaagtcccaacggaccgctacatggactgcgaattcgaaaccagcggcgacccccagcgtcccgtggagacatttcggttcgggccacagtacctgaagcagagactgtaccagctcagccccccagaggatttgaccctggcaatggcgatggtgaggccgtcacagc

SEQ ID NO: 2154 - DNA, 343 bp, Zea mays
  Clone ID: LIB3136-022-Q1-K1-A11
tcggtccctttcgattcgatcgatacctggatccagatccattcggtgatcatatccagcttccgctacttgagatcctcttgctttttggagatcctgttgcttcggtgcgtggagattgagatctaagcgacaagtattttcttttggttaactggttcgcaagaagtgcagatggacatctggttccaaattcgtgcttatatcatatctagctgccagcttggtcgtgaacacgtttatttccacagttgtgctcccattcttgcctcgtcgattgttttgttttggtgcacaactgatctcgtttgtgtcaaatagtatgtatgaagttcaaattttg

SEQ ID NO: 2155 - DNA, 208 bp, Zea mays
  Clone ID: LIB3136-022-Q1-K1-A12
gtcctcgatccgatccgccgagtgcacaccacctttccccactccgatcgaatcgatggccggcgagggcgagaagaagatgataaccctcaaaagctccgatggcgaggagttcgaggtggaagaagcggtggcgatggagtcgcagaccatccgccacatgatcgaggatgactgcgccgacaacggcatccctctttctaacgta

SEQ ID NO: 2156 - DNA, 339 bp, Zea mays
  unsure (1)..(339): unsure at all n locations; Clone ID: LIB3136-022-Q1-K1-A3
cggacgcgtggggcggttgacacgagtatttacccagaaaattcatgatcttatcggaacgcatagagatgtccctgctcctgacatggggaccaatgcacaaaccatggcatggatgctggatgagtactcgaaatttcatggtcactccccagcagtcgtcactgggaagccaatagatcttggtggatcactgggcagggatgcagcaacagggcgaggcgtaatgtatgctaccgaggccctactcgctgaatatggaaaatgcatttctggatcaacttttgtgatccaaggttntggcaatgttggttcatgggctgctcgacttattcacga

SEQ ID NO: 2157 - DNA, 375 bp, Zea mays
  Clone ID: LIB3136-022-Q1-K1-A4
ctaattttctgtttggattgattatcactttgtattatctaattaatttccatattgatcgatgttaagtactataattcactgactcttgatttcttatcttctgaaaccacgttggttatcctgctcttgcaatgtgaaattttctactgtcctgttaccctgattctattttaagctaggatgtgaattacaggttagggattgatgaggaacttgtggaactattggggcatcattcaccaatcccagtaacttatgctgggggtgtgtcaacaatggatgacctagagaggataaagaaggcaggcaaaagtcgagtagatgtaacttgtgggagtgctctagatatatttggaggagaattaccctaca

SEQ ID NO: 2158 - DNA, 381 bp, Zea mays
  Clone ID: LIB3136-022-Q1-K1-A5
gcagatggcaggtggcatcttgtcactgtaactttagatgccgacctaggtgaagcgactgctttcattgatggagttgatgatggatatcagaatgggttgccgttgccaacagataacggtatttgggaacctggaactgatatttgggttggtgctaggccacccatggacttagatgcctttggtaggtcagatagcgaaggttctgactcaaagatgcagatcatggatgcttttctatggggaagatgtctcagtgaagatgaggttactgttttacatactgccatgtctcctgctgagtatggattttttgacctttgcacccgcgatgctttgcatggaagttattctgcaagggtggatgactgggaaagc

SEQ ID NO: 2159 - DNA, 370 bp, Zea mays
  Clone ID: LIB3136-022-Q1-K1-A6
aaataatagagtggctgacagaagctggtgcaaagaatgccagaaatgttgggaaaattggggaggcatcagaactgaggagaactgtgagcgatatcaagcacaatgttcaggcacagcttagcgagaatgctaagaccaacaaacgggtgactgggattcgcaaagagttgcagaaactgcatagagaagctatccagaacaccatcaattcagtcaccttggtagcgaccctgatcgcctccattgccttcgtcgccatattcaatctgccaggtcaatacttccaggatgtgaatagtgggggagatattggtgaggctgaaatagccaagcttaccggtttccgtgtcttctgccttctgaacgc

SEQ ID NO: 2160 - DNA, 370 bp, Zea mays
  unsure (1)..(370): unsure at all n locations; Clone ID: LIB3136-022-Q1-K1-A7
accaacccagctcgctcgtcccagctgatcatgtcgagcacctagtancgacctggtcgagcatcagtgtagagtgtcggtaggtgtctgtctctcttggtggctggttgcaacggtcatggcgacgtcgtctcgtcgggtgcccttgctgctgctgtgcctgggcgtgctggtgtcctgctccttcgcggcgggcagcttggaccaggagctggacatcacgtggggcgacgggcggggcaaggtccttgacaacgggcggctgctgacgctgtcgctggaccgcacgtccggctccgggttccagtcccggcacgagtacctgttcggcaagatcgacatgcagctgcggctggtgccgggcaacttc

SEQ ID NO: 2161 - DNA, 370 bp, Zea mays
  Clone ID: LIB3136-022-Q1-K1-A8
gcgtccggtctgcatggtaccttctgctgatagggtaagtttaccaatttttacagttttttttcctggtggagaattgatatctactctcacctcatattgctgtattttgtagccagatgaggccaaatttgctgtaccacttctggagtctgactttgactttgccaaactggtgccaggatgtccttggagattacctcaaaagatccatctccaggtcatttttcctatcagcaggagttcaagctactcttctatgccttctgctccacgactcaaactaatctcaacaccagatttgaggtcacttctctcagttgaggatgtgaaactccctccatggtcaaatgggatgtgttttgcggag

SEQ ID NO: 2162 - DNA, 230 bp, Zea mays
  Clone ID: LIB3136-022-Q1-K1-A9
acagcaacccttgcagccccaatcccccacggtgaccatggccggcgcgcgggagtccctgtgcctggtgggcacgatgcgcggccataacggcgaggtgacggcgatcgcgaccccgatcgacaactcgcctttcatcgtctcctcctcccgggacaagtccttgctggtgtgggacctgaccaacccggtccactccaccccggaatccggcgtgaccgccgactacg

SEQ ID NO: 2163 - DNA, 393 bp, Zea mays
  Clone ID: LIB3136-022-Q1-K1-B1
ggcgggaaacaggatgaatgccggaacggcacgtggcaacgctcaggccttcaacgttacggcgctccgcaagctctctgacgtgaagagcactgatgggagcaccacgttgctgcacttcgtcgtcgaggaagtcgtccgctccgagggtaagcggctcgccatcaatcgcaactacagcatccgccgctcgggcagtctcgcgaggtctggccacgagggaggcagctcggcagcaggcttcgcaagccaggggccatcgcgggaggaaaggcagagcgaatacatgaacctggggctaccaattgttggaggtctcagcacagagttcgccaacgtgaagagggccgcactggtcgactacgacgcagttgtcagcgagtgcgccattct

SEQ ID NO: 2164 - DNA, 177 bp, Zea mays
  unsure (1)..(177): unsure at all n locations; Clone ID: LIB3136-022-Q1-K1-B10
gactttatatgtcctcagttggcanaagaggcttttgcaagcggcatcacgacattggtgggtgttggttctcggaccagcacatggaacttgtgccacaacttgcactccagcaccatctcaattgaaattaatgttgcagtccactgatcaattgccaattaacatgggattcac

SEQ ID NO: 2165 - DNA, 323 bp, Zea mays
  unsure (1)..(323): unsure at all n locations; Clone ID: LIB3136-022-Q1-K1-B11
cgcgtacggtcggcgatgacaccgcgtgcccctcangttttgcatcacccgccgcacctcctcctcgccgatgctttcgccgcctggcaccctttccacaagaagccatgtctcacggaccgctccacggctcccccctcctcggcccgcctccccgatgcggagactccgacgcctgccccctcggggggcggtagcggcggatccttccggtggttcgggctccgcaagcggcgccgccgcggtccgggctcgcggtccgtgtccggccgcagcagcgaccgccggagatccggcacgtgctccgacttccatttcacgtg

SEQ ID NO: 2166 - DNA, 284 bp, Zea mays
  Clone ID: LIB3136-022-Q1-K1-B12
gaaggtgaaacacaccaagggccagctgtcctagggattgctcttattgctatggctgaagaattaggagctgaaatggctgtacgttcacttgagcgtcttctgcagtatggcgagcagaatataagacgggcagtccctcttgctcttggtatactctgcatatctaatcccaaggtaaacgttatggacacactaagcagattgagtcatgatgcatacgccgatgttgtcgatggctgcaattatctaattgggtttgattggtgctggcacaaacaatg

SEQ ID NO: 2167 - DNA, 333 bp, Zea mays
  Clone ID: LIB3136-022-Q1-K1-B2
ccggaagcaggaagccgccgcggaccagagcgacgtctcgcgccgcgccgcgctcgcgctgctcgccggcgtcacggccgccgccggcgccaaggtgggtcccgccgccgcggcatacggagaagcagccaacgtgttcggcaagcccaaggcgagcacggagtacatcgcgtacagcggcgacggcttcaagctgctgatcccgtccaagtggaaccccagcaaggagcgggagttccccgggcaggtgctccgctacgaggacaacttcgacgccaacagcaacgtgtccgtcatcatccagcccacgtccaagaagaccatcgccgacta

SEQ ID NO: 2168 - DNA, 431 bp, Zea mays
  Clone ID: LIB3136-022-Q1-K1-B3
caagaacaccaaagccacatcccatccatctccacggtgaggcttgagcgatccgaggagagaaaatcatccgcgaagcagcgacgcaggtttgttctctgatctctctggttcttttagcagcagggacgcagcacaacacaagaaaaggtccggttcaagaggctcttctgttgggttttttagaatcctcaagagaagcgtgttcttgggttaggatttttttctcacctcatcacacctctcctaggaggaacagagatccagagaaccttttttctcttctggatccttgccgccttttggccttcgaaagggttgttttgcaataccctctctctgtttttttcttcttcgcacaaacccacctcgtttctctacttttattgaggaacaagagctgttttccaaaacaaattctgctttgattt

SEQ ID NO: 2169 - DNA, 385 bp, Zea mays
  unsure (1)..(385): unsure at all n locations; Clone ID: LIB3136-022-Q1-K1-B4
acgcggacccctttcctacccctccaagccggttttcattgacggcgccgctcgccagttgtagctggtttttattaacgaggggtgggagcccctgtatggcgggcttatgccctctctcgtcggcaccgctgcctcccagggtgtctactactacttctaccaaatattccggaacagggccgaggcaagggcccttgagcgatccangagagggcttggcgatgggtctgtcgggatgctccagtctctcactgtcgctgccctgtctggctgtgtcaatgtactgctcacaaacccgatttgggttgttgttacacggatgcaaactcacaagaaagcaaacaaacagcaaagaccttanggtttgaattgtgctcttgat

SEQ ID NO: 2170 - DNA, 371 bp, Zea mays
  Clone ID: LIB3136-022-Q1-K1-B5
gcagttccctgcagaggatcttggcttccactatgcagaaggtgctctagttgttgaagcgagtggtgagaagactcatgaaggagaaaaactacagcattctaagagggcatcaagagagtacatcccatctgctaaggttggttcgcggcttccccacatgctagtaagagaagtgcctgcttcgagtgagggcgcgttctcaacactggacctagtgagtggggataaactcgagtttgttctcatcattgcaccagtgaaagagtcatatgagattgcccgtgccaccctcaagatagcagatgagcttacgctatcagccagagtatgtgtaatgtggccacgaggttcgactgatgctgaagtgg

SEQ ID NO: 2171 - DNA, 386 bp, Zea mays
  unsure (1)..(386): unsure at all n locations; Clone ID: LIB3136-022-Q1-K1-B7
cctcttcaaacgctcgagaaagagagagagactaaatcctccctcgaaaccctagcatagggactgccttcccgcacgctaggaaggggaagatatgggcgccgaggaggacgccgctgcacgccgcgagcgtctccgcgccctccgtgccgccaaggacctcctctccacccccgacggcgccccaaccccttccaccgacggagaacaccaaaatggcaaccatgagatggcagaagagccagaattaccaggtcatcaggatgcacctggtgaggctgctaaagaggatggtagccccactgaggaggccgaagaggttgaagatgatggtgagcttccagccatgaagttcagaaactaccttccncatgatgaacaacttc

SEQ ID NO: 2172 - DNA, 312 bp, Zea mays
  Clone ID: LIB3136-022-Q1-K1-B8
tgtaataatggccaattctttgaatggttgtacatggcacaactttggaagcttccgattgggttttttggggagaataacccgttggcaattggaatggcacacattaaggctacatcggacccagagatttggaagaaggggccagcatttggaatgcctggggtgcatgttgatggtatggatgtcctgaaggtcaaggaggttgctaaggaggcaattgagagggcaaggagaggtgaaaggccaaccctagtcgagtgtgaaacatacacgttccggggtcactctcttgcagacccagatgagctc

SEQ ID NO: 2173 - DNA, 230 bp, Zea mays
  unsure (1)..(230): unsure at all n locations; Clone ID: LIB3136-022-Q1-K1-B9
cctcgccaagcgcaacantccttcgcaacacatctctctctcgatctcagcgatggctttngtggagcagcaacaagacacgccgaatctcttcaaccgctggaccttcgatgatgtccaagtgaacgacatctcgctgaacgactacctcgctgggaacgcgacgaagcacgcgatgtacctgccgcacaccgcgggacgttactccaagaagcggttcctcaaggcgc

SEQ ID NO: 2174 - DNA, 441 bp, Zea mays
  Clone ID: LIB3136-022-Q1-K1-C1
aaagactcaacctctcaaaacatttcaagattttcctgggaatgctgtttctattgtgaaagcagaaattgtcacctccgtgggtgctcgctctttgcatgtgcctggtggggtgcagtcaatgaagatggatgaagttccctcttcttcaacatcgccatccacaaacaacaatcctgttattttgcgatcaactccaagtagctccaagaaccaatgtttacctactgcagcaaaggctcctcagtcatctgttgtattgggttctacacttgaacagggtatgaagccttgtgacagtacacaacacccaatggtgattcccaagctggctgaagaaaggccagctactggacaagactacatgaacaacaatcagctggattatttggatacatcatcttcagcgacttcagtttgcctttcacaggctgatggatc

SEQ ID NO: 2175 - DNA, 426 bp, Zea mays
  unsure (1)..(426): unsure at all n locations; Clone ID: LIB3136-022-Q1-K1-C11
gctcgtcctccaatccttnaagtctctcttcttgctgaggctgccccaagcccaggcgtaatccgctggacgaggagacggcattgctcgcatcgcctgccctgccctgccccccatgcgtgttgtgcgcatgaacagaggctaggctaccaacaacgcatagcatagccatggatcccgagttcggcgtcggcacggcgccacaaaaggggcggcgggcgtggcggacgacgctgctgctggcgtaccagagcctcggggtggtgtacggcgacctcagcatctcgccgctgtacgtgtacaagagcaccttcgccgaggacatcacgcactcggagaccaaccaggagatcttcggcgcgctctccttcgtcttctggacgctcaccctcgtcccgctcctcaagtacgccaccatcgtcctgc

SEQ ID NO: 2176 - DNA, 352 bp, Zea mays
  Clone ID: LIB3136-022-Q1-K1-C2
ggcagatgtcattactcctcacgaacctgtacgttctgggcgttgacgtcgaggtgctcggcgagaaggaacctgaacctggacgagtcgaggttggtgccggatccgatgacgcggctggccgggaagcccgaaagcttccaggcgacgtaggtgagcacgtccacggggttggacacgacgagcagcagcgcgtcgtgggactgctccgccagcggcggcacgatcttgcggaacagcgccacgttccgctggagcaggtcgagcctcgtctcgccctggatctgccgcgccccggccgtcacgatgaccaggtccgagcccctggtcacggacatgtcggtgcccgaca

SEQ ID NO: 2177 - DNA, 434 bp, Zea mays
  unsure (1)..(434): unsure at all n locations; Clone ID: LIB3136-022-Q1-K1-C3
ccgtccgtnncttcttccttcttcccctgggctcggtctgctatcttcctactgtccggggaancccagccgagcggcctgaaccccacaccacacacacagggttgcctacccacgccacgcacgcgcagccgcggcggaagccacccgggggtgggctccgatgggctgctgcggctcctcgcagcgggcggggacgcacccggagaagaagccgccgggggcgctccccccgcaccgcccctcctactcggtcaaccagcaccaggcgccgccgccgccgccgccgccctccgcggctcgcgctggcgcccgccaggtgccgccgctcaaggagttctcgctcgcggagctgcgcgccgccacggccggcttcgcggcggggaacatcgtgtcggagagcggcgagaaggcgcccaatttcgtgtacaggg

SEQ ID NO: 2178 - DNA, 426 bp, Zea mays
  unsure (1)..(426): unsure at all n locations; Clone ID: LIB3136-022-Q1-K1-C4
ggcgatcgcatcggagactcggagccggcataaccctaaggggaaggtttctgcaaggaggagggagatgcagggtgccagccacatgctcctggaggagcccttccgcctcgcctccgtcctctcccccgccaagcctaaagtattcccatcactcaccaagatagttgggacgctcgggcccaattcacactcggttgagattattcaggaatgcctcactgctggaatgtcagttgcacggtttgatttctcatggatggatgctgcgtatcaccaggagacccttgataatttgaggaaagcggcacagaatgtgaagaagttgtgccctgtaatgttggatactcttggtccagaaattcangttcacaattccacttgtgagccaaatgagttgaaagctgggaatcatgttatcataac

SEQ ID NO: 2179 - DNA, 216 bp, Zea mays
  Clone ID: LIB3136-022-Q1-K1-C5
aaaaaaaaaaaaaaaaaaaaaaaaaaaaaattattttaaaaaacaaaaaaaaaaaaaaaatagaggggtgttctttttctaaggttcgaagctttctttctcatacatacaacctaataacacaattttattgggccacctatattaacttcactacccgccaaactacaacttcatcactcgtaatacccttcctttacataacttaatcgcctt

SEQ ID NO: 2180 - DNA, 360 bp, Zea mays
  Clone ID: LIB3136-022-Q1-K1-C6
ggccattgcaacccatctaccaaatcgcacttacaatgagatcaagaactactggaacacggacctcaagaaaaggctggccaagatggggatcgatcctgtcacccacaaatctatcagtggcactcgcattggcaccacaaacgacaaatcaaccaaggccgccgcaagcctcagccacatggcacaatgggagagcgcccgcctcgaggctgaggcacggctggctcgagaatcgaagatacggacagcaacgccaacaccaactgctctccatgcgcagccaacgatactacctgcctctgctgcttctccatgccttgacgtgcttcatgcatggcaaggtgcaaagatagacct

SEQ ID NO: 2181 - DNA, 229 bp, Zea mays
  Clone ID: LIB3136-022-Q1-K1-C7
cacatccacctgcattccacggcttatcattcatatgggggtacctatatccaagagagtgggcaggcgccttcaacgctgcgactgacaccactctgtggcctcacatcttaatgcgctggcaccacattgccctttcactatctaacgacatagcaacgagcccctgaacagatcctccttcgaacagagagacattctgcatgatgaatgggactctcgctgtata

SEQ ID NO: 2182 - DNA, 386 bp, Zea mays
  unsure (1)..(386): unsure at all n locations; Clone ID: LIB3136-022-Q1-K1-C8
gcagagacaggcgtcttcgtactcgcctatctccgcgactcaaagctttccccaatggccgcccttctcccatttctcaccaccgccgccgctccccccgttcaacaacaccatgagggagtgcatctcgatccacatcggccaggctggtatccaggtcggaaacgcgtgctgggagctgtactgcctcgagcatggcattcaggctgatggccagatgcccggtgacaagaccattgggggaggtgatgatgctttcaacaccttcttcagtgagactggcgctgggaagcacgtcccccgtgctgtttttgttgaccttgagcccactgtcatcgatgaggtgaggactggcacctaccgncagctcttccatcctgagcagc

SEQ ID NO: 2183 - DNA, 76 bp, Zea mays
  Clone ID: LIB3136-022-Q1-K1-C9
aagaacaaagagtgcaagaagcacacactccacaaggtgactcagtataagaagggaaaggatagcctgtctgctc

SEQ ID NO: 2184 - DNA, 399 bp, Zea mays
  Clone ID: LIB3136-022-Q1-K1-D1
cttgcacccatcgtgaagccaccgaagccgatggagcggcgacacattggtacctggtgtgctgcagtgctctcgtcctggtcggagatggacgctgaggccggcgaggcgggggtgcagcagccggccggggcggcgtccacgagcaccgcggcggtgccgttcgacaggtcgtcgtcgcggctaggcgcgccgggcgccgagagcttcgacggcgcgctcagggagctcaaggatctgcggtctcagctgcacgaagcggcggactgctgcgccaaggcgttcctcagcaccgacaagaagaagatgattctggagggtacaaagggttacatatgcgatgcggtggtagctgtgatcgatcacctggggacagtttcgtccaagcttgagcacaag

SEQ ID NO: 2185 - DNA, 201 bp, Zea mays
  unsure (1)..(201): unsure at all n locations; Clone ID: LIB3136-022-Q1-K1-D10
cccacgcgtncgggcgtcttcgtactcgcctatctccgcgaccttaagcgttccctcttctcccattcttctcgcatttctcaccaccgccgccgctaccccctttcgacaacaccatgagggagtgcatctcgatccacatcggccaggccggtatccaggtcggaaacgcgtgctgggagctgtactgcctcgagcatg

SEQ ID NO: 2186 - DNA, 204 bp, Zea mays
  Clone ID: LIB3136-022-Q1-K1-D12
cggacgcgtgggcaagcgcactctagcaatgtcttctgaggttgtccgccctagcgacgccgagctactaaaggcacaagccgacatatggcggctcatcctctcctacctcacgcccctgtcactgaggtgcgccgtggagcttggcatccccacggcgatctaccgccatggcggggctgcctcagccgctgagctggtcac

SEQ ID NO: 2187 - DNA, 356 bp, Zea mays
  Clone ID: LIB3136-022-Q1-K1-D2
ggcttcgtcagcaacagcaagcggtgggaagtttgacgagaagttgcctggcgagaaaccgccagagcaccctggcaaacatagaaagttcctcccagttgctgaggggaagggaatgggcagcctggagaaacagcagaatgacaaaatcctgagctctctacttgccagaaactctgatgaaccgcttgatgtcagcaaggcaattacaatgtacaaggtgaaaaaggaaaagcagagaaggaaagagaaaaatatgccatcaaaatctgataagcttaagccccagaagaaaccccacaagaaatcatcgaagaaaagggcttaggtccacgtctttcagttgaccacagttt

SEQ ID NO: 2188 - DNA, 452 bp, Zea mays
  Clone ID: LIB3136-022-Q1-K1-D3
gcgtgacttcaaatggtagtgcaactgcagttgggagccagcaactgttgaaaaacgatggaagtgtggatgtctctcttaagggcaataatgcctcagctgtacctgttccatctttattgggaataggtggtccggctgcgcatattgctgcaatgcattcttttatgattcatcctcaaggcattcctcaacctttagcatcacccaactctggcattcctcagtttggcagttttcagacacagcctatgattcaaccaaactcacattggccaaatcagcaggaagtacaaattgtctcacaaccacaagatgaaacaaactatcagacatcccaatcaggtcagactgcattgcaacaagacactattaatactgatgagctgtcccccaaggcaagtgagggtggccatccagaccatcttaatgcccaggggaaacaacaacag

SEQ ID NO: 2189 - DNA, 385 bp, Zea mays
  unsure (1)..(385): unsure at all n locations; Clone ID: LIB3136-022-Q1-K1-D4
ggcgcggccacctcctgctgccggcagcagccgcctgcctgcgggcgctgtcgtgcgcgcggcgggtgcgcgcgtcccctcaccgcgctggcgccggcgccggcgggctgctgagggtcgggctcagcaggcgcggcggcgggctcgaccagcgcgcgctggcggcggccaaggccgcgaggcagcaggaggcaagccgtctcggggcctccggcggcggcgacgtccctctcgtcgactacctcaacacccagtactatggggtcgtcggcatcggcacaccgccgcagaacttcaccgtcatcttcgacaccggcagctccaacctctgggtcccctcctncagatgctacttctcgattgcctgtacctgaccacagataca

SEQ ID NO: 2190 - DNA, 383 bp, Zea mays
  Clone ID: LIB3136-022-Q1-K1-D5
cggacgcgtgggcggacgcgtgggggcaagcccttggactggcaggacttcgtcggtatcgtcgtgctcttggttatcaactccaccatctccttcattgaggagaacaatgccggcaacgccgccgccgcactcatggccaaccttgctcccaaaaccaaggttctgagagatggccgatggggcgagcaagaggctgcaatcttggttcctggtgacatcatcagcatcaagcttggcgatatcgtccctgccgacgctcgtctcctcgagggtgatgcactcaaggttgaccagtctgcgcttactggagaatccctcccggttaccaagggcccaggggacgaaagtctctcgggttccacttgtaagcaaggtgagat

SEQ ID NO: 2191 - DNA, 384 bp, Zea mays
  Clone ID: LIB3136-022-Q1-K1-D6
ccacagtgtacttcttatgaagaacaggaatcgtgtacaggagcttttctgctctaacaggataagagtggttgttgcaacagtggcattcggaatgggtcttgataagagtgacgttgaaggggtgattcactatagcttgccagaaagcttagaagaatacatacaggaaactggccgtgctggaagggatggacgactgtcatattgtcatctatttcttgattcaacaacattctataaaagtcgtagtcttttgcacagtgacggtgttgacgaatatgctatgagcaaatttcttttccaggtattttcatgtgaaaattcagtggggtgcatttgctccttggttaaagagtcgacttcgcgcaagttcgatataaa

SEQ ID NO: 2192 - DNA, 365 bp, Zea mays
  Clone ID: LIB3136-022-Q1-K1-D7
agctcggctgcgtgttcctcaccggcgagaagctcaagtcccccggcgaggagtgcaacagggtgttcctcggcatcagccagggcaagctcgtcgaccccatgctcgagtgcctcaaggagtgggacggcaagccgctgcccatcaacatcaactaaaagacgccaggcgccgccatccatgctgccgtccgcgcatggccggaggaggaggagaggaggaggaggaaaatacatgaaaaataaaacttgtacacgtgtatgtctccagattgtgccgccgtcgttctcgtcgttgacttttcgttgtattggtcgatccatatgtgtgtgcgtgtgtggcgatgttctttcttctttgtgtag

SEQ ID NO: 2193 - DNA, 405 bp, Zea mays
  Clone ID: LIB3136-022-Q1-K1-D9
ggcttgcatactgtgtgtatggcaaacctgtcgtgcggcgtttgatgttcgaggtgtttgagttctaacaggtccagcctaaagcagtctgaggatcttctccattggtaccgatgctagagttgctgaatgctgaccaacaagaccccaatggcagtggtacaaatgctgtagattcttgaagtcgtccattcgaaaggagatctttcattcttaagcctgaagccctgaaccctgagctgggacagctgattagccactgggtcctgtctctcctgaaaccgtcactgttccaaccttcttgtccgtcggaaatggtagactagtgatgctgtggatcggaagctgcttgtgtttgaacttacaattttgataatttcgtgtaaattcctgtttgggcagaaa

SEQ ID NO: 2194 - DNA, 402 bp, Zea mays
  Clone ID: LIB3136-022-Q1-K1-E1
cacacgcagacacgcttccgcggcgccaccaccttccgccctccgctgcccgctcgggtccgcgcccgaaaggcaaagcctcctcgctcctgccccgccccctcctcgcggcgtcggtcaaaccctagcacaccgtacgcgcaggcccgcccgctcccattccccacctccacccatggcggcgctctccgcgcccctccgcgccgtcgccgccggatcccgcgtcgccgcgtccgaccccgtcaaggtctcgtgcgtgaggagcactggctcagctcacttcggctgcgccttcccctacatcagggcctcctcttcggcgtaagtgcttgctttcaacgccgtagtcactgtcgccttgtaaatgtagtttcaagcattgctattgtccgtctaactcac

SEQ ID NO: 2195 - DNA, 293 bp, Zea mays
  Clone ID: LIB3136-022-Q1-K1-E10
gcaactaatagatcttccaagttagatatgctttttgctaacaagctgcatgctttcgtggggtacgaaactgctgaggatgctgcgaaggctattttggagctcaatgatgagaaaaactggagaaatgggcttagagttcggttgctgaatacttgcacggtgaagggggcaggcaaaggaaaaaacggaatgaatgaaactgatggaaatagtgaggaggatgtctccactttgaaccattctaacgagaaacagtttgaacaatcctttcaactgttaaatgtactgcc

SEQ ID NO: 2196 - DNA, 246 bp, Zea mays
  Clone ID: LIB3136-022-Q1-K1-E11
cgaccgaccaccagagcagcagtagactcacagctcactcgcaacaagcgcactcaccgtgtgtcacactctcacacgtaccgatcgagcggaagcaaacaaagcacacgtacggggtcgtcgagagaggaccggaatcggatggcgttcatgcggtaccgcgcgctgccgcagggggagctgacggtggaggggttccgggcgtggctggcgcaattcgacgcggaccgcgacgggcggatcaac

SEQ ID NO: 2197 - DNA, 389 bp, Zea mays
  Clone ID: LIB3136-022-Q1-K1-E3
gcctctacagatggcccaagtactggtcccctgttcgggctgaaagctgatggttctgcggtcccttcctttagtcttggtgctgccagcaacgggagttccgccacagtgcttgctacctcagcagaagcacccaagaaatttgctatggcagaaggccctgtcgaaaccggcgaagaaaacgagaaggctgtatttactgccgattctgccttgtatgagtacctagatgggggctggaaagaaagaggaaaaggtgaactgaagctgaacgtccctgtatcctcctccggcggcgagagagcccggctcgtcatgcgggcaaagggcaactaccgtctggtcctgaacgcgagcctctacaacgacatgtcgctcaaagacatgga

SEQ ID NO: 2198 - DNA, 380 bp, Zea mays
  Clone ID: LIB3136-022-Q1-K1-E4
gcagcagcagcacgaaaccctgtagtagcctgccatgactacgcgctgctgcctggtcggggccagtctcctcgcggcgctgctctcggtcagtgccagcctcgagttcggtttctacaacaagacgtgccccagcgccgagaccatcgtgcagcagaccgtggccgccgcgttcaccaacaactccggcgtcgctccggcgctcctccgcatgcacttccatgactgcttcgtcagaggctgcgacggctcggtgctgatcgactccacggccaacaacaaggcggagaaggactcgatccccaacagcccgagcctgacgttcttcgacgtggtggaccgcgccaaggcgtccctggaggcgcggtgccccggcgtgg

SEQ ID NO: 2199 - DNA, 348 bp, Zea mays
  Clone ID: LIB3136-022-Q1-K1-E5
cggacgcgtgggcttcgaggagctcaatatggacttgttccggaagtgcatggaacctgtggagaggtgcttgcgcgacgccaagatggacaagagcagcgtgcacgacgtcgtgctcgtcggtggctccacccgcatccccaaggtgcagcagctgctgcaggacttcttcaacggaaaggaattgtgcaagagcatcaaccccgacgaggctgtggcgtacggcgcggctgtccaggctgccatcctcagcggcgagggcaacgaaaaggtacaagatctgctcctgctcgacgtcacgccactgtctctcggcctggagactgcaggtggcgtcatgacggtgct

SEQ ID NO: 2200 - DNA, 398 bp, Zea mays
  Clone ID: LIB3136-022-Q1-K1-E6
cttctctcgtcgcttcctgcgtctctcggcgtcgaatctcctccagccaccgcgcgagcactgtactcgacgcccggtggaaggagttctccgggatttgagctgtttctgccctcacctccgctgggccggcgtcgagtggagatccaatcgaaaatcgaactgacttcatcttctgttgcatccccatcaggataagccatgccaggagtgatcacaaagttcgcggttacatccatggtgatgtggatggccccggttgcgatcgtttatgggttctactaccaggcgtttccaggtgtgagtcggatgtcatcctcggcgcagacactcgccagcgggttcctggctgtcatatcagttaatctggtgatcggcttgtacatattcatggcgat

SEQ ID NO: 2201 - DNA, 376 bp, Zea mays
  Clone ID: LIB3136-022-Q1-K1-E7
gcttcgagatgtgattgagaggttggaggccagtgaagccacatggcctaacaggaagagtgtagtctcttgtgcagctgtttgtcggacctggagagaaatctgcaaagagatcgttaagaatccagagttctctggaaaaatcacttttcctgtgtccttaaagcagcctgggcctcgagatgtaaccatccagtgcttcatcaaaagggataaatctactcaaacctactacttgtatctgtgccttagcacagctgtgcttgttgaaagtggcaagttcctcctatgtgcgaaacggacctcccgcccaacctgtacagaatatacaatatttatgaatttctgaaatttatctaggtcaaagcaaatgtac

SEQ ID NO: 2202 - DNA, 335 bp, Zea mays
  Clone ID: LIB3136-022-Q1-K1-E8
ctccagcggcggcgtccagggtgaacccgaatccccaacaccatggcggggggcaggatcgagaagaagcgccacggcgcggcgggaggcgcccggctgcagggcggtatcccgttcgagaagtccaaggggcagcacatcctgcggaacccggcgctggtggactccatcgtcgccaaggccggtctcaagcccaccgacaccgtcctggagatcgggccgggcacaggaaacctcaccaagcgcctcctcgaggctggtgtcaaggccgtcgtcgccgttgagctcgacccgcgtatggtgctcgagctcaaccggcggttccaggggcacct

SEQ ID NO: 2203 - DNA, 334 bp, Zea mays
  Clone ID: LIB3136-022-Q1-K1-E9
gaggagaacttccaggagttcaagagcttcctcaaggacaactcggttgacctaaccgacgtggagatgagcccagaggaggaggacgaggagttctggggccgaggaggatcagcggcaggaggccgagacccatcggaagacgcctcccgggtcgcctcgccactcgcgcgaagcttcaacaaccacccagcgccgccgacagcagcagcagcagcagcaagggggtgcgaggcgtccacgccgagggaggcgctccggtcgcctctgcagcacggagcactggcggcggtggcagctgcagctgagtctgagtgacgcacgcagttgcagc

SEQ ID NO: 2204 - DNA, 399 bp, Zea mays
  Clone ID: LIB3136-022-Q1-K1-F1
gttgtcctggtaaaggcgagccatactcagacgaagctattgctttgatgaggagaaggagtgcttcaacgagatgtggagatagaggttgaagcagttgataggacaggaacgttcataggttctttgtgggagtccaagaccaacatgggctctgtgcttctggaagctggacttgccaagctgagttcatttggcttggataggacctcagatgcttatatcctaacaagagctgaacagtctgcgaagcaacagaagattaagatatgggagaactatgtcgagggtgaaaatgcttccaatggatccacacctgaatctaaacaaaagcaaattctcaaggttgttgtcacggaagttcttggtggtgggaagttttatgttcagacaatgggt

SEQ ID NO: 2205 - DNA, 270 bp, Zea mays
  Clone ID: LIB3136-022-Q1-K1-F10
gaggctatcagagccgtacaagggtattgttgactgcttcaaacgtaccattaaggatggaggtttctcttccttgtggaggggtaacactgctaatgttattcgttacttccctactcaggctttgaactttgcatttaaggactacttcaagaggttgttcaacttcaagaaggatagggatggctattggaagtggtttgctggcaacctggcctctggtggtgctgctggtgcttcctctttgttttttgtgtactccctggacta

SEQ ID NO: 2206 - DNA, 280 bp, Zea mays
  Clone ID: LIB3136-022-Q1-K1-F11
gatgagcaccacaccaagattgatacagaaataactgatattctcatagagtgggggatgcgggcaacaatgcgtgcaatacatccgatttactttgccaaatgtttgacaaaggccattcataataataatggggagaagatggatagtccatcaaacggtctctctattgtaggatatctgagacctgctttcatagaggaagagtcttacttgaggagcatgtttcatggtgacaatggtggttattcatctgactggaaagtaaatgaaaccgttg

SEQ ID NO: 2207 - DNA, 218 bp, Zea mays
  unsure (1)..(218): unsure at all n locations; Clone ID: LIB3136-022-Q1-K1-F12
cttctcaccaccgctgcctccgcggtttcgcttccccccgtcttcccaagcctttgcttcggtcttcgcttcggattccctctgctcatggccgggagagggaaggcgatcggctcatgggccgccaagaaggccatgtccaggagctccaaggccgggctccagttcccagtgggaaggatcgccaggttcctcaaggccngcaagtacgccgagag

SEQ ID NO: 2208 - DNA, 387 bp, Zea mays
  Clone ID: LIB3136-022-Q1-K1-F2
cgcaaatcctaagacatgcttcttccatgttctcttcaaggcatcggcattggcgttctacatactgtccacactgttcgtgaacaacttcgtcatcatctttgtcatcactgtgctcctcgcagcacttgacttctgggtcgtgaagaatgtcagcggaaggatactggttgggctgcggtggtggaatgagattaacgatgagggagagagtgtctggaagtttgagtgccttgatggagagtccctggctaggatgaataagaaggactcatggctgttctggtggactctatatttgactgcggctgcatggattatacttgggatattctcgctcatcagacttcaagctgattaccttctcgttgttggagtttgcttgag

SEQ ID NO: 2209 - DNA, 405 bp, Zea mays
  Clone ID: LIB3136-022-Q1-K1-F3
gttcaggcggctattcgccaagaaggagattaggattctcatggtcggtctcgatgcagcgggtaagaccaccatcctctacaagctcaagctcggcgagatcgtcaccaccatccccaccattggatttaacgttgaaactgtcgagtacaagaacattagtttcactgtttgggatgtcggtggtcaggacaagatccggcccctgtggaggcactacttccagaacacccagggcctcatttttgttgtagacagcaacgacagagagcgtgttgttgaggccagagatgagctccaccggatgctgaatgaggacgagctccgtgatgctgtgcttttggtgtttgcaaacaagcaagatctgcctaatgccatgaacgctgcttaaattaccgataagct

SEQ ID NO: 2210 - DNA, 399 bp, Zea mays
  Clone ID: LIB3136-022-Q1-K1-F4
ctcgccgtctgccttctgcgcctccatttctgcctctgtcccttgcaagttcagtctcgcgtccagccatgggtaaagagaagtcccacatcaacattgtggttattggccatgtcgactctggcaagtcgaccaccacaggacaccttatctacaagcttggaggcattgacaagcgtgtgatcgagaggtttgagaaggaggctgctgaaatgaacaagcggtccttcaagtacgcgtgggtgctcgacaagctcaaggctgagcgtgagagaggtatcaccattgatattgctctgtggaagtttgagaccaccaagtactactgcacggtcattgatgcccctggacaccgtgacttcatcaagaacatgatcactggtaccctccaagctgact

SEQ ID NO: 2211 - DNA, 391 bp, Zea mays
  Clone ID: LIB3136-022-Q1-K1-F5
cacagtttcatcacatagttgctggcggctggccggcctctttctctttctcgtttctggggccggtgcttgcccccctttcatctcaggcgtcgaagagagagagagagagagagaggagttgcaagttggtgagatggatctgttggagcggaatattaagacggagacggaggagacgcgcaaggaacaggagcgtaaggaggaggaggcggaggcggaagcggaggcgggggagaggaagacccaggagccgccgcagcaaggccagggcctcagcctctcactcgccaacggcagtggcaggtctggaatgttgccgatgtcgaacgtgtccgctaatccttcacagcttacaattttctatggcggatcagtatgtgtgtatgac

SEQ ID NO: 2212 - DNA, 280 bp, Zea mays
  unsure (1)..(280): unsure at all n locations; Clone ID: LIB3136-022-Q1-K1-F6
acgccgcaacagtctagtttagggttcttacatacagcatgatatgtacatttcttatgcactgaagggcgtcgtggcggtgatccaatanctagctcagctgcaattctaagaaaggtcctcgctcagctcggcactcgggcgttgtgttttattgttgcctgagatcacctcgcctggcgatatccttcccccgtttagggtttagggcccgtgctagacaattatatttgttggtgaatgtcgcgcataacataaattggtggaagagaagcttgat

SEQ ID NO: 2213 - DNA, 423 bp, Zea mays
  unsure (1)..(423): unsure at all n locations; Clone ID: LIB3136-022-Q1-K1-F7
tgattttggcacttatccatttgtgacttcttctagcccttcagctggcgggatatgcacaggcctagggattgctccaagggcaattggcgacctgattggagtggtcaaagcttacacatctagagtcggctctggccctttcccaactgaactatttggagaggaaggtgatcgccttaggaaagctggaatggaatttggcacaacaacaggtcgcccaaggcgttgcggctggcttgacattgttgcgcttaagcacagctgccaaatcaatgggttctcatcacttaatctgaccaaactggatgttctgtccgggttgtcagaaataaggtgggtgttcttatcccagactgatgacagagctgcatccttcctgngatctgataccctgacagtacagtcactatgagtctgctg

SEQ ID NO: 2214 - DNA, 397 bp, Zea mays
  Clone ID: LIB3136-022-Q1-K1-F8
gcctccgctgcaatcagcccccgcggcgagcttgccctgcccctgaccctgagtgctagtgctcgccgttacgtaaggcttcttggccttgcgtcctccgtctttcgttgctgatacatcgaggtattaaagaagctgcctgattccgggtagcagaggtcgccgccgcctgcagcaatggccgacttctcctggctcacggtgcttggtttcctattcctcacattcaactcaggcatggcgatttatcggtccaacggtgacgccggctccgtcgctttcgtcgtggtatcttatctcgacctggtggccctgttcgcctgcttgcgctactacgagcagttggatcagcagcactcccaaaagcgcgcgagggtcaagggctggggttggagcc

SEQ ID NO: 2215 - DNA, 268 bp, Zea mays
  Clone ID: LIB3136-022-Q1-K1-F9
gaccacgcgtccgagcaagtggatctgtgacacccattcatgtttctagtgaacccgatgcctctgacaatcgtggaattaatcgccatgagagtcctcatcctttaggaaactctgcaggcttgacattggaccagtctcctgctgcagacgaaaatgaagcgaaaataactacagaaaggacacccccagtatccataggtgatgctaagacagtcaaggtgcatacacttcctggagctacttgtggagttaacttgcagtgcat

SEQ ID NO: 2216 - DNA, 177 bp, Zea mays
  Clone ID: LIB3136-022-Q1-K1-G10
gtcacccgtccgtcgcatcctacgatccaaagctctcttgtcgcagtcgcaccgggcgaaaactacccgaccggacgccgagtacagcaggctgggcaaggcaggcgcaagctccgagccctcatcgcgaaagagtgcccccgtcatctccgctcgcgggactccgggggacgtcga

SEQ ID NO: 2217 - DNA, 234 bp, Zea mays
  Clone ID: LIB3136-022-Q1-K1-G11
tgtgatttgagacggtgtcgtgtcgcacgttgcacgcgacggcctgtgcccacatcctgagcgggtccttcatgtccgctgccgactgcaccctcactagcgctggccgctgccacgcctccgacaggtaaggacgccggggactggtcgtctgcttcttgctgcgccgcggctcatttccactactgccgccgccgggcgtcctctgctcaagcctcgcctgcacgtaatgga

SEQ ID NO: 2218 - DNA, 220 bp, Zea mays
  Clone ID: LIB3136-022-Q1-K1-G12
tctacatgctatggacctcagtggtttgttgcttttgtattcttcccttggggatgctgagggcattaacaaagtggcatctgtagccaaagaacaaggaaagaacaatgttgctttcctttgtttcttcatgctaggaaagctggaagagtgtcttcaattgctaatagaaagcaatcgtattccggaagcagcattgatggcaagatcttatctttcc

SEQ ID NO: 2219 - DNA, 401 bp, Zea mays
  Clone ID: LIB3136-022-Q1-K1-G2
cggacgcgtgggcggctacggtggctccccgtcccacggcggcggcgcgtacggtgggtcgccgtgcactcccggcagcggtggcgcctacggaggcgggtctccctcgccggcccatggtggcggcgcctacgggagctccccgacgcccgcgtacggcgacgccccctcgcacggcggcatagggacctcgtcgccgacgccgctcggcgacccccacagcttcggctctctcccgggctcctgcgactactggaggtcgcacccgatggagatctggtcggcgatcggcgggcggttcccgggcacgtcgtcgtcgatggggacgatgggccacttcttcggcgcggcttggcaggtgggcgggacggacgtgagcatccaggacgcgctggcgaaca

SEQ ID NO: 2220 - DNA, 371 bp, Zea mays
  Clone ID: LIB3136-022-Q1-K1-G3
ctcggccaccgcagcagcctggccctgccccggcccccgggcgtggtgtcaggtctgaaggggtggtggcgctttctcctctccggcacggtggccgcgtcatcccagctctcccgcgcggcggcggcagccgtttcctctcctgcgctcctcctgccgcacacagccagaaaattgcagctgaagtttgtttgaggataagcgacagctttgcgagtccttcgtgttgaaggagaaattgtagctgaagtgaaaaaaaaaacagcagggaacaatggcactatcacgaagtatgagagcatgtttgcacagtggaagacttgcacttcttgccatattggtctctggtggaattgtattgcaaatcttgg

SEQ ID NO: 2221 - DNA, 407 bp, Zea mays
  Clone ID: LIB3136-022-Q1-K1-G4
aattacggtatcgaccccgcgtccgcggaagccctacccgcgccgccgcgccgattcagccgcgcgtggtgctgcgggtggcgtcgtccggcgcgccagcctcgtcctcctccgcccgcccgcgcaggggcgccgtggcagaggccgcaatgcagccggccaaggcggtcgccgcggaggcggcctcccccgctgccgcgctggagatggggaacggcgccgcggtcgcggggctgcagcggcccgacgccatggggaggtttgggaggttcggcggcaagtacgtccccgagacgctcatgcacgcgcttaccgagctcgagaacgcctttcacgcactcgccaccgacgacgagttccagaaagaacttgacggtattctcaatgactacgtttggacgtgagag

SEQ ID NO: 2222 - DNA, 330 bp, Zea mays
  Clone ID: LIB3136-022-Q1-K1-G5
cgactggagcagtcagtccactccagtacctctgccgcacgctgctcccgccgcgccaccagctgaccaccgctgctagccacgatgcggtcgccgcgaatccccggccgccgcgacgcggcgtcgccgcagacgccaaaggggttcaacccgggcgaccccgtggaggtggtccccgacgaggcaggcctgcacggggcccacttcgctgccgtcgtcgtggggcccagcgccaagccccgcggctacaccgtcgaatacgactccctcctcgagtccgagggctccgaccgcccgctccgggaggcactgccggcgcggagcctttcg

SEQ ID NO: 2223 - DNA, 418 bp, Zea mays
  unsure (1)..(418): unsure at all n locations; Clone ID: LIB3136-022-Q1-K1-G6
agaggacccattggcgtattaagacctatcttgctattagccacatggatgctggaaaaagtgggttgctgacatgaggaaagttttggcaaaaaatccgcatatagaacaacaaaagctgcacaggagagtattctttgagaaaattgatccaaaaaatcaagcacttatgattttcatatcctgctttgtaaagacatcacattttgaggagtatctcaatgtccaggtaatgtgcctttacattgatagatatttgttgtgcaagaaagccttggaacatattatgctggcattcgcctatggtgtctgctgaaaatatatggtctgtcactttggaccctagttntctagcttgtgttcttcaaataaattactcangaaagctgtatgttggaccttcttagaatagtgggca

SEQ ID NO: 2224 - DNA, 277 bp, Zea mays
  Clone ID: LIB3136-022-Q1-K1-G7
ttctagatcgcgagcggccgccctttttttttttttttttttttttttttttttttttttgtgtggttttttttttatgttttttttttttttttttttttttttttttttttttaaaaacaaacaaccttgttcttcctttataaacaatttttttggccaaaaggcattcttatagcttatttgtctcaacaaaatactattgcttcaaaacttggggctcacttaaatcaccatccactggcccaagttttggaaaacattacaatcatgattg

SEQ ID NO: 2225 - DNA, 334 bp, Zea mays
  Clone ID: LIB3136-022-Q1-K1-G8
gagttgacttctcctccccctccggttcgttttccggttcgagaggttctccgggggtcggtttcatagataagcggagccagatggcggcctccgatgttcagtaccgctccttcgccggccgcctctcctggaccactgacgaccactcactacacaacgccttcagcacctacagcgaggtactcgagtccaagattatcctccatcgggagacgcagaggttccgccgcttccgcttcgtcaccttatgcacagaagaggcgatgcggaacgccatcgagggcatgaacagcaaggtgctggacgggcgtaacatcaacgacaactaggc

SEQ ID NO: 2226 - DNA, 380 bp, Zea mays
  Clone ID: LIB3136-022-Q1-K1-H1
gtgggacgttcatctttcctggcgcacagccagccccccacaggagcttttctgaggaagtggctgcacttaaccgctactttggcggcctgaaatctggtggtaatgcttatgtgattggagatccagcaagacctggacagaagtggcacgtcttctacgccactgagtacccagagcaaccaatggttaaccttgaaatgtgcatgactggtctggacaagaagaaagcttctgtctttttcaagactaatgctgatgggaacacaacatgtgccaaggaaatgacaaagctctctggcatctctgaaatcatccccgagatggagatctgcgattttgactttgaaccctgtggctactccatgaatgcgatccat

SEQ ID NO: 2227 - DNA, 348 bp, Zea mays
  Clone ID: LIB3136-022-Q1-K1-H10
cttttgatcggcatcctctccgccacaaaccatttcgccgagcgcatggctattaggaaaggttggatgcagggtccggctatccaatcggggaatgcggttgctcggttctttgttgcgctgagccacagaaaggagataaatgcagcactgaagaaggaagcagagtattttggagacatagtcattctgccgttcatcgaccggtatgagctagtggttctgaaaacggttgcgatatgtcaatacggggtgcacaatgtcactgcagattacatcatgaagtgcgacgatgacacctttgtgcggctggatatagtactgcaccaaatcagtacctacaacaaa

SEQ ID NO: 2228 - DNA, 377 bp, Zea mays
  Clone ID: LIB3136-022-Q1-K1-H11
gcaaagcaacctactccgcgctcgctcctccacttgctcccctcctcttccgtgctcgtaccgtgcaccgtccgctctcccttcgcttacgccacacccagcccaatcaactcgccgcggaccgcgcccatgccctcattcccctgctcctcccaaaattgaccacccaatcaatcggctcctagccctcacccccgacccgttcccatggatcgcaccacctccaacaacagcagcagtgccagtagcaccacctccgccggcagccagaacccgcacctcggcgtcaacaagctcgggcgctccattcgcaagggcacgccgtcggcgtccccgtagtcacagcccgcccgaaaccgcccttcccagacccagcc

SEQ ID NO: 2229 - DNA, 363 bp, Zea mays
  Clone ID: LIB3136-022-Q1-K1-H2
ccacgcgtccgggcagatgtcattactccttacgaacctgtacgttctgggcgttgacgtcgaggtgctcggcgagaaggaacctgaacctggacgagtcgaggttggtgccggatccgatgacgcggctggccgggaagcccgaaagcttccaggcgacgtaggtgagcacgtccacggggttggacacgacgagcagcagcgcgtcgtgggactgctccgccagcggcggcacgatcttgcggaacagcgccacgttccgctggagcaggtcgagcctcgtctcgccctggatctgccgcgccccggccgtcacgatgaccaggtccgagcccctggtcacggacatgtcggtgcccgaca

SEQ ID NO: 2230 - DNA, 398 bp, Zea mays
  unsure (1)..(398): unsure at all n locations; Clone ID: LIB3136-022-Q1-K1-H3
cagaatcgtttggctattcacttgcagcaccttgtctcattaccaaaaatattccggcctgattgggactctcatattaccattggacctccaaaatggcaaggccctgaagaacaagacagccgatggttcgagccaatcaagtggaagaactttgctcatgttagcacagcacccatagagtacactgaaacaaatattacggacctatctggtgtttatattgttacaggtgcacagttgggagtgtgggattttggtgcaaagagtgttctccacctcaaacttttgttctccagggttcctgggtgcacaattagaagatcagtgtgngaccacagcccatcaagttctcaattcataaagcagatgaatcttcatcgtcctcgagtgataat

SEQ ID NO: 2231 - DNA, 383 bp, Zea mays
  unsure (1)..(383): unsure at all n locations; Clone ID: LIB3136-022-Q1-K1-H5
gcgccaggccgccaagcgccagcaccaccgttccgcgcccaagcaggcaagcaccactgacgcacgaggccaccaccccaccgcttcgagccgagggagaagacggcgcggggcggcgcgctcaggtcggagatgaggggcggatccagacgggcctcggtcgccctgtttctcctcgctgcgtccgggatctgcgcccagttcaccgcagtgctagctggtgatcctcaaacatccaacgatgataagaaggctgaagctcagccaaagggccatactggcaagacagttttcttcgtcctcctaggagtggcggccgtcattctngtgtcatttttcaatttcaagtattggcagaagaagaaaaggaggaacaacatgca

SEQ ID NO: 2232 - DNA, 434 bp, Zea mays
  Clone ID: LIB3136-022-Q1-K1-H6
acttttcattgccctcactaaattttctattggagtagaatttttttctcaaccagcaaggggtctacaccattgtcattgggagccacatctcagccatctaccactacggcttcgcaaaccttatgatgcgcaggtatgttgaggccactcgtgaattcaacaagattcttctgtatatcctcaagtacaagcagtaccaccagaattcccctcagtatgatcagatactgaagaaaaatgagcagatgtatgcattgttggcaatttgcctatctttgtgcccacagaacaagctcattgatgaaaatgttagcacccagctgaaagaaaagtataatgacaagatgacaaagatgcagaggtatgatgatgaagcatacgctgcttatgatgagctattctcgtatgcttgccccaagttcattacaccc

SEQ ID NO: 2233 - DNA, 219 bp, Zea mays
  Clone ID: LIB3136-022-Q1-K1-H7
ctcatggaaatgtatcttatgctcgaatgtagtccatcatatgtaagacggattaatccaggggggatcagcctccaggtgatcgtgcatctgaaaattcgtgtcggtgtgtcgtccctaggtccagtcaccgtgcacagggtctgaagatcaagaagtgtgtactgtcctgtacaagtctgcagacatcaactcatcaccccgttgtctgcatgacta

SEQ ID NO: 2234 - DNA, 412 bp, Zea mays
  Clone ID: LIB3136-022-Q1-K1-H8
cgcgtccgtctccgccgcttccttggaagacgaagaaaccctcctcctccaccaacccgatccagctagatccgttgaggcccggccaggagcagctagccgtcttcgatcgatccgttcgcatccccaacgcagttcggtttgtaaggttttactcggttggctcttagtatttgctgctcgatcggctagattgttctgcggtttctcggcgatttaatttggggattggctggtgcatgtacgtaggaaggagcgtgatggccaagacaagctcgttcaagctggagcaccccctcgagaagaggcaatctgaggctaaccgtatcagagagaagtaccctgacagaattccagtgattgttgagaaagctgagaggagtgatattcctgacatcgacaagaaaaagta

SEQ ID NO: 2235 - DNA, 384 bp, Zea mays
  Clone ID: LIB3136-022-Q1-K1-H9
cttccatgcaggaatttgatgtactaatggagtctaagggtggcaaaaagtctagcagtagtggttctatgatgtatgaagctccccttggctacagcattgaggacgttcgacctgccggaggcgtgaagaagttccagtctgctgcttactccaactgcgcgaagaagccatcctgatatcccttttggcttcctcattctagtagtttaggatttcttttctgacactttgattctgaccaaactctcttggctggtggtttctgataaatgaacaagttcccagactttgctccttgcactcctccctccatctccagcattgggttctgattcacctgctccaatggctgttctttctgctgctgatgctttccccgtc

SEQ ID NO: 2236 - DNA, 348 bp, Zea mays
  Clone ID: LIB3136-023-Q1-K1-A1
cacatgaagacaagggtttctctctgagtctgctaggatctggaccttctcatggcggcctgtgtgctagcgggggtcttagagtgtcgacaggtgccccagcagtggcgcccggaccgggtgacaaggatattaagattccattcactgatcattgtatgaagtacgtgtctgaggcagttgggtaccacgttattatcactgaagcggagtcagtggaggaggtggtggatgctaacgcaaagaatgcatcctagaaacgtgggctgcagctgaaaattaagattgggaacccacattttaggaggctgggtattggagctattgcaggtgctgttttcaggactt

SEQ ID NO: 2237 - DNA, 433 bp, Zea mays
  Clone ID: LIB3136-023-Q1-K1-A10
gcctgccgttcgtccagatgggcggggccatgccgtcccagccgtgctgcggcggcatccgcagcctgctgcagcaggccaacaacacccccgaccgccgcaccatctgcggctgcctcaagaacgtcgccaacggcgccaacgggagcggcacctacatcagccgcgccgccgcgctgcccagcaagtgcggcgtcgccctgccgtacaagatcagcaccaacgttaactgcaacacgattaattaaatgaggcgtcctgtgcgcgtccgggcgaggaatgcatgcatggcggagagtaataaagtaatgctactggtattctaagctagatcgaggtgtgcctgtctctagtcatttatggtgtttagcaatcgtctacacagttcgtaaacggtgtatcgtggatgcatgttgccgcgagcagagtacgt

SEQ ID NO: 2238 - DNA, 409 bp, Zea mays
  Clone ID: LIB3136-023-Q1-K1-A11
aagaaacaaagagaggaaagtttaagcccatcaaaatcaaggtcagcaagggctggttcaagatcaccacgccatcataagggaagcaaatcatcgccaactcgtgaccgtcattctcgccatagcaggcattcaaggtccagatctcctggcagaaagcaccgtcacagtgataaaagggacagcagaaagtctgagattcaggacgacaaaagaagatctcatagaggtagcagacacgacaaagatgaaagttcagtaaaggacgaaggggaaagatctcatagaagcaatagaggtgacaaagatgaaaggtctgtaaaggatccagtggaagataaagggatggatactaaagttgttgcacataagaggagctcaacagtatctgaagatgaaattctgaaca

SEQ ID NO: 2239 - DNA, 432 bp, Zea mays
  unsure (1)..(432): unsure at all n locations; Clone ID: LIB3136-023-Q1-K1-A12
cggacgcgtgggcgggcgacggccacggcgacggcgacgcggcggtgtacgtggcgatgctgccgctgctggagggccagttccgggcggcgctgcagggcaacgaccgcgacgagctggagatcaccttcgagagcggggacaaggcggtgcagactgcgcaggggacctgcatgctgtacgtgcacgccgggaccaaccctttcgacaccatcactcatgcggtcaaggtggtggagagacacatgcagacgttccatcacagggagaagaaaaagctgncgtcgttcgtggactggttcggctggtgcacgtgggacgccttctacaccgacgtcaccgccgagagcgtcaagcaaggcctcaagagcttggcggacggcggcacgccgccgcggttcctgatcatcgacgacgggtggcagcagatcg

SEQ ID NO: 2240 - DNA, 333 bp, Zea mays
  Clone ID: LIB3136-023-Q1-K1-A2
tcggctcaagcttatcgagtctgcacaaccattgatcggatcacgtcttaacagctacaaggccggctggagatatggggcgccaacacgctcgtatacgtcatctaaagcttcatcccctccctcgacatgatacatacaacagggtccatacaataaccgaaggcattaacttccaccttccacacgtacaaggcggagcgccagccatacccggagtgaggcatgtaggcctatatatattcaagtccatgccttatgatgatgccactatcatgaagtggcttctgacgacttggacctacgacaagtgcacggccatgactagaaact

SEQ ID NO: 2241 - DNA, 316 bp, Zea mays
  Clone ID: LIB3136-023-Q1-K1-A3
ctcctgtcacgtaaggcgctgaggggaacgcataagagcctgacgaggacgagagggcggtggctcacaactatcacgacgagcatagcgaagaggcttaagatagaaaaaagctatcgactatgtaggtgagaacgaggcatcctgcgttatagcgcactataaatagctacatacaggtccagtcgtgatcgagagcgcatatcttatgctcttgtactcaccgtacgcatgcttacctcctgttctactgcgttacacactcttactacgccctatagccctttaccttgcctggtgctgccactgacacggg

SEQ ID NO: 2242 - DNA, 406 bp, Zea mays
  Clone ID: LIB3136-023-Q1-K1-A4
caaagattcctttgtatcgcaagaaaactgtcagaattcgtctgatctatcactggtgttgaactctagttgacctgattgtatttcacaggagatgaacctggaggcacctccagcattgggaggtggatgtgcagcccccatgctaggagattcgatggaaaaggctccaagctcaccttggatgcctttctccatgctgtttgcagcgatctctaccaaagtgtctcctgagaatatggacgtgattattggttgctatgaagagtttaagagcaagaaaataagccgaggtgaactagtgaagaagctgaggcatgtagttggtgatagagtgctaatatcgacgataatgcgtctccaaaataagttacctcccagggataagcgtgaggaaccagacaca

SEQ ID NO: 2243 - DNA, 262 bp, Zea mays
  Clone ID: LIB3136-023-Q1-K1-A5
gcgaaagtcaatttaatctggtgctgaacattgagttgcaacaaatcatcgatagagactgagtcaccgcagctagaaaccactgtctcaaggtgctgaacattgagttgcaacaaatcatcgatggagaccgagtcaccgcagccagaaaccattgtctcaatttgaggagattttccatctatgtttgttagaaggcataatgctatttatctcttgtattcgaacatttggcaattaagaaatagaagattacttcccc

SEQ ID NO: 2244 - DNA, 161 bp, Zea mays
  Clone ID: LIB3136-023-Q1-K1-A6
caagagatgctccaacatctcagcctgcaagcaagatcatgtcacggagaccagagtcactcgcagtcaggaaatccattgtctcacttttgagacagattttccatcatatgtcttgctagaagcgcgataagtgctatttatcgtcttgtatatcgaac

SEQ ID NO: 2245 - DNA, 451 bp, Zea mays
  Clone ID: LIB3136-023-Q1-K1-A7
gggctgcacagttaagcgcgacggctgcacacggctgcaaggtacagctcgacggctgctggtaggggcatcaccgcatcatccctgcacggtaggctcttgacccctgcacaatacggctggagggctacgagacgagtggtggcggagtctgctcgctggaggttgggcgcgtggacgaggtgaatagttcatttagaacctgctgcagatttgcaacaaaaacatgtatgcaactaggagatctatgatccatctcgaagatgaagaattagatgatgaacttgaccacctcatgcttctcatgatgggtgaatatcggaagaggaagcataagcagcgaaagaagcatcgaggttcagtttttggacacaaggtttacaatcaaaatagagatgaacacgggcaagaagcaaatactggacacccatctcctcctagctgttcactc

SEQ ID NO: 2246 - DNA, 334 bp, Zea mays
  Clone ID: LIB3136-023-Q1-K1-A8
gtctggcgcctatccatatggcacgggagcacggttgctgtgatagctgcgaatgtcccagccgtctatgaagctcacttagcagtaccaatgtcaggagctgcagctaactgtgtcaatatatcgctaaccaccgagacaatagcattcctccttgaacactgcgtgccacaagctgtgaaggtggaccaagaattctttaccctagccgatcaatagctgcaaatacttggcaacaagaagacatctgatgtcacgcgtgctccaaccttgatcgaaatcgacgacccaacctgtgatcccaattctgtacatcatgctctgggaaagggag

SEQ ID NO: 2247 - DNA, 67 bp, Zea mays
  unsure (1)..(67): unsure at all n locations; Clone ID: LIB3136-023-Q1-K1-A9
ccgtccgannagcgttcgacgtggcagtgtcgaatccacnttccatggnnnactacgcnncaagatg

SEQ ID NO: 2248 - DNA, 288 bp, Zea mays
  Clone ID: LIB3136-023-Q1-K1-B1
cagctccctcatgctgttggagctgcctactctctgaagatggacaagaaggacgcgtgtgccatcacatactttggggacggtgggacaagtgagggagatttccatgcagcgctcaacttcgcggctgttatggaggcaccggtgatcttcttctgccgtaacaatggctgggccatcagcactccgactactgaacaattcagaagtagcaacagcgtgtcttcatatactgatccatggcagttacaagtaaacaatgcaatgtcgtgttaaaattctagtcgt

SEQ ID NO: 2249 - DNA, 429 bp, Zea mays
  Clone ID: LIB3136-023-Q1-K1-B10
gatgtacctgatggtggtgcatccttccatgttgccagtcaacacggttgcggcaggagatcttgttcaacaacttattggctgggttactaaccaccctggacatggggcgacgacgaccaagctagcaattctgcgagggtactcaaggaccttttacattctggtcatagacgaaccaggccaacacagatcattttattatttgcatcacttacttacgcagatcaaggagatgtgggtgaggcttctcatgtatgctgctggcaaatgcagcggagaggtgcacgcacgccaacttggtgaaggacgtgagctcatcacctttgtctggctactcatgctgcatcatggacttggagacatggcagctgagttcaagcttttaagatctaatgatccaaatgtagccgagcggggggcgtggat

SEQ ID NO: 2250 - DNA, 379 bp, Zea mays
  Clone ID: LIB3136-023-Q1-K1-B11
ctcgagtccaagattatcctcgatcgggagacgcagaggtcccgcggcttcggcttcgtcaccttctccacggaggaggcgatgcggaacgccatcgagggcatgaacggcaaggagctggacggtcgcaacataaccggtcacgaggcccagtcccgcggcggccgtggaagcggcggccgcggctactgtggtggccgtggaagcggcggctacagccgggggcggccgccgtgatggcggcggcggctacggcggtggcggcggcggctacggtggcggcggtggctacggtggtggtggtggcggctacggcggtggcaaccgtggcggcggctacggcacctccgacggaacctggaggaactgaccggggggg

SEQ ID NO: 2251 - DNA, 409 bp, Zea mays
  Clone ID: LIB3136-023-Q1-K1-B12
aggctcgagactacaacgttacagcacaacacactgctagctgcacgtacatacgcagatagagaccagcagcaagctcgaccgatcgagaggcatggggagtgtaccggaggagaaggccaagctgggcttcggcggcctggtgggcgacctgagggaggtgtacgagagcggcaggacccaggacctggagtggcggcagtcgcagctcaggggcctcgtcaggctcctggaggagaaggaggaggagatcttcgacgtgctccacgaagacctggggaagcaccgcggcgaggccttcagagacgaggttggggttctgaagaagtccgtcgtcgacaagctgcaaaacctcaagaactgggcggctccggagaaggctcacacgccgctcgttgccttcccggcg

SEQ ID NO: 2252 - DNA, 359 bp, Zea mays
  unsure (1)..(359): unsure at all n locations; Clone ID: LIB3136-023-Q1-K1-B2
cgcagattctgagcccgcagctggagccgttggcggaggcgcagcgcatgctcgtgggcggcctccagcacacgtcgacgcaggcggaggacgccctgtcgcagggcatggagaagctacagcagaacctcgccgagatcctgaccgccgaggctgaccccttcggggcccccgacgcctacatgctgcagatggccactgcggtggagaagctgaaagagctcgtcaacttcgtcacccaggcggaccatctccggctgatgacgctgcaacagatgcacaagatcctgacgacgcggcaggcggccaggggcctgctggcgctcggcgactacttncagcgcctncgcacgctgagc

SEQ ID NO: 2253 - DNA, 351 bp, Zea mays
  Clone ID: LIB3136-023-Q1-K1-B3
ccctcactcccgttccatttccccatctcccagatccaattcgcgagttctccctcctctgccgccatggcgctctctgtggagaagacctcgtctggacgggagtacaaggtcaaggatctctcgcaggcggacttcggccgcctcgagattgagctggccgaggtcgaaatgcccggcctcatggcgtgccgcgccgagttcggcccgtccaagcccttcgccggcgctaggatctcggggtctctccacatgaccatccagaccgccgtcctcatcgagaccctcaccgcgctcggcgccgaggtccgctggtgctcctgcaacatcttctccacgcaagaccacgcc

SEQ ID NO: 2254 - DNA, 323 bp, Zea mays
  Clone ID: LIB3136-023-Q1-K1-B4
ctgcctcgaggttgcgtgttttgttctctgtgagcgtcgtgggtgttgatggcgtcaacggcgtactcgcggccatccaagccgcctgggccggcggccggagacaggagcggaccgcggctggccaaggagctcggcaggatcgagcccaagaagctgggcatcgggctggttgccggctgctgcttcgcgctgctcacctacctctcctttgcccggctgtttgccatctactcgccggttttcgacagctcgtcgtccatggtgttgaagaacatgccgccagcaacgacgacggtgccgggtacagctacaggggcgct

SEQ ID NO: 2255 - DNA, 443 bp, Zea mays
  Clone ID: LIB3136-023-Q1-K1-B5
gtttctgatcagcgaacatgggaacccgcggcgtcgccctgctgctcctcgcggcggtgctgctcctccaggcgctcctccccgcgtcgtcggagggcctggtgcgggtcgcgctgaagaagctgcccgtcgaccagaacggccgcgtcgccgcgcgcctctccgccgaggagaggcagcgcctcctcctccgcggctccaacgctctgggctcaggcggcgacgacgactccgacgtcatcgcgctcaagaactacatgaacgcgcagtactttggggagatcggcgtcggctcgccgcagcagaagttcaccgtcatcttcgacaccggcagttccaacctttgggtgccgtccttcaagggctacttctcgatcgcttgctacttccactcgcgctacaagtcaaggcagtcaagcacttacaagaagaacggaaaacct

SEQ ID NO: 2256 - DNA, 368 bp, Zea mays
  Clone ID: LIB3136-023-Q1-K1-B6
cggtcgtcgtacacagatcacgatgctgctcccacactcttcgtcagcctctgcaactgctaccactcgtgggctagcactagcagcagcagcaccgccgccgcgtccgaccgctcgcccccggcgcgcacgcctcctgcctccacgcgcgcgggccgagacgcatgcgacgggcgttggcgccgaccgcgcggccgaggcgcttctccagagcgggctgcgccgtgagtcgctgccgcggcacgtcgcggtggtgatggacgggaactcgcggtgggcgcgcgagcgggggctgacgcccgcggacggccacaaggccgggggccgcaacctggagcgggtcgttgcgctgtcgcgcgcctggggca

SEQ ID NO: 2257 - DNA, 360 bp, Zea mays
  Clone ID: LIB3136-023-Q1-K1-B7
acggaatctttcccgtgtatcccaactctcacccgatctcctcgataggcttttgtctccaaggccgcgctttctaacaagattcctcccctcctctctccgataacgctagcctccgccgccgccggcgacgaatccggtaagcctccttgcttctgctagatacacggctgccagattggtgcgccccgcgattagggaaagggtcgattgcgatcagccgttcctctgccttaggtcatcgtagttgattagtcggcggtcactgctcggattgggcacccactgcgcataggtggggggctcacccgggaaaaagcctatctttttctttttcagtaatttttggccgtttgaagt

SEQ ID NO: 2258 - DNA, 331 bp, Zea mays
  Clone ID: LIB3136-023-Q1-K1-B8
cgcccccactcctatccgcagagtactacatcaccagagggaggttgcgagttgcgaccgggggccggccgaccgagccaaagtacgctaccactcttgctgcaccgaccgcgagggtgcaacaacgacttacatatatatataaatataaatatccgcgccgaagctagctagctagcagagcagcccgaccgaagccgagtagcctagcctcctcatatatagcagcaccaggacgagatcgtccatcgatcgatggtgtctctgcagtcctcatgagcggcgcctgtcctgccggaggccgtcaccgcgaacaagctcccgccgtggc

SEQ ID NO: 2259 - DNA, 439 bp, Zea mays
  unsure (1)..(439): unsure at all n locations; Clone ID: LIB3136-023-Q1-K1-B9
gtcgaggctgttttgaatagtctggcagcaaatgttccaaaggctattgtgctttgtcaagtggagaaagcaaaggaagacatgcttaaccagctatacagctcgataagcgggcaaagcaatgctaagattgaagagctgcttcaagaggaccataatgctaagcgcagaagggagaagtaccaaaaacaatcatctctcctgtcaaaacttactcgtcaactcagtatccatgataacagggcatctgtttcctcttattctaatgacaccactgaagccgagagccctcgaacaccaagccgctcacgtgaggactggaggtcagcttttgattccgcttcaaatggtcctgttgctggaagcacaaacagtcaatcaaggtccaaaagtgctgacggtcgcagtcggcgctatgagaacggngacgtgagctcag

SEQ ID NO: 2260 - DNA, 398 bp, Zea mays
  Clone ID: LIB3136-023-Q1-K1-C1
gtcaaggccaccatctatgccgccttttcctcatcagatgcatttacaagtaccaaattcatttgggttgagggatgcaaatgctccgcagcacatgttacaacaaccaatgtttcatccggttgcgaatcctcaaactaatttcctccctggccaaccaccattgcctagccaaccaccaccacagcagctgtaccaggctagttcacactacaatacacaaaatacgactccaatgcaagttgataggggcgctccctgggggcgggcccctgatgctcccactcctggctcccatttccctggacaattacccgggttgcccggacaaatgacccaaggaattggtggtatccaggcaggccaagcaccactgacacctgagatggaaaagatgc

SEQ ID NO: 2261 - DNA, 388 bp, Zea mays
  unsure (1)..(388): unsure at all n locations; Clone ID: LIB3136-023-Q1-K1-C10
gtgaccaaggagaagagggcggccggcgtcctggacaaccacgacgagggcgagaggtacgccatgcacggcctcaggaagttcgtccgcgggaagaagcccgagatcatggcttccatcaactccttcttcgccgaccctcccaaggacgattaagctagattccgtcatggatggatgagtatgttttaccaatcattagctgccgggggcgcgccttgattcgtagccatcgtcggtacttttttttttggtttctaaaattctaattctcccatataaatggaacatcatgcatttgtcgtgtgtgcttgcatggctgcgaacgaattcagcatgccttgtgattttcatcacatatttgattaataactgatgactatntgat

SEQ ID NO: 2262 - DNA, 394 bp, Zea mays
  Clone ID: LIB3136-023-Q1-K1-C11
ggagagagatgctgccgtggggagagtcagggaccagttccccgtcggcatgagggtcctcgccgtggacgacgaccccgtgtgcctcaaggtgcttgagaacctcctgcgccgctgccagtatcatgtgacaacgacgaatcaggctgttgtcgccttgagtatgctgaggcaaaacagggacctgtttgatcttgttattagtgatgttcacatgccagacatggatggctttaagcttctagagcttgtggggcttgaaatggacctccctgtcattatgttatcggtgaatggagagacaaaaactgtaatgaaggggataactcatggtgcctgtgactatctcttaaaaccggttcggctggaagagcttaggaatatctggcagcat

SEQ ID NO: 2263 - DNA, 434 bp, Zea mays
  Clone ID: LIB3136-023-Q1-K1-C12
gtcgaatactcagtgaatactatgatgcatactctgtacaggtatcgaatgacgcaggcaatacgatctatctggcacgcacgttggttacgcatggcaaagatgaatgtgccatggcctcatcttctaaagagaaagcaagaccagtgacgcataaacctacgcctgctctgcgtgctgtgcatacactactccatgaatgaactcaccaattctgctgaacgaatcgcgttgatatatactacatactagaccgactcacggacatgttttcatatattaacgcactgccactcaacgtcatgatggatctgatattgcgactacgaacattaatgcgcgtcactatgtgtatgcccaatcagcgttatcagacctacatgttatgtacaaatacatcgatatatataaacattgatgatcattccacatat

SEQ ID NO: 2264 - DNA, 341 bp, Zea mays
  Clone ID: LIB3136-023-Q1-K1-C2
agggggctaaaacgaaagaaaagcagcagacggaggaatccagatacaggggaagggctcccccaagttctccagaacgcaaggaagaatatgcgagcgacatcgagggctgttccatgagtttcggcacgaaacaggcactgtctctgcataagaatgatatctgcccggagaagggctgctgcaggaagttcttctcgcacaagtatctgctgcagcatcgcaaggttcacgccgacgaccgtccacgaaatgcccgtggaagggctgcagcatggcgttcaagtggccatgggctaggatagagcacatgagggtccacacgggcgacaggccctacg

SEQ ID NO: 2265 - DNA, 366 bp, Zea mays
  Clone ID: LIB3136-023-Q1-K1-C3
ccatcgtccccgcctgcacctcgcgagcatccaaagctgtacttgcggcaagttctcgcaaaatcctactcccaccgccgactcgtacctccgctcccctcctccccaacccttccacgcttgcttctccgggagggaaggcacacgggaggtcgccccgccacccatcgcaaaagccacgcgccaccaaactcttttttccctcacccagtcgctttcgcgttcagcgcgagctgagccagccagtgggtcggtcgctggaggcggagccataaaggcgtcagcgacggcagcatgatgagcggcacatcgggcgggagggacgccgaaggcgagtgggaagttcggcccggcgggatgctggtg

SEQ ID NO: 2266 - DNA, 363 bp, Zea mays
  Clone ID: LIB3136-023-Q1-K1-C4
gactggacatagtggactgcctcctggttaacaagaatggccgcttcactggtgaggcttttgtggtcttcccaacagctatgcaaacagaatttgctctgcatcgtaacaggcagaacatgggccggaggtatgttgaggtgttcagatgtaagaagcaggagtactacagtgcaatagccaacgaggtgagccagggtggttactttgagtcggagtgtcgccgctcctcacctcctccgaggccccctaagaagactgctgaagacaagggcagcatggagtacactgaggtgctgaagctccgtgggcttccctactctgcgacgactgaagacatcatcaagttcttcctggagtatg

SEQ ID NO: 2267 - DNA, 278 bp, Zea mays
  Clone ID: LIB3136-023-Q1-K1-C5
caagaacggccgcctcgccatgttctccatgttcggattcttcgtccaggccatcgtcaccgggaagggcccgctcgagaacctcgctgaccacattgccgaccccgtcaacaacaacgcttgggcctacgccaccaacttcgtccccggcaagtgagggaggcgccgccggtgacctttaagtgtccggatgcatgtgagcgcacgctggttttcggtttgtaccatgatgtaaactattgttcaatcgacaaggaataattgtgttcattgtcatt

SEQ ID NO: 2268 - DNA, 357 bp, Zea mays
  Clone ID: LIB3136-023-Q1-K1-C6
gtccgatgcggccaatgggaagccatcacagtgggcagcctgcgtggcctagttttggcatgggcgatggagtgccctggggaggaacaggagggcactcatttacgacaagtgggctatcttcatctcttgcaagaaaggattatgggagcatcttttagtgtgttgtggacaggaggaatggcgttgattcattgcagtcgtaaattatttgtattagcaaaattggagtgcgatgattctggtttattgtttcgatgttgttaccccatccctccaattggtcctttgtgaacaagacagttgatatacaatatatgatcgatgacaatagcattcctttgtagcccttttttt

SEQ ID NO: 2269 - DNA, 346 bp, Zea mays
  Clone ID: LIB3136-023-Q1-K1-C7
gcttcgctgggctcaaactcagttccatcagcaacaaggaggagcagattacctgtgagcagatcatctccgcctgatgtgtcacccagtgtcaccaaaacatatagtccttcatccatcaggaacaagaagctgtcaccgccttcatatcgcaaagcgcgccaagcaaataattgtaactacaaggttgagatagctgttgctccggatgctacaccaatcaaagtggtgacggaggagaagctcctggaaggaggcaatgtgagaggcagactggaggctaggagggcactcttccaaggcagccaggataggtcggccaagctggctggacacaaaagcaggt

SEQ ID NO: 2270 - DNA, 276 bp, Zea mays
  Clone ID: LIB3136-023-Q1-K1-C8
atcgcgccctgcatctcctacgcgcgcggccagggctcggggccctccgccggctgctgcagcggcgtcaggagcctcaacaacgccgcccgcaccaccgccgaccgccgcgccgcctgtaactgcctcaagaacgccgccgccggcgtcagcggcctcaacgccggcaacgccgccagcatcccctccaagtgcggcgtcagcatcccctacaccatcagcacctccaccgactgctccagggtgaactgaaccctaaacgacgacgacggcgcc

SEQ ID NO: 2271 - DNA, 425 bp, Zea mays
  Clone ID: LIB3136-023-Q1-K1-C9
tgcattttgcagtgaggattcacctaatctacaagctgcaattgatggtcctggcaaatggactggtcagccccttgtacaatgcacttcccacatgtgcccgataagaatccactggcatgtgaagctcaactacaaggattactggagagtgaaaatcactatcacaaacttcaacttccgcatgaattacacgcagtggaacttagtagctcagcatccaaactttgataatatcactcagttgttcagcttcaactacaaaccacttactccatatggtggtggcataaatgatacggcaatgttctggggtgtaaaattctacaatgatctgctgatgcaagccggcaaacttgggaatgtgcaatcagagctgcttctccgcaaggactcccggacttttactttcgaaagggatgggc

SEQ ID NO: 2272 - DNA, 350 bp, Zea mays
  Clone ID: LIB3136-023-Q1-K1-D1
aggagctgggcactctaaaccagaggtggaactggaagagcatggcctacacgctggttttgtgcgttccagtgttctccgtgcaggcagtcctggtgttcgtcgtcgggcccaggcttgttagagactcgaaccatgatctcgggaggaggaagatcgcgaaatacttcgtacggacgcacacgccggttggagacaccagcgtctgcacctacccgttgttgggcaccatctttctcgggcttgtggatgccttcctgatgagctacgtgtcgtacgtcggatcacgggcgctgtccttggtcatcaacaagtcgctgcgaaggagggtgtacctgctgatgctgtcg

SEQ ID NO: 2273 - DNA, 325 bp, Zea mays
  Clone ID: LIB3136-023-Q1-K1-D10
tccgagccacgcgtactatcaagcatacatagcggcgaccgtgttaactttagacgaccaccatctgggggaactctaggtatatctatgatcacaacatccatattcttactctgaagacagatcaaaagtctttgaataaggtgcaaaatgctgtctcacatgacactggtctagatgatctattcggaagtgaagaggaaaacgaagtgtaggctacatgaacctgggcacagcgactagaataggaatgtgcaaagcatgccgaatccgacaatgaagaccaaaacagacaacaagtatacagtctagaagacgctgaaaa

SEQ ID NO: 2274 - DNA, 431 bp, Zea mays
  Clone ID: LIB3136-023-Q1-K1-D11
gtcttcacactcctcgccatcacataaaaccagtgcaagcagaagcagcgcaatggcgagcagcaccatggccctctcctccacagccttcgccggcaaggcagtgaacgtgccgtcgtctctcttcggcgaggcccgcgtgacgatgcgcaagacggcggcgaaggcaaagccggcggcgagctccggcagcccgtggtacggccccgaccgcgtgctctacctgggcccgctgtccggcgcgcccccgagctacctgacgggcgagttcccgggcgactacggctgggacaccgcggggctgtcggcggacccggagacgttcgccaagaaccgggagctggaggtcatccactcccgctgggccatgctgggcgcgttgggctgcgtgttcccggagctgctcgcccgcaacggcgtcaagttcggcg

SEQ ID NO: 2275 - DNA, 430 bp, Zea mays
  Clone ID: LIB3136-023-Q1-K1-D12
ggggcattccagcccttcagaatgataacagttcaggcactattccatactcaacctccaatttcctgagcccttctgataacgatttccccttgaatcaaccgctacgcagcgctggctgcttagatgagtcggattatcttccatgtgcagagaatgccgaacaggcaaatcaacagtttgcaacctttgtgaaggtttacaaatccgggaccgtcggaaggttgctcgacatcactagattcagcagctacgacgagctccgtagcgaggtggggcgtctgtttggcctcgagggccagctggaagaccctttgagatcaggctggcagcttgtatttgttgacagggaggacgatgtccttctggttggcgatgacccatggcaggaattcgtgaacagtgtgtcctgtataaagatactttcacc

SEQ ID NO: 2276 - DNA, 208 bp, Zea mays
  Clone ID: LIB3136-023-Q1-K1-D2
tcgggagaccggtactataaggtacaggtgcccctgtacgactgtgtgctatacgctctctacgtcaccctcagggcgctgagcgccggcagcgctggccatcttaataagaacattgcttattacatacttgaaacattatgtattgacgagaccgatatgcgagaaactgtgcaactgacctcacacaaccagactgcgggacaca

SEQ ID NO: 2277 - DNA, 320 bp, Zea mays
  unsure (1)..(320): unsure at all n locations; Clone ID: LIB3136-023-Q1-K1-D3
cggtcttatagtgcctgatctcccgtacgtggccgcgcactcgctgtggacccccgcctctttcatctcggccaagctgcgagacatgatgggcttgtagtaggagagcgagtggccgcagcatcaggaccgtctccaactcgccagtactcagccgccgcaatcagggacagggagctcgagcgcgcgccccacctgcgccgacgcgatgcgggccaaggttcctcttccctcgcctccgctgcgttcttctttccatgatgatgcgatgaaaccgtgtcctaggtagctntgcggagctagtcattttctaggttttc

SEQ ID NO: 2278 - DNA, 390 bp, Zea mays
  Clone ID: LIB3136-023-Q1-K1-D4
agcagattcaaaacgatcatcaagaaaccctactccagttctttctatccttgcgaaggacattagtgacctagctacgaaggagaaaaaattgtacagtccaatactgaagacatggcatcctcttgcttctggtgttgctgttgcaacccttcattcttgttatggaaatgagctgaagcagtttgtagctgggcttacagagctgacccctgatacagttgaggtacttaaatcagcagacaaattagagaaggaccttgttaatattgctgtagaagattctgtggatagtgatgatggaggcaagtcactaatcagagagatgccgccatatgaagcttgaaatgcaattgctaatctggtgaaagtgtgggataaagaaaagag

SEQ ID NO: 2279 - DNA, 358 bp, Zea mays
  unsure (1)..(358): unsure at all n locations; Clone ID: LIB3136-023-Q1-K1-D5
attgagatgcaggcctgaggaactacgtgtccctttcgaacggttcggccctgttcgggatgtttacctgccaagagattatcacactgggactgtatttttggttgaagtaaatacaagccctgaacaatcctagtcgttcatttgcttggtgagatagagtattgtgagaatgaagttcttttatcaagacaagattcaatttgttaatttcctgaagagaagagggtttgaccgtgtcttccatgggaatatataatgaagacaagttggtctcaagaacttttcatgagttttcaaactcgaagaaattgaagcanatcgctttacgaagatgtatacaagaaattttggatct

SEQ ID NO: 2280 - DNA, 426 bp, Zea mays
  unsure (1)..(426): unsure at all n locations; Clone ID: LIB3136-023-Q1-K1-D6
tggtgcttctggtttcgcccccattcgcctgaaggacaagccttactggatcatcaagaactcgtggggcgagaactggggggagaacggatactacaagatatgcaggggttccaacgttcgcaacaagtgcggcgtcgattccatggtctctaccgtgtccgcagtccacgcctcgaaggagtagactctggtcagcggtgataatcgtgattccatatattgtagaactataatccctgctagtaatccatttgtgctgtttatgtatcgaaggcagcaaagatgtgtgaagcggcaatgggatgcttgctgtaaggtaatatgtttggcttgctaggcatgctacacgctatttggatgtagcaacgttatcaccagctgtatacgctntttaatcgacaacatttgaataatatgtacata

SEQ ID NO: 2281 - DNA, 420 bp, Zea mays
  Clone ID: LIB3136-023-Q1-K1-D7
gatcgagcttcttttgcaccacaaggtcgaggatgtcttgcagctgcggatcaagctgcggctgcggctcaagctgcaagtgcggcaagaagtaccctgacctggaggagacgagcaccgccgcgcagcccaccgtcgtcctcggggtggccccggagaagaaggccgcgcccgagttcgtcgaggccgcggcggagtccggcgaggccgcccacggctgcagctgcggtagcggctgcaagtgcgacccctgcaactgctgatcacatcgatcgacgaccatggatatgattattatctatctagcttgtggtggtggttgaacaataataaagcgaggccgagctggctgccatacataggtattgtgtggtgtgtgtgtgagagagagagaaacagagttcttcagtttgctatctc

SEQ ID NO: 2282 - DNA, 366 bp, Zea mays
  unsure (1)..(366): unsure at all n locations; Clone ID: LIB3136-023-Q1-K1-D8
cggcgagcctggccacatggccagggactgctccagcggcggcggcggctacggcggcggcggcggtggtggtggcggcggctgctacaactgcggccaggccggccacatggccagggactgccccagcggtggcggcggtggcggagggaggttcggcggcggcggcggcgggggtggcggcgaccgctcctgctacaactgcggcgaggccggccacatcgcccgcgactgccccacgtgaggtgtgtccgcgtccgtccagccagatcagatcggatcgctccaccacctgctggtctgatggcgccgcccccttctagatctcgcttaanaaaacacccccctctcgctgtgtgtcggagt

SEQ ID NO: 2283 - DNA, 378 bp, Zea mays
  Clone ID: LIB3136-023-Q1-K1-D9
gtcgagcaaccatggcggcggcggcggtaaccctcctccgccttcctctcgcgcgactctcctaccacctccgctccgtaccttcctctcgtctcccgtccccgcgcctccgtatctttgcctcccatcgccttttctcttccctggaccatggctccgcctctgcttccgccaccgcggccgtggccgaggttgtaggcgtgccggacaaggaggaggagtcggtagaggaggaatctgcggccgaggccgaggccgaggcggaggcgcccaggtcattcgtgctcccacggctgccgcggccgaagctgaacgtgaaagagcggaaggagctggcctcgtacgctcacggcctcggcaaaaagctcaagtcgcaac

SEQ ID NO: 2284 - DNA, 397 bp, Zea mays
  Clone ID: LIB3136-023-Q1-K1-E10
ccggaccgaacgggggcagatcgatgctttgggtttgaagcggagctcctatcattccaatgaagggtcgtaccgaagggccggttccgctgctcgttcatggttcccactatcctatctcatcatgtgtatatatgtatgtattccatgggggagggtttctctcgtctttgagataggcttgtggtttgcatgaccgaggagctgcaccgcccccttgctggccgctctttggattgaagggagctctgcatcctgatccacccctccatttttttttgcttgttgcgtccttcctgggacctgagatccgaggctcgtggtggctcacttgagcctcgctacactgttttcttctcctctcctgtgctatttgctggttctcctaagattcttt

SEQ ID NO: 2285 - DNA, 371 bp, Zea mays
  unsure (1)..(371): unsure at all n locations; Clone ID: LIB3136-023-Q1-K1-E11
ctatgatctgctgcaccacggacaacacgggcgcaggtacgacaagatggaggcctgcatagcgccgctgccggaggtctccaaggccagcgacgtcgccggcggcgcggtgaagagatggccgcagcggctcacggccgtgccgcccagggtctcccgcggcaccgtcaggggcgtcacggccaggtcgttcgcgcaggacacggagctgtggcggaggagggtccggcactacaagtcggtggccagccagctcgagcagaaggggcggtaccgcaacgtgctggacatgaacgcgcgactgggcgcgttcgcgcggngctggcgctggctggcgacccgctgcgggtcatgaacatggtcccgaccgt

SEQ ID NO: 2286 - DNA, 423 bp, Zea mays
  Clone ID: LIB3136-023-Q1-K1-E12
ctctagagcaaaatacggtattgaagagatgtgccgcgaccaatggaactgggccagcaagaacccttatggctatggatcacctgactctatcaagcagaatggtcaccaaacaaacggatccgctgactcctccaagcagaatggccaccgcacaaacggttcaactgactcacccaagcggaacggccaccatgcgtatgggtctgctgactcacccaagcgcaacgggcactgcgtttttggatcatcagacctcaagccgaatggtaatggccacctgcgctgagcagaactgtttggcctgtgagctccctgtacattcggttgcgatgtgagctccctgcacgttcggtcgaggtctatcgtgaacccactatccgagattgatgtggatcattgggttgacaggtcatacagtat

SEQ ID NO: 2287 - DNA, 395 bp, Zea mays
  Clone ID: LIB3136-023-Q1-K1-E2
cattaattaggccagcacccagtgcatccaagaatggatggaatttatcttctacaccagagcccaaagctacaaaggatgtgaataccgtagcagattttgaaggtgatgatgaggaaaacaaaagggagtagaatgtactgtcgatttgattacggagggtatatttgagatcctttgaagagtgtgctagagcaattttggtatttaggagaggattggccatgttagttattattaatggagcactccactcgatgttatttcttcgattcgataccactacagtaggtcttcacatggcgagttatgcatgtatcttcatagtcttaatgatggtatatgatagaaagcaataagtctggggtataatatttataataatggcaccatat

SEQ ID NO: 2288 - DNA, 288 bp, Zea mays
  Clone ID: LIB3136-023-Q1-K1-E3
gggaactcgcacgcgaaggctgaactcatggttcgcgtctacgttgggaacctggatccgcgtgtcacggtgcgggagatcgaggactagttccggacgtttggggttctgaggagtgtatgggttgctaggaaaccaccagggtttgccttcattgactttgatgaccggatggatgcacaagatgccattcgtgaattggatggtaagaatgcgcgcagggatgagctgtcaactaaagtaggtggtggccgtggtcgaaaccgtatcggttttgatatgaacagc

SEQ ID NO: 2289 - DNA, 389 bp, Zea mays
  Clone ID: LIB3136-023-Q1-K1-E4
gccacatcgagaacacgatcgagcacacaagcacgaagactcgtttaggagaaaccacaaaccaccaagccgtgcaagcatcatggagtacggtcagcaggggcagcgcggccacggcgccacgggccatgtcgaccagtacggcaacccagtcggcggcgtcgagcacggcaccggcggcatgaggcacggtacgggaaccaccggcggcatgggccagctgggtgagcacggcggcgctggcatgggtggcgggcagttccagcctgcgagggaggagcacaagaccggcggcatcctgcatcgctccggcagctccagctccagctcgtcggaggacgacggcatgggcggaaagaggaaagaaaggaatcaagggagaaagatca

SEQ ID NO: 2290 - DNA, 312 bp, Zea mays
  unsure (1)..(312): unsure at all n locations; Clone ID: LIB3136-023-Q1-K1-E5
caccaccaccaaagaaggcgagaacgctccccttcccctccaggctccaggaccgtctcctcgcctgctcatccgccgctgctccccttctctgggctcggagaaccggagagaagcgcgcgcggccatggcgtccagcgcctctcggttcatcaagtgcgtcacggtcggcgacggtgccgtgggcaagacatgtatgctcatctgctacaccagcaacaagttccccactgactacatacctacggtgttcgacaatttcagtgcanatgtagttgtggatggcaccactgtggacttgggcccttggga

SEQ ID NO: 2291 - DNA, 446 bp, Zea mays
  Clone ID: LIB3136-023-Q1-K1-E6
gctgggagacacttgtctgcggccaagttccattcggtgctccagaatgttgctgggactaattatgctgtggcatctgcggagaagaaggaagtggttgtcttggatgcaaggaatgtatatgagactcggatcggcaagttcaatgtgccaaatgcgaagaccttagatcctgaaattaggcaatacagtgacctgccttcttggatagacaagcatgctgagcagctgcatgggaaatcaattcttatgtactgcacaggaggtatacgctgtgaaatggcatcagcttatattcgctcaaaaggtgaaggatttgagaacgtttttcagctatatggaggcattcagcggtatctggagcaattcccagatggtggctattttgaaggaaagacttttgtatttgaccacagaatatcagtgggaagcctaaggaaacatac

SEQ ID NO: 2292 - DNA, 384 bp, Zea mays
  Clone ID: LIB3136-023-Q1-K1-E7
ccctcacgctctcggtctctccctctctctccccaaaacctaaaccctagagccgccagacgccactgtccgtggagcagagcaggctgcagcaccgccgcgccggtgtgcggcgtgccggcgtgtgccctccgtcgtctgcccgtctgcccgtctgttcttcgctgtctgctcaagacacggtgaacagtctgttcttcgccgtctgctcgtcttccccgacggcgccctagccctgttcggctgtccggcctccggcgcccacttgcccatcgccggtcggcggctcgcctccatggaagcccaagaaccggatgggcacgaaggtcattcacgtccgccaataccaatgagtttttgggatcaatgatcaaagcgcacgag

SEQ ID NO: 2293 - DNA, 411 bp, Zea mays
  Clone ID: LIB3136-023-Q1-K1-E8
ggactgcaagagcgtattacgacaacaaagaagggttctattacgtctgtccaggctatatatgtgcctgctgatgacttgacagatcctgctcctgctactacctttgcccatcttgatgctacaactgtgttgtcacggcagatctctgagcttggtatttatcctgctgtcgatccactggattccacatcaagaatgctttctccccacgtgctgggtgaggatcattacaatactgctcgtggtgttcagaaggttcttcagaactacaaaaatcttcaggatattattgctatcttgggtatggatgagctcagtgaggatgacaagttgacggtcgctcgtgcaagaaagattcagcgtttcctgagccagcctttccatgtcgctgaagttttcacaggtgct

SEQ ID NO: 2294 - DNA, 282 bp, Zea mays
  Clone ID: LIB3136-023-Q1-K1-F1
gtgggttggcttctcctccccctccggttcgtgttcgggttcttgaggttctccgcggttcggcttcttggtgcagcggatcgagatggcggcgtcccatgttgagtaccgctgcttcgtcggcggcctcgcctgggccacggacgaccactcccttcacaacgccttcagcacctactgcgaggtcctcgagtccaagatcattctcgatcgggagacgcagaggtcccgcggcttcggcttcgtcaccttctccacggaggaggcgatgcggaacgccat

SEQ ID NO: 2295 - DNA, 439 bp, Zea mays
  Clone ID: LIB3136-023-Q1-K1-F10
caagaagttccaggccgccacgcgcctccgcgccaaggacaagatcgagggcggcaagatcatccgcgtcgaggcgcaccccatccccgagcaccccaggcctaagagggtgtccgggcgggtgacgctggtgggcgatgccgcggggtacgtgaccaagtgctctggcgagggcatctacttcgcggcgaagagcgggcggatgtgcgccgaggccatcgtggcgggctccgccaacgggacgcggatggtggaggagagcgacctgcgcaagtacctggccgagttcgaccgcctctactggcccacttacaaggtgctggacatcctgcagaaggtgttctaccgctccaacgcggcgcgcgaggccttcgtggagatgtgcgccgacgactacgtgcagaagatgaccttcgacagctacctctacaagcgcgtc

SEQ ID NO: 2296 - DNA, 367 bp, Zea mays
  unsure (1)..(367): unsure at all n locations; Clone ID: LIB3136-021-Q1-K1-F7
ttccggtttcggaattcgccggctgcgacgccacgtcagtctcggtttttctctgtgccagtaaaccctatcggagtgtagtcttgctnnngccgccgnnctttaaacggtgaggaggtgagagtctgtcagtgatatattnnnttggcgaagtaaatacctgnncttcttgcntnnccgttcnnccgtgccttttgtgctggcngttgaccagtgtgaaatggctttaccatgttgctncatggtattcggctgtgaccgaccccgtcaanggtttctgcgcaatgattgtggaagccagctcnctcagcaaagcttnccctttaagtttgncggctctgcggggatttcggtgccagtgcagcaa

SEQ ID NO: 2297 - DNA, 361 bp, Zea mays
  Clone ID: LIB3136-019-Q1-K1-G12
caaccgaacaagccctttagaccttgtttggatactctcgtatttagttgaatccacatgtgtaatgtattgagatggattgaagtgtaacttactttaatttacacctcaatccacctcaatacatgtggatttggattgaagtgtaacttagtttaatttacactcaatccacctcaatacatgtggattgatgtaaatacgggagtatccaaataaggccttattgggatgatgaggccatggtttggtgcctttcttcatttttttgtcagtttattcttattggaacacaatgggcgggtctccgcaccctcaccccaaccagacgagttctttaaataattccatgcaccaaagg

SEQ ID NO: 2298 - DNA, 385 bp, Zea mays
  Clone ID: LIB3136-019-Q1-K1-G2
gacaccgtctgttgttgctccagcgactgaaattatgccactgcaagacatcaacagcgaagaaaatgctttggtgaatgatgtggaagagagatccaaagaagaacatccatctactgataacctgaaaggcagcaagaggaggtcttcattctcagttaagcctgaatatccagaaaatggctccaaaaattctccagctctgccaagctacatggctgctacacaatctgcaaaggcgaaactgcgggggaattgttcaccaagacttagctctgattcagcagagaaaaacgggttcactcgtcgtcactcccttccgtcccctaacaatggtaagataatttcacattctccacgtacgcaaaggccaacccatgctggt

SEQ ID NO: 2299 - DNA, 384 bp, Zea mays
  Clone ID: LIB3136-019-Q1-K1-G3
gttgtcctggtaaaggcgagccatactcagacgaagctattgctttgatgaggagaaggatacttcaacgagatgtggagatagaggttgaagcagttgataggacaggaacgttcataggttctttgtgggagtccaagaccaacatgggctctgtgcttctggaagctggacttgccaagctgagttcatttggcttggataggacctcagatgcttatatcctaacaagagctgaacagtctgcgaagcaacagaagattaagatatgggagaactatgtcgagggtgaaaatgcttccaatggatccacacctgaatctaaacaaaagcaaattctcaaggttgttgtcacggaagttcttggtggtgggaagttttatg

SEQ ID NO: 2300 - DNA, 398 bp, Zea mays
  Clone ID: LIB3136-019-Q1-K1-G4
gtccaaatcatcctcataccccgcagcatctccacgccgccacacctcgtcgcgtcgcgtcgtctccgccgagaagatggtcggaccaggcctctacaccgagatcggcaagaagaccagggatctgctgtacaaggactaccagacagaccacaagttcaccctcactacctacagctccaatggcgtcgctgtcactgctactagcacaaagaaagctgacctgatcttcagtgagatccattcacagataaagaacaagaacatgaccgtagatgtgaaagcaaactcagagtcaaatatcattactacagttactgtcaatgagattgcaacaccaggactgaagactatcttaagctttgcttgtcctgatcagagatctggaaaggttgagc

SEQ ID NO: 2301 - DNA, 365 bp, Zea mays
  Clone ID: LIB3136-019-Q1-K1-G5
attcctcccaacaccacctcgcctgcgatcttcgtagcctccgtcgcgtcgagcatcgatcatgtcggcctactgcggaaagtacaaggatgagctcatcaagaatgctgcctacattggcacccctggcaagggtatccttgctgctgatgagtccactggcaccattggcaagcgcctttccagcatcaatgtcgagaacgttgaagagaaccgccgtgccctccgtgagctcctattctgttgccctggtgctctccagtacatcagcggtgtgatcctcttcgaggagaccctgtaccagaagaccaaggatggcaagccttttgttgatgtcctcaaggagggaggcgtcctccctggca

SEQ ID NO: 2302 - DNA, 392 bp, Zea mays
  Clone ID: LIB3136-019-Q1-K1-G6
caggtgtcttgctagagatgaggattcgaaggggtgcgcaaacgtttccaaggccgagactaatgaagaaaaagaaactacgccttcatcaagacgaagatgtctggtctgtctcggcgctgttaccttgatcagcgcgacaggaccaccaaacggactcgctgcggatgcgatgaacaaggccggggtacagaaagctgtttgcaggaactgtaatggcagtggtgctgtgatatgcgacatgtgtggtggcacagggaaatggaaggccctcaatcggaagagggcgaaagatgtttatgaattcaccgagtgcccgaattgctacggccgcggaaagttggtgtgccctgtctgtctcggaactggcctgccaaacaacaaggggcttc

SEQ ID NO: 2303 - DNA, 181 bp, Zea mays
  unsure (1)..(181): unsure at all n locations; Clone ID: LIB3136-019-Q1-K1-G7
cgnntccgcaaggganttcttgcctaagaagcatttcggttgcttttcggaccctgnnnagaccactcnnggcctcaaacagtggcgttcgttgatacttgtgccaaggggcagctgcagnntatctcaaatgannaatcaagggcattctcgtcnnngtggctgcgctttcnnncagtgg

SEQ ID NO: 2304 - DNA, 387 bp, Zea mays
  Clone ID: LIB3136-019-Q1-K1-G8
gaggagtctgggctttaatcaaagggctagctccaattcaaccctgatgatgactgcataattacagtttctgcgaaagagttctttgaagatcctgtatctccaacaattgatgctgcagttcgtttgcagcctagatgcagcgagaaaagtgatttagaatcagctgacagtcatacacaacacgcttgctggtgtcaacatcacgtattggtgcctaattggcaaaggtggttcaatcattactgagatacggagaacatccagagcaaatgtacgtattctttcaaaagaaaatgttccaaaggtagcagcagaagatgatgagatggttcagatcactggaggccttgatgttgcaagaaatgctcttgtgcaaatagctac

SEQ ID NO: 2305 - DNA, 373 bp, Zea mays
  Clone ID: LIB3136-019-Q1-K1-G9
tggcagtcttgcatcttcgaaggtggtaccacatcacgctgatgcacgtgtctacatgctcgcacacccaaaagaatttgatgtggttgaccttgatccttatgggtcaccagctgcattccttgattcagcggttcaatgtgtagcagatgggggcatcttgatgtgctcagctacagacatggcagtgcttgctggtggaaatgcagaagtttgtttttctaagtatggttcttatccattaagaagtaaacactgccatgaaatggcgctgaggattcttcttgcctgcattgagtcacatgcaatccgtcacaagcgctacataattcctataatatcagtacacatggatttctacattaaggttttt

SEQ ID NO: 2306 - DNA, 357 bp, Zea mays
  Clone ID: LIB3136-019-Q1-K1-H1
cgttaatgcaacatgccagaacagaacaaaatgggcccttcttcgtcaggaaagcaaattgacagattggcagcgggtcagaatgcaggagacatcaaaagagatacccgctgggtcacttcctcgttcccttgatgtcattctgcggcatgagattgttgagaaggccagagctggggacacgtgaggaagcttttttttggcctcttcctccttggaatgacttcatttgactgaatgttttgtttctggtatttccagggttatatttactggaactgttgttgcagttcctgatgttatggcactaacttcacctggcgaacgagcagagtgtcgcagggaagctcctcagcg

SEQ ID NO: 2307 - DNA, 312 bp, Zea mays
  Clone ID: LIB3136-019-Q1-K1-H10
gtgcagattaggtcttaaaaagggattgcgtttaagattttattgccagagcctgagctgtagaattttccatttacacacgtgactgtacagggggtaaacttgcaggaatgaatattacttggtgatcctataagatgcacatgctgtgaaccctgatttgttttagctgcttttgttcgtttttgtctacttagccttgcacactgaggacctttattgaggttgccggtctgtgagttgaatcatggcggagcacttggcttcgatcttcggcactgagaaggacagggtcaactgccctttttactt

SEQ ID NO: 2308 - DNA, 413 bp, Zea mays
  Clone ID: LIB3136-019-Q1-K1-H11
cacagatagaggagggtttgcccctgcacaccgctgcgctactgggaggagcacaagtgtatcgctgtggctgcggcgcccggcagtccgccacaagcacacgcgcacacaggggccaagcgcctacacctacagaggagagacaaggtctgccgtccgcgcgtgcgcggaagaggggacggaggaagaaggctgccagcaatcagagatggaggtggggttcttgggtctgggcatcatgggcaaggcaatggcgaccaaccttcttcgccacggctttcgcgtcaccgtctggaacaggaccctcgccaagtgccaagagctcgccgcgctcggcgccaccgtcggggagacgcctgcctccgtcgtctccaagtgcagatacaccatcgccatgctctccgaccccagcg

SEQ ID NO: 2309 - DNA, 336 bp, Zea mays
  Clone ID: LIB3136-019-Q1-K1-H12
gcgttcgggcaattcagccagcatacgtgggatacgtttattggcccagaaaccgcgacagtcagtagggcgacgacttcactgaagacattcgcgtgaagagccaccatatgctcgagagcgaggacatgcagcagctgctgagggtcttcagcatgggtggagcctccgggagtttgtcagacgacacgttcaacttccagccctacatgccctctgcctttgccaacccgcggttcgaaagcgagcgcagccattcatccggcaaagctgtcgtcggctggctcaagatcaaggcggcaatgaggtgggggatcttcgtcaggaagaaagctg

SEQ ID NO: 2310 - DNA, 359 bp, Zea mays
  Clone ID: LIB3136-019-Q1-K1-H2
ggccacgcctgcgccggcatgaggcgcctttcgcgggaccccaacacgggcatgctcgtgggggagacgcccgccatgttctacggccgcaacctctccccgattcagtctggatgctgcaagccaccgacgtcatgcgcattcacctacatgaacgagacgtactgggaacaaaaccccggtgtcccgaccgtgaccaatgaccctgactgcagcaggtggagcaacgaccagcagatgctgtgcttccagtgcgactcgtgcaaggccggcgtcctcgcgggcatcaagaagagctggcgcaaggtggccgtcctgaacatcgcggagttgatcatccttgtgattgtctatgtcgc

SEQ ID NO: 2311 - DNA, 400 bp, Zea mays
  Clone ID: LIB3136-019-Q1-K1-H3
cggacgcgtgggcggacgcgtgggcaaaagcagaaggagaaaatcgatccgattctggagtgggtagacactgaatttgggttcaaacccgttgtctacacaagcttctttggggggaagcaagacgagggccttgctaaagctgtagaaactgttctgaagaaagcaactgactgtgagttggcatccattgatgctatggctgcagcagcccattccttggtgatccctcttgcaatatttagagaaaggttgggtattgaggaggccattgagttgatcaggcttgaagaagaccaccaggttgatcgatggggcttggtggaaggaggtcatgacgttgatatcgcggatcttaaagtgcagatgtcctcggctgttgtatttcttggactttcac

SEQ ID NO: 2312 - DNA, 318 bp, Zea mays
  Clone ID: LIB3136-019-Q1-K1-H4
cttgactggtacaagggcccaaccctacttgaggctctggacttgatcaatgagccagaagaggccttcagacaagcccctgcgtctcccccttcaggatgtgtacaagattggtggtattggaactgtccctgttggacgtgttgagactggtgtcattaagcctggtatggttgttacttttgggcctactggtcttactactgaggttaagtccgttgagatgcaccatgaggctctccaggaggcccttcctggtgacaatgttggcttcaacgtgaagaatgttgctgtgaaggatctgaagcgtgggtatgt

SEQ ID NO: 2313 - DNA, 414 bp, Zea mays
  Clone ID: LIB3136-019-Q1-K1-H5
cggagagattttaggcagtaacatgcaggttaatcaactgactgactactactattggaacaagaactcccatgttcccgcggggacttcgctctccatggcctccggcctggaaacggcctcgaccgtcgacagcctggagctcagcatcgccgtcaacggcctggagctcagcatcgcgcccccttcccggtgcgtctgcggcggcgcggcgggggccatcaaggttctgtgactcggccgggacgccgagggagctactcgcatttggcttcccctgcgagcatgcgtttcatcaagtattatcagcctcgtcaggctgccgcgcgcagccgggtttcggtcttgctggttgtgttggtgtgttctgttctgttttgttgtgcgcaaggaatgtttgtgaagtgcattgcg

SEQ ID NO: 2314 - DNA, 373 bp, Zea mays
  Clone ID: LIB3136-019-Q1-K1-H6
ccccatcaagctttttgacgatgatatccgacggctcgagcatgtggactcagctcgtagaactggtagacatgctgttgcctccatcttggatccttcaaagacgagggacatcgattacctgccgttcttctactccagagtgttcacgttgtcctggcaattctatggggataatgtcggggaagtggtccactttggagacttcacaagcagcagtccgaggttcggtgcatattgggtcaacaaagggcggatcgcgggtgcgtttcttgaaggcggaagtcgggaagagtacgaggccatatcgatcgtgttcggcgggaagctgtggtcacagacatgggtgaactcgagaaacaaggcctggcac

SEQ ID NO: 2315 - DNA, 390 bp, Zea mays
  Clone ID: LIB3136-019-Q1-K1-H7
aaggagctgcgcaccaaggagatcaagaacggacgcctcgccatgctcgccgtcatgggcgcctggttccaggccgagtacaccggcaccggccccatcgacaacctcttcgcccacctcgccgaccctggccacgccaccatcttccaggccttcacccccaaatgaggagttgaacttattattagcattttgaggagtgctaccacacatgcatcgtcaggttgatggccgatatatatgaaacttcacattttttttggtggggaaggactgctgagtagactgtcaatgatggaatgctcgtggtgcgagtgcgatgcatggtgtacttgtactatgttgtaaccagtgtaaaaaggggatcctcgttagatgttatgccatgtt

SEQ ID NO: 2316 - DNA, 380 bp, Zea mays
  Clone ID: LIB3136-019-Q1-K1-H8
aacaatctatcggacagaaggtcttttagggtattacaggggacacggagctagaggggctcgaattgtcccgagtgcagctttgcattatatggcctatgaagaataccgccggtggatcattctcggctttcctaatgttgaacaagggcctgttcttgatctcgcggctggctctatagctggagggacagcatgatatatgcacataccctatcgatctagtacgcacacagttggcttatcatgtgaaatgtgcagtcagagtacattataaagaatctaagccctctgaacaggtagacaacagaatcattgatcgtgtgaaaacattatacagaccaaaagcattgtaatgcatataccgatgcacggctcct

SEQ ID NO: 2317 - DNA, 215 bp, Zea mays
  Clone ID: LIB3136-019-Q1-K1-H9
aacaagctatcgtacagaaggtcttttagggttttacaggggaaacggaggtagagttgctgggattgtcccgaatgcatctgtgcattatatggcctatgaagaataccgccggtggatcattcttggctctcctaatgttgaacaagggccctgtcttgatctagcgtctggctctatagctggagggacagatgtcatatgcacatacccta

SEQ ID NO: 2318 - DNA, 449 bp, Zea mays
  Clone ID: LIB3136-020-Q1-K1-A1
actctagggcgaattcgactcgggcatgagacgcaggggtgcttccatctgctattagcaaaggatttattgtgccagagggaaagttttatcttgtgggtggtgggtatgcaaatacaccatcatacattgcaccatacagaggtgttcgataccatctcagtcaatttaggaggagtcgttcatcacaaagtggttatgcaaactacaaagagttattcagagggatggaagtgtatcactgctaagtttaatgaaaggttctctttggctcatttcacaaaacaacaactacaagagaaggagaaagaacttaaatcaagctataaagtagtaagagattcaagaaaggaaagtggaactggttggaatgactccctatgtatgatattagctgaaccagaagtttgggcaacgttgattagtgctcacccaaaggttgcaaggtt

SEQ ID NO: 2319 - DNA, 362 bp, Zea mays
  unsure (1)..(362): unsure at all n locations; Clone ID: LIB3136-020-Q1-K1-A10
gtaccggtcgagcaacgcgtgctcggacgcctcgtcctcttacgatgattgttcaggtaagatctctttcgagacagaaagacgtggcangctcctgagtgccgtactccccaagcaggagcgcgaggagcaatgggccgccgagaagaaggagaagtccctggccgagaggaagaagtccatcgagagccggaagctgatcttcacccgcgccaagcagtacgccgaggagtacgatgcccaggagaaggaactggtacagcttaagcgtgaggcccgtttgaagggtggtttctatgtcagtcctgaggcaaagctgctatttgtggtccgcatccgtggtatcaatgccatgcacccta

SEQ ID NO: 2320 - DNA, 397 bp, Zea mays
  Clone ID: LIB3136-020-Q1-K1-A11
cgtggccagaaccctttcagctcaagggagggcttcacagtcaacctccgcacctttgggatggaccacgaacagtattccaagaagagagctttcgtccacgtcctactgaagagaaagaagaccttcgtgacggtgacagactccagcgggaacaaaaagacgggtgcctccgccggctgcttggaggacaggaaaggacggtcccgtctctcccgatacgcttccgaagcggtcgcggagcacgtcggacggtccgccaggaagatggggttgagctccatcgtcatgaaggtgaaaggggcttcgttcttcaagaagaagaagaaggtgatcctgagcttcagagaagggttccgaggcgaaaaggtgagggaccaatctcctatcatgtaca

SEQ ID NO: 2321 - DNA, 202 bp, Zea mays
  Clone ID: LIB3136-020-Q1-K1-A12
tcgatcatatcgaacatcgaaatatagcaatagcttggcagcttgattagacaaaaatgagggggatcagatgaagatggagagctacaaagcctggaaggcaaggggtgatgtgtatccaagcctaagtattagctggtagccacaactgacaatcttgaggagactaataacacgaatggcgacactctagattatcaaa

SEQ ID NO: 2322 - DNA, 451 bp, Zea mays
  unsure (1)..(451): unsure at all n locations; Clone ID: LIB3136-020-Q1-K1-A2
acccacgcgnncgaagacgaggatccttgnattcgnttactctcgtactgcaaaaagcatagacagccttctgctgctgaacgtccatctttggaaagtgatcctcctgaacccattcangtagttcagacagatatggcttcatcatctggttgtgcaaggaccgaaccctataatttacacaggagaaggggccaaaagcagccacaagttgtcgctactgcttctctgaaacgtttatatgtggagaatagacctcatattgtcagtggctactgccaaaacagagtaggcaatacatgcggagaatcaattcaaccgtttggtttgtcagatgctgtgcagcaagaagctattggcaatgtgtcttctatggttgaaaaatatacaatcgtgaaggctacatttaggaagagactaacttttggaaaatcaaaaattcatggatatg

SEQ ID NO: 2323 - DNA, 456 bp, Zea mays
  unsure (1)..(456): unsure at all n locations; Clone ID: LIB3136-020-Q1-K1-A3
gaccgacgcgaacganccagaaangacngngaacgggaaagnaactctcaaagacaaacatncagngactggcgggtatgacaatcaattcttggcactccgaaaaaagtgttgcccatccgagcttgcatatattacttctttaagccgctgcaagaagtggaatgctcaaggtggaaagagcaaggcctattttgtaaagacaacagatgacaggttcatcattaagcaaatcaataaaacagagtttgagtcatttattaaatttgcacctgattactttaagcatgtttaccattctctggacactggaagccaaacttgtctcgccaaaatattaggaatctatcaagttaagcaaattaagcatggcaaagaggtaaagattgacttgatggttatggaaaatcttctctttggccacaatatttcacgaatttatgacctcaaaggtgc

SEQ ID NO: 2324 - DNA, 440 bp, Zea mays
  Clone ID: LIB3136-020-Q1-K1-A4
catggatgagctccgcaagcgtgccgaggctgacaagaatgacaagtcagtcaaggatctcgtgatgctgctgttcgagactgctctcctgacctccggcttcagcctggatgaccccaacaccttcggcaaccggatccaccgcatgctcaaactcggtctgagcatcgatgaggacgagcctgttgaggcagaggctgagatgcctcagcttgaggacgacgctggtgaaagcaagatggaggaggtcgactaagtgtcgcatcgcatgcttgccgtttatcttatccctagctaagctacctgtgatagcttaattttcactattgttcgaggtttttggcacgttatcggttgtcctgctggccaggctataagtctggtttatctgttatgtttaccctttttaacagtttgtcgttattattcgtaatggtaaa

SEQ ID NO: 2325 - DNA, 427 bp, Zea mays
  unsure (1)..(427): unsure at all n locations; Clone ID: LIB3136-020-Q1-K1-A5
accaagcaaagcattgaagngtacaagcaggaacacagnctagcaattcaagataacaatgggattctgcaggaagtagattgtaaggggtaaagactgaaggaggacagccaggtgagctcgcttagataggaattacactaaaaggcttaaataattaaactgactcttcatgtgtttgaattggtacattaagatcattgaactgtcagatggtaagatctcaagattatttctatgatactcttcatgtgtttgatgccaaagatgagcatgttatagggcatttccacttacttggatggtaaagaagactctcctacaaattgaaatgcacatacttcgggcttcacgacaactggactggacaggtgtctgcacgcttcagtggaagcagttgaagccccatatatcacagagctcatgc

SEQ ID NO: 2326 - DNA, 424 bp, Zea mays
  Clone ID: LIB3136-020-Q1-K1-A6
ataactggcaaagtggtagctgacttcggctgtggctgtggcactctggctgtggcgagtgctttactggatgctgaacatgttcttggtattgatattgacccacagtcacttgaacttgctcaagaaaatgctgctgatctggagctggacatcgatttagtttggtctgacataaagaacttaaatctgaaaggcgtccatgttgatactgttgtcatgaatcctccctttggtacacgaaggaatggagcagacatggagttcctctctatggccttgcaggttgcttctcaagctgtctattctctacacaagacttccactagagaacatatcaagaaggcagccttgcgtggcttcaatgccatcagtgcggaggttctatgcgagctgcgttacaatctaccgcggacgtacaagt

SEQ ID NO: 2327 - DNA, 427 bp, Zea mays
  Clone ID: LIB3136-020-Q1-K1-A7
gccgggccgcgaatctctgcgtccccttcgtcaaccatggcctccttcttcgccgacgacggcaccgatgacctcccacgcaccacttcccaccccttcgactccgatgacttcggcgccgccgcggccgacgtcgccgccgccgacggatacggcgggtacgcctctttcgccgaggggggtgtcgaggaggtggacgaggagatcaccgtcgagtccgatggggtcccgatccgccacgtctccggggggtactcgccctcgccgttctcccccgagctcgagcccaacggcggcgacggcccgatcctaccgccgcccaccgagatggggcgggacgagggaatcctcctccgcgagtggcggagaaaaaatgctatggaacttgagaaaaaagaacagaaggagagggagctacgtgcccaaa

SEQ ID NO: 2328 - DNA, 428 bp, Zea mays
  Clone ID: LIB3136-020-Q1-K1-A8
tgaatgaacctttgcagtggtttcggctgctgctatacccgaaatggaagtccagggacagggacgagctgcaaggcttcgccgtggaccgccccgagccgctggtgcacttcgcactgtcctccggtagctactcggatccagtggtgcggctgtacagccccaagagcgtgttccagcagctggaggcggcgaaggaggagtacgtccgcgccaacgtgggcgtccgcgggcgggggcagcacaagatcatcctccccaaggccctggagctgtacgcgagggacgccgggctgggcgcgcaggaggtggtggccgcggtcgagtgccacctgcccgagggcctacgggacgccgtgcgccggagccagcagcaggccggccgggcgcgcgccgtggagtggaagccccacaacctggcgttccgg

SEQ ID NO: 2329 - DNA, 388 bp, Zea mays
  Clone ID: LIB3136-020-Q1-K1-A9
gcgaattggagctcgctacccggcgatgctcagcgccaagcggcgaccgatagtccgagacccattcccatccacgcgacggcgctgccatgctctccccttcctccccgtcgcttccattcccgtccctcacaatctcacccccgccagccgagccccaaccctaacgaaatttacacctgcttcgttggcgtgagcggtcttaggcgtcgggcgtcgctgctgtccagcggtgtcggatccgggtcccgcgccgttaggtcgaggtttcttcggcgacggtgcagccgctggatgttagtctggcagatcggggccgagctaggcagtgttgggttgtaacatttgtatcgcatgaatgaactcagagcatctcaatgttaaaact

SEQ ID NO: 2330 - DNA, 460 bp, Zea mays
  unsure (1)..(460): unsure at all n locations; Clone ID: LIB3136-020-Q1-K1-B1
cgacccacgcgaacggccggctcccggcccaacgctcgctnccccctcccgcgaancaaacgantcggcccgcctgggctcgcccgcccgatgggatttggccgtcagggtgatcggaaccggcgctagggttagggttccggcgatccccatacctatggtgcagctgccgagctcggggaagcggcacgcggagccggccatggctccggcgcggcgcgcggcgacggtcaagctagaggtggaggagctcggggccgacgagcgctgcccgctcagcaagcgcgccaaggcagctctgccgatgcccccgacgcctccgcagccgcagcaggatatgtaccacaatgtactcgatgaacctagcccattgggtctgcggctgaaaaaaagtccatcacttcttggatttgattcagatgagactttctcaagcatccaatgctggcgagtcatccat

SEQ ID NO: 2331 - DNA, 403 bp, Zea mays
  Clone ID: LIB3136-020-Q1-K1-B10
gagacgcgcaaggaacaggagcgtaaggtggaggtggaggcggaggcgggggagaggaggacccaggagccgccgcagcaaggccagggcctcagcctctcactcgccaacggcagtggcaggtctggaatgttgccgatgtcaaacatgtcagctaatccttcacagcttacaattttctatggcggatcagtatgtgtgtatgactcagtgccaccggaaaaggctcaagcaatcatgcttatagctgcagctgcagcggcagcggcagctaccaaaagcagtgctgcccctactgttaagcctccaatggtgcctgcagccactgttgccccagcagctgtcgtttctcctgtgcttacacggtctccatcactgcagagcacttctgtagcaactgggc

SEQ ID NO: 2332 - DNA, 390 bp, Zea mays
  Clone ID: LIB3136-020-Q1-K1-B11
ttggcttctccttgtctccttcggcagctagcaggggcggctacggctacggcgacgggggcggcggagcgagcgcgagcgcgtgcggggatggagagggctcttgcccctcgcctgccgcggctgcctcgcctctccctctcgtggccatgccgctcgatgactctctgcactatagctctgctccagattggaggcacggcgcagcagaagccaaagggcccaagctcgaggacttcatgagcatcacttgcagcaacaagagcagtggccgcagcctctacgacagctgcggccaccacgacgacgagcaggccagcaagtaccacgaggtccacggcatccaccccctctcgtgcgggtcgtactaccacggctgcatcaacagcg

SEQ ID NO: 2333 - DNA, 395 bp, Zea mays
  Clone ID: LIB3136-020-Q1-K1-B12
atcgtcaggcatcatcaccgccttctgccgaggctttcgagatggcggcggcggaagcgtcgaggacttgggaggcccgccgtgacgccgtgttcgggcggtgggtcgtcttctcgccggcgcgctcgcgccgccccaccgacctcaagtcccacaaccccaccaaccctagcccgggcccaggggccgacgcgccgcccaagccgtcctgccccttctgcgccggccgcgagtccgagtgcgcgccccagatcttccgcgtgccgcccgacggctcgctgccgtggcggatccgcgtcatccagaacctctaccccgcgctgcgccgcgacgtggacccgtcgccgcgccgcgacgtggacccgccgtctgtgccagaggcagagggggatgtc

SEQ ID NO: 2334 - DNA, 458 bp, Zea mays
  unsure (1)..(458): unsure at all n locations; Clone ID: LIB3136-020-Q1-K1-B2
gggccgacccacgcgtacgctccgcccacctcttcgccgncttccagggcctcctcaaggtgcttgccggcatcgacaccggcttcaccgtcacctccggggcctcggatgaagacggcgacttcgcggagctgtacatgttcaagtggacgacccttctgatcccgcccacgaccatcctgataatcaacctggtcggcgttgttgccggcatctcctacgccatcaacagcgggtaccagtcgtggggtccgctcttcggcaagctcttcttcgccttctgggtgatcgttcacctgtacccgttcctcaagggtctcatgggtcggcagaaccgcaccccgaccatcgtggttgtctgggcgatcctgctggcgtcgatcttctacttgctctgggttcgcatcgatccgttcaccacccgcgtcactggcccggatactcgaacgtgtggcatc

SEQ ID NO: 2335 - DNA, 441 bp, Zea mays
  unsure (1)..(441): unsure at all n locations; Clone ID: LIB3136-020-Q1-K1-B3
aatcaataaagttttgagactccttgcggactccgaccgaatcgatctgcatcgccccgccgcgtgcgccatgttcctgcggcggctgaaaacttccgccgccgtccgccggggcgcgaccgacggcggagtcctggccgccgtccgcgccgagctggccaacgagatctcctcctcggctccccctccattccgttccgagctggcgcccgacttcgacaccgtgtctgacgccccgcgcgcgcaggacgtactcctgcgccgccgggccgggtccgaggaggtcctcgtgtcggcgctgctcgccccgctgcggttcgtgggccgagacccgctgcccagggccgcgctcgtcaaggtcttcgtcagtaagcctggcgcggcgcccgtcctgcacttcgactgccgtgcgtcttgngtgggggaggaggagcgcggcgc

SEQ ID NO: 2336 - DNA, 358 bp, Zea mays
  unsure (1)..(358): unsure at all n locations; Clone ID: LIB3136-020-Q1-K1-B5
gccngacaggaaggangaacgagcgagganngaggcccnggggggaaaggncanccaagggganggcnaccgggncnccggnanacccgcnangncaagaacgannggggaccggnancngaagccgnncgngannccaaaaccagaggncacggnggnncccagggcgaaagaagacgacngncncanccncgcaagcgaagggcngngggaagnggngacgaacgaagaggcgngcagagcngcgcgccggcaaaaccaagngnggcacaagaacaacggngccgcnggcgcaacgnggncgnngngcgacgagggngaaggaaccaccaccgaccccgcngcccaagccgcagcg

SEQ ID NO: 2337 - DNA, 426 bp, Zea mays
  Clone ID: LIB3136-020-Q1-K1-B6
tgtttctccgtgtcgggattaaaccgccgaagggcgtgctgcggtacggtccacctggaggggggaagacgctcctagctagagccattgctagcaacattgatgctaattttttgaaggtggtgtcaagtgctatcattgataaatacattggtgaaagtgcacgcttaattcgtgaaatgtttaactatgcacgtgagcatcagccatgcatcattttcatggatgaaattgatgccattggtggccgaagatttagtgagggcacaagtgcagatcgtgagattcagaggacattgatggagcttctaaatcagttagatggattcgatgagcttgggaaggtgaaaatgatcatggcaaccaaccggcctgatgttttggatcctgcactccttcgacctggtcggttggacaggaagatcg

SEQ ID NO: 2338 - DNA, 427 bp, Zea mays
  unsure (1)..(427): unsure at all n locations; Clone ID: LIB3136-020-Q1-K1-B7
gcaccnggagcccagcgganaaaagcgcctacagcngangggggccaannnggaggggaggccggcaggccnccagngannncaacgncnccagcganggnnnnncaaccgccngcatagcagnangcagganncncnnnccctccaagngngcaccnncaaacaccagcaggggcaaagggagcagcaacacgnaagaanncggcatcggcaggagnnccatatnngccaactctttcctcctctcttgttgggccagccggagcgttgccttcccaacattcaaggcagtatgccataaatcttgctgagggtagcagcagtagtgtacgtgacggtaatcggaaatgggaaagtcagggccttgatcttaactcaagccctggaagtatagatttagaaggaaaggatgaacggatgcctttac

SEQ ID NO: 2339 - DNA, 423 bp, Zea mays
  Clone ID: LIB3136-020-Q1-K1-B8
cgccgatgtgctcggcctcgtcaaaggcgaggctggcaaggtgcctgccgagccatgctgtgccctcatcaaaggccttgcggacttcgaggccgccgtctgcctctgcacggccatcaaggccaacgtgctcggcgtcgtcatcgatgtccccatcaagctcagcgccctcgtcaactactgtggcaagtgcgtgcccaagggctacatgtgcgcgtaagcagctccgggcggttacacgctcgtagctgttcacgtacgagattacatatatgatatatgcacgcaccctgcatggcacgaatgcatgcattgtgtctgctgatatatctctcctgtctcagttgtgcaccttcggttctacaaaacctagaaccattccagccaaatacttacttgtcagttcaattattcgcatgtatt

SEQ ID NO: 2340 - DNA, 401 bp, Zea mays
  Clone ID: LIB3136-020-Q1-K1-B9
cttgtctttctccgtcccctccccaacacgcgttccccaaattctcccaccctactagggatccccatagccgcggcggcgccggccttcggattccatcctcctagcgagtcgactccatctgatcggcggagccggggcaccagccaccatgtgggcggcatcgtgcctggcgtcgtgctgcgcggcgtgcgcgtgcgaggcgtgccggacggcggtcggcagcatcggccgccgctccgcccgcatcgcctactgcggcctcttcgcgctctccctcttcgcatcctgggcgctccgcgaggtcgccgcgcccctcctccagtcgatcccatggattaaccacttccacaagacccccgaccgcgagtggttcgagaaccgacgcgtgctcaaggtca

SEQ ID NO: 2341 - DNA, 456 bp, Zea mays
  unsure (1)..(456): unsure at all n locations; Clone ID: LIB3136-020-Q1-K1-C1
gacccacgcgaacgccggacccggaccngccgcccaccgcgggctaccnggcgcccgccaacgcctaccgcgggggcgccggcgacgagnccgggagcggcgacgacgacgacgacgacagccggagcgagngctcctcgctcgacgacccaaagnacgtgccgntccaggccaacaacatcagcttccagaagaggcaggcgctggtgacgtacctggagaacaaccgggcggggatcacggtgtacggcttcgtggtggaccgggcgtggctgcacgcgctcttcatgatcgagttctcgctcgtcatgtggctgctcgggaagaccgtcggcatctcctgagctcacgcacacccttctttttgccggctctggctcctgtcaggtgcagagttctcagcggaggattgtacaaagtgagtgcagatacaagatactctgatcatctgatgga

SEQ ID NO: 2342 - DNA, 395 bp, Zea mays
  Clone ID: LIB3136-020-Q1-K1-C11
tgctggagagtggcttgaaggtgaaggagtacgagctgctgaggaggaacttcagtgagactggctgctgtggatttggtatccaagagcacatacatcttggcatcaagtatgatccatctactggtatctacggcatggacttctacgtcgtccttgagcgtgctgggtaccgtgtcgcccgtcgccgcaggtgcaagtcccgtgttgggatccagcacagggtcactaaggaggacgccatgaagtggttccaggtcaagtacgagggtgtgatcctcaacaaggcccaagccaacacctcctaagcctaagcgttaccataagatattagaccctcttggtctcttctagcgcttcgagttaatggagtattccgagtatatctggcagtc

SEQ ID NO: 2343 - DNA, 391 bp, Zea mays
  unsure (1)..(391): unsure at all n locations; Clone ID: LIB3136-020-Q1-K1-C12
cggacgcgtgggcgagacgccattctcaccatccacacaaagccacagcccaagagcaggagagcagagtcgtcgtcgtcgtcgggcatggcggggttcaaggtgacgcggatctcggagggccccgtgaagccggcgtcggcgacgcccgaggagacgctgccgctggcttgggtggaccggtacccgacgcaccgtggcctggtggagtcgatgcacatcttccggtcgggcgcgggcgaggccccggccgtgatccgggcggcgctggccaaggcgctggccttcttctacccgctggcggngcgcatcgtggagggggagcagccggggcgccccgccatccgctgcaccgncgacggcgtctacttcgcggaggccgaggcggact

SEQ ID NO: 2344 - DNA, 443 bp, Zea mays
  Clone ID: LIB3136-020-Q1-K1-C3
cggacgcgtgggcgccatccaggcccaccgcgtcgcgcacgtgctctgggcgcagcagcggcggcccctcgcgctcgcgctccagtcccgcgtcgccgacgtcttcgccgttgacatccaccccgccgccgtcgtcgggaagggaatcctcctcgaccacgccaccggcgtcgtcatcggtgagacggccgtcgtcggcgacaacgtctccatcctccaccacgtcaccttgggcgggaccgggaaggcggtgggtgaccggcaccccaagattggggatggcgtgctgattggagcaggggccaccattcttggtaacgtgaaaattggtgccggggctaagattggagccggatccgtggtgctgatagatgtgccggcgaggagcacggcggttgggaaccctgccaggctgattggtgggaagaaggccgagggtgcga

SEQ ID NO: 2345 - DNA, 438 bp, Zea mays
  unsure (1)..(438): unsure at all n locations; Clone ID: LIB3136-020-Q1-K1-C4
cggacgcgtgggtccccatcccccaaggaagtcaggccctcgcgcaccagcgcgaccggacgggaccgcccgtctgacggacgcaacccanccgtccagacgcgccgccgaccgtccttccaccaccacgcccgcgccgtcgcacgctccctagggttccgcagggccggggatcgccggagatggactggagcgcggtgacggcggaggacttggtggacgcgctgcgggaggtggactggtccatgccgccgcggcctgtcccggagttcttctcccgcttcaccgtcccacgctcctactccaagtggaccagccgcctcaagtgcaacctctactactacaggacaaactatttcatcttgatcatgttcatccttgggatgggcttcctttggaagccagttgctatagttgctgcttttatgactggactta

SEQ ID NO: 2346 - DNA, 284 bp, Zea mays
  unsure (1)..(284): unsure at all n locations; Clone ID: LIB3136-020-Q1-K1-C5
gaagaacggcgnngangaggagaacnncgnggncgaccncaagaagggcgaggncaccagggggccgnaccagggaaagccggangccacnnncnccnncacggacaacgannnccnnggaancgccaccggcaagacgaaaccgcagaaagcanncanncgaggggcgangaaaancaaggggagcancagngcggcgcagaagnncaccccggacaacgnccccaagccngcgaagcnggagaagggnnccacaagangnanngccagccanngaaacaccg

SEQ ID NO: 2347 - DNA, 427 bp, Zea mays
  unsure (1)..(427): unsure at all n locations; Clone ID: LIB3136-020-Q1-K1-C6
gcgnccaccagccncgncgnnaggacgnaagggaagacagccgggggncagccagngaggggggacngagnagcccgaagcccaaagcaagcgggngccaacngccaaggggggnganggcgccgncncgacgcaaggcggcncccgnccccgncccccngcnccnccgcgncgccacagagcnggggacgaccaaggnggcggaggcgaggcacngccngncgcagagccaccggnncaagggccngngcangagcagcaacaacngcgccaacgngngccagaccgagaacccccccggcggcgagggcaaggcggagggcgccacgcgcaagngcnncngcaagaagaaangcnagnagnagccaaggctttgcttgcnggcacaagcaggncgncggcacgcaacgcaanncaagcatatcgg

SEQ ID NO: 2348 - DNA, 296 bp, Zea mays
  unsure (1)..(296): unsure at all n locations; Clone ID: LIB3136-020-Q1-K1-C7
cngggcgaccgcctacgcaggccaggcgccgncgccctaagcgacgccaggnncccgggggggggncggncccnncaccggcgaagagcacccaccagacgcgccggngccggganccggaggaagngcngcgggnnncggcggnncgncnctcnccgcgcnnccggcggggnaaagaaggcggnggganacaaccgcnacgagagcagcgggaccgangacgancnccctccagcacaaaanagagganggagaggacgggcnnncagngggaagggccgagcancngcnggggc

SEQ ID NO: 2349 - DNA, 424 bp, Zea mays
  Clone ID: LIB3136-020-Q1-K1-C8
gaagggatctacaatctctgatgaaaacaacaaagcgactgcgatgggaggggatattcaggaaatatatgacaaactaaaagattcttcattgcccgaaggctttttcacagaggaacagccttggaaggatatatatatcacagaactccttaattgtatcaaagaggaacatctgaaggattttgaacaagagtattgtttagcagaaaagatagaaggggcaacggaggacacagatattgcagttgaactttataagctcagtatttccaccctagatctattgaaactagcatccaaagaggaacagggtgattatgtcggtgcatggtacagtatgcttctgtcctgtgctcaagaattgaagcatggcgtggcactttggcaagagttttatcatgcaaatgtctgcgacagagta

SEQ ID NO: 2350 - DNA, 413 bp, Zea mays
  Clone ID: LIB3136-020-Q1-K1-C9
cgctattttactttctgtggtagctaccacccttatagtgagaaggcgttcaagacacggaactgtctgaaaacgttcattgtcaaggttttctgtcaaagttgatggcgttagatgtttcacatttgaagaaatggctatagcaacaaataattttgatctatcagcccaagttggccaaggaggttacggcaaagtctacaagggaattctaggcgatggagcacttgtagcaatcaaacgagcacacgaggattcccttcaaggttcaagggagttctgcacggagatagagctactatcaagattgcatcatcgcaatttggtttcattggttggctattgcgatgaagaggatgagcagatgctcgtttatgaattcatgtcaaatggcactttacgtgatcatcttt

SEQ ID NO: 2351 - DNA, 372 bp, Zea mays
  unsure (1)..(372): unsure at all n locations; Clone ID: LIB3136-020-Q1-K1-D1
cgacccacgcgaacgngangagagggggaaggaagncncancnnacctcaagaaagnnggggacaacccncgaaagagagcacncgnncccagggggggcnnngagggngacaacacgancgagaggnccaccaaccgggaccggnacaaaggcccaacccngcnngaggctcgngaccagancaccgagcccaagagaccctcggacaagcccctgcgtctccccctccaggatgtgtacaagattggtggtattggaactgtgccagttggtcgtgtggagactggtgtcatcaaacctggtatggttgtcacctttggtccaactggcctgactactgangtgaagtctgttgagatgcaccatgaggc

SEQ ID NO: 2352 - DNA, 417 bp, Zea mays
  unsure (1)..(417): unsure at all n locations; Clone ID: LIB3136-020-Q1-K1-D12
cggaaaatcactagtgattcactgaacaaaaaaaaattacaagaaggaatcgagagcgggggctatcttgaaccacactccgaccgccggcgccggcgccggcgccggcacacctcaccatctgctcctcgcccgcagcgtggcggcgtgcgccggcggtgcgcgcggtgcggaactacgactccatcccgaagcgggagcccttcagctccagccgcagcatcctccacgagttcctcaggcaggacaagcccctcatccagcgcaccaaggaccagatcacagattattgcacggccatcgaaggcgatgagtgctgcagctgttgggacgcttactttgaactgaataaactngagcaagagctgcccaaagacgaaatcgcaaggatggtgaaggaactcgagggtgacgtga

SEQ ID NO: 2353 - DNA, 437 bp, Zea mays
  unsure (1)..(437): unsure at all n locations; Clone ID: LIB3136-020-Q1-K1-D2
ctngagcgcagggagtactttggtcaatatgggaaagttttgaaggtttcagtttcccgtgcgactgggcctccctctcagcaggcatcagcaaacagcagtattagtgtgtatattacttatgccaaagaagaagaagccatccagtgtattcaagctgtacacaattttgtcttggaagggaaagtgttaagggcatgctttggtactacgaagtattgccatgcatggctgagaaacatgacatgtgggaatccagattgtctctatttgcatgatgtaggcagtcaggaggatagttttactaaagatgagataatctcagcatatacgaggaccagagtcccccagatggcatctagtgtttcgcaaagacgtacaggcaacatgttgcctcctccaggagatgatttctcttacagtgcagtggtttcagc

SEQ ID NO: 2354 - DNA, 441 bp, Zea mays
  Clone ID: LIB3136-020-Q1-K1-D4
cgcgctctccggcggcaagcagggcgaccacaactctgaagacttcgtgcacctcttgctggggctgcagaaagactacggtctcaccacggataacatcaagggcatacttgtgaacatgttcgaagcagccatcgagacatcattcctggtgctggagtactccatgagcgagctgatgaacaaccgccacgtcctggccaagctccagaaggaggtgaggacggcgacgcccgacggccgcatggtgatggaggaggacctgagccggatgccatacctgaaggccaccatcaaggagtccatgcgcatccacccgccggcgccgttcctcctgccgcacttctccacccacgactgcgagatcaacggctacaccatccccgccggcacgcgcgtcatcgtcaacgcgtgggcgctcgccagggacccgacgtgctg

SEQ ID NO: 2355 - DNA, 429 bp, Zea mays
  unsure (1)..(429): unsure at all n locations; Clone ID: LIB3136-020-Q1-K1-D5
ncgcgccctgcctctcctacgcccgcggcacggggtccgcccgctccgcgtcctgctgtagcggcgtcaggaacctcaagagcgccgccagcaccgccgccgacaggcgcgccgcctgcaactgcctcaagaacgccgccaggggcgtcagcggcctcaacgccggcaacgccgccagcatcccctccaagtgcggcgtcagcatcccctacaccatcagcacctccaccgactgctccagggtgaactaaaacctagaccacgcgcgacgacggccgcctgatcgatcgaccaaccattccgccgtcgccgccggccggatcatcgatcgtcgtcatgatgatatctatcaatctacgcgtgatgatcgatgactacttgtctactgctatgtactactaaataaaatctctccgtgtgtacacgtac

SEQ ID NO: 2356 - DNA, 423 bp, Zea mays
  Clone ID: LIB3136-020-Q1-K1-D6
ccttcctgcccccattcgtttccgcatcggcgtatctcccggcggcaaaggcgctctcctggggacctccctgcggtgccggtacgacagtcgacaggatggcaatggccacatcagcatcgtaccctccacctcctccattttaccgattgtacaaaaaatttgagcaagatccctcatctgcaccagaacctccaccaccaattgatgaaccattcaaagccttgggtgttgattacacaggagatgttgtgattccaagcttggagagtcataatgtccgtcagctttatccaaagggtcccaatattgacttcaagaaggagcttaggaccctcaacagagagcttcaattgcatattttggagctggcagatatattagttgagagaccatctcaatatgctcgtagggtagaagata

SEQ ID NO: 2357 - DNA, 426 bp, Zea mays
  Clone ID: LIB3136-020-Q1-K1-D7
gcgggattgtgattcatgctatgtcatcagcaccatcatgccttaccatgtcacgatagaagtatcaccaacatgacaacatgctatgttactacattgataagcaagagagttctatttatggtgaagcatgttcaatgtctccggtcataatttcttactttggatataagttgttgaacaccattcttagccctcatcatgaatggagtctaccacactagtgctcttcatgccatcagaattatgcaggctttgcttttgtctactttgaggatgaacgtgatggcagtgatgccatacgtgctcttgatggttatccatttggccctggcagacgcaggctttcagtagagtggtcacggggtgatcgagctgctagacgtgatggcaacaaaccagaagtaaatactaagccaactaaaa

SEQ ID NO: 2358 - DNA, 422 bp, Zea mays
  Clone ID: LIB3136-020-Q1-K1-D8
gggatgcccccacttgcagccagtaccatgtatggctatcaagggcagagtcatcaggccggccttcggcagggccaactaccttcacaatttggctctgcgcttgggcagtcacagccaggcctgggccctgaacaccgaaaccctagcgatagtaacctaagtggcgctgctcaggctaaccaaatgtggccaaatacctactgatccatcccccttgtcgacttctgtggaaggcggacctgttgtgtgtgcaacgccggtgaggccatgcagtgcttgtgttctgatccaggcacgcggataccagctgtgcctgtgcgcatgagtcgctgtcgtgacattttgaggcacaagagacatatgttcgagcatgtagggtttctaggatatggcaaaagaaaatgtagctcgatctattt

SEQ ID NO: 2359 - DNA, 412 bp, Zea mays
  unsure (1)..(412): unsure at all n locations; Clone ID: LIB3136-020-Q1-K1-D9
gcacttcacatggcagcattgaacggtcacttagattgcatgcagttgttgattgactggggcgctaatgtctcagctgtctcattcccctatggcactactgcaaatttgataggagctggcagtacaccgttgcattatgcagcaggtggggggaaacaagaatgctgtgagctactaatatcaaaaggcgctagcaggttgacactcaattgcaatgggtggcttcccgttgatgttgctagaatatttggacggcgctctttggagccattactttctccaaattcacactcgaatgtccctgtatttcaaccgtccagttatcttgccttgccactcatgagtatacttaatatagccagagaatttgngttgcagcataccacaccctcgattgatgataatgatc

SEQ ID NO: 2360 - DNA, 77 bp, Zea mays
  Clone ID: LIB3136-020-Q1-K1-E10
cggacgcgtgggttacaatatatgagtttagacaatatatgagtttgatatatgaacaggtatggtgttgagttgct

SEQ ID NO: 2361 - DNA, 409 bp, Zea mays
  Clone ID: LIB3136-020-Q1-K1-E12
cacaaaccctagccgccgccagcaaggtatggccgccctcctacggctcaccgcagccgaatccgccctgccccggcgcaccctcgccccacaccggatgctccacacacgcaagttcatgaccaaccgtcttctctctcccaagcagttcgtgctcgaggtcatccaccccggccgccccaacgtctccaaggcggagctcaaagagaggctggcgaacatctactaggtgaaggaccccgactgcatcttcgtcttcaagttccgaaccaacttcggaggcggcatactatgccacggccggaggaggaaccgctgtcggcctactccacctccacggctccacctgtctgctctctgtctgccccgcgtcctcctccgcagcacgacgaccgcatcgcgttctacg

SEQ ID NO: 2362 - DNA, 452 bp, Zea mays
  unsure (1)..(452): unsure at all n locations; Clone ID: LIB3136-020-Q1-K1-E2
acccacgcgnccgcggacgcgggggcggacgcgnggggnncttttgagatactagnggaancgttctctgaatggtatggatcatgacgttgggtggaatggatatgtcatcataataactctgcagttttcatcggttctttggttcttctctgcagtgaaaattgaatgttctaatggagtccaagggtggcaagaagaagtctagcagtagtcgttcctccctgatgtacgaagctccccttggctacagcatcgaggatatccgccctgcaggcggcatcaagaagttctccgctgcttactcgaactgcgcgaggaagccatcctgatatctctgttgtcatccccatcctagtagcgtagaaaccacctgcattttcattttgatctccctaatccctccggctagctgctttccagtgaccaaaagatatcaaagaccacttccc

SEQ ID NO: 2363 - DNA, 438 bp, Zea mays
  Clone ID: LIB3136-020-Q1-K1-E4
gaaaaccgtctcgcagatcatcaagcgcatggattcacacctctacaggcacctgcagaaacttcaggcggaagactgggtctttctgtaccgaatggtggtggttctcttcaggagggagctcacttttgagcagactatgtgtctgtgggaggtcatgtgggctgaccaggccgcgatacgagctgggattggaaggtccacttgggcaaggataaggcttcatgccccgccaaccgacgacttgctgctctacgccatcgcagcctgcgtcttgcagaagaggaagctgataatcgagaagtacagcagcatggatgagatactgcgggagtgtaatagcatggccgggcagctagatgtctggaagctcctagatgatgcccaccacttggttgttgaccttcatgacaaaatctgatgcgactgccttcctca

SEQ ID NO: 2364 - DNA, 428 bp, Zea mays
  Clone ID: LIB3136-020-Q1-K1-E5
ctggtgtgcgcaatcttgaacggaacctagctgcattggctcgtgcagctgctgttaaggtggcagagcaagttaaaactcttagacttggcaaggaaatacaaccaattactacaacccttcttgattcaaggcttgctgatggtggtgaagttgaaatggaagttattcctatggagcatgatatatcaaacacttacgaaaatccatctcctatgattgttgatgaggctatgctagaaaaagtacttgggcctcctagatttgatgacagagaaactgcagatcgtgtagcaagcccaggagtctcagttggccttgtctggacttcggttggtggggaagttcagtttgtggaggctacagccatggtgggtaagggtgacttgcatttgactgggcagcttggtgatgttattaaagagtca

SEQ ID NO: 2365 - DNA, 424 bp, Zea mays
  Clone ID: LIB3136-020-Q1-K1-E6
atcgcctcgcgtccgcctgccgctccgctcgtaagtttttagtgaagattttttgaagccgggaagatggtgctgaagacggaactctgccgcttcagtggccagaacatctatcctgggaaaggcatccggtttattcgtgctgattctcaggttttcctttttgccaactcgaaatgcaagcgctacttccacaaccgcctgaagcctgcaaagcttacctggacagcaatgtacaggaagcagcacaagaaggacatccatgctgaagctgtcaagaagaggcgccgcgctaccaagaagccatactcgaggtccattgtgggtgcttccttggaagtgatccagaagaagagagctgagaagcctgaagtccgtgatgctgctagagaagctgctcttcgtgagatcaaggagcgcatta

SEQ ID NO: 2366 - DNA, 427 bp, Zea mays
  unsure (1)..(427): unsure at all n locations; Clone ID: LIB3136-020-Q1-K1-E7
gcgcaanncgncangnacccccgaagangccacnggaaccaaggagacaacnnccagncgggcgggctgaaggaaancncaaagcnctaagccngcaagccnngggncagggggnngacangcagcncggcnnggctannganagnccaaaggccactnnagcagncaaaaggcgctnagcctgngagaaggncaaatattggcaacaagttcaagagagcattccagagcttccagtctctgatggatggggaaaaaagcaccggctatttgtaaagtggaagtatgttgaagccaaggctgcagcatactatttccacggtttgattcttgacgagggaaataccgagaaatcccatggaatggcaatagctgcactacaagcttcagaagaatttctgaaagaaagcaaaatggtttcggaagc

SEQ ID NO: 2367 - DNA, 422 bp, Zea mays
  Clone ID: LIB3136-020-Q1-K1-E8
cggacgcgtggtcaggaacacaagacaagtgtgcgacttgtggtaaaactgcgtatcctggggagaaggtaacagtcgaagagaagtcctaccataagtcatgcttcaaatgctcccacgggggctgcgcgattacaccttccaactatgcagccttggagggcatcctctactgcaaacaccatttctcccaacttttcaaggagaagggaagctacaaccacttgatcaagtgcgcgtccgtcaagcgcgctgctgaagcacagccagaacaaccggcctctgattcctcctcctgaccacgccatttaaacagtgggggtttggaggcgagagagttgggaagcctcctgtttctacttaaaaccgcgtgatgtatgttattccatctatgccccgaggatactagactactactctat

SEQ ID NO: 2368 - DNA, 409 bp, Zea mays
  Clone ID: LIB3136-020-Q1-K1-E9
ttcagatcctggtcaattggatgaactctttgaagcattctgcaattgcgctgagcttgaccctgatcctagtgctgagagtgatgaagaacatggctgggttcatggtgatgagggttatgaagatacggtagatggaagcgacactgagttttcagatgtcaacccaattggtcaaactggtgagcaggatattaaccatgctgtaatcgagctccagatcaatgaccaacgttttgaggatgcggtagatgaggagagtcacaggaacgggaactagggaccatgtgaattggtccattgtaagtcggtcgtcgatgcagcatacttgtctgtaaagacttcacttttctcatgttgtcagatcatgtggaccaacttgaatggcaacaatgggggataacgagct

SEQ ID NO: 2369 - DNA, 214 bp, Zea mays
  unsure (1)..(214): unsure at all n locations; Clone ID: LIB3136-020-Q1-K1-F1
aaaaaaaaaaaaaaaaaaaagggaaaaaaaaaaaaggaaaaaaaaaaaaaaaaaagcaaaagaaaagggggggccganccaaggggggcccaanaacaaaanccggccccaagggcaaaaaacggccgaaagggaaaaacaaagggagggccaaaacaaaaagcaaaagcaacaaaaccccaaaaaacaacagggaaaaaaccaaaaaggcccg

SEQ ID NO: 2370 - DNA, 407 bp, Zea mays
  Clone ID: LIB3136-020-Q1-K1-F10
attgtttctgaggaagagtgggatagcttcatgagcatgctccggaagccattacctgggcacttttaggattaatgcgagctgtcaattttttcaagatatctgctcgcaattggaaaacgacttcaggaaatcattagagactgaggtgaccgatgatcatgaagaagatgctattcggcctttgccttggtacccgggtaatcttgcatggcatttgaacttttctcgaatgcagctgaggagaaatcaggcacttgagagttttcatgaattcttgaagcgagagaacgaagttggcaacataactaggcaagaggctgttagtatggtcccaccactgtttctgaatgtgcaacctgatcatcatattcttgatatgtgtgccgctccaggatctaaaactt

SEQ ID NO: 2371 - DNA, 385 bp, Zea mays
  Clone ID: LIB3136-020-Q1-K1-F11
atgagtcctacaagaccctcacatcattgtgtggtgtgactgcttacggtttcgatctggtccgttgagcgaagacccttgatcttatcaggagcagcttcccctctgggaagtacctcttcgctggtgttgtagatggacgcaacatttgggctgatgatcttgctgcatctcttagcactcttcattctcttgaggctgttgctggcaaggacaaacttgtggtgtcaacctcctgctcactgatgcacaccgctgttgaccttgtaaatgagactaagctggatgatgagattaagtcatggcttgcatttgctgcccaaaaagttgttgaggttaatgcccttgccaaggctttggcaggccaaaaggatgaggtctactt

SEQ ID NO: 2372 - DNA, 416 bp, Zea mays
  Clone ID: LIB3136-020-Q1-K1-F12
ccggctggacccacgcgtccggctgagcccaactgtgaggatgggctattcatgatgacaattgatgacagtgatgtgagtaatcatcacggtgctgcagatgataaacgattgttggaaatagctaacacagcactcatgagtgatccaccttcacctgacacgcttaaacctctgataggctcttcttctggagatgggtctgatgttctgcctctagccacacatcagcctgctggaccagtttcagcgacacctaacgtaccttatgccagagatgacaataagttcaatgatggcatgtatgaagacttatgtgtggatgatgctgacctgacattcgagaattatgaagagctattccgtacctctcacattcgaatagaggaactctttgatgacgccggatttgacag

SEQ ID NO: 2373 - DNA, 451 bp, Zea mays
  Clone ID: LIB3136-020-Q1-K1-F2
acccacgcgtccgctaccggcgacggccgacgggggatacggctacatcgtccccctcgacccctcctccatccgcgacgcggcggcgccaggctgcaggtgttgaatgctgatttgttgtggcctgttgcgtcttcaccagttcatacattaaacttgaagaaccacgtggttgaagaaaagcccactgaaaatgagtaatacatcatcttcgtcaagtgggatgtgatatatgctgatattccaaagctcattccatttattgatctgccgtgccaatttgccagttgggctgttccctccctaaaccccagcgtcgcctccgacgagtcaccgctccgtcggctgcttgctgcagtccacgccacgcgctacgccgtcacggtcgctcctcccgtgacgcagccgtcgctaggcgccgcctatttctcggacaaagtcgctcgccacc

SEQ ID NO: 2374 - DNA, 450 bp, Zea mays
  Clone ID: LIB3136-020-Q1-K1-F4
gaccacgcgtccgcggacgcgtgggcggacgcgtggggtccagcctcagctccaagtcccctcggtggtcgcaggccccgccaatccccccggcgcaggcgattcccgtggtgggggttctctcgccgccgctggagccacaggccgcggtgaaatcaacgaagcgcgcgggaatcattgggatcgcatttgaggcctactattctaagatttggcagatgcttgctgcgtcgaaggtggatgcctgcaatgctgctgctgcgtgggcggggcagtactgcaaatgccgttttgagctggatgagaaggaactggaagaagaggaagctgactctctggggtctgtctcgccaatgtcctcggaggctgagaatgggaaggagctggtggacgaattggccaggctgcgtatcaatggagacaacaattgcagcgaggaggacatggagg

SEQ ID NO: 2375 - DNA, 315 bp, Zea mays
  unsure (1)..(315): unsure at all n locations; Clone ID: LIB3136-020-Q1-K1-F5
aaaaaaaaaaaaaaaaaaaaaaaaaaaaaaaaaaaaaaaaaaaaaaaaaaaaaaaaaaaaagggggaaaaaaaaaaaaaaaaaaaaaaaaaaaaaaaaaaaaaaaaaaaaaaaaaaaaaaaggggcggccccccaaaaggacccaagcnaacgaccccggccagccaacgnaaaaacccnncaaaagggccaccaaaaaaaaaaccacgggccgccgggaaacaacgccggaacgggaaaaacccggcgcgaacccaacaaaaacgccgggaaaaaaaccccccnngcgccagcgggcgaaaaagcaaaaaggcc

SEQ ID NO: 2376 - DNA, 329 bp, Zea mays
  Clone ID: LIB3136-020-Q1-K1-F6
gggagacttcgccgacgaggcctccgcgccgaccgagtcggacatcgaggagacgctcaagcgcctcgtctcgcagctcggcaagtcgcgggaggaggtcttcgacgcgctcaagaaccagaccgtcgacctcgttttcacccgccaacctaacacagtcgggaggaaggctttttttcaaaaacaatgaaagatcccgaactggctgaagcaactttaatgccaagacattaattgttaccaccaaccagaacctggataagcaccttaaaaggaaaattaaacctgttttaaaaatgaagaaattcggagaaacccttccaattctt

SEQ ID NO: 2377 - DNA, 308 bp, Zea mays
  unsure (1)..(308): unsure at all n locations; Clone ID: LIB3136-020-Q1-K1-F7
gaagaagccaagccagangagccngaagccgnggcnccagcgccaggaagcaacccaacggggaacncagccccngcnccngccgagcccgcngcngnnccngccccagcgcccgagaccgaancagnngccgagccngcngcngnacncgccccagcgccngaaaccaaaccagangccaagccngcngcngnnccngccccagcgccngaaaacaaaccagangccgagccngcngccgccgcngcnccagngccngacaccaaancagangcngagccngcngcngcnccagcgccngacaccaa

SEQ ID NO: 2378 - DNA, 245 bp, Zea mays
  unsure (1)..(245): unsure at all n locations; Clone ID: LIB3136-020-Q1-K1-F8
caaaaacccccaaaaccngacgagcaggagggccganccgcggcgccccgccgcccgagcggggcagncnacncggcccagccggggacccaagcggganggggcacaggagccccgagagcggccaccccaccgacggaaccnccgncagcggcagcggccgcagccagaacggaagacaaagctacggctangcaagcccccccggcaaaagggcaaccaaggaagacgccnacgagacaaaa

SEQ ID NO: 2379 - DNA, 400 bp, Zea mays
  unsure (1)..(400): unsure at all n locations; Clone ID: LIB3136-020-Q1-K1-F9
gcaccaaggaccttcggcgcccgttcatgatccacatcttcccgagcgagttcttggtggacctcttcctcttcggaccacctccaaggctcttggtgtagcttgccactctcaccaatcaagttttcatgtctgatctcgacattcagatcccaactgccttcgatcccttcgctgaggccaatgctggggactctggtgcggcagcagggtcaaaggactacgtacacgtgcgcatccagcagcgtaatggtcgcaagagcctgactaccgtccagggattgaagaaggagttcagctacagcaagatcctcaaagatctcaagaaagagttctgctgcaatggtacagtggtccaggacccagaacttgnacaggtcattcagctccagggtgatca

SEQ ID NO: 2380 - DNA, 156 bp, Zea mays
  unsure (1)..(156): unsure at all n locations; Clone ID: LIB3136-020-Q1-K1-G1
ccggacgncaagggggggagganggcnggccagcnngccaagccaaggnccgaaccgnnggaggagagggacggcgncaagcngccaagcnacaagggcgacaacggcaacggcgacgacngcaccgagaagagccgcgggccagacccgcagagg

SEQ ID NO: 2381 - DNA, 397 bp, Zea mays
  Clone ID: LIB3136-020-Q1-K1-G10
ggagaggcccgcgactgtagtgggattgtgggaagatgcctcgggatggcgcgcagggggcgccgtcacggggagcgcggcgagatggacgaggtggtataggcggacccggatacggaggcggaggatcaggaggagaggtgggcgaggcttctgccggagctgctctccgacgtggtgcggcgcgtcgaggcgtccggcggcgagcggtggccggcgcggaaggacgtcgtctcctgcgcctgcgtgtgccgccggtggcgggaggccgccgtctccgtcgtgcgtccgccggcggagtccggcaagatcaccttcccctcctcgctcaagcagccagggccaagggagagaccaatgcagtgctttatcaagaggaataagaacaactctacat

SEQ ID NO: 2382 - DNA, 414 bp, Zea mays
  unsure (1)..(414): unsure at all n locations; Clone ID: LIB3136-020-Q1-K1-G11
accgggtcggaatacccggtncggaagaagcacagcctcactagaggggcgcgcgcgcagcgaagcatggagcatggagctgagggcgccgcgccggcgaccgtgagcacgctctgtagccagccgggtccggctgggcggccatggcagccaccgttctcttcactccggcgcagtgccaccgcgccaccgcgacgacgagcgggcgaggagccccctcgcattgcgccctggcccctgggcaccggcgcccggggcggggatcggtgagggcggtgcctcccgagcagagcagcttgcctcaggcggcggctgctgtctacgggactgctggcgacgtcaaggccgcgctgtaccgagcgctggacggcgccaacagggggatattcgggatgacgtccgncaagcgctcgg

SEQ ID NO: 2383 - DNA, 413 bp, Zea mays
  unsure (1)..(413): unsure at all n locations; Clone ID: LIB3136-020-Q1-K1-G12
gcgtccgnccaaccaacccgcacgacacgacactttgtcgaggagctcgagagggcaccaataagggccggcgtggactccagcgtcgtctggctcaagcccgccgcggcagtgccgcatgccgccgccgcctcatcgccggcgaagcgggtgcagctggccgcgcccgagggccgccgcgccgctctgctcggcctggcggccgtcttcgccgtcacggccaccaccgggtcggccaaggccacgatcttcgatgagtacctcgagaagagcaaggccaacaaggagctgaacgacaagaagaggctggccaccagtggagccaactttgcgcgcgcctacaccgtggagttcggcagctgccagttcccctacaacttcactgggtgccaggacctcgccaagcagaagaa

SEQ ID NO: 2384 - DNA, 453 bp, Zea mays
  Clone ID: LIB3136-020-Q1-K1-G3
gacccacgcgaacgaggcttcgaggagagtgatatcaagtgggcttctcgctgggacacctacttgttaatgatggatgatcaaattcactgggtttctattgtgaactctctcatgatcgtactcttcttatctgggatggtggcaatgattatgctccgcaccctttatagagatatctctaggtacaatcagcttgaaactgaagaagaagcccaagaggagacaggatggaagcttgttcatggagacgtattccgccctcctgcaaactccgacttactctgtgtctgtgttgggactggtgttcagttcttcggtatgctactagtaaccatgatctttgctgttctgggtttcctttcgccatcaaaccggggaggactgatgactgccatgctgctcacttgggtcttgatggggttgttcgccggatatgcttcttcacgcctg

SEQ ID NO: 2385 - DNA, 433 bp, Zea mays
  unsure (1)..(433): unsure at all n locations; Clone ID: LIB3136-020-Q1-K1-G4
acgcgtccgataaaaccaaaaaaggtcatgggagaagacaaacatggaattataaagaatagttgattttggacttgctagaatatatggggcttgattttggacttgctataatatatcaagctcccctgaaaccattatgtgagaatggggacgtatgtgttctctattctctctggtgtagttggagcatcaggtcaatagttcccttcaacaattaaactaaacggcggagtggagcttcatgttgggatgatacatgaacctttcaacttttagaacgtcgtgctcaactacaacttgtggctgttgaatccatacttttagaacgtcgagctcaactccaacttgcggctgttgaatccattgaacttgcttttggatttatgttataagatatttaaatgttggataaannaaagaaaaacagata

SEQ ID NO: 2386 - DNA, 429 bp, Zea mays
  Clone ID: LIB3136-020-Q1-K1-G5
atcgagaacacgatcgagcacacaagcacgaagactcgtttaggagaaaccacaaaccagcgaggccgtgaaagcatcatggagtacggtcagcaggggcagcacggccacggcgccacgggccatgtcgaccagtacggcaacccagtcggcggcgtcgagcacggcaccggcggcatgaggcacggcacgggaaccggcggcatgggccagctgggtgagcacggcggcgctggcatgggtggcgggcagttccagcctgcgagggaggagcacaagaccggcggcatcctgcatcgctccggcagctccagctccagctcgtcggaggacgacggcatgggcggaaggaggaagaagggaatcaaggagaagatcaaggagaagctgcccggaggccacaaggacgaccagcacgccacggcgacg

SEQ ID NO: 2387 - DNA, 422 bp, Zea mays
  unsure (1)..(422): unsure at all n locations; Clone ID: LIB3136-020-Q1-K1-G7
ngcaatnggntcagaaactgcaggatccatagcatacccagccgctagatgtggagtaacggcattgcgcccaacatttggaacagttgcacgaaccgatgtcatgagcatttctgagagtttggataagcttggtcctttctgtagaagcgcagtagattgtgctgttgtattagacacaattcgcggaacggatgccggtgatccatcatcgcgtgaggttgctttgggtgatccatttcatgttgacatcaccaaactcactgtaggctacctcgatgacgctgagatggaggttgtcgatgttctttcctctaaaggtgtcaagctggtccccttcaagctgaactacactgtggaatcagtccagtccatcctgaacataacgatggacactgatatgcttgcgcacttcgataact

SEQ ID NO: 2388 - DNA, 310 bp, Zea mays
  unsure (1)..(310): unsure at all n locations; Clone ID: LIB3136-020-Q1-K1-G8
gggngacgcccgaggggagccaccacaccagcgacgcgcaggggcnancggccgcgcccgggaagcggncgcagaagcagcccaaggacccgaagcaggaccncngcgacccgccgcacaccagcgccagcgncaccaagncggcgcacacggcaccagaccgcggccaagacaaggcggccancgnggcaaccccggacgaggagcganccggcggcggcgcgcccgcggaccccnggaggcacggcagcgngcagcaggnggaggaggncaagcgccncaaccgcaacgngcccgncnggnccacggg

SEQ ID NO: 2389 - DNA, 400 bp, Zea mays
  unsure (1)..(400): unsure at all n locations; Clone ID: LIB3136-020-Q1-K1-G9
gcgcaanaagaagccactttaaagaataaatgaacagaatgcattgacacgaccgctccatgatgtaggtgttattacaaatgttagtactaaccttttatgtttatatttgatcaaacctaaaatggctgactcattaaagaatgagaaatgacaaacttttgtgttagagggagtagataatggtgatctgtgcaagctaatctgcagtagtagtcaccagccgatgatcatgtgtttctctgaattctgaaacctaatcctgcttcaaaatggcatatataattcctggtcctctcgaaaaggcaatagaacctgagcttgtgatcttgttttaggagtagataatagtatataattcaagatgttaagtatatataaacaagaatcgtatatgaac

SEQ ID NO: 2390 - DNA, 413 bp, Zea mays
  Clone ID: LIB3136-020-Q1-K1-H10
gcctgccgttcgtccagatgggcggggtcatgccgccccagccgtgctgcggcggcatccgcagcctggggcagcaggccaacaacacccccgaccgccgcaccatctgcggctgcctcaagaacgtcgccaacggcgccaacgggagcggcacctacatcagccgcgccgccgcgctgcccagcaagtgcggcgtcgccctgccgtacaagatcagcaccaacgttaactgcaacacgattaattaaatgaggcgtcctgtgcgcgtccgggcgaggaatgcatgcatggcggagagtaataaagtaatgctactggtattttaagctagatcgaggcgtgcctgtctctagtcatttatggtgtttagcaatcgtctacacagttcgtaaacggtgtatcgtggatgcatg

SEQ ID NO: 2391 - DNA, 349 bp, Zea mays
  Clone ID: LIB3136-020-Q1-K1-H11
gtcgaacccatcgcccatgggaggagggcacgaggagcatgagggtggcggctcaaaggccgggggctactcctccggtctcccggcgtctgagccgccgcaggagtacgggtacggcacgttccagggccctcggcattcttccgtcgggttcccgcaagcttgccccgcctcccgggttcggcggcggcggcggctaccacaaccagcaacagccgtacgcgcacgcggagacgtactacgcccaggggtaccaggccgtgccaggctatggtcctgttgctgaaggaagacctgtgagaatgaggcgtctcccatgttgtggcctcggcttaggctggtgccctgt

SEQ ID NO: 2392 - DNA, 427 bp, Zea mays
  unsure (1)..(427): unsure at all n locations; Clone ID: LIB3136-020-Q1-K1-H5
nacgcccaccgccgccgccgctagggannnggggngaggaacgccggggncgacggcncccaggcggccctnccgaggccgcggcgccangcccccgggcaccggctacgnccgccgcggccccgccccaggctccgccgacgccgccaagcccctgcgcaagcccgncttcaccaccgncgaccagcttcgcccccagacacacggtcacactctcacagcccgcgtcattgccgtccgcaccgtcctcgacaagccctccacgcacctcggccgcacccgcgtcgccgagtgcctcgtcggagacagcaccggcaccgtcctcgtcaccgcccgcaacgaacaggttgaccttttgaagccagatacaacagtgatcttccgcaatgccaagattgatatgttcaagggcaccatgaggctggcg

SEQ ID NO: 2393 - DNA, 109 bp, Zea mays
  unsure (1)..(109): unsure at all n locations; Clone ID: LIB3136-020-Q1-K1-H6
cacncgngngccnaaacnnncnannggcactgaacnncnnccaagaggcagncngcnncggggganncaccgacccaacaaccagnnagangaaaggaagcgcnnaaga

SEQ ID NO: 2394 - DNA, 117 bp, Zea mays
  unsure (1)..(117): unsure at all n locations; Clone ID: LIB3136-020-Q1-K1-H7
gnagaanngacaacccnccnaccacanccgngccccnnccctggccnccacncgcgcgccggggccacgcacaaccaggaganangccncgcnangangaccgcnanggaggcacgc

SEQ ID NO: 2395 - DNA, 430 bp, Zea mays
  Clone ID: LIB3136-020-Q1-K1-H8
acgcgttcgatcatggaaatgtacatgctgctggaatggtttccagcatacatctaaataactaatccgggggatatcaaccttcaggtgattgtgcatctgaaaattcgcgttggtgtgtggtccctagtcccagtcaccgtgcacagggtctgatgatcaagaagtgtgtcctgtcctgtacaagtctgcagtcatcaactcatcaccccgttgtctgcatgactacgggcctgtttggtttggtgcctaacttgccatacttttctgcctaaggttagtttttcaattcgaacgactaaccttaggcaaagtgtggcagatttagccaccaaccaaacagcccctacattcatcagcggtcagcctttggaccaaactctggaagacctagctactctcttttcctgagagttaccagtaagtgtat

SEQ ID NO: 2396 - DNA, 236 bp, Zea mays
  Clone ID: LIB3136-020-Q1-K1-H9
gctgagtattaaatcgcgacagtagcgctctcatggagcagcaccagcattatgaggtgaggaggtacaggaaaggcgtgctaaaagtgcaggacggctctgagatccgagctatcgcatagaacaaggtggagttcgctaggatcgtcgactacaggttccggaagctctacgccgatggcgactggaggctgtccttgaaagagctacaaccggccatcgctgacatctgtgcc

SEQ ID NO: 2397 - DNA, 424 bp, Zea mays
  unsure (1)..(424): unsure at all n locations; Clone ID: LIB3136-021-Q1-K1-A1
cacagtcatccacactaacgaacgaactcttgctccgatcacgagctagctgaggtcgacgatggcggctgtgctgaacagcaggaagacgccgcaggtggtggccgtgctggtggtggtggcgctgctggcttcgtccgcgtcggcggcgatcacctgcgggcaggtggggtcgtcgctggcgccgtgcatcccgtacgcgacggggagggccagcgcgctccccgcgtcgtgctgcagcggcgtcaagagcctcaacagcgcggcgcggaccagcgcggaccgccaggcggcgtgccgctgcctcaagagcctcgccaacagcgtcaagagcgtcaacatgggcaccgtcgccaccatccccggcaagtgcggcgtcttcgtcggattcccatcagcatgtncaccgacttgcacaagatca

SEQ ID NO: 2398 - DNA, 422 bp, Zea mays
  Clone ID: LIB3136-021-Q1-K1-A10
gctcaggtcaaggttcccaaagagcagctgccgtagctgcactatcctctgtgctgactgctgagcaatctggatcttcagaaaatctacgagccaaagctagcagcacaggagataagactgatgtcgataggcctgtcataactccagctggaccatctggtccatcttctcctcagtctgaagctggggagtccaatgtgtttcgccaggaaaaagatgctgcagtagatggggcaccatctgacactgatggagcagtggctgagacccgagaggaagaaacgacagacaatgttggcgaagcgacatttagctatgaccgcttgatatctaaatctaccgatccagtccgtgggatagattacaaacgcagagaggcatacttatcagatagtgagttccaaactgtttttggcatg

SEQ ID NO: 2399 - DNA, 204 bp, Zea mays
  Clone ID: LIB3136-021-Q1-K1-A11
gaatgagacagaaggggctaatagctatgatttcatgtacgattcctgtactgtgacagggacactcaaggaacctgcgaagcttcaacaggcctacacaaagcgttcaaccgactcaatgtctacataaagacccctgataccgccgaatgaataaattccatccgcgaacttatcgttaatagcatcagcgtcaacgctacg

SEQ ID NO: 2400 - DNA, 420 bp, Zea mays
  Clone ID: LIB3136-021-Q1-K1-A12
ctggatcttgctggtcgtgatctgactgactgcctaatgaagatcctcacggaaagggggtgttccttcaccacgacggcagaacgggaaatcgtgagagacataaaggagaagctggcctttgtcgccctagactacgagcaggagctggagaccgctaagagcagctcctccgtcgagaagagctacgagctgcccgatgggcaggtcatcacgatcggcgcggagaggttcagatgcccagaggtgcttttccagccgtcgctgatcgggatggaagctcccggcatccacgagaccacctacaactcgatcatgaaatgtgacgttgatatcaggaaggacctgtacgggaacatcgtcctcagtggagggacgaccatgttccctggcatcgctgacaggatgagcaaggagatt

SEQ ID NO: 2401 - DNA, 379 bp, Zea mays
  unsure (1)..(379): unsure at all n locations; Clone ID: LIB3136-021-Q1-K1-A3
aaaagaaatttgggcagtcttctgtttttgttgcatcgacacttcttgagaatggtgggaccgtgaatagtgcaagcccagcttctcttctaaaggaagctatacatgttatcagctgcggctatgaagacaagactgactggggaaaagagattggctggatctatggatcaattacggaggatatcttgactggatttaagatgcactgccatggttggcggnctatttactgcatcccgaagcggcctgcattcaaaggttccgcacctcttaacctttcggaccgtcttcaccaggtccttcgttgggctcttgggtctgtcgaaatcttcttcagcaagcactgcccactctggtacggatatggcggcgggct

SEQ ID NO: 2402 - DNA, 330 bp, Zea mays
  unsure (1)..(330): unsure at all n locations; Clone ID: LIB3136-021-Q1-K1-A4
nggaaatatcttatcctcgacgccgcgcgccacgacgcagcacgcccaagaaaccccgggtcctcacaaaaaccctgcctgccggagatggccagcggcgaccttctcctccgcgcccacgccggcgccccggtcctagcgagggccttctcctgccgcctcctagtcccggcgaggcgccgcagcggactaatctcacctctggccgcttccaaggtcggcatcgccgacgtcgttgggcgggtcaggtcgggcggcgccgaccagaagaggcgacgcagggatgcgaaagagggatttgggttcttcggggtggccacgaggagagaa

SEQ ID NO: 2403 - DNA, 157 bp, Zea mays
  Clone ID: LIB3136-021-Q1-K1-A5
gcccccttttttttccttagaccacatcctcaccccgtttgccactgttgccttcacacgccggcgccaactcttataacaagctccctccacctcaccacgtctccttccaaccacaagacccaccgccatccaaaccttaagagggacgatgggg

SEQ ID NO: 2404 - DNA, 371 bp, Zea mays
  unsure (1)..(371): unsure at all n locations; Clone ID: LIB3136-021-Q1-K1-A6
gccgacaacgctctctaccgtttgagaccccaagcaccagcgcggcggcgggggcgggggcgaccatggctgtcggaaagaacaagaggatctccaagggaaagaagggtggcaagaaaaagaccgtcgaccctttctctaagaaggattggtatgacatcaaggcaccgtcggtgttcagtgtgcgcaacatcgggaagactctcgtatccaggacacanggtaccaggattgcttctgagggtctgaagcacagagtctttgagggttgcctagctgatctttcaggcgacgaggatcaagcttacaagaaaatcaagcttcgggcctgaaatgtgcaaggcaagaatgtgctcacaaacttttggggc

SEQ ID NO: 2405 - DNA, 435 bp, Zea mays
  unsure (1)..(435): unsure at all n locations; Clone ID: LIB3136-021-Q1-K1-A7
catcggcgcggcctcgctcctcgtcgtctcactccgccgccgcgcgccgcctgccgggcttcccgccaagctcgtcccctcctcccacatggcaggacgcaaccggagtttcgtgctgtggctgcacggcctcggcgactcaggcccggccaacgagcccatccgcaacctcttctccgccccgcagttccggctcgccaagtggtcgttcccctccgctccccgcgcccccgtatcatgcaacaatggttttgtcatgccgtcgtggttcgatatccacgagcttcccatgagcgctggctctccgcaagatgagactggggttctcaaggctgtggaaaaggtgcacgccatgatagacagggaagtagccgatggcatccaccctgagaacatatttgnttgtggattcagtcaaggaggtgctctgacatt

SEQ ID NO: 2406 - DNA, 439 bp, Zea mays
  Clone ID: LIB3136-021-Q1-K1-A8
ctgcactgcacggtagtcgcgtcgagtcgacgcgcgattcctgccatttgggtgggccagcctttcctggcaatctcggggggcgtttcgcctcgctgcgtggcagaaaggtgtgacgtgtgatgcatcccaaggctcgaatccacgccgacccggtgcgcgaggtcgaccacttcgactgcctgccggattcgctcgtcctgctcatcctgaacaaggtcgaggacgtgcggtcgctcggccggtgctacgccgtgtccaagcggctctgtgggctcgtttccctcgtccatgatgtgtatgtcaagattgaccgcgtcgttgcggtcgacggcgacgccgagggcacgctcaacctgtcctcgccgaagcctcggagcatcttctcgcacttcctgaggctgatgctcttcacaatcatcaagccgttccacaacat

SEQ ID NO: 2407 - DNA, 355 bp, Zea mays
  Clone ID: LIB3136-021-Q1-K1-A9
aaatctgtctagttatgggcaggattatggctatggtcagtatgagcaacacaaaggtcatgatgcatatggttacagtcaagatgtacgtggacatgaaactgaacactcaaagcggcatgagcacgaatattatcgcgttgactcgtatggtaaaatggaagctaactatcagatgccgccaaacaatgctgagccagaaggccctgaggaaggtgaggcatatgaggaaggcgactaccagtatcaccggtctggtgaacacatgaaggaagcttgattgcagcgatgagatttgcctgcagctttatactgatacacaacgatgggttcaaaggttggttctttgtatgaa

SEQ ID NO: 2408 - DNA, 341 bp, Zea mays
  unsure (1)..(341): unsure at all n locations; Clone ID: LIB3136-021-Q1-K1-B1
cgcgtnnccggcgacacccgcacgcctcgcttcggagcttggagacttgtgaggtcgttaggcgccttaggctgtgagctctggcggtagtatagaagaagaggggaagaacggtatgaccgaacgaccggctttcttttaggttgagcttagatacccnngtgactanngtctcgtatttagtgcgactttcgttataccgtnngctatggtctttagnnngccgccgacagacctgagaaagtccgaagtgtctcgaacacacactatttgtactggctcactgnnnntgtctgaaattgaacctgacaaaaaagacactttctgnnatgttcctggag

SEQ ID NO: 2409 - DNA, 421 bp, Zea mays
  Clone ID: LIB3136-021-Q1-K1-B10
atcacatgatcaatctgctattgatgattcggatgatgttattattcttcaagagtcgccggatttgacaacaagggatgaaaaagacaagggtagctgctccaacacttctgcacagcccagcacttcttctagaattcacatagcagcacgagatgataggacaacaagtgatgcacttgatagttcaaagcgggaatgtggtgcttgcacacttctgaaccagcctctggcaccaatctgtgaagtttgtggtacaacaaaacctaaaattgcaaaggcgaagtacacaacttggtcttgtaaattttgtactctagagaacagcactaaacttgacaaatgctcagcatgtgatcaatggagatactcatatgggccacctgtagccacatatggcccaagctatgattgagataac

SEQ ID NO: 2410 - DNA, 354 bp, Zea mays
  Clone ID: LIB3136-021-Q1-K1-B11
accacacgtccggtctggttctttttgctgtttggatgttattattggtcatgtatggctgcttgtatgcacgtcgttggccaccgtaaggaggcccttctttgttgtactggtcctctaagaccttcatcctttttcttcttaatatatcgacacacaattacactgcatcatccaaaaaaaaagaaactactagttcatgaccactcgaccatcttattcttgccagataatataactttaatatactgatgtcctgctctcaaaagcttgaagctcaagctgttcaagcgtggtcggttgatgatatatcttatacaaacatgtatcttacgttccaagaatggatttaat

SEQ ID NO: 2411 - DNA, 391 bp, Zea mays
  Clone ID: LIB3136-021-Q1-K1-B12
acgggagcagacactgtcccaccgaccacgccgccggtcgcccatgatctactcaacgttgcgtgccgaatgtattttcaataatcaagatgagccgtggtggtagtgccggaggtggtcaaagttctatgggttatctctttggaagcggtgagccccccaaaccagcagtggcaccagctgcaagtgctccacctgtagagaaaccatctgctgcaaagactgatgccgccaaccagattgctgctggggttaccagccaaaccaataactaccacagggctgatggtcacaacactgacaacttccttacggaccgtcctttaaccaaggtccacgctgctcctggcgggggctcttccctgggctacctgttcggtggcaactgatg

SEQ ID NO: 2412 - DNA, 313 bp, Zea mays
  Clone ID: LIB3136-021-Q1-K1-B2
gtcttgttctgatagccctggaaaatcttggatggtgatgctgcaaatagagaacttgtcctgtatgccactctcaggaacattccctgcaaatatttacagtttgcaagaactggtggcactcgatctgcaattggacacagattatgggaaagttcgtagcatacctcacaccgtatctactccatttgcagttagtgcatcaagaggagtagcctgtgtcttttcatcccggaggcatgccttggtttatatccttgatgaggatgaggaagcggagggggatgaaacttccgatatggagtgattatta

SEQ ID NO: 2413 - DNA, 408 bp, Zea mays
  unsure (1)..(408): unsure at all n locations; Clone ID: LIB3136-021-Q1-K1-B3
cccgtccggannncatcagcggncctccccaagaatttggtactctaagtccctcgcggacgtgccgccgccggcgcgcgctggttgtccggtagaaaatccgccctttccagccgctgtccaaaacgtccgatctgcttacttgacgccaaccgcaagggggagcactttagcctgtcagtgaggaatggatanntcctttatnccagctgtaaggagcgtctttgaacgatcccagacacgctttcggcgtattggtgtcaatattngctggattctacntnngcttcacttcccttcaattacttaatgcttanncacaagcaatacgacaaagggctggtgatgtcaaagggctgaccagtattattcctcctaccctgctggtactgaactactaactgacac

SEQ ID NO: 2414 - DNA, 444 bp, Zea mays
  Clone ID: LIB3136-021-Q1-K1-B4
cgaagtgcgagcgacccacgtccacacgacacgaaccaccaccaccaaccagcagccggaccgcgcacccagcgcaaagcgatggcgtcgctcaccatgatggcgtccttcgccgccgtggcggtggccgcgccctcgcgccgcggcaccttcgccgtggtcaggtccgccaaggtcgaccgctgccaggagcccgccacgctagcagcaaccgaggccaggcccgccgccgacggacgccgcgccgtcatgctcgcggctgctgcggcggccgtggcagccatcggcggcgccggcgccgccatggcgggccccaagaacgggacccccgaggcgaagaagaagtacgcggtcatctgcgtcaccatgcccaccgccaaggtctgccacaactgagcacgcccgcgttgcatgcagctgcagggccggggggtggtatataat

SEQ ID NO: 2415 - DNA, 386 bp, Zea mays
  unsure (1)..(386): unsure at all n locations; Clone ID: LIB3136-021-Q1-K1-B5
gcgagcccctcttcaccannaagcaggcgttcaaagcgaataccaacgaaatcctgaatggacattnntggagcttcgtcgttgcnncttcgacagtctaatccgtgagaaatatatacntatatatatttacccatacatatactgtactgctgctgtgcggtgccnnnngcgtaggcttttggcgtgatgaatnngtcatacaataaagaagggtgcgagtgtgctttgcgggtatttcatgtgtatggccatgcgatcttgagcacaatgacgtttgggatgcttntctttaagggcttctcgtgcgatctttctatattttggaaagaaagcttgtaaaataaatatatcgctcatctaggtggtgggcgttggcttgtatg

SEQ ID NO: 2416 - DNA, 433 bp, Zea mays
  Clone ID: LIB3136-021-Q1-K1-B6
gctcgatccatctcactctccgctggtcgctcactcttgcagctccaccctgcactgagtcttagtctcttattagctctaggctctagctagccgcgccactccttcgtgtagccatcagccttctcatcgccaccaatggccactgccgaggtccagaccccgaccgtcgtggcggccgaggaagcgcccgtggtggagaccccgccgccggccgtcgtgcccgaggagtctgcccccgccgaggccgaaggcgaggccgaggctgctgcttctgctgatcccgaggagcttcccgcggccgagcagcaggcagccgccgaggcggaggccgcggctcctgctggtgccgaggagcccgtcgcggccgaaccggccgccgaggcggaggctgctgctcctgctggtcccgaggagactcctgcggtcgagc

SEQ ID NO: 2417 - DNA, 395 bp, Zea mays
  Clone ID: LIB3136-021-Q1-K1-B7
cggacgcgtgggctttactcctatccactgcggcctggacgcgtgcgagagagttgacaaagcagcagcagggatggcgcctctgaagctgtacgggatgccgctgtcccccaacgtggtgcgcgtggccaccgtgctcaacgagaagggcctcgacttcgagatcgtccccgtcgacctcaccaccggcgcccacaagcagcccgacttcctcaccctcaaccctttcggccagatcccggctctcgtcgacggagacgaagtcctcttcgagtcccgtgcgatcaaccggtacatcgccagcaagtacgcgtcggagggcacggacctgctccccgcgacggcgtcggcggcgaagctggaggtgtggcttgaggtggagtcgcaccactttc

SEQ ID NO: 2418 - DNA, 570 bp, Zea mays
  unsure (1)..(570): unsure at all n locations; Clone ID: LIB3136-021-Q1-K1-B8
cgnntccgccggcttctttccgctgtagggcgttttctcgtgtcctcggtaggggcgagncctggggaagacggcaaggggtactgcgntngctgcgcgccgaggcggtcngnntcggacgaaccgtacgagtgaccgangctnggcatnnaggcgcccgtgcccatggcngctttcacnngaacntnntcatcncnntcacnnggtgngtnngggcggtgggggcngcngnngcggtgaatgcttgcttttgcggaaaggaccgnntcaagcnnagtcggcccaccnnngtcttccgcnncgcaaccgtgccngccacaatcncnngcaactggctttcgannngaggagtcnncgccgcnncgccgcccaaaattctaactganacnaagtcttcaagtgaaaggggagttggcaagtcccaaagcttggcaaagaaaagaacgctttgtgcccaaaggaccgacannaacattagatgatncttnnacaccctgtttcttgtaaatgcgttggccagtttgaggtccaaggatttttgaattgggtcctttaaaaaaaatgtatgtg

SEQ ID NO: 2419 - DNA, 337 bp, Zea mays
  Clone ID: LIB3136-021-Q1-K1-B9
acacgtctctcctcttccgttcctctcctgcctccagctctccacggtctctgacccgcacgaactgaacccgcgatggcgcgccgcctcctcgtcgccctcctcgccgcgtcgctcctgctcccgctcgcccgcccggactcctcctcgtccccgcccgccgccaccgcgtacgacgagctccgcctccggggcttcccgcgcggcctgctcccggccaacgtgcgggcctacacgctcgactccggctccggggacttcgccgtcgacctccgctccagctgccggatcgtgctgcccgcggggagctacctcgccgccttcagcgaccgactca

SEQ ID NO: 2420 - DNA, 408 bp, Zea mays
  unsure (1)..(408): unsure at all n locations; Clone ID: LIB3136-021-Q1-K1-C1
atcgcctacggggggcgcgatctacggcctgttctccaccccgagggccaccgccgggggcgggtacatggccaacctggaccctctcgacgtcagcttcggcggcgaccaggagcccgtggagagggtggagtccggccgcgccctccgagcgaaggtgttcgagcggcttagcagggagggcgctgtttccggcgacgccggtggccccgacgtctgttgnnnctcctacatcatcaactgatgcggcggcgggaccctggcatggcagtggcaatggcaataacaattggcacggagaaaggtgatggtgaaccgtaacggataaggatggtatccaaaaaaaatatttgcctatatttaatatccttactcagttaaatgcgataataccgggtacatatctat

SEQ ID NO: 2421 - DNA, 423 bp, Zea mays
  Clone ID: LIB3136-021-Q1-K1-C10
gtcgaactacatgtctgctgggcagatatctgttcctattgtctttaggggtccaaatggggctgctgctggagttggtgcccaacactcacagtgctatgcagcttggtatgcacatgttcccggattgaaagttctagctccatattctgcagaagatgctcgaggtttgctgaaagcagcaatcagggatccagatcctgttgtgttccttgaaaatgaacttctttatggtgaatcatttcctgtatctgctgaggtacttgattctagcttctgccttccgattggaaaggctaagatagagcgacaagggaaagatgtcactatcactgcattctccaaaatggtgggatatgcccttcaggccgctgatatactggccaaggaaggtatcagtgccgaggtaatcaatcttcgctc

SEQ ID NO: 2422 - DNA, 382 bp, Zea mays
  Clone ID: LIB3136-021-Q1-K1-C11
gacttatgatcttaatttcaaggaggagaacaacgatggctcaaacaaaatttcaggcgagagcctgaaagacctgtacaagtcctttgtttctgagtaccctatcgagtcgatcgatgacccatttgatcaggatgactggagcacttatgccaaactcactgatgagattggacagaaagtgcagattgtaggagatgatcttctcgttaccaaccccaccagggtcgccaaggccatcaatgataagacctgcaatgctctactgttgaaagtgaaccaaatcggctctgtgaccgatagtatcgaagctgtcaagatgtccaaacgcgccggatggggagtgatgggcagccacaggagtggcgagacaaaagacacc

SEQ ID NO: 2423 - DNA, 421 bp, Zea mays
  Clone ID: LIB3136-021-Q1-K1-C12
cactggtctcgacgccgcagttttggaaaactttggcgtctgcaaggtgatagcatctgggcaccaggatttcaaggttggggatcttgtgtgggggatgaccggatgggaggagtacactctcatccataacccggagtcatttttcaagatcaatcatactgaattgcctgtgtcctactacacaggcgttcttggcatgccgggccttactgcttgggctggatttttcgatgtgggcaagcccaagaaaggcgactgtgtcttcgtctcagcagcatcaggagccgttggtcagcttgctgggcagtttgctaagctcacaggatgttatgttgtcggcagtgctggttctgacgagaaggttaatcttctgaaaacaaactttggattcgatgaagcattcaactacaagaaagat

SEQ ID NO: 2424 - DNA, 440 bp, Zea mays
  Clone ID: LIB3136-021-Q1-K1-C2
cccacgcgtccgccaagatcagcgagtgggagcggaccttcgcctccgaccccgtgaggcccgcgggctccatgctcgaccccgtcctcggccacgccggcggcgacccgctgctgcaggacatcctcatgtactggggcaagccgttctagacgaatcatgcatgcaaacacccatcctcggctgcggttggtttggttggttgatctgtcttgggcagcgcaatgcaatgcaaccgcacggtgtgggcttgagtcaggcgagccgccattgttgacttgcaaggaggatataatatgaaactacagctggattacatggagaggcggcaatgagaccgtctggccccgccgcggaagtgagacggagacggagacggatggcgcagtgcatcggatgtggtggatcgtgcgccgcatgtgtgtgtgtggctgtacata

SEQ ID NO: 2425 - DNA, 360 bp, Zea mays
  Clone ID: LIB3136-021-Q1-K1-C3
gcagccgacaactctctaccgtccgagaccccaagcaccagcgcggcggcggcggcggcggcgaccatggctgtcgggaagaacaagaggatctccaagggaaagaagggtggcaagaaaaagaccgtcgaccctttctctaagaaggattggtatgacatcaaggcaccgtccgtgttcagtgtgcgcaacatcgggaagactctcgtatccaggacacagggtaccaggattgcttctgagggtctgaagcacagagtctttgacgtttgcctagctgatcttcagggcgacgaggatcaagcttacaggaaaatcaggctccgtgctgaagatgtgcatggcaggaatgtgctcaca

SEQ ID NO: 2426 - DNA, 402 bp, Zea mays
  Clone ID: LIB3136-021-Q1-K1-C4
gaggcagcagcggcggcgccggcacctgcaccggcaccggctcaccagcgataccgggaagaggggggaggtacagtcccgcgtacagccccccgaggagaggacatggcggcaggggaaggagcccacctcccaggagaggatatggcggtggccgtggtgaccatggctctgtcagcctcctggtccgcaacattccattgagatgcaggcctgaggaactacgtgtccctttcgaacggttcggccctgttcgggatgtttacctgccaagagattatcacactgggactgtatttttggttgaagtaaatacaagccctgaacaatcctagtcgttcatttgcttggtgagatagagtattgtgagaatgaagttcttttatcaagacaagattcaat

SEQ ID NO: 2427 - DNA, 400 bp, Zea mays
  Clone ID: LIB3136-021-Q1-K1-C5
cttctccgcgctctcccgagcccatcctcccgcgcattccccagaacactagccttccccgcgaggcccctcccccgcggtctccgcctgacccctccgcacgccgccgcggaggcatcggcggcagccacggcgttgggcgggcttctggcgtcgccgctctcgactctggaggccgccctgcggggcctcaacctcgcgccccttcgcgcccccgtggcggcggcgatgtcggcggccgtgcggtggctgggagtgtaccgggaggtgctgctcgtcggcgtgctgctctcctggttccccaacatcccctgggaccgccagcccttctcggccctgcgcgacctctgcgaccccttcctcgccctgtgccgtgaggtcatgccccccgtgttccggc

SEQ ID NO: 2428 - DNA, 437 bp, Zea mays
  Clone ID: LIB3136-021-Q1-K1-C6
ggttgatgggagccagttgactgttagttgggctgaacctaagggttcaacagatgggtcatctgcagctgctcaggtgaagactatatatgtgaagaacctacctgaaaatgtttctaaagagaagataaaggacctgtttgacaaacatggagaggtcacaaaaatcgttctgcctcctgccaaggctggtcataagagagactttggctttgttcactttgcagaaagatcaagtgcattgaaggcagttaaaggaagtgaaaaatatgaaatcgatggtcaagtactggaagtgtccatggccaaaccattggcagataagaaacctgatcattcacacaggcctggaggaggccctaattatccccttcctccctatggtggtggtggctacatgggagatccatatggtgcttatggtggtggcggtcctg

SEQ ID NO: 2429 - DNA, 428 bp, Zea mays
  Clone ID: LIB3136-021-Q1-K1-C7
tgcgtgtgcaacggctaccacctgcgcgacccaccgcgagcgcccgcagctaagctagctctcgctcgcgcgctccgggagaggagagatcaatggcgtcccgtggcagcatgacctgtagtcttcagctcgccgtcctcgtttccgccgccatcgcgctcgggttcggcgtccgggccggcgaggcgcagctgtccagcgagtactacggccagacgtgccccgtcgtgcaccgggtcgcgcggcgggtgctgaagaaggcgcacgaggccgacgtccgcatctacgccagcctcacccgcctccatttccacgactgcttcgtgcaaggctgcgacggctccatcctgctggacaacagctcgagcatcgtgtcggagaaagtcgccacgcccaacaacaactcggcgcgcgggtaccccgtggtc

SEQ ID NO: 2430 - DNA, 423 bp, Zea mays
  unsure (1)..(423): unsure at all n locations; Clone ID: LIB3136-021-Q1-K1-C8
gcagcgagtgggacatcctctccaatggcggcgtcgttcaagaaatggctcacattggcaatggccgcgaccatggcaactgcgtctcgcttcttcgtgtcaatagcaccaactcgacccaaagcaacatgctgatcctgcaagagagctgcacggacgcctcgggctcgtacgtcatctatgcgccggtggacgtggtggccatgaacgtggtcctcaacggcggcgaccccgactacgtggcgctcctgccctctggcttcgccatcctgcccgacggcccgtcaggcagcagcagcatgcaaggcggtggcggtggcggcgtcngctcaagcgggtcgctcctgacggtggcgttccagatcttggtcgactccgttcccaccgccaagctctcgctggggtcggtggcgaccgtgaaca

SEQ ID NO: 2431 - DNA, 314 bp, Zea mays
  Clone ID: LIB3136-021-Q1-K1-C9
agctttcagccgatcgagcaccatcgtcacagtcagtagtagccaagcatatttctttctgggagtgatttgcgctgagcgatcagttcatccagagcgagcggagcggagctgagctgagcgagcttgtgttgcttgagagaccctgccatggcttcccaccaggacaaggctagctaccaggccggcgagaccaaggcccgcaccgaggagaagaccgggcaggcggtgggggcgaccaaggacacggcgcaccacgccaaggaccgagcggcggacgcggcggagcacgcggcgggcaaaggccaggacgc

SEQ ID NO: 2432 - DNA, 396 bp, Zea mays
  Clone ID: LIB3136-021-Q1-K1-D10
cttccagtgtccgccgtcgtgcgctcgctacccctctccctcgaggcctttgccggcgaagagcgcccagtcgcccaccaggatgaagtttgttgctgcctatctgcttgctgtcctcgctgggaactccagcccctctgccgaggacttgacatccattctggagtcagttggctgtgaagttgacaatgaaaagatggaactccttctgtcccagctgagcggtaaggacattaccgagctcattgccgccggcagggagaagtttgcttcagtcccatgtggcggtggcggtgtggctgtcgcggcagctgcccctgctgctggcggcggcggcgctcctgcagctgaggcgaacaaagaagacaaggtggaggagaaagaagaaagtgatga

SEQ ID NO: 2433 - DNA, 360 bp, Zea mays
  Clone ID: LIB3136-021-Q1-K1-D11
ggccgctgtactggatcgcgcaggggtgcgtgtgcaccggcgtgtgggtcatcgcgcacgagtgcggccaccacgccttctcggactactcgctcctggacgacgtggtcggcctggtgctgcactcgtcgctcatggtgccctacttctcgtggaagtacagccaccggcgccaccactccaacacggggtccctggagcgcgacgaggtgttcgtgcccaagaagaaggaggcgctgccgtggtacaccccgtacgtgtacaacaacccggtcggccggctggtgcacatcgtggtgcagctcaccctcgggtggccgctgtacctggcgaccaacgcgtcgggggcggccgtacccg

SEQ ID NO: 2434 - DNA, 371 bp, Zea mays
  Clone ID: LIB3136-021-Q1-K1-D12
acgattcccaagcccttattaattcacaagcgcaatatcctctgcaaattggagagcagttgggccgcggcttaggtactggtggaaatccgaatttgggagagcaggctgctgaggaatcaagagaaaccatagccactgccctgagggattcagatcttgtcttcataacagctgggatgggagggggtactggatctggtgctgctccagttgttgcccagatatcaaaggaagctggttatcttactgttggtgttgtcacctatccattcagtttcgagggccgtaagcgctctgtacaggcattggaagcactagagaagctcgaaaagagtgtagacacacttattgggattccaaatgataag

SEQ ID NO: 2435 - DNA, 361 bp, Zea mays
  unsure (1)..(361): unsure at all n locations; Clone ID: LIB3136-021-Q1-K1-D3
tgagaagcgccttgagatcagcttctctgaggcacctgtcttggctgaccccagcggaaggggactgcgtgcgctctcgcgtgcccagatcgactctgttcttgaccttgctcggtgcaccattgtgtccgagctctcaaacgaggacttcgactcttatgtcttatctgagtcgagcctgtttgtctacccatacaagattgtgatcaagacctgtggaactacaaagcttctgctcgctattccgaggatccttgaacttgctgaagagctcctgttgccactcgctgcagttaaatactcccgtggaacgttcatattccctgaagcacagccttccncacacaagaacttcgctgac

SEQ ID NO: 2436 - DNA, 438 bp, Zea mays
  unsure (1)..(438): unsure at all n locations; Clone ID: LIB3136-021-Q1-K1-D4
ggaccccattcgctctgggcttaaacctaaccttgagaggcctgaggggtaccctaacggtgaggctggtcttaacgcgattgagaataagctaaagatgagagcaaggagggtgcttgcaaagcttgctgagaaaagaaaatcagctgtggaatcttcacgctcagaaaggagcttggatggaattgatctgacatgcaagattgtggactttgggaatgcttgctgggctgacaagcaatttacagattttattcagacaaggcagtatcgggcgccagagatcattctaggtgcaggatactcgttttctgttgacatgtggtccttcgcatgtattgcttttgagctcgcaacaggagaaatactatntacacccaaggaaggccatggatacagtgaagatgaggatcactttgctntaatgatggaactact

SEQ ID NO: 2437 - DNA, 431 bp, Zea mays
  unsure (1)..(431): unsure at all n locations; Clone ID: LIB3136-021-Q1-K1-D7
gcaagagcgaaaagttccctcccccacatcaagatggtgcggttggtgtccctttggacacttcaaatcatatggacccactatatgagcctccagacccgtcttccttcagcactgtgttcacgcacgagaaaggcgctgtgcctacttggtccggaccattggttgatcctgctgcagtggtgaaccaaaagcggaagcacaagtttgggcgctcatcgaaacaaccggccactgcccgtgctcggtaagatcctaaggatcaatatttacaggtaaaaaaaaggagacttcaacatgggggaaatgctccatgcagctgttttgcaaacgaanaatgcaatgataatgtattttgttggttacctgttgtcatgtgagtgattttntttctagacatcatgtataggcttgggagggagttgaagtag

SEQ ID NO: 2438 - DNA, 433 bp, Zea mays
  Clone ID: LIB3136-021-Q1-K1-D8
cggacgcgtgggtcctgccccgccaccacgccgcggcagcacaactgcacaagccctgctcagatctcaatcccggcgctccctccctccctccctcctcgcctcgggacagcgagcgccgccgtccgccgtccatggagcacgacgccgaggcgcgccgcgggttcgccaggatgggcttcgggtgcaagcactaccggaggcgatgccggatccgcgcgccctgctgcggcgacgtcttccactgccgccattgccacaacgagtccacgaaagacgggcacgagctggatcggcacgacgtccaatcggttatctgcctcgtctgtgacaccgagcagccgatcgcgcaggtgtgctgcaactgcggcgtctgcatgggggagtacttctgcgcagcctgcaacttcttggacgatgacgttgacaagga

SEQ ID NO: 2439 - DNA, 362 bp, Zea mays
  Clone ID: LIB3136-021-Q1-K1-D9
cacgcacgcatacacagcacagagtgaggtaagcatccgaaaaaagctgtgatctgatcgacatggccgccgccaccatggctctcacctcccgcgcgctcgtcggcaagccggcgaccagcaccagggacgtcttcggcgaggggcgcatcaccatgcgcaagactgctggcaagcccaagccagcggcgtccggcagcccctggtacggggccgaccgcgtcctgtacctgggcccgctgtccggccagcccccaagctacctgaccggcgagttccccggcgactacggctgggacaccgcggggctgtccgccgacccggagactttcgccaagaaccgcgagctggaggtgatccac

SEQ ID NO: 2440 - DNA, 376 bp, Zea mays
  Clone ID: LIB3136-021-Q1-K1-E1
catcgaccccgcggaagcggtggcgtgcgcgtatccactcctcaaccaagtggagcaggcccgcacgctagaccggagctggggggcgacgacgagccagccgccgccggtttgaccagacctgtggtgatggactgataaggtatgcctgtaggagggagagagctttcggtttacaaaataatagggtgccgctggctggactgagagagcggaatgaaggaatgatcctgcgatgggcgggtggaactggctcttctgcggccgatccaaaaccagaggcggcgagctccagccttccgagcccttccagctgccggcgcccttgcccgagttcacgcaaggaggggattttgctaagggcacaatatgcata

SEQ ID NO: 2441 - DNA, 415 bp, Zea mays
  Clone ID: LIB3136-021-Q1-K1-E10
caatggcccatgccacacccataaagactgcaagagaatgtacaagcatcctgcaaaatgattaccctgagaggctggccattgcatttctgttgaatcccccaaaagtattcgaagcctcttacagggctgttaaatatttccttgacccaagatcgatcgagaaactgaacttcgtgtacctgaaggatgaggagagcatgaaggtcctgtacaagtgcattgatcccgtggtccttcctgtggagttcgggggaaagaacagtgttgtgtacaaccatgaggactactccaagttgatgctgcaagaagatatcgaaacatcaagcttctgggaggatgatgcgaaaactgttaaccatgctatcaatgggaccttggttcctgatgttgatctcagctggcacggattgct

SEQ ID NO: 2442 - DNA, 412 bp, Zea mays
  Clone ID: LIB3136-021-Q1-K1-E11
ccgaagggcgccttcacggcgaccacctacacatcggctgcgcccaccggtggcggcgccggcgcggcccaggggcaggggcaggggcaagaccaccaggagagacggcagactccgcggacggagctccggtcggccgaggacgagcgcgggctgcctgtcaggaagctggaggacgcggtcgaggatgccgcgggcaagggcgggccggtgttcggcgccggcacggacgacgggaagccggatctcggggtcaccggcaccggctgatgctagccggatgtgcttcttgatgtgacgctcagtcaacgagcgagtcagcaagtgaaagcacaaggatgtgtccagcacatagtgcatacgatcggtcgtgtaaaatactgtacaaagtatgcacgtgcgaaataacact

SEQ ID NO: 2443 - DNA, 420 bp, Zea mays
  Clone ID: LIB3136-021-Q1-K1-E12
caggtctctgcaggaaggtagagaggaggaggaggtttgtggcaggatttgaccagcccaatggttccatccgagatggggagcgtcgccaccgccgtcagcacgcctgctgcggacaagctgctccatgggcctatctctggcaagaagtgcaagaaaccaggcccgaggaagattcataaggctgagagggagaagcttaaacgagaccacctaaatgatctctttgttgagctgggtaatatgctagaagcagatagacagaacaatgggaaagcatgcatactgactgacactactcggatactaagagacctgcttgttcaagtagactctcttcgaaaggaacatagcgacctacaaaacgaatctcattatgtaacaatggagagggatgagatgcaggatgaaaacggcgtg

SEQ ID NO: 2444 - DNA, 294 bp, Zea mays
  Clone ID: LIB3136-021-Q1-K1-E2
cggacgcgtggggcctctttggtgaggttttctactccgtggctttgccttccctctggagagagcgggtggtgtcttcagccctgatggcaccatgtcatgtgcgcgattggatcatggggattctgatggttcacagcgcttcttcaccttctccgtcaagggttctgtatgttgcaaaccacggtgtggttctctttgacatgtccattgacgactgccatactgtgcatttctgatagctttgcgcagcttacctgtcttattgcaaaataaccagtagtaccattggcg

SEQ ID NO: 2445 - DNA, 345 bp, Zea mays
  Clone ID: LIB3136-021-Q1-K1-E3
attcagcgcaactgatcgtggggattctattctccatcgtgaattgtggtgcctttccgatcagccatggtgaagaggctcaggcgtaagggcgacgtctcctccgcgccgccgcccaaggcctccgcccctgggtctaccaagtccgtcaagttaaagaagggggtcaaaaccgttccgaagaagttgaaggggctctgcactgaatccgtgggcatcgctgaggcgtctgcttcggcgcagacaccggccccgaaatcaatcaagacgagtccggcagcggccaccgccgcagagaccgcagatgatcgggtcgcccagaacaaaacggaggacagaaatttg

SEQ ID NO: 2446 - DNA, 373 bp, Zea mays
  unsure (1)..(373): unsure at all n locations; Clone ID: LIB3136-021-Q1-K1-E5
cgcnnctggagtcaactgcataacgttttaactgtgtggcgatacctggtatagnccatttcaaagaggggctggaatggtccnctcttcagatggagccttgggggaaaagatgcttgcattgtgctagaggatgcagatctggatttggtttccgcaaatatagtaaagggtggcttctcatacagtggccagaggtgcactgctgtcaaagtagtgctgatcatggaatcgattgctgatgctgtggtacagaaggttaatgccaagttggcgaaactgaaagtggcccacctgangacgactctgatatcaccccgtttgtacagaaatctcagccaacttcatcgagggtcttgtgatggatgcaaag

SEQ ID NO: 2447 - DNA, 439 bp, Zea mays
  Clone ID: LIB3136-021-Q1-K1-E6
aatagaggaaggtattgttccaggaggcggtgcagcgtatgttcatctatcgacatgcgtgccggctatcaaggagacgttggatgatcctgaggagcgcctaggtgctgatatcattcagaaggctttggtggcacctgcagcgctgatagcccataatgctggggtggaaggtgaggtgattgtggataaaatccgggaaagcgagtgggagtttggttacaacgccatggcggacaagcacgagaacctggtggaggctggtgtgatcgaccctgccaaagtgacgaggtgcgccctgcagaacgccgccttcgtggctggaatggtgctgactacccaggcaatcgttgtggagaagcccaagaaggctccagcagcagctgctgcagcggcaccattaggttgttctttcaccatgtaataatactttctagtg

SEQ ID NO: 2448 - DNA, 429 bp, Zea mays
  Clone ID: LIB3136-021-Q1-K1-E7
cttcgtcgttgtgtatgagttgctggatgagatgatggatttcgggtaccgacaatggacggaggcgaagatcctaagtgagttcatcaagacagatgcgtacaggatggaggtcacacagcgtccacccatggccgtgacaaatgctgtgtcatggaggagcgaggggatccgttacaagaagaatgaagtcttcttggatgtagtagagagtgttaacattctagttaacagcaatgggcagattgtgagatcagatgtggttggggcactgaagatgcgaacatatttgagaaaacagcttgcattgctgtcggcgaatttgttcctgagatctacggattttatgctggattgggatagcataccaaggcttttgttactatggcctctctttggtatgatgtagattagtgatcgaaatatatg

SEQ ID NO: 2449 - DNA, 411 bp, Zea mays
  Clone ID: LIB3136-021-Q1-K1-E8
gatggatcacattcctgaccttacaccaagtgagaacgggaatcatgctataaatggaactactgtattcgaggagctcaaaagtctgcgcttaacatcagatagacagcctaaggcagaatctattatacatagtgaacggccaccatataggagtacatctgatggccctacaagttctagtggtttctcttgcccagacaataatgctggtcacaacggtgaactagagtcatatgtagctgcattttttgaaaactcactatcacaagccaggcagatggttgacgaagccatccaggcaaactctggtggtagtgatgatgaaaaggtatgcatgttaaatcaagtgacaggatgtctaggctcagattccgtggcgtgcaacttcatctgacatgatatcaaact

SEQ ID NO: 2450 - DNA, 419 bp, Zea mays
  Clone ID: LIB3136-021-Q1-K1-E9
aatacggtcaactagggcatggtgattttgaagatcatttagttccacataaagtagaagcgttgaaagatagcactatatcccagatttcaggcggctggaggcatacgatggcacttacatcagagggaaagctttacggatggggatggaacaagttcggacaagtcggagtcggcaacaacgacgaccacagctcccccggacaagtcagttttccagaggatcagaaaatctcccaggttgcatgcggatggaggcacactctggccctctccgagaagaaaaatgtcttctcctgggggaggggcactagcggacagctcggcaacggtgaaatagtcgacaggaacacgcctgtgctgatcgatgccctgagctcagacggttctgcctgcaagaagctggagtcatccacg

SEQ ID NO: 2451 - DNA, 287 bp, Zea mays
  Clone ID: LIB3136-021-Q1-K1-F1
attagtattagcgaactactgacgggctgtcaatgtggaaaacatggtcggagactagaacaaggcgaaggtccgaagtcattatcagaacacagatgcttacacgattgatgtcacacacacatcaccactgtccgaaacaaatactgtgtcatttaagacctatgggcgtctctccatgaacaatgtaacattgttgaataaccgtatgagtgcatactttccagtttaccagccagctctgcctgctagagcagttgttcctgatccacactatcatcatgcat

SEQ ID NO: 2452 - DNA, 293 bp, Zea mays
  Clone ID: LIB3136-021-Q1-K1-F10
ctggcttctcctccccctcttaccaagtcctcctcgggttagggtgccttagggttttgtggaggggcgatggcggcggctgatgtggagtaccgttgcttcgtcggcgggcttgcctgggccaccagcaacgagtcgctggagaatgccttcgcctcctactgcgagatcctcgactccaaggtcatcaccgaccgggagacggggaggtctcgcggcttcggcttcgttaccttctcctccgagaactccatgctcgacgctatcgagaacatgaacggcaaggagctcga

SEQ ID NO: 2453 - DNA, 230 bp, Zea mays
  Clone ID: LIB3136-021-Q1-K1-F11
catcgattatgtaaggactgtcacctaccctcagctcttacatccggagcagctcatcaggggcatggacgatgcatccaacaacttcactcgtggtcactacaccacaggcacggatatcgatcacctgcgcctagaccaaatacacgaaactcgcatataattgcactgatcttgactaatagctactacctaacgctgttcatggtggacccgaccctgtactcggt

SEQ ID NO: 2454 - DNA, 411 bp, Zea mays
  Clone ID: LIB3136-021-Q1-K1-F12
ggtgttacttctgcagatgcagatctttgtgaaaaccctgactggcaagactatcacccgcgaggtggagtcgtctgacaccattgacaacgttaaggccaacatccaggacaaggagggcatccccccagaccagcagcggatcatctttgctggcaaacagcttgaggacgggcgcacgcttgctgactacaacatccagaaggagagcaccctccaccttgtgctccgtctcaggggaggcatgcacatctttgtgaaaaccctgaccggcaagactatcaccctcaaggtgaactcctctgacaccattgacaacgtcaaggtcaagatccaggacaaggagggcatccttccagaccagcatcggctcatctttgctggtaagcagcttgaggacgggcgcacgct

SEQ ID NO: 2455 - DNA, 440 bp, Zea mays
  Clone ID: LIB3136-021-Q1-K1-F3
accatgggagatgttcgctgactcttgccgcaggctcaggatcatgaaaggatcaggtgcaattggacttgctccaagggcagctgataagtccaagaatcgcaactagaatggttgcttcttacagtccagagcaagagggagatatccagtgactgtagggatctttgtggaagccggaaaacgtctaacagtttcaagaagaattctgccttatggtctgtaccacatgtttttgctgctacgcaagtaaagaactccacgtctgtcaatgttagttttacaacatcgtctacggacaaaaaaaaaaaccccccgctatttgattgttgctaagccttcgtacgatgtgtaaatggtttggtacaatgagtgctgcgactacgattgagcacccctctacctaagttgcaaaaaacagtgtcccatggactgtctgt

SEQ ID NO: 2456 - DNA, 248 bp, Zea mays
  Clone ID: LIB3136-021-Q1-K1-F4
gtgaggttctccggggttcggtttcgtgggtgagcggatcgagatggcggcgtcggatgttgagtaccgctgcttcgtcggcggcctcgcctgggccacggacgaccactccctccacaacgccttcagcacctacggcgaggtcctcgagtccaagattatcctcgatcgggagacgcagaggtcccgcggcttcggcttcgtcaccttctccacggaggaggcgatgcggaacgccatcgagggca

SEQ ID NO: 2457 - DNA, 364 bp, Zea mays
  Clone ID: LIB3136-021-Q1-K1-F5
gcgatcaaaactggccaccaactgctgtgcatccaatgtggaaaacagtatgggagacaggcaattcttgtctgcgagaaggagttttcaggactacatgtgatgagcgactaatcgatgcattgccacctgagagtcacaatgcaagagttgcttttcttacccctaaaaatgttacacctgagaagatgtcatgtgtggtccatcttgcatgcactggtgatcacacatttgagcgcacgcttatgctgggtgggcctcttcttaagaacaatattgcaactattgttcttgagagcccctattatggacagcgacgtcctagcatgcagcgtggtgcaaagctccagtgtgttagtgatct

SEQ ID NO: 2458 - DNA, 438 bp, Zea mays
  Clone ID: LIB3136-021-Q1-K1-F6
cggacgcgtgggtgcggccgggtcggatctgagacgagacgagtcccctgcggccaggtcgcctcacccaaccggaacgaacaagttacaatctcatcccaaccccgcctcgaccggatctcgtcggactcggatccgcccgaccaccccgcgccgccgcagatcaaagaagatggcagctctcgacaccttcctcttcacctcggagtctgtgaacgagggacaccctgacaagctctgcgaccaggtctcagatgccgttcttgacgcttgccttgctgaggaccctgacagcaaggttgcttgtgagacctgcaccaagaccaacatggtcatggtctttggtgagatcaccaccaaggccaatgtcgactacgagaagattgtcagggagacctgcccgcacattggttttgtgtcaaacgatgtcgggcttgg

SEQ ID NO: 2459 - DNA, 94 bp, Zea mays
  Clone ID: LIB3136-019-Q1-K1-G11
aaaaaaaaaaaaaaaaaaaaaaaaaaaaaaaaaaacaaaaaaaaaaaaagggggaaaaaaaaagggaaaaaaaaaaaaaaaaaaaaaaaaaaag

SEQ ID NO: 2460 - DNA, 402 bp, Zea mays
  Clone ID: LIB3136-017-Q1-K1-F6
ggcggctcaagcctcgtgagtgcagtattgggcaaaccggaggctgcggcaaccttgtgcagttcggccacgaatatactagggaagatcgcgaccaatcaatcaatcgacgaccgagttcaattgttcagcattctttattagttttggtgggtggatacttcaatcggtgagccgaacagacagttgttttgagtatgaattgctctgcatctgcaaagttgttgtttgtcatccgtcgtctcaataaggcgagggtggaactggaatagatggtgctgtatggaacaggggaagagatgcatgcgccattgttgtttgttttgtttatgtagtaagatgcgtgcgttcctttccttgctcctcgtcatggtgcatttctcctttactaagacacacaaa

SEQ ID NO: 2461 - DNA, 403 bp, Zea mays
  Clone ID: LIB3136-017-Q1-K1-F7
gcagtcaccactcccaagccagtaccgagtcctacgagcagtcgcacgcaagtgtcaagagacgaaacggtcgacatggctcgcacgcaatctgccgtagcggtcgccgtggtggccgcggtgctgctgctggcagcggcggcgacgacctcggaggccgccatcacctgcgggcaggtgagctccgccatcgcgccctgcctctcctacgcccgcggcacggggtccggcccctccgcgtcctgctgtagcggcgtcaggaacctcaagagcgccgtcagcaccgtcgtcgacaggcgcgccgcctgcaactgcctcaagatcgccgcagggcgtagcgcctaacgccgcacgccgcagcatcctcagtgcggtagatcctaacatagactcacgactgtca

SEQ ID NO: 2462 - DNA, 415 bp, Zea mays
  Clone ID: LIB3136-017-Q1-K1-F8
agggggctcgtttcgttggtattcctggaactgagacagaggagcatccaagaggcatcatggttgaggtgtactgggatcaggatgaaaatggatcgctctgcatttctgggcactctgacgagatgcccgtgccagttcatgctgagctgaggaggcctccgtcactttctcgtagggcctcaatggaccgtggacgtccagttgggtatatgattgacctgaaccaggtcccatgaaaaaaaagatgagtccaggtgcaacgtttagattggttttgatgcagattatctggtacatatagtatataggaatcttgtattcgtgtctttgtattagaagtcgtaaccttgtattgcagtagtaattggtaaagacatgctttgaaaatatcctatagtgtaacacaatattt

SEQ ID NO: 2463 - DNA, 337 bp, Zea mays
  Clone ID: LIB3136-017-Q1-K1-F9
cggacgcgtgggcgtgagatcggctcgaatccaatcctctccaataatacgcaccggcacccatttgcgccatgctgccgcggccggcgaccacgacgagccaagaacacgcgcggcatccctgagccacccacccaggcttaccaaaacggattccttttccctcttggatcccagccgctcccaagcgtgcgcgcgaattctctgcttgcctcgcccagcgccgtgtgctcttgtgctgaagatccatcccatccatggaggggtgccaactgctagtaggctgtaggatggagatggaagaggaagcgttctttgactcgcgagaggagctcac

SEQ ID NO: 2464 - DNA, 393 bp, Zea mays
  Clone ID: LIB3136-017-Q1-K1-G1
agcagcatgaggggggaacagcccatacccttctcaaagaagttccccaatgcaaatcattcggcgctcaagctcttacaaaggcttctagcatttgatcctaaagatcgaccaacggctgaagaggcattggctgatccctactttaaaggcattgcaaaagtggagagggaaccatcctgtcagccaatttcgaaaatggaatttgagtttgaacagaagtttaccaaagaggatgtcaaggaacttatattccaggagatactgcagtaccatcctcaacttctgaaggactacaagaacggctctgaaaagacgagttttctatatcccattgccgttgacaggttccgtaggcaatttgctagcttagaagaaaatggagagaggaat

SEQ ID NO: 2465 - DNA, 399 bp, Zea mays
  unsure (1)..(399): unsure at all n locations; Clone ID: LIB3136-017-Q1-K1-G10
caccactccgcgctagctgaggacggtacagcggcacagagcgacgacgacgacacaggcgccacacatggcatcccagctctccgccgccgtgccccggttccacggcctccggggctacgccgcgcccaggtccgcggtggcggcgctgccgtccgtgagggtgggcaggaagaggtcgtcgtcgcagggcatccgctgcgactacatcggctccgccaccaacctgatcatggtgacgacgacgacgctgatgctgttcgcgggacggttcgggctggcgccgtcggcgaaccgcaaggcgacggcggtgctgaagctggaggcgcgcgactccggcctgcagacgggtgaccccgccgggttcaccctcgncgacacgctggcctgcggcgccgt

SEQ ID NO: 2466 - DNA, 386 bp, Zea mays
  unsure (1)..(386): unsure at all n locations; Clone ID: LIB3136-017-Q1-K1-G11
gggtgactgcaagaaggggaggaagaagaagagcaagaaggataaggacccctccaagcccaagcagcccatgtcggcctacttcgtgtactcgcaggagaggcgtgccacgctggtcgcggagaagaagaatgtacctgagattggcaagatcaccggggaagaatggaagaacatgacagaaggtcagagggctccctatgaggaggtcgcgaggaagcagaaggaagagtaccacaagcagatggaggtgtacaagcagaagaaggctgaggaagctgctagtcttgagaaggaagagcangagcataagaaaatcatgaagcatgaggctctccagctgctcaagaagaaggagaaggcagataatatcatcaagaaaacca

SEQ ID NO: 2467 - DNA, 422 bp, Zea mays
  unsure (1)..(422): unsure at all n locations; Clone ID: LIB3136-017-Q1-K1-G12
cggactactcgctcctggacgacgtggtcggcctggtgctgcactcgtcgctcatggtgccctacttctcgtggaagtacagccaccggcgccaccactccaacacggggtccctggagcgcgacgaggtgttcgtgcccaagaagaaggaggcgctgccgtggtacaccccgtacgtgtacaacaacccggtcggccggctggtgcacatcgtggtgcagctcaccctcgggtggccgctgtacctggcgaccaacgcgtcggggcggccgtacccgcgcttcgcctgccacttcgacccctacggccccatctacaacgaccgggagcgcgcccagatcttcgtctcggacgccggcgtcgtggccgtgggcgttcgggctgtacaagctggcggcggcgttcggngtctggtgggtgtg

SEQ ID NO: 2468 - DNA, 274 bp, Zea mays
  Clone ID: LIB3136-017-Q1-K1-G2
agcggcatattttcacattctagagcctggaagccgaaaaccaattcccatcctcagaacagctcagacggcaagattgctgttgaagggaaagtggattcccatggtggtaggcttgagctgaacatgcccaaaggatctgatacaattacccatcaagacaccagcagtaaaccgatgaaaaggagtgatggcaccgatgaggcctcacacagcaaacaggagaacctgacacaggaagatggtaaccagaagatcgagactggacaagagc

SEQ ID NO: 2469 - DNA, 325 bp, Zea mays
  Clone ID: LIB3136-017-Q1-K1-G3
gtccctctcgcgtgttgcttcctcggttcctccccagctccaacttccaagaacccgtgaagtgaagtgaggaggtcggcggaaccggaacccatgcgatacgagatgatcgcaaacggcctccgcaaatccagtgctgcctcctcccaggttagcaagctggtgaaatacattgctagtgctggaagcttgcaaggggggcacagtttatcagagccgtctgccagacattacagctctgaaccttcacttcaggcgacagaagaaaatgggtttaaggggcacagcatgctggctccattcacaagcgggatggcagagcact

SEQ ID NO: 2470 - DNA, 332 bp, Zea mays
  unsure (1)..(332): unsure at all n locations; Clone ID: LIB3136-017-Q1-K1-G4
ntccgggcagtggagttgtggtaggaaaagctcgtcgccaagtcgacgtacggtggctctgctcgggtgagccagccgcgggtactgatgcctgatggccatgcgatggaccgtctccgcgacgggcgagccttgctgcaccgcgcgcttgtgctctcgtggctgctccttctggcctgcggcgaaatattcttcgaggaacggctcgatgatgggtgggatagccgctgggtgaaatctgattggaagaagagccaaggacaagctggaaccttgcgacacacagcgggaacctactctggagaccctgacgatgaaggtatacaaacaac

SEQ ID NO: 2471 - DNA, 385 bp, Zea mays
  unsure (1)..(385): unsure at all n locations; Clone ID: LIB3136-017-Q1-K1-G6
cttatagtaataaaacttgaccaactaaaagcaactgcttaaccttaactccacatacagctagtccactttagccaaacgggacatttgctgagtacgttgatgtgtattcacccttgctttacaaaccaccccaccctaggttgtccccactgtactcagtgctcaggaggtgatgctggcaacatggaggactttgaggagttccaggactacgatgagttctagtttttcttagtggcaaacccccagtcggctgcctgtgaaggccttatcttctacgtttcgtattccgcactttgatattaatgttaaagacaatggttatgtattagactctgtggatgtnctggacatctngatgtaactaaagtaccttttcgct

SEQ ID NO: 2472 - DNA, 328 bp, Zea mays
  Clone ID: LIB3136-017-Q1-K1-G7
gtatccgccagtgcaaggcaaccaaccaacgggtatttatccccagcaaatggctggagatgtctaccagcaacagatgtttggtggccagatgataggttatggctatggtccgcagcctggaggctactacgtgccgaacgccgcatatgcatatgccggtgcaaatgatctttctcagaggatgaatggcctctcgatgcaaggcaacagtctgtatggcacacccgcgtcgtcttccctccagcagcgtaacaggccaagcagacctgaagattcgctctttagtgatcttgttagcatcgccaaaacaaagccttgtaaaact

SEQ ID NO: 2473 - DNA, 349 bp, Zea mays
  Clone ID: LIB3136-017-Q1-K1-G8
gataatttccccaatcccccccgcgcgccgatcgcgacaaacatgcatggcgaagccttccgcttctgcagcggcggcggcgctccgtgcctccctcggcgtcgccttcgcgctgctgctcctgctcgcttcctcccgcctcccgcaccgcgccctgtccgccgaactctcgtccccctcggtggtggcccacgagcgacgcggccacggcgcctgcgcgggcgtgcggacccccgacgagagataccgcgccatcgcggccgggtctgacggccggtaccgctacccgcgcggcggcgggcacgtcgactacctgtacctcttctactgcgtcctcggcggcgaacgc

SEQ ID NO: 2474 - DNA, 358 bp, Zea mays
  Clone ID: LIB3136-017-Q1-K1-G9
agaacggtatatgttggtgggcttgaccccaatgtcagtgaagatgaactgagaaaagcctttgccaaatatgatcttgcctctgtgaaaattcctctaggaaagcaatgtggctttgttcaatttgttagcagaactgatgctgaagaagcactacaaggattaaatggatcactcattggaaagcaggcagttcgcctttcatgggtccgcagcccatcgcataagcagtctaggggtgactccgtcaacatgaggaacaacatgtactatggcacaccattctacggtggatatggctatgcctccccggtgccacacccaaacatgtacgctgcatcgtatggcacgtacccgc

SEQ ID NO: 2475 - DNA, 246 bp, Zea mays
  Clone ID: LIB3136-017-Q1-K1-H1
tcgggcttcttggggcccggctcccgcgtggcggggcccgcttctacggcaactggtactacatcatgcgcgtcgcattcacggccgacaaggtgtcctcgtcgtcccgcgccgacgtggtgaaagtcatcaaggagggaaagaaacggctgccgtccgagttcgcgcggtgggccgcgggggaagaggacgccgacccctaccagatcaccttcgactaccggacgctgctggtgtctgactgga

SEQ ID NO: 2476 - DNA, 315 bp, Zea mays
  Clone ID: LIB3136-017-Q1-K1-H10
acgccctgctcccccaccccatgtcaacggccaccgtgccgtctccgtccccgtcctcttctccctcgtgtggaactcgccctctgctccggatcggcgcggcccgtcgtttcgccatggcatttccgccatgggcggctctgctctttgcggaacaatctggtgctgtatttggcagcggcgggagcggactctggaggagggagcgtctgcttcaaccggacgttcagcttcagaaactccctcacggataccaggaacttcctgctctacgggcccgacgacttcccggacccagcgcggataccttcctac

SEQ ID NO: 2477 - DNA, 455 bp, Zea mays
  unsure (1)..(455): unsure at all n locations; Clone ID: LIB3136-017-Q1-K1-H11
gaattccctcccctagccgccgccgccgccgctcgtctccctgagaggtgccgggaccgaggaactggccgagtactaggtagagaatcggcttttcttgtctcagcccggggtctgctgcgtctggtggtggtgaaggggagaaattcgtgagatctgttccggatcaggcgtgcgagctcgggaatcaggggtttcacacatagcttcgtcgatttgaatttgatgtactaatggagtctaagggtggcaaaaagtctagcagtagtcgttctatgatgtatgaagctccccttggctacagcattgaggacgttcgacctgccggaggcgtgaagaagttccagtctgctgcttactccaactgcgcgaagatgccatcctgatatccccttttggcttnctcattctagtagtttaggatttcttttctgacactttgattctgaccaatt

SEQ ID NO: 2478 - DNA, 301 bp, Zea mays
  Clone ID: LIB3136-017-Q1-K1-H12
ggccaattgcttggatcgatgaaaatgaaaagtgctacttcccggaatcatttatacaagatgagaagttatttatgaagaaagattttggcaacggaaatcatgagtacattagtgaagagcgaaatgggacacgagaaacgaatcaccagtttggagcatcagaaagttctgctgaaagctcaaactttgagtcaagtattggagatgtttctagtcctaagagagctagggctgaaaagaatttcattgtaaaaaaatattgtgatatgggagaagctatgggagaaaatgagccatg

SEQ ID NO: 2479 - DNA, 59 bp, Zea mays
  Clone ID: LIB3136-017-Q1-K1-H2
cgcttctcttctcccgcctcccgcttttcgtctccgtcttctacggctactgctactac

SEQ ID NO: 2480 - DNA, 217 bp, Zea mays
  Clone ID: LIB3136-017-Q1-K1-H3
gggcgcgtggcgaggcgatgctattgatagccggtaataattattcgctgggcttaaggggagtatttgagtatactctgtatggtccactcattgcgtgctgtgctggtgttcatttgtatttggataattgtcgagcccctatggcatgattgtgtcatatatctgtttgatttgcaatgctattcatcgaagtcgatgtagtatatttcattca

SEQ ID NO: 2481 - DNA, 259 bp, Zea mays
  Clone ID: LIB3136-017-Q1-K1-H4
cagaaacgaaagagcctccaaaacctcgcaacaaccccgtgacacccacacccatccgccctgcccctgctcgcgctccccaccaaccccgacgagcggcgatgaccggcacggtgtccaagctggcggcgccccggcctgcggcgccaccgctccggccggcgtccctccgcgccgccgcaatcgccttcgccccctccccgcgccgggtccgcgtctccgtcgccgggcgggccaggatcccctccgtcattgcgat

SEQ ID NO: 2482 - DNA, 383 bp, Zea mays
  Clone ID: LIB3136-017-Q1-K1-H5
ctcgccgctgttccccgcaacctatcgacccaatctcgtccgacccggcgcgtcgtcccctccagatctccgtcgccctctccaggtagcagaaactgttctgctgcagtctgacaaagtggagggcttaggagcttctgcttcttttatgtctgaacaatctttgctttatttgggattgttgggagagtactctcgtgcaacgaggaaaaggcacaaggttccgtcccactgcatgcgtcaagagcctgtctggttttcttgttctgatttgtcatttgctggtgctcagagccggcttggtttcctcgaaggatcagcaactactcttgattgtggaccttgtcacatctgatatcaacttcatagatttttatccaaga

SEQ ID NO: 2483 - DNA, 362 bp, Zea mays
  Clone ID: LIB3136-017-Q1-K1-H7
cgcaggaggagtatgaggcggcgctgcttgcgtcgacaacgctgtacatcggtaatatgtccttctacaccacggaggagcaggcctacgagctcttctcccgcgccggcgagatcaagaagatcatcatggggctcgacaagaactccaagaccccatgcggtttctgctttgtactgtactactctagggaggatgctgaagatgctgtcaaatacattagtggaacgatgcttgacgatcgtccaatccgtgttgatttcgattggggctttgaagaaggcagacagtgtggccgtggacgaagtggtggacaagtagtggcctggtcttattctaacaaatatacatgggtttctaca

SEQ ID NO: 2484 - DNA, 454 bp, Zea mays
  Clone ID: LIB3136-017-Q1-K1-H9
gaaggaaggttgcggcggcgagcgctgactgtatctaaacctcgatgatcatggtgtccgcttccaagcgcttctgctgaggcgcaatctacttcacatccagaagacaccgaagaaactcaagacatggacattgaaccaactgggtatgagtaagataaacttcattcttaccttctatactaaatcttaatatctttcaaataataccattttatattgaatttccataatgaactatatgtgtgtgtatgtgcataaaaagattatacttatttgtttgatctgctataaaaatatatttgagaccactgaaatattgcatattagtttaacatatttataaacatctttaatagcttatgtcatgaatgccctatgaagccatatttcagagaccatgagctatgcgacacaatagttctcttatttcgtgtactgttggacagagtaa

SEQ ID NO: 2485 - DNA, 476 bp, Zea mays
  unsure (1)..(476): unsure at all n locations; Clone ID: LIB3136-018-Q1-K1-A10
ccacaaaataccactgatagcaatgtggaattccctgctcgagaggaatctgcaccagtagatcaaatagatgccaggaatcaagattactatgaaagtggtgcagtaacttcaccagcagacgaaaatcttgaggccatgcttggagctaacatggagaatgtagacgcgccttctgtttcacaggctaatgagctcaggcaggacgtacttgatccttctgaacttcaatatgacgtcccatcagttccaagtcatgcttattcaaacacggacactntacagcctaccacaattgaggagccacaaggaaacaaccaagcacatactctttcccatttgtcaaacttaatgcaagcaaatcctttgagcaccagcagcctattggggtcaaatcaaaatcatgcaactcttcatggcttagagtttgatttaccgccttatctgggagcaaaatataacgcaggctcaactac

SEQ ID NO: 2486 - DNA, 438 bp, Zea mays
  Clone ID: LIB3136-018-Q1-K1-A12
ctccccctccaccgccaccgccttccgcctccgtgactgggatccacactcgccctcttcctcgtcgtctgctcgctctccgtcacctccttccgcctcctcctcctcctccacatccgcctccgctcgccgcctctccccgctcgcgcgcttcctcctcgacgcgctccgccgccaccagcgctggggaccgcccgttgtcgccgatctctccaagctccgccgcgtccctccatccctcgtcgctgaggtccttaccgggccgccctccccgccgccttcggtcgcgctcccgttcttcctctgggcgggccgccagaagggcttccgtcactgcttcccagctttccatgccctcgcctcgctactgtccgcggcgggcctcccagccgcggctgaccagctccccgacctcatgcgcgcgcacggcagaccgat

SEQ ID NO: 2487 - DNA, 412 bp, Zea mays
  Clone ID: LIB3136-018-Q1-K1-A2
cgagtgccccaaggtgaagccggtcgaagtcgaactcatcgacccgacgcttggtgcaggcgtcgtccaggacgtcgtccccgccgagctctcggtccccgtggaggaccgcaacaataaggaagcggctgatcaactggtgttggtgaaggagagcgatctgtcagatttcgacttcagcttccacgcggccatgaagcccgtccggtccgacagtgacgtggcactggacacctcggccgacgctgcggtggcggacacatcgccgaagctgaagcggtcttgctccaacatcgagactaagcgaccaggctcgcgttccgcgcccgagatgccggcccggtcgcgctcctacggcgatctgggcaacctggtcgccggccttcgcctggacgcgacggcgaccccgcac

SEQ ID NO: 2488 - DNA, 427 bp, Zea mays
  unsure (1)..(427): unsure at all n locations; Clone ID: LIB3136-018-Q1-K1-A3
attaattgttgccctttcagttcgccatcggcagccgaccagcatgagctccacaggcggcgacgatggcgccaagaagtcttggccggaagtggttgggctcagcctggaagaagccaagagggtgatcctttgcgacaaacccgacgccgacatcgtcgtgctgcccgtcggcacgccggtgaccatggatttccgccccaaccgcgtccgcatcttcgtcgacaccgtcgcggaggcaccccacatcggctgaggtttaaatctacaaaatgaatagctcgatcggacatgccatgcgtacctgtatccgtcgccgaataatggatgtgtgtgtgcttcgttccaataaattgctagtaaaaataatggcatcgtcggtatgcatgaataaaatgtatcagaatgttcatcctttcaaanaaaa

SEQ ID NO: 2489 - DNA, 274 bp, Zea mays
  Clone ID: LIB3136-018-Q1-K1-A4
gtgaatggtcggccccatgagagttggtgtattaatatattggtggtcgcttctgaggacggtctactggtggctttgcacgggtgtttcttttttggcaaccaattttataggtcaattcttttatttgtatatggcctgcgttgtgctgcttgcgaggtcctaaaaatgcttctttgttcttctttgtgaatgtccatatgtgtatatcatttttctactcgccagtttgttacgtacgggcatttcctggcaggttcgtcattgcattgtc

SEQ ID NO: 2490 - DNA, 479 bp, Zea mays
  Clone ID: LIB3136-018-Q1-K1-A5
gcaagcggtggtagagcgagaggtcgagaagatgaagagcagcactctgttggcgatcctagttctccaggcccttctggtctctgcggccgtggccaaaggacctgcagggccgacgacgaagaagcagtgctggtgcggcgagtgcaccagctggtcgggcgtgtggacctgcgacgacctcctcaccaagtgcgccgccacctgcaagaactgcgtccccgtgtccacggacaagggggccatcaagtacaggtgccgcgacttcctccccgaaaactgcgggttgaagatccactagagactcatccaattccaccatggccgcgcgccacagcggcacagccgatggatccttccatgttcctccgtccgtccgccttgctacaagcaggcagccacaccaataagctagctcttggtggtgggtttgatgtttgattgcgtgtcccttcccagtcgagatggaataaaataaa

SEQ ID NO: 2491 - DNA, 372 bp, Zea mays
  Clone ID: LIB3136-018-Q1-K1-A7
agccaggccagcttcctgatgcaggcctgcaccctgaccaagcgctccttcatgaacatgtggcgggacttcgggtactactggctcaggctcctcatctacctcctcgtcaccgtttgcatcggcacgatctacctggacgtcggcaccaaatacacatctatcctggccagggctgcctgttccgcgttcgtcttcgggttcgttacgttcatgtccattggagggttcccttccttcgttgaagaaatgaaggcgtgcatttaagacggggcgtgatttccattcattcgcagctaaataataaacgctagctgggaatactggttcatttttttcttcttacacggctttcagcgggaacgggtggac

SEQ ID NO: 2492 - DNA, 401 bp, Zea mays
  Clone ID: LIB3136-018-Q1-K1-A8
cggaacgaccgacgcgacccacacgtccgcagtgtgttgcgatctaaatcaaactcatccgcccgacgcttggtgctggcggaggacaggaccaagaagaatgtccaccgtctcggttcgcttctacgaccgcagacagtaacgatgcgggtgctcaacgggtgccgctcaacgatagcgaactgcagatttcgactataacttacacgcggacataaagcccgtccggaccgacagtgacatggtactggacacctgagtcgacgctgtggcgctggacacatcgttgaaactgaaactgcctcgttgcaacatccatactaatctaccaccctcgcgttcctctccctaaatgcccgccccgttgcactcctacggtaatctaggtaatctggtcgccg

SEQ ID NO: 2493 - DNA, 473 bp, Zea mays
  unsure (1)..(473): unsure at all n locations; Clone ID: LIB3136-018-Q1-K1-A9
cgggacgacccacgcgaccgctcgaacgangctaccccaactcgacggccggaacacgacaaccggagctccagaggcgagggggacggcgacaagaaggatggggcgcaacccaaagcactcacacgggaacaatacaagaacatgactcggggcgacagacacaacacgaccggcaaaacgcagggcgatggaacggcgagcaccacaaaccctactgacctgcgtgtacgaataaaagagaacaccggaacggatgcacccaacaggcctagaagaatagcgtatacagaaacaggaacgagaggacacatgccgaggctccggagaagacaaaagaatcatgtgaagaggaagcctacaatttccaagaagactattactcacaatgagagcatcaaaggcccgcatgaaggagaaggccagcaagtggactccttgggatgaactaccttctggaatctcttactctc

SEQ ID NO: 2494 - DNA, 426 bp, Zea mays
  Clone ID: LIB3136-018-Q1-K1-B1
ctgggaggatcctaccctcactgaatggcccgaaaacgactaccggctgttctgtggagatctaggcaacgaagttaatgatgatgttctctccaaagcattttcacggtttccatacttcaacatggctagggttgttagagataagaggactggcaaaactaaaggctatggatttgtgagcttttcaaaccctactgacctggctgcagcaataaaagagatgaatggaaagtatgttgggaaccgccctattaaattgcgtaagagtaactggaaggagaggacagatgttgaggctctggaaagacaaaagaatcatgtcaagaggaagcctaaaattcccaagaagactattcttcacaagtagagatacaaaggccctatcgagggtgaatgccagctcatgtgctgcctttggatgat

SEQ ID NO: 2495 - DNA, 473 bp, Zea mays
  Clone ID: LIB3136-018-Q1-K1-B10
cccacgcgtccggcacagtcatccacactaacgaacgaactcttgctccgatcacgagctagctgaggtcgacgatggcggctgtgctgaacagcaggaagacgccgcaggcggtggtggccgtgctggtggcggcggcgctgctggcttcgtccgcttcggcggcgatcacctgcgggcaggtggggtcgtcgctggcgccgtgcatcccgtacgcgacggggagggccagcgcgctccccgcgtcgtgctgcagcggcgtcaagagcctcaacagcgcggcgcggaccagcgcggaccgccaggcggcgtgccgctgcctcaagagcctcgccaacagcgtcaagagcgtcaacatgggcaccgtcgccaccatccccggcaagtgcggcgtctccgtcggattccccatcagcatgtccaccgactgcaacaagatcagctaagttacgacgaccaagctaataagccta

SEQ ID NO: 2496 - DNA, 471 bp, Zea mays
  Clone ID: LIB3136-018-Q1-K1-B11
ggagatctgtgattttgacttcgaaccctgcggctactccatgaatgcaatccatggctctgcgttctccacgatccatgtgacgcctgaggatgggttcagctacgccagttatgaggttatgggcttggatgccactgccctgtcttacggtgaccttgtcaagagggtccttgggtgcttcggcccctcggaattttctgtcgccgtgaccatcttcggcgggcggggccaagctgggacatggggaaaggaacttggtgcggaggcttatgactgcaacaacatggtcgagcaggagctgcctggaggtgggatcctcatctaccagagcttctgtgctgctgaagacgccgttgctagctcgcccaaatccgttcttcgctgctttgatggcgagaatgcagcacctttttgcgaaggactgcaagctggctaatcttgtctgcttggaggaagttggatgctatc

SEQ ID NO: 2497 - DNA, 467 bp, Zea mays
  Clone ID: LIB3136-018-Q1-K1-B12
cggacgcgtgggggcgctcagataaaaatctcacgcagtagacaaatccacgctttccttcggctcctctcctctatcgcagtcgcggccaaggccaacgaaccaattcctctacggcccaccttcttcctacctgccattctcccatccagcacagcagggcgtctcctcctcctccctcccgcttttatcgccgcctccatttccaggacgcgtcgaattcctccatctaccgcgccggcccgccgaggcccgagggggaggaggatgctgggcgccgcgaggaggcagcttggatccggtcccatgctgggacaggttttgcgaaggctccgcccggcggcggcggctgaggtggcgaggggctactccgctgcggcgaaggagatgactgtccgtgatgcattgaactctgcactggatgaagagatgtctgctgatccttctgtttttctgatgggagaaga

SEQ ID NO: 2498 - DNA, 483 bp, Zea mays
  Clone ID: LIB3136-018-Q1-K1-B2
cggacgcgtgggcggacgcgtgggcgcggcggggcacggtgttgccggtgcttaagggatgctccctccttgtcccgcccgggcagctctggatgctcctcggccccaacggctgcggcaagtccacgctgctcaaggttttagcaggttttcagaatccaacggccggtacagtgtatataaacagaccatgcagctatgtcttccaaaatcctgatcaccaggttgtgatgcctacagcgggatctgatgtagcatttggtctcggtaagctcaaacttccgttagatgaggtcaggttaagggtatcaaaatctttggatgccgttgggatgttgaggtactctcagaggccaatccaaactctgagtggtgggcagaaacagagagttgcaattgctggtgcgttagctgaagcatccaaagtattactgctggacgaactgaccacattcttagatgaacatgaccagataggcgtga

SEQ ID NO: 2499 - DNA, 265 bp, Zea mays
  Clone ID: LIB3136-018-Q1-K1-B4
tcgggcttcaaccttcaagggttcacccattttaaaaacctaacaaccgggccttcattgggccattcctagcccaaaatccaatccaaggtcgggccccaagcggggagggaacctccggggcgaactcgtcccgcaaatcggggggcggggcaaaattaaaattcggtccggggttcggctgggtaggctcggcggggtcccaccgcggcggtcggggagcatggtggggagggggggagggctgggaaggaaccgccggcgg

SEQ ID NO: 2500 - DNA, 421 bp, Zea mays
  Clone ID: LIB3136-018-Q1-K1-B7
ctcgtcgtgaaatttcctggcaagtttaaccttggcgaagtgtgcagttgcctggcagacccctccgaggtggaggtggtgagctttgacaagtgcgaggggattgtgaagaagtacgagcatctcgaggacttacattgggcagcgaggcccctgttcggtgctattggtttcctcacggcgatcaagctgggtgtttttgttggcaagagcatttcgaggccgaggagccggaaggttgccagcatctctgatcagagtggagattattaccaccaccaccaccagcagcagcaggaggtagtccaacacagtgctaatgcggcgtggcttcctccaccagttgcaaacatgttcttcggagatagtgttgggactactggataagaaatcataagtggcccggagtttttcttaaaat

SEQ ID NO: 2501 - DNA, 479 bp, Zea mays
  Clone ID: LIB3136-018-Q1-K1-B8
cggaatacatctgtatttgcttcagctactgctctactggagaagttaaggagagaaaaggagagtttgagttcagataagcctcgaaatatcatgcatgatgatgtgaaggaaatgaacatgcatgaagaggataaacgaaaaaacccagcttatttctctaagctggtttcctctttcattgaaagatgtgcaacacgaagttctgtagaggagaccaatattgccatgctaactgaagatcaaaccaaccaattgctgtcttcattctggattcaggcaaatcaaacagataataccccttttaattatgaggctattggacattcatacagcctaacagttctttcttcccgccttaagaattcaagcaatggcaatatcattcagtttttccaattgccattatctcttcgaagtgttgctttaaccccgagtgaagttctgccggcttattgccaacggtctatttttacatt

SEQ ID NO: 2502 - DNA, 480 bp, Zea mays
  Clone ID: LIB3136-018-Q1-K1-B9
ctggaagctgaggcgtatgtcgaacttctcgaggagtgcaacatcaatatccctgcatggttttccttcaactcaaaagatggagtgcatattgtgagcggtgactcgttaatcgaatgcactactattgctgacaagtgtgcaaaggttggtgcggtcgggataaactgcacacctccaagatttatccatggactgatactctccattcgaaaggtcacggacaagcccattctgatatatcccaacagtggcgaaagatacgatggtgaaaaaaaggagtgggtggaatccactggtgtgtcagatggtgattttgtttcttatgtgaacgagtggtgcaaagacggggctgtgcttatcggtggctgctgcaggacaactccaaacactatcagggccatacacagaactctgaacaaaagccccaacaagcagcagttacctgctgtagaataagagctgtgctctactctgatg

SEQ ID NO: 2503 - DNA, 441 bp, Zea mays
  Clone ID: LIB3136-018-Q1-K1-C10
gtgaggcggcgctcggcttctcagcgtgaggcttctccccagcagcgctcgtctacagcgcgaggcttccagcagtggcgctcggactcctgtctccaccgccggtgctcgctgtccaccgaatgcagtaggcctccgtcccttgcctccggttcacgccaccatcgcaaaagatccagtgaggacgccatctagacatgaaagaaggaatctttttcttttgcgctgatggaaaatatgcatttgatgcttgtttatctacttctatcttccgtcctggtcgatgaagctctgtgcttttgcgtaccttgcaacattgtataggacatgttcgcctgtcctcaacggttatgcttgtcttgtgttgctggagcatcttgttgatctccatggaccttggatctttggttgtaccctaggtcccgtgtaacatatggatag

SEQ ID NO: 2504 - DNA, 233 bp, Zea mays
  unsure (1)..(233): unsure at all n locations; Clone ID: LIB3136-018-Q1-K1-C11
angaaggctngnttctctacattcgcagttgccgcctaagagctttcgccctgccaggctggagagctagtgctgcctaatccttccttggatgtctgatgcaaagaaataagaacatttatttagctgataggttgaatcgttcccttgtacatttgcagtttattttgacgttcgccattctttattttgttgagcgttcgttctgactccgcccaatgatgatagaagtg

SEQ ID NO: 2505 - DNA, 378 bp, Zea mays
  Clone ID: LIB3136-018-Q1-K1-C12
gaagcgagctgagggcagggcgcgcgcgcgcgcagacacgacacgacacgacaccgattctggcttcctcgtgaagtatctatagatacggcgtacatacggacacaatttgtgcccactatacgtacgtacaaaaaagattagtactagagtttaccgtagatctgttcttggagttggccgacgccggcacggctgcaggaactgcggctcacggccggctggtaatggtactagtagcatggtttttgctctgcactccgcatgaatctcacggcgcacgcaggcttaattttcttagcgcaaatttgcgaaactgagttgtaaatgaggttatttattcctacgattaagtatgatacaagacgaataattatt

SEQ ID NO: 2506 - DNA, 475 bp, Zea mays
  Clone ID: LIB3136-018-Q1-K1-C3
cggacgcgtgggcggcctcactctacgcggccaccaagaaggccggcgaggagatcacgcacacgtacaaccacatctacggactctccatcaccggcctccgcttcttcaccgtgtacgggccctggggccgccccgacatggcctacttctccttcacccgcaacatccttcaggggaagcccatcacggtgtaccgcggcaaggaccacgtggacctggcccgcgacttcacctacatcgacgatattgtcaagggctgcctcgcctccctggaaacggccggcaagagcaccggcaccggcggcaagaagcgcgggccggcgccctacaggatcttcaacctcggcaacacctctcccgttacggtgcccaacctggtgtccatcctggagaagcaccttcgcgtcaaggccaagaaagaacgtggtcgagatgcccggcaacggggacgtgcccttcacgcacgccaaca

SEQ ID NO: 2507 - DNA, 307 bp, Zea mays
  unsure (1)..(307): unsure at all n locations; Clone ID: LIB3136-018-Q1-K1-C5
tgagattgataaagttgataaaggtggtatggataaaatgacacttattgaggttggccccaggttctgtttgaatccaatcaaaatatttggtgggagttttggtggtcctacatggtatgagaacccatactacatttcccccaatcagatccgtgcactagagaagaggcagaaggcaggcaaatatgccaagaaggtgaaggccaaattgaggaggaagatgcacgagatggagaacacgctggagcctgatgagtttgctgagctctggaaagggtagtangctttgatcgaccctgtcaat

SEQ ID NO: 2508 - DNA, 282 bp, Zea mays
  unsure (1)..(282): unsure at all n locations; Clone ID: LIB3136-018-Q1-K1-C6
caccaccagctgagagccaaaagcaggaggagcccaagaacaaccagcctgcggagccgggcagacccagcgaacctgccgaggagcgcggngccgccgccgacacggtcgaagccgccgcggccgagccgagccacccgcaacctttgccgccggagcccaagccgagcgccggcggagaaggccccaatccggcggcccaggacagcaaagagaacgccagcgccgatgacgtcggcgggggcgacgagaccgccgcagcaccggcaccggcaccggcgc

SEQ ID NO: 2509 - DNA, 464 bp, Zea mays
  Clone ID: LIB3136-018-Q1-K1-C7
ctggcttctcctccccctcttaccaagtcctcctcgggttagggttccttagggttttgtggaggggcgatggcggcggctgatgtggagtaccgttgcttcgtcggcgggcttgcctgggccaccagcaacgagtcgctggagaatgccttcgcctcctacggcgagatcctcgactccaaggtcatcaccgaccgggagacggggaggtcccgcggcttcggcttcgttaccttctcctccgagaactccatgctcgacgctatcgagaacatgaacggcaaggagctcgacggccgtaacatcaccgttaaccaggcccagtcccgtggcggtggcggtggcggcggtggctacggcggcggtcgcggcggcggcggcggttatggtggcgggcgccgtgacggcggttatggcggcggtggcggctacggcggtcggcgcgaaggtggcggcggcggcta

SEQ ID NO: 2510 - DNA, 481 bp, Zea mays
  Clone ID: LIB3136-018-Q1-K1-C8
ctccaacttgtttccgcttctaaacaggtcatctatgtcagaccaggagacgaagtcgatctcgactcggtaatccaagagaccgtacgattaactgcgtccacgaagagttcatgttcggagacctgcgagaagtctacagttgtatggcaatatggtggtagccagaagaagaagacttccagccaaaggtggtcaaaacttcttgatctaaagaaaaccctggataaagcgcctaagtgaattacttagtatgcatcagtcaactgccaatgctgcatgcagagcaagagaatagtgctgtatcatgatgctggaatggaagtggcgacaacttgaacttgttcaaccaagatggaaggttggtggtttgtaactcattggctgttggctatccttttcttttgaacagaagagagaggattgaccatcttatctgaatggtatatacaatgcgactccatgcccagggactggtcat

SEQ ID NO: 2511 - DNA, 477 bp, Zea mays
  Clone ID: LIB3136-018-Q1-K1-C9
tttatgacttggctaatgttgtgccaacgcttgcaaagttctaccatcaagccagtgaatcatatgaactagcttgcactcgccatatcagctcactcatttatctgcaatttgagaggttatttcaattcaaccggaaagttgacgaattgacatacaccattgctgctgaggagataccgtttcagctgggattatcaaaaactgacctaaggagggtactgaaatccagcttatctgggattgataagtcgattagcgccatgtacaggaggttgcagaagacactgacctccgatgagttgtttccttcgctgtgggacaagtgcaagaaggagtttttggacaaatacgagagttttgttcagatggtgacacggatatacgggaatgagccgatcatgtcagtcaacgaaatgaaagacgtccttgctggtttttagatacaagtacacagcaccatgtatcatttcagag

SEQ ID NO: 2512 - DNA, 251 bp, Zea mays
  unsure (1)..(251): unsure at all n locations; Clone ID: LIB3136-018-Q1-K1-D1
anangancnnnacnacagaaggaaggaganancacgggagccccangagnnnngccnggaccagagcgaggcagancgnaaccngancgcaaagnggaaaaagccagganacgagcgccnnngcngccnncggngcanacagacacgngaccacaacnnngcaacgacccgngncngccgagnccccaagcancngagggaggagcaaggganagaangngnccanngcggcngcaggggnggggccagcg

SEQ ID NO: 2513 - DNA, 284 bp, Zea mays
  Clone ID: LIB3136-018-Q1-K1-D10
tgcctgtactactgaagagtataaactcaaactgtaccacgacatggaaataatatcttctcatcatggtctcatttctgtcataagctttactttgccactttgtcattctatatctgcctaccaagttaattccaatttcgagatccctcgggagccatcattatgtttggtttcatgccacaaagtcagacatagaagagcgatcttaagaactgaagaataaggatgatgccatcatgaacctggagaaagccattgaagagaagtcaaaggctattacc

SEQ ID NO: 2514 - DNA, 474 bp, Zea mays
  Clone ID: LIB3136-018-Q1-K1-D11
ggcaaagcgcctgatgctcataccacctcatctttggtcaagaacacacacagcaacctggagcatgttgttcagaagggtatctcacagtcgcataatatcagtatggtaaaggctaagcaaggctacaggaaaagacaggttgtttcagaggagaaaatttctggcgagaaggcaagtgcttcaataaccactgattccagtgtgcagaaaaatgttgatgttctcgtcgacacagtaacggctgttgttgcaccacatgatgatcccccaactcagaacaagaagggaacccggcatttgaggagtaagaaaaaggtagatgatgcttcagttacttctaaacatccacctgtggtgtttaatgaacagaatacagtgaaaatctctaccgagccaaaaacacatactggtggtgttattatcagtagctctattgttcccattgaaggtactattgtaactgttggaagt

SEQ ID NO: 2515 - DNA, 473 bp, Zea mays
  unsure (1)..(473): unsure at all n locations; Clone ID: LIB3136-018-Q1-K1-D12
cgttccacacacaagaagagagccgagagctagctacctagcgcgcgatggcgatggcgatgtccgcttccaagatgatggcggtcgccgccgccgccctgctagccctggccctggccgtgtcgaccgccgaggcaaggaacatcaagacgacgacgacgacgaaggagaagaaggacgacgcggtggtgcagccgcagaccttcccgcccttcgaccgcctcggcggcggcgcgtccccggcgtccggtggcctccccggcacctcgtcgggcggcagcagcattccagcgttcagcatgccgggcagcggcagcagcagcctccccggcgggtcgttcttgcccggcagcagcggcagcatcggcagcatgcccctcttcagcggcggctccccggccttcagcggcttcggcggcatgcccgggtcccccgccgccggctccgtctncgtcgtccccgtacacggcaac

SEQ ID NO: 2516 - DNA, 480 bp, Zea mays
  Clone ID: LIB3136-018-Q1-K1-D2
accggctccattcgaccattccatcctttccttatcccctcccgcttcgtctcccttcctggcttcctttcttcgccatggcaaccatgtccctccgctgcctcgccatggccatggccgacaccgcgctcccgcccgcccacaagctcctccccacagtttccctcccgctcctctcctcgtccacccgcgccgcgccgctcctcctcttcgccaggcgccgcctgccgctcgcgcccctcgttacctcctccgacgccgttgaggccaagtcggcagacgaggaggaggagaaggccggagagcccgtcgaaatggaagctggggagtttgaggaggtgctagcctcaggcggcgagggtgaggggcagtacgccgcggtggagccgccagaggaggccaaggtctacgttgggaaccttccctacgacgtcgacagcgagggactcgcgcagatcttcgaccaggccggcgtcgtcg

SEQ ID NO: 2517 - DNA, 484 bp, Zea mays
  Clone ID: LIB3136-018-Q1-K1-D3
agccttccgagggccgggtggtcctgcccaaccaggaaagggttccggccacccaaggagggaaggccgagagcgtcaccgtgcaaaaaaagcttattcgtaccgaaagagcttgccgcgcttggggtgccgtctcctttgaggttagggacaagccggcttcgctcaagtcagacgattgggggcgggtggtggccgtgtttgtgctcggcaaggagtggcagttcaaagactggcccttcaaggaccatgtagagatcttcaacagagttattggtttctatgtgcgctttgaagatgatagtgtggaagcagccaaggtggtgaaacagtggaatgtgaaaatcatatctataagcaaaaataaaaggcatcaagacagaacagctgctcttgaagtatgggagcgcttggaagaatttatgccggcacggacataattgatgtgcagtcatggaaaggataaaagacaaccatttactag

SEQ ID NO: 2518 - DNA, 474 bp, Zea mays
  unsure (1)..(474): unsure at all n locations; Clone ID: LIB3136-018-Q1-K1-D5
ctccaccttccttttcagcacctgcaccaatccgttgcgctcgtgctcccctctcgtccgccgccagcagccccgcgccgccatggccacggactcctccgccggctcgttccagaagatccagatccagcgcgaggacaccacttttgatgcttatgttgttggcaaagaaaatgctcctggaattgtggttttgcaagagtggtggggagttgactatgagataaagaaccatgcgatccacatttcccaacttggtggaggatacaaagcactcattccagatttataccgtggaaaagttgctctggatgttgctgaggcacaacatctgatggagggtcttgactggcagggtgcagtcaaggatatccaggcttcagttaaatggctgaagtcaaatggatcacccaaagttggtgttactggctattgcatgggaggtgctntatcaattgcaagtggagttttagt

SEQ ID NO: 2519 - DNA, 317 bp, Zea mays
  unsure (1)..(317): unsure at all n locations; Clone ID: LIB3136-018-Q1-K1-D6
gaaagggaactcagnctcctattatcaaggatgaatattgctcgtgccatttagccaccggtgatatgctgagggctgctgtggcggccaagacacctctaggtatcaaagctaaagaagctatgaataagggagagcttgcttcagatgatttggttgtgggcattattgatgaagctatgaagaaaccctcatgccagaaaggtttcattcttgatggctttcctagaactgtcactcaagcacagaagcttgatgaaatgttggcaaagcaaggtgccaatgttgacaaagtcctgaactttgcaattgatgat

SEQ ID NO: 2520 - DNA, 472 bp, Zea mays
  unsure (1)..(472): unsure at all n locations; Clone ID: LIB3136-018-Q1-K1-D7
cgacgacgacgcatccacccgagccctnctccgcgaaatagccgncgccgcactgcggcaggggcggctatgtcaatcttcgagtacaatgggtccgccgtggtggcgatggtggggaagaactgcttcgcgattgccagcgaccggcggctcggcgtgcagcttcagaccatcgcgacagacttccagagggtgttcaagatccacgacaagctctacatcggcctctcagggctcgccaccgacgcccagacgctgtaccagcggttggtcttcaggcacaagctgtatcagctgcgcgaggagagggacatgaagcctgagacctttgccagccttgtctctgcgctcctctacgagaagagatttgggccatatttctgccagccagtcattgttggacttggagatgacaacgtaccattcatttgtaccatggactgcctcggtgcaaaggagctggccaaggatt

SEQ ID NO: 2521 - DNA, 477 bp, Zea mays
  Clone ID: LIB3136-018-Q1-K1-D8
gcgctgggctgcgtgttcccggagatcctggccaagaacggcgtcaagttcggcgaggcggtgtggttcaaggccggcgcgcacatcttctcggagggcgggctggactacctggggaaccccaacctggtgcacgcacagagcatcctggccatctgggcgtgccaggtggtgctcatgggcttcgtcgagggctaccgcgtcggcggcggcccgctcggggaagggctcgacaaggtgtaccccggcggcgccttcgacccgctgggcctcgccgacgacccggacaccgccgccgagctcaaggtgaaggagctcaagaacggccgccttgccatgttctccatgttcggcttcttcgtgcaggccatcgtcaccggcaagggccccatcgagaacctcttcgaccacgtcgccgaccccgtcgccaacaacgcctgtgcatacgccacgaacttcgtcctcggcaactaactg

SEQ ID NO: 2522 - DNA, 476 bp, Zea mays
  Clone ID: LIB3136-018-Q1-K1-E10
gcatcctcggcctcggtgatctcggttgccaggggatgggaattcccgttggcaagctctccctctacactgccctcggaggtgttcgaccgtcagcttgcctgcccatcacaattgatgtcggcaccaacaacgaggccttgctcaaggacgagttctacatcggcctccgccagaggcgtgccaccggcgaggagtaccatgaacttcttgaagagttcatgaccgccgtcaagcaaaactacggcgagaaggtcctcacccagttcgaagacttcgccaaccacaacgcctttgacctgctcgagaagtacagggagagccatctcgtcttcaacgacgatatccagggaacagcctccgttgtcctcgctggcctcctggcggcgctcaaggtggtcggcgggacacttgcggaccacacttacctgttcctcggcgccggcgaggccggaaccggcattgctgagctcatc

SEQ ID NO: 2523 - DNA, 470 bp, Zea mays
  unsure (1)..(470): unsure at all n locations; Clone ID: LIB3136-018-Q1-K1-E11
gaaagccattgggcttgatttttatctacttagaggacttggctttcttataaataagtatggtgacattgtaaccagcgatgttgttgccctcatcgatgaatttgctcgaagagtttttcaagagcttaattatgttcaggaaggccaaaatgcaagaaggtttaagaaattatatgccgataagcaagatgtattagtgcctgatatattttgggattacacaagtgcaaaggttctaacaatggagtggattgagggtgtaaaattaaaccaacaagcagttattgaaagtcaaggattgaaggttctggatttggtcaacattggtatccagtgtagcttgagacagcttctggagtatggttactttcatgcagaccctcatcctggtaatatattagcaacacctgaggggaagctggcttttcttgattntggcatgatgagtgaaacaccagaggatgcga

SEQ ID NO: 2524 - DNA, 467 bp, Zea mays
  Clone ID: LIB3136-018-Q1-K1-E12
gccgaccacccgccgaaggccagagagaaatatctcatcttctctccaccggatcggttcaatcgagagcgagggagaaagggaggtggtgcgtcgaggggggccgagattttgccggtttggagccaaataggggtatgagctgcttcgcgcaccgccgccgctccgacgtcgcccgccgccaggacggcctcctcgtcttcgtcttcttcctctcgattcccatacgtaccagtagttttaatttaagtagtagtaattgtagtagcaatctcttgtaaactgcgctcgcctttgcgtgttcgtggtccttttgcgctttctcgtccctctttctctcaatctctccttattcttctccttccacggcgaagccggcggctggtatggatcccaatggcctcaaaactggaggccttttgctcccgaccatcgagaggcggtgcacgtcgcctccatccgtcatt

SEQ ID NO: 2525 - DNA, 338 bp, Zea mays
  Clone ID: LIB3136-018-Q1-K1-E2
ttttggcctgggctggcactccaccacgcttgttgtactgaaagctttttcccaaaataaaagctggggaagaggaagcggcggcggcggcgctctcagaagagagggtgagatgaagactcggagctcagcgagaggggagccgaggcgtctcggaaatgcggctcttctggcgctcatgctctgctccgtcgtcgcgctctccctcatccgggggagattcgccccaattgtcactaccgcaggagatgccatcaaatccgaggacgacgctgcggcggctgcgctcagggtcagcaaggcgggcggcaacgttgacaccggcgacagcgtcgacg

SEQ ID NO: 2526 - DNA, 388 bp, Zea mays
  Clone ID: LIB3136-018-Q1-K1-E3
ccttcggctgggatcatgtcttgcagcagcggcaagtgcgacttgggctccagctgctcctgcggcagctcatgcaactgcatgtcccctaacgtggagaccgccgccgccagcagcatcaagaccacggtcctcgccgcgccgaccaccaaggccagcgccggcggcttcgagacggccaccgagggcggcggctgcgactgcaacacctgcaagtgcggcaccagctgcggctgctcctgctgcagctgcaactgagccggcccggcgatggcgcacgagtcgagaggacgacgacgagtcgtataaatatagtagcggcgtctaaatagatcctgtcaactgcacacgccattatcgatccatgggtcgctcctgggtcatgtca

SEQ ID NO: 2527 - DNA, 444 bp, Zea mays
  Clone ID: LIB3136-018-Q1-K1-E4
ctcatagcattatcatgaatctcaaaacataacaggtgaaacacgaatcaagcagaggcgccatggggttcacagatccacacctaaaccgctaaattaaactgcgagcgatacatgataaactaagaccaccactcagatcaccaccatcttattcagatccaaaggaacggacgcagggggagtcgacgatgacggagggagggcggccgaacagaccagatcagagagatctaggagagctgtccgcagtcagcgaccttgaccaccttggaggtggagccgttgcgggtgcccaccttctcgatggccttgacgacgtccatgccctcgacgacctggccgaagacgacgtgcttgccgtcgagccaaggggtcgcgacggtgcagatgaagaactgggagccgttggtgttgggcccggcgttggccatggagagcaca

SEQ ID NO: 2528 - DNA, 476 bp, Zea mays
  unsure (1)..(476): unsure at all n locations; Clone ID: LIB3136-018-Q1-K1-E5
gacgacttgtttcattgattcttgaagagatttagcttcttttgcaccacaaggtcnaggatgtcttggaactgcggatcaagctgcggctgcggctcaagctgcaagtgcgggtaatatatataataatatataagtgcaccgtgcatgattaatttctccagccttcttcttgtcttgtctagttaatttcccttcttctttatttatttttttccattgcaaaacaaacaaacaaacagacaagaacaaagttactttggatcgagtagttcaatccatttgcgcgctgtcctttttcagcaagaagtaccctgacctggaggagacgagcaccgtcgcgcaggccaccgtcgttctcggcgtggccccggagaagaaggccgcgcccgagttcgtctaggccgcggcggagtccggcgaggccgcccacgcctgcggctgccgtagcagctgcaagtgcgacccctgcaact

SEQ ID NO: 2529 - DNA, 439 bp, Zea mays
  Clone ID: LIB3136-018-Q1-K1-E6
cgcacccctttatcaacccggctgtccactgttggcttggggacttcctccgctccgctccgctcccggccgctcccgaacggtcgatctttgcatggcagcagcagctggctccaaggggcgggcgatcgctggaagcttcgtcagccgcgtcctcgccggcaaggccgcctcgccgaggtactcagacgggccacactcacccacacgcgcgggtttcggtttgccctgtgattctgtttttttactatttttgagcgtgcttgttctcgatcagttcgtccaagatctcgccgtagttttaggcttgtagcagagcgatctgtctgttctatttacggccgttcttagctttgcgctgggagtctgggttcggtgattcggtccctcggatcgatagtgcttgctggctgctgcagtttatttccccccctccgac

SEQ ID NO: 2530 - DNA, 465 bp, Zea mays
  unsure (1)..(465): unsure at all n locations; Clone ID: LIB3136-018-Q1-K1-E7
atcgcaggcagtctccttggctagcccgagcggctctcatccaccatgccaggctcgtctcttctatttcttcaacccgactcgttcacgccgccaggaacgaagggaaacggggaacgaacacgcgaagggtgcagatgacaggacgacgatggtcagagaccaattcatgagtttgacggcacttatttgcccctcctccccctgttcatttatttcttgctgcttcagagcacagagtgaagctagagagaggtggctatgcaatggaatacttcctttagttagagctttcttacgtacgatcctccggcagatgcanccaaattaactgacagtatcaacgataaagatgatgcaacattgtatccactaataacagatctagaattgtggcacatggtacatagagtttatactagttcagtactctctcaaataacgcaacatagtgtcatagtgcta

SEQ ID NO: 2531 - DNA, 478 bp, Zea mays
  Clone ID: LIB3136-018-Q1-K1-E8
cgcctccggttccagagcggagaggattgcgccgcctgattggcgattgctgatagtctgccgccagtgccctcgcccgatttgctccgccgagaacaacatggggagaagctataatcacagtccatcgccaccaagaggctacaggagaagaactcgcagcccaagtcctcgtggtcggtatggaggccgtgatactgatagggacctcccaactagtcttttggtgaggaatcttcgtcgggattgtaggcctgatgaccttcgtagaccatttggaaaatttggccccgttaaagacatatatctgccaaaggattactacactcgacgcacgtcttaagagtactattgaagaaaaggaagaaatagaggtttaaagagatatgcaagttatgaagagtttcaagtgtatctctaaacactgatgactgcaagggaacctagaggatttgggttcatccaatactttgatcct

SEQ ID NO: 2532 - DNA, 475 bp, Zea mays
  unsure (1)..(475): unsure at all n locations; Clone ID: LIB3136-018-Q1-K1-E9
acacagcaacgctcgctcgacactgtcactagctagttgctctactagagggcgggtatagagctgcctgcaatccgccgctgagaagggaggatcggaagcgacgatgaggtcgtttgctcctgtctttctgtcggcggtcgtggcctggctggagctggcgggcaccgcgcagggcggcaacttctaccaggacacagagatgacctggggcgatggccgcggcaaggtagtggacggcgggcgcgggctggacctgacgctggaccgcacgtccggctccgggttccagtccaagagcgagtacctgttcggcaagatcgacatgcagatcaagctggtgccaggcaactccgtggcacggtcaccaccttctacctgtcgtcccagggcgacgcgcacgacgagatcgacttcgagttcctgggcaacgtgagcggngagccctacacgctgcacaccaacgtgttcacgc

SEQ ID NO: 2533 - DNA, 382 bp, Zea mays
  Clone ID: LIB3136-018-Q1-K1-F10
gcagtacagtgctcgaactggactcgcagatgggttgtctgtttctgaaacaaggacagcgtgatgcagaggagcgcaagagacagccgtggctaatcagctgatgtccatgtgtgagagagtagttggggtggttctcctgcttttcgctcgtggccaaccaccgttcgttgaacctcacaaggatggctgtaacgttttcgttatcctttacctaccacgtcagattgtatgtaaggtttgtcagattgtatgtaaggttgtaccctcctttgatggaggacaaagctaaaacctggttttgattatctaaaaaaaaggagaaactgtccatgctccgccacacaccagtttttgtgaggctgaagcctgaagctactgg

SEQ ID NO: 2534 - DNA, 478 bp, Zea mays
  Clone ID: LIB3136-018-Q1-K1-F11
cagtgtttgtttctgaccaagttccacaagcactaattggcgatcctggcagaataaggcaagatcattacaaatcttgtcgggaactctataaaattcacagagaagggtcatatctacttgacagttcatgttgttgaagagattatgaattgtcttgaggttgagacgggaactcagtccgccaataccttaagtggctacccagtggcgaacagaaagcgcagttgggaaaactttcgagtctttagcagggaactgaactcatctgagatgccttttgcacccatcgcatcagactcaataagcttgataatatcagttgaagatacggggttggaatcccgttcgatgctcagtcccgtgtcttcacccctttcatgcaagtaggtccatccattgctcgcatccatgggggcactggcattggattaagcatcagcaaatgcttggttggactcatgaggggagagattgg

SEQ ID NO: 2535 - DNA, 313 bp, Zea mays
  Clone ID: LIB3136-018-Q1-K1-F12
cgcatcttttatttatttgctatatacgtttctgtaattgcttgcagagttgcaggggatagtactattagaatttttaaggtaagaagtagtactagtggaacccacaaccgatgttaggccacgataaagagaagatttgcgacctcattttttctatacggcaagctaaatgcaatgctgctgctgacgtgtgtagcgggccgcaagctgacgtggcgaaaacttgagccctgaggagtttctgaccgtacgatttggagaaggtagtgatgccacgtgctttattttattatttggtttttttttacag

SEQ ID NO: 2536 - DNA, 223 bp, Zea mays
  unsure (1)..(223): unsure at all n locations; Clone ID: LIB3136-018-Q1-K1-F2
aacatttttgttgctgaagtggattctctaaggatgaagatggcattttgcgaaggtgtctttccgaagggactgtactaagagggcaactcaactcactggaagaaccacttctacgtttgaatttgagttnagtttgtaaatttggtttttctctacctggagataatgtaatgcatataagatcatgttattgttactcccatataaaattattgtatac

SEQ ID NO: 2537 - DNA, 474 bp, Zea mays
  Clone ID: LIB3136-018-Q1-K1-F6
ccgctcctctccctgctcgctgcacagggactcggcctccgggacggcagacccacaagcgccagcacgctcgagactgtgccgtgggagtgggaggttcctcaggtgctgagcagtcgccggcggcgaccgccggtgtcggagatgaaggagagaagcggctccagggcggcggtggacgagcgctacgcgcagtggaagtcgctcatccccgtcctctacgactggtttgccaaccacaacctcgtctggccatccctctcctgccggtgggggccacagtttgagaaagctacctacaagaatcgtcagcgcctgtacctatctgaacagacggatgggagtgtgcctaatactctggttatcgcaaattgtgaagttgtgaaacctagggttgcagctgctgaacatatctcacagttcaatgaggaagcacggtcaccttttgtaaagaagtacaaaactatagttcat

SEQ ID NO: 2538 - DNA, 473 bp, Zea mays
  Clone ID: LIB3136-018-Q1-K1-F7
tgcaaggctcagggagatccgaagctatttggatcttgtaattgaagggaagctcccactgaatcatgagattttgtatcatttgcaggttagtccctctcttgcaatttgtcaggtgttactctcgtggaatgaactatgcagtaaaagctgaaatataccagctttgttagtttgcagtagtattgcaattggaatttgaattttgaacacataaggtgatgaaaggatgtttcaacatattttggtttatcattttctttattttatgtttttgtacattgctcccttcaaaacagttatttttccgcacatagctatgttttaagttcttccattatgtgcagcattgatttttaattctgccatcaagttgtgcttcaaagggactgtagattatattagagatatgcatagtctagagatatgtgtgtattttacttgcgcttcaagtttgtatcctgctatatata

SEQ ID NO: 2539 - DNA, 428 bp, Zea mays
  Clone ID: LIB3136-018-Q1-K1-F8
ggcccgcgcgctggggctgcagccccgccaggtggccatctggttccagaaccgccgcgcccggtggaagaccaagcagctggagaaggactacgacgcgctgcgccgccagctggacgccgcccgcgccgagaacgacgccctcctctcccacaacaagaagctccagacagagatcatggcgctcaagggaggcggaggagggaggcaggaggcggcgtcggagctcatcaacctcaacgtcaaggagacggaggcgtcctgcagcaaccgcagcagcgacgagaacagctccgagatcaacctcgacatctccaggccgcctcgggccgccgacgagagccccgccgccatggacagctaccgcggcatcccgttctacgcctgcgcccgcgccgacgacgtcgaccagctccagctcctgcaca

SEQ ID NO: 2540 - DNA, 473 bp, Zea mays
  unsure (1)..(473): unsure at all n locations; Clone ID: LIB3136-018-Q1-K1-F9
gtcccggtggcgctagagaggcctccggatgtaggacattctgccggggcgttgctttcgcgtgacgagatcgagaggcggtctccatcaagaagggacgggatcgattccgcgcttgaggccaggctgcgtgcgtcctactgcgcctacctgcattgcctcggcaaccggctcgggttgccgcagacaacaattgcgacggctgtggtgttctgccatcggttcttcttccacagatctcatgcctgccatgatagatttttggttgcgactgcagccttgttcctggcagcaaaggcagaagaaacaacatgccttttgaatactgttcttagggcttcatgtgaggtttctcaaaatcaggaattcaatcttcttccttacatgctatgtggtgactggtttgaacagtacagagagagtgtaatacaagcggagcanatgatacttacaacacttgattttgaactcga

SEQ ID NO: 2541 - DNA, 464 bp, Zea mays
  Clone ID: LIB3136-018-Q1-K1-G10
gcaggattcaatcaccaaaacctcaccagacgccatcctcgaaatttatcagaggtaattttctccctccatttttcgcattttgttttctccgctttttggttttcagtttgattgctcatcttttcaccaaaatatcaagtagcgtcatacttgaaatttgattgatcatcttctcgatttgatcttttattttcttataggagattggtcgtctatctggagcactccgcggccatcaacccccacgcttaaggtcagggtttctgttggagcgtcagggcgatggtgtttggggcgttcctttatcaacaaggggtagagaaggaagaaggttaatggagattcggaatgcacttgaaatgattcaaaggggggaaaatgtaaggctcgagtctatcttctatggcggcctcgacattcatgacagacacagggacatgcgccttgacattgacaatatg

SEQ ID NO: 2542 - DNA, 477 bp, Zea mays
  unsure (1)..(477): unsure at all n locations; Clone ID: LIB3136-018-Q1-K1-G11
cacgtctatagcaactgtgaagctcccacctgctgagaaaatgactcctgagagagtttacggtaaaaatggttctgtaagaaagacaaaggtccccataactgcaacaccttatactgtcgcttctctccaagttgctactaatagtttctgtcaagattctcttctgggtgagggctcacttggtcgtgtttataaggccgatttcccgaatggaaaggttcttgctgttaaaaagatagatagcgccgcactttctttacaggaagaagacaatttccttgaggctgtatcgagcatgtctcggctaaggcatccaaacatcgtgccattgacaggatattgtgttgaacatgggcaaagacttcttgtctatgagtacattgtaaatggaacgctgcatgatatgttgcactttcttgttgaaataagcaggaagcttacatggaacatncgcgtaaggatagcactaggcac

SEQ ID NO: 2543 - DNA, 436 bp, Zea mays
  unsure (1)..(436): unsure at all n locations; Clone ID: LIB3136-018-Q1-K1-G12
cgcaccccgcccggcgcccgcaatcagcgcctccgccgccgcagcccttccagaaatcgtcatcccgaaacctccgcgcccccgcccgaccccgcgcatcccgcagcccccgccccctcgcgcagccttggtgccgtgaccgccgcctctgctcgctcctccatcccgcgcaacaacgacgaccgccggggcctcgcctggcagatcaagtggggaatccacccgccaggcgtctccctgacagcggttccagcattggtgctcgcatccccgccgtccaaagcatggcgctcttcgtcttcctcctcgctgccgggcctctccacctntncctcccatcgacctccacccccaagcctcacccggcctcgctcctgcgcctatgctccacctaccgccgcgttgttagcctcgcgctccatacagaggagctaga

SEQ ID NO: 2544 - DNA, 233 bp, Zea mays
  Clone ID: LIB3136-018-Q1-K1-G2
cacggagtctggggagggtttcacccggggggaataatcatcaatatgccgggggccagggcgaggggggggaactatatttcgtcccatgcaagtagaaacgcttaaaaggattcccttgcagcaagttgctactggtctaagatttactgggattcttacaagggatggacaagtatatacttgtggaagcaatacacatggacaacttcgtcacggtgacaccatagaca

SEQ ID NO: 2545 - DNA, 400 bp, Zea mays
  unsure (1)..(400): unsure at all n locations; Clone ID: LIB3136-018-Q1-K1-G3
tcgaagggctctgatcttctttgcagctggcacatatatcttttcatgcttggctggagaaccggtgggctgagcaacatcctcttctattttaaagaggactttctttcggttggcaataacagcatttgccacgcgtccgctccaagctgtgagcaagaacagaaacaagagattacagatcttgagaagagagtattgattggaagcttattagttattggaactcccttgaaaaagcaggttgtgcggggattattgtttattgaataaaaaagcccgccaatttgattctactgccataccagtatatataattggagagttgaatagttnanaaaaaaaaaaaaaaannaaaaaaaaaaaaaaaaaaaaaaaaaaaaaaaaaaanaaaaaanaa

SEQ ID NO: 2546 - DNA, 478 bp, Zea mays
  Clone ID: LIB3136-018-Q1-K1-G4
cacgtctatagcaactgtgaagctcccacctgctgagaaaatgactcctgagagagtttacggtaaaagtggttctgtaagaaagacaaaggtccccataactgcaacaccttatactgtcgcttctctccaagttgctactaatagtttctgtcaagattctcttctgggtgagggctcacttggtcgtgtttataaggccgatttcccgaatggaaaggttcttgctgttaaaaagatagatagcgccgcactttctttacaggaagaagacaatttccttgaggctgtatcgagcatgtctcggctaaggcatccaaacatcgtgccattgacaggatattgtgttgaacatgggcaaagacttcttgtctatgagtacattgtaaatggaacgctgcatgatatgttgcacttttctgttgaaataagcaggaagcttacatggaacatccgcgtaaggatagcactaggcact

SEQ ID NO: 2547 - DNA, 481 bp, Zea mays
  Clone ID: LIB3136-018-Q1-K1-G5
agcggcggcggcggagcaaacgcaggcgaaggcgagggtgtgagggaaggagcaccagccatggtgcacgtcaacttctaccgcaactatggtaagacgttcaagaaaccaaggcgtccttatgagaaggagcgtcttgatgctgaactgaagctggtcggtgagtatgggctgaggtgcaagcgtgagctttggagggtccagtatgcactgagcaggatccgtaatgctgcaaggcacttgctcacccttgacgagaagaacccccgtcgtatctttgagggtgaggcgcttcttcgccgcatgaaccgctatgggctgcttgctgagggtcagaacaagcttgattatgttcttgccctcaccgctgagaacttcctcgcaaggcggcttcaaacacttgtcttcaaggctggcatggccaagtccattcaccatgctcgtgtcttgatcaagcagcgtcacatcaaggttggcaggc

SEQ ID NO: 2548 - DNA, 447 bp, Zea mays
  unsure (1)..(447): unsure at all n locations; Clone ID: LIB3136-018-Q1-K1-G6
cggacgcgtgggcggacgcgtgggcggacgcgtgggcggacgcgtgggtagtggttctgaaaacggttgcgatatgtcaatacggggtgcacaatgtcactgcagattacatcatgaagtgcgacgatgacacctttgtgcggctggatatagtactgcaccaaatcagtacctacaacaaaacctcacctctgtatctgggcaacctgaatctcttgcacaggcctctaagaaggggcaaatgggccgtcacctacgaggaatggccagaagcggtgtatcccccgtacgccaatggacctgggtacgttatctcggccggcattgcgagagacgtagcatcccggcatacaaaccactccctacggctgttcaagatggaagacgtgagcatgggcatgtgggtggaggactacaacgccagcgcccncgtgcagtatgtccaca

SEQ ID NO: 2549 - DNA, 367 bp, Zea mays
  Clone ID: LIB3136-018-Q1-K1-G7
gtcggcagcaagttcctcgtggagtatgctacgctgaaggccgatgacgggaccaagcctctgaaagaatctgtagaagcacggcacatcagaccttgccctccagatatccctgccactgatggattcaaactacttgacgaggtcgatgccttctgcaacgacgcgtggtgggtcggtgtggtatccaaggtcctcggcgagaagaggtgcacggtctacttcaggccttggaaggaagagatggagttcgagcatgcgcagctgaggttgcactgtgactggatgggcgggaggtggatgcgggcttccccggcactggagatgtgaaggctgaagagccacgcgaaggcgttagacagtagct

SEQ ID NO: 2550 - DNA, 440 bp, Zea mays
  Clone ID: LIB3136-018-Q1-K1-G8
gctcgatcgatctcactctcagctggtcgctcactcttgcagctccacccttaatcactcaggcttagggtcttagctctaggctctagctagccgcgccactccttcgtgtagccatcagccttctcatcgccaccaatggccactgccgaggtccagaccccgaccgtcgtggcggccgaggaagcgcccgtggtggagaccccgccgccggccgtcgtgcccgaggagtctgcccccgccgaggccgaggctgaggctgaggctgaggctgctgctcctgctgctcccgaggagcttccggcggccgagcagcaggcagccgccgagccggaggccgctgctcctgctggtgccgaggagcccgccgcggccgaaccggccgccgaggcggaggctgctgctcctgctggtcccgaggagactcccgcggccgagca

SEQ ID NO: 2551 - DNA, 356 bp, Zea mays
  Clone ID: LIB3136-018-Q1-K1-G9
cgccttcaactcctccacgctcccgtcctctccacctctcgctcccacctcccccgccgtcaccaccaccaccacagcctctcccccgcaacgcgttccttcccggtgcatgaaaccctaaacctataccccactcccctccccgagccatcctctccccccgcggcgatggccaaggcgctgctctactcctccctcctccccgggctgccccgcgctgtcgggagcagcccggagcgctgccgcgaggctgctgctgctcccgcctctccggctgcgccgcgggcggcgcgccgcctccgcgtgcgcggtgagggcgggcctgcacgggctcgactccgtcggcgggccccatc

SEQ ID NO: 2552 - DNA, 371 bp, Zea mays
  unsure (1)..(371): unsure at all n locations; Clone ID: LIB3136-018-Q1-K1-H10
aggtgacctcgaacaatcattaaggcatacagaaggatttgcagaatcagttcgtcggtgttgtcaaacttcaatggcagagtttgatgctggaatgacagatacagcagttaaacatgtgcagtgggatgcttcaaaagttaggaataaactgcaagagcatatacaagctcatgtagaatgtattaggaacgcaaaattggctgaactgagagctaactttgagaagaagctgtcagactcaatgtctgggcctgtacaatccatacttgaaactggcaagagagactccttggcatgcattangagactatataggcgtgagatngaaaatgctgctatttcattctcagctttcctttctgagtttg

SEQ ID NO: 2553 - DNA, 270 bp, Zea mays
  Clone ID: LIB3136-018-Q1-K1-H11
gcgatcgaggaccatcctcgctaccctgcaggccggcactgcactgcactgcagtctacagaacgcgtcagtcacagatcggtgcaggcggtctgcacctgcatcacctaaccaattcctcgattagtctgctgttgcgatttgcgaggcaggtcaggtactgacgtattgcatttgcatgcttagctagctgatagatgatctttgtttcttctctgctttgctctgtgtatgtgtttactggaagaaaattttgtaattgcaaatcgt

SEQ ID NO: 2554 - DNA, 248 bp, Zea mays
  Clone ID: LIB3136-018-Q1-K1-H12
accatgcggcatccaagactccgctcatcacagcgcttggagcttgccggatgccgagatgaaccctgtgcttaggccatcagcaccctaacctcccgttcacagtacctccctgacctcccttactctattgcagcaacagcacttgactccagggccctcaacacccagccatagtctacctctgcgctcgtcacgaaaccccgtggcccaacagtcctggccatgtcaccgtcctacaaacaccg

SEQ ID NO: 2555 - DNA, 314 bp, Zea mays
  unsure (1)..(314): unsure at all n locations; Clone ID: LIB3136-018-Q1-K1-H3
catcacatcatnctntcgatccaccaataatttctactcaactgtaatatccatcctgctccaactcatgtaatccttttgttctggcgaaccagggcgttccttccttcgtctatagcctgaattcgtttcctttggtagcctgaaaaaaaaggtgttttggctgcattgcctgctactatctcttacgacctcccttctacttgcctgatcctaaaaacgttttcgtctgatctgaatagagtaagcaatgagccggatctgtcggttcacgctcacgccgattaatgtggttctcttgctatcttttnnaa

SEQ ID NO: 2556 - DNA, 452 bp, Zea mays
  Clone ID: LIB3136-018-Q1-K1-H4
cggacgcgtgggtttttttgaactccagcaaaagataaaacaatgaaccatcaaacatggtggcagcttaccagggtttatgcaaattaaaaagagcacatacttaatctgtgtaactatttctttgccccgtgagtattgatgcgcagtccaatcaagctcaacaaatggcgggaatggctcacgatacacatggcgcacgctacaacagttggagcttccactgaactgaacaataaccagcctggtgcatcaatctcgctcactgttggggggagggggggcatgttgccttttttttcctttctttttttgcctcacattgaaccagatagcctaactaacgattgcaaggccagagtgagctaccatccggatcttgtcagcctactcgtcctcctccgacaacacactccagatcatccagaacaaggacagggacaggagaacta

SEQ ID NO: 2557 - DNA, 83 bp, Zea mays
  Clone ID: LIB3136-018-Q1-K1-H5
atcgaggaccatcctagatgtggtgcatgcacgacgtggtgtacactgagctcgacatacgggacaaacaagagaggctgggc

SEQ ID NO: 2558 - DNA, 408 bp, Zea mays
  unsure (1)..(408): unsure at all n locations; Clone ID: LIB3136-018-Q1-K1-H7
cacgcacccatacacaaagcagagtgaggtaagcatccgaaaaaagctgtgatctgatcgacatggccgccgccaccatggctctcacctcccgcgcgctcgtcggcaagccagcgaccagcaccagggacgtcttcggcgaggggcgcatcaccatgcgcaagactgctggcaagcccaagccagcggcgtccggcagcccctggtacggggccgaccgcgtcctgtacctgggcccgctgtccggccagcccccaagctacctgaccggcgagttccccggcgactacggctgggacaccgcggngctgtccgccgacccggagactttcgccaagaaccgcgagctggaagtgatccactgccgctgggctatgctgggcgcgctcgggtgcgtgttcccggagc

SEQ ID NO: 2559 - DNA, 452 bp, Zea mays
  unsure (1)..(452): unsure at all n locations; Clone ID: LIB3136-018-Q1-K1-H8
cggacgcgtgggtttgttcgcggcgaatctcctctgcttgtccgcttccccctcgtatataagaaaaacacgccgcgcgtgccgggtgccgcgctttaaccgccgcacaccctcctccctccataaatggccactcccgctcccaccctgccggagccggccgcgcaagagctgaccgctgccgtcgccggcgccggccagcggcagcagccccatcaccagcacccgctcctcgcggcggcggctgcggcgtcgctcctcgccgtgctctacctcccccggccggtgctgctgctcgtgctctccccggcctcgctctcctccctgctcctgctcctctccctcctccacctcggctccacgccgccgccgccgcctcccgctctcngccgccctcctccttcctccccgccgccgacggaggagaagaagcagcaagagcaggagcaggc

SEQ ID NO: 2560 - DNA, 473 bp, Zea mays
  unsure (1)..(473): unsure at all n locations; Clone ID: LIB3136-018-Q1-K1-H9
cggacgcgtgggtgggtccgggcctagcgtcagcgcaaccgaacacgccggcgaccgctgccgcccttctcccagctgcccaggtcttcgtcgggccctttgcctgcggcgtcggcgacgagcgcctgccacaccaggaatcccgttaagtttatttatgctcaccaatttaagggcagaacttacggacctcaagctcttggttactcctgatcttctctaggcgactaggcacaattgccctctggcaaaatgccatcagtttatctttacatccctaacattatcgggtattttaggatcatcataaatttcattgcatttgcggtttgctattccaacaaggctctctttgctatcctgtacttcatcagctntgtccttgatggtgtggatggttggtttgcaaggaagttcaatcaagcatcaacctttggagctgtgttagacatggttacagatagggttagcac

SEQ ID NO: 2561 - DNA, 407 bp, Zea mays
  unsure (1)..(407): unsure at all n locations; Clone ID: LIB3136-019-Q1-K1-A1
cggacgcgtgggtgttgttgttgttgttgcaggagctgcaggaggtcgggaactcgttcgcgagggcgcccaagtgcagctggtcgccgatcccaccgccggagctgcgcggggagaacgtgcaccacctcaccaccaacggcggcttcgtctccttcggcgtcctgtcgcggcacgtgagggggaagcgggccgccaagaccgcgtggatcctgctcaacttccagtcctacgtcaagtaccacatcaaggttctcctgccactggcagccaccgtccaccgacccgtccacgtccgtttccattactaccgtaccgtgggtggctgatggcggcggtggcgtgacgccttgcagtgcacccggagccacgtncagagccggatgcgggagcgcctggaggccctg

SEQ ID NO: 2562 - DNA, 416 bp, Zea mays
  unsure (1)..(416): unsure at all n locations; Clone ID: LIB3136-019-Q1-K1-A10
gttgctggccgccaacgcgctcgacttcggcgccccaggggcggcgcacgcgcatcctgcccatgggcctcttcgtgcgcgtgcccacccgctgctcctgcgccgacggcgtccgcaagtccgtctccgtccgctacgccgngcgcccggccgacacgctcgccaccgtctccgacgtcgctttgggggggttggcttcttcgaacagaatcggaacgaggaccggcttaacttcggcgaacccggagcggcggtcgacgccggccagaagctcgccatcccgctgccatgcgtctgcttcaactcgtccgacaacaacctccccgcggtgtacctctcctacgtcgtgcaggtcggagacaccgtgcccgccatcgctgcaagctacgagaccaccgtcacggatgtcatgaatg

SEQ ID NO: 2563 - DNA, 430 bp, Zea mays
  unsure (1)..(430): unsure at all n locations; Clone ID: LIB3136-019-Q1-K1-A11
gctagctgaatcacaatggatcctaccaagttccgtccgtccagcaggcgcgacacgacggtgacgacgacgaacgcgggcgctcctgtgtggaacgacaacgaggcgctgactgtggggcctcgcggtcccatcctgctggaggactaccacctgatcgagaaggtggcgcacttcgcgcgcgagcgcatcccggagcgcgtggtgcacgcgcgcggggcctccgccaagggcttcttcgagtgcacccacgacgtgacgtcgctgacgtgcgccgacttcctgcgcgcgcccggcgtgcggacgcccgtgatcgtgcgcttctcgacggtgatccacgagcggnggtccccggagacgatccgcgacccgcgcgggttcgccgtgaagttctacacccgcgagggcaactgggacctgctggcaacaa

SEQ ID NO: 2564 - DNA, 391 bp, Zea mays
  Clone ID: LIB3136-019-Q1-K1-A2
aaggacctgaacctgccagcagccctgccgtagccgaccaggacgccaccgcagcagcagaggggctccccgggactgctgcggtacaggtcagcgccgagcacgctgctcggcgaggtgatgtgtggtggtgatcaggacttccccgcggctggcggcgcagggcacggaccaccggaccacgccgccgcggacaacgtcctcgcgcgctttctcgccgggcaccactccgagacccgcgactgcaagcctccccgccccgccgccgccgctcacttcatggacgaagctgccgtcgcgtccatggccgcctcacagcagcagcagctcatgtaccagtcgcagcaggagcagcagatggccgccatggaggggctgtaccgcaacgtca

SEQ ID NO: 2565 - DNA, 419 bp, Zea mays
  unsure (1)..(419): unsure at all n locations; Clone ID: LIB3136-019-Q1-K1-A3
caatatcagcgtgccgcaattttcacaggccgcagccggctatatacgcccgtccgctgccggcggtcaggtgcagtgcgctgtgcacggacacggacacggacccgattcgcgtcgtgtttgtgtctttatggacgcgcgacaaggggaccaatccctccgcctccaggcatcgaacatccagccgcacgccacccctctgaatatctactgtgtgtgtcctgttctgttcctgccctggtcggcgcagcgatagcgaacgcgaaccaaccatgcctgcgtttgcgtgcgaacggcacaggacactgcaaatacccagaccatgcttatccgccggccatggttcacgttcactgtcgcgtnatcgcaccaccagccttacgcactcgccggacgatttcaacgcgctgacacgccac

SEQ ID NO: 2566 - DNA, 337 bp, Zea mays
  Clone ID: LIB3136-019-Q1-K1-A5
aagacgacttgtttcattgattcttcaagagatcgagcttcttttgcaccacaaggtcgaggatgtcttgcagctgcggatcaagctgcggctgcggctcaagctgcaagtgcggcaagaagtaccctgacctggaggagacgagcaccgccgcgcagcccaccgtcgtcctcggggtggccccggagaagaaagccgcgcccgagttcgtcgaggccgcggcggagtccggcgaggcccgccacggctgcagctgcggtagcggctgcaagtgcgacccctgcaacttgtgatcacatcgatcgacgaccatggatatgattattatctatctaac

SEQ ID NO: 2567 - DNA, 362 bp, Zea mays
  unsure (1)..(362): unsure at all n locations; Clone ID: LIB3136-019-Q1-K1-A6
ggctttcttagagctatatcccctgacttcggtcatctctcaggccaagaacaagaacttgaaggaacattcaggttcatgcactcgagactgcggacacatgctgaatcaattgctttctttggtggtggttcaagagaaaaagcgatggttgaggctaaattcgtcaagttaattaaccactcaaagattcttttgaggaaacagtggctttatggtattgttgatgattttgtaacaaagcaacttccacacaatgtaacgtggggtctgagtctgttgtatgctttggagcacaagggagatagagncttaacctcaactcaaggagagttggcacatgctctgcggttcttggcttc

SEQ ID NO: 2568 - DNA, 262 bp, Zea mays; identical to SEQ ID NO: 2243
  Clone ID: LIB3136-019-Q1-K1-A8

SEQ ID NO: 2569 - DNA, 383 bp, Zea mays
  unsure (1)..(383): unsure at all n locations; Clone ID: LIB3136-019-Q1-K1-A9
cggacgcgtgggctggagcagaataccacgtcacagccagatctacttgattaccaatcacacaacgcaccttggctgcccacaccccagaccaatgctccatcaattccttccacggggccggtttgagtacattacctaacaatccatcgcagccacaaccgcctgctggttctttcagtatgcctccatatactggtcaacctcctcacatgaatagcatgccaagcaatccattttcttgtccctgggcctcagcaaccagtaccaagcaatcaacaacatccacctcaatttcgagctaactcctcgattgggccttttttcggtcaaccacctggtattgtaagccaacanatgccaccatcttcctcaatgccacc

SEQ ID NO: 2570 - DNA, 413 bp, Zea mays
  unsure (1)..(413): unsure at all n locations; Clone ID: LIB3136-019-Q1-K1-B1
gctctcccccacctcccggtccggcagcagagagcgggggtgcagagagatcgagatccggaggccgcgagtgggagcgccaccaccagcgtctgcggcaatggcgggcacggtgacggtcccggggtcgtcgaccccctccacgccgctgctcaaggacgagctcgacatcgtgatcccgacgatccgcaacctcgacttcctggagatgtggcggcccttcttccagccctaccacctcatcatcgtgcaggacggcgacccgaccaagaccatcaaggtgcccgagggcttcgactacgagctctacaaccgcaacgacatcaaccgcatcctcgggcccaaggcctcctgcatctccttcaaggactccgcctgccgctgcttcggctacatggtctncaagaagaagt

SEQ ID NO: 2571 - DNA, 169 bp, Zea mays
  Clone ID: LIB3136-019-Q1-K1-B10
gaaaggtgaaacacaccaatggccagctgtcctagggattgctcttattgctatggttgaagaattaggagctgaaatggctgtacgttcacttgagcgtcttctgcagtatggcgagcaaaatataagacgggcagtccccttttgctcttggtatatctctgcaata

SEQ ID NO: 2572 - DNA, 422 bp, Zea mays
  unsure (1)..(422): unsure at all n locations; Clone ID: LIB3136-019-Q1-K1-B11
ccttttcagatgatgacatcactcagatcgtctcaacaaacctagttggttctctactgggcaccagagaagccatgaatgtcatgcaataccaagagaagggaggccatatattcaacatggatggagcaggttctggaggatcaagcacaccactaacagctgtctatggttcaactaaatgtggactaaagcagttccaaggatcacttctgaacgaaagcagaagatcaaaagttggagtgcatactgcttcacctggtatggtcctcacagaccttctgttaagtggttcatcgctcagaaataaacagatgttcaatntaatatgtgaacttncagaaacagtagccagaactttggttccaaggatgagagttgtaaaaggaagtggaaaggcaatcaattacttaacaccacca

SEQ ID NO: 2573 - DNA, 395 bp, Zea mays
  Clone ID: LIB3136-019-Q1-K1-B12
atgagttctaggtttgctgaaatctccattgatctttaatctgttcatcggcttgcttgagtgtgtggcgttagcgtgatgccttctcctagttcatgaacttccttccggtctggagctttgcttactcagttacccttttttgacccgtatttttttctctccattccacaactgttggctcccaaattctggtgatttgttgggtatccccctgcgaaatccgggtaaaagtggggatccgcagcttctgtggcttgtcggcttttaaccctactttttttttgaccctttaccattttcttttgcccatttttaatcccccattttccgcaagaatttacctttaatttcatgtctacttatttccgccgtaaaactgtgtttgtcgcgtg

SEQ ID NO: 2574 - DNA, 275 bp, Zea mays
  unsure (1)..(275): unsure at all n locations; Clone ID: LIB3136-019-Q1-K1-B2
cacgcgtncgccgaaagatattactatcaggtactaatcgtcaggtttgatcacaacacctacgggggctcagtcaccaaaacatgcatgccactgttctatagtgtccgaacgattcaaccctgtcattaaccagccttactcctgttgctgacctccaccaccactacacccaaacagaggctattttccatctatgtttgttagaaggcataatgctatttatctctttgtttcgaacatttggcaattaagaaatcaaacattactccccc

SEQ ID NO: 2575 - DNA, 346 bp, Zea mays
  Clone ID: LIB3136-019-Q1-K1-B3
atgctggttgcatgtattactacaccaacgaattcgacttctgccgtaaggagcagcaagcttttgaggaagcctgccccatttctgagtagatcttgagagttttacttgcagtggtcttcgcaaataagggaaaaaaaggcagaaaaacagcgttcatgatctcccatgtttgttgtcctcatggaatttgtactggtgaatgaatagcacagcctggagctattcaccccatttgccgcccctcaggattttagagcaggcgaatgctctaaaatggtgatgatggcgttttctctttatggttcacaaattacatttggcggactcacttgtatttctgtct

SEQ ID NO: 2576 - DNA, 351 bp, Zea mays
  Clone ID: LIB3136-019-Q1-K1-B4
agctagctagcgtacagacgaataatctcttcttcacctcactagctaacaccagctagcagctcgatcgctctgtcctgcaataatggccgctcgctcctcctcccagcagctggtcgcggcggcggtcctggcagcggcgctgctgctgctggcggcgggggccgggacggcgacggcggcggtgagctgcggcgaggtgacgtcgtcggtggcgccgtgcctcgggtacgcgatgggcagcgcggcgtcgccctccgcggcgtgctgcagcggggtgcgctcgctcaacagccgcgcgtcgtcgacggcggaccggcaggccacctgcaactgcctcaagagcatgac

SEQ ID NO: 2577 - DNA, 421 bp, Zea mays
  Clone ID: LIB3136-019-Q1-K1-B5
gcaacatcgtcctctccggtggcaccaccatgttccctgggatcgctgacaggatgagcaaggagatcactgccctggctcccagcagcatgaagatcaaggtggtcgctcctccagagaggaagtacagtgtctggatcggaggatccatcctggcatccctcagcaccttccagcagatgtggatcgccaaggccgagtacgacgagtccggcccatccatcgtccacaggaaatgcttctaattctttgggcccgagaaatgcaagccgtgggggagccgttaccgccgccagcctctcctgcccccgttttcgttgccgtttcttcattagcgcgaacaaagttttgtgccggtctatcggccgccgctttcctcccctattcatcaagacttgcataactgtcgctacctatgctt

SEQ ID NO: 2578 - DNA, 401 bp, Zea mays
  Clone ID: LIB3136-019-Q1-K1-B6
cagaagcaaatgactctcaggtcaaactagtatggtattataacaacgcattggggaggccagacaagaagaaatttattgcacgatcaaaagcataccatggatctacactgatatcagcgagcctaactggtcttcctgccctgcaccagaagtttgatctaccagcaccttttgttctgcacactgactgccctcactactggcgatatcatcttcctggtgagacggaagaagaatttgcgactagacttgccaccaatttagagaatcttattctcaaagaaggaccagaaacaatcgctgctttcattgctgaacctgtgatgggtgcccgtggtgtcatccctcctccaaagacctattttgacaaggttcaagcagtggtcaagaagtatgac

SEQ ID NO: 2579 - DNA, 283 bp, Zea mays
  Clone ID: LIB3136-019-Q1-K1-B7
ttcccttcttcacctttcgggtgttagtaaaattacacagatttccctctctctgtggtctctgtctctgtctctgactctttttagggatgttagcaaaattacacagatttcccttctcttccattcaccttcgggagatgtattagcttgagatttctgcggggtatcatcattactatgactaggtgtaataattattgccgatctgttataacttgtaatgctgctttgaaattttcaacatttctttgccacctatttatagaattttattcttaag

SEQ ID NO: 2580 - DNA, 409 bp, Zea mays
  Clone ID: LIB3136-019-Q1-K1-B8
gcgagctgctgaaattttatttggtctgggttttgacaaacaaatgcaagcaaagaaaactaaagatttctctggaggttggcgtatgaggattgctttagcaagagcactgtttatgaatccaacaatccttttgcttgatgagcccacaaaccatctagatcttgaggcttgtgtctggttggaagagacactgaagaaatttgaccgcatacttgttgtcatatcacactcccaagattttctaaatggagtgtgtactaacattatccatatgcaaaacaagaagctcaagttatacaccggtaactacgatcagtatgttcaaactcgctccgatcttgaagagaatcaaatgaagcagtacaaatgggagcaggaacagattgcttcaatgaaggagtacatt

SEQ ID NO: 2581 - DNA, 407 bp, Zea mays
  Clone ID: LIB3136-019-Q1-K1-C1
agaagatggcatgaaggcacaagtatatgatggctgccagagctgggagacatcattcataattcaagcattttgcgctacagatcttgttaatgactatggttcaactcttcagagagcctatgagtttatgaaaaattcacaggtcatgaggaaccatcctggtgaccaacgttattggcatcgccatagatcgaagggttcatggacactttcatctgcagacaatggatgggctgtatctgacactacaggagaagcacttaaggctgtactgttgctgtcaaagatctcaaacaaaaacaaccttgttggggatccaatagaaagagaaaggttgcatgacgctattgattgccttctatcttttgcgaacaaagatgggcaccttttctacatatgagtgc

SEQ ID NO: 2582 - DNA, 407 bp, Zea mays
  Clone ID: LIB3136-019-Q1-K1-C10
gctgaatgacaggttcctggaattaagttcagttatgagtcatggtaaggaagcaaagttagataaagcaaatatattgagtgatgcagcccgtatggtggcacaacttagaggtgaggcagaaaagcttaaggaatcaaatgagaagctgcgggagaatatcaaggatctgaaggaggagaagaacgagctccgtgaagagaaagtgagactaaaggtagaaaaggataggctggagcagcaagtcaaagctatgagtgtagctcctacaggatatgtaccccatctccctcatccagcttcataccatcctgctgcgttcactccatttgcgctgccacagcaagctccagccaacaaaagtgctccaatcccagcaccgttccctgggatggcgatgtggcagt

SEQ ID NO: 2583 - DNA, 243 bp, Zea mays
  Clone ID: LIB3136-019-Q1-K1-C11
ctgattctgattctgatttcagccaccctgaccggcgaagcgcggctgagattttctccacagcggcaccaccagagaagagatcgatccaatcagattaaccaattatcatggagggaggagaggggcaaaggcaatgtccgggacggaagttgaagacccgcccgcggcggcggctgctgctgctgcgtttgaagtgcccgcgaaacgcggccttctacggtacaactcgccgctggcgca

SEQ ID NO: 2584 - DNA, 100 bp, Zea mays
  Clone ID: LIB3136-019-Q1-K1-C12
ggactgcaagagcgtattacgacaacaaagaagggttctattacgtctgtccaggctatatatgtgcctgctgatgacttgacagatcctgctcctgcta

SEQ ID NO: 2585 - DNA, 396 bp, Zea mays
  Clone ID: LIB3136-019-Q1-K1-C2
agtggcagaaggttctggaggactatcacgaagaacatccagaagttactgtccttgacccaccaaatgctatcgagcatctgaacaatcgacaatcaatgcttgaagaagtagctgatttgaacctgtcaaatttctatggagaagtttgtatcccacgccagctggtcattacgaaagatccatcctctataccaacttctgtagctatggctggactaactttgcccttggttgccaagccattggttgttgatgggacgtctaaaggtcatgaactatatcttgcatatgacgaggcatccttgtcaatgcttgatccgcctctggttctacaggaattcataaaccatggcgggatcctctttaaggtgtatatcattggtgaaacaatac

SEQ ID NO: 2586 - DNA, 406 bp, Zea mays
  Clone ID: LIB3136-019-Q1-K1-C3
ctcactcttcactagccctctgctcctctgaaatggcggcggcgacttcctcttccacctacctcgccatcggccgcaaaaccctaaaccccgccccctccgtagccacagccgccacctccgtctccttccccgccacgcagcacccatgcctcgtcgccgcctccgcggaccgccgccgcgccgtggctgcgaaggtctcgtcgccgtcggtcatcggcaccgccatgccgtcgctcgacttcgagacctccgtcttcaagaaggaaagagtgtccctggccggccatgaggagtatattgtgaggggtgggagggatctgttcccgctgttaccggaggccttcaagggaatcaaacagatcggcgtaatcggctggggctcgcagggtcctgcacaagctca

SEQ ID NO: 2587 - DNA, 407 bp, Zea mays
  Clone ID: LIB3136-019-Q1-K1-C4
gagtacttcaacaccgacctcaccgagctgggtgatcaccccatcgggtcccacggtccaggcgtgcacccagtagcaacccctctcgtggccctcggcgatcacggtgccggacgaggcggcgcgaagaatgagctcctggccatgcgtgctgagcaagaacaggaggagcagcctgctgttgtccagaaggtgattgacatgcgagggccgcaggcgtgggtgctgacagacttgaaggggctcaatgaagaacaagagatggaggcgaatgacgtgcccatgccagagctgcagtacaatgtgcgtttgcttgttgatgaggctagggctgatattgtcaggttggacgcgcagctgcggcgggagcaagagaaggtagctagcttggtgcgggagagggaaaa

SEQ ID NO: 2588 - DNA, 415 bp, Zea mays
  unsure (1)..(415): unsure at all n locations; Clone ID: LIB3136-019-Q1-K1-C5
cttctagcccgggccgactccactccaatccaatcctggggcgagcgactgcctccttccctcgatctattccccatcttgtcctccctttgctaaaaataacgaggcagaggcatcttcgatttgacgtgcgcttcctcttcctcgctcgctctcggtcgcagtgatggctgatgtcgacgagtaccgttgcttcattgggaacctgtcctggtcaacgactgatgaaagcctcaaggatgcgttcagcaaattcggcaacctcactgaggcaaaggtggttcttgacaaattttcaggccgttctcgtggtttcggctttgtaacttttgatgagaagcaagccatggaggatgctattgagggaatgaatggacttggacttgacnggaggaacatcactgttgataagctc

SEQ ID NO: 2589 - DNA, 367 bp, Zea mays
  unsure (1)..(367): unsure at all n locations; Clone ID: LIB3136-019-Q1-K1-C6
cttctctgctaccagtaaccgttccttccgccggaatcgattttgtgaggggcgagttccgccaccgtgggcgtatcaatatcggcgaacgctcgagttctcgcggcgaaaaacaacgcgttctgcgaggattccgtggtgaaagaccggggccttttttttctgcggattccagctgccaaacagagatgtcggctctcctcgacctactgatggggatcttccgccagcagaccctcggcggcgccgccctggagctggccgcgctggcggcgcccctctggctcgccgctcttgtcggcctcctcatcgggtgggcgtggcgcccgaggtgggcggnggtcgtcgtcagcgaccacaacgccca

SEQ ID NO: 2590 - DNA, 398 bp, Zea mays
  Clone ID: LIB3136-019-Q1-K1-C7
attttgagtaccacaagaaagcaattacatccatcgagtggagcccacacgaagcatgatcattagctgtaacatctgaagaccaccagctcacaatctgggacctttcattggaacgggacaccgaggaggaggctgagttcagagcgaagatgaaagagcaggcaaacgcccctgacgatttgccgcctcagcttctctttgctcatcaggtagtactccatatgttggcattggaatggctttcatcttttttggctgtatcatttttcttgcacaattgtgttgcttgtaaactgtgaagagtggaccacatgatgctgactgtttggtgtgagcagggtcagagagacttgaaagaagtgcactggcacccacagataccgtcgatgatcata

SEQ ID NO: 2591 - DNA, 416 bp, Zea mays
  Clone ID: LIB3136-019-Q1-K1-C8
ggtggcggcgtcgcaagccgagacgccggtgccagcggtgaccatcgtgatctcgcggccaggggaggaggttcagacgcctgatgcaatgagtggctccccggcgtgctccacgcaggccggtgacggcaaggctacagccacctcggtttcgttgaccgcttcggcggctgccaaggaggccgagttggcaaggtccgacagcttcgacgactacgagcaatgcagagtttgtcaacagaagacagaagaacctctggttgaccttggatgtagatgtcgtggtgatcttgcaaaagcacatcgcacatgcattgatgtttggtttcgtactagaggttcaaacaagtgtgagatatgccagcaggttgctgctaatatccccccttcagagacgcaagcaagtacaagttatt

SEQ ID NO: 2592 - DNA, 207 bp, Zea mays
  Clone ID: LIB3136-019-Q1-K1-C9
ccgcgccacgacggcggtgttctggaaggcgactgggcgagacaagggcgtcttcctcggcgacgcctccaggaggatcggcttgaggaagaccctggtgttctacatcggcagggcgccacacggcaagaagactgactggatcatgcacgagtaccgcctggaccaagagaacgttgaaattcaggaaaatggttgggtggtgtg

SEQ ID NO: 2593 - DNA, 370 bp, Zea mays
  Clone ID: LIB3136-019-Q1-K1-D1
ctcgcgccgccgccgccgtgcccagcgctcgagctcctcgcctgccgcgagctcgcgccgcaacgccaccatgaagttcaacatcgcgaacccgtctaccgggtgccagaagaagctggaaatcgatgacgaccagaaactgcgtgccttttatgaccgaaggatctcccaggaggtcagtggtgatgctctgggcgaggagtttaagggttatgtcttcaagatcatgggtggatgtgacaaacaaggcttcccaatgaagcaaggagttctgacttctggtcgtgtccgccttctgctccacagaggcactccctgcttccgcggttatggcaggcgtaatggtgagcgcaggaggaagtctgtccgt

SEQ ID NO: 2594 - DNA, 271 bp, Zea mays
  Clone ID: LIB3136-019-Q1-K1-D10
gcgctatcaaaggccaaagcggcatgatgatttcgcgcaagggaatcgggggactggtttgcgtgattgatgccggaacatgttcaagttttcgacattccctgtagaatctaatggtcgggggatatatattactagaatggggctcttcatatgaactgccccgtatgcgtaatgtgttgtaccggagtcatcatttcaaatttcaactgttgcgtggttaaatcgaaattggcttccggataacccataagttgggggggggatttca

SEQ ID NO: 2595 - DNA, 290 bp, Zea mays
  Clone ID: LIB3136-019-Q1-K1-D11
ggctgaaccacatattgagactgctaagatgaaatggattcctgttaaggagaaattggttgtcctcaagaaaaatacagaaccttatgtacagaaggtatcgacaagatcagtggagttttatgagtcatcaagggatgctgtgacacctcacgttgtcaaagttaaagagtttgctcatccctactaccaggaagccaagaagttttctaagccttacattgatcaaattgctgagatcactaagccacatgttgagaaagttagaactactctgaagccatacacta

SEQ ID NO: 2596 - DNA, 378 bp, Zea mays
  Clone ID: LIB3136-019-Q1-K1-D12
cgtcgccccggctctcgatcctcgcccacgctctccacggaaggcgattgcgcgatgctcgcatcatccctaaaccccgcctcgtctctcatgaaaacattagcagatgatgaggcggaatgttcttcttgggatagcgacgatgagtaccagaaattcatccaaaacatgaaccctccaagatatactaaccactcctccattaatttcttggttcaaaaaaaaatcaaatccttccttaacccttttcgaaggtcaaggtcaacattgacaacaccttatgtccaagtgctacagttattcatgtggacagcaccaacaagtatggcatactgttggaggtagtgtaggtcctcgctaacctcaagctcatagtga

SEQ ID NO: 2597 - DNA, 383 bp, Zea mays
  Clone ID: LIB3136-019-Q1-K1-D2
gaagaatactgggcaggctgcttatgaaccaatgtgtgtatggaatgaatttctgacacgagcaattcggaatcatctcaagaatacatgttggactgttgccttagtccatggattttttaaacagtcgaagctctccgtatctgggaaggatatttggttgacccttatagctaggcgctcacgacactttgcgggaaccagattcttgaaacgtggcgttaatgaaaagggcagggtagcgaatgatgtcgagactgatcagattgtttttgaagacacatctgatggaatcccaactcagatggcttctgctgtacagcatagaggatcgatacctcttgtctgcgttcaagaaacttcaagacttaatatttgaccag

SEQ ID NO: 2598 - DNA, 398 bp, Zea mays
  Clone ID: LIB3136-019-Q1-K1-D3
ctgtactgaacgtgtgactagataacaacaagcgtgaaccatggcggacgagtacggccgcagcggctacggcaggtccggcgccggcgacgactacgacagcggctacaacagcaagtccggcactgatgactacggccgtggcgaaggtggctacaacaagtcgggcggcgatgacgactacggccgcagcggcggcgatgggtacggcaggtccggcggcgacgactacggccgtggcaccggcggcggtggctacaacaagtccggcggcggagacgactacggccgcagcggcggcgacgactacggccgtggcaccggcggcggcgggtacaacaagtccggagacgacggctacgacagcgggtacaacagatcgggcaccaccaacgacg

SEQ ID NO: 2599 - DNA, 367 bp, Zea mays
  Clone ID: LIB3136-019-Q1-K1-D4
ctgtgaaggagattaggaggacaatgagaatacaagcactgcgttgccatgttttgtacagccatgatggtagcaagttgaatgtaattcctgttttggcttctcgctcacaggctttaaggtatttgtatatccgatggggggtagagctgtcaaacatcaccgtgattgtcggtgagtgtggtgacacagattatgaaggactacttggaggcgtgcacaaaactatcatactcaaaggctcgttcaatactgctccaaaccaagttcatgctaacagaagctattcatcccaagatgttgtatcctttgacaaacaaggaattgcttcaattgagggatatggtccagacaatctaaagtcagc

SEQ ID NO: 2600 - DNA, 415 bp, Zea mays
  Clone ID: LIB3136-019-Q1-K1-D5
ccggccttctccacggtgacaatccagagggacttgttctatggttatgatacgttgatggagaacgtctctgatccgtcccatatagaatttgctcaccacaaggttactggacgaagagatagagccaggcctttgacattcaggatggaatcaagtggtgcctggggttactcaggagcaaattctggtaatcctcgcattactgcaacttttgaggccccttgttatgcattgaacaaaatagagatagacacaaagttacccatttttggcgaccagaaatgggtcatatggatttgctctttcaacattccaatggccccagggaagactcgttctattgtctgtagcgctcgaaactttttccagttcacaatgccaggaaaagcatggtggcagcttgttcctcgat

SEQ ID NO: 2601 - DNA, 379 bp, Zea mays
  Clone ID: LIB3136-019-Q1-K1-D6
gtccttcctccagttccggtggttagcagggatgagaaaaggaggtttggttttagtacgcctcaagcatcaaaaaaatttagagagagggaatgggacagggaaaggggtatggactttgatttaatgccccctccaggtagcagcaagaaagcaggtacatctatggatgtggatcaaacaattgatccaaatgaaccgacatactgtatatgccaccagatttcatatggtgacatgatcgcttgtgacaatgagaattgtggaggaggtgaatggtttcattacacgtgtgtgggtcttacaccagaaacgagattcaaggggaaatggttttgcccaacgtgcaggaatcttcagtgagaggttcttcaagtag

SEQ ID NO: 2602 - DNA, 421 bp, Zea mays
  Clone ID: LIB3136-019-Q1-K1-D7
ggtaatcgctggagaaattctgaggatttaatggaccaagttcgtgggccgagggcaaataaattgaacaatgcttcagtatcctccacggtgaaagatatcacaagtccattgatccgtagaaatcagtataatagatcagatttttcagttcaatataatcaggccaagttttttatgataaagtcatatagtgaagatgacattcataaaggtatcaaatacaacgtttgggcaagtacaccaaatgggaacaataagctggatgctgcataccatgaagctcaaaatttaatggacagtggggaaagatgccctgtcttcctattcttctcggttaacaccagtggacagttcgtaggtttggctgaaatgttaggtcctgttgatttcaagaagaccatggatttttgggaagaaa

SEQ ID NO: 2603 - DNA, 410 bp, Zea mays
  Clone ID: LIB3136-019-Q1-K1-D8
ctcaaggaaggaaacagcagcagtgctgggcaagttcggctttgttgaagctttgtagctactcggtgctttaagaaagttagcacgatcaaagagtgatacatcagaccttttgttgctgtttgtgcttttcttttacatcttcaaacttactgtattattgcgaatgcaatgttgagtagaataacagagttcccattatttaagctatatagagtgtgacatgggcttcttttgtagcaaataaagcagctcagttggggattttggataaaaaaaaaaaaaaaaaaataatgaaaaaaaaaaaaaaaatataataaaatatatttattatatatttaaatttaattatttaatttttatatttttttataattttatttttttttttattttttatttttattttt

SEQ ID NO: 2604 - DNA, 312 bp, Zea mays
  Clone ID: LIB3136-019-Q1-K1-D9
ggagatcgttattccagagattctaatgaacgctatggcagagattatagagaagatgaatacaaaggaagtcatagcaaccatgaatatgctgaaggagcaggtcgcaggagctatggtcaggaaagagattcatatggggatggtgaagcttattcatcccgtggtcgtggcagcaatgctgatgatcctactcaggatgataggcctatagagcgaaagctttctaaccagcaaatttcttcaccaccaccgaactacgaaaatgtcacaagagaatggccagacaatcttcacgatgacagaaatgga

SEQ ID NO: 2605 - DNA, 396 bp, Zea mays
  unsure (1)..(396): unsure at all n locations; Clone ID: LIB3136-019-Q1-K1-E1
gttgcgttcgagcgttgtggacttgtggtggtttccttcctccgccggagaaggtagacgatgggaaggggaagcgaagcagtgccggacgcccgtcgagctgcgctgctcttgatcgtctgcttggcggctcgagcggcttctgcaatccaggatggcctgttgccgaacggcaacttcgaggaggcgccgcccaagtcgcagctcaacggcacgagggtgatggggcgcaacgcgataccgcactgggagatctccgggtacgtggagtacatcgggtcgggccagaagcagggcgacatgctgctgccggtgccggagggcgcctacgccgtgcggctcgggaacgaggcatncatccagcagcgcctcgccgtgacgccgggcgcgcgctac

SEQ ID NO: 2606 - DNA, 207 bp, Zea mays
  Clone ID: LIB3136-019-Q1-K1-E10
ctccggcagcgaggtgaggccaccgatcggaccttccctagcggcggcgcctaccaacctgaaggagcgatggctctgtctgcgacgctacggatttctcttagcgtcgcgttctttggggttctggcgttcgtgcttggtgtcatcgccgaaaacaaaaagcctgctttcgggactcctatcctaggaaggatgtcgtcatctgca

SEQ ID NO: 2607 - DNA, 321 bp, Zea mays
  Clone ID: LIB3136-019-Q1-K1-E11
ccgacatcgtcccttcgttcccacgagcaacctataatccgccggcgttgagatgttggttgatcaggatctcctatctggcgacgagctcctgtcggattcattcacctacaaggagctcgagaacggcgtcctgtgggaggtcgagggaaagtgggtcacccaaggtcctgttgatgtggcattggtgccaatccattccgccagggttgtgaagaccaaagccgttatgacacagctgtgaaggtggttgatattgttgacacattccgtctacaggagcaacctccttttgacaagaaatcatttgtgtcttacatc

SEQ ID NO: 2608 - DNA, 141 bp, Zea mays
  Clone ID: LIB3136-019-Q1-K1-E12
ggcagaggcggcaacaacaacaacagcaaaacctcctcctccctagactggaagcagagatgcagcgtggccctgggcgtcgccaagggcctggcctacctccaccacgagtgcctggagtggatcgtccactgcaacctg

SEQ ID NO: 2609 - DNA, 366 bp, Zea mays
  Clone ID: LIB3136-019-Q1-K1-E2
ctgccgccttcccttcgcgtctcctcgctccggccgcagcagccgcctccgccctccatgggcaaaattacccaatccatcatccccgaaccctaaataaatcctcgatcggccgcgcgcgggaatcaacggatgggaccgcggccggcggctccgtagcggattggaggcgctcggttcgcgggggccgcggttcggctgccgggtggcgcccgcttctagagggaaaccaagaaggaaggaaggagattggaataaagacaggcactgcaacgatggctccatctcaagcggcggcagcggctggccccacctttgaggacctcgagcgcgacctgcaggcagttctcatggaccaaaaccaca

SEQ ID NO: 2610 - DNA, 285 bp, Zea mays
  Clone ID: LIB3136-019-Q1-K1-E3
agtaaggtcctttcctgtacgcccttcattatgcacttgatgccgtaaatggaattgcatggcagactcccatggacgtgataaaacatggttcgaaaaggcctgctgacgcagatcccatgaacttgaacgcgcatcccatgaataaacctacagcagcataacgtgactcctgatcgcctgtctatagagacgatcactttgatgacctaagacgcggaatgcaggtgcttaactgcgtagtgacttaccagacctacatgttccaggtgctgaactaaacac

SEQ ID NO: 2611 - DNA, 345 bp, Zea mays
  Clone ID: LIB3136-019-Q1-K1-E4
ggccccgtcctccgtccgccgcgtgctcatgtccgcggcgctatcgacggagctccgccacaagtacaatgtgcgttccatcccgatccgcaaggacgacgaggtgcaggtcgtgcgcggcacctacaagggccgtgagggcaaagtggtgcaggtgtaccgccgtcgctgggtcatccacgttgagcggatcacccgcgagaaggtgaacggctccaccgtgaacgtgggcatccacccttccaaggtcatggttacaaagctgaagcttgacaaggaccgcaaggcgctcctcgaccgcaaggcccggggccgcgccgccgacaaggctaagggcaagtttac

SEQ ID NO: 2612 - DNA, 259 bp, Zea mays
  unsure (1)..(259): unsure at all n locations; Clone ID: LIB3136-019-Q1-K1-E5
aacaagtgcaacgatgccgctgatactagctcactttggggactcctgttgtggatacgcggcacttgaagttgtgaaaagagttttgggggtccattctttcttccttgtctttggctcggctagttggctgtttttttttcatcgggtcagtggtggaactgcgaggttgtggttttatcatgtaggcaaatttgccaaatgtgtacatcggaaatatgggaataaaagcctttatcgatccccattcagcttcnna

SEQ ID NO: 2613 - DNA, 336 bp, Zea mays
  unsure (1)..(336): unsure at all n locations; Clone ID: LIB3136-019-Q1-K1-E6
ccgtccggtcgccggcggggcgtcggcgccgccgtgggcccaacccggccccgacgtggccatggntgcggatgcaggnncggacgggcgccttgcccctcgcggagcgccggaactacccgcggnncgtcggcgaacgccatcggcccggatgggcgcgcgacgaagggcgtgcgcagncctctggnncgcgggtcctcgctcaaaccgtcaaccgcgccatgatncgtcancggcgtcgcagnctggcccacgtacgaaccaggccaaggagggccatcctggcgcgccgcggcccgggcgcagacgggctcgccacgcacgtggccgccagct

SEQ ID NO: 2614 - DNA, 383 bp, Zea mays
  Clone ID: LIB3136-019-Q1-K1-E7
cttcactccactattccggtcaacccatccctttcctccgcctccgcttccgcgtccgcccgccgctatgccgccagccagtagcctcaccgccgaccagctcagcttcttcgaggccaatgggtacctcgtgatggactcgttctcgagcgcggaggaggtgcgggagatgcgggaccgcatggccgaccttgtcgctgggttcgatggcgccaactccgcggtgttctccaccaaggatcatcggcagttaaaggacgactacttctttaagagtgctgagaatatctcattcttctttgaggaaaaggcatatggagatgatggatgcttgaaacagccgaaagaactttcaattaataaagttgggcatgcattacatg

SEQ ID NO: 2615 - DNA, 362 bp, Zea mays
  Clone ID: LIB3136-019-Q1-K1-E8
gacattgttaagggatataattcgtggaagtccagatgttaaatgggaaagcataaaaggtctggagaatgcaaagcgtcttctcaaagaagcagttgtaatgccaattaaatatcccaaatacttcacaggtctattatcaccttggaaaggcatattactgtttggtccacctggaacaggaaagacaatgctagctaaagctgtggctactgagtgcaaaacaacttttttcaatatttctgcctcgtcgattgtaagcaagtggcgcggtgactcggagaaactagtgaaagtgttattcgaacttgcaaggcatcatgcaccatctactattttccttgatgagattgatgctatca

SEQ ID NO: 2616 - DNA, 381 bp, Zea mays
  Clone ID: LIB3136-019-Q1-K1-E9
tggaccgaggcggtcagcaggccttgctcgtgtgtatgcattgtggaacataacttcactggtcaatgttgttgtggctttcatatgtggttttgtacattataagtcatcaaccaaaacacacccgagcgtgcagccctggaacctgggaacggatgaaagccggttggtggctcttcccaaccggactcatgctgttgaaatgcattcaagcaaggcttgttgattggcacgttgctaatttagagattcaagaccgtgcggtatatagcaatgacccaaacatattttggcagtcatgacccctgttgtaactgagggtccttctgggaagctttttacaactcgattttttgggagttgataaaaggaaagtgcggc

SEQ ID NO: 2617 - DNA, 384 bp, Zea mays
  Clone ID: LIB3136-019-Q1-K1-F1
atcagctcccagagactaataaccataataaggtgacaaaggcagaagcgatgaaccagtcttggtccagaccagcagcagtaaggagcaatgcaggaaatcatcttgccaacgacctgaacccccgtgtacctgaccttgccgagaagctgtctcagttgtcaatgggccccaacagggtgtcgggtttgggttccgagaggtttgttagaacccatgagaacgctgccaagcgccccttgcccgtgggatccagggcgtggcatggtccagctgaccccttccggcgcccatacgagatgccaggtgatagaactctccttccaaggaatctcgttcgctgaggctgtgaagctcttcgcaagaaacatatccaacgctcgc

SEQ ID NO: 2618 - DNA, 153 bp, Zea mays
  Clone ID: LIB3136-019-Q1-K1-F11
gtgaaccctcaatcaaagaccgaaatcccctggggagtcggagtcggtagtaggtgaagctagtaacaaggttggcgaaatattattttctggcctgactgcctatatatgttgtacgtgattggtatcgtaatattcattcgcttttgtgat

SEQ ID NO: 2619 - DNA, 276 bp, Zea mays
  Clone ID: LIB3136-019-Q1-K1-F12
agcaaagcaagtgtctgctcactcagtcctgcgcaagagctcgctctcggagaaaaaaacgcgggaggcgataatggagggaggtgccggtgcgagcgagaaagggacggtgctggtcacgggggcgtcgggcttcgtcggctcctggctcgtcatgaagctcctccaggccggctacaccgtccgggcgaccgtgcgcgatcccgcgaacgttgggaagacgaagccattgatggaccttcccggagcaacggagcgcctgtccatatggaaagc

SEQ ID NO: 2620 - DNA, 71 bp, Zea mays
  Clone ID: LIB3136-019-Q1-K1-F2
agataaagtgggcagtgtttttgagccttcatatgacttttcaatatgaaatactccatggggtataaaaa

SEQ ID NO: 2621 - DNA, 394 bp, Zea mays
  unsure (1)..(394): unsure at all n locations; Clone ID: LIB3136-019-Q1-K1-F3
ctccttcctcggtcctctcctctccgcatttcgggcggccacttgtggcggcgtagctagcgtactacagctccctgcatggtgatggaggggcgcacaggctcactctacggccgcctcaacaagagcagcacgcgggggttcctcgcctacaccgccgccggggctgcctgcgcggctgtcctcgcctgcttcgtgctctccgccgcggactcgccggcatctgcggcgcgcaacgatggcgcgcgcctncgnctgtcctcgcgctcaccgcgcgtctggcccgacctcgcgttcaactggcgggtggtggtcgccaccgtcgtcgggttcctcggttccgcgtttggcaccgtcggcggcgtcngcggaggcgggatcttcgtgcccatgc

SEQ ID NO: 2622 - DNA, 373 bp, Zea mays
  Clone ID: LIB3136-019-Q1-K1-F4
atactttctaataactagtactaaagtagatgctaattaagatgaaaggatacttatatatatgtaccgactactgctcggatagaagctaaaagatctcaggattattctgagaggggggacacgcaaaaacccgcggcgatgcccgtacaaccttttaggtgaatccaactaaccacagttactgccactggctagctagctggactggagtgaacagtgatgtatgtaccgctgctacagttgcttgtctgagatttcgatatgcatgtgcatggcatggatcgcaatcaaaagactgccctgccgatcgatcgacctccttcaattgtgcaaagacgaaacaattaggtatcctcggcaggatgcagca

SEQ ID NO: 2623 - DNA, 374 bp, Zea mays
  unsure (1)..(374): unsure at all n locations; Clone ID: LIB3136-019-Q1-K1-F5
cggacgcgtggggcctacctgcactggactcaaaaacatgcctgccgtaggatcctgtgatgtgtccattcgcgtgttgagtcggcggcttgtgaaggcatccgacccctccctccagccgcacgtcgtcaccttctcaaacctagatctctacccggacaacgtgcaggcctccatagtgtgcctctaccccaagctgtcaacaaagtccggcccgggcggcggcttcgacgccgtcgtctccaccttcgaggccgtcctgccgaccttgcttaaccacttctaccctctcgccggtcgcattgtcgtcaacccaagctccggcgtccccgagctccactgccacaaccagngcgcggagctcgtggtgggag

SEQ ID NO: 2624 - DNA, 401 bp, Zea mays
  unsure (1)..(401): unsure at all n locations; Clone ID: LIB3136-019-Q1-K1-F6
cttcgttccgttgatactatcactttcttccaaagtattttcattgacttcgaaagatcagctcaaggttgaagttacatcagtttttggatctgctgcaccttcactcaaagtgaatcttgtgcaagtgttgggatctgactctaaagtcatcaccagtgagaacaaggcatatagctaaatcagtggcttcctctggcaacttccttgtcattgtttttgtgtgttgcagctccaattctctagcatcattctcctttttgtctcaggaacttcaatacgaccttgacaacaatgtccattacttggacattgctccattgaaaattgatgttgggaaatactcgatagtttttgagatttcacttcangaaccagagcaggagactgtttatgctact

SEQ ID NO: 2625 - DNA, 424 bp, Zea mays
  Clone ID: LIB3136-019-Q1-K1-F7
cctctacctaccggagcagggagcacgccgcacgagccctttccgccgccgccaaaatggtgaacgttcctaagaccaagaagacctactgcaagaacaaggagtgcaagaagcacactctccacaaggttactcagtacaagaagggtaaggatagcctgtctgctcagggaaagcgccgttatgaccgcaagcagtcaggatatggtggccagaccaagcctgtcttccacaagaaggccaagaccaccaagaaaatcgtgttgaagctgcagtgccagagctgcaagcactactcacagcacgcaattaagaggtgcaagcattttgagattggtggagacaagaagggcaagggaacatctctcttctaagtttctcatcgctcatctcgatgttggatcgaagctgtgggtctactact

SEQ ID NO: 2626 - DNA, 400 bp, Zea mays
  Clone ID: LIB3136-019-Q1-K1-F8
cacaactccacgtcacacacctcacagagctgcagcagcatcagctgccacctcctgcctctcctccttccttccttccttactgcataggttgttgctacacgtatatattctgaagaagagagatgactagcgtgtggaagaccaaggttctgcctggcctcaacaagatctttgacaaggatggcaagaaggctgcagctgcaggcttcttgaagtccttcaacaaggaggagattgacaaggagattgaggacaagaagacagagctggagcccaaggtcgtggaggcctacgaagcatctccacctgaggtcaaggctctgttcaaggataagaagccagtcaaggtcagcaagaagaactcggctgcagtcaccaagttcctcgatgagctggc

SEQ ID NO: 2627 - DNA, 253 bp, Zea mays
  Clone ID: LIB3136-019-Q1-K1-F9
aagagcggtgttcttatgagcgctagtcatggccacgctggtagctcgatgcaacaagtgcagtcttcactcgataagaaagaggcgaaggtgaaggagctgctgaagaagaggaaagggtggaagagcaaggcttggccaggcacgatggaggaggtccagctgctgttcgccctgatcgacatcaaggtcgtgtcgcgggtgctccggatggggaagctgagcaaggagcacctgctgtggtgcgaggaga

SEQ ID NO: 2628 - DNA, 383 bp, Zea mays
  Clone ID: LIB3136-019-Q1-K1-G1
caacagtgtactgtccacccactccctcctcgagcacactgatgtggctatactgctggacaatgaggccatctacgacatctgccgccgatcccttgacattgagcgcccaacctacaccaacctcaacaggcttgtgtcccaggtcatctcatcccttactgcctccctgaggttcgatggtgctctgaacgtggatgttaacgagttccagaccaacctggtaccctacccgaggatccacttcatgctttcttcgtacgctccagtcatctctgctgagaaggcctaccacgagcagctctctgtggctgagatcaccaacagtgccttcgagccatcttccatgatggccaagtgcgacccacgccatggcaagtaca

SEQ ID NO: 2629 - DNA, 306 bp, Zea mays
  Clone ID: LIB3136-019-Q1-K1-G10
ctcgtgtctgccctgctcatactgcttgccctcgccgtatcgtccacccgcaacgcacaggaggattccatggccaacaacaccgggacgttggtgggcggcatccaggacgtgccggggagcgagaacgaccttcacctccaggagctcgcccgcttcgccgtcgatgagcacaacaagaaggccaatgctcttctggggttcgagaagcttgtgaaggccaagacacaagtggttgctggcacgatgtactatctcactattgaagtgaaggatggcgaagtcaagaagctctacgaagctaag

SEQ ID NO: 2630 - DNA, 382 bp, Zea mays
  Clone ID: LIB3136-017-Q1-K1-F4
ggggaaatggcatcgttgtcccgcaccgctgctgccgctgtcgtggccctgaggtcggcggtccgctccgcgccccttaccggccgcgtcctcggagcgccactaccttcctttgcctcgccttccgctacccgctccgcccggatcctccgcagatcgacggccgcggcgtcggcggggctggaaacactaatgccgctgcacagcgcggtggctgccgcgcggcttatgtcctgcatcgccgtcgactcctcctgctggtgctcgctctcacaaggtttaaacaagcgcatctgaccatggctaggagctgagcagaagagaagatatgctttgcctttatgacagcgaggcgagctgcacctgaagaaacaaaagaatc

SEQ ID NO: 2631 - DNA, 393 bp, Zea mays
  Clone ID: LIB3136-015-Q1-K1-G1
acgcggacgcgtgggttagacttgtttgacacgaaacacaatggaattctcgagtttgaggaatttgctctagccctttctgtgttccatccgagtgcaccaatcgatttcaaaatcgattatgctttcaaattgtatgatctcaagcaacaaggtttcattgtaaagcaggaggtaccttgcacttgcttatattcttaagtaaataacttctttcgcgccaatatttgttattgcatttgattcgtctgcatgaaccatgttgcttaaattttttctacatgtgttacacttgcttgtacgtgagtgcaattattcaccctctcaagtcatgtcctaatttagcataacgcattattcagtggaaatctatatctctagttaaattgaact

SEQ ID NO: 2632 - DNA, 376 bp, Zea mays
  Clone ID: LIB3136-015-Q1-K1-G10
tcgctctctcgttcctctccatcttttccttcttctccgcctccgccacgccacctcccctcgcctcccgccgtgcgccccgatccctcgcctccccacgccggcctcatctcgccgtggactggatcgccggggggacatcctgggtgtccttcacacacatgcggcgttaggtgatgacgagcttgcctgataggggagaatcacctgtgccgccactctattctctgcgccaggactctgacgtgaccgacctagcggctgccgtcgttgcctttatatacgctggctcctatcgctacgaagacagcggctccaggcaacccaaggccttcatcctttccgtcgtcttttatcaccctttttgcatattcta

SEQ ID NO: 2633 - DNA, 416 bp, Zea mays
  Clone ID: LIB3136-015-Q1-K1-G11
gcgtagtgaggccgagttggcagaacccattatacggttgcttcctgttgcgcttggccttttatatcttggaaaacaggatagtgtggaggctaccgcagaggtctctaaaacatttgatgagaagatagggaagtactgtgatgtaacacttatgtcactggcatatgccgggacaggaaatgtgcttaaggttcagaaacttcttggcatttgctcacagcatcttgagaaaggtgaaacacaccaagggccagctgtcctagggattgctcttattgctatggctgaagaattaggagctgaaatggctgtacgttcacttgagcgtcttctgcagtatggcgagcagaatataagacgggcagtccctcttgctcttggtatactctgcatatctaatcccaaggtaaacg

SEQ ID NO: 2634 - DNA, 421 bp, Zea mays
  Clone ID: LIB3136-015-Q1-K1-G12
ggcaaaactgggtcggacgaatcgatccccatgattcccatttcctagccatcgccatcgcagagcagcagctgctgcaagctgaatttgatgactgtgtatctgcaaactctagcggtgccacatgctgccgatccattgctttaattgtgatgttccttttgctcgtacgccatgtaattgtcattgtgagggatgttagcatgctacaagatgcaacggtgctgttcagcgcaactcttcagtttgcgggattctttcttccttgttatgtaatagctcgttcttgctacgctttgcagcatcggagacggagacaggtgtagggagactcacctgaaccttaaaagaacacaaaggcgcaccaattgaagcgccaccgcggcggtacccccgaagataggaggactacatggaagct

SEQ ID NO: 2635 - DNA, 289 bp, Zea mays
  Clone ID: LIB3136-015-Q1-K1-G3
caaaaaaaaaaaaaaaaatctaaaaaacaataaacataaacaaaaaatttaaaaaagggaaaggaacaatacctacgcaggcaaaaaattgtccttccctattccggaccccatcttcggatgcctggaactctacaccctaggtcttaacatcagccacctcctctgaatcctgtcgccctccctttacaacctatccacgcttaaaagcttgacctaaccaacatcaacctactgggcatcgttcttcctttcaacgcctccacttttaccttaaacggcaacgact

SEQ ID NO: 2636 - DNA, 406 bp, Zea mays
  Clone ID: LIB3136-015-Q1-K1-G4
ggccaagaaggtggaggtggaagtggaggtcaccaaggcggcgccggcgaaggagaacgccgccgaagagaaggccgtcatccccgcgaccgagccgccggccgcccaggagaagccgccagcgccggccgacgactccaaggccctggccatcgtcgagaaagttgcagataaatctgctcccgagaagcctatcgctgagaagcaagggggctccagtatcagagatctcgctcttgcaagggtggaaacggagaagaggaactctctgattaaagcatgggaagataatgagaaggcaaaagctgataacaaggctactaagaaagtatctgttattctttcatgggagaacacaaagaaagcaaacatagaagctggaatgaagaagatggaggaacaactg

SEQ ID NO: 2637 - DNA, 401 bp, Zea mays
  Clone ID: LIB3136-015-Q1-K1-G5
ctgaaaacagcatctggttggaatgacatgaccctgctgggtatttagacagtgagaaacatactgcgtttgttggaaatgcgccattgatcagctaacttaacacttacagttaatgtagcgctgacgagcgtttcacatagattgggagatctcaacgatgccggaagaagctgacataacaggtgttttaatgggaggcgaccatggaaagcgatgtgccgtctgcgtgtggcttctttctgagtggagggagtggtggacgatgctaccaacaaacagaggtgtaaagatagatgcactacaggctgctcccctcctttctgccccaatttcctccctgatgccatcttttgaggggacgcatgtttattgtgtggatggccttgccatgccctttc

SEQ ID NO: 2638 - DNA, 395 bp, Zea mays
  unsure (1)..(395): unsure at all n locations; Clone ID: LIB3136-015-Q1-K1-G6
cgatttgatggggtgacctccatgatgtatactcaccatggattacaagtgacattcactgggaactatggcgagtattttggatttgccactgatgttgatgcagtagtttacctaatgctggtaaacgatcttattcgtgggctttatccagaagctgtatccattggcgaagatgtcagcggaatgcctacattttgtatccctgtccaagatggtggtgttggttttgattatcgtcttcatatggctgtcccagacaaatggattgaacttctgaagcaaagtgacgaatattgngaaatgggtgacatcgtgcacaccttaacaaatagaaggtggcttgaaaagtgtgtcacttattgtgaaagtcatgatcaagctcttgttggtga

SEQ ID NO: 2639 - DNA, 383 bp, Zea mays
  Clone ID: LIB3136-015-Q1-K1-G7
gggacgccaagctctccggcaccctcgacgtcgtcgccaccatgaccggcctccaggagctctggctccacggcaacgacttctccggccccgtcccggacgccatcgccggctgcaaggaactctacaccgtcaggctcaacaacaaccagctcctcggcctcctgccgcccggcctcgccgcgctccccgcgctccgggagctcaagctcgacaacaacaacctactgggccccgtcccggcgctgaaggcccccactttcaccttctccgggaacgagttctgcgccgccaaacctcggggaagcctgcgaccccggaggtcaatgggcgctgctcccactttcactcgacgaaccgtgccagtaccccgaaacagggct

SEQ ID NO: 2640 - DNA, 356 bp, Zea mays
  Clone ID: LIB3136-015-Q1-K1-G8
gttcgtctgactttggctgggcggctagcgctgccggcggaaaaggcctgtcggacgaaacggccgcccagaactcgtcgtcttgctccagcagcgtcatgtgctccgacgtcagcacaagctccgcggcgatgcttccggctccctcccggccggggtacagcgacgccttcccgtcggacttgttggccctgccgctgcgcgcgccaggggcggcccccagccgaagtcgcagccgccgtacatgtcgaaccgcggcgagctgcccatcatgatgccgttggggtcaaagaacctgaggttgtacaggacagggttggccattcacgcggtcacgcgcgcccggatggcgtcgt

SEQ ID NO: 2641 - DNA, 172 bp, Zea mays
  Clone ID: LIB3136-015-Q1-K1-G9
gaccacgcgcccgcgacccgtgtggtcgtccaacttgaagacaaccatttttcacaagcgtgagcttactggggactgcccatttcttagcaaacagccacattctccatgctgtcgcagaactccacaaatattgtggggggcttatggaaaccacacgtagagatgcttc

SEQ ID NO: 2642 - DNA, 405 bp, Zea mays
  Clone ID: LIB3136-015-Q1-K1-H1
gtctgaagaattatgatccacagaaggacaagcgtttcagtggctctgttaagttgccccatatccctcgtcccaagatgaaggtgtgcatgcttggtgatgcccagcatgttgaggaggccgagaagatgggacttgactacatggatgttgaggctctcaagaaaatgaacaagaacaagaagcttgttaagaggcttgccaagaagtaccatgctttcttggcatcagaggccatcatcaagcagattccccgtctccttggtcctggtctcaacaaggcaggcaagttcccgaccctggttactcaccaggaatcccttgaatccaaggtgaacgagactaaggcaaccgtcaagttccagctcaagaaggtcctttgcatgggtgtcgccgtcggcaact

SEQ ID NO: 2643 - DNA, 400 bp, Zea mays
  Clone ID: LIB3136-015-Q1-K1-H10
cggacgcgtgggcgaggctcggcccattccttgcccacgtcatctctctgtctctccctgtcatcgccgcgtcacgcacagccgccgccgtcgtgcgcgtgtgccggaacggccgcgtggatcctccgccccgtcccagcggcgacttgtccgtgcgaagatgctggggttctcgaccggacagctgctggtcatcctcggggcctgctccgtcatgatgaagcccagcgatatggtgaagattgcgaggacggccgggcggatgactggaagagcggttgggcggctcatagtggctcgccggcagctggacgagattctgggccagtctgcagccacccaagttcatatggagcttatagacgctatgacacaattagactcgatccgttatgaagtt

SEQ ID NO: 2644 - DNA, 344 bp, Zea mays
  Clone ID: LIB3136-015-Q1-K1-H11
gtccgaatcgcgcccaggtccctcgctgggagtttcgccgagggcccttccgcctcccctagattcacgacggagatggcgtccgagctcacctaccgcggcggcgggacgtccacggccgccggcgccggcgccgggggatactcaccgaagccgtccaagccgctcgcgtggctgccccgcgcggcccgctacgccgtcgccgagcatcgcccgctcttcgcgctcgccgggatgctgatcgccgccgacgtcatctccatcgactgcccgtacgccttctcctgctcctacacctgcacctgcaccggcggcgccgtctcgtcctacttcaacaacaacaa

SEQ ID NO: 2645 - DNA, 408 bp, Zea mays
  Clone ID: LIB3136-015-Q1-K1-H12
cgcgtcagtgctgctcaacgcgacgggcggcagcgaggcggagaaggacgcggcgcccaacctgacgctgcgcggcttcggcttcatcgaccgcatcaaggcgctgctcgagaaggagtgccccggcgtggtgtcctgcgccgacatcgtcgcgctcgccgcccgcgactccgtcggcgtcatcggcggtccgttctggagcgtgccgacggggaggcgcgacggcaccgtgtccatcaagcaggaggcgctggaccagatccccgcgcccaccatgaacttcacccaactcctccagtccttccagaacaagagcctcaacctcgccgacctcgtctggctctcaggggctcacacgatcggcatctcccaatgcaactccttcagcgagcgcctgtacaacttcac

SEQ ID NO: 2646 - DNA, 385 bp, Zea mays
  Clone ID: LIB3136-015-Q1-K1-H2
acctgctatcgacatgccttttggaagtgtacttctgcaagcactggtttcaagtgatgtcaatggagatatggaggcatgttgcagagcatctagcgttctttctcacattgtcaaggacaacatgcaaagcaaggatcatgtattgcaaattcagcttgagacacttacaccgtccttggggcgcactgagccagtattgcatcgtattgtcacatgtttgtccatcgcagcctcaacagagggagaaaacaaccaaaacaaccaaccagaagaaccgtacattcaacctgttattcttcggctactcatcatatggcttggtgattgttcaaatgctgttaactgcctgttggaatcagcagtgcatctgaactacataata

SEQ ID NO: 2647 - DNA, 409 bp, Zea mays
  Clone ID: LIB3136-015-Q1-K1-H3
cacaaaggatcatgatacttctagtctagggtattcttgtgctgataatgaaaacagcgtcgttgatgaagatagcaccagaactgacgtgtcatgtatggacagcatcctcccatcatgtgtgcttgaggattcaccaaataaccatgacactgtcgtgcctcgtggtgcggatgttgctgatcaaagtggagaagaaaagaaggttgacaattatcagtcggtgtatgctgaggaaggaacaacttaaggtgtaatcacaaaaaacgctgaaggatcaagcatttcaagatctgctaatgaagtccatgaagaggtcctcgacatagaaaaagtgatggtccttgccaaagacaaattgatccttttactagaagacgaggtgaaatgtcttaaagctaaactagat

SEQ ID NO: 2648 - DNA, 411 bp, Zea mays
  Clone ID: LIB3136-015-Q1-K1-H4
cgattcgggattccagccacgcgccacgcataagctcgccggttcctataacatgttggggttaaactactacacctcacggggctcgaaaaacatcgatagctcaccaaactactcacctgtgctcaacactgacgacgcctacgccagtcaagaagttaacgggcctgacgggaagcccattggtcctcctatggcaaatccatggatctacatgtaccctgagggctagaaggatctccttatgatcatgaagaacagatacagaaacccacctatctacatcacggagaacggaatcggagatgttgataccaaggagacacctctacccatggaggatgccttagatgactacaaaaggctagaatacatccagcgccacatcgctactcttaggaatcaatagac

SEQ ID NO: 2649 - DNA, 156 bp, Zea mays
  Clone ID: LIB3136-015-Q1-K1-H5
gatcgataaggttctagatctgtagctttgttgtacgccatatgacgaggggacggggcaagattctctaggcagatttggttttagatgacgtaccaaggaacttctatatatgtggtcaaaggcttcatcgctttgtcataatattgtaagtct

SEQ ID NO: 2650 - DNA, 416 bp, Zea mays
  Clone ID: LIB3136-015-Q1-K1-H6
atcggaagcttgctaggagctatcatccagatgtaaacaaagatcctggtgctgaacaaaagttcaaggatatcagtaatgcttatgaggttctgtctgatgatgagaagcgatcgatctatgataaatatggagaagcaggtctgaagggtgctggcatgggcacaggagattactcaaacccgtttgatctctttgagtccctgtttgaagggtttggtggaatgggtggaatggggggtggccgtgctgctcggaacagaccaatgcaaggtgatgatgagagctacaatctggtactcaatttcaaggaagctgtgtttggtgtggagaaggagattgagataaccagattggaaggctgtaacacctgcgacggaagtggtgcccagccaggtacaaaagcaacgacatgt

SEQ ID NO: 2651 - DNA, 341 bp, Zea mays
  Clone ID: LIB3136-015-Q1-K1-H7
gacaactgcacgttacacaccttacagagctggagcagcatcagctgacacgctggtgcctatacttacttccttagttcctgcataggttgctacacctatatattctgaagaagagatcgagatgaccagcgtgtggaagaccaaagttctgcctggcctcaacaagatctttgacaaggatggcaagaaggctgcagctgcaggcttcttgaagtccttgaacacggaggagttagacaaggagattgaggacaagaagacagagctggagcccaaggtcgaggaagcctacgaagcatctcctgctgaggtcaaggctctgtacaaagataagaagc

SEQ ID NO: 2652 - DNA, 395 bp, Zea mays
  Clone ID: LIB3136-015-Q1-K1-H8
ctcttgcgattcgctcgctcgatcctagcttcccttccaagaagcgcagcgcccatggccatggccacgcaagcctccgccgccacgcgccacctgctggccgccgcctgggcgccggcggcgaagccgcggcagctgagctcgcagctcgcgctgccgtcgtcgtcctcccgcgggccggccccgctccgcgcgtccaccgaggaggcggtggaggcgcccaaggggttcgtggccccgcagctggaccccagcacgccgtccccgatcttcggcggcagcacgggcgggctgctccgcaaggcgcaggtggaggagttctacgtcatcacgtggacgtcccccaaggagcaggtgttcgagatgcccaccggcggcgccgccatcatgcggga

SEQ ID NO: 2653 - DNA, 419 bp, Zea mays
  Clone ID: LIB3136-015-Q1-K1-H9
atctcattgcctcctaagtcctatcgcccaccccgatcaccgcgcgggtatcggagcatggcgtctgcggcggcggtggacgccggcgacgcgccggagcccacggtgcggaacctcctagaccaggagtccctcaagtgggtcttcgtcggcggcaagggcggcgtaggcaagaccacctgcagctccatcctttccgtcctcctcgcgggggtccgccagtccgtgctagtcatcttcaccgaccccgcgcacaacctcagcgatgccttccatcagcggttcaccaagtttgccactctcgtccgcggattcaccaacctctacgccatggaaattgacccgaaggtagaaaatgatgatttagccaatgaaggaatggagggattcctttcagaactgacaaatgcgattccagg

SEQ ID NO: 2654 - DNA, 405 bp, Zea mays
  Clone ID: LIB3136-016-Q1-K1-A1
gccggcctacgccatcgtgccgggcgggaagggcgtggctgggaacaatgtcggcagcgtcagggactggcaggccatgctcgagttcgcggggaagcacggcatcggggccgaggtcgaggtcatcaagatggactacgtcaacacggccatggagcggctcgagaagaacgacgtccgctaccgcttcgtcatcgacgtcgccggcagcctcggctctgccgcctatgcatggctgcaaaggtttcaatcagagcccagccgcaataatttgttagctaccgaatgaatgatggtctacgcttgttgatgagttggtgctttgtcgtggttttgtggatgtaataattcgatgtacaaataaaaaaaggggagacaaggtgcttcgtcccttggtttggtgac

SEQ ID NO: 2655 - DNA, 425 bp, Zea mays
  Clone ID: LIB3136-016-Q1-K1-A10
ctgaagggttacgagagtacatggccaagtttggacccctagacgattgtgtcgtcatgaaggagcggtcttctgggcgatctcgcgggtttggctatgtaacattcgcctcagctgacgatgcaaagaatgttcttgattgcgagcatgttcttgggagccgtacattagaagtgaaggtagctactccaaaggaagaaatgaaatcacaaggatcaaagaaagctacaaggatattcgttgctcgaattccgcaatcggtggatgagtcgatgtttcgtagacattttgaagcttttggggaaattcttgatctttacatgccaaaggaacatggttcaaaagggcatcgtggaattgggtttatcacgtttcagagtgcaaagtctgtggacaacatcatgcaagagtcacatgagcttgat

SEQ ID NO: 2656 - DNA, 441 bp, Zea mays
  Clone ID: LIB3136-016-Q1-K1-A11
aagaaacaatctggtggttcgaaatcgaagacagctgatgctgatattacggttgcaaaattggatattagagtgggccttatcaggaaagcagagaagcatccagatgctgattccctttacgtggaggagattgatgttggagaggacacaccaagaacagtggtcagtggcctcgtcaaattcatacctctcgaagaaatgcagaaccggaaagtttgcgtactctgcaatctgaaacctgtggcaatgcgtggtataaaatcacatgcaatggttttggctgcatcgaatgaggaccacacgaaggttgagttggtggagccacccgaatctgctgccgtgggcgagcgtgttacctttgctgggtactcgggggagcctgaggcttccctcagtggcaagagcaagacgtgggagaagctggcccgcgagctgcac

SEQ ID NO: 2657 - DNA, 435 bp, Zea mays
  Clone ID: LIB3136-016-Q1-K1-A12
cttcagcgccttcaaggaggagatggaggtcaagcggcaactcgagcaggtgcaggtggcgctcgagggcgccactgaagacatgaacctcatgggccggctcctcgatctgcatgttactggggtgttgaagtgtataagtagatcgtctatcttctcctaatagcttaaacgtttaggttgaactggttattgcgttcgctcaaacaagttggtcgtcatcttattagtatctgtgtcattctgtttggtagttgttgtgctgcactaaaaatttacatgatatttgttataggaagagttggaaacacatgatggcgtgagcaaagggaagtataccattgggcttgggcaggaaaagtatgacatttccgcacttgaagttgagggatgttaatttcgatgagccttgacagtgggtgaagtccccttctg

SEQ ID NO: 2658 - DNA, 334 bp, Zea mays
  Clone ID: LIB3136-016-Q1-K1-A2
cttttccctgctcctgtgggctgtggcgagcgcaaaccaccctcgcttcccaaaccctagctcctcgctctcccgcccgcgtggcctgccaggcaaccactcccggatcaactccgtacagcgtgcctccgcctcccggactccagcggcggcgggatgtggtctcactccaaggacttgctcgagatcgagcccctcgagctccgattcccattcgagacaaagaagcacatctcgtgctctatgcagttgacaaaccgaacagatgactacatcggctttaaggttaagacgacgagcccgaagaagtactgtgtccggcccaacagcggca

SEQ ID NO: 2659 - DNA, 378 bp, Zea mays
  Clone ID: LIB3136-016-Q1-K1-A3
gcggcggtggcggagcggaaggcgaaggagtagcaacagcaggcggcgccgagtagcggctcccgacctcgagcttgccaccatggctagaggattgaagaagcatttgaagaggctcaatgcgcccaagcattggatgctggacaagcttggcggagcttttgctcccaagccatcttctggacctcacaagtctagggagtgcctgccactgatcctcatcatcaggaacaggctcaagtatgctcttacataccgcgaggtcatttccatcctgatgcaacgccatgtactacttgatggcaaggtcaggacagacaagacctaccctgctgggttcatggatgtcatttccatccccaagaccaatgagaacta

SEQ ID NO: 2660 - DNA, 400 bp, Zea mays
  Clone ID: LIB3136-016-Q1-K1-A4
acgctccgccagagcttccatgaacataacgtgctgcgcgaaccagacgcagacggcgcagcgcaagtggtatggggggacgacctctccgccgtcaggttcagtgaaagagaaggtgaagccgatgctcgaccacgggggcgtcggcttcccgccgttccggatcgggggaggccgatgaggaggatgcggcggcggcagcagctcgtccggcgggttcatcctcttcgaggacgagctgctcctggattacctcaaggagttcgagaggaacctgcagaacgggccacggatgaccgtcagtggctacgacgacaggctggcgccacagtagattgctctctctctctatctcacacacactctctgtatgtggtttgaagagaacgtgtactacctc

SEQ ID NO: 2661 - DNA, 414 bp, Zea mays
  Clone ID: LIB3136-016-Q1-K1-A5
gtctgtcctgcaggaatttgatgtactaatggagtctaagggtggcaagaagtctagcagggggggttccatgatgtatgaagctccccttggctacagcattgaggacgttcgacctgccggaggcgcgaagaagttccagtctgctgcttactccaactgcgcaaagaagccatcctgatatcccttttggcttcctcgttctagtagtttaggatttcttttctgacacttcgattcttaccaatccccctggcctgctgctttcctgacaatcgaccagttccccagtcttgctccctgcagtcctccctcctccatctccagcgttgtgttctgactcacctgcaccaatggctgttctttctgctgctggtgctcccccggcctcagctatcgggtttgagggctatg

SEQ ID NO: 2662 - DNA, 386 bp, Zea mays
  Clone ID: LIB3136-016-Q1-K1-A6
ctttctcatttcagtcgccgccatggtgattccaccggtcatggcggctccgatccgagcacctggggcatgggcgggcgcgggttcctccccggcggcgcggcccttgcagcggcctctcctggtgggcacggcctgccccggcgacgcggtagcagccgtccctgcccctgcgcgggcgcggcggtcaagggcgagcaggaccgacccggctcgggcggcaccagccactgccgacgcgggggcacgaccttggcggctggagcagccctcggtgcgagtgcgcaaccctggcacgtgctacagcgggtgcgggcagcatacggcggcgcacacggtgcggtgggcgcggcccctgcctggctccccggcgatgcacggcgtgc

SEQ ID NO: 2663 - DNA, 441 bp, Zea mays
  Clone ID: LIB3136-016-Q1-K1-A7
atcaagttcacgctgccccacgtcaagtgctatgtgcaccagctgttgtcaggacttgagcattgtcacaaccggggagtgctacatcgcgacatcaaggggtctaacctgcttttggacaacaacggtgtgctgaagattgctgatttcggtctggcgtccttcttcgaccccaaccataaacagccaatgacgagtcgggtggtgacactctggtaccgcccaccagagctgctgctgggtgcgacagattatggagttggcgtcgacttgtggagcgcaggatgtatactagctgaattgctggctggaaagcccattatgccctgacggactgaggtggaacagctgcataaaatttttaagctatgtggctctccgacagaagaatattggaaaaaatcaaagttgcctcatgccaactatattaagccccaacag

SEQ ID NO: 2664 - DNA, 446 bp, Zea mays
  Clone ID: LIB3136-016-Q1-K1-A9
cactgggcagtgcaaaatggtctccatctatcaagaagcactgtggtgtacttcaagcacaatgatatggcttcaattgcaagcactttggaaaaacttactcgtggaaataaacgtgctgaaaagattagacgctacattattgtagaatctatttaccaggtgcagtgcttttgattgttttgtgttgatttgtgctgtcttttcttatatgtccttatgaaaatttggaaaataaaatgtccatttaacctgtgcaacctagacaattcatgaaacctctcttacagtcgtcatggtttgtgaacacagaattctagccaaattgccccattggatgagattgtcaggttgaaggagaaatatcgattccgtgtatcccttggacaatctggttttgacatgatgcaaccgatgtatcccttgaacaatctagttttgacatg

SEQ ID NO: 2665 - DNA, 460 bp, Zea mays
  Clone ID: LIB3136-016-Q1-K1-B1
cacttgaacagggtatgaagccttgtgacagtacacaacacccaatggtgattcccaagctggctgaagggaggccagctactggacaagactacatgaacaacaatcagctggagtatttggatacatcatcttcagcgacttcagtttgcctttcacaggctgatggatcgctgcaacaaagttttccaccttcatccttcaatcaacatcaaccgttgagagaagcagctccagatagtgagtttgaggttacacgatgcaggaaataactttctatttggggcaaatatcgatggccatatggagcctcttaacgaagacaatttgcttggaactgccttcgaagctgacaagtacatggaacacatgccaggaaatggcatctctaactacatttcatcaaaagattctcagcaagagttatcatctttaatgatctcacatacatttggcgggg

SEQ ID NO: 2666 - DNA, 416 bp, Zea mays
  Clone ID: LIB3136-016-Q1-K1-B10
atcgttcctgatcatgttactgttggagcactgatgaaaacatgtattttggcgggccaggctgatagagctcgtgaggtgtacaaaatgcttcaggagtataatataaagggtaccccagaagtttacacaatcgcattaagaagctgtagcttgactggtgatttagggtttgcactgaagatatatgaagatatgaacaggattggagtaaaacctgatgagatgtttttgagtgctctagttgatgtagctggccatgctaggagggcagatgctgcctttgaaataatgaaagatgcaagagcaaaaggtttactcgttggaacaattgcatacagttcgttaatgggggcttgctgtaatgcggacgactggaagaagcactgcagctatacgaggagatcaagtctatc

SEQ ID NO: 2667 - DNA, 412 bp, Zea mays
  Clone ID: LIB3136-016-Q1-K1-B11
gcggcgggagaaccgggagctgaagctggagatctcgcggatgcgggtgcggctgacggagctggagcgggagcaggggctgatgaagcagcaggggaggatgcgcggcggggacggcggcggcagcggcgggcggggcggcggcggcgagcacggccgcgccttcctcgcgtcgctgtccaggggcatcggccgcatcaccatgttcggcgggcccgcggcggccgacaggcggcgcaagaagagcggcggccggagctcccagtgctccgacggcaagacccgcaggcggcagaaggcgtctttcgcctacgactgaagcttcgctgctgatatcgacagtggaggcgcgcaggcggcgatcgtggatggatgcggtctgactctcagcggctggaggatcggtcggagc

SEQ ID NO: 2668 - DNA, 367 bp, Zea mays
  Clone ID: LIB3136-016-Q1-K1-B12
cggacgcgtgggcaaaggttgaaaaccaagagggtgttgtaaactttgatgagatcttgagggagactgatgcttttatggttgctagaggtgatctgggaatggagattccagttgagaagattttccttgcgcagaagatgatgatctacaagtgcaacattgctggcaaacctgttgttactgctacccagatgctcgagtcgatgatcaaatctcctcggccgacacgtgctgaggccactgatgttgcaaatgccgttcttgatggaaccgactgtgtcatgctcagcggcgagagtgccgctggagcctaccccgaggtggctgtgaagatcatggctcgtatctgcatcgaggcggaatc

SEQ ID NO: 2669 - DNA, 463 bp, Zea mays
  unsure (1)..(463): unsure at all n locations; Clone ID: LIB3136-016-Q1-K1-B2
cttgaattctattgtaagagaaaggaagcattgttgaagaatatcaagctggacttaaagaagcttgaaaacaaagttaggtttatccgctgtgttgttgataatgaaattatagttaacaacaggaaaagggcagatctatttttggagctccggcacaagaattttgaccctttcccaaagaaaaaaaagaaggctgaaccaactgctgtaggtgctatagaagaggaggaaaatgaagagtctcctgaaactgcagcaggagtggatcctagtgactatgagtatctcctctccatgtcaattggtaccttgactttggagaagatacaagagctcagtgctgagaaacaaaaattggtggacgatgttgtggaactgatgaacacatcgncaaaatcactttggttgaaagatcttgatgcttttgagaaagaactggatgtgcttgatcaaatggatc

SEQ ID NO: 2670 - DNA, 338 bp, Zea mays
  Clone ID: LIB3136-016-Q1-K1-B4
gactactcgagtgatctccgctcttatctcaaatactgcaaggaagttgtttttgctggaattacatcttcagatgaacagactcatctaatagagatcttttgggatatgtacaaagccagggaggtcatgatgcaatgcaaatgctcaagtcagagatgcaagatcatggatttcattatttgccacctaggaaaccaaggaaatcagatggttatcttcgttataggcggcggcggctaagtggtggctttatttttgttgcacatgctgattattacttgttgctacgtgcttttgcaaagcttgcagaaattgatattcgtatcatgcatatt

SEQ ID NO: 2671 - DNA, 426 bp, Zea mays
  Clone ID: LIB3136-016-Q1-K1-B5
caatcctcttcgccgcctggctcgcagtctgccggggattcagctgcattggtcggtaaatagcgacacaacctccaaggctgctgctcaatttttaagcaagaaatctggagtgcagtttgtttctcagacgaaaaagtgggtcataccaaccataactcggttgtaaggtgccaatattcgcaaggaaaggtgctttgccccccgcgcgcgcatactgttacgtctttattgtatgaatcgtatttaaaagtgaatgccaacagtcctggtagactacataagtttgaatttgatgttttttgtatggtgatctgtaaacccggtagtgcaatttttttgttcattttcctatagaaagcaaatgtcaaaattttgaccatggcagactcgggtatatgtgaatcttattgtcatgtaatattt

SEQ ID NO: 2672 - DNA, 458 bp, Zea mays
  Clone ID: LIB3136-016-Q1-K1-B6
gttggggatgggttccgctgcattaggatggtcaacaacatctacctgaactttgatgctttacatggagacaaggaccatggtggtgtgcgcgacgggacggcccttgtgctgtgggagtggtgcgagggagacaaccagcgctggaagattgttccctggtgaacaaggaaatgtgtgaccgagcccgcaccaaggaggagctcctgccgtaataagtgaagtgattggtactgaagtttctggaaataagaggctcttctgagatgcctgtttgtgtgagtatttgcgtttccattccgttttcatgataataaaacgcattgattattaatatatgtaatgtgatgctacactgagtggcagcgttggtatatatttgtaagaattaagaacccattgttgttggactaagcgtgacgagtgatgtactgatgtatgaacctttgcttgatgca

SEQ ID NO: 2673 - DNA, 447 bp, Zea mays
  Clone ID: LIB3136-016-Q1-K1-B7
gttagcaggcagagttaggaaggcagtagcagcgttagcatcattgttaggtctgttcgtttcggatctggtgatacattcgttttatttttggtgtggacggaaagctgggggaggttgacgagcagtgaagaaaacccataatgtcgtccggtggtttgggggaagtgtaacaaataataagtggttagagagagagaggtcttagctgatgcaagaagagcctgcatagcaagtgttggatgattttctttctgagatgaaaagcaaataagaggtcatttccctcccatgcgcccaatcagtggctggctttgcttgctttgggcgctaccagcacggacccctctctcctgttttgcaacttttcttttttacttggaaaagaagcttgccgtgggctccatgaataagggcgtttgcttttagcctagagtgtattatgaa

SEQ ID NO: 2674 - DNA, 145 bp, Zea mays
  Clone ID: LIB3136-016-Q1-K1-B8
cggacgcgtgggcggacgcgtgggcggacgcgtgggtgcgccaaacaaacacgaaccttttccggtctccttccatgcttgtggggagggttcacatggattgccacgtattttgttcctgcagcagatatgtttgatctgttgg

SEQ ID NO: 2675 - DNA, 448 bp, Zea mays
  Clone ID: LIB3136-016-Q1-K1-B9
ccggtcctaattccccgtcacccaccgtcgacaaaaacaaaatttctaatcaacttctttacaattcatattaaccaagctgctaaacttatctacaacatatcctacataaaatctatatacataccttttaacttacttcaagggcttctctttttaacttccaatttttttcccgtcttcccacctttcttttttttttttttcccctaatttcatttttttgccttcgttttaaacatcttaacttgaaaaaccttggttttccccactttttttccttttgagaaattcccctttttcccaatttgatttttattcaaaaggcccccccccttcttttttttccaaattttcccccttcttatttttaattgggactcccccttttctgtgcctttttccccgagtttttttttttttcccccaagttttccttttattttta

SEQ ID NO: 2676 - DNA, 364 bp, Zea mays
  Clone ID: LIB3136-016-Q1-K1-C1
tgccagggccgcttccgaggacacgtcggcctccggcggcgacgagctcatcgaagacctcaaggcaaagtgggacgccgttgaggacaagcccaccgtcctcctgtacggcggcggcgccgtcgtcgcgctatggttgacgtccgttgtcgtcggcgccatcaacgccgtgccgctgctccccaagatcctggagctcgttggcctcggctacaccggctggttcgtctaccgctacctcctcttcaagcaaagcaggaaagagctggtcgacgacattgagaccctcaagaaaaagattgctggaacggcggaataagcgctagctctcgtggaaagctttaaaaaaccaacgacgagaggg

SEQ ID NO: 2677 - DNA, 436 bp, Zea mays
  unsure (1)..(436): unsure at all n locations; Clone ID: LIB3136-016-Q1-K1-C10
gggtgttctggatgacgggcgactacaagtcccacccggacgacaagtacgaccccaacgccgtccccgtcgtcgccaacatcagctaccaggacgtggtggccacgggggtctacaaggaggcggcgcgcctccagggcatccagggcgcaccgttccggggcatctgcgtcgccaacgtcaccgccgacctgtccaagtccaggaagtacccatggaactgcgccgacatcgagggcgtgtcggccaacgtcagccccgcgccgtgcgacccgctacagggtgcgcacgacggcgcatgcccgttcccgaccgacacgctacccatcgaccaggtcacagtgcagcagtgcgcatacgacatcccggccaccaactagcagctcaatcaaggagtgtattcggatgtggatcagccgnctagtacaacttgtag

SEQ ID NO: 2678 - DNA, 412 bp, Zea mays
  Clone ID: LIB3136-016-Q1-K1-C11
ggccgccgcgaagcgcttctacgcggcgcagctcggccacagcgatcgggccgggatggacgagctggagatggacgaggaggtcaggcccgagttcccctgcccctactgctacgaggaccacgacgtcggatccctctgcgcgcacctggaggaggagcacccgttcgaaccccaagccgcggcctgccctgtctgctctgagatggttacgaaggatatggttaaccatattactacgcaacatggatatttattcaagaatcgccgccggctgcgcagattcatcattccaggcagccaggccctctctttgctgagccgagatctacgggaagcccacttgcaggtgctcctcggaggaggcggacagagatccagcgacaacagcagcagcagcgccacgaacatt

SEQ ID NO: 2679 - DNA, 390 bp, Zea mays
  Clone ID: LIB3136-016-Q1-K1-C12
cgatgacccctgaaaactttctccctacagatatccctgctacatgggcagcgatggagaagttatacgactctggcaaagctcgtgcaatcggcgtgagtaacttctcttgtaagaagctgcatgatttgcttgccgttgcacgagtgcctccagcagtcaaccaggttgagtgtcatccggtttggcagcaagacaagctccggaagctatgccaatccaatggtgttcatctttctgcattctcgcctttaggctcacctggatctccttggatcaatgggccaagtgtcctcaagaaccccattgtggtctctgttgcagacaagttgcagaaaacgcctgcccaggtcgctctacgctggggaatccaaatgggccatagtgtac

SEQ ID NO: 2680 - DNA, 362 bp, Zea mays
  Clone ID: LIB3136-016-Q1-K1-C2
cggaactggacaccctgagcgaggagtcctacaaggacagcactttgatcatgcagctccttcgtgataacttgaccctatggacttctgacatctcggaggaccctgcggaagagatcagggaggcgcccaagcacgactcgagcgaggggcagtaaagccggctttacgtgcctagaagctagtacctagtgtttgctgctgtctaatgacactatgcaatgtgatctggaccctggtttcttgggtgcgacgcttgtagcagccgtgttatgattatttgtcgggaaaatttgggggctccccatatgagatgctgccgggcaagacctcggcatcccacctcgtttcaagcgggggac

SEQ ID NO: 2681 - DNA, 400 bp, Zea mays
  Clone ID: LIB3136-016-Q1-K1-C3
ggttcgctgagaacctaccagacgctagtcctggtcctcacattcttcgcatacgcatgcttccacatgactcggaagatcacgagcatcgtcaagagcgcgctggacccccagacgaagatggggttctcccactggggacggctgcacctgcacacgagcgaggctccggctcttaacactggctggctgccgttcaacaccgctgacggctcatcgttgctcggcgagatagacgtcgcgttcctcgctgcgtattccatcgggatgttcttcgccggacacatcggggaccgcatagatctaaggatctttctgacgatcggcatggtcgggactgccgtgttcacggctctcttcggcgctggatactggctgaacgtccacagcttttactatt

SEQ ID NO: 2682 - DNA, 451 bp, Zea mays
  Clone ID: LIB3136-016-Q1-K1-C4
ctcgcctctacgagaacgtctctgtcagcgacaacgatgtccgaaacatagttctatcttatcttatgcacaactgttttaaagagacggcagaggcattcctatctagcaccgggttgaatttacctgtcgactatagtgtggatgtggataagcgtaaaggtatttatttgcagcaatttttaattttgtgctagaagggaatgcccttaaagccatagagctgacagaagaaatggcacctaacttgctagagaatgatatggatctacattttgatcttcttagtctccacttcattgagctagttcgctccaaaaaattcacagaagctcttgactttggccagaaaaaattgacatcatttcagaaagttaccaagtatattgagaaactagaggactttatggccctcctggcttatgaagagcctgagaagtcacctatgttt

SEQ ID NO: 2683 - DNA, 455 bp, Zea mays
  Clone ID: LIB3136-016-Q1-K1-C5
attcgcttctccgtcaacttcacttcctcgtcgacgcctccgtcccaccaaccatgccggcggccatggcggctgcggcggcgcagaggctcctcgcggcgagcacgaaaatcatcggcgttgggcgcaactacatagcccacgccaaggagctcggcaatccggtccccaaggagcccgtcctgttcctgaagccgacctcgtcgtttctccacgctggtgtggccaccgccgccgtcgagatcccggagccgctcgagtcgctacaccacgaggtcgagctcgccgtcgtcatctcccggcgcgggcgcgacgttcccgaggcgtccgccatggactttgttggaggttatgcacttgctttggacatgacagcaagggaccttcagtctgttgctaagtctgcaggccttccatggactttggctaaaggacaagacaccttcaccccaatt

SEQ ID NO: 2684 - DNA, 444 bp, Zea mays
  unsure (1)..(444): unsure at all n locations; Clone ID: LIB3136-016-Q1-K1-C6
gtcctgtgtacaatggcaaagccagtggctcaatgagccccaacggtcagccagaggcaggtgccaaatttgttgaaccttctgggaaacctgagcctgcatctccagtgcgctgcagcaaaggcagagatgatgatgaggaaggtatcatagacgaggatggagagattggtgaggatgatccgcgtgcaaatgcagctgtgcagaatggtaataactgacggagagtggcctgcatcttctgtgacaaccaagacttatctgttgtgcaaaatgcagtcattcccatctgcaagtcctgaatacggaaatgcatttgtgtgccattaaatatctcgtagaacatgtgatactgatgcctctgccatcgatgaaccanaactgttgatgcatgtcatgtcatgttgttaaacttaatgaccattgtgtgttctggtgttttac

SEQ ID NO: 2685 - DNA, 379 bp, Zea mays
  Clone ID: LIB3136-016-Q1-K1-C7
gttctgtgtacaatggcaaagccagtggctcaatgagccccaacggtcagccaaaggcaggggcgggaatttgttgaaccttctgggaaacctgatcctgcatctccagtgcgctgtagcaaaggcagccatgatgatgacgaaggtatgagagacgaggatggcgagatcggagaggatgatccgcgtgcaaaagcagctttgcaaaatgctcataactgacagagagcggcccgcatcttctgtgacaaccaagacttatctgttgtgcaaaatgcagagattcccatatgcaaatcccgtatacggaaatgcatttctgtgccagtaaatatctggtagaatatgagatactgatgcccctgtcatccatgaacca

SEQ ID NO: 2686 - DNA, 428 bp, Zea mays
  Clone ID: LIB3136-016-Q1-K1-C8
caacgatgccccggctcttaagaaggctgacatcggtattgctgttgcggatgctactgacgctgcgaggagtgcttccgatattgtccttactgagccaggtcttagcgtcattatcagcgccgtcctcaccagcagatgcatcttccagaggatgaagaactacaccatctatgcagtttccatcacaatccgtatagtgctcggatttatgctcattgcgttgatctggcaatacgatttctctcccttcatggttcttatcattgccattctcaatgacggtactatcatgaccatctctaaggacagagttaagccatctccgttgcccgacagttggaagctgaaagagatctttgctacgggcatcgtgcttggaagctaccttgctctgatgactgtcattttcttctgggctatgcaca

SEQ ID NO: 2687 - DNA, 447 bp, Zea mays
  Clone ID: LIB3136-016-Q1-K1-C9
gtttgtttgcgcgaaaaaggttaggaatcctcttgtgtcgtggccgtcggccgtcgctgcgctgcgtcgttccagatttggggaaggaatccggcaccgagattcgagtcgaaaaggacatcatttgctagatggcgcgtaccaagcagaccgctcgcaagtccactggaggaaaggctcctaggaagcaactcgctacaaaggcagcccggaagtctgcacccacaactggaggagtgaagaagcctcaccgttaccgcccagggactgttgctcttcgtgagatccgcaagtaccagaagagcactgagttgctgattaggaagctgccgttccagaggcttgtcagggagattgctcaggatttcaagacggatctgcgcttccagagccatgccgtgcttgctttgcaggaggcagcagaggcctacctggttggtctcttcg

SEQ ID NO: 2688 - DNA, 216 bp, Zea mays
  Clone ID: LIB3136-016-Q1-K1-D1
ggagtacatcgagctggcgcgcaagatcggcaagttcgacgaggacaggctggcgctacagatgcgtctgctgggcaaatccggcatctgggaccagtcgtacatgccgcgctgtgtgtttgagcccaacgcccgctgcgccaccatgaatgagggtcgcgccgaggcgttcacagacatgtttgcggtgctggacgagctgttctacaagagccg

SEQ ID NO: 2689 - DNA, 384 bp, Zea mays
  Clone ID: LIB3136-016-Q1-K1-D10
ggcgtgcggctcctcgcggacagctccagactccagagccgcctcttcgccctctcgccatcggcaggctacggtggctgcttccccgagcctgcaggtagaccaccttgtgttgattcctcgagtcttcacctggtgcttccgtttgcagcttcatttttaactaagatgtcacaagccaaggaagtgaggtacactgcacggtctattacacctcctgctgatagaaatggcacttcaaggtcgcctcctccaaagagacgcagcccttcaaggtcacctccaccaaagagtgcttcacggtccccacgtccaaggagtccaaagagacgcagcacttcaaggtctcctcctaggagacgtggtagatcaaggtcaagggat

SEQ ID NO: 2690 - DNA, 104 bp, Zea mays
  Clone ID: LIB3136-016-Q1-K1-D11
cgttgcgtggcttggcgtgatgatgtcataaataaagagggtgggtgtgcttgcagtattcatggatggccatggatctgagcacatgacgttggatgctttct

SEQ ID NO: 2691 - DNA, 443 bp, Zea mays
  unsure (1)..(443): unsure at all n locations; Clone ID: LIB3136-016-Q1-K1-D12
ctcggcacgcaggctagcagcacagcagcagccagagccatcccctctcctcgctacgcttcgcttcctcggcgccgattcctcctccaccctcgtccgtccccttccggcgcgcgagctcgcccgagatggcgaacgcgagatcgggtgtcgctgtgaacgatgagtgcatgctgaagtttggcgagctgcagtcgaagaggctgcaccgcttcataactttcaagatggacgacacgttcaaggagatagttgtggaccaggtcggggatcgcgctaccagctacgatgacttcacaaacagcctccctgagaatgactgccgatacgcgatctatgatttcgactctgttactgcagaggatgtccagaagagcaggatcttctatatcctatggtccccatcctccgncaaggtgaagagcaagatgctntacgcaagc

SEQ ID NO: 2692 - DNA, 453 bp, Zea mays
  unsure (1)..(453): unsure at all n locations; Clone ID: LIB3136-016-Q1-K1-D2
ctccaacgccacagcttgcgcccgcaatggcactcgtctccgcctcctcgtcctccaccaccgccgtcacggcgctccccaggaatgggcagcgggcgtcgtcctccttcctcggcggcaagacgctgctgagacaggccgaggcggcccggccgtcgttcgccgtgcgcgccgcggcggaccccaacaggccgatctggttccccggcagcacccctccgccgtggctcgacggcagccttcccggcgacttcggctttgatccctggggcctcggatctgacccggagagcctgcggtggaacgtgcangcggagctggtgcactgccggtgggcgatgctcggcggcgggggcatcttcatcccggaggtcctgaccaagatcggcgtcctcaacacgcccttctggtacaccgccggcgagcagcagtacttnaccgacaccaccaccc

SEQ ID NO: 2693 - DNA, 391 bp, Zea mays
  unsure (1)..(391): unsure at all n locations; Clone ID: LIB3136-016-Q1-K1-D3
gccagctgctcgctgaaacgccgcggatgaaacagatgtccgtccgtcggtttgcgtgctaggctactgtgccgcttgacagaagcggccactcacctctctctctctctctctccccgcacacgttgctgtcggcagcctcaccaatctcggcgccagactgggaccgcgaagggactggtggtcgccggttcctcccgctactccggctgcttttcctcctctctccgncgccttccccttcgggctgcccatatttcattcagtgccaacaagtgccaagtgctcgtgtccggatgcgccagcgccgcctggtcaacagatttttggcctgcgctgtcactccaccacgctgcttgtactgaaaacgctgcttgtactgaaagctttt

SEQ ID NO: 2694 - DNA, 421 bp, Zea mays
  Clone ID: LIB3136-016-Q1-K1-D4
caagaatgatacaggtttcttcttcagaggccagcgtatctgggaagcagtcatggccgaacttctgtctaaggggctagccagagcgaaacaggcttttttgactggatgctcggctggtggcctttctacatacattcattgtgatgatttccgggcacttctaccaaacacacctactgtcaagtgcctcgcggatggtggattctttcttgatgtagaagacatttctggaagaaggtatatgcggggcttttataacgatgttgctcggctgcaggatgtgcgcaaaatattccctcattgcagctcagatatggaaccggggcagtgcttcttcccacaagaagttgcaaaaagcatcaccaccccgatgtttatactcaatccagcatatgatgtttggcaagtagagcatgtg

SEQ ID NO: 2695 - DNA, 386 bp, Zea mays
  Clone ID: LIB3136-016-Q1-K1-D5
ccgtgccaatctcatatcttcatcacaatggataagcattccataccctttacaatggggtgcacgaacattcagtgcagaccatgcatttggtatgatggcagcggtgatggtttctttaatagagaccacgggagcattcaaagctgctgcacgattggctagtgcgacacccccaccagcatatgtcctgagcagaggcattgggtggcagggcattggcaccctactagatggcctgtttggcactgggactggttctactgtttctgttgagaacgttggtctcctaggatcaacgagggttggtagcaaaaagagtgatacaaatttctgctgggttcatgatcttcttctccattcttggaaaatttggagcacttttt

SEQ ID NO: 2696 - DNA, 461 bp, Zea mays
  Clone ID: LIB3136-016-Q1-K1-D6
ggaggcgccgctccggtggctcaacggccgtgcgccgcgctccgttgtgtatgtcaacttcgggagcatcacggtgatgtccaacgagcagctggtcgagttcgcgtgggggctggccaacaccggctactacttcctatggaacgtacgcccggacctcgtcaagagtggcgactccgccgggctgccgccagagttctcagctgcgacagagggacgaagcatgctgtctacgtggtgcccgcaggcagctgtgctggagcatgatgccgtgggggtgttcctgacgcactccgggtggaactccacgctggagagtatttgcggcggcgttcccatgctgtgctggcccttcttcgccgagcagcagaccaactgccgatacaagtgcaccgagtggggcatcggaaaagagatcggtgacgatgtacagcggggcgaggtagagtcgctcatacggg

SEQ ID NO: 2697 - DNA, 392 bp, Zea mays
  Clone ID: LIB3136-016-Q1-K1-D7
tgggtatttagttcgcccatgcgaaggtggaggatcaattgtgcatatagtggaccatctagatctcgaagcatggagtgttcctgaagtgcttcgaccactgtatgagtcttctagagttgttgctcagaaaatgactactgtggcactgcgccaccttagacaaattgctcaagaaacaagtggagaagtagtgtacgccttgggaaggcaacctgcagtcctacggacctttagtcaaagactaagcagggggtttaatgatgccattagcggtttcaatgatgatggctggtctgtaatggggggagatggcattgaagacgttgttattgcttgcaactcaaccaagaaaattaggaataccagcaatgctgggattacatttggag

SEQ ID NO: 2698 - DNA, 451 bp, Zea mays
  Clone ID: LIB3136-016-Q1-K1-D8
cgcagagataggcgtcttcgtactcgcctacctccgcggctcaaacctttcccccttctcccaatgccttccgccggccgccgctccacccgtacgacgacaccatgagggagtgcatttcgatccacatcggccaggccggtatccaggtcggaaacgcgtgctgggagctgtactgccttgagcatggcattcaggctgacggtcagatgcccggtgacaagaccattgggggaggtgatgatgctttcaacaccttcttcagtgagactggtgctgggaagcacgtgccccgtgctgtttttgttgaccttgaacccactgtcatcgatgaggtgagaactggcacctaccgccagctcttccaccctgagcagctcatcagtgggaaggaggatgcagccaacaactttgcccgtggtcactacaccattggcaaggagattggtga

SEQ ID NO: 2699 - DNA, 442 bp, Zea mays
  Clone ID: LIB3136-016-Q1-K1-D9
gtgccaaaggagcagcaggataaggttgtcaaatttgactttcatgggcagccagcagaaatcaagcatggtagtgttgttatagcagcaataactagctgcacaaacacctcaaatcctagtgttatgcttggtgctggtcttgtagctaagaaagcttgcgagttgggtcttgaggttaaaccatgggtgaagacaagccttgcccctggatcaggagttgtcacaaagtacttgcttcagagtggtcttcaagaatacctcaaccagcaaggattccatatcgttggctatggctgtaccacttgcattggaaactctggtgatctcgatgaatccgtatcaactgccattacagaaaatgatgttgttgctgctgctgttttgtcgggtaaccgtaacttcgagggtcgtgtgcaccctttaactcgggctaactatc

SEQ ID NO: 2700 - DNA, 268 bp, Zea mays
  Clone ID: LIB3136-016-Q1-K1-E1
gccccacgtgatccgagccatctccgatggagtcgaacaactgatcgccgagggggcaaacgatgtgatcgtgcccagagtgatgacatcagggtgcttttcggtctacctgaccatgtacgctgaccccaaggaagggcatggctcacgcacctgttgcctcaagcggtttaacactttgtcttgggtgcacaatgcgatgctgaagcgcgcgctcttgaagctcccagcgaagcaacctggggcgaggatcatctatggcgattac

SEQ ID NO: 2701 - DNA, 431 bp, Zea mays
  Clone ID: LIB3136-016-Q1-K1-E10
ggccgtgtgggaaagtcaagaactgccagcgtggaatctcagcagctgtgtccggaacagctcagaatggcaggcagggcccaggtgtcaccatgggtctctggtctagacactgtagagtgtatggcagagagcgtctgtcgtctgtgcgagatgcctcgatctggaccggagcagtgcttagaccaagggcgtgcctccctcctgtctccccttctcttctctcgtctcgtttgcgttgaatgccattcggggcatggttggtgtatcagagatgacagatggtcggttgctgaacaagaatttattgctgcttcatactaataacaataatactagttaagtcgtgcatctctacggtttctatatattatatacggtttatttgtacatcaatgatcaatatgagttgcagtggttagtgtaagaat

SEQ ID NO: 2702 - DNA, 380 bp, Zea mays
  Clone ID: LIB3136-016-Q1-K1-E11
gtttcggtgagagtgcaaggacggcgagctgacgcctgatgagctgtagcgcctgatgacggacgaggccaaccctaggcagatcaaggtgccggactggttgctcaacaggaagaaggattacaaggacggaaggttctcgcaggtcgtgtgcaacgcccttgatatgaagctcagggacgaccttgagaggctcaagaagatcaggaaccaccgtggtctgcgtcactactggggcctgcgcgtccgtggccagcacaccaagactactggtaggcgtggaaagaccgttggtgtctccaagaagcgatgagctctatatcaccctgagaaatcttggccgcactaccgtgttggattgtgttcaaacagacctgatg

SEQ ID NO: 2703 - DNA, 417 bp, Zea mays
  Clone ID: LIB3136-016-Q1-K1-E12
cggacgcgtgggtagggatgggacagaaggacgcatatgttggcgatgaggcacagtccgggagaggtattcttacgctcaagtacccgattgagcacggtattgtgagcaactgggatgacatggagaaaatctggcatcatactttctacaacgagcttcgtgttgccccagaggagcaccctgtgttgctcaccgaggctcctttgaacccaaaggccaacagggagaagatgacccaaattatgtttgagactttcaatgttcctgccatgtatgttgcaatccaagcggtgctctcactctatgctagtgggcgtactactggtattgtacttgactctggtgatggtgtgagccacactgtgcccatttacgaaggatatgcccttcctcatgccattcttcgtttggatc

SEQ ID NO: 2704 - DNA, 410 bp, Zea mays
  Clone ID: LIB3136-016-Q1-K1-E2
cgacgatattgcatcagatgactatagcattgttacaattacacttggtgacaaaagaataggaattcggactattgtgctggaagagaaagcaacagcttgcaacatgctgtgctgttatgctgatgagcttaaagagggtttcttaccatggattgatcaggttgccccaacgttggttcctctgctgaagatttacttccatgaggaagtcatgagagctgctgttgcggccatgccggaacttctacgctcagcaaaattggctgttgagaaagggcaggctcaaagacgtgatgagtcttatgtcaaacagttggctgactacataattgcagcacttgttgaagcactggacaacgagccaaaaacagaaatgtgctcatgcatggtggattctttaaacgagt

SEQ ID NO: 2705 - DNA, 424 bp, Zea mays
  Clone ID: LIB3136-016-Q1-K1-E3
tcgagccaacacaaaaagagcaagtggccataggtgaaactattatgaatttactcctgaagcttgacgcaatccacggcttgcatccaagtgtaagggaagctaggaagtctgttgctcgagaactgatttgcttgcaggagaagcttgatactttatgcaaagcagcatctggagacttgaatcacacagatagtaatgatgatgaatctgaggggaccaagaacattatccaaactgaagctcctactgtaataactgaagcttctgatagacagaagagaactattgaactgggtaaggtacaagaaccatgttcagtggactccatggagccatgcaacacagttccatctggagtttcctgggaagtgaggccagatgtagacgctagcgaggagaagaatgaaaaacaagagtcatg

SEQ ID NO: 2706 - DNA, 457 bp, Zea mays
  Clone ID: LIB3136-016-Q1-K1-E4
atttcctctggcggcatggctatgaatatgctatttccaatcactatgatcggcattgtgtttgggaggaagtagcacaaaataaaaagctgaacaagttcaaccatacaataattgaccagcaatttgagttttaccaagcagacggactgacaaggttcaacccgtcggatcccaacaagcttctaccaagctatgtccccgaaggctcttttatcgtgagagaacacacaccaatgtccaacttattctcttgcctgtggtacaatgaggttgatcgtttcacgcctcgtgaccagctcagctttgcatatacgtacctaaaactaagaaggataaaccctgacagaccgttccgactcaatatgtttaaggattgtgagaagcgatcgatagcgaagctattccatcatcgatcagaagagagtcacagtggtgcacaactaacaagatgaca

SEQ ID NO: 2707 - DNA, 240 bp, Zea mays
  unsure (1)..(240): unsure at all n locations; Clone ID: LIB3136-016-Q1-K1-E5
attcaactgatggtgctttctgctttcggctgcgaggaacttttcagattctgaactaaaacccactagaatcagtgccagcagtcacttggaactggttctcgtttgtgtactagtctagagaaacgctaaaaaacaggtttctcttgattctagttctaattttaaggatacagtgagcttgctacatgaagttattttgatttattagagaaaatgttttgttctcagggcnnanna

SEQ ID NO: 2708 - DNA, 395 bp, Zea mays
  Clone ID: LIB3136-016-Q1-K1-E6
gccgagagctagctacctagcgtgcgatggcgatgtccgcttccaagacgatggcggtcgccgcgctgctagccctggtcctggccgcgtcgaccgcggaggcgaggaacatcaagacgacgacgacgacgacggagaagaaggacgacgcggtggtgcagccgcagaccttcccgcccttcgaccgcctcggcggcggcgcgtccccggcgtccggttgcctccccggcacctcgtcgggcggcagcagcattccagcgttcagcatgccaggcagcggcagcagcctccccggcgggtcgttcttgcccggcagcggcagcatcggcagcatgcccctcttcagcggcggctccccggccttcagcggcttcggcggcatgcccgggtccccc

SEQ ID NO: 2709 - DNA, 285 bp, Zea mays
  Clone ID: LIB3136-016-Q1-K1-E8
cttctgctccccctacctatcaggttctttttcatgacgctctccagactattgtttcgggggtgagcgtatccatattgcagcgtcggatcatgaataccgttgcttcattggcagccatttctgggccacggacgacaactacctccacaacgtcttcagcacctaccgcaaagtccttgactacaagattatcctcgatcgctatacacacaggtgccaccgctctcccttcgtcacctttttcactgaggaggcgatcaagaacgccatcgatggcatcaa

SEQ ID NO: 2710 - DNA, 390 bp, Zea mays
  Clone ID: LIB3136-016-Q1-K1-E9
gtggcgcagtgcctcggcgccatctgcggcgtcggcctcgtcaaggcgttccagagcgcctacttcgacaggtacggcggcggcgccaactcgctcgcctccggctactcccgcggcaccggcctcggcgccgagatcatcggcaccttcgtgctcgtctacaccgtcttctccgccaccgaccccaagcgcaacgcccgcgactcccacgtcccggttctggctcccctccccatcggcttcgccgtgttcatggtgcacctggccaccatccccgtcaccggcaccggcatcaacccggccaggagcctgggcgccgccgtcatctacaacaaggacaagccctgggacgaccactggatcttctgggtgggccccctcgtgggcgct

SEQ ID NO: 2711 - DNA, 288 bp, Zea mays
  Clone ID: LIB3136-016-Q1-K1-F1
ctcttggagtcatgtaggatctgacgcctgttcaccacgtgcctttcttcctccttggttcttcacagcgggtcctgccggatcacagcttactggtgaccgcacctccgttcctctctcctgagtcttctctcctcaccaagacaacagtcgccactgtccactgtccccacccgactgcctgcataaaaaaaaaaccgaggttcaacaaacagccactgaaatcttcatgcccatccttacttcctacccacacaccatatctctttcacatgaggatttctttcc

SEQ ID NO: 2712 - DNA, 422 bp, Zea mays
  unsure (1)..(422): unsure at all n locations; Clone ID: LIB3136-016-Q1-K1-F10
ctccggcgccgccgcacagtccccgtcgtccgcgcccaacaaggagcccccgcagctgtcccccgccgaccggttcgagcagcagcgcaagaaggccaagctcatctccatgctcgacgaggtggaccggcggtacaaccactactgcgaccagatgcagatggtggtgaacttcttcgactcggtgatggggttcggcgcggcgacgccgtacacggcgctggcgcagaaggcaatgtcgcggcacttccggtgcctcaaggacgccatcgcggcgcagctgcgggccacgtgcgagctgctgggcgagaaggacgccggcaccagctcggggctcaccaagggcgagacgccgcggctgcgcgccatcgaccagagcctncgtcagcagcgcgccttccaccacatggtgatgatggagc

SEQ ID NO: 2713 - DNA, 407 bp, Zea mays
  Clone ID: LIB3136-016-Q1-K1-F11
gtggactgaaatatctcaatctcaagtggttcttgtgaaatcaaccatgtctatttggtggaccattcgcgtgtgtcttatggtttacactgtagttaactcgtgatgtctttcctctggcatacataaatggtgccgcagaacttccgatgttctaggttgtatgcttgcttcacatggggattgctgatctggagatatgccttgcagccgggtctgcctctatttgatcttttagctctgcttgaagctgaattcccgtcgaccggagatactgattctgctgaagatctacagcttgctctcatacgacgccctgttggcatgcattgtgttttctgatgtgctgacaaacatgctcgggtaaggaaaagatgttttgtctgccggagattctgatcatctgg

SEQ ID NO: 2714 - DNA, 421 bp, Zea mays
  Clone ID: LIB3136-016-Q1-K1-F12
ggctaaggtgatcaaggatcgaaacaccggacagagcaaaggatatggatttgtcaagggttcagatgcgtcagaggccaatgcagcgattgctgcaatgaacggtcaccatcttgaaggtagagttattgcggttagagttgctggaaagccaccacagccggcaccagcagtgtcagcacccccatcgtatcctcctacggatcctacttcaggtggatattcctcccaatcctacatgggggtaccaccaccaccttctccagggagtgacgctccagttccttggggacagacaccaccgtatgcttcatatcctgcgccaccaccaggctctagcatgtacaatcctgcaccacctgcacctggccatgctgccccacctccatatggcgtgcagcatccaccacccccagcagct

SEQ ID NO: 2715 - DNA, 427 bp, Zea mays
  unsure (1)..(427): unsure at all n locations; Clone ID: LIB3136-016-Q1-K1-F2
gttggcttctcctccccctccggttcgggttctgtgttcgtgaggttctccggggttcggtttcgtgggtgagcggatcgagatggcggcgtcggatgttgagtaccgctgcttcgtcggcggcctcgcctgggccacggacgaccactccctccacaacgccttcagcacctacggcgaggtcctcgagtccaagattatcctcgatcgggagacgcagaggtcccgcggcttcggcttcgtcaccttctccacggaggaggcgatgcggaacgccatcgagggcatgaacggcaaggagctggacggccgcaacatcaccgtcaacgaggcccantcccgcggcggccgtggaggcggcggccgcggctaccgtggtggccgtggaggcggcggctacagcggtggcgggcgccgtgatggcggc

SEQ ID NO: 2716 - DNA, 365 bp, Zea mays
  Clone ID: LIB3136-016-Q1-K1-F3
cagagggctgaacagtaaaatgctggagaaaagactgcacggatgcctgctcctgctcgtcttccttctggcagacgtatcagttcaccgccacttatttgccagtaaagatgtacgtggagcctgcatgagggcagccgtgctgaaactgccgtcgatctgggtccagactcggaggacggcagcaagaggaggtcgctggccaccgccatgttctgtgtggcgaaacagggcgcggacgcggcggcgctgcaggcagggctcaactgggcgtgcgggcagggcctaacgaactgtgcgcccattcagcccggcgggccgtgctacaagcagaacgacctggaggcgctagccgtctacgccta

SEQ ID NO: 2717 - DNA, 338 bp, Zea mays
  Clone ID: LIB3136-016-Q1-K1-F4
cgtcaactgcacttgtgttctactagtgacctcctattcatcgacggcgacgctttaccttccaggcaggggtggatgatgagtaccacgtcaccatactaatcgctgtgataagggagtacatcactcagcggtcctccaatctgtcgaccgactgaaggttttttatatgggcagaactgactactatggaggagatttctcctcactcaacattaatcagatttttactatgttcagagtggaacacaagccttctttacatctaagcgcaagcagagacaacaccgtggacatagggccaaaggttatcatagcgaatgggacattgattcaaa

SEQ ID NO: 2718 - DNA, 444 bp, Zea mays
  unsure (1)..(444): unsure at all n locations; Clone ID: LIB3136-016-Q1-K1-F5
cgaatatacccatcccattccccacaaggctccgtcccttcggcggcggcggcgatgtctctcccccctggcccggcggacagtggcaccggcaccggagacgactggttcctcgactgcggcatcctcgacgacctgcccgccgcggcctgcggagccttcccgtgggacgcgtccccgtcgtcttccaaccccagtgtggaagtgggcagctatgtaaacgccaatgatgcattcaaggagcccaatgatgtcttcaaggagcctggcagcagtaaacgtttacggtcaggatccagtgatatgccaacatctaaagctngcagggaaagaatgaggaggaacaagctgaatgacaggtttcttgaactggggtctgcattagaaccttggaagccagtgaaagctgacaaagctgccatcctaagcgatgctactcgcatg

SEQ ID NO: 2719 - DNA, 359 bp, Zea mays
  Clone ID: LIB3136-016-Q1-K1-F6
cggacgcgtgggcgcagctatggccacctgaggcatgcatggtggcgacgtgcatccaaggcgtgtgcgggggttctcccacggagcgcgacgacaatggatctgagaggtgcgcacacgacggtggatcccagaaacgtgcgcgcgaggttggctctttgaaggcgcacgccctgaagtggcacacgttggcatctcacctcccgcgacgacgccgacttttcctatgcgcgggctacgacgacagccttctctaggcgcaagcgatggcggatcaacaaccctgtttttatgatattttgtatacatattgatgtcaacttcaatagatttttatgatataatgtcagttcatagtc

SEQ ID NO: 2720 - DNA, 234 bp, Zea mays
  Clone ID: LIB3136-016-Q1-K1-F7
ctgtgaaagtgttgcagaagccatggaatatcctggacaccaacgtcgaccaacccgtggcagtcgagatacagcatcggatgacagacagccatcagtatcacctgatgatttgcttgtgattgctcagcagtgcagtagtgatcttctgcaaggggagttggagaggactcgattgaacatagcctgtttcatggagtcgaccctttcaccaacagctgcgccagcaggccc

SEQ ID NO: 2721 - DNA, 246 bp, Zea mays
  Clone ID: LIB3136-016-Q1-K1-F8
tcgcggacgcatgggctcagctatggccacctgaggtatgcatggtggcgacgtgcatccaaggcgtgtgcgggggttcttccacggagcgccaccactatggatcttagaggtgcgcacactactgtggatcccataaacgtgcgctcgatgttggctctttgaatgcacacgcccttaattggcacacttttgcatgttacctaccgctacgacgccaactttttctatgcgcgggctacgacg

SEQ ID NO: 2722 - DNA, 405 bp, Zea mays
  Clone ID: LIB3136-016-Q1-K1-F9
cgtcctccacctcctccgtcccccaccgcgcctccgctccccagatcccccaatccctaaccctagcgccacccacggcgtgctccgcctcgccctcctcctcttcctcctcctcctccgcgtccggcatgcgggacgcgggggaggacgacgactccgactcgccgccgtcgcagatgtcggaggacgaccccggcggcggcgccggggacaggtgggagccggatctgaggggcgggggcggcaggcgggcgccgccggaccaggtgctggggaacgtgctcgagaccgtgctccagttcctcaccgccgcgcgcgaccgcaacgccgcctcgctcgtctgccgctcctggtaccacgccgaggcgcagacccgccgcgagctcttcatcggcaactgctacg

SEQ ID NO: 2723 - DNA, 342 bp, Zea mays
  Clone ID: LIB3136-016-Q1-K1-G1
cttgtgacccttcctcagccgcgtcgcgtcgcatcctacgatccaaagctctctctggtcgcaggtcgcgggcatggcgaagaactacccgaccgtgagcgccgagtacagcgaggctgtggacaaggccaggcgcaagctccgagccctcatcgccgagaagagctgcgccccgctcatgctccgcctcgcgtggcactccgcggggacgttcgacgtgtcgtcgaggaccggcggtccattcggcacgatgaagcatcagtcggaattgggtcacggcgctaacgcggggctggacatcgcggtgcggctgctcgagcccatcaaggaggaagttccaat

SEQ ID NO: 2724 - DNA, 430 bp, Zea mays
  Clone ID: LIB3136-016-Q1-K1-G10
ctggaattatatcgaaaactatttcaaagaagggtatgcttgaagtgtataactctctgactgaagaaggaaagaagcagtttattgaggcctatagtgcagcatattacccatgcatggacatattgtatgagtgctatgaagacgtctcttctggaagtgagattagaagtgtggtgttggctgggaggagattttatgagaaggaagggctccctgctttccctatgggaaaaattgatcaaacacgtatgtggaaggtgggtgaaagggtccgttcaaccaggccacaaggtgatcttggcccactgcatcccttcactgctggagtgtatgttgcactaatgatggctcagattgaggtccttaggaagaagggccactcttactcagagataattaacgagagcctgatcgagtctgtggactc

SEQ ID NO: 2725 - DNA, 431 bp, Zea mays
  Clone ID: LIB3136-016-Q1-K1-G12
gcgcatcgcatccaccgccgagcttgctttctttcttttttctgggagaagaggaagaagaggggaggcgcgacaaaaagggcgccgagccccgccccgccccgtcccgcatcggccccgacgccggcatctctccctcgctctccttctcccgatctgatccgaagcgcggcgtcgacgacgacgacctaagggcacgatgcattcgaccaacctgctgctggaggagcccatccggatggcctccatcctggagccatccaagaccagcttcttcccggcgatgaccaacatcgtcggcacgctcggtcccaagtcgcgctccgtcgacaccatctactcctgcctcaaggccggcatgtccgtcgcgcggttcgatttctcgtggggagacgccgcctaccaccaggagacgctcgagaacctcaagc

SEQ ID NO: 2726 - DNA, 396 bp, Zea mays
  Clone ID: LIB3136-016-Q1-K1-G2
gccgtgcgcggaatgcccgtggaaggaggggagagagggagggcgcatgcgcaggcgcagctgagctgagctaagctgagcccgcgaggttcgcggtctgcggtgcggcggcggaggtctcgccagcgcgatggccagcggcggctcctccaggtacagctcgtacaaggcgccggggctgcgcggcgcgctgctggaggcggcgcacgtgtcgtgcctcgaggaccggtacgcgctgggcccgcagctggggtggggccagttcggcgtgatccggtcctgctccgacctggtcaccggcgaggcgctggcctgcaagtccatcgccaaaggccgggtcgtgttccccgacgacgtgcgcggggtcaggctggagatcgacgtcatggggcgcct

SEQ ID NO: 2727 - DNA, 358 bp, Zea mays
  Clone ID: LIB3136-016-Q1-K1-G8
gtcgcgcgcagaatgccttttaaaggacgggagacagggaagactcatgctctagcgcaactgggctgagctaatctgagcccgccaggtttgcggtctgcggttcagcttactatgtctacccagcgcgatagacaacttgggatacttcatgtaaaggtagtacaatgcgcccgtactgcgcggtgctctgctggaggcggcacacgtgtcatgcctataggaccggatcgcgctgggcccgcagatggggtgaggccagttacgcgtgatccgaacctgcttcgacctgctcaccggcgaggcgctggactgcaagtccatcagcaaaggccggatcttgttccccgacgacgtg

SEQ ID NO: 2728 - DNA, 442 bp, Zea mays
  Clone ID: LIB3136-016-Q1-K1-G9
gaagaaatggctgacaagctagcaacaaggatgaggaatcgaacaggaagtttaaatccatacatggctcttcacttgcgatttgagaaaggaatggtgggcctttcattttgtgattttgctggaacccgagaggagaaagctatgatggctacttacagacaacagcaatggccaaggcggtacaagaatggatcacacttatggccactagcgctacaaaagagaaaagaaggccgctgcccccttgagcctggggaaataggaatcattttgcgcgcaatggggtatacgaaagaaactcagatatatgttgcatcagggcaggtgtatggtggaaacaacagaatggcacccttgaagaatatgttccccaatatggttagcaaagaagatctcgcaagcaaaggaagagatggagccctttcaagaagcatgtaac

SEQ ID NO: 2729 - DNA, 425 bp, Zea mays
  Clone ID: LIB3136-016-Q1-K1-H1
caagggcatcctggggaggcacggcaagacccccgtggtggtgctcgtctggtggggcttcacctgggtcattaccgccgtgctgtgcatgaacattccccacattcacaggccacgcggcaagcacggcggcgcgatcggaaggcacggcggggacgcacaccaccatggcaagaagttcgacggctactacctctggccgtgaagcgccgagcagccagcatcgtcatgcatgcacatataccgcctgccctgatggtgacgatggtgagccgccaaggtgaagactgaagagtacgttcccggtcatccatccatcgtctccttagtactgctgccccgggattagtcgatgaaaagtgaaagggaaagctacccacacacccccatttggtcgacggccccgccaaaattgaatttttttc

SEQ ID NO: 2730 - DNA, 320 bp, Zea mays
  Clone ID: LIB3136-016-Q1-K1-H10
tcgggagcacaagtgagctagctagctctagctaggccacgcactgatgactccttgatgatgaggtcgtgctagctagctagctatagctgggccgggggacgtacgacatcagcgcgcggccatgggcgtggggaagctgatgaacgacgtgaagccatacctggcgatggtgctgctgcaggtggggttctccgggatgtacatcgcatgcgtcgcctccctcagagcgcggcatgaaccacttcgtcctcgtcgtctaccgcaacctcgtcgccaccgtcgtcatggcccccttcgccctcctcttcgagaggcga

SEQ ID NO: 2731 - DNA, 418 bp, Zea mays
  Clone ID: LIB3136-016-Q1-K1-H11
cggacgcgtgggttcagtttctgctccagaagctgaaagctatcaggaggaagctgctccagaagatgagggaagtagtgaagaattgagctctgtgtcagaagtagcaactgatgtttctcctcctgtatctgatgcctcctctcaggtgggaattcaggattctacttctgtggcaaatgctgctgaggaccaaactgtaggatctgaaagttcacctacaattagtgttgaactgtcctccaacgggaccccagatagctctattgtgtcttcagtttcagaaactgcagataaacctactgaacctgaagaatcttcagcggtagaagaggttcttgtaactgcaagcagcgaggcggggaaagaaccagctgctgacactgaggctgtaccagccttgactgagaaaactggt

SEQ ID NO: 2732 - DNA, 294 bp, Zea mays
  Clone ID: LIB3136-016-Q1-K1-H12
ggaacacaaggcagctagctaactttaactaggccacacactgctgaattattcaggaggaggaccttctagatacctagctatagctcgcccggcggacacactacaacagcgacctcccatgcgcgttgagaagctgatgaaccacctgaaaccatacctggcgattgtgctgctgcacgtggcgttctccgagatgtacatcgtctcacggcgccttccctaagcgcggcctgaaccacttcgtactaagcagataccggaatcttgaggtcaacgacgacatggccccct

SEQ ID NO: 2733 - DNA, 386 bp, Zea mays
  Clone ID: LIB3136-016-Q1-K1-H2
cggacgcgtgggctcaggaggaacatgttgaatctgctgtcgcaacattgcgccgggaacgtgaagaaagacgcaagagactaaagagagagcagcaggatgatgggtcaaggctacattcccagcagattagggttgattatgctcctcaacccaaaaggcatagtcgcatcaaagaggcacctcagggctggttggactgtcctgcatttggggagccaatagataaaatcataccatctaaagttcctctcgatgaaacattcaatgagtcagtgcctcctgggaagcgatactcctcaaagcaactagttaacaaacaaagaaaagctggtcgtgaaataagtctggtgattgatttgacaaataccaccaggtattattca

SEQ ID NO: 2734 - DNA, 323 bp, Zea mays
  Clone ID: LIB3136-016-Q1-K1-H3
aggacatcaatgagagatttgaaacagtacttgatactcgtggtcctgtgtccaaatatattcttcctgatgaaaatctacaaggaaggcttgaaatcacttttgatggagatgtgatgaatggggtggcttgcaatctggagtctcgaggctatcatgcattatgcaaagcaaccaaggaaatagttggccacgtggagccatattccatcaccgggagtctacctctaatccgggaattacaggacgagggatttgatgttcaaacagctggatatggcttactgaagacgtaccatgcgaagaacgagtactgtctgttt

SEQ ID NO: 2735 - DNA, 267 bp, Zea mays
  Clone ID: LIB3136-016-Q1-K1-H4
acgcaagacccaaaacccacaatctatctttgtgcacagcatggaagaagaaagaacctatggcacagtcgtggtgcggctccctcaagctgctgaatctgcttctccctgcgctcctgctgatacgagaacgatcgcaatgtatagtataacggaccttctatgcttatgggagcgacgacgagtgcctgattccctgcgctctagattcttactttcggtcaaatggtggtaatcgtggcagatgttgacccacatggaacagaa

SEQ ID NO: 2736 - DNA, 450 bp, Zea mays
  Clone ID: LIB3136-016-Q1-K1-H5
gtcgtttcggttttttcagagccttaagatgtcaaagtgccccaaggagctggtgcctactgatggagaacatgttgatgtgtctgttattaaaaggatggaagattaccgggaacctgtaaggcctcaatcagctttccagggtgttggaagaacccttggtggtggacctttcccagatgagagtgcaacacctgcttctgcaccaacggcccctgctgcttcgaggtccgatggcatagtcgtggatgactcccagccatttacatccatacagctgatgctggctgatggcactcgcatggtcgcccggttcaacatgcaccacaccgcgggagacatcatgtccttcatcgacgcatctcggcctggaacacgaaggtcgtatcatctgcagacaggttttccacccaaagcagctgctgacccaacgcagaccgtggtgcaagc

SEQ ID NO: 2737 - DNA, 448 bp, Zea mays
  Clone ID: LIB3136-016-Q1-K1-H6
cttgcaacccttgtggttaataggcttagaggtgcattgaagattgctgctattaaggcccctggttttggagagcgcaaaagtcaatatcttgatgacattgctactctcactggaggcactgtcatcagagaagaagttggattatccttagacaaggcagacaatgcggtcctaggaactgctgctaaggttgtagttaccaaggattcaacaacaatagtgggagatggcactacacaggaggaagtgaacaaaagggtgacacaaatcaagaaccagattgaggctactgaacaagaatatgagagagaaaaactaaacgagaggatagctaaactctctggtggtgttgctgtcattcacgtaggagcacagacagaaactgagctcaaggaaaagaaattgagggttgaggatgccctgaatgctacaaaggcagcagtcg

SEQ ID NO: 2738 - DNA, 206 bp, Zea mays
  Clone ID: LIB3136-016-Q1-K1-H7
aagatttgaaaccagacttggttcttctgggcccgtgggccaatatattttgggtggtgaaaatttacaagggagggtttaaatcacttttgatggacatgtgatgaatgggggggcttggcatctggagtctcgaggctattattccttatgccaagcaacccaaggaatagttggccacatggggccctatttcattaccggga

SEQ ID NO: 2739 - DNA, 383 bp, Zea mays
  Clone ID: LIB3136-016-Q1-K1-H8
cacgcgttcgggacgctgggtgacaatgctgttccgcgctggaaaaaatgccaatttcatcgggagggtggtgatgcagctcaaggtggtccagcctggcttatctgcttgcctataaaagacgacaaggttgacgctaaagttgtacatggacagctttgctccatggtggagaggacggatgctgaaattcttgggcctcacagtcagtatcttcctaaaattgtttcaattcttgcagaggttttgtgcaatggaacagaacttgccactgatgaaactagaaacatgatggtgaatgtcttgaggcgtttacagcagactctgcctcctgattctcttgcatcgacgttttccatactgcaaccgcagcaacagctact

SEQ ID NO: 2740 - DNA, 424 bp, Zea mays
  Clone ID: LIB3136-016-Q1-K1-H9
gatagcgcgggcggggaggggaaggagacaagtgaactcagagaagaactagcgcggcgggcgagcattgcaagccgagctgcaggggcccggagcggagaccggaggagggagacttcgcttgcgatgtcaccggcagcatccgccgccgaaaccatcgtcgtcgcaatcgcaagcgtcccgagccagcagcagagcagccaccgcgccgcggcgccgtccgtcccgtcgtcctacgccgtctgggagaaggagcggtaaggcgtctgcagctttacgacgacgtcgtcgtcgtctgccacctacctactgctgctgctgctgcaaggggaagtaaaaaggaacggaaagggggaaggcatggaggtggaggcggccaagtgcgagtgctgcggggtcacggaggagtgcacgccggcgtaca

SEQ ID NO: 2741 - DNA, 338 bp, Zea mays
  Clone ID: LIB3136-017-Q1-K1-A1
gcggtgtcgatgagctcgacgccgcaccctctggatccgtccgttccggccgtcgtggggggcggcaaggaggatgaggaggcggtggagtcttgtgccgccgccgcgcccttgccgccggttgggatcgacgacgacgaggagggcccccggagagtgcgcaagccctacaccatcaccaagtcacgcgagaggtggaccgaccccgagcacgtcaagttcctcgaggcactgcagctctttgaccgtgactggaaaaagattgaagcatatgttggctccaagacagtaatacagctcttttaacagattaggagtcacgcacagaagtatttttt

SEQ ID NO: 2742 - DNA, 374 bp, Zea mays
  unsure (1)..(374): unsure at all n locations; Clone ID: LIB3136-017-Q1-K1-A10
ggtagaagatccaaattcagatgcattcaagcgtcaccttgcaaggataccagacttcttgtggatttcagaagatggcatgaaggcacaagtatatgatggctgccagagctgggagacatcattcataattcaagcattttgcgctacagatcttgttaatgactatggttcaactcttcagagagcctatgagtttatgaaaaattcacaggtcatgaggaaccatcctggtgaccaacgttattggcatcgccatagatcgaagggttcatggacactttcatctgcagacaatggatgggctgtatctgacactacaggagaagcactntaaggctgtactgttgctgtcaaaagatctcaaaacaaaa

SEQ ID NO: 2743 - DNA, 356 bp, Zea mays
  unsure (1)..(356): unsure at all n locations; Clone ID: LIB3136-017-Q1-K1-A11
aaaccaactaaaatcccaaaagagaggaaaggcacaaacagacggtagaaggaagaaagggacgctcgtctcggctcgtcacgtgccgccgccatggctgctctgggccgtggcctgcccctcctcctgctcctcctcctcgccgtagcgggggccgccaacgccgcggcggcgcccggcggcatgtccatcatcacctacaacgaggagcacggcgcgcggtggctggagcggacggagccggaggtgcgggccatgtacgacctctggctcgcggagcacggncgcgcctacaacgctgctggcgagggcgagggcgagcgcgaccgccgctttctcgtcttctgggacaacct

SEQ ID NO: 2744 - DNA, 409 bp, Zea mays
  unsure (1)..(409): unsure at all n locations; Clone ID: LIB3136-017-Q1-K1-A12
tcccgccagccgccctccagcgtggcgccggcatctctggcacgtggcttgctcatgctcttgctccgcccccgcagctaccacagcagcaggaaccccccgggttttatggccggaggaggtacgaagatgaatacaacagtaaccctaacggctggcctaggcgagccaatggcactagtagcagcactagtagcagagatgattgcagccgtggcagctacaatggaagagggaagaggaagtatggggagtacaggagggggtatctggactcanggagagacagggaggagagaggaaggccatttccgaacggccggcgctacgaggaggatggggatgaagatggggcaccctgggttcaaaaaaagcgccgcggcaatcggggaatgatgaggcgagtact

SEQ ID NO: 2745 - DNA, 307 bp, Zea mays
  Clone ID: LIB3136-017-Q1-K1-A2
gattgaggataccgtgggtatcggcaagggcaccaccaagatatacgccaccgttgatctggagaaggcccgcgtggggcgcacccggatggtctgcaacgagcccgtgaacccttgctggtacgagttcttccacatctactgcgcgcacatggccgccgacgtagtattcaccgtcaagatcgacaaccccatcggggcctcgctcatcgggagggcttacctgcctgtcgaggacatcctgggcggagacgagatcgacaagtggcttgagatccgcgatgagaagcgcgagcctattggggac

SEQ ID NO: 2746 - DNA, 371 bp, Zea mays
  Clone ID: LIB3136-017-Q1-K1-A3
ctgacttgctgagtggtggatttgactcctttggtggcgggtatagcggttcaaactatgggcgctcaggtggattcggtggacgtggtggttttggccgatcaggcggtggcggcggatatggcaattctggatttggtcgctcaagcggtggatatggacgttctggtggtggaggattcggtaactcatgatttggtggtcggtcaggcggcggtggaggattcagtggtggccaatcaggcggcggtggaggattcggcgactcatggtttggccgatcaagtggtggtgggtcaggatttggtcgttctggtgggttatgagattcttgttaccggccggttcggttggcggtttcggcgggttct

SEQ ID NO: 2747 - DNA, 345 bp, Zea mays
  Clone ID: LIB3136-017-Q1-K1-A4
tcgcggacgcgtgggcacgtggtcaaagtttaatggccacaagtgtggccggttcactaatgatcagactaagaagaccgaacaagcaaggagagacctctatagatatatgcactaccacaacagatacaaggctcacaccgactctcttaagcaggaagcaaagcttaagaatgagatccaagggaagatatccatttcagaaaataaggagtcaaagataaaagattattcttgggtcataaatgggttaaacaggctattcagatcaaggcgtgttctaatcctattcgtatccgcttgcattctacatggttggtgatgagattttcaaagatgagatga

SEQ ID NO: 2748 - DNA, 321 bp, Zea mays
  Clone ID: LIB3136-017-Q1-K1-A6
cgtcccgtggtctctaccttcatgccacaaccaccaccaccaccgtcactgcattctcaaacgagcagtgcctgaacccaagtgcagtgcagcagccatgggagcagcagcagcaggtggcacgcgctgcgcgccgtcggcgacgtcgtctcgttccccgcgaccgtcgccgccttcgtggaggcgctgctccaggggtgggccgaggccatggccgggctgctggtgccgctgctccgcgccgcggtgctgctgtgcacggccatgtcgctgatcgtgctggccgaaaaagtgttcctgggcgcggtcagctccgtggcg

SEQ ID NO: 2749 - DNA, 321 bp, Zea mays
  Clone ID: LIB3136-017-Q1-K1-A7
atgctggatttttggaggggacatgcacttgtgctgctgtgggacgacgtctgaagtctcacaaacgtccatggtatgatccacatattatgaagcctgcacataataatgaagcaaagcttacaagacataccagacgtttatccgagattgagcaagggcggagttcatttgctaggttacatcttttgaagggtagaaacagtgacacgtcaactgtggagtcaggatctgaaattgatgatcttggtgctccgatcatgagaagcacagtgtggtgtagtcgattggccccaattcgcgaagagatgcatatgagag

SEQ ID NO: 2750 - DNA, 53 bp, Zea mays
  unsure (1)..(53): unsure at all n locations; Clone ID: LIB3136-017-Q1-K1-A8
aaaaaaaaaaaaaaaaaaaaaaaannaaaaaaaaaaaaaaaaaaaaaaaaaaa

SEQ ID NO: 2751 - DNA, 306 bp, Zea mays
  Clone ID: LIB3136-017-Q1-K1-A9
cggacgcgtgggtgctaccgaagtaaggcctgaagagaaaacgaaagctctggctgacacagaagctgctcctgaggacatcgatgacgttatcgagcttcctgatgtgcctacgaaagtgccagagaggcctgaagctccagaaaaaaacaaagttttggaggagccgctacctgcataagtggatggagctgagatgaatacggcacacttagtttgcaggaaattgtaacatacccaccatttcattgtactatctcattctcagccataccagaatttcatcgtgtacagcaagaaaaattt

SEQ ID NO: 2752 - DNA, 320 bp, Zea mays
  Clone ID: LIB3136-017-Q1-K1-B1
ccagaacatatgcctactgctggtgaactgctgaggcatccacatctgcaaccatatctttctgaatcgtcgaactgttcaccgatctatcttccggtgaagcccaccaaaggtaacctggtagacaagcagtcaaagaagccaagcagtggcagaaagcgagctgtcaaagccaatggatccaatggaacattagaaactgcatcagatcacgctgtgtaagcaagagacagctccacaaacttctcagatgtatcaactataggtacccaggaagccttgatattgcaaatgccggtggatcctgatgccggaagcaa

SEQ ID NO: 2753 - DNA, 333 bp, Zea mays
  Clone ID: LIB3136-017-Q1-K1-B10
gtctagatcgcgacggccgccctttttttttttttttttttttttttttttggatagcgcaatatttattctgagaaaaggacgcagaaccacacgaggatctagcaagtcaaatcggaaggccgagctaccatacctaatactatagcctccacggtctcaccggatttgctactttacatgcagcgtggataatttggagttttggacgagtgcacgtactgagcgcaaagtttcgccggttcaaaacctgtggatccccaaaaaaaaacatgtgatttaaaacttggccgagaggacagagtatgtacttgaatcagtaattcacacttg

SEQ ID NO: 2754 - DNA, 333 bp, Zea mays
  unsure (1)..(333): unsure at all n locations; Clone ID: LIB3136-017-Q1-K1-B11
ccaggagcgtggcctcactctcctcgtcgcatcccccctcctcatcttcgcagcgcgggcgggggcaatggcgatggcctgcacctacgcgccgggcggatgcgcgcgggcgctcgcgcatggtagatgcagggtccgcggtcccgcggggctgggcttcctcggcccctccaaagccgncggccttccccgtcccctctgcctcgccaggcggatgagcaaccccgtcgcggtgggcgccaggctgcgatgcgcggcgtcgtcgtcccccgcggcggcgcggaccgtcacggcgccgcgcttcattcagcacaagaaggagccttctggttc

SEQ ID NO: 2755 - DNA, 345 bp, Zea mays
  Clone ID: LIB3136-017-Q1-K1-B12
gcgctcccagctcgcgcaggcaggcgacacagcgacgcttaaaaccctatatcgaggaggcgtgccaggccagcggtttgcgatgacggcaccggcggacaaggggaagaaggccaagaccgatgccgacggcggcgaggagaacgagcaaatcgacggcgcccttgtcttctccatcgagaagctccaggagattcaggacgagctcgagaaggttaatgaggaagcaagtgacaaggttatggaggtggagcaaaaatacagtgagattcgcagacctgtctatctcaagaggggtgacattatcaagaccatcccggactttttgctcacagccgttttgag

SEQ ID NO: 2756 - DNA, 437 bp, Zea mays
  Clone ID: LIB3136-017-Q1-K1-B2
aaagaagggaagagttctcggcttctcgcgagtcgcgacagacagaggcggagttgcggagaatatgcagagcatcagcatgaagagggagatcagcgaggcccacgacaccattcgcttctgcatcaacgccggcgtcaaagacgacctcgccccgtcgcacccggtccagtctaccatccaatcggagaccaagttctgggcggacaagaagaagttcgggacagatgccatatatggatccgccctcaacatccgtaaggatctcgatgcccaaatcctctccaggttccaaaggccccctggtgctttgccgccatctgtgcttggatacgaggcactgacaggttccctggatgattgtggatttgaagattatcttaacacgcctcatgattctgacaggttccgtgaaacctgacatgcaccatggaatg

SEQ ID NO: 2757 - DNA, 354 bp, Zea mays
  Clone ID: LIB3136-017-Q1-K1-B3
ggcggcagcggcggcggcggcattgccgagatttccgtgattcttgcgcttgttagttgtgctgtgtatagttgggccggccgggggtggttccgtacagttccttctctgttggagtagtcggcggcgatgggtatcctcgcgctcatcaccggcaaggcgggcgccagcgggttcgggtcggcgtccacggcggagcatgtcaccgacggcgccgacgccagccgcctcaccgtcgctatcacaggaggagctagtggcattggtctggagacatcaagagtcttcgccctgagaggagcccatgtggtcatcgctgctagaaacacagaggctgcatcagaagcaagaaag

SEQ ID NO: 2758 - DNA, 294 bp, Zea mays
  Clone ID: LIB3136-017-Q1-K1-B4
ctgatacttactcaagtgactcatctgatgtcagcagttcaagtgatgacaggcgaaggcgcagaaagagacattcgaagaaaaataaacgcaaacgtttaagaataaagcgtgaccaaaggcgtgaaagaaagcgtatgaagcgtgatatgaaatcaaaacagaagtcaaaaaggattaagggtgacagtgaagctgaaagttcgagtgatagcagctctgaagatgcttgaagcaagagacaccgccacgggcggaagtccaaagcatcatctcaagtttttgaggaaaata

SEQ ID NO: 2759 - DNA, 270 bp, Zea mays
  Clone ID: LIB3136-017-Q1-K1-B5
ggaactctgtgggcttttatcagatagcaaagctgtgcatgatacctgcatcatgtcttctggaggttgtctttgatcatgtacattattcccgggacacaaagctgagcataatggttgtgcttataggagttgcagtctgcacagttactgatgtcagtgtgaatgcaagaggtctaatcgcggctgttatagctgtttggagcacatctttgcaacattattatgtccactttctccaacgcaagtactctctgaactcattcaacc

SEQ ID NO: 2760 - DNA, 358 bp, Zea mays
  Clone ID: LIB3136-017-Q1-K1-B6
cgaccacgcgtccgcaaggatggaattgagctgcaattcgcaacgaatcatgttggccatttcttgctgacaagtctcctgctagacaagatgaaatcaactgctgcagagacaggtgtgcagggaaggatcataaacgtatcatcggtcgcgcataaaagaagtgatggtacatgctttgagctgaacaagctaaacgataaggctaggtaccaaccgttcattgcatacgcgcattcgaagttagccaatgttctccacacaaatgagttatccaggcgttttcaggaagaaggatgcaatctgacagcgaattccctgcatcctggagtgatcgtcaccaatatcattcgctatg

SEQ ID NO: 2761 - DNA, 438 bp, Zea mays
  unsure (1)..(438): unsure at all n locations; Clone ID: LIB3136-017-Q1-K1-B7
cgatcctttcatctccccgacacagaaagctgctgccttggggcaatgtggcgtcaactgctgatcgagacagtgactcttatttgaagaggctcaatcaagatctgccccctcgtgtaaatacctgtcacctgaggaggctagatgggaattccttttgttgtaggtgaggatggatttgcatctaagttatgcctctgttcattagcttcttccgtgccggtgctgcagcggactaagaatcacggagcctttctaccttgcatgtagcgctagccagcaacgtaagatgtgaattttgaagttttgttatgcgtgcaggttattgttttagagtaaantatcatttgtttgtgggaacctgtcacacgagcttatattggcaatgctgttatttatacacatagactacattctttggaatgtgtgcagacagtc

SEQ ID NO: 2762 - DNA, 193 bp, Zea mays
  Clone ID: LIB3136-017-Q1-K1-B8
tgcgagactggaagagactccacggagactccacatggccgccgccggcgacggcggtgagtcccactgccgggacgcgctccgcgaggccttcggtgattcgtcgagcagcgattccgacacacccgccggtgtcagccccggagcgggccgcgggcactggaggtgggaagccgtggcttgggtcaagggg

SEQ ID NO: 2763 - DNA, 361 bp, Zea mays
  Clone ID: LIB3136-017-Q1-K1-B9
caagaagttcactcaggtcgtgttcctgaaggtggacgtggacgaagtgaaggaagtcaccgcggcctacgaggtcgaggcgatgccgaccttccacttcgtcaagaacggcaagacggtcgcgaccatcgtgggtgccaggaaggacgagctcctggcccagatcgagaagcatgctgcgcctgcgcctgcgtctgcgtctgcctaaaggagatcagatcagtcgtcgccgtcaataagggccagcacgtatggctgtaaatgttgtcgttatcagttctggctttgtcgtttgtgggcgattgtgaactagtagtatgtttgtttctatccgagccggaggcgatacttaaccatggat

SEQ ID NO: 2764 - DNA, 364 bp, Zea mays
  Clone ID: LIB3136-017-Q1-K1-C11
acgcggacgcgtgggtgttccaggcgttcccctcctgcacgcaaccttcctccgtacggatgcaggattgccgggctccttgactcgttacctcgcgcgccctcggtgagctactttgtttcgatttagcgacaaatcagtttgcttcatgttgcgcaggcttagatctgaatgccggattcttcgtcttacggcttgaatcgagctgggaggctgtggatctgagcacgggaggtacaacaaatccgcgtgtatgacgagttggatcggcaccggttagtctctgaccgcaagattttgttgttgtgttgggctgatctgccgcgttgttttgcttcaggttctagagctagcgaaatcgcaa

SEQ ID NO: 2765 - DNA, 318 bp, Zea mays
  Clone ID: LIB3136-017-Q1-K1-C12
acgatctgacccaagcgagggttacacctcacccaaggacctatccaatcctatggagggcggcgactcgtacggcgccgacgccagccgctccttggtgtaccgcgcggtcatcgccaacttcatcgccacgctgctctttctctacatgaacgtggccaccgtgatcgggtacaagcaccagacggacgcgttggcgtcgggccccgactcggcgtgcggcggcgtctgcatcctcggcatcgcgtgggccttcggcggcatgatcttcatcctcgtctactgcaccgtcggcatctcatgtgggcacatcaaccc

SEQ ID NO: 2766 - DNA, 336 bp, Zea mays
  Clone ID: LIB3136-017-Q1-K1-C3
aagacatcaagcttctcaagttccatgggtgggagctgcccccacgatgcgctcgtgttctgcgcatcagcaccatgcttttgaagaaaggtgcagctcgtggcttcacaccatatgacatagggcgcatactatgcagggaaactgtgaatagggagtctgagattgaggacatcattcaagaagcagaggatgctgttctcccagggtccagtgaaaacatgttcttagaaactgtatctgaaatcatggaccgtcacctcgacaagggagtgagtttagacattcagaataactgatctagttgttccagctgtatccggtttgttgtttcta

SEQ ID NO: 2767 - DNA, 201 bp, Zea mays
  unsure (1)..(201): unsure at all n locations; Clone ID: LIB3136-017-Q1-K1-C5
gcgacggtggcatgggcatccggtgtccggccaatgaagaagacnggataaatgtgacgtaaccctctgttcgagaaaagggccgaagcacgttcgtgcatcggtcggcgcgttgccatcccaagaaggatcctgtcaccgattcgtcaatgtggcccataggtcgtgctgcattcagcgccatgcgtcgcattcctcaag

SEQ ID NO: 2768 - DNA, 378 bp, Zea mays
  Clone ID: LIB3136-017-Q1-K1-C6
gcatatgttcatagggcacttggacctgacatttcaaaggttttatctgttactttggatgattggtctgacagcgatatcgactccatggttgaggttggtggaaactcatatgcaaattcaatttatgaggcttttcttccaaaagatcacccaaaacccaaaccagattcaacgatggaatataggacgaaatttataagagctaagtatgagacacaagattttttgaagccaagtttgcgcatttcatcaagatcatcttttaaatctaccaattctgtgaagagtgtagatagcaatttctctagcacttcaaggaaggatatctctgaagatacaagagaatttgttggagagctgaatattacagtcgtg

SEQ ID NO: 2769 - DNA, 282 bp, Zea mays
  unsure (1)..(282): unsure at all n locations; Clone ID: LIB3136-017-Q1-K1-C7
ccctgatgcactgacttacttgaatactcttcaacagctcagaataaagagtggtcttatagatcatcggggaattgagcctnttatgatggaagctcttgagaagattgagatggacattaataaaccacttttgaggagcgacatgttgaacatggccaccctcttggcagattttgacatgattaacaaaaatgcttggctttcggaaggtggatctttttaagatcgaggaagagcttgtattggtaatttccataatgtatctgacttgatcttaat

SEQ ID NO: 2770 - DNA, 325 bp, Zea mays
  unsure (1)..(325): unsure at all n locations; Clone ID: LIB3136-017-Q1-K1-C8
gcctttcnagccaaaagaaatatccaattcctcaccctaccccctcgctgctttctcctgcccgtcgacctcgccaatctccctcccgctaaccctattccagcacccgagatctactccgtgcaaacagccatggcggagacgctcgacatgaccctcgacgacatcatctagaacaacaagaagagtaacccctcatctcgcggggcccgccgcatccgctgcggatccgcccctggcggcgggaccggcggtgtcgggccgaccaggcgcccctttaaaagggctgggaacaggcaggcgccctaccagccgcctaaggccc

SEQ ID NO: 2771 - DNA, 295 bp, Zea mays
  Clone ID: LIB3136-017-Q1-K1-C9
ggctgatctccatgtaccttgttgaatgccgggtgacaccattcttattgcggctggtggtggccatgttgcatgtaacatccaaataaagaagcctatttgcataattggcggtggcgttatgcctgctgtcactagagtgacccgctgactggacatgcacatctctctggaagctttatcaacatgcaagattgcatatctgactatcagagcaaaactcggatgcttcttgcttgatcgaggcgccagattgaccattccggacagtctccctctttacgaggctttgacc

SEQ ID NO: 2772 - DNA, 438 bp, Zea mays
  Clone ID: LIB3136-017-Q1-K1-D1
tgtcgaaactgtcacacttttggtggctttaaaagttcgatatcctcagaggatcaccattctcagaggaaaccatgaaagccggcagtgaaattatttgcagattactcaagtgtatgggttctatgacgaatgcttaaggaagtatggaaatgcaaatgtctggaaaacctttacagatctatttgattacttccccttgactgcattggtcgagtcagaaatattttgcttgcatgggggaatatcgccatccattgagaccctcgacaacatccgcaactttgaccgcgtccaagaagttcctcacgaaggtccaatgtgtgatcttctgtggtctgatccaaatgatcggtgtggctggggtatttctcctcgtggtgctggttataccttcggacaggatatatcagagcagttcaaccataccaatagtct

SEQ ID NO: 2773 - DNA, 428 bp, Zea mays
  Clone ID: LIB3136-017-Q1-K1-D10
cggacgcgtgggctttcagtgcagaagttgttgaccttataaccaagctactcgtggtcgacgaaaacgcgcgccttggaaccagtggtgctgaagctgtgaagaaacacccctggtttgatggcactgattgggagcgaatagcatctgggacttgtgcagcacctgaagaaatcactgagcgcatcaactactgtatagaaactcttaatgaggacttgtccgcatctccttccgtgccgattgaagacccagatgatctcactgctccagagtggatccaggattggtgatctcaatagttgcatgactgtccaatgatgaattgttctagttgaggaaaacgtctctagtttttcaccgagcattctcatatcaaaatggaagaaggtatacataagagttgatcgaactgacaagttgtacat

SEQ ID NO: 2774 - DNA, 416 bp, Zea mays
  Clone ID: LIB3136-017-Q1-K1-D11
cttccacgaatctccccgccgccctcaatttccctcggcgccgccgcctcctcccctcgcttgggtcctcggttagttaaccatccaggttctgtcaagatgtctgatagccatgagactgacaggaacattgagatttggaaaattaagaaactgatcaaggcattggaatcagccagaggcaatggcacaagcatgatctctctaatcatgcctccacgtgatcaggttgctcgagtggctaagatgttaggtgatgaatatggtactgcttcgaacatcaagagtagagttaatcgtcaatctgtgttggctgccatcacctcagctcagcagaggttgaagctctacaacaaagtgcctcctaacggattggttctgtacactggaactattgttactgaagacggaaagga

SEQ ID NO: 2775 - DNA, 429 bp, Zea mays
  Clone ID: LIB3136-017-Q1-K1-D12
aaaaaatgtagagctatctttgaaagggcattcgactacttcagaatcagtgcctccgagttgaaggaggaaagagctatgcttcttgaagaatggcttaataaggaagtgatctttggtgatcttggagatgtcaccttagtgcaaaagaaggcgccaagaaaagtcaagcggaagagaccaattcctacagaagatggctccactatagcgtctgaggagtatatagattacattttcccctgatgaagttgctctagcaccaaacctgaagatcctggaagcggcttacaaatggaagaagcagagaaccgacgatgacaatgtgtgatcctggcatcgcagtattggcgttgttgtgaacattttgctacagccaaaatcaggtgtcttgcaacacttgccagagctatcggaatgagaataatc

SEQ ID NO: 2776 - DNA, 409 bp, Zea mays
  Clone ID: LIB3136-017-Q1-K1-D2
accgcgcccgcgcggctccggcactggcggggctacgccggaactcggccgacttctcggctgccgagaccgccgcgttcctccgcgcctgcgggctctgcaaccgccgcctcggacccggccgcgacaccttcatgtacaggggcgacacggcgttctgcagcctcgagtgccggcagcagcacatcacgatcgaggagtggaaggagaagtgcgcgctcgccacgccgccgacggcgccggcgtccgacccggtggtgccgctgccgcccagcggcgcgggctccgacaaaccaggcacgctcgccgccgcatcctgattagtcatgagggagggggtccgaggcgatcgaagatccggctaagctagcatcctctggccttggccaccacacacattacatgcata

SEQ ID NO: 2777 - DNA, 449 bp, Zea mays
  Clone ID: LIB3136-017-Q1-K1-D3
cttgaaaggggagagagagagagagaagagagagagaagagagagagagagagaggagtgggagacccgcgagaggctgccgtgtagggaccgtagactcagcgactgcgaaggagggataaggggatggccgggatcggaccgatcaggcaggactgggagccggtcgttgtgcggaagaaggcacccaccgccgccgccaagaaggatgagaaggccgtcaacgccgcgcgccgcgccggtgcggagatcgataccatgaagaagtacaacgctggtacgaacaaggcggcatccagcggtacatccctcaacaccaagcgcctcgacgacgacaccgaatacctcgcccatgagcgagttccaagtgatctgaagaagaatctcatgcaagcaaggctcgataagaagctgacacaggcacaacttgctcagatgataaatgagaa

SEQ ID NO: 2778 - DNA, 244 bp, Zea mays
  Clone ID: LIB3136-017-Q1-K1-D4
gtcagaccaccaccatctctaagggggaacaaagaggagtagaaagccgcaaaaagagggcaatgtgcaaaagtcgtttcatgcgagtgttgcaggaaggtcccttcatgatttcaacccttattgcgttgttatgtattccatgtttacattttgctaagcattgctatctgaatctgaatttcagttgttagtctcttctgtaaattttgacttatttaaatttacacttctatctgtgttt

SEQ ID NO: 2779 - DNA, 88 bp, Zea mays
  Clone ID: LIB3136-017-Q1-K1-D5
aaataaaaaaaaaaaaaaaggacggacagaatttaagataacaaaaataaaaacacatacatgcggaaaaaaaaaatataaaataaag

SEQ ID NO: 2780 - DNA, 456 bp, Zea mays
  Clone ID: LIB3136-017-Q1-K1-D6
gagaagagctcattgcagatgttgtcctatttgcgacagggcgcacaccaaactcccagagactgaacttgcaagctgcaggcgttgagattgaccgggttggagccatcaaggttgacgaatattctcgtacttctgctcctagtgtatgggctgtgggtgatgtaacaaaccggattaatttaacacctgttgcattgatggaggcaacttgctttgctaaaactgtgtttggtggccagcaagttaagcctgatcacagagatgttccttgtgctgttttctccattccaccactatctgtagtgggcctcagcgaagaacatgccttggaggaagccaatggtgatattcttggtttcatctcatcattcaacccaatgaagaacatcatatccaagcgccaggagaagactatcatgaaactggtaagtgatgctgaaactgacaaagtac

SEQ ID NO: 2781 - DNA, 432 bp, Zea mays
  Clone ID: LIB3136-017-Q1-K1-D7
cggacgcgtgggtcctgctcctgctactacctttgcccatcttgatgctacaactgtgttgtcacgacagatctctgagcttggtatttatcctgctgttgatccactggattccacatcaagaatgctttctccccacgtgctgggtgaggatcactacaacactgctcgtggtgtgcagaaggttcttcagaactacaaaaatcttcaggatattattgctatcttgggtatggatgagctcagtgaggatgacaagctgacagtcgcccgtgcaagaaagattcagcgtttcctgagccagcctttccatgtcgctgaagttttcacgggtgctccaggaaagtatgtggagctgaaggaaagcgtgaagagtttccaaggtgttttggatgggaagtatgatgaccctcctgagcagtcattctacat

SEQ ID NO: 2782 - DNA, 433 bp, Zea mays
  Clone ID: LIB3136-017-Q1-K1-D8
tcgccccgctccgtcttcactcctcgcgccgctgccgcatctcctctacaggtaagaaggagagaaagagggcgaaatggtgaagcacaacaacgtcatccccaacgggcacttcaagaagcactggcagaactatgtcaagacatggttcaaccagcccgcccgcaagcagaggcgccgcatcgcacgtcaaaagaaggctgtgaagatattcccacgaccaactgctggccctcttcgtcccattgttcaatgccagactctcaagtacaacatgaagtcaagggctgggagaggctttacccttgaggagttgaaggctgcgggcattccaaaaaggcttgctccaaccattggcatttctgtggatcaccgccgcaagaacaaatcccttgaggggctgcaggccaatgtccagaggcttaagacatac

SEQ ID NO: 2783 - DNA, 273 bp, Zea mays
  Clone ID: LIB3136-017-Q1-K1-D9
caagaacgtgcagctgagtttggccgtctgaagaaagagagagatgaacggatgaatcgggtgtgatcttcaagaaagcatgaaagggagacagcaaggtagttgatgttttatctgaacctggaggaacagcggattgaaatgcttcgtgaggaaaagggagctacaaaacgtgtatcgggagaaaagaaggatagagaggtggctccatagaaaactgaacctgatgccacctgtgaaaagcaccgattgagagagatagagctggaggag

SEQ ID NO: 2784 - DNA, 445 bp, Zea mays
  Clone ID: LIB3136-017-Q1-K1-E1
caaacgctttcagatgttgatataaatattattgctttggcttacatgttataagcggggaggcatgggactagccatttgcgagagcaccctcctcctctgaaaattctcgaatacttcctctgaagaatattgagtcaagatatcttcatgtgtgataccaacagtctttgtggggcacaagaggatatagagctctagccatcaaagaaggatgcacctgttgcatgggaagacgatgagaacgatgtacgttggatgcatgctattagccgtagaatgcacagaagatatttgcataggaaggcaaggcgtgatgccctcaaggaattttgacaaaatttttgagacaagttctgttggtccaataatccgatgatgataaaaattctctctgaaaatagtggattggagcatggtctgactttcaactgatggccctttc

SEQ ID NO: 2785 - DNA, 421 bp, Zea mays
  Clone ID: LIB3136-017-Q1-K1-E10
cgaccggcggcggcggcgaggtgatggcgatggacccggacgcggtgtcggccaccggcatgcgcgtcggcctcgcctcggcttccgcctgcagcgacgcctgcgacgcccacgactccgaccaccacgccccgcccaaggccaccatcgagccaccgcacgccgccgtctccgccgcggtgcagcaggtgccctcgccgccgcagttcctgccgcagggctgggccgtcgacgagctcctgcagttctccgactacgagtccagcgacaagctgcacaaggagccgacgctcgggttcaaggagctggagtggttcgccgacatcgacctcttccacgagcaggcgcccaaagccagcaggacgttggcggaggtgccggagcttttcggataccaagcggggaacgacgcggcgtacta

SEQ ID NO: 2786 - DNA, 424 bp, Zea mays
  Clone ID: LIB3136-017-Q1-K1-E11
ctgggaaaaacctaacacagaagattctaaaaaaagaaacctaaaaaaggttcaaagaacacgaagcctatcactaaaaccgaggactgtgagagtttcttcaactttttcaatcccccgcaggtccctgaagatgatgatgacatcgatgaagacactgctgatgagctgcagagtcaaatggagcatgattatgacattgggaccaccataagggataagattatccctcatgcagtttcctggtttactggtgaggctgtgcaaggtgaggattttggtgagttgggcgatgatgatgaagatgatgatgatgaagacgatgacgaagatgatgaggatgaagaagaggatgatgatgaggaagaggatgatgaggaagaaagcaagccagcaaggaagtcaggatctggtcgcagacata

SEQ ID NO: 2787 - DNA, 425 bp, Zea mays
  unsure (1)..(425): unsure at all n locations; Clone ID: LIB3136-017-Q1-K1-E12
gcaacccgggcggcggcggcggcgacccgggcgccttcttcgccgggatgccgcggttcagcggcggcggggtgccaggcggcggcgggttcttcggcgggtggggcgagggcgggctcgggtaccggcgcggcgctgtggtgccgccctccacggtgtgcccgcaggacgggccctgccgcgggaagcgcctcacctggcccgccgcgctgcttccggaccttcagctacggcggcaagaacgggggcggcggcggaggcggcggatgctgcagcttcgactgcaccgagcgctgcgccgccacgtgctgagtgaatctgggatgtattagaggagggcgtggccgtagctatagctaaagctcgtgtactccgtcctctattggcatgcagtgcactgctttcttctgctcgtnncactatac

SEQ ID NO: 2788 - DNA, 391 bp, Zea mays
  Clone ID: LIB3136-017-Q1-K1-E2
cttcagaattacaagaatctccaagatattattgccattctgggaatggatgagctcagtgaagatgacaagttgacagttgctcgtgctaggaagattcagcggttccttagccagcctttccatgttgctgaagttttcacgggtgcacctggaaagtacgttgagctgaaggagagtgttaaaagtttccagggcgttttggatggcaagtatgatgaccttccagaacagtcattctacatggttggaggaatagaggaggtcatcgccaaggcagagaagattgccaaggaatctgcatcataaggggtctacaggcaacgcaaaattaacttttggaggtcaacgtgatgtgctttttatcctgtgttatcaagaacttacgtgc

SEQ ID NO: 2789 - DNA, 453 bp, Zea mays
  Clone ID: LIB3136-017-Q1-K1-E3
gacgacgatgctataaacataattaagatggacaatgaaagggagtttttggttgatctgatggctgctcctggtgctcttattccagcagatatcttaagttggaaaggcaattcgttaaattctaatcgaaaactcggcctgaatcgaacagctggatcatcaagtactgttgatgctaatgtggatcctactgtattgccacttgaacctaaaggtggccaactgcctttgttcagcagtggtgattggatgtcagacattgattctggatatgaggcagcagaaattgcagcttctactcaaacctcttcgggtgtcacaccatatctgtgttctgctggaagtgtttttggcagttcatggatgctggttaatcatgaccaatcagatggaccatcaacttctgctggtacatcatcgcagcagaaaagtgtacctcaaagcgagcat

SEQ ID NO: 2790 - DNA, 394 bp, Zea mays
  Clone ID: LIB3136-017-Q1-K1-E4
ttttctatttgacacaaagtgatctcatcttatcacttcaagaaaatcgaagaccataaccggcactctgaggcaccgaaatgcccgtctgaagactgcaactttgtggaggctctgcccaggccatctttttgagttgagctaacagaaccgagggttcttctcgacgctcgtgcacctaggtaacccctgtaaattggtttgctgacgctaggctgcaaggggcctgccctgtttgaactgctgtactgtacatgattcttggccgttgccctgtgtaattatgttttggttagctcgtaaatttatacgcatccaatggaggcatacaatgcaagtcgcaagcgcaatagtacagtgcatgataaactgtacggccaggttggattggaat

SEQ ID NO: 2791 - DNA, 404 bp, Zea mays
  Clone ID: LIB3136-017-Q1-K1-E6
tcgccggccgtcagcgccgccgcgttgatggccgccgcaccggaggagcgccttgacgtcctcaacgccgctggggacaagatcggcgtctccaagcccaggtcggaggtgcacagggacggcgactatcaccgggcggtgcacgtgtggatctacagcgagagcaccggggagctgctgctgcagcgccgcgctgactgcaaggactcgtggcctggacagtgggacatcttcagcgccggtcacatctccgccggcgaatcctcgctcttctcggcacaagagggagcttgaggaagaactaggcatcaaccttccagtcgatgctttcgagcttatatttgtatttcttcaggaatgcgttatcaacaatgggacatacacaaacaatgagtacaatgatg

SEQ ID NO: 2792 - DNA, 448 bp, Zea mays
  Clone ID: LIB3136-017-Q1-K1-E7
gaaagtggttagacaggagggtttcagtagactatggagaggaacaaatgcaggcttagcattagctgtacccactgttgggatatacttgccttgttatgatatattccgcaacggcattgaggatttcacaagaagtaatgctcctggcttgacaccatatgccccactagtagcaggatcagttgcacgttcgttagcatgcattgcttgttctccaattgagttggcaaggacgcgtatgcaggcatataaagagtttcgtcctggattaaagcctcctggaatgtggaaaaccttggttggtgttctcccaccacttgcaggttctagtcagaatgtacaaaattatcgtgttctgtggactggggtgggtgcacaactggctcgagatgttcctttctccgctatatgctggtcaactcttgagcctattcgaagacaactg

SEQ ID NO: 2793 - DNA, 404 bp, Zea mays
  unsure (1)..(404): unsure at all n locations; Clone ID: LIB3136-017-Q1-K1-E8
atttccggtccaccatcagcagacttgcgtcgtcgcggagggctcgcgtcggggtccatctgaacatccgccagaccgccgccaccatgccgcaacctaccgccgattcgagcaccatggtcgccggcgagcatcagcaacaacagcaacctgccaccgcgcggatctcctcctcctcaaccagctccggaaggctcgtcactccgttctggaaagtatgagagggacgcgaggaggtactgggacatcttctacaggcgccacgaggacaagttcttcaaggatcgacactacctggataaagaatgggggaaatactttaagggacgagatggagaaaagaaggtggttctagagggtggttgtggagctgggaacacaatctatccatggctntctacata

SEQ ID NO: 2794 - DNA, 449 bp, Zea mays
  Clone ID: LIB3136-017-Q1-K1-E9
ggcttgtctcccaggtcatctcatccctgacggcttccctgaggttcgatggtgctctgaacgttgatgtgaacgagttccagaccaacctggtgccctacccgaggatccacttcatgctttcgtcctacgctccagtcatttctgctgagaaggcctaccacgagcagctgtccgtggccgaaatcaccaacagcgccttcgagccatcctccatgatggccaagtgcgacccccgccatggcaagtacatggcatgctgcctcatgtaccgtggtgatgtggttcccaaggacgtgaacgctgctgtggccacaatcaagaccaagcgcacccatcagttcgtggactggtgcccgactggcttcaagtgcggaatcaactaccagcctcccagcgtcgtccccggcggtgacctggccaatgtgcagcgtgccgtgtgcatgatc

SEQ ID NO: 2795 - DNA, 427 bp, Zea mays
  Clone ID: LIB3136-017-Q1-K1-F10
cggacgcgtgggtaccaggccaaggtcggcgtggtggagttcttgaacggcgtcgggaagggggtggaagcgcacgccgcgaagctggaggaggctgtgggcggcgacatgcagaggctcctcgaggcccgcacgctgcggctcaagaagcttggcatcccctgcaagcataggaagttgattttgagttttgctcacaagtaccgtcttggtctctggaagcctcaagcagaacccaggaaagttgaataaaattggtttgttcttgaaagctagtctactgttggactgaggcttgtttgggacattttgaatatttccttttgtaatttaggagccacaaatctttgttctctgtctctggccatacttatttgcatccattgtgcaactttttctagaaaaattccaacttcgcgtggaataa

SEQ ID NO: 2796 - DNA, 294 bp, Zea mays
  unsure (1)..(294): unsure at all n locations; Clone ID: LIB3136-017-Q1-K1-F2
gtcggattcaacgacgaacatttttgtcgtgttcgcgaatggccaacatttcgctttcatgtggatntggtgtatgaccaacgcgcattttctatttctacacctactatctcacctaacttctttacaaatactactcaccaatcctcaaaaataatttggggcgcccgctctaaaaaacccaaacttacctacccttgcttgcgaccgcatacccttcctatagcgaccccaaaattcaattgattggccccatgtttaaaaactctatacaggaataacccggcccttacc

SEQ ID NO: 2797 - DNA, 149 bp, Zea mays
  unsure (1)..(149): unsure at all n locations; Clone ID: LIB3136-017-Q1-K1-F3
ccgcagtccaagtaccgctacaaccgcgtcttcttctccaacgacacgtacctncccagccagatgccggcggcgctgaagccctaccgcgacgacgagctccggaacctgaggggcgacgaccagcagggcccgtaccaggagcacga

SEQ ID NO: 2798 - DNA, 363 bp, Zea mays
  Clone ID: LIB3136-015-Q1-K1-F8
gccgtccaaggactcgacgaccgcgcatcagtccgtgccgagcccgtcgtgcgtgggcatggcggccgaagccctgagcccgctgcgcgtgccagcggacatcgccgagctctgcggcgacagcccccagttcttctcggcgacgtcgcggcccgggagctccaggagggggggcgcgttcacgccggcggccaagagcgagtgctcgcgcagcctcttcggcggctactccgactgccccaactacatggcgaacacggagtcgttccgcgccaaggcgcgttcccagagcgcgcccaagcagaggccgcagcagcagtacgagaagtcgggctccctccgcagggcgtcggcgcacgccct

SEQ ID NO: 2799 - DNA, 412 bp, Zea mays
  unsure (1)..(412): unsure at all n locations; Clone ID: LIB3136-014-Q1-K1-G12
cggacgcgtgggtggattttggatcctgaaaagtggggaggagccattgagctctctattggatccgaatactacgggcgtgaaatcgcaacatatgacattcagaccactcgctgtgatctctatggtcaggttagtgatctttcttccccctaactacttatgccaaatttgttaacttacttatcagctttgcaccccttgacacaggagaagaattacagtgaaagggccatgctcatttatgatggcttgcattatgatgctctcgctatgtctccggctgaaggtgcacctgaagaatttgaccagacaatcttncccgtcaatcatgaccgttccattggtccagcagaaggccttgccctcaacttagtgagggaggcgcanaggaagaggagctacactgaca

SEQ ID NO: 2800 - DNA, 367 bp, Zea mays
  Clone ID: LIB3136-014-Q1-K1-G2
gaaaagttaccaagcctttgcctgataccacttggttaagcaacccttctgcaccgaggcgtgacacagcaggagcaattgtcacactggcaaaagaaccgcagaatgttggcatactcaacagtcggcacacctgattatattgctccagaagttctactgaagaagggatatggaatggagtgtgactggtggtcccttggtgctatcatgtatgaaatgcttgttggttaccctccattttattcagaggatccaatgtctacttgcagaaagattgtgaactggagaagtcacttgaaattccctgaagaggcaaagctttcttctgaagctaaggatctcatcagcaagcttttgtgtaatg

SEQ ID NO: 2801 - DNA, 376 bp, Zea mays
  Clone ID: LIB3136-014-Q1-K1-G4
gagttgttgctcaaaaaatgactactgtggtactgcgccaccttagacaaattgctcaagggacaagtggaggagtagtgtacgccttgggaaggcaacctgcagtcctacggacctttagtcaaagactaagcagggggtttaatgatgccattagcggtttcaatgatgatggctggtctgtaatggggggagatggcattgaagacgttgttattgcttgcaactcaaccaagaaaattaggaataccagcaatgctgggattacatttggagccccaggaggcattatttgtgcgaaggcatccatgttactgcagagcgtcccaccggcagtactggtacgatttctgagggagcatagatctgaatgggc

SEQ ID NO: 2802 - DNA, 310 bp, Zea mays
  Clone ID: LIB3136-014-Q1-K1-G5
cggacgcgtgggcgcgtcacgcgccctgtgtagggatctcccccttctcctgctctttgttggccgggtagcgtcgcgtggaagcacggcggcgtggttccgcgcccgtttcgcggtggcggttccgcgaacctcgccggcggccggactaacttcaccccgccgtgtggtgcacggcaatcggcgcagcacggtgggttatgctgctgctgcgcctacctatatggacggaggattgttgtggttgtggtcgccccgactagatattttccttctgtggtgtatgattgctatggcgggcccgcgctcg

SEQ ID NO: 2803 - DNA, 429 bp, Zea mays
  Clone ID: LIB3136-014-Q1-K1-G6
agccttccgaggaatttcatccggccaatatgtgggcacaagatatgtgtctaggaatggaacatcagggtcttcgtccagcgttcgagatgagaagagccaccagtctccggctagtgctaataggagtggacatggtcatagatcttcatttgagcaaaaccgcgcttcaccagctcttccgagcaaagttgcacatgcagcttcaaggatatactctcaggcatcacctcaccccccgaaggtagaaacaccagttccaaaggtggttttacctcctcagtcacagaaatcccccgccaaagttgatgcaacaccgcctaaagttgagaagccatcggttacaccacctcctaaagttgattatgccactgatctctttaacatgttgtcaatggatggaacaacagagaaagagtcagcgtcatc

SEQ ID NO: 2804 - DNA, 351 bp, Zea mays
  Clone ID: LIB3136-014-Q1-K1-G7
cggtagcaggagcgcagccagcaagctcaggcccccagccctactgccaccgcgccgaacgaggtggccgagccggcggagcaccgtccagctgaggaggaggaggccgcggcggccggccaggatgaggacaccggcgcccacgtcgcgcccatcgtgaagctggaggaggtcgccgctaccactggagaggaggacgaggacgcgctcctggacatgaaggcgaagctctaccggttcgacaaggaggggaaccagtggaaagagcgcggcacaggcactgtgaagctgctcaagcacaaatacacggccaaggtccgcctcgtaatgcgtaaggcaaaaaccctaaaa

SEQ ID NO: 2805 - DNA, 398 bp, Zea mays
  unsure (1)..(398): unsure at all n locations; Clone ID: LIB3136-014-Q1-K1-G8
ccaactccaactacgttcttgttaattgtcgaaacacacgttggggagatgggggactataaaagcctctatgaccccatccttattttaggccctttggtactcaggagcgatgcaaggacctgctgcgccgaagaaccattacttttgctgtgtgtgcaccacctacatttgcatgtagacctgcgactacctactcaccaagtgcgccaccacctgcaagaactgcattcccgtatccacagacacgggcgacaccaagtacaggcgctcttacttgctcatgcaaaactgctgctgctacatccactagactcatacacagcggcacagccgatggatcctttcatgctcctncgtccgtccgccttgctacaagcaggcagccatcaataagc

SEQ ID NO: 2806 - DNA, 110 bp, Zea mays
  Clone ID: LIB3136-014-Q1-K1-G9
aaaatggcagatcttcactgcagggtctgcttggcagaaagcattcgtagtcatagtattagctgttaataatttgactgagcaagtcaagcgttgatctgtgttctagt

SEQ ID NO: 2807 - DNA, 308 bp, Zea mays
  unsure (1)..(308): unsure at all n locations; Clone ID: LIB3136-014-Q1-K1-H1
tcgcacaggaccaccagagagccacaacaccagcggcaggcacccaaagcccaagaccgccaatggccgaccgcgtgtaccccgccggcaagccgaacccgccttcaagcgcggggggcaacagcaacggcgcgcaggcgtcgtcgttccctgcgcccaagtcgcagatgtaccagcggcccatctaccgtccgcaggcccccgcgaagcggcagcgcgggcggtcgtgccggtgcagcttgtgctgctgcttctgctgngcgcttgtggtggtgatcctgctggcgttcgtggccgcggtgtgcggc

SEQ ID NO: 2808 - DNA, 362 bp, Zea mays
  Clone ID: LIB3136-014-Q1-K1-H10
cggacgcgtgggtgagattgtgaaagaagtctcattctacctcaagaaagttgggtacaacgctgataagattggcttcggtcccatttctggttttgagggcgacaacatgattgagagggccaccaaccttgactggtacaaaggcccaaccctgcttgaggctcttgaccagatcaccgagcccaagaggccttcggacaagcccctgcgtctgcccctccaggatgtgtacaagattggtggtattggaactgtaccggttggtcgtgtggagactggtgtcatcaagcctggtatggtagtcacctttggtccaactggcctgactactgaggtgaagtcttgtgagatgcaccatg

SEQ ID NO: 2809 - DNA, 410 bp, Zea mays
  Clone ID: LIB3136-014-Q1-K1-H11
aggcggcttgccctgcccgccgccttggtgccgcgcgcgccatggccaagagcaagtcgtcggccaaggccggccccccgctcctcggcaagtacgagctcggccacctcctcggccggggcaacttcgccaaggtataccacgcgcgctgcctcggcggaggcgaccccgtggccgtgaaggtgctggacaaggccgggctggccgccacgggcatggcgtcgcggctcctgcgcgaggtgtccgccatgcgccgcctgagccaccccaacgtgctccgcctccacgaggtgctggcgacgcgctccaaggtgtacctcgtgatggagctggccccgggcggggacctcctgtcccggctggcgtcgttgccgtcccgcaagctccccgagcacgcggcgcggcgcgtg

SEQ ID NO: 2810 - DNA, 306 bp, Zea mays
  Clone ID: LIB3136-014-Q1-K1-H2
ctcatgtatttggcttttaagctctacaggatgtggctcactgggggaaaacccagagttgtgcgagatcaaggtccttgaagactacatataacagcgccattggctacatataaaagcgctattgacagatcagtggattgataaaactccatgcagcggagcgcttttaccttacctggctggcacctaccaacatttgaatgtagctctaaggataacgatcttgttcgaacctaactgtaattgcttttttgattagtaaaccaggaccccgtacgatgtagagtatgggcattatttatg

SEQ ID NO: 2811 - DNA, 284 bp, Zea mays
  Clone ID: LIB3136-014-Q1-K1-H3
gaagaagaatccgatcatcttctcgatggcgcgtctcgaccgcgtgaagaacatgacaagccgggtcgacatgtgcggcaagaacgcgcgcctgagggagctggcgaacctcgtgatcgttgcctgtgaccacggctaggagtccaaggacagggaggagcaggcggagttcaagaagatgtacagcctcatcgacgagtacaagttgaaggggcatatcccgtggatctcggctcagatgaaccgtgtccgctacggggagctgtaccggtccatttgcgata

SEQ ID NO: 2812 - DNA, 259 bp, Zea mays
  Clone ID: LIB3136-014-Q1-K1-H5
gaaagaaaacacgaagttaaatcaggaaagaagtaagtctgaattctttggtaaagaagatgaggctaatgacactgtccagaatgctctatgccacaagagtaataggtatcctccaagaccattattatctgattcatctaggcatcaaggcgaaagtgacttccagaagccatttgttggagggtttgcgatattgccagatgatgaagaaccatgtgagaaacgttatggtggcgctaatataaattgcagaact

SEQ ID NO: 2813 - DNA, 344 bp, Zea mays
  Clone ID: LIB3136-014-Q1-K1-H6
gcgtgacatgctgcctgcggttcccgggccagctgaactcggacctccgcgggctggcggggaacctgatcccgttcccgcggctgcacttcttcatggtggggttcgccccgctgacgtcccgcggctcgcagcagtaccgcgcgctgacggtgccggagctgacgcagcacatgtgggatgccaagaacatgatgtgcgcggcggacccgcgccacgggcggtacctgacagcgtgcgccatgttccggggcaagatgagcaccaaagaggtggacgagcagatgatcaacgtgcagaacaagaactccctctacttcgtggagtggatccccaacaacgtc

SEQ ID NO: 2814 - DNA, 168 bp, Zea mays
  Clone ID: LIB3136-014-Q1-K1-H7
tcgatgagtggtcaggcaggcattcctttagaagaaaatctctacatgccattgagggcaccccagagtcatatgaacaagctatctctataatcgggcgaacgctgtcaccttttgacgatgataacttgataccatggtttggatttggggaagcttttaaaacat

SEQ ID NO: 2815 - DNA, 445 bp, Zea mays
  Clone ID: LIB3136-014-Q1-K1-H8
cactaacgaacgaactcttgctccgatcacgagctagctgaggtcgacgatggcggctgtgctgaacagcaggaagacgccgcaggtggtggccgtgctggtggtggtggcgctgctggcttcgtccgcgtcggcggcgatcacctgcgggcaggtggggtcgtcgctggcgccgtgcatcccgtacgcgacggggagggccagcgcgctccccgcgtcgtgctgcagcggcgtcaagagcctcaacagcgcggcgcggaccagcgcggaccgccaggcggcgtgccgctgcctcaagagcctcgccaacagcgtcaagagcgtcaacatgggcaccgtcgccaccatccccggcagtgcggcgtctgcgtcggattcccatcagcatgtcaccgactgcacaagatcagctagttacgacgaccagcttatagcctaccgacgt

SEQ ID NO: 2816 - DNA, 244 bp, Zea mays
  Clone ID: LIB3136-014-Q1-K1-H9
cgacgcgtcaacgggccttggcgcgcgagtactcgcgcctcgccaacctgaagaggcctccggatctctccggcatgactgaggccgaccgggcggtggaggcggagaggctgagggaggagatgttgcagaaggcgcgtcaactccaggaccagggggacatgagcggcgcccgcgagtctgaaggtctggcacgcatcatcgacttcgatgtcaagcagggtggcgaatacctcaacagtat

SEQ ID NO: 2817 - DNA, 466 bp, Zea mays
  Clone ID: LIB3136-014-Q1-K2-A1
cggacgcgtgggcggacgcgtggggtggcaaacaacaatagacattcaggcactgaagagggaaggagaagcgggtggtctgacatggacccaatgcgacgccaggctccaccaccagttataaatgcaggcagcctagccaagcagaagtcgcctgttcggcctgagacatcaacatcgaaagatgctgtgttctccagttcgacttttttgggacgttcaagcggatcgtcaaggcggcctgctgtatctagtagccgagagctaagcactgaagcggagcaaacacgtagccgcacaactgacgcgagcccaggggcattccagaggtctggagctccacggtggagcccgcagatgcctgattcctcggacggcaggcgttcgtcttccagcaggcgccactcatctaaccccaagaactacgagtctaccattaggggcatgcagggcctaaactttgatg

SEQ ID NO: 2818 - DNA, 237 bp, Zea mays
  unsure (1)..(237): unsure at all n locations; Clone ID: LIB3136-014-Q1-K2-A10
cgacccacgcgnccgcaagggcttatcaatgaacccgctcgctttttttccttaaccgaccagcccatgaaaaggaaggttcttaacactgctttgggttacaagataccattcactacaacgagatcacacctatctcctagccccccataatggataactgactgcataacatcgactaccccctccttcatctaaagatcaccggcttcttcaccggtgactgctccacactat

SEQ ID NO: 2819 - DNA, 460 bp, Zea mays
  Clone ID: LIB3136-014-Q1-K2-A11
cagcagccaattcgctcgagttcagatcgtgcgcgcgccaagcaagtcttccggccggccgcgaagagcgcaatcaagcaagacaagatggtgaagctcgccttcggaagcgtcggcgactccttcagcgccacctccatcaaggcctacgtggccgagttcatcgccaccctcctcttcgtcttcgccggcgtcggttccgccatcgcctacgggcaactgacgaatggcggcgcgctggacccggcgggcctggtggcgatcgcgatcgcgcacgcgctggcgctgttcgtgggcgtgtccgtcgcggcgaacatctcgggcggccacctgaacccggccgtgacgttcgggctggccgtgggcggccacatcaccatcctgacgggcgtcttctactgggtggcccagctgctgggcgccaccgtggcgtgcctgctcctcgggttcgtcacccacg

SEQ ID NO: 2820 - DNA, 422 bp, Zea mays
  Clone ID: LIB3136-014-Q1-K2-A2
gtccccagcagagaagcaataccatgttaaaattcttgatgaactacttgacagcatgaaccattcatctgctcaggtaagagaagcaattggtattgccatgtgtgttacaacctcaaatatgagactttctgggttatttggcactggatgttcaccgcaaggccttcatggggatgtaagcatgattgaacaaacaggaaataaatattggtctgaacgtttgacagatggagctaatgaattagccgtaagtatacaaaatagtactcaatctaagcaactagaatcaacatcagattcggctgaagatagcatggatgatagagagcaggctgatgctaaaaggatcggaacaatatttcattttatgatcgcatctttgaagtctgggcgatcttcttgtctactggacactatta

SEQ ID NO: 2821 - DNA, 462 bp, Zea mays
  unsure (1)..(462): unsure at all n locations; Clone ID: LIB3136-014-Q1-K2-A3
cgcccgactggcttcaagtgcggaatcaactaccagcctcccagcgtcgtccccggcggtgacctgaccaaggtgcagcgtgccgtgtgcatgatctgcaactccaccagtgttgtggaggtcttctcccgcattgaccacaagttcgacctcatgtacgccaagcgcgccttcgtgcactggtacgtcggtgagggtatggaggagggcgagttctccgaggctcgtgaggatctggctgcgctcgagaaggactacgaggaggtcggcgctgagtttgacgagggtgaggacggcgactagggtgacgagtactagacgctctactggcgcggcgtcttctggcttgtgtgccactgctatcctgtgatctgccctgagtggctcctatcgngatatgtctctgtcggttcttatctatctgacgntgtgtggtttacaacttacgttgtaagactttat

SEQ ID NO: 2822 - DNA, 453 bp, Zea mays
  Clone ID: LIB3136-014-Q1-K2-A4
cgttggcggcggtgctggactactcctacccgccgctggcggagaccagcgaggcgacgttcgacgccgccttcagcgtcaacacacggggcaccttcctgtgctgccgcgaggcggccaggcggctggtgcgtgacggccgcggccgaatcgtgacgttctcttcgtcgggagttgggtctctgcgccctggctactcggcatacgcagcaagcaaggccgcggtggaggtgatgactaagatcctggcgcgcgagctgcgcggcacggggatcacggccaacgtggtggcgccagggtccacggggacacccatgatgtacaccggcaagacggaggatgacatggagcgatacatcgccgaggcgccgctgggccggctcggcatgcccgaggacatcgcgccgctcgtcagcttcctcggtagtgatgctggccactgggtcaacgcgc

SEQ ID NO: 2823 - DNA, 422 bp, Zea mays
  unsure (1)..(422): unsure at all n locations; Clone ID: LIB3136-014-Q1-K2-A5
ttcttttctgacacttttattcttaccaaacttttttgcctggtggttgctgataatcgagccagtccccaagtttggctcttggaacctcttccctcatcttcaggattgggttctgattcacctgctccaatggctgttcttttttgttgctgatgctttcccggtcttagctatncggtttgagggctatgagaagcgccttgagatcacattctctgaggcacctgtctttgtggaccctcatgggcgtggtttgcgtgccctctccagggcccagattgactctgttctggatcttgcacggtgcacaattgtgtccgagctctccaacaaggatttcgactcatatgtcctttctgagtcaagcttgtttatctatcctctgaagattgtcatcaagacctgtggcactaccaagc

SEQ ID NO: 2824 - DNA, 185 bp, Zea mays
  Clone ID: LIB3136-014-Q1-K2-A6
gactgaatcatagcgagcgagctgtccggacaaaccctcacgggcgcctccacaatgccgtgccatctcgcgctgctcctgcccctgctcctgctggcctcggcggcgggcacgcgcctggcgtacgccgcctgcgcgggcgagaagttcccggcggggcgtgcgtacgcgtctgtgcgaggacc

SEQ ID NO: 2825 - DNA, 440 bp, Zea mays
  Clone ID: LIB3136-014-Q1-K2-A7
ctctggtgcggcagcagggtcaaaggactacgttcacgtgcgcatccagcagcgtaatggtcgcaagagcctgactaccgtccagggattgaagaaggagttcagctacaggaagatcctcaaagatctcaagaaagagttctgctgcaatggtacagtggtccaggacccataacttggacaggtgattcagctccagggtgatcagaagaagaacgtgtcgaattttctcgtccaggccggcattgtgaagaaggagcacatcaagattcatggtttctgagcaaccgccgggtccatagcaaaccaaccctgcatgcagggccagcttattatatataatatctgaggtggagcatatctatctggctgtgtactacaagcaggcctagtacgccgcctgcgcgttccttctattacacataacacatataaccccc

SEQ ID NO: 2826 - DNA, 440 bp, Zea mays
  unsure (1)..(440): unsure at all n locations; Clone ID: LIB3136-014-Q1-K2-A8
ggaggagggtgttgttctacagtacataatgaaaaatagtttccaattattttagcatagcaattaaaggttcaacactgattagacatggtgattttctccatgtctgcactatcacgattttctcaaatctattgccatggttagttgagtactctgcaaattcaaacatgcaacagttgcttttttttgtcagtcgttaaagaagttaacctgtttgtgcagctagttgaaagggtagttccagtcatcaggaaaaaatcaccacaagatcttagaagaaacaactccatggaatggtaaaaatgacactgagccctgatgttcttctcttagaatntacagggtttctttttcttttaagaattctggtctcctaggtttctttggcagctatttaaaataatggaaaacatttaagggaatgggcgtgataaaaa

SEQ ID NO: 2827 - DNA, 430 bp, Zea mays
  Clone ID: LIB3136-014-Q1-K2-A9
gtaatgctgcaaggcacttgctcacccttgtcgagaagaacccccgtcgtatctttgagggtgaggcgcttcttcgccgcatgaaccgctatgggctgcttgctgagggtcagaacaagcttgattatgttcttgccctcaccgctgagaacttcctcgcaaggcggcttcaaacacttgtcttcaaagctggcatggccaagtccattcaccatgctcgtgtcttgatcaagcagcgtcacatcagggttggcaggcaaattgtcaacgtcccatcattcatggtgagggtggagtctgagaagcacattgacttttcactgtcaagcccattcggtggaggccccgcatgaagggtgaagagaaagaatcagaagaaggcaagcggtggcggcgatgctggcgatgaagatgaggagtgaggatggac

SEQ ID NO: 2828 - DNA, 454 bp, Zea mays
  unsure (1)..(454): unsure at all n locations; Clone ID: LIB3136-014-Q1-K2-B11
gcgtcggcacgtacaccaagctgncggtaccatttgcctgagggttgggtagatgggcaagcggtgctgcagcaacgaggcggaggaggaggccgggttcaacctcctggggctgctggtcgccgccatcatcgcgctggtgttcatgctcctctgcgcgccgcccaggaggcgctgcgtcgccgtctacccgtgctgctgacccctcagtcagcgctcgcgcctcctcgctgtgccgctgccgctgcctggccctcctcgtgcgggacaggagcttctggatccaaccaacaggtttcggatcagcttcagcatgtgtgcaggggagcttcaagttcttggggggaggggagcagagcaagacaggcattggttcatcacatcatctttcgatccaccaataatttctactcaactgtaatatccatcctgctccaactcatgtaatcctttt

SEQ ID NO: 2829 - DNA, 293 bp, Zea mays
  unsure (1)..(293): unsure at all n locations; Clone ID: LIB3136-014-Q1-K2-B12
acccacgcgnccgcgctcgtattcccaaattccaaagccaacctaatgcgcaaggcgactggcgaaacgcgttcgtcctctccttttcccaaaggcaaccaaaccatctcgactcgtggggaagtttcgctctctcgggggtcgacttcctagtgttcgaggaacgtccatccgtccgtcctgggaaggttcatgagggaggccgagatgatcgaggtggtgctcaaccaccgactcgtgaagaacgtgcgggtcaagcgcaacgaggacgacaccatcagcgaccctaacaa

SEQ ID NO: 2830 - DNA, 300 bp, Zea mays
  Clone ID: LIB3136-014-Q1-K2-B2
gcgggcttatccttccccaccggttcgtgttcaggttctggttcgtgggcgagagggaagagatggcggcgtccgacgttgagtaccgttgcttcgttggcggactcgcctgggccaccgacgaccactccctcaacaacgccttcagcacctacggcgaggtcctcgagtcgaagatcatcctggatcgggagacgcataggtcccgcggcttcggcttcgtcaccttcttcacggaggacgcgatgcgcagcgccatcgagggcatgaacggcaaggagctcgacggtcgcaacatca

SEQ ID NO: 2831 - DNA, 456 bp, Zea mays
  Clone ID: LIB3136-014-Q1-K2-B3
cccgcccccgccgctctacgccaggtgcccaggtcttcgtcgggcccttcgccgaagagcagccaacaggttgccggtctgcgagttgaatcatggcggagcacttggcttcgatcttcggcactgagaaggacagggtcaactgccctttttacttcaagattggggcctgtcgtcatggggatcgctgctctcgtctgcacaacaggccaactatatcaccaactcttgtgcttgctaacatgtatcagcgccctgatatgataacccctggagttgatgctcaaggccaacctattgaccctgagaagatgcaggagcattttgaggacttctatgaggacatctatgaggagttgggcgagtttggtgagattgagaatcctgacgtttgtgataaccttgctgaccacatgattgggaatgtctatgtccagttcagggaggaagagcaag

SEQ ID NO: 2832 - DNA, 456 bp, Zea mays
  Clone ID: LIB3136-014-Q1-K2-B4
ctggcagaagatggatctgttgacgagggtgtggcttattttgttgagtgggctatcttgattgtttcaaccgttatgatcctccaaagttctctggactatctctttgcatttacaactctagtattatgtggaatcatcaaagtgattgcaagaattgagggaaagtcaaaagttttacgctatatattcgggggactttctgatggtacctctcgtaattcatcccgttatggagattttgatgaagactattctagcatgaatgaagatcgccaagatggatttggcaatcttcatggtggataccagagacatgcaccgagaagaaactcacctcttgcaggctcagcaaagacattatcgcaaggtgttgctatggatagcttctattctacatttcacactaccccagagaggatggaattcacaaaagaggaatatgaagcattcacc

SEQ ID NO: 2833 - DNA, 349 bp, Zea mays
  unsure (1)..(349): unsure at all n locations; Clone ID: LIB3136-014-Q1-K2-B5
ggccggcgnccagaccggctccccttccccgccttcggtgcccaaggccaggccaacagttttgaggtggtaatggcggaccaggctaaccaacccactgtccttcataagctaggtggccagttccacctgagctccagcttctctgaaagtgtacgggcccgtaacatctgcccttctttcttaccttatgaaaggagatttgccacgaggaactacatgacccagagcctttggggcccttcaatgtctgttagcggtggcatcaatgttccagggatgccgactccgctttttgccaatgctccaaccgagaaaggtggcaaaaacttcatgattgatttcatga

SEQ ID NO: 2834 - DNA, 307 bp, Zea mays
  Clone ID: LIB3136-014-Q1-K2-B6
catatgcacctatgctcaagctatggtgttcacgactgtcttggcgaaaattctgaccttcccggcgttgccctgtggttgctggaggacgggaagatggctagcatcttcaggagtactgtacttgcttctgcaccttgtggctttctcgaccgacgtgcaaagcgccctgtgtgaatatccatctgtagaaaaagtggatgccctgcgatccctttcttcatggacatggtgtgcagacctcttttactctatggcacttgatccacgactgtagctgatcctttgtactggatgcgagcgacac

SEQ ID NO: 2835 - DNA, 368 bp, Zea mays
  Clone ID: LIB3136-014-Q1-K2-B7
cggacgcgtgggcggacgcgtgggaaaaaatccaccaatttgttaatataccactccctgggtgaagcgaagatgggcagccatggctttggatgtatattgcttgatgtggtcagccatgccttttgagttcttgtatgccatggcagcagagctggaggagcttatgtcatgtgcagttgccgtatgcgccaatgctactgtgtttgtaaaggtctcagctgaggtgctgcggctatcatctgggtccgcgataagttaattgtactgatagttgatatctaactactattttgcgatcaaatgaaaatgttggaactcaaggatcggatggtatagtgtattatgaacctgttctggctggcgga

SEQ ID NO: 2836 - DNA, 399 bp, Zea mays
  Clone ID: LIB3136-014-Q1-K2-B8
gtgaagctcgtcctaatgatgagcgaagagagaagctacatgatcgcgagaaggataagcccaagtcagagaacaagaagattctggatgcaaagcaactaattgatatgatcccaaggacaaaggaagagctttttgcctatgatataaactgggcgatatatgacaagcatgagttgcaagagagaatgaggccttggatttcaaaagataattgaatttcttggcgaggaggaatcaactttggtggactatattgtttcctgcaccaaagaccatgttcaggctgaaaagatgctagatcttctacagtcgattttcgatgttgaggccgagatgtttgtcctcaagatgtggaggatgcttatatttgagatcaagaaagtcgaatctggacta

SEQ ID NO: 2837 - DNA, 131 bp, Zea mays
  Clone ID: LIB3136-014-Q1-K2-B9
ttcgctctagttcaatcgtcgccccaagcagttcccggcggaaccatcacagaagattaactgctcaagctgcactcttacccatcataggctactggcattatgcccctctttgctcccgctcgtcgcat

SEQ ID NO: 2838 - DNA, 416 bp, Zea mays
  Clone ID: LIB3136-014-Q1-K2-C1
cccacgcgtccgcccacgcgtccgctcgtccctccccctcgtccagttcactcccattgggcgagaagccgagaaggacagggagggagcgagagctagccaggccgtcccgtccagagccgctatgtccggcggcgcgcccctcctggccctgctgctgctggcggcggcggccatgatcgccccgtcgccggccaatgccgccgtgtcgtacgaccacagggccgtggtcatcaacgggcagcgcacgatcctcatctcggggtccatccactacccgcgcagcacgccggagatgtggccggggctgctgcagaaggccaatgacggcgggctggacgtggtccagacgtacgtgttatggaacgggcacgagccggtgcatgggcagtactacttcgtctaccgctacgacc

SEQ ID NO: 2839 - DNA, 277 bp, Zea mays
  Clone ID: LIB3136-014-Q1-K2-C10
cactcgtatccccaaatgtccaaagccaactttatgcgcaaggcgactggcgaaacgcgttggttgctctccttttcccaaaggcgaccaaaccatctcgactcgtggggaagtttcgctctcgcgggggtcgacattcctagggttcgaggaacgtccgtccgtccgtcctgggaaggcgcatgagggaggcggagatgatcgaggtggtgctcaacgaccgacttgtgaagtacgtgcggttcaagtgcaactaggactacaccttcagcgacct

SEQ ID NO: 2840 - DNA, 385 bp, Zea mays
  Clone ID: LIB3136-014-Q1-K2-C11
cccccttctcccaattccttccaggtgccttctatccacccgtacgacgacaccattagggagtgcatttccatccacatcgaccaaaccagtttccatgtctgaaacgcgtgctgggagctgtactgtctttagcatggcattcatgctgacggtcagatgcccggtgacattatcattgtgggaggtgatgatgctttcaacaccttcttcagtgagactggtgctgggaagcactttcccctgtgctgttttttgttgacctttaaacctaacttgttattctattatgtgagaacctggcacctaccgccagctctttcaccctgagcagcttatcattttgaaggatgatgccaccaacatcttttgccttggtcactac

SEQ ID NO: 2841 - DNA, 298 bp, Zea mays
  Clone ID: LIB3136-014-Q1-K2-C2
cggacgcgtggcaagggcttatattggcgttttagatgacccaaagcattcttcaaaatgatacagcagaagcactgacttgaattttggatcaattcccatgagctgatatcttcaaaaacatcttagttaggaaaaagaaggaaacgaaaatggaatttgtttccatttgttatttgtttgggtgccacaaggaggcaaaatcatagcaaggaattgtaccttattttttagggatcgtgtacttttctgctgttgagagctatttggtggttggataatgtgatggagcctatct

SEQ ID NO: 2842 - DNA, 435 bp, Zea mays
  Clone ID: LIB3136-014-Q1-K2-C3
tccgcttctctctccccatcttcatgtgcaatcctcgctcgcccacactcggcagccatggcgtagtcgcgcaccggagccggagccggagccggcggccgtgtggtggtctttccgttcccatttcagggccacttcaacccggtgatgcggttggcccgcgcgctgtacgcccggtgcctggcgattaccgtgttgcacagcggtgccctggacccggacgactaccccgacgactaccgctttgtgcccgtgaccgtggaggcggacccgaagcttctggcgttcgaggacatcgccgtcatcgtcaccacgctgaacgccagctgcgacgccccctttatggcccgcctctcggcgctgctggccgccgaggggagggacagcgttctgtgcgtcttcaccgacgtcagctggaacgccgtgctgacagcg

SEQ ID NO: 2843 - DNA, 389 bp, Zea mays
  Clone ID: LIB3136-014-Q1-K2-C4
gcccaagggagctgtggacgaggacctgtacaagatctccccgcagcttctctgcaaggtgaagaagaagaagctgctgaggaatttgcttggagggtgcctgggcttgggctgcatcgcctgagagtgagagatgcagagcttaataagtttcttgaaagttcgcttgcttggtgctctggagagagttgtatagttgtctacgctaatatgagattaatggaaacttactactgctaaaaaaaaaagtcctccaaggagtgaagactagggaatgcacattgttagtttaaactggacatttctgtgtgctcctctgcgagtccctgtcgtcgtgtaggttttagttgagctggcaagttggagtgacccttctcctgtgtaacgct

SEQ ID NO: 2844 - DNA, 399 bp, Zea mays
  Clone ID: LIB3136-014-Q1-K2-C5
cggacgcgtgggctgtgaaggagtctggtgggctgaaagaaaaattgtttcatactgcatacaatgccaagagacaagcaatccttaaagggaaaaatccatccctagtgtgggataagttggtatttaacaaaataaaagctaggcttggtggacgagtgagacttatgagttcaggtgcttctccactgtcagcagatgtcatggaattcctgaggatatgctttggtggtgaagttcttgaaggctatggaatgacggagacatcctgtatcatatctgcaatggatattggtgacagatcaattggtcatgttggatccccaactgcatcttgtgaggtgaaacttgtggatgtcccagaaatgaattatacatctgatgatcaaccttatcctc

SEQ ID NO: 2845 - DNA, 432 bp, Zea mays
  Clone ID: LIB3136-014-Q1-K2-C6
ctcgtcctgatctgatattaacgggacaccaggaaaatgcagaatttgcgcttgccatgtgtccagcagaaccatatgtcctgtcaggaggaaaggacaaatttgttgtcttgtggagcatccaagaccacatatctgcccttggggattcctcgtcttctcccggagcatctggcagcaagcagtctggcaaaattgcaaatgaaaaggagagtcctaaagttgatcctagaggtatattccatggccatgacagtactgttgaagatgttcagttctgcccttccagtgcgcaggagttttgtagtgggggtgatgatgcttgtcttattctgtgggatgctcgaactggcactgacccagctgttaaggttgagaaagctcacaggggagatgttcattgagttgattggaatccccttgatgttaact

SEQ ID NO: 2846 - DNA, 245 bp, Zea mays
  Clone ID: LIB3136-014-Q1-K2-C7
gggtgcctgagcttatattgatacggcactattaaaccgcggatacatcgcaaacagtgcgaacagctcaagcacttgcacccatggccatgcaagccagggacaccggactggggatcatttcagagaacgaagtggcggttgcggatctcagtcatcggccgcgatgctttgtaacggcggcgggaactataacggcggtgaccaccgagatgcttctggcggaatgtacaggaatgatccat

SEQ ID NO: 2847 - DNA, 446 bp, Zea mays
  Clone ID: LIB3136-014-Q1-K2-C8
ctcttcgtgcacatcgtcatggagctctgcgccggcggcgagctcttcgaccgcatcgtcgccaagggccactacagtgagcgcgcggctgcgaagctcatcaagaccattgtcggggtcgtggagggatgtcactcgctcggcgtcatgcaccgggacctcaagccggagaatattctctttgccagcaccgccgaggaagccccactcaaggccactgacttcgggctttacatgttctacaagcccggtgataaattctctgatgtcgttggaagtccatactatgttgcaccagaggtgcttcagaaatgctatggtccagaagctgatgtgtggagcgcaggagtaattctgtacattctgctttgtggtgtgcccccattctgggcagaaactgaggctggaatcttcaggcagattctgcgaggcaaacttgattttga

SEQ ID NO: 2848 - DNA, 464 bp, Zea mays
  Clone ID: LIB3136-014-Q1-K2-C9
gtcacacacagccaaacagccaggtaccatttgcctgagggttgggtagatgggcaagcggggctgcagcaaccaggcgggggaggtggccgccttcaacctcctggggctgctggtcgccgccatcatcgcgctggtgttcatgctcctctgcgcgccgcccaggaggcgctgcgtcgccgtctacccgtgctgctgacccctcattcagcgctcgcgcctcctcgctgagccggtgccgctgcctggccctcctcgtgcgggacaggagcttctggatccaaccaacaggtttcggatcagcttcagcatgtgtgcaggggagcttcaagttcttgcggggaggggagcatagcaggacaggcattggttcatcacatcatctttcgatccaccaataatttctactcaactgtaatatccatcctgctccaactcatgtaatccttttgttctggcgaacc

SEQ ID NO: 2849 - DNA, 392 bp, Zea mays
  Clone ID: LIB3136-014-Q1-K2-D1
gcttgtgcagggagtgacgaagcagatcggtggctcagtgcacgagctggcggcgaaggtggacgagtacgcccgcggcatgatcagcgggcccggctcctcgctcttcgaggagctcggtctctactacatcggccccgtcgacggccacaacatcgacgacctcatcaccatcctcaacgacgtcaagagcaccaagaccaccggccccgtcctcatccacgtcgtcaccgagaagggccgcggctacccctacgccgagcgagccgccgacaagtaccacggtacaacgcaccacatgagctagcatatgtgccactgtttgcctgttgcacagcacagatcgtaccccgaccggaatctgtgcgtcatcttggcttctgtgtttgatg

SEQ ID NO: 2850 - DNA, 350 bp, Zea mays
  Clone ID: LIB3136-014-Q1-K2-D11
cgacgcacgcgtccgatcacagcgcccacctttcaaccggacttgtgttacttgactccgccgcggattcccctcgacatctcattctcgcctcaagcctaaccgcctacggtggccatgatggccaccgagcccttgtccccgggatatttcgtttaggaccttgaaacactacccctctcctgctccactctcgcggctacgaccgacccgctgctccgcccacctttcccctcgttcaccttctcttccaccgccggcgagaaccacgtcccgtttcttgacgaggaggatgaggatggggtggatgacttcacgccttcgccggctccccatgccggtaccgccgc

SEQ ID NO: 2851 - DNA, 248 bp, Zea mays
  Clone ID: LIB3136-014-Q1-K2-D12
gtcaggttgtccccgtctaataaagccgtatttacctacgaggtagtcaaggaggtgcctgatgaatttgccagtggtgaggagctccccccctcgcgcataatctagccactccgcccgtccatggatcgcgccagggaaattcatgagattaaaacaggaggctcactcgattcgacaaatagagacatgcatcttatcaacagaggatgcaaacattacctaaactcatatcatattcccacttt

SEQ ID NO: 2852 - DNA, 423 bp, Zea mays
  Clone ID: LIB3136-014-Q1-K2-D2
acgggtcgagccacgcggtgcgcttcgcaagtatacgtctctctgctaagcgaagcgaagcttcaagctagtctcggcggctctagaagacgatgggcaaggacgacgtgatcgagagcggcgctggcggcggcgagttcgctgccaaggactacacggaccctcccccggcgccgctgatcgacgcggcggagctggggtcctggtcgctgtaccgcgccgtgatcgccgagttcatcgccacgctgctgttcctgtacatcacggtggccaccgtgatcgggtacaagcaccagacggacgcgtcggcgtcgggcgccgacgcggcgtgcggcggcgtgggcgtgctgggcatcgactgagccttcggcggcatgatcttcgtgctcgtctactgcaccgtcggcatctcggggggccaca

SEQ ID NO: 2853 - DNA, 433 bp, Zea mays
  Clone ID: LIB3136-014-Q1-K2-D3
gcggaagcagcgcctcgcaccgctcctacccaatggcgccgacgtcgaagctgtcgatgggcatcaagcgcgcgtcgcggtcacacgcgtaccaccgtcgtgggctctgggccatcaaggccaagaacggcggcgtcttccccaaggccgagaagcccgccgccgtcgcggaacccaagttctaccccgccgacgacgtcaagcctcgcgttcccagcacccgcaagcctaatcccaccaagctcaggtcgagcatcacgcctgggacggtgctgatcctcctcgcggggcgcttcatggggaagagagtggtgttcctcaagcagctcaactccggcctgctcctcgtctctggtccattcaagatcaatggagtaccgatccgttgtgtgaaccagacctatgtcattgctacatcaaccaacgttgacat

SEQ ID NO: 2854 - DNA, 461 bp, Zea mays
  Clone ID: LIB3136-014-Q1-K2-D4
gcgcttccctccctccctctccccgcgggccgccagaggcaatttcgccctcgattcgaccccgattcgtccgcccgcgaccgggattccctccgccaagcgcggatctgaacgctgcgctccgtgtcgccgctcgaatccgccatgaagggggccaaatccaagggcgccgccaaggccgatgccaagctggcggtgaagagcaagggggcggagaagcccgccaagggcaggaaagggaaggccggcaaggaccccaacaagcctaagagggctcccagcgctttcttcgtgttcatggaggaatttcgcaaggagttcaaggagaagaaccctaagaacaagtctgtcgctgcggtggggaaagctgctggcgacggtggaaatccctgagcgagtcggacaaggctccctatgtagccaaggctaacaagctcaagctcgagtacaacaaggccatc

SEQ ID NO: 2855 - DNA, 202 bp, Zea mays
  Clone ID: LIB3136-014-Q1-K2-D5
gtcagccttctctagcagtgcatctccaatgaatggctcgttttgcagcaacggtgtagctgagttgggtgctgcatcctctggaagtacaagtattttcccctccaatgacctgaggatagaaagagacagcaaagtggcagctagctcttttggtagggtgatacttctgtctccagacactgtgccaaaccaaaaatac

SEQ ID NO: 2856 - DNA, 287 bp, Zea mays
  Clone ID: LIB3136-014-Q1-K2-D6
gtgagcatatcattgctggagctggtgagcttcatcttgagatttgcctgaaggatctgcaggaggacttcatgggtggtgctgaaattattgtttccccacccgtcgtctccttccgtgaaacggttcttgaaaagtcctgccgtactgtcatgagcaagtctcccaacaagcacaaccgtctgtacatggaagcgcgccccttggaggaaggtctcgctgaggccatcgatgacggccgtattggcccacgtgatgatccgaaggtgcgctcccagatcctctct

SEQ ID NO: 2857 - DNA, 92 bp, Zea mays
  Clone ID: LIB3136-014-Q1-K2-D7
gtgttcaactctgtagcagaagctaaggctgaaacaaaagccaatgcatctgtgatatatgttccaccaccatttgctgccgccgctataat

SEQ ID NO: 2858 - DNA, 373 bp, Zea mays
  Clone ID: LIB3136-014-Q1-K2-D8
tgataaagcggggctcctcgggcccggcgttggccgcatcgacactcgccgcgcaccaccaccaccgctgcggctcacggctacgcagcccgctctgccgaccccgccgtgccctcctttttttgctactagcacatagagtttcgcccgaatcgatcgccgactgactccgctagggttcggcccgatcgccgattcgtcctcccggctcccgcggggaccccgccgagatgtctgactggagctcgccggctgagccgacgttcttcccttttggcccgcaggccgaggggtgggacgtcaccttcagggtcaaatatggagatacacttaaaaggttctatggttgtgccaatgggaggcatttgacatg

SEQ ID NO: 2859 - DNA, 218 bp, Zea mays
  Clone ID: LIB3136-014-Q1-K2-D9
gtttattatatcaatattcatacgaacttttattttaccgcttaccttcaaattattctggagaatcttgatccacacatggacatgccctatattgggtgcgtttaatagcctcacatccctcagccaaataacaacgtgaacatccttcctgattcccaccacgcttaggacgctaataaaatcatacttgcctacaaccattttgaaaacctttt

SEQ ID NO: 2860 - DNA, 337 bp, Zea mays
  Clone ID: LIB3136-014-Q1-K2-E1
ggaagaagcgctccctacccaccgcggttgccccctttcggcctttccccttctcgatcgaactcgggtccttcggcgacgtgcggatttttcgtccctcccgatgctcccggggtgcgtggattgactaccggtgttgatttggcgaggcaatcggcggggagggagggggtattaatttcgatcgctgcgccgattccccggtccttaggttcattgtgaagctgaggtgagtatataggcataaagagagcatgaacactgttagtggtacaaagcgtgcaccaaggagacagtcgcaagatgggtctggtgataaactagtggtgatcgtgga

SEQ ID NO: 2861 - DNA, 427 bp, Zea mays
  Clone ID: LIB3136-014-Q1-K2-E11
cgcagatcgagtcataaatctagctagcccttatcacgcctagacacgccagcaacaatgggggctcagctggccgacgcgtgtatcgccttgttgtcctcctatgccttcttggccgtgtctggccagaagttcaacgccatcttcagcttctgcgacttcatgtccgacaccggcatcctgtgcatgaacggtccctccgccgtcctgacactcacccagccgacctactgcgagaccttctttgtccgcgccacctgtcgctggtcccacagccgcctcgtcgtctacttcctggccgagaagttcaggctaccgctgctgaagccctctaagcaaggcggttcatacttcaagcacgtcgccaacatttcgatcattggcgcgaccaccatggactctggcttgttccaatttttgggcattg

SEQ ID NO: 2862 - DNA, 174 bp, Zea mays
  Clone ID: LIB3136-014-Q1-K2-E12
aacacttctacacacaattcgcaaatggcttgtttacgatcggacacaaaggcataaagggcatcgtttcccattattgatggaccacactctctcgaggtgggaagcgaaataaaaggtggtcttttctaaaccaccggaccgagtgtagtgtagctctagcttcgcacgccc

SEQ ID NO: 2863 - DNA, 141 bp, Zea mays
  Clone ID: LIB3136-014-Q1-K2-E2
gctctattggtatgaggtttggttgccgtgttgccgagcctgtaaacgaagcaagatttgcaaacttgttatattgcggtattgatgatactggattactggctgtgggttgttcgggaaaaaaaaactaaaaaagataaa

SEQ ID NO: 2864 - DNA, 358 bp, Zea mays
  Clone ID: LIB3136-014-Q1-K2-E3
accacagccagtcagccacatcactagctatctgtgcagaggcaatggcgtccaaggttgagctggtggtggaggtcaagtccccggctgacaagctgtgggcggcgctgcgtgactcgacggagctgttccccaagatcttccccgagcagtacaagagcatcgagaccgtcgagggcgacggcaagtcggccggcaccgtccgcctcctcaagtacaccgaggcggtgccgatgctgacgttcgccaaggagaagcttgagacggcggacgacgagaacaaggtggtgtcgtacagcgtggtggacggcgagctggcggacttctacaagaacttcaagatcacgctgaaggtgac

SEQ ID NO: 2865 - DNA, 403 bp, Zea mays
  Clone ID: LIB3136-014-Q1-K2-E4
ctactcactctctctccccatccgcgccagtccaaccaagtcagcacccgcgcgcggcaaggagttcacgcccatggcgagcaccaacatggcgtcggccacctcgcggttcatgctggccgcgggcgtgcccactgccagtagcggcagcggccgtgtcagcttctcctcggcgcccaaccggcttggcaggaggcttgtggtccgggccgatgaggagtccccggcagagccggcgcccaccgcggaaggggagggcgccgtggccaccaagcccaaggccgagaagccgccgccgatcgggcccaagaggggcgccaaggtgaagatactgaggcgggaggcctactgggccaaacggatcggcaacgtcgtcaccgtcgatcaggatcctaaccacccg

SEQ ID NO: 2866 - DNA, 304 bp, Zea mays
  Clone ID: LIB3136-014-Q1-K2-E5
cggacgcgtgggcggacccggccactttcctcgccaccgccaacgaatacttcgccgccgacaacgacttcaccaacaatcatccatcgtcgccggccggcgacctcttcacctttgggggcagcggcctcctcaccattggcacgctaggcatcgccgccgtcgcggggtctgcagatgctgatgaagttgattaccacgtcgacgccgatgctgactccgactttgacgacaacgacgacaccgccggtgatgacgaagaccaggtcgacagcgccgtcacgcccacgttcacatatgcagc

SEQ ID NO: 2867 - DNA, 430 bp, Zea mays
  unsure (1)..(430): unsure at all n locations; Clone ID: LIB3136-014-Q1-K2-E6
tcagatacgcctttggattgagagtggtcagaacatgaaatgtgaaagtacttcagcttctaacagcaaaggtcttgatacgccaagcaaggcgaatcgcaagagatctcgacccggtgaaagtgctaagccacgacctaaggaccggcagctgatacaggaccgtattaaagagcttcgtgagcttgtaccgaatggggcaaagtgtagcattgatggtttgttggagaagacggttaagcacatgcttttcttacaaagtgtgacgaagaatgcagacaagctcaaggactctaccgagtctaagatacttggtagtgaaaatggccccctttggaaagactacttncgaaggtggggctacctgngctnttgatgtcggctctcagtctatgacatgtccaatcattgttgaggatcttgaccgacc

SEQ ID NO: 2868 - DNA, 320 bp, Zea mays
  Clone ID: LIB3136-014-Q1-K2-E7
caggcacgctggtcaggaaatcagtagcctgttttggctgctgttgctaatcagttgggagagggagagatggccgggaggaacatcggagtcgcagtggacttctcgtcgtgcagcaaagcggctttgcggtgggcgtcggcgaaccttgccaggaacggcgacaggctcatactcatccacgtgaacagctcctgccagaccgagcggggcgccgttcatctctgggagcagagtgggtccccattgatccctctggccgagttttcagacgtcgccaggacatacggtgtgtcaccggacaaggagacgatcgagat

SEQ ID NO: 2869 - DNA, 390 bp, Zea mays
  Clone ID: LIB3136-014-Q1-K2-E8
ggtgcatggaacgaagatggaaagggggaaagcaattgggatcacttctgccacaattttccggaaaggataatggacgggagcaatgcagacattggagcgaattcgtaccatatgtacaaaacggatgtcagattgctgaaggaaatgggcatggacgcatataggttctctatctcttggcctagaatactgcctaagggaacggtcgaaggaggtattaaccaggatggcatcgattactacaaaaggctcatcaacttgttgctagagaatggcatagagccatatgtaacaattttccactgggatgtccctcaagcactcagaagaaagtacggcggattcttagataagactcataagaggattgtaaatgattacaaaaac

SEQ ID NO: 2870 - DNA, 302 bp, Zea mays
  Clone ID: LIB3136-014-Q1-K2-E9
gacgtacttttaaaaacacacccgaccatttctccacaagcccaaacacacacgaacacaggaggctatccactatgcaccgacgctaactcatcgcgaccaaagaaaaggacacagcaactcagcaagacccccatcttccatagctctagctactaactacatactttcaggccggcggctcgtgaacacctcatctttttagccacttttgccatcaacaacgaccaccgaacgatcatctaacagctaaaacatcttgcgtcacgaggaacacacagacggcggtgacattgttgact

SEQ ID NO: 2871 - DNA, 348 bp, Zea mays
  Clone ID: LIB3136-014-Q1-K2-F1
gcccgattgggtgcactgcactggtggtgtgcacgcccctcgtcactcacacgctaccccatatcccattctccccgacggcgcttctggcagcaaggaacagtatgtccaatagggccacccattggtgttatgcctgtcggcgaccaattcgtcttcgtgggcaggatatcatatgtcccaactgcaatgatggttttatccaagaaatcagtgagatgggtggcgtactgaacacttatgggctaattgaaccggactttgaagagcgccaggccagaagatttggaatgatggatgccatatcttccctcatgcggcaacggctgtcagaaataggaaagggac

SEQ ID NO: 2872 - DNA, 410 bp, Zea mays
  Clone ID: LIB3136-014-Q1-K2-F2
gactcctcgcattcgccgctgcgtcaacgtgtcttcctttccgcggtctctccgtcgcctaccagatacggcggccatggcaaggaacccgggctggaccgtctttataggcacgttcaagcttaccttgcagtttacagaagattacccaaacaagccaccaactgttcggtttgtctctaggatgtttcatccaaacatatatgctgatggaagcatctgcttggatattctacagaaccagtggagtcctatatatgatgtggctgcaatcttgacttctattcagtccctgctgtgtgatccaaacccgaactcccctgcagactcagaaagccgcaagactgctcagcgagaacaagcggtagtacaaccggcaagtccgctagatagtggagcagagctggaca

SEQ ID NO: 2873 - DNA, 211 bp, Zea mays
  Clone ID: LIB3136-014-Q1-K2-F3
acccaatccaaaccagacaagcaaggaatcccccgatggctcatcgcgttctcctcctcctctctctcgcgtcggccgccgcggttgccgccgccgtcgacgcggaggacccgctgatccggcaggtggttcccgggggagaagacaacgatctggaacttaacccggagtcccactttctgagctttgtgcaacggttcggcaaggtcta

SEQ ID NO: 2874 - DNA, 453 bp, Zea mays
  Clone ID: LIB3136-014-Q1-K2-F4
tgaatgacaaggttgaagatgacagtactttgcatgagaagtctgaagatgacacaatgtcggaagaggtctctgttatggagagcaatttgcctaatgacgctagaaatttgctaaactattgtaggtttgcaagagttccaacaagaccacgaacagtgcttgcaaacaggaatgttggaccatgtcaaagagaaattactgtgtctgaacagctcaatttggttacttctgaagaaatatccaatatggcaatggatggagaagctaacactaattccataactagcatcgaggaaggcagtaaagttgagctggttggccaagaccaagaacatgctgaacaaagcgctatctgcaatcaagtggcagaatcagtggcattccatgaaaaggaaacctcgggtgaaactgaagaaaaggaagaacagaagaacatccctcaacattatg

SEQ ID NO: 2875 - DNA, 311 bp, Zea mays
  Clone ID: LIB3136-014-Q1-K2-F5
cggcaaacgggtggtgcgcttcaagtcgaaccatctcggcaagttctggaggcggagccccaactggatctgggccgacaccgacgacaccagcactaacaactccgacaccctgtttgaggtcatcaagatcgacgaggacgacgtgtacgcgctccggaacctcggcaacaaccacttctgccacaggctgacctacgacggcaaggagagctgcctgaacgccacaattccgaccatcaggaaggaggcgcacatcaagatcgaagaagccgtcctctcccgaaagatctccaacatcgagtaccacc

SEQ ID NO: 2876 - DNA, 233 bp, Zea mays
  Clone ID: LIB3136-014-Q1-K2-F6
gtgttcctttgttgtcttggacagtatcagctcagttttagtacgagtcagcttctagttcagttgactattcattttaacgtggatggtcagtactttataatagaccagatgtatgatcgtgatcaaccaattttgtggtttcttttctcgcaaacaggaatgttggaaccaacgaaaaaaaggggcggctgatctagaacagcgaagcttgcttactggtgcctacaatt

SEQ ID NO: 2877 - DNA, 154 bp, Zea mays
  Clone ID: LIB3136-014-Q1-K2-F7
cctttgaaaatatttgggcgccatgtttgcatacaggtcttttcattggcagtcacaaagggcaaacgtgtgctccaattgttgatgactggcgaacaggtttctacccgaaaaaggcggatgggaagtactcttctcttacctaagctttcgc

SEQ ID NO: 2878 - DNA, 328 bp, Zea mays
  Clone ID: LIB3136-014-Q1-K2-F8
cttcgccacgaacaaaagcgcatcgatctcgctgtcgtcactcctcgtcacccagccacgaacagaggcaccacccagcatggccctgcaggcggcgctcctcccatccaccctctcatccgtccccaagaagtgcagcatcgccgtcgcggcgaaagacacggcattccttagcgtatcccagaaggtcagcgatcagctgcatctgcatctgcatgctgcactcgcagtcacaatgcgcttgaattgaacgtgtcactgactctgtcgtgagcatgccatgcgggcagaaggtgcaggcggcgtcgctgttggtgagaacgcgggt

SEQ ID NO: 2879 - DNA, 84 bp, Zea mays
  Clone ID: LIB3136-014-Q1-K2-F9
ggcgtgccgaatgagtatgctggataccctttctcacgcgttggcactccctcagaactggggggatagctgggcatggaggaa

SEQ ID NO: 2880 - DNA, 461 bp, Zea mays
  Clone ID: LIB3136-014-Q1-K2-G1
cggaactgggacagcaaaggaagatacggcgcgatattttagattacaggagagtaggagaccggcgccgaaagctccgtggcctcgtctccttccccacttcggcctcggcagttccgcgtgccggccggagcctcgtctcgcttcgcatctcgcacttcgcgccttcgccgctgcgattcctcagcagctcctcggccgctccacccacccctgcgccggcgagatggagctcaagcccggcatgtcggcgctcgtcaccggcggcgcctctggcatcgggaaagcactttgtattgcttttgcaaggaggggtttatttgtgactgtcgttgatttctcagaggaaaatggaagagaagttgctacattagttcaaaaagaaaatagcaaatttcacggagatcttagaattccatcttcaatatttgttaagtgtgatgttagtaatgcagataatc

SEQ ID NO: 2881 - DNA, 290 bp, Zea mays
  Clone ID: LIB3136-014-Q1-K2-G11
ctgtggcaggcaccttgaccatggtgttcttcttgttggatatggtgcttctggtttcgcggccattcgcctgaaggacaagccttactggatcatcaagaactcgtggggcgagaactggggggagaacggatactacaagatatgcaggggttccaacgttcgcaacaagtgcggcgtcgattccatggtctctaccgtgtccgcagtccacgcctcgaaggagtagactctggtcagcggtgataatcgtgattccatatattgtagaactataatccctgctagta

SEQ ID NO: 2882 - DNA, 351 bp, Zea mays
  Clone ID: LIB3136-014-Q1-K2-G12
gcctcacttatgactacgtcggggatgatccggaagacagtctcgtggagaccgatctggaggccgtttctgcccttgccaccctcgcggcgtcgcgccctcctgctgcagctggagtctctcaccgtgatgccctccaggcttgtgcccatcacgcccgcctctggctcagccgtgcggatgaacccatccaccctgactccaccatcacatatgctggggtgagggcaaagctggatagaatcatggcatcgggctactacacagctcagctagaaatgaggacaccaatggatctggctgctgcagtggcaaactttggagccggaggtgtgcaggtgcaagagagca

SEQ ID NO: 2883 - DNA, 368 bp, Zea mays
  Clone ID: LIB3136-014-Q1-K2-G2
cccaattccccattcaccaatccccagtattgtagtagggggaaaaacgagagaaaagaaacagcagtagcggaggcaagacgaaatggtggccgccgtcgcgtcgccttcgtcggcggcaccctccgccggccgtccccatccgacatacaaggagatgatcatgcaggcgctgacggagctgcgggacccgagcgggtcgagccgcagcgccatcgccacctacatcgccgaccacttctccggcctccactcgcgccacgatgccctcctctccgtccatcttcgcagcctcaagtcccatggccaactttggcctcgtctctggcaactacttcgtctccaccgccgctcagcggcaggggcga

SEQ ID NO: 2884 - DNA, 406 bp, Zea mays
  Clone ID: LIB3136-014-Q1-K2-G3
gaaaagttaccaagcctttgcctgataccacttggttaagcaacccttctgcaccgaggcgtacacagcaggagcaattgtcacactggcaaaagaaccgcagaatgttggcatactcaacagtcggcacacctgattatattgctccagaagttctactgaagaagggatatggaatggagtgtgactggtggtcccttggtgctatcatgtatgaaatgcttgttggttaccctccattttattcagaggatccaatgtctacttgcagaaagattgtgaactggagaagtcacttgaaattccctgaagaggcaaagctttctcctgaagctaaggatctcatcagcaagcttttgtgtaatgttgagcagagacttggcacaaaaagagcccatgaaataaa

SEQ ID NO: 2885 - DNA, 267 bp, Zea mays
  unsure (1)..(267): unsure at all n locations; Clone ID: LIB3136-014-Q1-K2-G4
aaaaggtggaaggaacatggctttacaatctaacagaagcttgagctcnagaactatgatggtctccctgcgggctctagacacactggctgattacccctccaatgttggcatgctcaacttccgggtcgcgtgtttatattgctcctcaatttctattgtaaaactcatattgaatgattgtgccactgctggtcccttgatgctatcatgtatgagctgcttgctgggtacatctcgattgtattgataggatccgacacctac

SEQ ID NO: 2886 - DNA, 394 bp, Zea mays
  Clone ID: LIB3136-014-Q1-K2-G5
gagttgttgctcacaaaatgactactgtggcactgcgccaccttagacaaattgctcaagaaacaagtggagaagtagtgtacgccttgggaaggcaacctgcagtcctacggacctttagtcaaagactaagcagggggtttaatgatgccattagcggtttcaatgatgatggctggtctgtaatggggggagatggcattgaagacgttgttattgcttgcaactcaaccaagaaaattaggaataccagcaatgctgggattacatttggagccccaggaggcattatttgtgcgaaggcattcatgttactgcagagcgtcccaccggcagtactggtacgatttctgagggagcatagatctgaatgggctgattacaatattgatgc

SEQ ID NO: 2887 - DNA, 424 bp, Zea mays
  unsure (1)..(424): unsure at all n locations; Clone ID: LIB3136-014-Q1-K2-G6
cggacgcgtgggcgcgtcacgcgccctgtgtagggatctcccccttctcctgctctttgttggccgggtagcgtcgcgtggaagcacggcggcgtggttccgcgcccgtttcgcggtggcggttccgcgaacctcgccggcggccggactaacttcaccccgccgtgtggtgcacggcaatcggcgcagcacggtgggttatgctgctgctgcgcctacctatatggacggaggattgttgtggttgtggtcgccccgactagatattttccttctgtggtgtatgattgctatggcgggcccgcgctcgagcggtgtgcggttcagctcagctgcggtggccctacttgggtggtgtgccgtgtgcggtcgtgctttcgtagtccttgtgcgggccatccgcccgtgtctggctcctnctatg

SEQ ID NO: 2888 - DNA, 337 bp, Zea mays
  Clone ID: LIB3136-014-Q1-K2-G7
gagaatttcatccgcgcaaaatatgaggacaagagatgggtaccaaggaatggaacatcaaaatcttcgtccagtgttcgagatgagaagagccaagagtctccggctagtgctaataggagtggacatgggcatagatcttcatttgagcaaaaccgtgcttcaccagctcttacgagcaaagctgcacatgcagcttcaaggatatcctctcaggcatcacctcagcccccgaaggtagaaacaccagctccaaaggtggttatacctccctagtcacagaaattccccgtcaaagttgatgcaacaccgtctaaagttgagaaggcatcggtta

SEQ ID NO: 2889 - DNA, 457 bp, Zea mays
  unsure (1)..(457): unsure at all n locations; Clone ID: LIB3136-014-Q1-K2-G8
gcgcgaccgacgcgtccgcagtagcaagagcgcagccagcaagctcaggcccccagacctactgtcaccgggccgaacgacatggccgagccggcggagcaccgttcaactgacgaggaggaggccgcggcggccgccgaggatgaggacaccggcgcccaagtcgcgcccatcgcgaagctggaggaggtcgccgctaccactggagaggaggacgaggacgcgctcctggacatgaaggcgaagctctaccggttcgacaaggacgggaaccagtggaaagagcgcggcacaggcactgtgaagctgctcaagcacaaagacaccgtcaaaggtccgactcgtcatgcgtcaagcgaagacgcttaagatctgcgccaaccatctcgtggtggcgacgactaagatgcaggagcacgcggngagcgacaagtcgtgcgtgtggcacgcgctggac

SEQ ID NO: 2890 - DNA, 299 bp, Zea mays
  Clone ID: LIB3136-014-Q1-K2-G9
ctgtggcaggcacctcgtccatggagttctttttgttggatatggtgcttctggtttcgcggccattcgcctgaaggacaagccttactggatcatcaagaactcgtggggcgagaactggggggagaacggatactacaagatatgcaggggttccaacgttcgcaacaagtgcggcgtcgattccatggtctctaccgtgtccgcagtccacgcctcgaaggagtagactctggtcagcggtgataatcgtgattccatatattgtagaactataatccctgctagtaatccatttg

SEQ ID NO: 2891 - DNA, 443 bp, Zea mays
  Clone ID: LIB3136-014-Q1-K2-H1
aattgatcgagtaataagcacctttggcatgccaatgggaccttttcaactccaagatgtggctgggtatggagttgccttggcagtaaaggatatctacgctgatgcctttggagaaagaaatttggactctgaccttgtggatttgatggtaaaggatggacgacaaggaaaggtgaacggcaaaggttactacatttatgagaagggtgggaagccaaagccagatcctagtgttaagcatgttatcgaggagtaccgaaagcacgcaaacacaatgcctggtggaaagcctgttactttaacggatcaagatattttggagatgattttcttcccagttgtgaatgaggcatgcagggttatggatgaaaatgttgtaattcgagcttctgatcttgatattgcttctggtcttggaatgggctttcctaaatacaggg

SEQ ID NO: 2892 - DNA, 449 bp, Zea mays
  Clone ID: LIB3136-014-Q1-K2-H10
gcctcacttatgactacttcggggatgatttttaagacagtctcgtggagaccgatctgagggccgtttctgcccttgccaccctcgcggcgtctcgccctcctgctgcagctggagtctctcaccgtgatgccctccaggcttgtgcccatcacgcccgcctctggctcagccgtgcggatgaacccatccaccctgactccaccatcacatatgctggggtgagggcaaagctggatagaatcatggcatcgggctactacacagctcagctagaaatgaggacaccaatggatctggctgctgcagtggcaaactttggagccggacgtgtgcaggtgcaagagagcatggttgtgtcgcctcaagcactggaagcattcaaggagagccaggatgttgaagaacacatggacgagaaggaagattctgaggctacagaaatctac

SEQ ID NO: 2893 - DNA, 293 bp, Zea mays
  Clone ID: LIB3136-014-Q1-K2-H12
acgcgttcgcttctattaaaaactctcttggaacgtttatatttcctgaagcacagccttccccacacagaaacttttctgacgaggttggcttcctgaatcgcttcttcggtggcctcaagtccggtggcaatgcttatgtgattggtgactctgcgaaacccgggcagaagttgcacgtctactacgccgctgaacacccttaggagcctgtcgttactcttgagatgttcatgactgttctgtacaagaataaagcttttgttctttttaagaccactgctgatggttta

SEQ ID NO: 2894 - DNA, 430 bp, Zea mays
  Clone ID: LIB3136-014-Q1-K2-H2
cacaggaccaccagagagccacagcaccagcggcaggcacccaaagcccaggaccgccaatggccgaccgcgtgtaccccgccgccaagccgaacccgcctccaggcgcggcgggcaacagcaacggcgcgcaggcgtcgtcgttccctgcgcccaagtcgcagatgtaccagcggcccatctaccgtccgcaggcccccgcgaagcggcagcgcgggcggtcgtgccggtgcagcttgtgctgctgcttctgctgggcgctggtggaggtgatcctgctggcgttcgtggccgcggtgtgcggcggcgtcttctacctgctgtaccggccgcagcggccgtcggtcaacgtgtcgtcagtgcggctggcgtagctgaacctgacgtcgtcggcgacggcgcccgtgctgagcgacgccatcacgctgac

SEQ ID NO: 2895 - DNA, 385 bp, Zea mays
  Clone ID: LIB3136-014-Q1-K2-H3
ctcatgtatttggcttttaagctctacaggatgtggctcactgggggaaaacccagagtttgtgcgagatcaaggtccttgaagactacatataagagcgccattggctacatataaaagcgctattgacagatcagtggattgataaaactccatgcagcggagcgcttttaccttacctggctggcacctaccaacatttgaatgtagctctaaggataacgatgttgttgtaacctaactgtaatttgtgttgtgatctagaaaccacgaccccgctcgatgtagagtatgggcattatttatggcttatgcacataaaatcgctatgcttgtggccaacagtcaacgagtcatcagtgcggatggatgaaaatgaacctga

SEQ ID NO: 2896 - DNA, 402 bp, Zea mays
  Clone ID: LIB3136-014-Q1-K2-H4
cacgaggatgccgatcatcttctcgatggcgcgtatcgaccgggtgaagaacatgacatggctggtcaacatgtacggcaagaacgctcgcctgaaggagctgtcgaaccttgtgatcgctgtctgtgaccacggctaggagtctaatgacagggacgagcaggcggagttcacgaacatgtacagcctcttcgacgagttcaagttgaagggccatatgccgtggatctcgacacagatgaaccgtgtgcgcatcggggagctgtaccggtacatgtgcgatactcaagggcgcattcttgcatcctgcgttctacgaagcgttcggcctgcctgtgatcgagtccatgacgtgcggtctgccgacgatcgcgacctgccatggtggccctgctgagatca

SEQ ID NO: 2897 - DNA, 311 bp, Zea mays
  Clone ID: LIB3136-014-Q1-K2-H6
gaaagaaaacacgaagttaaatcaggaaagaagtaagtctgaattctttgttaaagaagatgaggctaatgacactgtccagaatgctctatgccacaagagtaataggtatcctccacgaccattattatctgactcatctaagcatcaaggcgaaagtgacttccagaagccatttgttggagggtttgcgatattgccagatgatgaagaaccatgtgagaaacgctatggtggcgctaatataaattgcagaactgtgcagcctactcataatactaataatttgctctgtccagttcacgatgatt

SEQ ID NO: 2898 - DNA, 380 bp, Zea mays
  Clone ID: LIB3136-014-Q1-K2-H7
gagagacatgatgaatgtgaatcaccgaaagaagtagaatctgagtctctttgttagataagaggaagcttgtgacactgtccacaatggtctatgttaaaggagtagtacgtatcgttgacgaccattgttatgtgatacatctaggcgttgacgggaacgtaacttacacaacccatttgttatacggttagcaatattggcacatgatgaccaaccatgtgagagacgctatgagggtgctaattgatatggcgcaacatgaccacctactcatagtactagtaaatgattctggtgcgtaacagaagattctggtacttcgaatagtgaatgccctcattctgtgacttatggagtgcaagatgacactgtcattc

SEQ ID NO: 2899 - DNA, 94 bp, Zea mays
  Clone ID: LIB3136-014-Q1-K2-H8
gcatgatctcaagggggcgtttcttgacagaagaatatcttgattctttgtttgggacaaggaagctattgacactggccagaatgatctatgg

SEQ ID NO: 2900 - DNA, 377 bp, Zea mays
  Clone ID: LIB3136-015-Q1-K1-A1
cgtcctccgcatcccggtgaccggtgttctccgatttggggggcgtcccttgcacgctccggtctgctgttcctccgccctccggagtcctatccagaggagcgcgctacggtacagatcgcccgccgtccatccctttcccagctctccagagcctccgccgccgcgtccggtgagcacatttcgaccggtttccaggtagtcacgtaccgcacctgtgcctctctctatcctctcctcgccgtatgcctcttggcgatttctattagtttttcattgtcacttagtttaagtcagctgctggtatgttctcgctgtctttacataattttctggtaggtccatggcttcagctattagctctgaaatattctaca

SEQ ID NO: 2901 - DNA, 427 bp, Zea mays
  unsure (1)..(427): unsure at all n locations; Clone ID: LIB3136-015-Q1-K1-A11
gtccttatctttaggcgaagatgagatgcctgatataaaggatgagaccctgcgtgacggagaaggcttgtctaagccaggggtaaccaatgctattgaggaattcaagacttcagtctatggtgaaaattatgaccaagaggaggcagacgcggcagcagggaaagcttcccgtggtaatgcttcaaaaaagcggaaggaggtcactgatgcagctgcgcagataagtgctgcttatgactgggcagaacttgcagacaatggaaaactgaaggaaatgaccacggtggaattgagatcctacctgaccgcgcatgatctnccggcttctggtcagaaagacgtacttatcagcaggatcttgactcacctgggtaagtgaagccggctatccgaactgttagttttctgagacccgactgacatc

SEQ ID NO: 2902 - DNA, 344 bp, Zea mays
  Clone ID: LIB3136-015-Q1-K1-A12
catccacactaacgaacgaactcttgctccgatcacgagctagctgaggtcgacgatggcggctgtgctgaacagcaggaagacgccgcaggcggtggtggccgtgctggtggcggcggcgctgctggcttcgtccgcttcggcggcgatcacctgcgggcaggtggggtcgtcgctggcgccgtgcatcccgtacgcgacggggagggccagcgcgctccccgcgtcgtgctgcagcggcgtcaagagcctcaacagcgcggcgcggaccagcgcggaccgccaggcggcgtgccgctgcctcaagagcctcgccaacagcgtcaagagcgtcaacatgggca

SEQ ID NO: 2903 - DNA, 418 bp, Zea mays
  unsure (1)..(418): unsure at all n locations; Clone ID: LIB3136-015-Q1-K1-A2
acgattccaaagcgtgaaattgttgattgggttgatcttcatgaaatggttactgctggctgctgtactccagatggaaagggcgcgctgatcgggtcccacaagggcagttgccatttgtatgatacatatgatgacatgctttgctacaaaacacagattgacctgcaaaacaagagaagaaaatctagccagaagaaaataacaggatttcagtttgtcccaggggattcttcaatggtcataatcacatttgcagattcacgaatcagagttcttgatggatttgagctagttcataggtttaaaggattccggaacaccagcagccaaatctcagcttgcttagctggaaacggacggcatattatctncgcaagcgaggattcccgtgtatatatctggaggaacgatgatg

SEQ ID NO: 2904 - DNA, 394 bp, Zea mays
  Clone ID: LIB3136-015-Q1-K1-A3
caacagagagccgacggcgagcacagccagcacaaggacttggacaggtaacacgagggcgaccggtgcccgtagccgacagctgaccgctgcgttggcgccagccgccaggccgggtggatgcggtgcaggatccatctcttcagccttctcccgcttccgctcggctgcgctcgcatcgcctctgccttgttgctgcctctgccgttgagttgaagcccgcctgcggcccgcctggtgtatatatatataagataaaggccgccgcatctcccattctccctgcaccgtttcgtcgcgtctcattcagcagctactagaagtagtagctggctcgctcctgccggtttcttgccgtcttcttcttcaccgacgacggtcgcgcgttcctacc

SEQ ID NO: 2905 - DNA, 418 bp, Zea mays
  Clone ID: LIB3136-015-Q1-K1-A5
gagctatataactacatgctcaaaaaagagggttctgaaggtgaagaagcgcggagagaaagcatatatagccgctagggaagacccacacaatgatgctgaggctgctgcagaagaaaaggtctcgtaggcgttgattgagaaggttgacgctatgcttcaagaattagaaaaggagattgatgatgtggatgcacaaattggaaaccgttggcagctgcttgatagggaccacgatggctatgtgactcctgaagaggtggccgtagctgctgcctatctgaacgacaccatcgggaaggaaggcgtgcaagagctcataaccaacctttcgaaggacacagaaggaaagatcctcgtggaagatatcgtgaggctagcatcgcatacagaggaacacaacgacgacgaagagcaa

SEQ ID NO: 2906 - DNA, 362 bp, Zea mays
  Clone ID: LIB3136-015-Q1-K1-A6
cgataggaggccccgggcttgcgcctggcgtcaggttccgtacagacctcgcaagtgccggcctcgccaatgttgcggcgacggtcatgaaccttcatgggtttcaggcacccgatcactatgagccaacgctgatccaagtcgtcgacgagtgatttccgctttgctggttgctgcgttgcagttttcagacattatctgaactaactcctaccacagttgtccggcatgtaatcgtactcaaactagactacctgggcaattacctgtgccaattaccgtgtcgaatgttcaaaaatgttttcgttaaggccttgttcgtttgtatcggattacactcgcaatgtatcggattacactcg

SEQ ID NO: 2907 - DNA, 373 bp, Zea mays
  Clone ID: LIB3136-015-Q1-K1-A7
acggagaaacttctgttattcaagtggaaccagaggcaagaaactcaaatgggtactgtacaacacaggctggcagtgctttatctgaaactgtcatgggattggagccaaataaagaaactgcggatccaatgcatgagaatattgtagaagctaatgataattttaataattgcgaagcacacaataattcggagattcatgcatttgaagtgtccatggaaacgcagtcatcagaagttaaggaagtatcttatattcagtctggtgcagcaaatttgagcacacagacaactgcactgcctgatgtaacacgacaaaccagtatggcatcgactggagaactagtatctacaaatgaacacatacacat

SEQ ID NO: 2908 - DNA, 181 bp, Zea mays
  Clone ID: LIB3136-015-Q1-K1-A8
gcggacgaatagtatacgacacttcgcttactcactagattcccacatacatagctcggtgtacctttccttatcgtggggtctctatcccgaatctgctgggctttatttctatacatatatactatccctcgctattcgcatctctatactgtccgagtactctacggagttccgtaca

SEQ ID NO: 2909 - DNA, 428 bp, Zea mays
  Clone ID: LIB3136-015-Q1-K1-A9
ctccttctccgtcggcatcgaccgcgtcgacctcgccaagtgccgcgaccgcgggatccgggtcaccaacacccccgacgtcctcaccgacgacgtcgccgacctcgccgtagggctcgccatcgccgtgctccgcaggatcccgcaggccgaccgatacgtccgcgcggggctctggaagtccaggggagactacaccctaaccacgcggttcagcggcaagcgggtgggcatcatcgggctgggcaggatagggcaggcggtggcgaagcgagtggaggcgttcgactgcccggtgagctaccaccagcggacggagcagcgggcgacgtacccgagctacacctactacccgtcggtggtggagctggcggcgaacagcgacgtgctggtggtggcgtgcccgcttgacgcgcagacgcgccaca

SEQ ID NO: 2910 - DNA, 364 bp, Zea mays
  Clone ID: LIB3136-015-Q1-K1-B1
caacggggagctgtaccgctacatttgcgataccaagggcgcattcgtgcagcctgcgttgtacgaagcgttcggcctgactgtgatcgagtccatgacgtgcggtctgccaacgatcgcgacctgccatggtggccctgctgagatcatcgtggacggggtatctggcctgcacattgacccttaccacagcgacaaggccgcggatatcctggtcaacttctttgacaaatgcaaggcagatccgagctactgggacaagatctcacagggtggcctgcagagaatttatgagaagtacacctggaagctctactccgagaggctgatgaccctgaccggcgtgtacgggttctggaagtac

SEQ ID NO: 2911 - DNA, 367 bp, Zea mays
  Clone ID: LIB3136-015-Q1-K1-B10
gaagattgtggccgaacattttgaagaaaacctagagattacaggcacatccttggagagtggtaagctggtcgttgacatctgtgacattgtgacgacaagagcagcccggctggctgctgcggcgcttgcaggcatcctcatgaagatcggaagacatcacagcgacgaggaccaacggtcagtcatcgccatcgacggatgactgttcgagcactacaccaaattccgtctgtgcttggagaccacactgggtgagctgctaggagacgaggcgttcaaggcggtggccatcaagcatgccgatgacggctcatgaataggtgctgacctgattgcagcttcacagtctcagtacaaaaacgac

SEQ ID NO: 2912 - DNA, 291 bp, Zea mays
  Clone ID: LIB3136-015-Q1-K1-B11
tgtaggcccagagagatctagctagagttttctgcatccgcctccgccctccagggtctggacctaaatgctcaagcgtacctccccacattatgaaagatgaaaacccttgttttctcctacctctattcgccgtaatcctaataaaaacatgcccaactctcatcttcgcagaagaagcagtcttcctccgcttaaggagatgacaaggagaaaccaacacatttgttatttctagtgtttaatacagcatcagggcgcatcattggcaacgttggttccaccattaat

SEQ ID NO: 2913 - DNA, 307 bp, Zea mays
  Clone ID: LIB3136-015-Q1-K1-B2
cggacgcgtggtcaggccagccttcgtctcggtacaaagcgcgttcatcgaggcggaccgggagaaaaaccgcctccatgcagacaacgtgatggctgaagcaaggttttctgcaaagcgcggtgacctgaccaccgctgtttctatactcaaggactgccggaggatgatcatatggtgcgcgtcaggacaatctggtgaccgtctgagccaggcactggatgccgagctgaaggagatgcatgatcggatggacaaccggcagaggtacgatgcattcggtcgagcatatgtgctctcaggcttg

SEQ ID NO: 2914 - DNA, 355 bp, Zea mays
  unsure (1)..(355): unsure at all n locations; Clone ID: LIB3136-015-Q1-K1-B3
gggacttgtatccgatgaactttacaagaatgctagggagaactgcggtggaaaggatagcgctccactgaatgctgtatgtgcagaggctgtccaagctatcaacaattgcacacgggatatcaataagcaatacatcttggatcctgcttgcccggatgatgatctgttgagccccaagactgtagcaaagacagatggaacgagcatgttgatgctagagtctgcagattttctacttggttccaaatgtgcagaagctttatacattctatcctacgcttgcgggaatgatgatacagctcangagagcctatgtatccgcaaggggacaattggagcatggaaacgatgc

SEQ ID NO: 2915 - DNA, 385 bp, Zea mays
  Clone ID: LIB3136-015-Q1-K1-B4
atgactcttcttttggggagttcctgaaatctcctccccctatatttccgtacatgctttcgcacaaaagccgatccttcggtggatcgattccttcaatagcaacggtcggtcataaggtggctaatcactactacttattaagttagcatgcgtagccagccttgtgtgtcctgccgtgtctgctctgacacgtgaggccacgcttgctcttgcgcgtatgctctccgggttatatagtagcacatactttttgcgcaagtatatacactatatgctcctctagtggaaatgaagatacggcctaagagagactagctatctttgtcgggacactttgtacaggttaacaatatcaacgcgcatttgcttacgggaataaact

SEQ ID NO: 2916 - DNA, 290 bp, Zea mays
  Clone ID: LIB3136-015-Q1-K1-B5
agtgattgtaggtttctttaagactctgacatctaactggctatcctcgtcttcaggatcctttaccatctgatcatcatccggcatacgtactgtttggatattcctccaaagacgtcagacctcatgacgggactgattctattatatggcttcctgataaggcgaacttgggtcatctcacaaaaacccaatgcacattgtactgaatgtatcaacatcgagataatgaagatattctcctattgcgactgctgggatgacctggattttctctaaagagtcattga

SEQ ID NO: 2917 - DNA, 291 bp, Zea mays
  Clone ID: LIB3136-015-Q1-K1-B6
accatacgtttggggtgttcctgaaacactgtccccctatatgttcgcctcttcttccgcataatatccgatatgttggtatatcgaattcttcaattgtgacggttggttcaaaggcggctaatctctactacttattaacttagcaatattaccctgccttaagggtactgtcgtgtagttctctgacacgtagggcccacttgctcctgcgtgtatgctcccggtttattacgtcacacatttcttttacttgctaagataacattaattttctcaaaagacatcatt

SEQ ID NO: 2918 - DNA, 420 bp, Zea mays
  unsure (1)..(420): unsure at all n locations; Clone ID: LIB3136-015-Q1-K1-B7
cttttggtgttgtgctgtttgaggtcctctgtgcacggcctgccttgaaccctactcttccaaaagaggaagttagcttggcggagtgggcgttgcactgccagaagaagggcgttcttgatcagattgttgacccctacctgaagggaaagatagctccacaatgcttcaagaagtttgctgagacagccgagaagtgtgtttctgatcagagtattgaccgcccttcgatgggcgatgtgctcttgaacttggagtttgcccttcagatgcangagagcgcggaagagagcggaagcctcggttgtgggatgtcggacgagggcactccccttgtgatggtcgggaagaaagatccaaatgacccgtcgatcgaatcgagcaccaccaccacaaccaccacttctttgagcatgggcg

SEQ ID NO: 2919 - DNA, 362 bp, Zea mays
  unsure (1)..(362): unsure at all n locations; Clone ID: LIB3136-015-Q1-K1-B9
gaagattgtggccgaaaattttgaagaaaacctagagattacaggcacatccttggaggctcgtaagctggtcgttgaaatctgtgacattgtggcgacaagagcagcccggctggctgctgcggggcttgcagggatcctcatgaagatcgggagagatcacagcgtcgaggaccaacggtcagtcatcgccatcgacggaggactgttcgagcactacaccaaattccgccggtgcttggagaccacactgggtgagctgctaggagacgaggcgtccaaggcggtggccatcaagcatgccgatgacggctcangaataggtgctgccctgattgcagcttcacagtctcagtacaaaa

SEQ ID NO: 2920 - DNA, 407 bp, Zea mays
  unsure (1)..(407): unsure at all n locations; Clone ID: LIB3136-015-Q1-K1-C1
ttctccttctagggattcatcttcctctcgtcttccctcttcctctccgaggatacaaggcgccgtcccaggtagaggtagggtcgccaccatgctggaggagctgctcatcttcacccggggcggcctcatcctgtggtcgtcctgccgggcgctcggcgccgcagccctcaagggctcccccatcgacgccctcatccgctcctgtctcctcgaggagcgatccgccgacgccagcttctaccaggacaattacgccctcaagtggaccttccacaacgacctcggccttgtcttcgtcgccgtataccagaagatactccacctnctctacgtcgacgatctcctcgccgccgtccgcaaggagttctcccagatctacgaccccaagcgcacctnctacgatg

SEQ ID NO: 2921 - DNA, 377 bp, Zea mays
  Clone ID: LIB3136-015-Q1-K1-C10
ctgctagtagtaagcgttttctgccgatagtggtggttgcggcaatggttgccgccgccagtggcgccgtggagttcgcctacaacggcttcggcggcgcgggcttgtcgctcgacggtacggccaccgtcacgccggccggtctgctccagctcaccaacgacaccaacatgtccaagggccacgcgttccacccggatccagtcaagttccaccggccgatgctgtcgtccttctacacgacgttcgtgttcgccatcgtgtcggagttcctcgacctgagcaccagcgggttcgcgttcctggtggcgccgaccacggacctgttcacggcgatgccgcagcagtacctgggcatgttcaacggcaccgacaac

SEQ ID NO: 2922 - DNA, 428 bp, Zea mays
  Clone ID: LIB3136-015-Q1-K1-C11
ggtttgacggcctggtgggacggacgatggagccaagtgcttgagagaaggcatctgagggtaactgtttgctcgacgactagacgattcaccttgctcgccgttgccgcgtgttttctagatgaacgagaattccgtccggacgtttctccttcccccttgccgcaatcactgtctcgcagtgtagcagacagaacaactcaacagctccgcagaagctctgtttttaagtttcaatggaagttacgccaaagcagggaactatttgaccattgtgtggtatgtcatttatacaaaacaaatgtgaaggtatcaccctgcataaatatgcatgtcacttattatggacatgtggtatatctatagcatcactattagtttttgtaccattccgcacaaactcgtaatagatatcatatacgtcattt

SEQ ID NO: 2923 - DNA, 382 bp, Zea mays
  Clone ID: LIB3136-015-Q1-K1-C12
cccacgcgtccgctaacatcaagttcaacgttgcaaaagtactaaagtcacttgtaccgatcctcgatcaatctaccgtgaaaccatgccttgttgagctcagcgaggaccctgacgtcgatgtgaggtactacgcgaaccaggcgctgcaggcgtgcgatcaaatgatggtgtcgagctaactagccgtgtgcccgagtacttagagttcgatgcctcatagtccaattttggattacctgtaatttgttgggccttttagattgaagagttttccgtctagcctcggtggacagatcgacgctgcccatgctgataaatggacggtcctgatccattgatcgttgcgtattaaatgtgataattgagcagacacaacacg

SEQ ID NO: 2924 - DNA, 394 bp, Zea mays
  unsure (1)..(394): unsure at all n locations; Clone ID: LIB3136-015-Q1-K1-C2
aagagctcttttcttcaggtacaggggatttcgatgaagaggaaatgtatgtgaagattccagctgatctcataataagttctgagaaggccaagtcaattgtacaggatattgcaaaggttaggttggagaactcccttgtccaagctattgcgttgcttcggcagaagaagagagatgatgcgctttcatctctgaatgacatgctcgcatgtgatgctgcggtctctgcatcacgacccttgtcatggccgacaccaagagagctagatgatctgtatgccatctacctgaagagcattcctaagcctgagaagctatcaaggttgcagtacctgctctgcattagcaacgagaaggctaacgagatgcangacgcagcctccgagggatc

SEQ ID NO: 2925 - DNA, 395 bp, Zea mays
  Clone ID: LIB3136-015-Q1-K1-C3
tctaaacaaacgacttggcactgaggatttggaccttcaggggatcattatggagattgaaagacgtggaatgtcttttgatcagttgctcaccatacccgagcaagacgaatgggtgtacagtgatggtaaatcaactacttgtgtcgccttcattcttgcaatgtacaaggaggctggaatattcacccctttctcggagtcgatccaggtcaccgagttcactattcgtgacgcatacatgctcaagatatttgaagacaacccggcaaggcttccaggttggtgcaacgcagacacggacaagctttccttttgcagattctcggagagtacagaatggagttaccagagtacaacacgattgaaccttatgcgaaaatgaacgagaactg

SEQ ID NO: 2926 - DNA, 420 bp, Zea mays
  Clone ID: LIB3136-015-Q1-K1-C4
gtgcagggggtgtcatgtgatctcttcaatggcctgtggtacccaacagtgatgagcattggcccagtccttgacaactcgctgcagtgcggccccgacgccaagttcagcgcccagctgttcgacctgaggcgcctccggacgctgtctttctacagctgcttcccggcgagcaaccccacggccatcccgaccggcagctgggagaagctggcggggacgctggagacgctggagttccgcaccaacccgggcctgaacggcgccatcccggcgtacctcggccgcctggccagcctgcagtcgctggtgctcgtggagaacaacctgacggggcccgtgcccgcggagctgggcgcgctgtcgaagctgagacggctggtgctgtccggggacgggctgtcggggccgatccccgtg

SEQ ID NO: 2927 - DNA, 280 bp, Zea mays
  Clone ID: LIB3136-015-Q1-K1-C5
acgataacgagatggatctgatgatgttgtttgttgggaaaggcctaatgatacgtgagggagatcctaagtggatgtagcgagaaaccaatccttgttgagctaaacgaggaccctgacggcgatgtgaagtactactcgatctatgcgctgcttgttgcgataaaatgaaggcgtcgagcttactaaccgtgttccagtgttctttcagttcgaagcctaatattccagtcaggtactacgctggaaattgttgggccacaacagatctgaagagttt

SEQ ID NO: 2928 - DNA, 387 bp, Zea mays
  Clone ID: LIB3136-015-Q1-K1-C6
ttctttaatatatctcgtaagtgaaagaaatgtattgttatacttgagcggacggtgtcaaggagttcaagaagcatgacaggaagcctgataagtacatcaaacattggtcagctgttaaaccaaagaccggggtcccatatacaattgacattggatatgaacgctatcttgggccagagatcttcttcaatcctgagatatactctgccgacttctccactcctttgcccgagttgattgacaactgtgttcagtatgcaccaattgacacaaggagagctctgtacacgaatatagtattatctggtggatcaaccatgtttaaagacttccacaagagactccaaactgctataaagaatatagcggatgaccgtgttgctg

SEQ ID NO: 2929 - DNA, 314 bp, Zea mays
  Clone ID: LIB3136-015-Q1-K1-C7
ctctctagacatatctggcgacgtggacttcttgaatcgacttactgacaacgcaggcgcgcaccttttcacgaggcgtgaacccccgcctggtcggtctatggataggagttaagctacttaactaactaccgtgttgcgatgaacgcgtggcatataatacgacctatgtcttgtgacactgagcgccatctaccgtcacatgtagtttcgccagacgtggactacgtggatacccattccggacagccgtcagaagtgatgcaccggacgagagccgtgagctttcttgaacgatgcacgctcatcttgta

SEQ ID NO: 2930 - DNA, 349 bp, Zea mays
  Clone ID: LIB3136-015-Q1-K1-C8
cggattcgaattcgggccacgcccacgcgtccgggcctgccttctaatacccggatttgcactgccgtcgccgacgacgcacaggggagggcccatccgttataattcgttccttcgctctcggcggccgcgagatgagggagacacgtactggcagtcgacggtcctaatgacgactcactagatggagatgccacaacccatagcactctcacatccgtgacgagaagatggacatagaagcgttagcttatgcagcggacgggagcaagttctgcaaaggcgcagcctgagacttctatgacgccagcaactgctcgaatgaccacactgagaggtctgcgtctat

SEQ ID NO: 2931 - DNA, 423 bp, Zea mays
  Clone ID: LIB3136-015-Q1-K1-C9
cagagtcttcatgtcccggcgtgcaagaagcaatccattctgtggttcatggtctgctggctactctttcccccaagatacactcaaaggtccctccaccgctagataacacttctggaggggtcttaaaccttgggggcgaggatgatgactgtgcagaacttgtggagaatgcttccctcccatttcagcccctaatatctgttccccgtgattatcttgcacgcttgctcttctggtgcatgctgctgggtcactacatccggggtctggagtaccggttagagcttgctcagcttctgcgaatatccagcgacgtgggttctttctctggtggtgatgatcatgttgtttgagggtaccacgtttactggtattcctcaccgggaagaatggaaagatctggccaagcaatgcagaggt

SEQ ID NO: 2932 - DNA, 310 bp, Zea mays
  Clone ID: LIB3136-015-Q1-K1-D10
aagaagaaagctcgtgtctttttcaagacttatgctgatgggatcacagcttgtgccaaggagatgacaaagctctctggcatatgttaaatcatcccagagatggagatctgggactatgacttcgaacccatgtgcttctccatgaatgccatccatggctcttcattcttcacaatccatgtgacatcagtggaccttattatctactccagacacgatgtgatgggcttgacttccaatactgaaggctatggtaacctttttacgttggatcgccagtccttctgcacacataatgaactcttgt

SEQ ID NO: 2933 - DNA, 417 bp, Zea mays
  unsure (1)..(417): unsure at all n locations; Clone ID: LIB3136-015-Q1-K1-D11
cgccgcgctgcctgcgagcagcctgctgtccctgcagctgccgcggtgctcggcgggaattggccgcacggcgccgagcctggccctggcgccaccgaaacacagccacccttcttcgtcgctgacggcggcaaaggctggtggcctggcgccggacctggagctgaagatctcgaccgcccggcagaacgagcaccagcagcaggtccagatggggccatcgctggcgctgncgccgccgccgccgccgcagaggacgccctttctggggaccatcanggtcacatgacatgaccggcaaagacggcggcggttagtagggaatatcctgctggtaggagaagagcttttgcccatctgaagctggagaaggttgcttcaaaagataggacggcgtgggaaaactgaaaaggagga

SEQ ID NO: 2934 - DNA, 402 bp, Zea mays
  Clone ID: LIB3136-015-Q1-K1-D12
cggacgcgtggggtgggttggcttctcctccccctccggttcgggttcgggttcgtgaggttctccggggttcggtttcgtgggtgagcggatcgagatggcggcgtcggatgttgagtaccgctgcttcgtcggcggcctcgcctgggccacggacgaccactccctccacaacgccttcagcacctacggcgaggtcctcgagtccaagattatcctcgatcgggagacgcagaggtcccgcggcttcggcttcgtcaccttctccacggaggaggcgatgcggaacgccatcgagggcatgaacggcaaggagctggacggccgcaacatcaccgtcaacgaggcccagtcccgcggcggccgtggaggcggcggcggcggctacggtggtggccgtgg

SEQ ID NO: 2935 - DNA, 416 bp, Zea mays
  Clone ID: LIB3136-015-Q1-K1-D2
gccattgaactggccaatgatacacagtatggtttagctggtgctgtaatttctggtgatcgtgagcgctgccagagattatctgaggagattgatgctggaattatctgggtaaactgctcacagccctgcttctgccaggctccctggggcggtaacaagcgtagtggatttggacgtgagcttggagaagggggcattgataactacctgagcgtcaagcaagtcacggagtacatctctgatgagccgtggggatggtatcgatccccctccaagctgtaaactggcatgaaattttgtttgttccattagaataaatatatctcgatgctatacagaacgaacccgtgtatcaaatggagtatgacattgtgaaaaaggcacatcagcggaacaaatgtcagagttgacaa

SEQ ID NO: 2936 - DNA, 429 bp, Zea mays
  Clone ID: LIB3136-015-Q1-K1-D3
cggcccaggcgcacgcgtacgggcgagggagcgagacgagatccattttttacttcagctgcgcctcgacggggagggcgaaccctagccaccaagccggaggcgagagagcagccatggcgcggtgcctcgcgctcgtacgccctccctgactcggcctcgccgccggcggctccgaggccgacgcgcccttcgtcgtcgcgcacaagaagatttcgctctcccgccccaagccgggcgtcgagcgcgtcggcgtctccctcgacctctacaaccagggatccgcgactgcctatgatgtgtccattaatgacgactctcggccaacagaagtgtttgagcttgtcactggagagaaatcgaagacattggaaaggcttgaccctggtgccactgcttcgcacacatatgtcctgcagaccaaaacac

SEQ ID NO: 2937 - DNA, 396 bp, Zea mays
  Clone ID: LIB3136-015-Q1-K1-D4
tgtaaatctgtcagaggaggatagaaagaaggtttgtcttttactggaagttgcattttgttttgcaacgatttttttattatgtttagttgtttgccctccggaggtcgagttttttttactatattgtacaatagtcacaaaaaacagttaattttcagtgtttaatttaatcatgttggattcgttcagcaactttcctgcagtagccatggttgtatactattctgttagaagtgtttgttaaatctacgtaaagagctacagaaataagttaagttgactagtatatagaaggacgggtctggtgcagtggtgagagctatctcaatgagtcacgtgttagaagcagcctcaccgcatttgtcagggaaaagcttgcattggtttatgtct

SEQ ID NO: 2938 - DNA, 412 bp, Zea mays
  Clone ID: LIB3136-015-Q1-K1-D5
ctcgacaacgaggccatctatgacatctgcaggcgctccctcgacattgagaggcccaactactccaacttgaatcgccttgtgtctcaggtgatctcatcgctgactgcttctctgaggttcgatggtgccctcaatgtggatgtgaacgagttccagaccaacctggttccttacccgaggatccacttaatgctgtcctcctacgcaccggtgatctcttctgcgaaggccttccacgagcagctgtctgtggcggacatcaccagcagcgcgtttgagccggcttccatgatggtcaagtgcgacccacggcacggcaagtacatggcttgctgcctgatgtaccgcggcgacgtggtgcccaaggacgtgaacgccgcggtggccaccatcaagacgaagcgcacca

SEQ ID NO: 2939 - DNA, 422 bp, Zea mays
  Clone ID: LIB3136-015-Q1-K1-D6
tacggattcgaattcgagccacgcctcacgcgtacgaacgtgaccaatgatacacaggatggtttatctggtgctgtaagttctggggggcgagagcgctgacagagattatctgaagagattgaggcttcaattatctgggtaaactgttcacagtcgctgcttctgccaggctccatggggcggtaacaaacgtaaaggatttggacgtgagcttggacaacggggcattgataactacctgagcgtcaaacaagtctcggagtacatctctcatgagcctcggggatggtgtcgataccactacaagctgtaaactgtcttgaaagattgtttggtccataagaataaatatatcttgatgctatacataactaacccgtgctttaaatggagtatgacatttcgaaaaaggcacatta

SEQ ID NO: 2940 - DNA, 408 bp, Zea mays
  Clone ID: LIB3136-015-Q1-K1-D7
agcgagggagcgagacgagatccattctcaacttcagctgcgcctcgactcgtagcccgaaccctagccaccaagccggaggcgagagagcagccatggcgcggtgcctcgcgctcgtcgccctcctcgtactcggcctcgccgccgccgcctccgcggccgacgcgcccttcgtcgtcgcgcacaagaagatttcgctctcccgccccaagccgggcgtcgagcgcgtcgccgtctccctcgacctctacaaccagggatccgcgactgcctatgatgtgtccattaatgacgactcttggccaacagaagtgtttgagcttgtcactggagagaaatcgaagacattggaaaggcttgaccctggtgccactgcttcgcacacatatgtcctggagaccaaaacac

SEQ ID NO: 2941 - DNA, 384 bp, Zea mays
  Clone ID: LIB3136-015-Q1-K1-D8
caggctgtttaactgcactaatagtcatgacagctctatcggcttctctaggttgggttgcaccaaatctgatttcacgtaaatggactcatcatttgaccactctattgttctttctatttggcatttggtcattgtgggaaggcttcaaggaagatgggtaccgagattcggaagaattggctgaagttgaagcagagctggatgctgcctttaagagtaataaaggtgaatctaaaaataaatttaaggcgaatgatgatatgaagaaacagcaaagaccatttctcatgcagttcttctcaccaatttttctgaaggcattttctattacattctttggtgagtggggtgacaagagccagattgctacaattggcttgg

SEQ ID NO: 2942 - DNA, 396 bp, Zea mays
  Clone ID: LIB3136-015-Q1-K1-D9
gccgtgaagctgcgttgatgaagtttcgcatgaaaaggaaagatagatgcttcgagaaaaaagttaggtatcatagcaggaagaagctcgcagagcaaaggccaagagttaagggacaatttgtaagccaaaagctgaactcagctacaacaacagacgcagaagctgactcgtgaccggcgtcaagtcatcactgtaacttattcttcccttcccaccaggtgtgggcaatcggacttgtaagactgaaggctggcagaagttttttcccttccatggttagcctttctgcacaacgggtgaactcttgtgtcgggtgtttggtgccgttgtggccttatttttgtaaagtgcatcaaattgacaaatgttcagaggggaatgggttgggggttt

SEQ ID NO: 2943 - DNA, 365 bp, Zea mays
  unsure (1)..(365): unsure at all n locations; Clone ID: LIB3136-015-Q1-K1-E1
agataagcttgtcactgttgaagatattgtccgtcagcactgggccacatatggtcgccagtgctacacacgctatgactatgagaatgttgatgcaggggctgctaaggagcttatggcaaacctagtaagcatgcagtcatcactttctgatgttaacaagttggtcaaggagatccggtctgatgtttctgaagtagttgcagctgacgagtttgagtacaaggatcctgttgatggctctgtgtccaagcaccagggcatccgatacctctttggagatggatcacgactggtgttccgnctctctggaaccggttgtgttggtgccaccatacgagtctacatcgagcagtacgagaggg

SEQ ID NO: 2944 - DNA, 378 bp, Zea mays
  Clone ID: LIB3136-015-Q1-K1-E10
gagaaagggcaaaaggcaacaccgcccgcgacgaccacgatggcagcctcgctccaagtccaagccgcggccaccttgatgcaaccggccaagatcggcggccgggcgccgtccgcctcgctgccgtcgtcccgcccgtcgtcgcaactcgccagggcgttcggcgtcgacgccggcgccgccaggatcacgtgctccctccagtccgacgtcagggacgtcgccagcaagtgcgtcgacgccgccaagctcgccggcttcgcgctcgccacctcggcgctcctcgtctcgggcgcgagcgcggagggcacgcccaagaggctgacctacgacgagatccagagcaagacgtacctggaggtgaagggcacgggcacg

SEQ ID NO: 2945 - DNA, 351 bp, Zea mays
  Clone ID: LIB3136-015-Q1-K1-E11
gcaggcgggagcggaatctggcaccgggcatcaagtaccactgcggcgtttcctcctgcgtgacctacctttccccagatgcgaatccattaaaccagcggatcttgcatcggcgcgcgtccacggcatccgggcaagcgagtggtggagccagcagccatgagatggtatgcatcggtagcctcctgagggcgctggtgctgcgtgcggcgtcgtatgccggcaggcgccgcgggcccaggattctgtgtggccgctcgacggatgtgcgcgtgacgccactgcacggacacggatggcgcgggttcacggcggtcacggtaaggatgatgctggactcctctgagtctg

SEQ ID NO: 2946 - DNA, 259 bp, Zea mays
  Clone ID: LIB3136-015-Q1-K1-E2
tcgtgactggagaggaccagacgatatttaagttcttacactccattgatgtgcatgatggggatgcacaagctgggtattcaattcatttaaaccactctcagaacacgcgcttggtgtacacaaaccgcgcacagacccatatctttggtaatgatggaacaatcacaatagaagcttccgaaattaactggactgaaggaacgtgacactgcgatctttaatagtcttaacaagaggcgcagtaagcagcccttag

SEQ ID NO: 2947 - DNA, 105 bp, Zea mays
  Clone ID: LIB3136-015-Q1-K1-E3
acggctatgcccacctgtcgtctggccttgcctgtggtcttgctgggcttgctgcaggcatgggcattggcatcgttggtgatgctggtgtcagggcgaacgctc

SEQ ID NO: 2948 - DNA, 169 bp, Zea mays
  Clone ID: LIB3136-015-Q1-K1-E4
acgcgtacgcataactgtcagactgggcatctctgctccgctgatcgattctctgattaggcgcgggttgtgaacttgggggtgcctgtcgatccacgcccacactcttccttaggcgcatccctcataagcacctgggcgccatcgtcatcaatgatgataggcgtga

SEQ ID NO: 2949 - DNA, 412 bp, Zea mays
  Clone ID: LIB3136-015-Q1-K1-E5
gaaggtttggaaacgtggcgtggtttctatcaaagcataaggcccacacagatgggtctttctctgaatattggttagataccatcgctctcatttattgggtcatctaccttctatttttcaaacttgatacatgaccataatggaggagcacactacattctacatcatgatgcctatggatgtagtttgtggcatcactatttggtcttatctgaaaattgagtttgtgtaatttcttttttttcgcagatatgtcctctactgcatttattgagcccctccctgcgattgattctgctgctcagcttcttgacagagatatctcagttagaccattgtctgattctgatcgtgtgaagattaacaaagccctacgaggtgtgaaagtcgaggtcacacaccgtggaaa

SEQ ID NO: 2950 - DNA, 368 bp, Zea mays
  Clone ID: LIB3136-015-Q1-K1-E6
cagaacgcgcacaagcgggagcgcagcgccgccaagcgatcctcgtaccacgcgcagcgggtggtcgtgggcggcctgccgctgcacgcgcacgccgccctcatgcgctccctccgagccaacccggcgccggcgccggaggtcaggacggcggcgaggttcctcgagggcggcgtggcggcggcctgtgcaacggtcccgtgcgaggaggcgctgtgcggtcaccagaacgcgcacaagcgggagcgcagcgccgacaagcgatcctcgtaccacgcgcagcgggtggtcgtgggcggtctgtcgttgcacgcgcacgccgaccttatgcgcttcctccgagccaacccggtgccggcgccggcggt

SEQ ID NO: 2951 - DNA, 417 bp, Zea mays
  Clone ID: LIB3136-015-Q1-K1-E7
cacagccccgtactactatccccgctaccgctagccgccgcgctgctcatctggtggcggctcgcctccctccccccatccgccgacgccggctcctcctctagctccctccttaccccgagctttaagctcgtgctacctgcctacctatccgtagggagagagagagagaggggagaaggttcggtcggtcggtcgggggctctcggatctcgccgctgcctccccgtttcttcgttgggatctcgctcgcttcgcgccatggccgccgtcgcgacgccaccggcccccgcgcccgccgcgccggcaccggcaccggcaccggctgctgctccggctcccgtcaccgtcgcccctgccgcggaccaaaccacggatctgctgcagaagttgtcgctggattcgcagcccaaggcg

SEQ ID NO: 2952 - DNA, 413 bp, Zea mays
  Clone ID: LIB3136-015-Q1-K1-E8
gggaagttaatgttgacaacaatactattggatggtatcagtcttgcttgctgggggcttttcaaactgtggaactgattgaaacatttatgaactatcaggagagcatcatgagatgtgtgtgcattgtctatgacccatctagatctagtcaaggcgtgctaactctcaaagccttaaagcttacagactcgtttatggatctttaccgtaacaatggtttaactggggagaagttaagggagaagaaattgtcctgcgttgatatttttgaggagataccaataaaagtttccaactcagcgcttgtcagtgcctttatgaatgagctggaacctgagtcacctgttacccagtgtgacctgcaccgacttaaattgttaaccgacccctttatggaaaggaacttggaa

SEQ ID NO: 2953 - DNA, 392 bp, Zea mays
  Clone ID: LIB3136-015-Q1-K1-E9
atgcgtaacaccttgttccccataatcaatctactatctactttcctgtagtaacgaacaaatcagctgaaggtgttgatgcatgaactcaaattccatacttcttttagaaacattgttgtatggttgataataaagctacgcatttataatattcaacgctgtaactttggaatatgtaagtcaacacaaggatatagtaaaaatgttgtcaccctcacattgttgtgtgcttgagcaacgtttttttttttgtagttgagatctattttcagtaattatatacatttgttgaaacttagacaaccatcattccatgtttcttatgtctgtatacagagattgaaggatataaatacacagtaccaggagaaactattaacacttagagc

SEQ ID NO: 2954 - DNA, 390 bp, Zea mays
  Clone ID: LIB3136-015-Q1-K1-F1
acgcggacgcgtgggcggacgcgtgggctgttggaaaggagcttccagttgtcgctgtagaaagttttgaatgcctacctggtaggggagttgttgctactttgagtggtgtaaaggtaagggaaaatgaaaatgagctatccgaggcatctatcggttctgtggattatatttcttcactatatacatccaatggtgaatcagagcaaataagagcagcagcaaaaagttctgcatatgggcctgaatttgttcaagctgctctatctgttgacaaaaaagttactcttttccactttgaggatgaaccccgctctggtgtttgtgaagttatatccaccttaagagagaaagctaaacttcgcattatgatgctaactggagaccatg

SEQ ID NO: 2955 - DNA, 113 bp, Zea mays
  unsure (1)..(113): unsure at all n locations; Clone ID: LIB3136-015-Q1-K1-F11
atcgcctnctatccttcgcccgactacctcggcgggtcagggcgtgtttagggcggagggtgtggcatgaggagcagcagcagcaacgctccatggacccgtgcccgttcgtg

SEQ ID NO: 2956 - DNA, 270 bp, Zea mays
  Clone ID: LIB3136-015-Q1-K1-F12
atcgcctactatccttcacccgacaacctcggcgggtcagggcgtgtttcgcgcggagggtgtggcatgaggagcagcagcagcaacactccatggacccgtgcccgttcgtgcgggtgctgatcggcaacctcaccctcagaatgccggtggcgccgcccgccgtcggtgccggagcggacgtacacccgtgcacgtcggcgtgctactgcaagatccggctcatgaagatgccggtccatagcgtccaggcgccgctcgtggtctccg

SEQ ID NO: 2957 - DNA, 414 bp, Zea mays
  Clone ID: LIB3136-015-Q1-K1-F2
gattggaaaaggaggagcctacaccggagagatcagtgccgaacaactggtggacatcggctgtcaatgggttattcttggacactctgagcgtagacatattattggtgaaaatgatgagtttattggaaagaaggctgcatatgcattgagccaaaatgttaaggttattgcctgcataggagagctgctggaagagagggaagcaggcaaaacttttgatgtatgttttaggcagatgaaggcttttgcagatagtatttcaaactgggcagatgttgtaattgcatacgagcctgtttgggctattggaaccggaaaagttgctactcctgaacaagcccaggaagttcatgctgctgtacgcaattggctgaagaccaacatatcacccgatgttgcctctagcactcg

SEQ ID NO: 2958 - DNA, 410 bp, Zea mays
  Clone ID: LIB3136-015-Q1-K1-F3
aaaaatgcagaaaatgatgggcgctatgcaaggaaaagagtcaccagacatggacgagctcatggaatcgatgaaagctgaggagcaggctgctgccggtactggacggcgtagaaggaagtatggcaacctgaggcagaggcaactggatgccatgcgtggtttccgcagacggtgagatgctcattgccggctagtactggcggtgcctgcacgaacgatggcatttagggacttgggctcggatatagaagtggaagaagatgaagtgcttttgggtgcaatggcaatcatctgggtacattgagttgagtttgcatattcatgtgcagtgtcctattttgtcatattagctgcattattatctttcttcggagcaagaactcgcaaaattgcgtcatctgaaccct

SEQ ID NO: 2959 - DNA, 298 bp, Zea mays
  Clone ID: LIB3136-015-Q1-K1-F4
gttcgttttccattgcattattacacacagctggatcgatacatgggctaagacgaagctccgggcggccgtgacttaatatagcccgtccgctgattcaactatctacgctaatataaagggataacaacatgctccatcaagttatctcgacacatacacgtacaaacatgcatatatgatcgactctggatccatcatgatcacgggaagacctcaatgatcgacgggaagcctcgggtgtgcgtgatcttgtagtcacggaacccagccgccaggaagatccttgtccactcgt

SEQ ID NO: 2960 - DNA, 384 bp, Zea mays
  Clone ID: LIB3136-015-Q1-K1-F5
ggccatcaggctagtagccgtcttcttagtatgaaatctgctaatgccctgctggaaataccatccactggacaaatattggcagctgggacatctatccaagccatacttatttcagacataataacttcttcagataaactgcctactccttcaaatccgtatccatctcgtggtccttctgcaaaaagtatttccgcagatgtatctcagattgcatctccacaggatgctgaagttaaagtcgcaattctgactgtaagtgacactgtttcatcaggtgctggccctgataggagtggcccaagagctgtatctgtagtgaattcttcatcagagaaactgggtggtgcaactgtggttgccactgcacgtggtcctgat

SEQ ID NO: 2961 - DNA, 260 bp, Zea mays
  Clone ID: LIB3136-015-Q1-K1-F6
ggccatccgagttcaactcgattgttgactagctcttcctcctaaacggagcggggtgcgccgtggactagatacagaggctcggctgggtcaactttcacggctacactaagaggatagaaaaggctgtgctcatgtaagatcgctacactggagcaacgcgatgcatatcacgaccagtgtcgacagaggatgggcggaggtttatctcacatagacatggcacacctggtgctggagctagccgacgacctcaaact

SEQ ID NO: 2962 - DNA, 104 bp, Zea mays
  unsure (1)..(104): unsure at all n locations; Clone ID: LIB3136-015-Q1-K1-F7
nggcaataaagggaatgttatgctttatacaaagaacggaataatggagagatattatgaacatatatggaacatatatatggaaccacactgctgagcaacaa

SEQ ID NO: 2963 - DNA, 346 bp, Zea mays
  Clone ID: LIB3136-014-Q1-K1-G11
cggacgcgtgggtggattttggatcctgaaaagtggggaggagccattgagctctctattcgatccgaatactacgggcgtgaaatcgcagcatatgacattcagaccactcgctgtgatctctatggtcaggttagtgatctttcttccccctaactacttatgccaaatttgttaacttacttatcagctttgcaccccttgacacaggagaagaattacagtgaaagggccatgctcatttatgatggtttgcattatgatgctctcgctatgtctccggctgaaggtgcacctgaagaatttgaccagacaatcttccccgtcaatcatgacccgtccattg

SEQ ID NO: 2964 - DNA, 399 bp, Zea mays
  Clone ID: LIB3136-012-Q1-K1-G2
cggacgacccacgcgtccacgccgacattcttgacctgattaacaaacggtcctacaccaaccttaaatacccaattccggctcactccaagagaacccaggacacaccggcttaattttaagaaggcttacaagaggcgcacggtggcggtctttcggtaacatctaccacaagggtgcgcgcgcgcgctatatagtcattttgatattcgagtacataaaaggcgacatctacgcgctgcagcaagggagacagcttatacatagactcatgatataaccatgtatttgctcctttcatccaaaaataattgcccaccatatccaataatcaataaatcttaatcttcaccaatcatatccatatcttgcgtatctaatattaaagaaagtgttact

SEQ ID NO: 2965 - DNA, 396 bp, Zea mays
  Clone ID: LIB3136-012-Q1-K1-G3
ctccgagaccaggtcatatttttattcagcaacagagactaagttagttgtggacacatcaagaggagaaaggctacgagtaaattttgatattacttttctgagcattccttgcaccctcctcagcgttgatacaatggatattagtggagaacagcaccaggacattaggcatgacatcgaaaagatacgattagatgcacatggtaatgttattgaagcaagaaaaggaaacattggtggagcaaagatcgagagaccattgcaaaaacatggaggaaggctggacaaaggtgaacaatattgtggtacgtgttatggtgctgaggagtcggatgagcaatgttgtaattcttgcgaaagagtccgggaggcatataagaagaaaggatgggc

SEQ ID NO: 2966 - DNA, 361 bp, Zea mays
  Clone ID: LIB3136-012-Q1-K1-G4
cggacgcgttggctacacacacgggcgctcacatttgtctcggcttctgtacccccctcctgcgcgcagggctgtctctctctccctcactctctttttaggagtgaggacgactggggcgaacgtcggcggcgcctccctacatcacgcgcccaggtcgtcggtccggccttcgtcagctgttttttgggcacttccgcggagacgaacacccaccaggtgctgatgcaaggctttcaaaagattaacagcttcacttgatgcagaagcaacacaatcacactaaacgactggattatacatttcagaacatgggttcgcggtttccattccaccatctaaacaatggcttgtatgtctc

SEQ ID NO: 2967 - DNA, 240 bp, Zea mays
  Clone ID: LIB3136-012-Q1-K1-G5
acggagaaggatgatgaaaggctttggcaatcgccgctgcaactgcaacccatgccatgccgggggagggattgggtataatttggcttggcagcagccagcattattatgtgctgatctggtatcttttactagtttggtcgtgcgatatctttctttctttttccccccttttcgactctagactgaaactgctgacagattcacagtattgatgcatcgaattgatacgctactggt

SEQ ID NO: 2968 - DNA, 300 bp, Zea mays
  unsure (1)..(300): unsure at all n locations; Clone ID: LIB3136-012-Q1-K1-G6
ctcctctccgcatttcgggcggccacttgtggcggcgtagctagcgtactacagctccctgcgatggtgatggaggggcgcacgggctcactctacggccgcctcaacaagagcagcacgcgggggttcctcgcctacaccgccgccggggctgcctgcgcggctgtcctcgcctgcttcgtgctctccgccgcggactcgccggcatctgcggcgcgcaacgatggcgagcgcctacgnctgtcctcgcgctcaccgcgcgtctggcccgacctcgcgttcaactggcgggtggtggtc

SEQ ID NO: 2969 - DNA, 180 bp, Zea mays
  Clone ID: LIB3136-012-Q1-K1-G7
gtcgatgggcgcgcgctgctacatacgcagtttccgccgcctcgtcgacgactgcggccatttcttcaagtccgtctgcgagcttgaggagtaccggggcaagagccgggtcctgtacggcgagtccatgggtggcgcggaggcgctgctgctgcacaccggggaccccgccttctggga

SEQ ID NO: 2970 - DNA, 345 bp, Zea mays
  Clone ID: LIB3136-012-Q1-K1-G8
gcacctcaacgacgatgctgcggtgcagattgtcttcaagaatccgagaactgggatagggagcagactggtgaaggctgccttgaaggaagcgaccaggaagagggaggtcaggtaccgtgatctgaggacgatcgagagaggggtgaggcggcatttccacgacgacatcagcgtcgtcgtggtctacctcgatggccaccgcgagcgccgccacaccagggtcgttgactcgagcagcaactgcaccagtgcgcccgtcgacatccactcctccaactcccgctagtttccggagccccttgcaacgcgagctgaactctgggtgggaggtgaagtgggtgc

SEQ ID NO: 2971 - DNA, 396 bp, Zea mays
  Clone ID: LIB3136-012-Q1-K1-G9
ggtcgacccgctgtaccctggcggcagcttcgacccgctcgggctcgccgacgacccggaggcgtgcgcggagctcaaggtcaaggagatcaagaacggccgcctcgctatgttctccatgttcggcttcttcgtgcaggccatcgtcaccggcaagggtcccgtcgagaacctcgccgaccacctcgctgaccctgtcaacaacaacgcctgggcctacgccaccaacttcgtccccggcaagtgagcgagggcatatacatacttgtatgcgtgtaccgtagacatacatattcgtatatgtactgcaggagatgtaccagtattaatttgtgaagcagggagcatgggctcagagattgtaccagtagtgtacgtatttgcatgcatgctttg

SEQ ID NO: 2972 - DNA, 419 bp, Zea mays
  unsure (1)..(419): unsure at all n locations; Clone ID: LIB3136-012-Q1-K1-H1
gtttctcgccgcaggctacggcatggagtgcagtggcttcatgagagaatgcggcgtgcgggtggcggcggccgggtacggcgtgttcgggatggactacgagggccacggcaagtcgatgggcgcgcgctgctacatccgcagtttccgccgcctcgtcgacgactgcggccatttcttcaagtccgtctgcgagcttgaggagtaccggggcaagagccggttcctgtacggcgagtccatgggtggcgcggtggcgctgctgctgcacaccgaggaccccgccttctgggacggcgccgtcctcgtggcgcccatgtgcaagatatcggagaaggtgaagccgcaccctctggtgatcacgctcctgacgcangtggaggacgtgatccccaggtggaagatcgtgcccaccaagc

SEQ ID NO: 2973 - DNA, 272 bp, Zea mays
  Clone ID: LIB3136-012-Q1-K1-H10
cccacgcgtccgcccacgcgtccgatccgcgaatcacagacgcgtctatctcagcttgctgggactggactaccctgccctgccatcatatcgtacgtgagcccggccgagcgagagcgagggagaggcatggctgctccgaagctcgcgacgctggcgctggccgtgctcctggcggcgaccgtggtggctcccccggccgcggtgcgcgcggcgatgtcgtgttccaccgtgtacagcacgctgatgccgtgcctgccgttcgtccagat

SEQ ID NO: 2974 - DNA, 364 bp, Zea mays
  Clone ID: LIB3136-012-Q1-K1-H3
cggacgcgtgggtccaggagatggagaagcaaaatatgatacagatacaggaatggtacatgggctgaccaagtctaggaagccatataagaagaaaggaagacgttcccagcacagctgaaaggagagctaagaacaagcttgccaggatcttcttggaattggacgtccaggatgagaagtggaggtagctggaccccaagtggtgtatacgaggggtttacctttagatcagctgctcgtggccagagcccaaagtgaagttcacaaattttggttacagtcaaggttgtctgcgtggccattagctcaatcaaagaatctactgatacgaaagtttcttaagatttgaagcaaataaaaa

SEQ ID NO: 2975 - DNA, 289 bp, Zea mays
  Clone ID: LIB3136-012-Q1-K1-H4
gccaaagctgacggaccacggcttccacccgctgctcccgcaccacgcgcaccggctggcggcggccgggtgcccctagttcgcgcgccgcggcggcaggcgtctgtcgtcccgcgccgacgtgtactgcctcgggttggtgctgctggagctggagacggggaaggtgcccgtggaggaagacggcgacctggcggagtgggcgcgggtggcgctcaaccacgagtggtccacggacatcctcgacgtggagattctgggcgaacgggggcggcacggggacatgctc

SEQ ID NO: 2976 - DNA, 278 bp, Zea mays
  Clone ID: LIB3136-012-Q1-K1-H5
ccacgcacgcgttgatacatgacatcgtgagcataatatgatacacatacacgaatggtacattgactgagcacatgtaggaagccatttaagaaaaaaagaagaccttcccaccccaccatatatgagagctaagaacaagcttgccatgatcttcttggaattggacgtccaaaatgagaaatggaggtagctggaccccaagcggtgtctacgaggtggttacctttagatcagctgctcgttgcccgaacccaaaaggaagtttacaaattttt

SEQ ID NO: 2977 - DNA, 438 bp, Zea mays
  unsure (1)..(438): unsure at all n locations; Clone ID: LIB3136-012-Q1-K1-H6
gagaagttcacagtgcccaatgtgttggcagcctattactatgaaggatcctaccagtcaggagctgcttgaggcagtagagcgtgagaggaatataagaactaatcaaactcggaacacaactatatttcatcatcctgctcttggggattttgagctgcagcatctgcctgttggtaatgatgctgagcttgaagagcgtatactgcagcatctagctgctgctgctgcaatgggaagggcacaccatcttggaagaagggaggggcacaggggacgatctggctctcatggtcgtccacattttctagttttctctacacaaccaaattcaccttctgctggcacaatctcttcatcttctgctcatatggagggagaaaatgattcaaatcctgccacacctagagctagcgagtcatctncacgagctattcg

SEQ ID NO: 2978 - DNA, 422 bp, Zea mays
  Clone ID: LIB3136-012-Q1-K1-H7
cctcaaagaagctctctctttcgcgcaatgtcatctgctccaagtgcaagggcaagggctcgaagtctggtgcttcaatgaggtgccctggttgccagggctcaagcatgaaagtcactattcgtcagctgggcccttccatgatacagcagatgcagcagccttgcaatgagtgcaaggggactggagagagcatcaatgagaaggaccgctgcccacggtgcaagggtgagaaggtcgttcaagagaagaaggttcttgaggttcatgttgagaaggggatgcaacacaaccagaagatcaccttccctggtgaagctgatgaagcgcctgatactgtcactggagacattgtattcgtcctccagcagaaggatcactccaaattcaaaagaaagggtgaagatctcttctatgagcac

SEQ ID NO: 2979 - DNA, 370 bp, Zea mays
  Clone ID: LIB3136-012-Q1-K1-H8
gccaaagctgacggaccacagcttccacccgttgctcccgcaccacgcgcaccggctggcgggggccaggtgccccgagttcgcgcgccgcggcggcaggcggctgtcgtcccgcgccgacgtgtactgcctcgggttggtgctgctggagctggtgacggggaaggtgcccgtggaggaagacggcgacctgtctgagtgggcgcgggtggcgctcagccacgagtggtccacggacatcctcgacgtggaaatcctgggcgaccgggggcggcacggggacatgctccggctcacggaggtcgctctcctctgcgccgccgtcgagcccgacaggcggtccaagctgcaggacgtcatcatgatgatc

SEQ ID NO: 2980 - DNA, 368 bp, Zea mays
  Clone ID: LIB3136-012-Q1-K1-H9
ggaaatgtctgtcttgggcttctcaacggaacggagattaatcatgggtcaactatcataggaggggatgtttctctgcgcggcaagttggttgtgtacgacaatcaacggaagcagattggatgggcagattcagactgcaccaaacctcaatcacaaaagggctttcctttcttcctctgacgaagcatcactcgctacataatacatgtgtaaagcgtaaatagtgaacgccattgtattgtaaaataccattattaatggggactggccttggggatgggtattatcgtcccttggaaccggcaaaaattcttcaatggggtggaccccgctggaaaggggataccatggtggttacctggatg

SEQ ID NO: 2981 - DNA, 404 bp, Zea mays
  Clone ID: LIB3136-013-Q1-K1-A1
gatcgtcgacccgcgcctgcagctcaacaaggtggtgcgagagatcaagtattccccggggggctgcaccgtcaagacagaggacaactccttgtacagcgcagactacgtcatggtttctgcaagcctgggtgtcctgcaatccgatctcattcagttcaagcccaagctacctacatggaaggttagggcgatctaccaattcgacatggccgtgtacaccaagatcttcctcaagttccccaggaagttctggcctgaagggaaaggaagggagttcttcctctacgccagcagcaggagaggttactacggagtgtggcaggagttcgagaagcagtaccctgacgccaatgtcctcctggtcaccgtgaccgacgaggagtctaggcgcatcgagcagc

SEQ ID NO: 2982 - DNA, 114 bp, Zea mays
  Clone ID: LIB3136-013-Q1-K1-A10
ggcgagagttatattgtgctcatagagaatcgttaggttgccccctcacaatcactcaaatgtatcattaggttttaacaatgtactgatcatgtatgaacttccatttgacgt

SEQ ID NO: 2983 - DNA, 212 bp, Zea mays
  Clone ID: LIB3136-013-Q1-K1-A11
cccacgcgtccgtcgcgacctgccatggtggccctgctgagatcatcgtggacggggtatgtggcctgcacattgacccttaccacagcgacaaggccgcggatatcctggtcaacttctttgacaaatgcaaggcacatccgagctactgggacaagatctcacagggtggcctgcaaaaaatttatgagaagtacacctggaagctctac

SEQ ID NO: 2984 - DNA, 389 bp, Zea mays
  Clone ID: LIB3136-013-Q1-K1-A12
gtatcacacaagaattctcgcaatgatagtatacaggttacataccctatatggtccttaaggaatacgtgcactatatatcatatgggttaaatttggattcaattgaatgaaaaaggatctttaaaatgttcttttttatgtcataaggaccctgtactacattacacataatgagcagaagaagtgttacctcaaaaacatttattgacaaccagaatacaacaaacacgcttgttgggttaaaaatgtgcaaggcataagtattctacttccttcgtcttaaaatataagaaatctaaagttcaaaatttgcaccaaaatacaagtattctggagttccctttttctttgtcttttaacatacaatattgagattccttttaaaa

SEQ ID NO: 2985 - DNA, 310 bp, Zea mays
  unsure (1)..(310): unsure at all n locations; Clone ID: LIB3136-013-Q1-K1-A2
aacccacccctcccgcttttgctaacccanacaacccaccacctattatttttctcattcacttctcactcaagcgtcttatattcgcccaactacaacaatctctcaaccataaaatacctcttatacatcctctaaaccaaccttccccttacattaccaaacactaaaactacattcttttatacaaacaattactttaaccccttttacttcctctcactcgctcctccattaataaaccataatactaaaatccctacctataaaactcctgttcaaccatattataaatcctcataaccctaac

SEQ ID NO: 2986 - DNA, 463 bp, Zea mays
  Clone ID: LIB3136-013-Q1-K1-A3
gcagaggaagcgaggcggagatgtctgcggggctggtgaccgacgaggccaccgtggggcggctggaccgcatccggcgcacggtgatgcaaatgctgcgtgaccgtggctacctggtggtggaccacgagctcgccaccagccggcgcgacttcctccgcaagttcggcgagtccttccaccgcgaggacctcctcatcaacaagtacaagaagaacgacccatccgaccagatatatgtcttcttccccaacgatgacaaggtagggatgaagcacatcaagaagtacgtcgaaatgatgacgcacgagaacgtctccagagctgtgctggttctccagcagaacctaactacgcttgcgaagtcgcttctcatagagttggagccaaagatccatctggaaattttccaggaggccgagatgcttataaacatcaaggaacatgtccttgttcctgagca

SEQ ID NO: 2987 - DNA, 440 bp, Zea mays
  unsure (1)..(440): unsure at all n locations; Clone ID: LIB3136-013-Q1-K1-A4
accggannaaaatgtgtgaaatctcattgctatcggagctggcattcaatatgacacttgaaacctcacnaaggtggtgccggcgttcatactcgaaagatgacactttgcttgctatcacagagagagcctggcccatatattatctccacataccaccatatctcaccggtatgctacctggggaccggaatcagcaactgtgtcatacgtgcctcacggctgtaataatccaatatggagtgttgtgcacgntccatcccaactgcacctttcacgatgaagggccctgcgcaatataagcccaaagacacagaagaaagagaattgcactttctcataaccagaagccggtgaagaggaagacaggaggtgattcttttacaacacagtccactggagagattcnatgccgatgtaccgatgaaaccgctcggagc

SEQ ID NO: 2988 - DNA, 446 bp, Zea mays
  Clone ID: LIB3136-013-Q1-K1-A5
cgaccgacgcgtacgtgattgcttccatccaccagcccagcagctaggtgttcgagctcttcgacatgctcggccggctatcctgcggcaagaccgtctacttctgacaagcatcccaagcatgcgagttctttgctcaagccggtttcccttgcccggctctgcggaatccgtccgaccatttcctgaggtgcgtcaactcggacttctacaaggtgaaagccaccctgaaaggatcgatgaaagcaagggtcgagaggtccgacgatccacttgacaggatgaccacatcggaagccatcacgaaattggttgcatcctacaccaggtcccagtactactacgcctcaagggagaaagtaaatgacatctcgcgaatgaaaggaaccgtgctggattccggaggcagccaggccagcttcctgatgcaggcctgcaccctgacc

SEQ ID NO: 2989 - DNA, 419 bp, Zea mays
  unsure (1)..(419): unsure at all n locations; Clone ID: LIB3136-013-Q1-K1-A6
gctttgcacaccacagactaccaacaacctatgctcttcctcaatacccttgccgtgagccgtcttgtggtcgccaaactaccgaatatgcacaaggtcaggatttttggaataaatgctgagagctaaacagcgtcatccttcaccagacattttacctatatgctttttcagaacggtctgtatgttccccttctagtgctttagttgggctcattcatcagagtaccatagtttaaaagttgttagcagatgggccttggtcgttgtatagagagatgctcagaggctggactggacatgtcgctgctgtacatctgatgtgcacagattctgtacacccttaatgttgctatatggtttgttgcgagcatctgtcagttgctatatatgtatgtatagnatcattcttgcagagc

SEQ ID NO: 2990 - DNA, 404 bp, Zea mays
  Clone ID: LIB3136-013-Q1-K1-A7
cggacgcgtgggcggacgcgtgggcaaaaacatacagcaagctagcatcaaatggggtatgggccacctccatgaatgccagagttgacacgaatgccaaattaggccttgagcctcctatctcggggaagtcgtctctactgaatgctcgaagcagcacaccacatagcgctggacataaagttgttgcaagtcatgtgcttctaaaagctagcaatacttctgattcattgcaaggtgttccttccaaagataataaatcgtcaacaatttctcaactgacaggagcaagaatcacaaaattaggaatcagaagtctgaaatctgacatggccctagagaaagaatcagtacaagtgagtgggacaaagtgttccccggtaacaacatccagaatccttgac

SEQ ID NO: 2991 - DNA, 418 bp, Zea mays
  unsure (1)..(418): unsure at all n locations; Clone ID: LIB3136-013-Q1-K1-A8
cggacgcctgggttgttacccgcaccatctcatcttgggtcaccgtatgcgtcgacggtagtggagattatgtttgggtgcttatatgtgggagtcacaacctgcatgagtggatgcaaaataagtcattttaatgttattaacctgcatccacccatacgtttaaaantatcgcgtttaaaattatcgtatctggctgaccaggacggcggcagcctgcgcatagacgcgcagccatccaatcaggctgatatctccttcaccatatgtcatatcggacttcattcaatcaggatatatagaaccttggtagatgaactacaaactccttggatcttgacaattgttaggcccctgcatcatgtaacacttaacaagcaaaatttgcgtgtgtcagaatggtgtgtgccctgctatc

SEQ ID NO: 2992 - DNA, 112 bp, Zea mays
  Clone ID: LIB3136-013-Q1-K1-A9
aaaagaaaaaaaaaaaaaaaaaaaatttaaattaaaaaaaaaaaaaaaaaaaaaaaggaaagggttaatttaaaaaaaaaaaaaaaaaaaaaatcgccgccctttttaaaaa

SEQ ID NO: 2993 - DNA, 366 bp, Zea mays
  unsure (1)..(366): unsure at all n locations; Clone ID: LIB3136-013-Q1-K1-B1
gaanggaaggnccgggccgagcgacgcgtccgatcacacctgagctgacacgtcggcataaatatacaacaaggtaccatcaaatcggggatgggccacctccatgaatgccaagggctacacaaatgccaaattaggccttgagccttctatctcggcgaaatcctctctactgaatgctcgaagcagcacaccacataccgctcgacataaagttgttgcaagctatttgcttctaaaagctagcactacctcctgattcattgcagagtgttactttcacagataataactcgaacacactttctctactgacaggagcagaaatcacacaattatgcatcaaacacttgaactataacatgc

SEQ ID NO: 2994 - DNA, 194 bp, Zea mays
  Clone ID: LIB3136-013-Q1-K1-B10
cgaaaagttggagcgaccagataacagtgttgattgattctgatatgctgaaaagtctaccgaaattaagtcgccaggagcttgaagtggcctgtgaggattttagcaacatcattggctcaactccagagacagtagtctacaaaggaaccatgaaggatggacctgaagtttctgtgatatcgttgtgcgcc

SEQ ID NO: 2995 - DNA, 182 bp, Zea mays
  unsure (1)..(182): unsure at all n locations; Clone ID: LIB3136-013-Q1-K1-B11
ctgatcgatggaccgtantggaggtagctatgcctctgcatgctcgttggatggcagcgtgtccatcagcagcatgcggtcgtcgtcntcntcctaacatatgtcctaactacgtgtgtgtcctcagactggcactgtggcacataataaagaagtacatcatgcacccactattcatcact

SEQ ID NO: 2996 - DNA, 347 bp, Zea mays
  Clone ID: LIB3136-013-Q1-K1-B12
cctgacgccgcgaccccggccccgagctggctttgccggccaatcggctcgcccgcgccggcaccgcgcctcttcccctcgccgagatcgcctgaaaaggcaagcgaggccagcccgatccccctccccgcccccctcaagaaccaaaaaagggtgtcatttcgtcctaggatcgcagctcgagctcggtcgctctcgctcacctcgcttcctactcgcctgctttccacttccttcgggcttccgaatttcttttcgaattcttcgccgacttctttcttcttggcaattccgtgcgccggccattggcccgaccgcacctgggtacattaactacaagaccggac

SEQ ID NO: 2997 - DNA, 349 bp, Zea mays
  Clone ID: LIB3136-013-Q1-K1-B2
cacaccgcgcatctagctgtcaccggatcgagcaagaaggaagaaaaatcagcggcaccgagaatggatcgacgacactcgcgcgaggtgggaagcgaaataaaaggtggccttttcgaagccgccggacggagtgtagtgtagcgctagctccgcaggccggagaggaggacgatggtggggcgacgcacaggaggaggaggaggagcggcgacggccctcgtgtgggcggtggtggcggtcgcggcggcggtgtcgcgggcgcagcagcagcagcagctgctgcaggtggggttctacgacacgctgtgccccgcggcggagatcatcgtgcaggaggaggtcagca

SEQ ID NO: 2998 - DNA, 421 bp, Zea mays
  Clone ID: LIB3136-013-Q1-K1-B3
ccagttgcagatggaagtggagaagcagaggaggaatgtggaaatgaacctttctgttgggagtgacatgcatgggcagccctaatgaataaagagaggaatgcagaacaagatttgagtgatatgattcacaagaaacttgcccttcaatcgcagcagtcccttggttttcctgatgtttctgttgcggcatcatttgggcataaagatcactttgtgcaacctgttgcggagaaccctctgagatcagtggacatgttgtcgtttgaggagtctctttcagaaaggtcactttatgcaaagtcagggcagttggcacaagagggatcagctaatctgggtactttacccaacagtattgagaacactggaaattttaaccttagaccaggatctggatcaatgtttgagcagaagcatt

SEQ ID NO: 2999 - DNA, 402 bp, Zea mays
  Clone ID: LIB3136-013-Q1-K1-B4
gcgtgggcgcgcatgcgagcgaatgcgtggtgctgcaggagttgaagttgcagtccttcatgcagggagacttcttgcacagtgagagatctgcagcatgctgatggtagtccatcatttctggagaaggccctgaagttcattgaagatcatggggtaaaggtagagggcatcctgcgtcagtctgctgatgttgaagaagtcaaacgcagaattcaggattatgaaaaggggaaaaacgagttctctccagaagaggatgctcatgttattggtgactgtattaaggaagtgacaaggcaagaagactttatgagataagtagggtgatatatgaagttttccctgaaccaaatcgatactatgtagcctatgatggctggggaaacagggaaaagtgtg

SEQ ID NO: 3000 - DNA, 405 bp, Zea mays
  Clone ID: LIB3136-013-Q1-K1-B5
ccgcaattccgcatcacgcagaggcagagcgaccaacccagaaccccaccccaccggccgcggccgcaagctcagattccctccccaccccaccccaccccaccgtcccgctcactccagcccaacccgcagtccccacagcccatcgacagcgggcaccggcggcatccacccatgtgcggcggcgccatcctgtcggacatcatcccgccgccgccaccgcggcgggtcacagctggccacctctggcccgagagcaagaagccgaagaaggctgcatccggcaggaagtgagcccccgtggagcagcatgagcacgaggaggatttcgaggccgacttcgatgagttcgacgtggagtccgacgacgagcccaagcccttcgccgcccccaggagcgcgctc

SEQ ID NO: 3001 - DNA, 183 bp, Zea mays
  Clone ID: LIB3136-013-Q1-K1-B6
cgacccgacccacgcgtgcggccccactccccatcacacagcatcattacgaccaacccaaaaccccaccccaccgggcggtagccttatctcacattgcgtgaccaccccactccatcatagcattccattaactccagaccaggccctgtacccacatgccaatcacagcgtacaccgaca

SEQ ID NO: 3002 - DNA, 434 bp, Zea mays
  Clone ID: LIB3136-013-Q1-K1-B7
acgatcagagagagagagagagcgcatagtcgatcatgaagggtggcacgaaggaagtgggcggggcgtgcgtggccatactgctggttctacaactcatggcagctccaccgacggccatggccgaccgatcgccgaacggagccgtgccggatggctccctcgccacgacgcccaaggtgacgatgctgtcggccacgctgtgctacacagtggagacatgcaaatacattggctgcctcactactgcttgctcctgcaactatagagagcgtctatgctacatcatatttactcctgtagcttgaggccattccgcgaagacacaactcttacatgcatgcgccggccgacgacgacgctgactctcgtgagcttctgttcaagagatgcatgtttcaaggcatccatggatgctctatgtatatgatatg

SEQ ID NO: 3003 - DNA, 441 bp, Zea mays
  Clone ID: LIB3136-013-Q1-K1-B8
gtggagaccatgcaaaccagagggatctgattagtcatgattatacgccgcacccaggcaagagatgatgtattcttcactcaggggcaggggggtctgaagctgacccttttcaactgcatctactgcatggattatacatgggcatcgtcgcagcgagcagcccgtcccgccgctcttgaacaccgaagcttttgacttgtacataaggcagaatcctgttccaaatgcctacaccttagcaatcaacgacaaaaaaccattcattgtcgttcacacaagccttgtggagctgcttactccaagggaattgcaggctgttttggctcatgagctgggtcacctcaagtgcgatcatggtgtttggctcacttttgccaatatactcacaatgggagcatacactgtccctggcttcggcatggttgctggctttctgga

SEQ ID NO: 3004 - DNA, 178 bp, Zea mays
  unsure (1)..(178): unsure at all n locations; Clone ID: LIB3136-013-Q1-K1-B9
acgaccatcncctgctagcacagacaacaagcctttcgccacacattcgacactatgggaggcgcccaccatcgatacaggcgtcttccccaccgacagtccaccgtactcttatttgctagactgcttcccttatgcatcgctcacttgcttcactactctcaagacgcaatcatcc

SEQ ID NO: 3005 - DNA, 392 bp, Zea mays
  Clone ID: LIB3136-013-Q1-K1-C1
gtgaaaataaaaatagtggtcctgagtcagttgtcatgagacctacaaagtcacaattgggtgatgaaaacatgaacagcgaacacaatggttttgttggtgttagaaaagatgcagtgcaaactggcattgtatcacacaatttagatggttcaattaggagggatgggaatactgaccaggcaggcaattcacatggcccacttgtgcagggaggcaaagatcacaaggcttcagatgcatctactgatcatgagaaaggacgactgtttcaacaggcatcactgcaaaatgcaggggcaccgggctcttatgtgcccccaggtgtggtaccacatccatctggaccagataaaatgcttcctcagcatatgacgaatcatggtcatatg

SEQ ID NO: 3006 - DNA, 171 bp, Zea mays
  Clone ID: LIB3136-013-Q1-K1-C10
caaatccccaaagcctccgacccccttcctctctccctccgccgccgctgcgcacgcgagggacaagcgacatgggcgtctacacctttgtgtgccgcaacaacggcggcgagtggaccgccaagcagcactccggcgagatcgaggcttccgccgctaccccatacgagc

SEQ ID NO: 3007 - DNA, 211 bp, Zea mays
  Clone ID: LIB3136-013-Q1-K1-C11
cagacgcctggactgcacgaaggctttcctgtgtcacctggccaaggcctacgcggacgtggacgactactgctggcaccaactcatcaaccactggctcaacacccacgccgtgatggatccagtcgtgatcgccaccaaccggcagctcagcgtgacacacctcctgccacaacttctcctgccgcactaaccgtgacaccattaaaca

SEQ ID NO: 3008 - DNA, 369 bp, Zea mays
  unsure (1)..(369): unsure at all n locations; Clone ID: LIB3136-013-Q1-K1-C12
ggcttcgccgtgaactactggatgctcatgttcgggcgcttcgtggccgggatcggcgtgggctacgcgctcatgatcgcgcccgtgtacacggccgaggtgtcccccgcgtcggcccgcggcttcctgacgtcgttcccggaggtgttcatcaacttcggcatcctcctaggctacgtgtccaactacgccttctcccgccttccgctccgnctgggctggcgcgtgatgctcggcatcggcgcggcccctnccgtggtgctcgccttaatggtgctcggattgcccgaatcgccccgtgggttgtattgaagggccgcttgccgaccccaaaggtgtgcttgggaaaaacttccacacccccgaaga

SEQ ID NO: 3009 - DNA, 450 bp, Zea mays
  unsure (1)..(450): unsure at all n locations; Clone ID: LIB3136-013-Q1-K1-C2
ctcggcaacgactattcactcctccacggtggagtactgtctgacacacacttgacatactgtcaactgctagagatggcgaggacaatggatgggcatgccctctctgacccagcatacgcccttatacttcagccggcaagacagctatgagagacggtcagcacacattgctagactacacacatccacgaaggtagtcaacgccttcatattggtgcctcgcgccttactgggacngcattgcacgatctattgtcaatgacccttgcactggcagagacaactcacgccttgtcagtggagtcctacagacaccattgacatatgtcaagcgctaactatcacaggacaaaggagtggcatccctctctgaccaagcaactagcttatctatctccggcaagcacgcttgaggacggtacgcacaccttgctgactacaacatcc

SEQ ID NO: 3010 - DNA, 422 bp, Zea mays
  Clone ID: LIB3136-013-Q1-K1-C3
ctcctcgccatcacataaaaccagtgcaagcagaagcagcgcaatggcgagcagcaccatggcccgctcctccacagccttcgccggcaaggcagtgaacgtgccgtcgtctctcttcggcgaggcccgcgtgacgatgcgcaagacggcggcgaaggcaaagccggcggcgagctccggcagcccgtggtacggccccgaccgcgtgctctacctgggcccgctgtccggcgcgcccccgagctacctgacgggcgagttcccgggcgactacggctgggacaccgcggggctgtcggcggacccggagacgttcgccaagaaccgggagctggaggtcatccactcccgctgggccatgctgggcgcgttgggctgcgtgttcccggagctgctcgcccgcaacggcgtcaagttcggcg

SEQ ID NO: 3011 - DNA, 355 bp, Zea mays
  Clone ID: LIB3136-013-Q1-K1-C4
ctttttcagagtaaagccttgccttggtgctgaactttacatatttgattcaaatcattggaatggaaaaggaatgtctatagagcctggttttctattgtctctaaccctctgcatgaagtggaagtgtgcgttagaaagaagcaccattcgcatcgtgaaattgtactgcattttggccgcaagcttagagacctgcttggatacagcacgaacaagaagcaagcagcttgatcagcacaggaccgctgaaatggtcgaattgaactccaagctgctacagtacataaagaatgatctgaggaaggctaggaatgagaagaagaattcccatagtgtcatggagatggtgact

SEQ ID NO: 3012 - DNA, 340 bp, Zea mays
  unsure (1)..(340): unsure at all n locations; Clone ID: LIB3136-013-Q1-K1-C5
aaacaccaccctagctaccctacctatggggcggttgcaacacattcttctccggcaagggcaccaacgtccctccccctgtgtacaacaacccctcgtgaccaccccaaaatctacccaagcaatctccgacacctgcttcacacccggcaccgaacctcgcacgtttctccccatattccgcgcgacccaaaaaccttattccagtacccacaactacccttcacaccgagttctaccaccaataccganaccagcccagcacctgaattgaaggtcatccacttcccttgacaccgtctccacttatctaggacttacacacctttcggcccaacag

SEQ ID NO: 3013 - DNA, 349 bp, Zea mays
  Clone ID: LIB3136-013-Q1-K1-C6
tcggacaatcaaacttctgcctgcactgaagagactgtatatccttacaatgtacacttaaggctgaggaatcattaagcatcgggtctcaattctctatttgtgttacccatcgcgtgcatagaaagaatgggtgagcaagatgcaatctgcacctcgcaccatgtgaacaggttatttacttggccttctttgcctgctctaatacaaaaaaagataatttctatgcacggcggcattacacgatccatcaaccatataaagctaacataaaatctttatagaccatttaccatcaaatcatgctcacttgttctgatagaacttatatggactgatccaactgaaa

SEQ ID NO: 3014 - DNA, 325 bp, Zea mays
  Clone ID: LIB3136-013-Q1-K1-C7
gacattttcatgaccaccactggcaacaaggatatcatcatggttgaccacatgaggaggaggtagaacaatgccattgtctgcaacattggccactttgacaatgaaatcgatatgctcggccttgagacctaccctggcgtcaagcgcatcaccatcaagccccagacttaccgctgggtgtttcccgagaccaacactgtcatctttgtccttgctgagggtcgcctgatgaaccttacctgtgctactgaccatcctagcactaccatgtgcagatcattcactaaccaggtcattgcccaacttgaactgaggaacgaga

SEQ ID NO: 3015 - DNA, 464 bp, Zea mays
  unsure (1)..(464): unsure at all n locations; Clone ID: LIB3136-013-Q1-K1-C8
tgtcccacccatacagcacggtggcaatatatgatgctagtgctgttattcatgcagtacggaaccaagcaatggagattctccctcatgccattgacactagagtgcctcgtggccctcggtccaccttgtactatcgtactgggcattccttccaaaggaagcaaggttacacgcacagccagagcactattgtaaggggtagttactcccccacaaccatgaacccccatgctgctgaatttgtgcctggaaaaacttcgcaacaatctgatgtggctgacagagaacccagtcctgataatcatgtggccaatcctgatctggatgttgtatcgcagaccacagatgaagtgaaggctgaaacacctgccactgaaaaggcaggtcaaagtgagaaagtcgcttcacgtaaaggaaaggaaaacaganggaaagacatcgtgagagactcatacaaaaca

SEQ ID NO: 3016 - DNA, 210 bp, Zea mays
  unsure (1)..(210): unsure at all n locations; Clone ID: LIB3136-013-Q1-K1-C9
gcgtgcgccactgtccacctgggcggcgatggcgaccgccgcgagggagaggcgcctgccgggggcggtggccctggcgactctgatcggccggaagctccncacggggggctccgagcgcccggccctgcgctactgacacgccggctttgccaagcgtggagaggactactttctcgtcaagcccgactgtcttcgcgttcccgggga

SEQ ID NO: 3017 - DNA, 186 bp, Zea mays
  Clone ID: LIB3136-013-Q1-K1-D1
gtctcaactcttccttctccagcagcgggtcctaatgcgtcagcttgggcgccacctacagatccttttctcaacaattcttgtgcaccaacaacggcattcctaactcgtacttttccccccagccctacaactactcctctctgcggcggcaaaaccaatagctcaatctttagatctctcgga

SEQ ID NO: 3018 - DNA, 265 bp, Zea mays
  Clone ID: LIB3136-013-Q1-K1-D10
cacaaacgttcctctccttttccatcgtcgtcccctcttctcgcgtgcaacccctgtacgtgctaggcacacaacacagctagctgcagctacagcagggcagcaaatggtttccggtgcgggtcatggtgggtacggcggcggcagcgacgacgggcaggccgtggacttccggggcaacccggcggacaagtcgaggaccggaggctggctggcccccggcctgatcttggccacgaacctgccgaaccccttttccttaatg

SEQ ID NO: 3019 - DNA, 362 bp, Zea mays
  Clone ID: LIB3136-013-Q1-K1-D11
atggaggtctgatggactatgcgtttgagttcatcatcaacaatggcggaatcgacaccgagaaggattacccttacaagggcacggacggacggtgtgatgtcaacaggaaaaacgcgaaagttgtcactattgacagctacgaagatgtaccagtgaacgatgagaagagtctgcaaaaagcagttgcaaaccaacctgtcagtgtcgcaattgaagctgctggcacaacatttcagctctacagctcgggtatcttcactggaagctggggaacaacccttgaccatggtgtcacggccgtcggctacggcacaaaaaacggcaagggactactgggatcgtgaaagaactcatggggc

SEQ ID NO: 3020 - DNA, 395 bp, Zea mays
  unsure (1)..(395): unsure at all n locations; Clone ID: LIB3136-013-Q1-K1-D2
aaggnncgacccgagcgacccattctagatgtataaacacacccatggctcattatcttattctattagcactgcttaagcagcgacagagccaactaattgaaaatcatcaaattctcatattcactatatttccttctttttttttgattatctttacctttaattcttaccctttccttctaaaaatgatcaattcacttcatagatacagctctatagtcataggtagtttctaccccccaaatattaacccccatcctcctgcatatgcccattgaaaaatttatctatattaacaacagcatttcttagatcacatcacacataacatttatatcacctctaatccataaaaatgttccctccccacaaataaagtaaaggcttaaaca

SEQ ID NO: 3021 - DNA, 463 bp, Zea mays
  unsure (1)..(463): unsure at all n locations; Clone ID: LIB3136-013-Q1-K1-D3
gatcgatctggagaccaacaagatcatggacttcatcaagtttgacgtcggcaacgtggtgatggggaccggcgggaggaacaccgggcgtgtaggtgtgatcaagaacagggagaagcacaagggcggcttcgataccatccacgtcgaggactccatgggccaccagttcgccacccgcatgggcaacgtgttcaccatcggcaagggcaacaagccgtgggtgagcctgcccaagggcaagggtatcaagctcagcatcatcgaggagcagaggaggcgcgactttgctgcccaggctgctgccaaggcataagttctctgaatgtgctgcttggagctttttgctatgtctagttntatttttatctgcaaggatatagagctaccttcccaagacgttatcatcatgntttgttgcttttggttctgaacagcgtttgcagctagctgtaatgcttta

SEQ ID NO: 3022 - DNA, 367 bp, Zea mays
  Clone ID: LIB3136-013-Q1-K1-D4
cgctgcttcaagaaaccaccgagagcccaagcgcgcaaggcaggagagagagagagagaggagggggagaagcgtggggccggggagcaaagatggaggggaaggaggaggacgtgcgcctgggcgccaacaagttctcggagcggcagcccatcggcacggcggctcaaggcgccagtgccggtgacgacgacaaggactacaaggagcccccgccggctccgatgttcgagcccggggagctcaagtcctggtccttctaccgcgcgggcatagccgagttcgtcgacaccttcctcttcctctacatcaccgtcctcaccgtcatgggcgtcttcaagtgcacctccaagtgcaccaccgtcgg

SEQ ID NO: 3023 - DNA, 430 bp, Zea mays
  Clone ID: LIB3136-013-Q1-K1-D5
cggacgcgtgggggtgtctccaacaagacccctgagtttcttaagatgaaccccctgggggaggttcctgttctggagactcctgatggccctgtttttgagagtaatgctatcgcacgctatgttgctcgcttgaaggatgacaaccctctttttgggtcttcccatattgaacaagcccacgttgagcaatggatggattttgccgcaacacaagttgatcctggtgttgcatggtacttgtatccaaggcttgggtacctcccttatgttagcacaactgaggaaacagctatttcttcattgaagaggtcgcttggtgctctgaacacacaccttgcctcaaacacataccttgttgggcatgcttgtactctagctgacattgtattgacatgcaacctctaccatggaattgcacggatcttga

SEQ ID NO: 3024 - DNA, 267 bp, Zea mays
  Clone ID: LIB3136-013-Q1-K1-D6
ctggactcaaaaacatcccttccgaactatcctctgatgtttccattcccctgtagggtggggggcttctgaaggcctcctacccctccctccagccctacgtttttaccttctcaaacctacatctatacccttacaacgtgcaagcatacatattgttcctctaccccacactgtcaacaaagtcccaaccttctcgaggcttccaccccgtcttcttcagcttcaatgccgtactgtcaaccttgcttaaccacttctaccctc

SEQ ID NO: 3025 - DNA, 462 bp, Zea mays
  unsure (1)..(462): unsure at all n locations; Clone ID: LIB3136-013-Q1-K1-D7
atggaatcattagatactgctgagaaatggttcgagaaagtagcagaacttgacaaggtggaggattccccaagtgcaatttccgatgaaaattttcctgagattatgccaataaggaaaggtgaaaatcgatttgttgttagtaagaaaaaagatcgctcattgacatcacagcagtacaaaaggcgcagtattctcgagcaggcagacagttctgattttgtcccatttgttccttttcctcctggctactttggcaagaaagatacgccaatagagagtactacagacacaggaattatgtcaggaggcagtcagccaaaaggtaacctgaataatgagaactggaacaggaattactatcaatatcaatcacaatctcaagaatttaagcctagtggtaatgcatatactggctctcggaacacaagcaactcttangggaacattaatgggagtagg

SEQ ID NO: 3026 - DNA, 426 bp, Zea mays
  Clone ID: LIB3136-013-Q1-K1-D8
caagcgtgaggttgttgcaatagcatcaaatgcattggagaccttcaaaaacgacggcagagggatggtcgttgcgcttgttgatatggaacgtgcttttgttcctccccaacatttcatccgcttagtacaaagaagaatggaaagacagcgtcgggaggatgagttgagaaatcgatcttctaagaaaacacaagaagctgaacagccaacatctaagagggcctcaagtccccaaacagatgctgagcaaggtggtggcagcttaaaatcaatgaaagacaaatctggccagcaagataaagacacaaaagagggatcaaatttgcaagttgctggtcctgctggtgaaattactgcaggttaccttttaaagaaaagcgcaaaaactaatgggtggagcaaaagaatggttgtcttaatgag

SEQ ID NO: 3027 - DNA, 369 bp, Zea mays
  Clone ID: LIB3136-013-Q1-K1-D9
gacgaactgctaccccctcgcctcgccctcgccgcctgctcctctccagttctccgggcacggaccgcagcagcgagagcgagactgagaatggccgcggcgccgtcgtccctcgtgtcctaccatctctaccgcctcgccgacctccgccgcgcggcggcgccggccactcccaccgtcccacagcagcttcgcgtcggcttctcgcgccggcgcgcccagcgcgtcgtcgacattgctggatcccgcaaggtcttcctcggaggcaactggaagtgcaacggaacaaaagacttccttagccagcttggctcttaacctaaagctgctaccctccaaactgatatggtgcggtggcttcttcattca

SEQ ID NO: 3028 - DNA, 355 bp, Zea mays
  unsure (1)..(355): unsure at all n locations; Clone ID: LIB3136-013-Q1-K1-E1
cttgaacatcangatctcatatgcgaggtatcatctcgggacactggaaagactatggttggggggtcattaggagagataatgaccacctgtgagaagattacctggcttttggatgagggcgagaagtggctgaaacctgaatacagatctactgggagatcaatgctgcataagagagcaaaagttgagttttaccctcttggagtgattggtgcgattgtatcttggaattatcccttccataatgtttttaatccagtgctagcagcagtattctccggtaatgcagcagctataaaggtctcagaacatgcgacttggtcgggctgcttttattttcgtattatacaag

SEQ ID NO: 3029 - DNA, 308 bp, Zea mays
  unsure (1)..(308): unsure at all n locations; Clone ID: LIB3136-013-Q1-K1-E12
cagatgtgagagaaacaaatgaggctgtcgcattgaggggtatgaagtttatggactggtggtggacaagagaagagaaagagatagctattgtcagtcacagtggtttcttgtttcacaccttaagcatgtacagcaaggagtgccatccaaccataagagacgaagttagcaagcactttgcaaactgcgagctacggtcgatggtgttggttgacagaagcatngcttggtcatattcgtcaagattcaactatgctggcaagaatccaanccggctagatgtgcctagtgatattgcagataaa

SEQ ID NO: 3030 - DNA, 415 bp, Zea mays
  Clone ID: LIB3136-013-Q1-K1-E3
gtgcagggcgcgagcgcggagggcacgcccaagaggctgacctacgacgagatccagagcaaaagggacatggaggtgaagggcacgggcacggctaaccaatgcccgaccatcgacggcggcgtggagtcgttcccgttcaaggccggcaagtaccagatgaagaagctgtgcctggagccgacgtccttcaccgtcaaggcggagggcatcgccaagaacgccccgcccgagttccagaagaccaagctcatgacccgtctcacgtacacgctggacgagatcgagggcccgctcgaggtcggctccgacggcacgctcaagttcgaggagaaggacggcatcgactacgccgccgtcaccgtgcagctcccggagggcgagcgcgtgccgttcctcttcaccgtcaagcagc

SEQ ID NO: 3031 - DNA, 282 bp, Zea mays
  Clone ID: LIB3136-013-Q1-K1-E4
ataaccaaacatagttggacgcgttcccatcctgtactcaacctaatctcgtcctacataggcgggatggccatccttcttgagaccttacctacccaaacgctctcggtgagctacttctattcgattaatcaggcaatccgcttgcttcattttagtccgtctcatatctgattgctggaaagtccaaacccgcgatggatcctgtctccggttgtccttgcctgtaaagctcctgtcgctctgtcttagtcgtctaaaatcacatgttctgcttattga

SEQ ID NO: 3032 - DNA, 452 bp, Zea mays
  Clone ID: LIB3136-013-Q1-K1-E5
cagcacattcccatgacgggccacgccagcctgctgctgccggcgctcgccgccggggtggtctgctgccccctcgcgcaatgcggacagcaaaactacacctccatgttcagcttcggcgactcgctcaccgacaccggcaacctgctcgtgtccagcccgctctccaaccacatcgtcggccgctacccctacggcatcacctacttccaccgctccaccggccgctgctccgacggccgcctcgtcgtcgacttcctagcgcaagcgttcggcctgccgctgctgcagccgtacctgcagtcccgcggcaaggacctgcgccggggcgtcaacttcgccgtcggcggcgccaccgccatggatccgcccttcttgcaggagatcggcgcgtccgacaagctctggaccaacctgtccctcagcgtccagctcggctggttcgagcagct

SEQ ID NO: 3033 - DNA, 466 bp, Zea mays
  Clone ID: LIB3136-013-Q1-K1-E6
cggacgcgtgggcggacgcgtgggcaagggagctttggatggtggcctggatattggtcagagcgagaagaggtttgctggtttcaagaaggatgacaagcagctggatgctgatatccatcgcaagtacatctatggtggccatgttgctgactacatgaggaacctcgctgaagaggagccagagaagtaccagtctcacttcagtgagtacattaagaagggaattgaggctgacgacatggaagctctgtacaagaaggtccatgctgccatccgtgctgatccttctgtggtcaagtcaaccaagcagccaccaaaggagcacaagaggtacaaccccaagaaactgacatacgagcagaggaaggccagtctcattgaaaggctcaaccaactcaactcctcgggcggcgcagatgacgacgacgaggatgacgagtaaagtttcgtcccatcgaagtag

SEQ ID NO: 3034 - DNA, 400 bp, Zea mays
  Clone ID: LIB3136-013-Q1-K1-E7
gcggagcaacaaaccagacttctctcacaaaggaaacagccagaggccaaaatctggccacgcagcttctgagaaccccctgcgtgaacgcgctaatgctagcatggtgttcttgaagggctctgtcaagaggaactccccaggtttcctttcacataaaccgagcttcaagaaacaaaaacctcacaaaccccattctggtagaccacacggcaaacgtcttgttcgagatagtgatactaacgcaccgttcgtcaagaatgccggccaacataaacagtacattgctgacctcgcagacctggctcgtcaggacaatctgactgcgtctgaaggtcgcaaattgctgaagcctcaaatgtcaggcaatagctaatgactttagcgtgagcagaggcat

SEQ ID NO: 3035 - DNA, 379 bp, Zea mays
  Clone ID: LIB3136-013-Q1-K1-E9
gtcccgtactctctgccccggcctataagatctcgttcccggccgtcttccgctgggtcctgacccgtcgccgacgtccccctcccggtccctgcctttcaaatcgtcagctcatggcgcaggcgctcagtcgcacacgcttgcccgcgccggccagcagctcccccatagccgtcgcgccgttcccgccctccaagattctgattggtgttttgctggaaccatgtccactccgtgcagccctatgagtatggaggaagactaatagatccaagagctcgatgccgaagagcatcatgacggttagcagcctcaacacggtgatgggctgcaacatgggtccacagcttaagcaagggcacaacaaaccggaaagaaa

SEQ ID NO: 3036 - DNA, 333 bp, Zea mays
  Clone ID: LIB3136-013-Q1-K1-F10
ccgccactggctgcgggtgctagggtttggctcgagatggggaaggcaaagagcgagggcgctaaattcgcggcggtgaagaagattatcaccaagaaaaccatcaataagtacaaggaggatgtgctgaaccacaagaagaaggacgtggacaaggagaaactcggccggaatgtgccgcaggtttcgtcggcgttgttcttcagctacaacacagcatttgggccgccgtatcggtgattgtgataccaactcatcaattctcatacaaataactgatttgaaaaggatgatgatgcttatcaaatgacccatttacgacggtatgctact

SEQ ID NO: 3037 - DNA, 302 bp, Zea mays
  unsure (1)..(302): unsure at all n locations; Clone ID: LIB3136-013-Q1-K1-F11
ggtggagcagcanacaaatgggtcggcgacgagcaaagcaactggaacagagagcgcgccggcgaactcatcggcccgattcaatagatcgtagttaggagagtgattacagcgagcagagataatcggcatttaaaataattcgtggctttcgagtttgtaacagcgtgcggcttgaagcttgccgtaattttcctttgtaataataacatgagcaagatcttgaccaannaaaaaaaaaaattaataaaaaaattaaaaaaaaaataaaataaaaaaaaaaataaaattataaaatttaa

SEQ ID NO: 3038 - DNA, 331 bp, Zea mays
  unsure (1)..(331): unsure at all n locations; Clone ID: LIB3136-013-Q1-K1-F12
gccgcggcgcgtcgcgacccgggccgacaagatagggtcggaaagccccgccgccgacggggtcggcgacgccgcgcgcaagcggcccatcggcgatgatggccccaccccggggccagccgacaagcgccgccgcccggagcacccttcttcctcctccgcgggctcccgcgaccgccaccaccaccaccacggncgccgcccgccgtcctcggccgacgagaaggtgcgcgcctctcacatcctgatcaagcacgagggctcccgccgcaaggcctcgtggcggcatcccgaaagcgtcggcatctncgncacgacacgcgacgacgcg

SEQ ID NO: 3039 - DNA, 356 bp, Zea mays
  unsure (1)..(356): unsure at all n locations; Clone ID: LIB3136-013-Q1-K1-F2
gaanngaaggnccgacccgagcgacccgaactgttacgcctttacggacacctcttcctaacacacaggacatcacaattataccactggagtggtgatttaattaccaaacttttacaacccacaaaggatatttactctacttttcacttcactcttcctttggacatcactaactgcgactgatatctaactgcaactacactaaagatcacactgccagccaacctagaccaatgcaaccagcaccagcaatacaaacaactaatggtgtgcagccccatgtgcaacactactaggagcaagaagctcccctccaccagaaagtaataggctaaaaatacttaagcataggc

SEQ ID NO: 3040 - DNA, 290 bp, Zea mays
  Clone ID: LIB3136-013-Q1-K1-F3
cgctcctgtgcaccctgctgccggcgtcgcctgcccgtggcataaactgtcaccgtaactgtggggggtgtcaaagcgcacgagctcccgtagaagagcaagactgacctgcgagcgcaggtcaaggagctgaagtatgagctatccctcctccgcgtagacaacgtcaccggcggcgcacccaacaagctatacaagaacaacgtggtgcgcacctctatcgagcgcgagctcacagcgatctctcataagcagaaatcggcgttgcgggaggcgtacaataagaagaa

SEQ ID NO: 3041 - DNA, 411 bp, Zea mays
  Clone ID: LIB3136-013-Q1-K1-F4
gggcgcccgcgcgtccgaaaccctagccgccaggcgcacgcggtcacgtagcgagtaccgagcgccccagttcacacggtctgaggtcctaatctacgcagtcaatcctccttagcggtttcgttaatttgcttgtttccagcgggcgctgcttcacagattttgcttagctacgcttcggaccggcgttcctttgatgctagctcttaccttttggaagtcaaagagtgctgtctttcgcctgatctacctagacaccttttcttgcatcagcgacttctattttggttaattagcaccggtagcccccctgctgtcttgagtgagatgtccgaatacaagaacgtccttgggcggaggctaaagctgaagggtaatgcactggacgtgacggaaggtggagtccagacg

SEQ ID NO: 3042 - DNA, 358 bp, Zea mays
  Clone ID: LIB3136-013-Q1-K1-F6
gcgacccaaaccctaacccccaggcgcacgcggtcactttgcacctaccgagcaccccacttcacagggcttgggtcctaatctacacagtcaatcctccttaacaggttcattaatttacttgtttccagcctccgcttcttcacatattttgcttagctacactcctgaccggcactcctttgatgcttgctcttaccttctccaagtaaaagagtactctctttcgcctgatctacctacacaccttttcttgcatcaccgacttctattttggttcattaacaccccccgcccccctgctctcttgagtgacatgcccgaatccaagaacgtcccttgggcggggctaaagctg

SEQ ID NO: 3043 - DNA, 464 bp, Zea mays
  Clone ID: LIB3136-013-Q1-K1-F7
aaaaggcaaacttttaactttcatcgtcttctcagacagaaatcaatatgccatttaggacgggtgttacttcacgggcacaacatttgaacattacactgacacggtcgaaatttgaatctcttgtacacaatctgattgaactgactagagatccatgcaagaactgcttgaaggatgccggaatatctactaaagaggtggatgaaatacttcttgttggtggaatgactagggttccaaaggtgcaagaggtagtctctgaaatctttgtaaagagcccaagcataatagtgaacccacatgaagctgtaggcatgggtgctgccattcacggtggaattctccgcggagatgtttaggaacttcttcttctagatgttactccactgtcactcggtattgagacactgctttgtatctctaccagatagatcaacaaaaacactactatccctacaaag

SEQ ID NO: 3044 - DNA, 453 bp, Zea mays
  Clone ID: LIB3136-013-Q1-K1-F8
ggagaaggcagatccatccgcgagcaatagacttaaggtctatggaggggctgaaggtagggctgatgtgaagaagggctggaaccgtcttgcgttagacagtcttcagaaacaaagtactagtcgtgtaaacacagacgagaagaagaacgctgcgcaaggactcgtcactagttcttgtggtactaatgatacagctaatacccctgccaagttagcttcgctgtatcaggacaacattgcctccattccaagtcttggcgccccaggaatccttggtgaccctcaggaccagcctagtcctgtatctgtgctagatggaccgtttattatacgtgataacagcaggaatgtactgtactcatctccatccccacaggctttgtcgaggtctcccttgatcggatcgtttccacggtccctgccagtgtcgtgggaggaccccccggcgga

SEQ ID NO: 3045 - DNA, 346 bp, Zea mays
  Clone ID: LIB3136-013-Q1-K1-F9
cggacgcgtgggcggacgcgtgggcggacgcgtgggcgcgtccggaggcaagagcgttccgcgccgaacgcggctcgccgctcttcctcctcctccccctctcccgtaggcgtcctcgccgtcctagcgtctgcctttcgacgctgctgccgtggagcgcagatcaaccctgactcttgccgatttcttctctcgttgatgctgaaagtcatttcttacatgttgcaaaatgtggaaaaaccttgccatgaaatggaaaaatggtttgaaaggaatggcaccgcttaagtccacaagcagattcttttaacgccattcttcaactatttgcttactgaattttcta

SEQ ID NO: 3046 - DNA, 248 bp, Zea mays
  Clone ID: LIB3136-013-Q1-K1-G1
ccttgtccttccccactttctccttccttcttctccttcccgctcccctcgcccaaccaccggtccgtgtctttattaaaccgagcctaactccacccaatccttccgggcctcccggctccacttttaagacaccgaactcacacttacccttcgccttccttgctctcgacctttcttcgccgcccccgatgccttcctttcccttttcttcttcttctacttctgctttcccgaccccgaccgca

SEQ ID NO: 3047 - DNA, 273 bp, Zea mays
  Clone ID: LIB3136-013-Q1-K1-G10
cacgcacttattgtccatgaagatgcacaaagcgagtcacaggatcttgttggtgagcaagcctaccatttcatgtccctggtgcttaatctagtgaacacattcctttacatggtgaatacatatatcattgtgccgactgcagatgactatgcagtaagccttggggctgctgcaactgtatgtggtataattattggatcgatggcagacgcccaagtattctcatcagtctactatcattgccttgtcaaataagtactacttcaaacc

SEQ ID NO: 3048 - DNA, 389 bp, Zea mays
  Clone ID: LIB3136-013-Q1-K1-G2
ctccaccttccttttcagcacctgcaccaatccgttgcgctcgtgctcccctctcgtccgggcgggggacccccgcgccgccatggccactgactcctccgccggctcgttccagaagatccagatccagcgcgaggacaccacttttgatgcttatgttgctggcaaagaaaatgctcctggaattgtggttttgcaagagtggtggggagttgactatgagataaagaaccatgcgatccacatttcccaacttggtggaggatacaaagcactcattccagatttataccgtggaaaagttgctctggatgttgctgaggcacaacatctgatggagggtcttgactggcatggtgcagtcaaggatatccacgcttcaattaaat

SEQ ID NO: 3049 - DNA, 377 bp, Zea mays
  Clone ID: LIB3136-013-Q1-K1-G3
acccgtgaagctaaggatccttcaacacaatggcgcaaacataataaacatggggccccattggtggaggtgggaaaatatggatgagatccagaagtatgccttggaatacttaataaccttgaccacatcatttgaattttaggattacttccatcaaacacttctctgcaagcttcatctgtgggatccggccaaggtaaaacattacatccatctccaactacattagaacagataattctcaacgagctctttaaagtgccttggggactcgtcttttccggggccgccggagatgtcaatctacatagccaccgccgtggctgccatcacgatgctgtaattataccttttgtacatgtattccaatcagc

SEQ ID NO: 3050 - DNA, 421 bp, Zea mays
  Clone ID: LIB3136-013-Q1-K1-G4
gacccacgcgtcccctgaggcatcaataacttccagtctgctgcttactccaactgcgcgaaaaacccatcctagaatgcctttttgcttcctcatatctactactttaccatttcttttctgacactttgattctcaccaatctctctggcctgctgcttcctgataatctaccacgtccccattcttgctccttgcactcctccctacatctgcaacattgtgttctcattcaccctctccaatgcctgttctttcttctgctgatgcttcccccgtctcacctatcagctttgaagactattacaaacgccttgacatcacattctctgatgcacctgcctttgtggaccctcatgggcgtacttcgcgtgccctctccacagcccatattgactctcttctagatctcgcacagagc

SEQ ID NO: 3051 - DNA, 448 bp, Zea mays
  unsure (1)..(448): unsure at all n locations; Clone ID: LIB3136-013-Q1-K1-G5
ccatcanatattgtggtcgtccctcagccgcgtcgcaccgcatcgcattctacgatgcgaggctgtctctgctcgcagccatggcgaagaattacccaaccgtgagcgccgagtacagcgaggccgtcgagaaggccaggcacaagctccgcgccctcatcgccgagaagagctgcgcgcccctcatgctccgcctagcgtggcactccgcggggacgttcgacgtgtcgtcgaggaccggcggtcccttcagtactatgaagtgcccggctgaactggctcacggcgccaacgcggagctggacatccgcgtgcggctgctcgagcccatcaaggaggagttccccaccctctcctatgccgatttctaccagcttgccggagttgtggccgtcgaggtcaccggtgggcctgacatccccttccaccccggcagggaggacaagcc

SEQ ID NO: 3052 - DNA, 327 bp, Zea mays
  unsure (1)..(327): unsure at all n locations; Clone ID: LIB3136-013-Q1-K1-G7
ccgccgattccgggcgccacgcgtcgcaacggccggcccgaacacccgggcaaggagccggaccccaggaggtgaggggcggcccagaaggaacggcaaaaaccgttccttggccaacttgttacacttngttgccgggcttgaaggcgaagaaacaccccaaccgcgcggccgccgtggacgcttccaggcgggagctggcgctgctcgagtccaacgccgacacccgctcgcaggccaccatggactactacgccaagatggagagcagcttcgacgccaccgccgagtccgaggccgccgccaggtccaagcgctccaggctcg

SEQ ID NO: 3053 - DNA, 384 bp, Zea mays
  Clone ID: LIB3136-013-Q1-K1-G8
tgatctttttcacgcttgccatattgtgtttctcaagagtgcccaacaaccttggtgccgtgttcttttgggtatctattaccaccaatccatccaggatataaaaagctcttcccctataatgcatctccattagcgcactctttgtgttctttcctccccctatttttattaaatcattattggtgcaccatgggaagtttctaaagacatgatcactacctttaacatttcattggttgtccatgggactgtatctgagggcaattcaactggtgaaattgatccttatgctgttccaaagagcatggggatttttcacacaatcaggagcccaaaatctattacaacattgtcagtggcgacaagaataatttacaatca

SEQ ID NO: 3054 - DNA, 229 bp, Zea mays
  Clone ID: LIB3136-013-Q1-K1-G9
agccgccgccgctgcagtgtccatagccaccgcaggagactgacatggggggtttggtcaggacccacaagagcaatgcatacttcaagcgtttccaggtgaagttcaagagaaggcgcgctggcaagacagactacagggccaggataaggctgattaaccaagacaaaaacaagtacaatacacccaaatacagatttgttgtgcgatttaccaacaaggacatcac

SEQ ID NO: 3055 - DNA, 328 bp, Zea mays
  Clone ID: LIB3136-013-Q1-K1-H10
ggagaagcgaagcacgcatgcttcgagaactagggggagggggaggaccaagcgaaagggggaactagagcaagatgggcggggaactgctgcttgcgctcctcctcgtctctgctgctgccgcccctcaggtacttggagttggcaatggagacaatcacatgagaatcatccaggaggacatcattgagacagtcaacaaccatcccagtgctgggtggacagcctcacgtaatccttacttttcaaactataccattgcgcaattaaagcacatacttgaagtgaaaccagcaccacaaaatgcactaagcaatgttcctgtcaa

SEQ ID NO: 3056 - DNA, 388 bp, Zea mays
  Clone ID: LIB3136-013-Q1-K1-H11
gccggcccggctcggcgatggcgcacgagagtcgagaggacgacgacgaggaggcgtataagaaatataatagcggcgtccagtaaataacatcctgtcaactgcacccgccattatccatggtcgctcgctcctcgcctgcgtctcctggggttcgtctgaacgtcctcgcggcttcacgacggcgatgccgccgccatccatcctgtccgtctcgtgccggatttagtatttacatctatatgcgtgtttttctgcgttattactacatgttgtgtctgtctgtcgcgtgtctctctgacggccccatgcgtcagcgtcactgcttgcttcattgctgcatctcactctgttgaagcgcttaaagaaaaactgataacatcttttc

SEQ ID NO: 3057 - DNA, 286 bp, Zea mays
  Clone ID: LIB3136-013-Q1-K1-H12
aagaaactgttccttcctaggctcaagtcttggatccgcaatgttgtagcagaaggtaatggcactgaaggcaaccagcttaagcctaggattgatgatgaaacggccgatgctgtaaaggcttctgcttcggctgtttctgctattgccaaaacaaaccaacaactgcttgcttcaaaggatgaagaaaagaagatactagtgacgttgacacaagctctagattcccaagccaaggagttaaaatccttgaccgattcaatcggtcataccagggaacccataa

SEQ ID NO: 3058 - DNA, 440 bp, Zea mays
  unsure (1)..(440): unsure at all n locations; Clone ID: LIB3136-013-Q1-K1-H2
ncnngccgcctctctctcttcttctcgtcgctttgggcagctagggcccttctcttcccgaactcnnccgagtcccgaggcgagggcgatgctccccctggctcgagccctcgcctccccgccgcgaaccagcgcctccggcttccgcctgctcgggcggggcggcancccacgctccctgcatncttcgnnctgcggcgagggtaccacgatnnggagggagctggaagaagaatgccaaccctttgggcggttaccgaattggcaaaaccctgggaatcgggtccttcggtaaagtgaagatcgcggaacatatattgactggccataaggtggcaatcaagatcctcaatcgccgtaagatcagaagcatggaaatggaagagaaagtgaagagagaaatcaagatactgagattatttatgcatcctcatatcata

SEQ ID NO: 3059 - DNA, 387 bp, Zea mays
  Clone ID: LIB3136-013-Q1-K1-H3
ctctgagtgttggtatgtttctaatttgatagtatctgaccgagaacaattatttcgtggtgatgggggtaattgggctgcccggtgtaggcaagtcaaccatcatgagcgagctttattaatatgatgcaagctacctgtgacaaaaacgattccaagaaaccacttcttgtcttcctccactggctgtctgtcatcttgctctaaaacaatcgcagtcctgcaagttgttgctgttgctcctacccctgcctctgcaattgggtttgagggatatgagaagcgcctcgagatcagcttctatgaggcacctgtcttcgctgaccccaacggaaggggattgtgtgcactcttgcgtccctagatttactctatttctgccatgca

SEQ ID NO: 3060 - DNA, 411 bp, Zea mays
  Clone ID: LIB3136-013-Q1-K1-H4
agcattgttcgttttttatctgccaatggagcttcttgagtcatatcactcctatgagtgtggggtgatgctattgtggatctcgtgagtaacggaacgaccttgcgtgagaataacctaaaggaaattgatggtggagtagttctggaaagccaggccactcttgtagcaagtagaaaatctctgcacaagcgtaaaggtgtgctggaggttactcatgagttgcttgaaagattagaagctcacctaagagcaactgcagaatttatggtcaccgcaaacatgaggggcaacagcgcaaaagaagtggcagagagagttcttagccaaacatctatattgggattgcagggcccgactgtaagtcctgtctatcgcagacgtgatggaaaaagttgatgtggaatacta

SEQ ID NO: 3061 - DNA, 239 bp, Zea mays
  Clone ID: LIB3136-013-Q1-K1-H5
ctttgaccataccattgaaatcaacgttccaatgtcccgcttcctaccatttaaggggacgggagattttaagctagcacagtctgatctatatacctatgatgatcgctctgttacacttaattcaaccctaacaaatccataaaatacttcaatagaacattttcctgatttcaacaatgactggagctatcttggtctctaacaatccatacctatcattgttgagcttgacactc

SEQ ID NO: 3062 - DNA, 447 bp, Zea mays
  unsure (1)..(447): unsure at all n locations; Clone ID: LIB3136-013-Q1-K1-H6
gatctacacnctaaaataaatccaaaactaatttataaatcaaattacgctatgttgcatggctcccacgattatataatccaacttataaattatataaacacctaatgatccgcttatatattattataatctaagtatatatattacatattcaactaataatttgtgttgtttgtttgtcacttaacttatttaagcgcgataagtttctaacacagcaggcaaaccgactcgggccgcttatcggttaataaaccatcctaaccacttctagacaatatatatggaattagccagaccggatcagcaggtggcaataccatctacttctctttttgcttggtgctttcaattatgttgtactaaatatttttcaacacttttctagatgtcataaatataatggtttaacctaatttccacgctcatacattttgcatgtta

SEQ ID NO: 3063 - DNA, 430 bp, Zea mays
  Clone ID: LIB3136-013-Q1-K1-H8
gctactactagtagcaccacactcgcagcgggagatgcggtgctgatccgcgcccgggctgggatctcgggagtggtgccgactcgtgtcggctcggctctgcctaggccagctccttgtcggttctgggcgagctcgcctgccatggagggcgacgcggacggcgtgaagtcggggaggcgcgggggagggcaggtgtgccacatctgcggcgatggcgtgggcactacggcggagggagacgtcttcactgcctgcgacgtctgcgggttcccggtgtgccgcccctgctacgagtacgagcgcaaggacggcacacaatcgtgcccccagtgcataaacatgtgcaagcgccacaaggtgagcccagccatccgaggggaggaaggagacgatactgatgccgatgatgctagcgacttcaactacc

SEQ ID NO: 3064 - DNA, 381 bp, Zea mays
  Clone ID: LIB3136-013-Q1-K1-H9
gcggcgcggacggacaaggagcaggcggaagaggagttgtgccaaggcacaatgggtatctggcgtgactcgatgcacaagcgccgagccaccggtggaaagcagaaggcctggaggaagaagcgaaagtatgagcttggtcgccagccagccaacaccaagttgtcaagcaataagacagttaggagggtccgtgttcgtggaggtaatgtgaaatggaaggctcttcgccttgatactggtaactactcatggggaaatgaagctggtacccgcaagaaccgtatcctcgacgtggtctacaatgccgtaaacaattagcttgtgaagacacaaacccttgtgaagaatgccattgtgcaagttgatgctgtcccattc

SEQ ID NO: 3065 - DNA, 277 bp, Zea mays
  Clone ID: LIB3136-014-Q1-K1-A10
ctgaaaaacaggaggatcatgtataacgaggcaattccacttactggaaaaacagcgaacgggacaaagcctcaggcttttaacagtactgctgaaagcagcaaggtacctgatactgatagcaagcctgcatcatcagttatcgtctctgtgctagctgatcccagggaggctggcaatggggatggtgatccaagagtatcaccaaaacccctctccaggatatttgtcgtcgttctgctcgatggtgtcagatacgtgacttactcgtgcacac

SEQ ID NO: 3066 - DNA, 97 bp, Zea mays
  Clone ID: LIB3136-014-Q1-K1-A12
cctatgctgtggtcttcacttgatagtatgaactaactattctccgggctgaaactacgaggcggggacattcgctcttttataccaattcaaggtt

SEQ ID NO: 3067 - DNA, 292 bp, Zea mays
  Clone ID: LIB3136-014-Q1-K1-A2
gaccacgcgtgcgtgcccgactggcttaagtgcggaatcaactaccagcctcccagcgtcgtccccggcggtggggtggccaaggggcagcgtgccgcgtgcattatcttcaactccaccagtgttgtggaggtcttctaccgcattgaccacaagttcgacctcatgtacgccaagcgcgccttcgtgcactggtacgtcagtgagggtatggaggagggcgagttctccgaggctcgtgaggatctggctgcgctcgagaaggactacgaggaggtcggcgctgagtttg

SEQ ID NO: 3068 - DNA, 433 bp, Zea mays
  Clone ID: LIB3136-014-Q1-K1-A3
cgttggcggcggtgctggactactcctacccgccgctggcggagaccagcgaggcgacgttggacgccgcctgcagcgtcaacacacggggcaccttcctgtgctgccgcgaggcggccaggcggctggtgcgtgacggccgcggccgaatcgtgacgttctcttcgtcgggagttgggtctctgcgccctggctactcggcatacgcagcaagcaaggccgcggtggaggtgatgactaagatcctggcgcgcgagctgcgcggcacggggatcacggccaacgtggtggcgccagggtccacggggacacccatgatgtacaccggcaagacggaggatgacatggagcgatacatcgccgaggcgccgctgggccggctcggcatgcccgaggacatcgcgccgctcgtcagcttcctcgctagtgatgc

SEQ ID NO: 3069 - DNA, 232 bp, Zea mays
  unsure (1)..(232): unsure at all n locations; Clone ID: LIB3136-014-Q1-K1-A4
ntcttttcttacactttgattctgaccaatctctctggcctgcttcttcctgataatcgacgagttccccatgcttgctccttgcactcctccctccatctccatcattgtgttctgattcacctgctccaatggctgttctttctgctgctgatgcttccccggtctcagctatcgagctttgagggctatgagaagcgccttgagatcaaattctctgaggcacctgtct

SEQ ID NO: 3070 - DNA, 127 bp, Zea mays
  Clone ID: LIB3136-014-Q1-K1-A5
gactgaagcagagcgagcgagctgtccggccaaaccctcacggccgcctgcacaatgccgggccatctcgcgctgctcctgcccctgctcctgctggcctcgccggcgccacccctggcgtcgcgct

SEQ ID NO: 3071 - DNA, 217 bp, Zea mays
  Clone ID: LIB3136-014-Q1-K1-A6
ctctggtgcggcagcagggtcaaaggactacgttcacgtgcgcatccagcagcgtaatggtggcaagagcctgactaccgtccagggattgaagaaggagttcagctacagcaagatcctcaaagatctcaagaaagagttctggtgcaatggtacagtgggccaagaacccagaacttggacaggtcattcagcttcagggtgatcagaggaagaa

SEQ ID NO: 3072 - DNA, 414 bp, Zea mays
  Clone ID: LIB3136-014-Q1-K1-A7
ggaggagggtgttgttctacagtacataatgaaaaatagtttccaattatggtagcatagcggttaaaggttcaacactgattagacatggtgattttctccatgtctgcactatcacgattttctcaaatctattgccatggttagttgagtactctgcaaattcaaacatgcaacagttgcttttttttgtcagtcgttaaagaagttaacctgtttgtgcagctagttgaaagggtagttccagtcatcaggaaaaaatcaccacaagatcttagaagaaacaactccatggaatggtaaaaatgacactgagccctgatgttcttctcttagaatttacagggtttctttttcttttagatttctggtctcctagctttctttggcagctatttaaattagtggaaaaca

SEQ ID NO: 3073 - DNA, 413 bp, Zea mays
  Clone ID: LIB3136-014-Q1-K1-A8
ctttgataatgcatacagaggtggccaagatgttaaggttagttgattttcactacagctgtgggcttttaatcgagcatattaattcaatgcctactttctttattccccgaactgtaggtttctgttgaactatcattcatggaagctgtccaaggttgcagaaaaaccattacgtacgaagctgatactttttgtggaacttgcaatggaagtggcgtcccccctggaactgtgcctaaaacatggtaaacatgtccagggttttgtgtgatatacattcccaaagggatatttactgtgcaatgtacctgctccctgtgccatgggagcgggaaaaatgtcaagaatttttgcaagacttgccaaagagaacacgtagtgaaagggaaaacgtcagtcaagctagacat

SEQ ID NO: 3074 - DNA, 323 bp, Zea mays
  Clone ID: LIB3136-014-Q1-K1-B1
ggcttctcctcccccaccggttcgtgttcaggttctggttcgtgggcgagagggaagagatggcggcgtcgggcgttgagtaccgttgcttcgttggcggcctcgcctgggccaccgacgaccactccctcaacaacgccttcagcacctacggcgaggtcctcgagtcgaagatcatcctggatcgggagacgcagaggtcccgcggcttcggcttcgtcaccttctccacggaggacgcgatgcgcagcgccatcgagggcatgaacggcaaggagctcgacggccgcaacatcaccgttaacgaggcccagtcccgcggc

SEQ ID NO: 3075 - DNA, 272 bp, Zea mays
  Clone ID: LIB3136-014-Q1-K1-B10
aaacccggccgacccatcatccccctagctgctcctaccaattttatcccatactattattaaacatactctggtgcacattatgcagcacattattacatatggtaccttcctcacttaccagaagaacccgaactgtaaattaaccttgaccaacttttacgtatgcaaatcattagcaacaaggacaacatgtttgatttctttaaagcatgaactgagtctcaacgtgcaaactatcttattaccttaggaggtattcaaagcaacca

SEQ ID NO: 3076 - DNA, 402 bp, Zea mays
  Clone ID: LIB3136-014-Q1-K1-B11
gcagctatacgtcatgaagcttttacacacatggatggccagaagcaatgtgttcagattgatcagaatgacttgtttcccttccttcttgttaatgtcggatctggtgttagtataatcaaggttgatgggcatgggaaatttcagcgagtaagtgggacaaatgttggtggtggtacgtactggggattggggaggctaatgacgaagtgcaaaagttttgatgagttgctagagttgagccagcgtggagacaatagcaccatggacatgcttgtaggagacatatatggtggtctggactactccaagattggcctttcagcatctacaattgcctctagttttggaaaagataattcagaaaacaaggagctatcagattatagacctgaagatata

SEQ ID NO: 3077 - DNA, 438 bp, Zea mays
  Clone ID: LIB3136-014-Q1-K1-B12
gcaggctatacgtcatgaagcttttacacacatggatggccagaagcaatatgttcacattgatcagaatgacttgtttcccttccttcttgttaatgtcggatctggtgttagtataatcaaggttgatgggcatgggaaatttcagcgagtaagtgggacaaatgttggtggtggtacgtactggggattggggaggctaatgacgaagtgcaaaagttttgatgagttgctagagttgagccagcgtggagacaatagcaccatggacatgcttgtaggagacatatatggtggtctggactactccaagattggcctttcagcatctacaattgcctctagttttggaaagataatttcagaaaacaaggagctatcagattatagacctgaagatatatcgctctctctgttacggatgatttcatataatat

SEQ ID NO: 3078 - DNA, 259 bp, Zea mays
  unsure (1)..(259): unsure at all n locations; Clone ID: LIB3136-014-Q1-K1-B2
cgaacacgcgtccgacctactcctccactatacgttagtttcccatttcttcatcattccctacaccgaaaaacacccaacantttagcaatcttacaattcaattcattcctaccacttctcttccatcttctacacattcaatcacaacgccaacttcacttactactacaacactctagtcctaacatcattctttatccctacactcatatgcacaacaccccaactatattaacctctttcacgcttgacacca

SEQ ID NO: 3079 - DNA, 407 bp, Zea mays
  Clone ID: LIB3136-014-Q1-K1-B3
ctggcagaagatggatctgttgacgagggtgtggcttattttgttgagtgggctatcttgattgtttcagcggttatgatcctccagagttctctggactatctctttgcatttacaactctagtattatgtggaatcatcaaagtgattgcaagaattgagggaaagtcaaaagttttacgctatatattcgggggactttctgatggtacctctcgtaattcatcccgttatggagattttgatgaagactattctagcatgaatgaagatcgccaagatggatttggcaatcttcatggtggataccagagacatgcaccgagaagaaactcacctcttgcaggctcagcaaagacattatcgcaaggtgttgctatggatagcttctattctacatttcacac

SEQ ID NO: 3080 - DNA, 267 bp, Zea mays
  Clone ID: LIB3136-014-Q1-K1-B4
ggccgccgcccagaccgacttcccttccccgtctccggtgcccaaggccaggccaacacttttgaggtggtaagggcggaccaggctaaccaacccactgtccttcataagctaggtggccagatccacctgagctccagcttctctgaaggtgtacgggcccgtaacatctgcccttctttctcaccttatgaaaggagatttgccacgaggaactacatgacccagagcctttggggcccttcaatgtctgttagcggtggcatc

SEQ ID NO: 3081 - DNA, 390 bp, Zea mays
  Clone ID: LIB3136-014-Q1-K1-B6
cagacgcttttgctgacgctttctaaaaaattcaccaattcgataatataccagtcaatggtggaagcgataaagggcacccatgcgctatagatatatatcgatcgatgtggacagccatgcctatagagatctcgtatgccagtgcagcacagctggatgagctcatgttatgtgcattctccggatgcaacaaattgctctgaagtacgaaaaggtaaatccttacgtgcctgttgcttataatcttggtaccgggaataaagtaattgcacctgatccgtgataatctaactaccaaatctgcgtatcaaatgaaaatgttagaactaaatgatcggatcgaataagcgtcttattaacactttctggctgacaaattaaccagat

SEQ ID NO: 3082 - DNA, 314 bp, Zea mays
  Clone ID: LIB3136-014-Q1-K1-B7
gtgaagctcgtcctaatgattagcgaagagataagctacatgatcgcgagaaggataagcggaagtctgagaacaagaagattctggatacaaaacaactaattgatatgatcccaaggacaaaggaagagctttttgcctatgatataaactgggcgatatatgacaagcatgagttgcaagagagaatgaggccttggatttcaaaagataattgaatttcttggcgaggaagaatcaactttggtggactatattgcttcctgcaccaaagaccatgttcaggctgaaaagatgctagatcttctacagtc

SEQ ID NO: 3083 - DNA, 233 bp, Zea mays
  unsure (1)..(233): unsure at all n locations; Clone ID: LIB3136-014-Q1-K1-B8
gggtagtctttgtaactgtgatcacagacctcaacacatgccaccctacatggtttcatgctgatgtgaatagatgttactgtccttcanaagaagttgccaagcgggcagcactggatgatctacaaccatctcaaatccgcgtgttcggtctttcgattcgaccatctttctgtcgtgcagttcttgttaaggatgatttgaggagggaacttgaattggatcctgagctt

SEQ ID NO: 3084 - DNA, 343 bp, Zea mays
  Clone ID: LIB3136-014-Q1-K1-B9
acgctccactctctgcggcgcgtatatcccgttctttctctgtgccccctgtggggataggagcgactgccaggcgccgccctttttacaacttaacatggaagcggccgcggcgtcgagcagccgcggtcgaaggttcgggcgctggactgaccagttggcaggcagcaacgcttgcggcgctggccggctgggtgtgggcggcctccttctacgacctcacgcgccgggcgcgcgcgcttgtacagccgtgggtcacgcgccgggtgcacgccgagacgccggccatccttaggttccagaagttggagcacaagttgctggacaatttcttctccgtgct

SEQ ID NO: 3085 - DNA, 298 bp, Zea mays
  unsure (1)..(298): unsure at all n locations; Clone ID: LIB3136-014-Q1-K1-C1
cggacgcgtggcaagggcttatattggcgttttagatgacccaaagcattcttcaaaatgagacagcanaaggactgacttgaattttggatcaattcccatgagctgatatcttcaaaaacatcttagttaggaaaaagaaggaaacgaaaatggaatttgtttccatttgttatttgtttgggtgccacaaggaggcaaaatcatagcaaggaattgtaccttattttttagggatcgtgtacttttctgctgttgagagctatttggtggttggataatgtgatggagcctatct

SEQ ID NO: 3086 - DNA, 344 bp, Zea mays
  unsure (1)..(344): unsure at all n locations; Clone ID: LIB3136-014-Q1-K1-C10
acggaaccagncaaccagctttttaaggaggaactttagcgcaacactttgcaggttactnagagacgctactgaaaacttcatcgccctacccattactgtgaatacagtggcatctctcccctttgaccatcctccatccactatgcgactgctccagcatactacctgcatatcagatcaacaaagataaccttgcgcatactgctaagaaaatcaagactacccaaccaggttctacagaccctcaaaaccttaatcattacatcatcaccactctcatgaacggactatatattacggcgagcacattactttattgaattagaccacttaacctttac

SEQ ID NO: 3087 - DNA, 449 bp, Zea mays
  unsure (1)..(449): unsure at all n locations; Clone ID: LIB3136-014-Q1-K1-C11
cggacgcgtggggccatgaagaggaccagctcattccaaacttgtatcgtgacatccagccgtgggagagtgagtttattgattcacagcgtgtttgggctgagtatgctttgaagaggcaggaagcacaatcacagaacagacgattaactcttgaggatcttgaagattcatgggatagaggtatacctcgtatcaacactcttttccaaaaagaccgccatacactagcctatgacaaaggatggagagtgagaacggattttaagcaatatcaagtgctgaaacagaacccattctggtggacacatcagcggcatgatgggaagctttggaatctaaataactacagaactgatgtcattcaagcacttggtggtgtagaaggcatcctggagcatacattatttaaagggactttacttcctacttgngagggtctgttttgg

SEQ ID NO: 3088 - DNA, 411 bp, Zea mays
  unsure (1)..(411): unsure at all n locations; Clone ID: LIB3136-014-Q1-K1-C12
cggacgcgtggggccatgaagaggaccagctcattccaaacttgtatcgttacatccagccgtgggagagtgagtttattgattcacagcgtgtttgggctgagtatgctttgaagaggcaggaagcacaatcacagaacagacgattaactcttgaggatcttgaagattcatgggatagaggtatacctcgtatcaacactcttttccaaaaagaccgccatacactagcctatgacaaaggatggagagtgagaacggattttaagcaatatcaagtgctgaaacagaacccattctggtggacacatcagcggcatgatgggaagctttggaatctaaataactacagaactgatgtcattcaagcacttggtggtgtagaaggcatnnctgagcatacattattta

SEQ ID NO: 3089 - DNA, 431 bp, Zea mays
  unsure (1)..(431): unsure at all n locations; Clone ID: LIB3136-014-Q1-K1-C2
gccgcttctctctccccatctccatctgcaatcctcgctcgcccacactcggcagccatggcgtggtcacgcggcggagccggagccggagccggcggccgtgtagtggtcttcccgttcccattccagggccacttcaacccggtgatgcggctggcccgcgcgctgcacgcccggtgcctctcgattaccgtcttccacagcggcgccctggacccggacgactaccccgccgactaccgcttcgtgcccgtgaccgtggaggcggacccgaagctttttggcgtccgaggacatcgccgncatcgtcaccacgctgaacgccagctgcgacgcccccttcacggcccgcctctcggcgctgctggccgncgaggagagggacagcgttctgtgcgtcttcaacgacgtcagcttgaacgccgtgctga

SEQ ID NO: 3090 - DNA, 303 bp, Zea mays
  Clone ID: LIB3136-014-Q1-K1-C3
gcccaagggagctgtggacgaggacctgtacaagatctccccgcagcttctctgcaaggtgaggaagaagaagctgctgaggaatttgcttggagggtgcctgggcttgggctgcatcgcctgagagtgagagatgcagagcttaataagtttcttgaaagttcgcttgcttggtgctctggagagagttgtatagttgtctacgctaatatgagattaatggaaacttactactgctaaaaaaaaaagtcctccaaggagtgaagactagggaatgcacattgttagtttaaactggacatt

SEQ ID NO: 3091 - DNA, 258 bp, Zea mays
  Clone ID: LIB3136-014-Q1-K1-C4
cggacgcgtgggctgtgaaggagtctggtggtctgaaagaaaaattgtttcatactgcatacaatgccaagagacaagcaatccttaaagggaaaaatccatccccagtgtgggataagttggtatttaacaaaataaaagctaggcttggtggacgagtgagacttatgagttcaggtgcttctccactgtcagcagatgtcatggaattcctgaggatatgctatggtggtgaagttcttgaaggctatggaatga

SEQ ID NO: 3092 - DNA, 442 bp, Zea mays
  Clone ID: LIB3136-014-Q1-K1-C5
ctcgtcctgatctgatattaacgggacaccaggaaaatgcagaatttgcgcttgccatgtggccagcagaaccatatgtcctgtcacgaggaaaggacaaatttgttgtcttgtggagcatccaagaccacatatctgcccttggggattcctcgtcttctcccggagcatctggcagcaagcagtctggcaaaattgcaaatgaaaaggagagtcctaaagttgatcctagaggtatattccatggccatgacagtactgttgaagatgttcagttctgcccttccagtgcgcacgagttttgtagtgtgggtgatgatgcttgtcttattctgtgggatgctcgaactggcactgacccagctgttaaggttgagaaagctcacagcggagatgttcattgtgttgattggaatccccttgatgttaactatatcttaac

SEQ ID NO: 3093 - DNA, 396 bp, Zea mays
  Clone ID: LIB3136-014-Q1-K1-C6
gggtgcctcggcgtcgtctgctacgggtctcttcaaccttggctacatcgcaaacagtgcaagcagctcaggtacttccagccatggccatgccaaaccaggacacctgacaaggtaatcagttaagcgaacgaggtggcggcggcggctctgagtcatccgccgcgatgcttttcagcggcggcgggaacttcgcccgtggtgaccaccaagttgctcctggcgggatgtacaacaatgatccggccgtgatgctgccgcagatgtccgcgacggcgcttctgcagaaggcgtcccagatgggcttcagcgcgagcgcgcacggcggcgtgtccgtgtttggggggctcgtgggctcgtcggcgcccttcgctaagcacgcccgggcacccatgc

SEQ ID NO: 3094 - DNA, 327 bp, Zea mays
  Clone ID: LIB3136-014-Q1-K1-C7
ctaccctcttccttcacatcgtcatggaacttttcccccgccgcgaacttttcgagcggatcttgggcgagggccactaccattagccccccacttctaatctcatcaacgaccacttgtcgtgggtccaaagaaggatttcacttgctctgcgttattcacacgggacctcaagccccataattttctctttgtcaacaccgccgcggaagccccactcaaggccactgactttgggctatacatgttctacaaaccccgtgataaatactctgatgtcctcggaagtccatactatgttgcaccagaggtgctctagaaatgcta

SEQ ID NO: 3095 - DNA, 397 bp, Zea mays
  Clone ID: LIB3136-014-Q1-K1-C8
cgtcacggtcatcgtactctccacacagggcatctgccaagtccccttctcttatactcagggggatgttttgactaccgcaaagaggaaggttttcaagtttgatgacggcatatatcgtggtgtcaacagcttcggcttcaagtccgacgtcaccgaaaggaagctctccaaggacgatgactgagcgatatatcgtgcataatctctcgataaacttatgtcagcgtgacttataataagctatactcagtgactgatgctttaataatcacgtcactatatatgtggaagaaaaatcatgtttttatactactaatatgtgtgcatgcacactttatgtgtcatgctttacttgtgatttattgcgacataacaaagacagtacctcttttcc

SEQ ID NO: 3096 - DNA, 445 bp, Zea mays
  Clone ID: LIB3136-014-Q1-K1-C9
ggacactgtctaatgtttgctaatagggttcggtcgtacagagagttgcctcttcgcatgggtgattttggagtgcttcatagaaatgagcttagtggtgctcttacaggtttgacacgtgttagaagattccagcaggatgatgctcatatcttctgcagagaagaccaaatcaaggatgaagttaaggctgttttggaattcatcaattatgtttatgagatatttggcttcaaatatgagttggagttgtctacgagaccagagaagtatctaggtgaagttgaaacttggaacaaagctgaacaacaattgacagaagctttaaatgagtttgggaagccatggaagataaatgaaggggatggtgctttctacggcccaaaaattgatattggtgtgcttgatgcccttaagaggaaatttcagtgtgcaaccctacagc

SEQ ID NO: 3097 - DNA, 371 bp, Zea mays
  Clone ID: LIB3136-014-Q1-K1-D1
ctttgcaagtatagtctctctgctaagcgaagcgaagcttcaagctagtctcggcggctctgggggactataggcagggacgacgtgatcgagagcggctctggctgcggcgagttcgctgccaaggactacacggaccctgccccggcgccgctgatcgacgcggcggagctggggtcctggtcgctgtaccgcgccgtgatcgccgagttcatcgccacgctgctgttcctgtacatcacggcggccaccgtgatcgggtacaagcaccagacggacgcgtcggcatccggcgccaacacggcgtgcggcagcgtgggcgtgctgggcatacgctgggccttcggcggatgatcttcgcctagatactg

SEQ ID NO: 3098 - DNA, 460 bp, Zea mays
  Clone ID: LIB3136-014-Q1-K1-D10
atcccatccgcgccctccttcggtcctctcccatccgctccgctcgcagcccctccccctggccccccgcgatgtcgtcgtcgtcaccgccgccgcggcccgacgacgacgacggtgcgcaggaggtgggcgccggcgatgggaggtcgctgggctacggcgaggcggagtactgggacgcgcggtacgtggaggagggcggcgcgccgtacgactggtatcaacgctacgacgcgctccgccccttcgtccgctgcttcgcgccgccggcgtcccggatcctcatggttggctgcggctccgcactcatgtcggaggatatggtcactgacggctatgtggagatagtgaacattgacatttcgtcggttgtgattgagatgatgagaaagaaatacttcgatgttccgcagctgcaatgtatcctttgactgtttttagcattttccccaatctattg

SEQ ID NO: 3099 - DNA, 392 bp, Zea mays
  unsure (1)..(392): unsure at all n locations; Clone ID: LIB3136-014-Q1-K1-D11
acggccttttgtggccttctcggtgggactgttggtggccttcttggatctggtggtgggttgaggcttggcccacttcttcttgagcttgggtgcataccgcaggtggcaagtgcaacagcaacattcgtgatgatgttctcctcctccctctctgtggtggagttttactttctgcacagattccccctgccttttgctggctacctcatcttcatttccatattggctggattctggggccagcgtttggttaggaagatcgtgcatgtgctcaagagagcatcgcttattgncttcatcctctcctctgttatcttcaacagagctcttaccatgggtgtcgttggaacccaaaagagcattttgatgatcaacaatcacgaatatat

SEQ ID NO: 3100 - DNA, 425 bp, Zea mays
  Clone ID: LIB3136-014-Q1-K1-D12
gccttttgtggccttctcggtgggactgttggtggccttcttggatctggtggtgggttcagccttggcccacttcttcttgagcttgggtgcataccgcaggtggcaagtgcaacagcaacattcgtgatgatgttctcctcctccctctctgtggtggagttttacttcctgcacagattccccctgccttttgctggctacctcatcttcatttccatattggctggattctggggccagtgtttggttaggaagatcgtgcatgtgctcaagagagcatcgcttattgtcttcatcctctcctctgttatcttcgtcagtgctcttacgatgggtgtcgttggaacccagaagagcatttcgatgatcaacaatcacgaatatatggggttcctcaacttctgcgagtaactcaaacacca

SEQ ID NO: 3101 - DNA, 301 bp, Zea mays
  Clone ID: LIB3136-014-Q1-K1-D2
gcggaagcagcgcctcgcaccgctcctacccaatggcgccgacgtcgaagctgtcgatgggcgtcaagcgcgcgtcgcggtcgcacgcgtaccaccgccgtgggctctgggccatcaaggccaagaacggcggcgtcttccccaaggccgagaagcccgccgccgccgcggaacccaagttctaccccgccgacgacgtcaagcctcgcgttcccagcacccgcaagcctaatcccaccaagctcaggtcgagcatcacgcctgggacggtgctgatcctcctcgcgggcgcttcatgggg

SEQ ID NO: 3102 - DNA, 396 bp, Zea mays
  Clone ID: LIB3136-014-Q1-K1-D3
cttccctccctccctctccccgcgggccgccagaggcaatttcgccctcgattcgaccccgagtcgtccgcccgcgaccgggattccctccgccaagcgcggatctgaacgctgcgctccgtgtcgccgctcgaatccgccatgaagggggccaaatccaagggcgccgccaaggccgatgccaagctggcggtgaagagcaagggggcggagaagcccgccaagggcaggaaagggaaggccggcaaggaccccaacaagcctaagagggctcccagcgctttcttcgtgttcatggaggaatttcgcaaggagttcaaggagaagaaaccctagaacaagtctgtcgctgcggtggggaaaagctgctggcgacaggttgaaaatcctgagcga

SEQ ID NO: 3103 - DNA, 291 bp, Zea mays
  Clone ID: LIB3136-014-Q1-K1-D4
gtcagccttctctagcagtgcatctccaatgaatggctcgttttgcagcaacggtgtagctgagttgggtgctgcatcctctggaggtacaagtattttcccctccaatgacctgaggatagaaagagacagcaaagtggcagctagctcttttggtagtgtgatacttctgtctccagacactgtgccaaaccaaaaatacttgaacttcggcggtgaaagcgatttgagatcgaacatggatggagggaacgcaggcaatctgttgaatcccaagctactatgggagtg

SEQ ID NO: 3104 - DNA, 313 bp, Zea mays
  unsure (1)..(313): unsure at all n locations; Clone ID: LIB3136-014-Q1-K1-D5
gtgagcatatcattgctggagctggcgagcttcatcttgagatttgcctgaaggatctgcaggaggacttcatgggtggtgctgaaattattgtttccccacccgtcgtctccttccgtgaaacggttcttgagaagtcctgccgtactgtcatgagcaagtctcccaacaagcacaaccgtctgtacatggaagcgcgccccttggaggagggtctcgctgaggccatcgatgacggccgtattggcccacgtgatgatccgaacgtgcgctcccagatcctctctcaggagtntgggtgggacaaggacct

SEQ ID NO: 3105 - DNA, 280 bp, Zea mays
  Clone ID: LIB3136-014-Q1-K1-D6
gtgtttaactctgtaacagaagctaaggctgaaacaaaagccaatgcatctggtatatatgtgccaccaccatttgctgccgacgctataatggatgcaatggaggctgagctcaaccttgttgtctgcattacggaaggaattccccagcatgacatggtgaaagtgaacgctgcactaaatagacaatataaaactcgattgattgggccaaattgtcctggtatcattaagcctggtgagtgtaaaaatggaatcatgccaagttacatccacaagc

SEQ ID NO: 3106 - DNA, 405 bp, Zea mays
  unsure (1)..(405): unsure at all n locations; Clone ID: LIB3136-014-Q1-K1-D7
tgataaagtggggctcctcggtcccggcgttggccgcatcgacactcgccgcgcaccaccaggaccgctgcggctcacggctacgcancccgctctcccgacccccccgtgccctcctctttttgctactagcacatagagtttcgcccgaatcgatcgccgactgactccgctagggttcggcccgatcgccgcttcgtcctcccggctcccgcggggaccccgccgagatgtctgactggagctcgccggctgcgccgacgttcttcccttttggcccgcaggccgaggggtgggacgtcaccttcaaggtcaaatatggtgatacacttaaaaaggtttatggttgtgccaatgggagtcattttgacatgaatttatctgctctacgggcgaggattgata

SEQ ID NO: 3107 - DNA, 410 bp, Zea mays
  Clone ID: LIB3136-014-Q1-K1-D8
cgcttccccgcggtaggcaatagaagccgcagcgggagaaggaaagcgaagcgaaccctcggggcgcgagttagcgatggccggagaggacgccgccgccgccgcgaggaggcccccgaaggaggaggaggaggacgatgacgacgagtttgacaacgttccgctggcactttccagggccaagaaaccgggtaatgcgagcgcctccaaggtcaagaaggaggtggaggacgatgacgacgacttggacaacgttccgctcgcactttccagggccaaaaaggtttgcttgcctctaccccaaatctttgctttccggtctgtggcttggcggccgtcgcagtgcaagcgatgctaggtcttgaaagatttttttttggaataaaatttttttttggttaggtaatttt

SEQ ID NO: 3108 - DNA, 370 bp, Zea mays
  Clone ID: LIB3136-014-Q1-K1-D9
cggatggcctgacatgctgatggctaaagaagtggatgaacttgcaaggaagacccctggggagagatctcatgctatcgatgctctctcccacgctctgcaagccatcccaacaatcatagctgacaatgctggtttggacagcgctgagttgatctctcagctccaagctgagcaccacgaagagaactgcactgctggaatcgatgtcatcactggcaccgttggtgacatgcaaaagctggggattcaagagtcgatcaaggtgaagcatgccatactcctgtctgcgacggatgccgctgagatgatcctcatggtcgatgagatcataagctgtgccccgcgcacaacagaggataggatgtga

SEQ ID NO: 3109 - DNA, 118 bp, Zea mays
  Clone ID: LIB3136-014-Q1-K1-E1
gctctattggtatgaggtttggttgccgtgttgccgagcctgtaaacgaagcaagatttgcagacttgttatggtgtggtattgatgatactggattactggctgtgggttgttcggg

SEQ ID NO: 3110 - DNA, 415 bp, Zea mays
  unsure (1)..(415): unsure at all n locations; Clone ID: LIB3136-014-Q1-K1-E11
ggaagaagggcctcctgtctcacttccctcagtcctcgtccgtctctgctggtccctcctctgtctctctctacctagctagctagctagccttcctgtagcgcggcagatatggctgcctccaccacggcggcggcggcgctgctgctgctcctcctgtcgctcgccgcggcggcggacatgtcgatcgtgtcctacggggagcgcagcgacgaggaggcgcggcggatgtacgcggagtggatggcggcgcacggccggacctacaacgccgtcggcgaggaggagcggcggtaccaggtgttccgggacaacctccgctacatcgacgcgcacaacgccgncgccgacgcgggcgtncactccttccgcctcggcctcaaccgcttcgccgacctcaccaacgacgagtacc

SEQ ID NO: 3111 - DNA, 367 bp, Zea mays
  unsure (1)..(367): unsure at all n locations; Clone ID: LIB3136-014-Q1-K1-E12
ggaagaagggcctcctgtctcacttccctcagtcctcgtccgtctctgctgtccctcctcggtctctctctacctagctagctagctagccttcctgtagcgcggcagatatggctgcctccaccacggcggcggcggcgctgctgctgctcctcctgtcgctcgccgcggcggcggacatgtcgatcgtgtcctacggggagcgcagcgacgaggaggcgcggcggatgtacgcggagtggatggcggcgcacggccggacctacaacgccgtcggcgaggaggagcggcggtaccaggtgttccgggacaacctccgctacatcgacgcgcacaacgccgncgncgacgcgggcgtncactcctt

SEQ ID NO: 3112 - DNA, 345 bp, Zea mays
  Clone ID: LIB3136-014-Q1-K1-E2
accacagccagtcagccacatcactagctatctgtgcagaggcaatggcgtccaaggttgagctggtggtggaggtcaagtccccggctgacaagctgtgggcggcgctgcgtgactcgacggagctgttccccaagatcttgcccgagcagtacaagagcatcgagaccgtcgagggcgacggcaagtcggccggcaccgtccgcctcctcaagtacaccgaggcggtgccgatgctgacgttcgccaaggagaagcttgagacggcggacgactagaacaaggtggtgtcgtacagcgtggtggacggcgagctggcggacttctacaagaacttcaagatca

SEQ ID NO: 3113 - DNA, 364 bp, Zea mays
  Clone ID: LIB3136-014-Q1-K1-E3
ctactcactctctctccccatccgcgccagtccaaccaagtcagcacccgcgcgcggcaaggagttcacgcccgtggcgagcaccaacatggcgtcggccacctcgcggttcatgctggccgcgggcgtgcccactgccagtagcggcagcggccgtgtcagcttcgcctcggcgcccaaccggcttggcaggaggcttgtggtccgggccgatgaggagtccccggcagagccggcgcccacggcggaaggggagggcgccgtggccaccaagcccaaggccgagaagccgccgccgatcgggcccaagaggggcgccaaggtgaagatcctgaggcgggagtcctactggtacaacgggatc

SEQ ID NO: 3114 - DNA, 302 bp, Zea mays
  Clone ID: LIB3136-014-Q1-K1-E4
cggacgcgtgggcggacccggccactttcctcgccaccgccaacgaatacttcgccgccgacggcgacttcgcgaacaatcatccatcgtcgccggccgccgacctcttcacctttggtggcagcggcctcctcaccattggcacgctaggcatcgccgccgtcgcggtgtctgcagatgctgatgaagttgattacgacgtcgacgccgatgctgactccgactttgacgacaacgacgacaccgccggtgatgacgaagaccaggtcgacagcgccgtcacgcccacgttcacatatgca

SEQ ID NO: 3115 - DNA, 347 bp, Zea mays
  unsure (1)..(347): unsure at all n locations; Clone ID: LIB3136-014-Q1-K1-E5
tcagatacgcctttggattgagagtggtcagaacatgaaatgtgaaagtacgtcaacttctgacagcaaaggtcttgatacgccaagcaaggcgaatcgcaagagatctcgacccggtgaaagtgctaagccacgacctaaggaccggcagctgatacaggaccgtattaaagagcttcgtgagcttgtaccgaatggggcaaagtgtagcattgatggtttgttggagaagacggttaagcacatgcttttcttacaaagtgtgacgaagaatgcagacaagctcaaggactctaccgagtctaagatacttggtagtgaaaatggcccnctttcgaaagactact

SEQ ID NO: 3116 - DNA, 427 bp, Zea mays
  unsure (1)..(427): unsure at all n locations; Clone ID: LIB3136-014-Q1-K1-E6
caggcacgctggtcaggaaatcagtagcctgttttggctgctgttgctaatgagttgggagagggagagatggccgggaggaacatcggagtcgcagtggacttctcgtcgtgcagcaaagcggctttgcggtgggcgtcggcgaaccttgccaggaacggcgacaggctcatactcatccacgtgaacagctcctgccagaccgagcggngcgccgttcatctctgggagcagagtggttccccattgatccctctggccgagttttcagacgtcgccaggacatacggtgtgtcaccggacaaggagacgatcgagatcctcactcaagcggcaaaccatagaggggtatggatgggccggggcttccgtctattcattcacaccttttcagtgttcagttctttctggaagttgctattgggag

SEQ ID NO: 3117 - DNA, 387 bp, Zea mays
  Clone ID: LIB3136-014-Q1-K1-E7
ggtgcatggaacgaagatggaaagggggaaagcaattgggatcacttctgccacaattttgcggaaaggataatggacgggagcaatgcatacattggagcgaattcgtaccatatgtacaaaacggatgtcagattgctgaaggaaatgggcatggacgcatataggttctctatctcttggcctagaatactgcctaagggaacggtcgaaggaggtattaaccaggatggcatcgattactacaaaaggctcatcaacttgttgctagagaatggcatagagccatatgtaacaattttccactgggatgtccctcaagcactagaagagaagtacggcggattcttagataagactcataagaggattgtaaatgattacaaa

SEQ ID NO: 3118 - DNA, 317 bp, Zea mays
  Clone ID: LIB3136-014-Q1-K1-E8
agagatacaagcaaagacacccaactcgtacatccttcaacaatttgaaaatgcagctaaccgagagattcactatgagactactgggcctgaaatctggaaagctacagcaggaaaaattgatggccttgtatctggtatcgggacaggaggtaccatcaccggtactgggcgatacctcagagagcaaaatcctaatgtcaagctctatggtgtggagccagtggagagtgctgttttgaatggtggaaaacctggaccacacaagattcaaggaattggagctggttttatccctggagtcttggatgttgatc

SEQ ID NO: 3119 - DNA, 430 bp, Zea mays
  Clone ID: LIB3136-014-Q1-K1-E9
cctcaatgtccttccagcagaaaacggtgaaaatggcaatgtgtttaaggtctgtgatgacggagttaatgttgtcaaccttgacacatgggaatgcacctgccaaaggtggcatatttctgggctgccatgcatgcatgtgattgctgtattggagcgcactgggcaatatgcatatgactactgtgtgaagtacttcacaacagaatgctaccgcttgacctattccttgtcaataaatcccatacctgatgttattgtgccgcctacattaatcgacttagctcagagcccagcaacatacccatgcccactgcgaacccgccgtcgggttggccggccaaaagagaagcctgctgatcctcgcattgcaatcaagagggcagtgcgctgcagcaggtgcaagggttatggacacaacaaggcaacc

SEQ ID NO: 3120 - DNA, 222 bp, Zea mays
  Clone ID: LIB3136-014-Q1-K1-F1
acggtgttcctttactatcttgttcagtatcagcttaattttaataccattcacgttctatttcagtggactattcattttaacgtctattgtaactactttataatataccaaatgtatgatcgtcatcaaccaaatttgttctttcttttatacttgaacacattaatgttctatcacttttaaactacaatactttctaatgaacaccttctatttttt

SEQ ID NO: 3121 - DNA, 381 bp, Zea mays
  Clone ID: LIB3136-014-Q1-K1-F10
aattcggatccctcccaccacatccatccccttcccttcccttccttcgtgccccgccggcgctccagcgcgccgtctctgcccacatccaggagatatgcctcgctatgatgatcgctatggaggcacgcgcttgtatgttggcagattggccccccgtactcgttctcgtgatttagaatatctcttcggcaaatatggaagaatacgagaagtggagttgaagcgcgactatgcatttattgagttcagtgaacatcgtgatgccgatgaagctcggtaccaactagatggcagggatgtcgatggaagtcgcattgttgttgagtttgctaaaggggtcccacgtggtccaggtggctcacgtgaatatatgggaag

SEQ ID NO: 3122 - DNA, 441 bp, Zea mays
  unsure (1)..(441): unsure at all n locations; Clone ID: LIB3136-014-Q1-K1-F11
aagagcaggtcaaagatcctaaggagccaggctcggctggagatgccctggaggagaaggaggacctgttttggcgtcaagggttgttaatcattcagaccatatatcatggtgccgtggaagctcttccgtcaagcttaaccttgcggaagaaattcttggagatactaaacagtgttgacttggcacattctgatgagttaaaactggaggtcctggatgaccttaagagagatttctctcatagcgaggactactgggattggtttgctaggcttcagcttagcaacttgaacagttccagtaattcgaatagaaaggatgctatatcaaacaagttgaacagatcaattcangtgtatgacgaagctatcaggaagctaccannattccaaatgtactcattgtatgccaaagtttggatgggatgtatatatactg

SEQ ID NO: 3123 - DNA, 452 bp, Zea mays
  Clone ID: LIB3136-014-Q1-K1-F12
aatgaacaggtcaaagatcctaagagccaggctcgctggagatgccctggggagaaggagacctgtttggcgtcaagggttgttaatcattcaaaccattatcatggtgccgtggaagctcttccgtcaagcttaaccttgcggaagaaattcttggagatactaaacagtgttgacttggcacattctgatgagttaaaactggaggtcctggatgaccttaagagagatttctctcatagcgaggactactgggattggtttgctaggcttcagcttagcaacttgaacagttccagtaattcgaatagaaaggatgctatatcaaacaagttgaacagatcaattcaggtgtatgacgaagctatcaggaagctaccaaattccaaaatgtactcattgtatgcaaagttttggatggatgttatatatactgacagagaagattcagt

SEQ ID NO: 3124 - DNA, 356 bp, Zea mays
  unsure (1)..(356): unsure at all n locations; Clone ID: LIB3136-014-Q1-K1-F2
acccaatccaaaccagacaagcaaggaatcccccgatggctcatcgcgttctcctcctcctctgtctcgcgtgggccgccgcggttgccgccgccgtccacgcggaggacccgctgatccggcaggtggttcccggtggagatgacaacgatctggagctgaacgcggagtcccacttcctgagcttcgtgcagcggttcggcaagtcctacaaggacgccgacgagcacgcgtaccggctgtccgttttcaaggccaacctgcgccgcgcgcgccggcaccagctgctggacccgtcggcggagcacggcgtcactaagttctccgacctcacgccggcagagntccgccggacc

SEQ ID NO: 3125 - DNA, 350 bp, Zea mays
  unsure (1)..(350): unsure at all n locations; Clone ID: LIB3136-014-Q1-K1-F3
tgaatgacaaggttgaagatgacagtactttgcatgagaagtctgaagatgacacaatgtcggaagaggtctgggttatggagagcaatttgcctaatgacgctagaaatttgctaaactattgtagttttgcaagagttccaacaagaccacgaacagtgcttgcaaacaggaatgttggaccaggtcaaagagaaattactgtgtctgaacagctcaatttggttacttctgaagaaatatccaatatggcaatggatggagaagctaacactaattccataactagcatcgaggaaggcagtanagttgagctggttggccaagaccaagaacatgctgaacaaagc

SEQ ID NO: 3126 - DNA, 328 bp, Zea mays
  Clone ID: LIB3136-014-Q1-K1-F4
cggcaaacgggtggtgcgcttcaagtcgaaccatctcggcaagttctggaggcggagccccggctggatctgggccgacaccgacgacaccagcactaacaactccgacaccctgtttgaggtcatcaagatcgacgaggacgacgtgtacgcgctccggaacctcggcaacaaccacttctgccacaggctgacctacgacggcaaggagagctgcctgaacgccacaattccgaccatcaggaaggaggcgcacatcaagatcgaagaagccgtcctctcccgaaagatctccaacatcgagtaccacctcaagggcgccaagatc

SEQ ID NO: 3127 - DNA, 197 bp, Zea mays
  Clone ID: LIB3136-014-Q1-K1-F5
gtgttcctttgttgtcttggacagtatcagctcagttttagtacgagtcagcttctagttgagttgactattcattttaacgtggatggtaagtactttataatagaccagatgtatgatcgtgatcaaccaattttgtggtttcttttaaaaaaaaaaaaggaaatactaaaaaaaaaaaaaagggcggcctctct

SEQ ID NO: 3128 - DNA, 339 bp, Zea mays
  Clone ID: LIB3136-014-Q1-K1-F6
ccttttcaattctttggggtccatgtatgcagcagttcttttcattggaattcagaatggtggaactgtgcagccaattgtggatgtcgagcgaacagttttctaccgagaaaaggcagctgggatgtactctgctctaccctatgcttttgcacaggttcttattgagatcccacacatcttccttcagacagttgtgtatggtctcattgtctacagcctgattggctttgattggacagttgcaaagttcttctggtatatgttcttcatgttcttcaccttcatgtacttcacattttatggaatgatggcagtcgccatgacaccaaacagcga

SEQ ID NO: 3129 - DNA, 289 bp, Zea mays
  Clone ID: LIB3136-014-Q1-K1-F7
cttcgccacgaacaaaagcgcatcgatctcgctgtcgtcactcctcgtcaccgagccacgaagggaggcaccacccagcatggccctgcaggcggcgctcctcccatccaccctctcatccgtccccaagaagtgcagcatcgccgtcgcggcgaaggacacggcattccttagcgtatcccagaaggtcagtgatcagctgcatctgcatctgcatgctgcactcgcagtcacaatgcgcttgaattgaacgtgtcactgactctgtcgtgagcatgccatgcgggca

SEQ ID NO: 3130 - DNA, 285 bp, Zea mays
  unsure (1)..(285): unsure at all n locations; Clone ID: LIB3136-014-Q1-K1-F9
cttcggtcaaaaatatccttgtacctgcatctcgacctcaccggcgtccggcggtggtatcgccatggttgcattgctgggccgncncatcngggtggcttcnncatctgccgcgttcatcgacctcttggcgttcgcgatacccctcatcctcgaccaagtccttcgagaaatccaccgtctccgcccacgacgtcatcatcttctacaagtcatactgtccgaactgcaaaagagcaaatgccctgtttaaggaccttgagtttaagaaagatccatattttt

SEQ ID NO: 3131 - DNA, 441 bp, Zea mays
  unsure (1)..(441): unsure at all n locations; Clone ID: LIB3136-014-Q1-K1-G10
cgccagtcgcgtccatggcgatcttggtaggcctcgtcggcgtcctctcggccctcttcggcgcggcgcttcggcgcctcctaatctcttgtcgccaccccgcatacgccgccgggttcttccacccgtacaccaacgatggcggcggaggcgagcgcgtgctctggtgtgcggtgcgcgccgtgcaggagcttcgcccggacctcccctgcgctgtctacaccggcgatgtcgatgccgcgcccgaggccctcgccgcacgcgctctcgaccggttcggtgtccgtctcctccgcccgccgcaggttgttcacttgaataagagaaagtggatcgaagcaagcacatatccncacttcacaatgatcgggcaaagtcttggctctgtttatcttgcatgggaagcccttactaaatntaccccacagttntactttgata

SEQ ID NO: 3132 - DNA, 274 bp, Zea mays
  Clone ID: LIB3136-012-Q1-K1-G12
attctcaaccgccgccaatcccttcccgtgctccgcaaccgctgagtgagaataatagatggcctggaaggtctatagcccggctatcggcatccatctcggcacgacgtactcttgcgtcggcgtgtggcagcacgaccgcgtctagatcattgccaacgaccagggtaaccgcaccacgccctcgtacgtcgccttcaccgactccgagcgcctcatcggagatgcggtcaagaaccaggtctccatgaaccccatcaacaccgtctttgat

SEQ ID NO: 3133 - DNA, 206 bp, Zea mays
  Clone ID: LIB3136-010-Q1-K1-G5
cttagatagttcaacggaaaatggaaaagaaagggtccggctgaaacttgaaacaccggtgggcattgcagatcgattgttaacttcgtgtcaaaggctggtgaaactagaatatgaaaaggctgttgaagacttagcatccatcaaggatcttgtttatggtgcaaacaattatgccatcaaacttaagtctgatagcagttcct

SEQ ID NO: 3134 - DNA, 230 bp, Zea mays
  Clone ID: LIB3136-010-Q1-K1-G6
cggacgcgtgggtttttttttttttttttttttttttttttttttttttttttttttgttggtttttttttattttttttttacttttttttttttgcaaaaaaaacaaaaaccccataaacctaaaaataacccaaccaaacccccaaaaggacttgtcccgctttcaattttcctttttttctaaacacacaaaccaaattactatttccccggaaaggtttttttat

SEQ ID NO: 3135 - DNA, 395 bp, Zea mays
  Clone ID: LIB3136-010-Q1-K1-G7
cggacgcgtgggtttgcacatagctacacggaaatggaggccccagatggtacaactgctgcttagctacgaatcacttgaaattaatgctatcaatattcaaaatgaaacagctatggatttggctgacaaagttccttatggtgagtctaaaacggaaataatagagtggttgacagaggctggtgcaaagaatgccagaaatgtggggaaaattgatgaggcatcagaactgaggagaactgtgagtgatatcaagcacaatgttcaggcacagcttagcgagaacgctaagaccaataaacgagtgactgggattcgcaaagaattgcagaaactgcatagagaagctattcagaacaccatcaattcagtcaccatggtagcaaccctga

SEQ ID NO: 3136 - DNA, 443 bp, Zea mays
  Clone ID: LIB3136-010-Q1-K1-G8
cggacgcctgggtttgcacatagctacacttaaatggaggccccagatggtacaacttcgtcttatctacgaatcacttgaaattaatgctatcaatattcaaaatgaaacagctatggatttggctgacaaagttccttatggtgagtctaaaacggaaataatagagtggttgacagaggctggtgcaaagaatgccagaaatgtggggaaaattgatgaggcatcagaactgaggagaactgtgagtgatatcaagcacaatgttcaggcacagcttagcgagaacgctaacaccaataaacgagtgactgggattcgcaaagaattgcagaaactgcatagagaagctattcagaacaccatcaattcagtcaccatggtagcaaccctgattgcctccattgccttcgttgccatattcaatttgccaggtcaatact

SEQ ID NO: 3137 - DNA, 383 bp, Zea mays
  Clone ID: LIB3136-010-Q1-K1-G9
ttttaagttctcagacgatatgtacaatcaacctcaaatattgacatggactacagcaaaggtctgttctcaaatatagcccataaaattatagctgaaagttgttaatttagacttgtttagagtccaaaatgtgttttacgtttctagggtttgaagttttcaaagaacgtacattgaatgttcacatcatatggttaataccgaagttgtggcgtggctaacctgatctacgagcatgttattcataacttcttgtgaagttgtttagaggctcaaatattagctttaaactcatatatgaggcctagctaaatttttgtttttggttttttttgaaaaaaatcaaacattctctaatgggagatacgtcctacaccaaa

SEQ ID NO: 3138 - DNA, 337 bp, Zea mays
  unsure (1)..(337): unsure at all n locations; Clone ID: LIB3136-010-Q1-K1-H1
gtgcagtgcttccctgttccctccatcaagaaacagcaaagatccagtgcagagagagaagcgcgcatggcactctgaacaagaaaagaaaagaaagagctagagagagatctcagtcagccagtctctcacaacacaatgccggcaaccaccaagccgatcttgctcccaagggcgtgggcagcagcgccactcctcctcctcctgctgctcgtcctgcacgggagaggaggccactgcgtcggcatggaggcggcggagctggagatggactcggaggcgcaccggcggctgctgtgggaggcgaccacggngcggaggtacatcagctacgacg

SEQ ID NO: 3139 - DNA, 356 bp, Zea mays
  Clone ID: LIB3136-010-Q1-K1-H10
cagaggatattgcaactcctgagaagccactggaggaaggtgtgggaagtgtggaaccatgagaagacaattctgttcttgataaaccattggaggaagaagagtttgatgccaaaccggtgaaggacgttgtaactcccgagaagccattggaggaaggctcaacaactgcagagccattagaagacaatgctgcccatgaggaagcaaaagaagaagatgaggtgattgccaagcccttgtccagtgtggcacttgagaagtcactggagggaagtgaggcaagtgtagagccatcggaagacaatgctgctcttgagaaaccatcggagggcaacgaggcaaatgccaagtca

SEQ ID NO: 3140 - DNA, 314 bp, Zea mays
  Clone ID: LIB3136-010-Q1-K1-H12
cacgagccgaccaaatcgaatcgattcgcgcgcaccgcgcccgcgcatctattgccggcggtggggagccttaccctgcctcctgctatggcaaacccacggcatgacgccattgacctgcaaaaggccttcaaagggcttgcctgtgacagtacaacagtgataaacatacttactcatcgagaatcaatgccatgtggactgattgaacaggcatacagggctatgtatcatgaggaactcttccattgcatttcatctgaactcaatggagaccacacgaaagctatgatgccgtggattcttgatcctgc

SEQ ID NO: 3141 - DNA, 345 bp, Zea mays
  Clone ID: LIB3136-010-Q1-K1-H2
ctttagtgtcactgttggtggtcgtgatctaattcaagaagccactataacacttgctttggggaggcactatggacttgttggaagaaacgggactgggaagacatcttttctcagagcgatggcattgcatgcaattgatggtattcctaagaactgccagatattgcatgttgagcaagaggtcgtgggtgacgatacgacagctttgcagtgtgttctgaacgccgatgtcgaacgagttcaacttttgcaggaagaagctcgtcttgttcaacaacagaaagatttatagattgaggctgagtttgggcagagctctgcaagggcaaagatggttttgac

SEQ ID NO: 3142 - DNA, 402 bp, Zea mays
  Clone ID: LIB3136-010-Q1-K1-H3
cccaagggcccaactacccccagtctcggaagagaactatccacaatcgcaagactccaagggcggggcctttctatccatcccttactaaccgcggtggtcgcctgacatcacataaaccatggtgaatgcttgcactgtgcttggtagctacgatctggtcaatgtcaccatcttcttcacacaagagggagatggccctaccactgtcaccgtaagtgtttatggcctcaagcctggccttcatgggttccatgtgcatgcacttggtgacaccaccaatggctgcatgtcaactggaccacactacaatcctgcgagcaaggaacatcgagcaccagaagatgaaaaccgccatgcccgtgatcctggaaatgttacatctgcagcttatggtgtttc

SEQ ID NO: 3143 - DNA, 390 bp, Zea mays
  Clone ID: LIB3136-010-Q1-K1-H4
agataaccgttttcggtggcttactcgtgtttctctagatccatatacagagaacagagagtgaactgaaaatgattctgcagcattgggtgatacagcagcccaaacaactaccatgcttctgtatttcccatgtggattgataagaggtgccttgactaacttaggaattccgtgttctgtctctgctgacatgtcaaaccttccagcatgttcgtttgtggtgcgcataaagacatgaactgtgagaaacgatacaagtacagcatgaagatctgacagtacctgcttctggttcaagcgggttgaacattgaagacagcagtatttgggcatgcattagatgtatcgtggtactgcatttagcccccgttggtttttggtttcttt

SEQ ID NO: 3144 - DNA, 243 bp, Zea mays
  Clone ID: LIB3136-010-Q1-K1-H5
aactcactcgcctcgcctcgcctcgcccacccgcccgcctgtccctccccaaaggccggaggtcactcttgtcgtgcaccccttcccttccaaccggcaaaaactaacatttgccgccgccgggccacttgcaagggaccgaagggaagcccccgccggctagggagcggcaccaggcgcaagggggggaggagaagcaggagagccgccggcaggatgttcgggcgggacccctggggcggg

SEQ ID NO: 3145 - DNA, 415 bp, Zea mays
  Clone ID: LIB3136-010-Q1-K1-H7
gtgacaagtgtccgaacaagtgatggagacaccgatgacttccaattaacataggactacggcaagggtcggctttgagcccttatcttttcgctttggtgatagatgaggtcacaagggacatacaaggagatataccgtggtgtatgctttttgccgatgatgtggtattattgaggagagtaggagtggtgtttcgcaaaagttggaattgtggaggcgacactggaagcaaaaggttttaggcttagtaggtctaaaacagagtatatgaagtgtgatttcagtgccatggggtatgaggatggcgatgttagtcttgatgggcaagtggtacccaagaaagacacttttcattacttaggatcaatgcttcagaaggagggagacatcgatgaggatgtcagtcatagaa

SEQ ID NO: 3146 - DNA, 175 bp, Zea mays
  Clone ID: LIB3136-010-Q1-K1-H8
gtcacacgcgcacgaacacgtgatcaatacaccaacgacttccaattaacataggggtgcgacacgggtcttctttaagcccttatctttttcatatactaacaaattacctcacacggaacatacaaagaaatataccttggatgatcgctttctcccgatgatactacattat

SEQ ID NO: 3147 - DNA, 318 bp, Zea mays
  unsure (1)..(318): unsure at all n locations; Clone ID: LIB3136-010-Q1-K1-H9
gttggaagtgaggcagtagggtcactatggaaatgaatagacggagaggcattggcagacataatatatgctagactttcgagttgccgtgtttttcgaagaaacttagaatcttgtattattaggccttgctagcaacaaggtgcagatgcctctccgtttgctgttgtactttagtgtaacttaccttccgaatgtattattaggcgttgctagcaacaagatacggaggttatacatttgattttcagtaaaaaaagtagactctttgttggngaaaaaaaaaaacaaaaaaaaaaacaaaaaaaaagggcgggc

SEQ ID NO: 3148 - DNA, 331 bp, Zea mays
  Clone ID: LIB3136-011-Q1-K1-A10
gcggcatcctcggcctcggtgatctcggttgccaggggatgggaattcccgttggcagggtctgcctctacactgccctcggaggtgttcgaccgtcagcttgcctgcccatcacaattgatgtcggcaccaacaacgaggccttgctcaaggacgagttctacatcggcctccgccagaggcgtgccaccggcgaggagtaccatgaacttcttgaagagttcatgaccgccgtcaagcaaaactacggcgagaaggtcctcacccagttcgaagacttcgccaaccacaacgcctttgacctgctcgagaagtacagggagagccatct

SEQ ID NO: 3149 - DNA, 361 bp, Zea mays
  Clone ID: LIB3136-011-Q1-K1-A11
agagaagaacattctaaaaccaagggaagatcccctacttgatagcgatgatgagagaccagatagcttcgatgacgatttcaggaagaaagaaatgagaaagggcatagatttggctaccacacttgaacgtattgaaaagaattttgtcatcaccgacccgaggttaccagataatccaattatatttgcatcggatagctttttgcgtttgacagagtattgccgcgaagaaatattgggaagaaactgcaggtttcttcaaggacctgaaactgaccgtgggacagtaaagaagataagagatgccatagataaccaaacagaagttactgttcagctgataaaatatacaaagagc

SEQ ID NO: 3150 - DNA, 344 bp, Zea mays
  Clone ID: LIB3136-011-Q1-K1-A12
ggatcagcaacatttaataattctgtatcttcaggagttccatactttccaactggctccccttcttttggtgggccggctggagcgttaactccccaacatttaaggcagtttgctataaaccttgctgagggtagcagcagcagtggacgagacagtaatcgtaaatgggaaagtcagggccttgatcttaactcaggccctggaagtatagatttagaaggaaaggatgaacgggtacctttaccagtcagacaaaatttgatcccacccccacacggctttgtggaggatcaaagaagaatttaccagatgccagttgtaggaacaaagaaaaaggaacc

SEQ ID NO: 3151 - DNA, 374 bp, Zea mays
  Clone ID: LIB3136-011-Q1-K1-A2
tcggggacgagtacgcctaccagcaatcatgctacccacggaggaacgctagctgacggaaggagctctcacctgagggccatctctgtcgcgcccgtcatcctcctcctcctgccctactcaactgctatcggatttgcgctgcagtggagatcgacccgggctgggaatttctttcgttggtaaggaaccctaatttggtcggatgggattttcatcttcgacgaagcccgcgagattgatcgaccttagctgacgcgagggattggaaagcgaacgctcgggcgtagttaattttctaggaagattggggtttcagctcaaacccccatgctcgatgctgaggacgaccctggcgggagatgacgaggatc

SEQ ID NO: 3152 - DNA, 334 bp, Zea mays
  Clone ID: LIB3136-011-Q1-K1-A3
acgcaaactgtatgcagctgttagaagcgagttaaatctggacttaaagaacattaagacagagcaagcgaagttctggaagcagcatccatcactagtaaagatggaactgctgattcaggcgcatctcacttgtgagtcattcgctttgacgccagcacttcttaaagattacagacacatgcttgaacttgcacctcgtcttctggaagaactcgttaagattgcagttttaccaaggaatccccatggttttggatggctccggcctgcactcagtgttattgagctttctcaaaatattatccaggctgtaccattaagtgcacgaaaa

SEQ ID NO: 3153 - DNA, 258 bp, Zea mays
  Clone ID: LIB3136-011-Q1-K1-A4
ctttcactctccagggctccactcccatctcgccgccgcagccatggcgatcacagcgccaactccggacatcctcggcgagcgccaatccggccaggacgtccgcacgcagaacgtgatggcttgcggggcggtggccaacatcgtcaaatcctcgctcggccccgtcggtctcgacaagatgctagtggacgatattggtgatgttacaatcacaaatgatggagcaaccatacttaagatgttggaagttgagca

SEQ ID NO: 3154 - DNA, 296 bp, Zea mays
  Clone ID: LIB3136-011-Q1-K1-A5
ggaggacataagggatttgtctcgagaggaatgtgtgacatacttgagaaggaggagcaggggcttttcaagaggagcttctatttatagaggagtgacaagaaggcagaaagacgggagatggcaagcacgcataggactggttgctggaactagagacatttacctgggaacattcaaaacagaggaagaagctgcagaggcttatgatattgctgccattgagatacgtggcaaaaacgctgtgaccaattttgaccgaagcaactatgtcgataagggtatgcactgtatag

SEQ ID NO: 3155 - DNA, 303 bp, Zea mays
  Clone ID: LIB3136-011-Q1-K1-A6
tgcacgcaagccactccgaggccaagtctagggtttgggaatctgtaggaggggagaggggagcgcgctcagggtcagggaggcgaagatgatcgaggtggtgctgaacgaccgcctggggaagaaggtgcgggtgaagtgcaacgaggacgacaccatcggcgacctcaagaagctggtggcggcgcagacggggacgcgccccgagaagatccgcatccagaagtggtacaacatctacaaggaccacatcacgctcaaggactacgagatccacgacgggatggggctcgagctctacta

SEQ ID NO: 3156 - DNA, 327 bp, Zea mays
  Clone ID: LIB3136-011-Q1-K1-A7
gagggaggaaccctagcggaacactgtgcaagtgacggcggggcgctgccggtgacggcggcgcgctaccggtgacgggggatacggtggcatcgtccccctcggcccctactgcatacccggcgcgggggcgccagcagccggcctgcagggcttatattttacggtgagcacattcttttgctgatggagaccactgaacctctacaggatatcatgtgtgagtttcgtgctggtaagatgtctcatgagggaacacgagtggttccagacacgcgcaagggtcttgtccgcgttggtaggggtgaagagggattagtccatttt

SEQ ID NO: 3157 - DNA, 354 bp, Zea mays
  Clone ID: LIB3136-011-Q1-K1-A8
acgagatacacatccctgacgtatctggtggcatctcatagccttgaccgaacttctgagggtgttcggcaaacaacgattggcttttatggatctgattgagcccatttttcaaggaacaatgtgttcaaaggatcttgcggatgtgcatatttcgggaactgtactgcaacttggtgcttgatcctctcccgtggtaacgagagcgttacctcaaccaaggtggtgtagattctgcaggctcgccacccgtcgttgctctatggcgcactggccctctgctgccctcttgtgcctaatgtacagtctacattcttttctttctttattatggacggtgctcacaaaatggat

SEQ ID NO: 3158 - DNA, 361 bp, Zea mays
  Clone ID: LIB3136-011-Q1-K1-A9
gggggatcgatcttgttcgcggagaggggtgacgtgcttgacagttttgactcggatccagggtgtgcatctctaccacatagagagctgacctgaggtggagacgtggatcgtggctcctggggtggaggtacaagcgtacagctcaataggagatcaagagtaaagagtgtggggaggggaaggacgcgatatcgggggaggatggtgcttgtgcttgcgctgggggatctgcacatcccgcaccgggtgcccgacctgcccgccaaattcaagttcatgctcgtgcccggcaagatccaacacatcatctgctctggcaacctctgcatcaaggaagttcatgactacctgaaaaagc

SEQ ID NO: 3159 - DNA, 301 bp, Zea mays
  Clone ID: LIB3136-011-Q1-K1-B1
ggatcctctagccattgagaggtggcaggcacaggcgatggaggctgataaagaattctggagtcggatacgcatacctgatgaagatgattcaagtagtcagaagcacacatgccgtagttctgcttcacagggtgccgatagcaaacctgcatctgagcggcaatcaagaggtgtggagcatataaaacagggtctcgtgaactttatagcctcgctgctgatgccattatatagaggaaaaaagatcgaccgagaggggtacaaaacaatcatgcgcaaatctgttaacaagatcatt

SEQ ID NO: 3160 - DNA, 363 bp, Zea mays
  Clone ID: LIB3136-011-Q1-K1-B10
cacagattaccagttgtaaaccaggtcgaaaaagtaataggtacggtgagtgaggtgcagaatgctcacaagccagcggagattaaaaaaaaaaactgcatgccatacacttaattagtattatccttaattatcattgacaacacagagattatatgttgcaagggctaatggggttctaaacactgtcaacaggtatagttacccgcgctgatgttcttcgcgtgttggaaggcatgttgaagatttatgagcgcagatacccatgctcggaagccacagcctcttgtaaatatgtagatgtgcccgggcatggtgtttctgagtagcagcaaaaagatctaccatgtataggagtgtttt

SEQ ID NO: 3161 - DNA, 279 bp, Zea mays
  Clone ID: LIB3136-011-Q1-K1-B11
gttcagggacttgttcgaggggatccagtccatgacctactgctgcggtaacttgggtgaggacaagggtgccagggccattgtcaaagccttcccacacataaaatgcactgtgctggcccctcccaagatcattgccaccaaaccggccgatggagcgatgataaactatgtcgaaggtgacatgttcagtttcattccacctgctcaaactgtcgtgctaaagcttgtgctgcaccacctgaccgatgaggagtgcgtcaagctcctggctcaatg

SEQ ID NO: 3162 - DNA, 313 bp, Zea mays
  Clone ID: LIB3136-011-Q1-K1-B12
acttgatatgcttgggcgcatttttaatggttctggaaaacctattgacaatggcgcgccgatattgcccgaagcctacttggatatctctggaagttctattaaccccagtgagagaacctatccagaggagatgatccaaactgggatatccaccattgatgtcatgaattccattgctcgtggacaaaagattccactgttttctgctgctgggctccctcacaatgaaattgctgctcagatttgtcgtcaggctggtcttgtgaagacattggagaaaggaaaagcatgctgagggtggtgaagatga

SEQ ID NO: 3163 - DNA, 279 bp, Zea mays
  Clone ID: LIB3136-011-Q1-K1-B2
gactatgtgaacatgctcaaggactggtacggcaatggagcgtcgacgctgtgcgtgatcggcaaccagacgggcggaaccctgcggtacgtcgacgacaaggactggctgggctacccggggccgacgccctacccgacggagatcggcaacgggcagtgggcgtccttcctccacgtccacaagaccggcgcctcgtcggggtccatggccgccgtcgtctaccgcggcaaggactgcggcggcagcgagcgcgacttcgccatggcctggagcacc

SEQ ID NO: 3164 - DNA, 312 bp, Zea mays
  Clone ID: LIB3136-011-Q1-K1-B3
cccgccttggtttgacggttcgctcccaggtgacttcggtttcgacccgctggggctggggggggacccggcttcgtggatctgatggcggcttcttggatctcaccgcgcagctgagaggtgagccacccaccacgcagccgagaggaaccaaaggtgagccacccaccgcgccgcctagaggaaccaaaccaaactcaaagggctacgatttcgtggatctgatggcggcttcttggatctgaccgcgcagccgagatgagcgacccgacgaaccagaccaaatcagtgctcgtggatctgatggcgcgt

SEQ ID NO: 3165 - DNA, 306 bp, Zea mays
  Clone ID: LIB3136-011-Q1-K1-B4
cacatctgttccgcttatcgcctattgtgtgcttcctgctatctgtcttcttaccaataaatgtatcattcctgagattagtaattatgctggaatgttcttcattcttcttttcgcctccattttcgccactggtatattggagctcagatggagtggtgttggcattgaagattggtggagaaatgagcagttttgggttattggtggcacctctgcccatctcttcgcggtgttccagggtctgctgaaagtgttggctgggattgataccaacttcacagttacctcaaaaggcatctgatg

SEQ ID NO: 3166 - DNA, 319 bp, Zea mays
  Clone ID: LIB3136-011-Q1-K1-B5
cccgccctggctcgacggctcgctcccaggtgacttcggtttcgacccgctggggctggggggggacccggcttcgtggatctgatggcggcttcatggatctcaccgcgcagctgagaggtgagccacccaccacgcagtcgagaggaaccaaaggtgagccacccaccgcgcagccgagaggaaccaaaccaaactcaaagggctacgatttcgtggatctgatggcggcttcttggatctgaccgcgcagccgagatgagcgacccgacgaaccagaccacatcagtgctcgtggatctgatggcgcgtctgccgc

SEQ ID NO: 3167 - DNA, 209 bp, Zea mays
  Clone ID: LIB3136-011-Q1-K1-B6
atacaatatcatttaatacagccttttcagaaataagggttaaataaaaaatataatagacgtctcgtttcacacagatcatctcttatctcctttctttaatctttccttccaactgatattttatcctccctccattctttctctcttttcctcatcttttccttccacctcccatctcccctgatccacccccttctcttttttct

SEQ ID NO: 3168 - DNA, 378 bp, Zea mays
  Clone ID: LIB3136-011-Q1-K1-B7
cggacgcgtgggaccggataggtagcaccggagcaggtacaacgctgcacaatcgccttcggcgccgccaagatggtgaacgttcctaagaccaagaagacgtactgcaagaacaaagagtgcaagaagcacacactccacaaggtgactcagtataagaagggaaaggatagcctgtctgctcagggaaagcgccgttatgaccgcaagcagtcaggatatggtggtcagaccaagcctgtcttccacaagaaggccaagaccaccaagaagattgttctgaagcttgaatgccagagcttgcagcactacttacagcacgccatcaagagatgcaagcattttgagattggtggggacaagaaaggcaagggcaca

SEQ ID NO: 3169 - DNA, 347 bp, Zea mays
  Clone ID: LIB3136-011-Q1-K1-B8
cgaactctcagctgcaagacatcattgaattcatcaagcggttccccaatgttgaggtgacctatgaggtccgtgagggtgatgatataagcgctggtgacaatgtaacagtgcaggtaactctggagcgtgacatgactaacgtttcatctgaggttggtccagtccatgcgccaaggtttcccaagcctaaggaagaaggctggtggctggtgattggggacagctccacaaaccagttactggcaatcaaaagagtggcactccagaagagggcgagagtgaaacttgagttctctgctccggcagaggctgggagaaaggactacatgatttacttgatgtca

SEQ ID NO: 3170 - DNA, 397 bp, Zea mays
  Clone ID: LIB3136-011-Q1-K1-B9
ctttgatttgccattagatttgccacctactcattcatatgctgatgcaaataacgtctgagcaaaatactggagatgtttttgttcacatgtcagacttgcttacaacaatatggccgtcaccctctcagtatttggggccaaaatgtgcactttgggactgtggtaggccagctggagggacagaagactctggagattactgcaacccttaccatgctggtttggctttgaatgatgatggtcttcttgggataagacctgtgatgcgtccaagaggtattgatttgaaagatgggccactgtttgctgctctcattgcaaaagttcaaggaaaagaacgttggtattcctgtgtgtggaggcgctgctacgtctaaaatccccatggaatgca

SEQ ID NO: 3171 - DNA, 316 bp, Zea mays
  Clone ID: LIB3136-011-Q1-K1-C1
cggacgcgtgggcggccacgaagatgtcttactcaagaggctcaaggtatggatctcgctcgccttactcgagaagcacaaggtaccgaagtcgctctaggagtgtcgactctagtgatgctgaaaaccctgggaacaacctgtatgtgactggtttgtcagctcgtgtaacggatcgagatctggagaagcacttctccactaagggtgaggtgattgatgcaagcgtagtatatgatccttggacaagggaatcacggggttttggttttggtaccatggctgctgttaaagatgcagatcgctgcatcaaata

SEQ ID NO: 3172 - DNA, 339 bp, Zea mays
  Clone ID: LIB3136-011-Q1-K1-C10
cggacgcgtgggccggggccggggttgtcaggggcgtcgtcgcgctcgtagccacggaggggggcggcggtggcaccgtggcagtgcggtgccgagaaaccgtcccaccaaggaggctggggcaccgaacagcgaacaacggaagaagagcagctgaacaggcaggggagaggttccagctatgctcaccgcgcagccgccacctgaggtagcgggtgaggatgacagcagtttccaccatgtcttcgtggagtttatgaccaaagccgctcagttcgaggagctcgctgaatctggggagcgattgcttgggagattccgtgaggagcttgagtattt

SEQ ID NO: 3173 - DNA, 377 bp, Zea mays
  Clone ID: LIB3136-011-Q1-K1-C11
ctccgttcgtcaaggcgttcgacgctgcggcggccgggcccaacttcccctggatgtccagggtcgccgcggtggcgccgttcgaccggtgctacgactccaccaagctcccgcagagtctgctcggctacgccgtgccgcagatcgatgtgatgctggagggcgggcagaacttcacggtgctcggcggcaactccatggtgcaagtgaacggcaacacggcctgcctcggcttcgtccaggcgccggggcaagcgccggcggccgtcatcggtgggttccagctggagaaccatctgctgctgctcgacgtggacaagaagcagctcggattcaccactttcctcaacgcaatcgggctttcctgcagcagcttc

SEQ ID NO: 3174 - DNA, 218 bp, Zea mays
  Clone ID: LIB3136-011-Q1-K1-C12
ctggacatggccaatttgtcacaatttattattttgacccatgtcatgtgaaactgctttcgttgaagtctggtatctagattgacttgtaccagagctgtggtttacgcagactggattctggagtactggactgtgtgtgtttttttcggaactgaaaaaaaaaaaaaaaaaaaaaaaaaataaaaaaaaaaaaaataaaaaaaaaaaaaaaagaa

SEQ ID NO: 3175 - DNA, 357 bp, Zea mays
  Clone ID: LIB3136-011-Q1-K1-C2
caggcaacttgaatcgttaagcagaggactggaaatcaagattccaatccaaatcactgaggggaacaaaaggaaagttgtgtgaagaacaaacttaatcgtgaaaaagtacaatatcaacaatgcacaggctctcaatcctacattgcaaaggctattatattgaagcaagaaaaatataaggatgcggaacctaatgcaatagatcttttcaaggagaaatgttttagtgaaaatgttcagaaagatattgttcacatggaagaaatggtagcagcgccatttcaggatggacaacaaccaacatctcctacagaagtttgttctaatgtgctacccggcttcaatgtgttttta

SEQ ID NO: 3176 - DNA, 338 bp, Zea mays
  Clone ID: LIB3136-011-Q1-K1-C3
cggcatttcaaccactgaaagatgcacataatccacttcgtccttttcctaataaaatatgtgggactcgctcaagtacctgggtcacagccgatgcccgttatccagctcaacaagccaatcacaacatgttacatggcacattgtcttttatgcctcatagcagtggttttaggatgattcaacagaataatctagtgacgcctgaagctgcaaattttactgggaaatcagctttcacttcacttcagggccatgtcactgatcagtgctccacaggctggtttggacctattgagtcaaattcccacacagaccatgcatcgtcaaagttgatc

SEQ ID NO: 3177 - DNA, 296 bp, Zea mays
  Clone ID: LIB3136-011-Q1-K1-C4
cgcaggtcacgcggcgatggacatatgcgatgtttgagcaggcggtggcagatttctgctggcatgcgagggaagtagtgtcgtcagggatggggctctggggttggccgtgggggcgacgtgggccgtcgggcttcggctccgcgtccaccgccgaggaggtcaccgccggcgtcgacgcaagcaacatcactgccatcgtcacaggagcgacgaatggcattggaaaggagacagccagagttctagcactgaggggagccaaggtaatcataccagctaggacactggagagt

SEQ ID NO: 3178 - DNA, 329 bp, Zea mays
  Clone ID: LIB3136-011-Q1-K1-C5
cggccaaggaacttagcaagcatgacccaccgattgttctcgctaaggttgatgctaacgaggagaagaacaggccgcttgctaccaagtacgagatacaagggttcccaaccctcaagattttcaggaaccaggggaagaacattcaggaatacaaaggccctagggaggctgatggcattgtggattacttgaagaagcaggttggccctgcgtccaaggagatcaagtcagcagaaggtgtggccgcccatttcgatgacaagaagatctacatcgttggaatcttcaaagaattcagtggcactgaatttacaaacttcatggag

SEQ ID NO: 3179 - DNA, 325 bp, Zea mays
  Clone ID: LIB3136-011-Q1-K1-C6
gatagatctgaggtcaatggatctactcaaataaagcctccaaaatttcaaaagggtgtatgacgtacaaactgtatagattgtttggatcgcacaaatgttgctcaatatgcctatggcctagctgctctaggataccagttacatgcacttggttctgtagaatctccagaagttcatttagactcccctttgtctcggcatttgatgcatttttatgaacggatgggtgacacacttgctttacagtatggtggttctgctgctcacaataagatattctctgcaaaaagaaggcacttgaagttcgccattcaatctcaag

SEQ ID NO: 3180 - DNA, 324 bp, Zea mays
  unsure (1)..(324): unsure at all n locations; Clone ID: LIB3136-011-Q1-K1-C7
acgctttgnccaattccccaatcggaccaatccctaggagccacatagatttcgattcgagcggaaatctggcatggcaatgtcagatctcacagccaccgtgatcccgaagccagacggggccgacgacgagtccgtggagatccgggaggtgtgggcggacaacctgaaggaggagttcgcgctgatccgctacatcgtttacgagtacccgatcgttgcgatggacacagagtttccttgcatcaggtgacgccccgtaggcgcctttcgctcccccgccgactacaactacgccaccctcaaggccaacgtcgacatgct

SEQ ID NO: 3181 - DNA, 254 bp, Zea mays
  unsure (1)..(254): unsure at all n locations; Clone ID: LIB3136-011-Q1-K1-C8
aggtgacttccagtcatgttttggttttggtggtgtcgagcagaggttatttattgttgggttaaggtcggagtcggacggatgctcttgggctaagtggatttaattttatccttgctgaataaagaacacggaattgtagccaaataagaacgtgatatataaatatttctttcccactttgctggatgcctggattttcaaannaaaaaaaaaactaaaaaaaaaaaataaaattttatcttttataaaaa

SEQ ID NO: 3182 - DNA, 424 bp, Zea mays
  Clone ID: LIB3136-011-Q1-K1-C9
gcgggcagcggcctgccggtctccgccccgcactcccgcagccatggccgccgccgccggggcgttggttgccgagcccaagaccaattacgatcgccagctcaggatttggggtgatcaaggccaaactgcactggagaaggccagcatatgcttgcttaactgtggtcctaccggaacagaagcattgaagaatctcgtgcttggaggaataggaagtgtgattgttgttgatggctccaaagttgaagcatctgatctggggaacaattttatgtgtaatttctttgctatgtgattccacctgttcttctgaattcatcctcagaaattgatggaactcatattctggtaccttatatttgcattcagtggatgaaggatgtttggggcaaccaagagctaaattatatgtcattcctac

SEQ ID NO: 3183 - DNA, 304 bp, Zea mays
  Clone ID: LIB3136-011-Q1-K1-D1
caagaaaccaccgccgagcccaaccgcacaagcgcgcgaggcaggagagagagagaggcggggagcgaaacaatggaggggaaagaggaggacgtgcgcctgggcgccaacaagttctcggagcgccagcccatcgggacggcggcgcagggcgccgctgacgacaaggactacaaggagcccccgccggcgccgctgttcgagcccggggagctcaagtcctggtccttctaccgcgcgggcatcgccgagttcgtcgccaccttcctcttcctctacatcaccatcctcaccgtcatgggcg

SEQ ID NO: 3184 - DNA, 355 bp, Zea mays
  Clone ID: LIB3136-011-Q1-K1-D10
ccattgttggacgcgtttccctcctgcacgtaacctcatctcgtcctccagatccgggatggccgtcctccttgataccttgcctcgcgagtgctctcggtgagctactttgttttgatttatcaggaaatccgtttgcttcatgttatgcaggctcagatctgattgctggattcggcatcttacgggcttgaatagagctaggactgggagaaaacaacaaacccgcgttggatcctgtatcggttagtccttgccttcaaggttcatgttgttttgttttggtggtcgagcatcgcatgttctgcttctgttccagatctggagacattctaagtcgtcgtcgtcgtcgtcg

SEQ ID NO: 3185 - DNA, 371 bp, Zea mays
  Clone ID: LIB3136-011-Q1-K1-D11
atcggtctctgcatgcaccgctcattgctatttaaaaaaaaatattttgtgcagaggggacggcaaggccgaggggttgccgctgatgtcgttattggtgaggttgacggtggtgatgccgtggatgctcgagtggcgcttgtccttgacgctggagttgaggcggatgatgtacttctatgcatggttggccaactacattggagttgaggcagatgttcctccagtccctggaagctcaactttgagccaccaagagaaccgaatacttgggaagttgaggagcaaaatggagcaaactctatccaaggtttttgagaattacaagtcactaatacgactctatacttgttggtttgacagaagatttt

SEQ ID NO: 3186 - DNA, 440 bp, Zea mays
  Clone ID: LIB3136-011-Q1-K1-D12
caggcacactggtataatcatctattgtatgagcattaggaggcagaagaaaatgacaatgggagctaaaagaaaatatctctggtcccttttctgttggttattgctgtgctagagtattacttgtttggtccttttgcagctcaaggtaagttcaagctttatgtgacgaagcgtttctccttgatcattgctcaaacaagactgtctcgaatatgtgcccgaatatgaagtgtttccgccttttaattggtcagaaaggatgttttgaacacatcatgctgtataagttggatggcctgcaatttttgtattgcatctggcattaatcctcctttcactatgcaataaaatctacttaggtctggaacaattttaactatctggaacttaaaatgcaatatgttgcatcttctttcctttgctgaagctcatgccac

SEQ ID NO: 3187 - DNA, 317 bp, Zea mays
  Clone ID: LIB3136-011-Q1-K1-D2
ccaagtcggcgtcccaggacgatctcaagaaggcctaccgcaaggctgctatcaagaaccagcccgacaagggcggtgaccccgagaagttcaaggagctcgcacaagcctatgaggttttgagtgatccagagaaacgtgagatttatgatcagtatggtgaagatgcccttaaggaaggaatgggcggtggaggatcccatgttgatccatttgacatcttctcatcattttttggaccctcttttggaggaggtggtggaagcagcaggggaagaaggcaaaggaggggagaagatgtagtccacccacttaaa

SEQ ID NO: 3188 - DNA, 330 bp, Zea mays
  Clone ID: LIB3136-011-Q1-K1-D3
ctctgctttgatgaatgttgccattttattgtttgttccaagttctcctctgcatttgtctacaacagtgctggttaaccttgttttgactgtgagttctaacaatcaaagctctccagggctcaagaacagtaacctggacacatgtatacttggagtgattgcggcaagtacctaatgactagatagacctgatctagtctcccaatgttttttcattaatcttttgacaacattccatcaggttcttgccactgctgttacaaccaagatcttggacagggctggacggagaatcctccttattatttcttcttttgggatgaccct

SEQ ID NO: 3189 - DNA, 385 bp, Zea mays
  Clone ID: LIB3136-011-Q1-K1-D5
tgttatactccctcttttcatataaatatatgacaccgtttattttttttaaataaaactgtgatcacctgtcttattaaaaaaataataaattatcatttattttttgatttgttttatcactaagttagtttgtgtttgacttaaaatttttgattttgaataaatgctttgaataaaacgagtggttaaagtttctgaaaaaaaatcaacggtgacatgtatttataattttgaaaaaattcgaaataaatcaacggtaacatatttatgaacggagttagtataaaattagtggggccggctgttacttccacgagtggacaaaaggcagtttctatcactaatttgcccccctttgagtactcttctggtctatttgcaa

SEQ ID NO: 3190 - DNA, 342 bp, Zea mays
  Clone ID: LIB3136-011-Q1-K1-D6
caaggtttcaaggccattaccttggaggccagcgactaatgttttccgtgttaaagaggggggtcgagctatattctgggccaacagaccaaagagctatcttaaaaggacattaggttgggatcagtatccccatggacggtggggtgattctcggaacccatcatatggagcacttactgaccaccagcgcttcacaaacttctgtcaagggaaactcacaagcagcccatggtcagaattggacggtcttcaaccagagacaaagattatcgatgaccagttggtgaatattaaccagaagggtttccttacaattaacagccaacctgctgtaaatgg

SEQ ID NO: 3191 - DNA, 322 bp, Zea mays
  Clone ID: LIB3136-011-Q1-K1-D7
gcaactgcaagacgattcgtttccatcgccatcggtgctgctcgagctcgactggtgcaggtgctaccagtagtgagctgtgtgtgtgtgtagtatatacaatattcgtataaactgctggtctcaatcgagtcgtcgcccaatcggttgaatcggggagcagaggcatcgcccccacgcccaatcatccgcccccaaatccccagaagcacccacccctccgcgcgcgagatcccacgcgcgttccttccacagtcccaccaccccccggggacgcggactccctcctccgtcctcccccccgcggtcccagcccagcggt

SEQ ID NO: 3192 - DNA, 318 bp, Zea mays
  Clone ID: LIB3136-011-Q1-K1-D8
cccgtcagcccctctcgtttttcatccgccttcgcctccaaccgcgtgcgctccacgcctgctccaggaaagcgagagcttctgcataagaacaacaaatcaaaagcgtgatcagctcggtgccaacaaaacctcaacaaccaagtttcatgtctgatctcgacgtccagcttccatctgcctttgatccgtttgctgaggcaaatgctgaggactctggtgctggtcctggaacgaaggattatgtgcatgtgcgcatccagcagcgcaacggcagaaagagtctgactacagtccagggtctgaagaaagagttca

SEQ ID NO: 3193 - DNA, 410 bp, Zea mays
  Clone ID: LIB3136-011-Q1-K1-D9
caagtgtcaccagaatttgctgatgcaaatgaagaaaagctgtatgattttcttaggatcgagctaaaaagcgatatgaaaagaattcaaaggaggaatgtgctgtcgacaatgctctccgcttggacgatcctgctcttgaggccgggtcaggtcagcttagcagagacaaccggtggcgcattcagggagtatatcgacacgtttgacggctacaccttcctgtacccgaagaattggatccaggtccgtggagctggcgcggacatattcttcagagaccccatggtcctcgacgagaacatgtcagtggagatatcgtcgccttcgtcgtccaggctgggcgttcggcgtgaatccaacgtcttatcggcgtcatccaaagtcgctgacgatggcaagctttacta

SEQ ID NO: 3194 - DNA, 418 bp, Zea mays
  Clone ID: LIB3136-011-Q1-K1-E10
attaattgttgccctttcagttcgccatcggcagccgaccagcatgagctccacaggcggcgacgatggcgccaagaagtcttggccggaagtggttgggctcagcctggaagaagccaagagggtgatcctttgcgacaaacccgacgccgacatcgtcgtgctgcccgtcggcacgccggtgaccatggatttccgccccaaccgcgtccgcatcttcgtcgacaccgtcgcggaggcaccccacatcggctgaggtttaaatctacaaaatgaatagctcgatcggacatgccatgcgtacctgtatccgtcgccgaataatggatgtgtgtgtgcttcgttccaataaattgctagtaaaaataatggcatcgtcggtatgcatgaataaaatgtatcaaatgttcattctttc

SEQ ID NO: 3195 - DNA, 298 bp, Zea mays
  unsure (1)..(298): unsure at all n locations; Clone ID: LIB3136-011-Q1-K1-E11
cacaaaggagggtaggaatagctgtggtgactcggaagagaaagagacagtcgacgccttgttttgttgatgcttagtgtggtgacctggtggtggtggtggtgggtgttcttggcacaagttacatgctggggatagctataggaggtacctgttgaggtgtgtaagacagtagctagcaaccgtatgccttggtttcctgtttgggtgcgtgacttgccgactttctagctgcttctggggttttgacctcggtaaggaaagaataaaaagataatcggagtgcaaaaaanaaaaa

SEQ ID NO: 3196 - DNA, 382 bp, Zea mays
  unsure (1)..(382): unsure at all n locations; Clone ID: LIB3136-011-Q1-K1-E12
cggacgcgtgggcggacgcgtgggcggacgcgtgggcggacgcgtgggcagctgtcgatggaattgtcacttgctctccctccaacaagctaattaaggccggtcatccctcttctagctcgtttcattatccatggcggaggagaagcaccaccaccaccacctgttccaccacaagaaggacgaggagcaggaggagcagctcgccggcggcgggtacggcgagtccgccgagtacacggaggccacggtgacggaggtggtgtccacgggcgagaacgagtacgacgagtacaagaaggaggagaagcagcacaagcacaagcagcacctcggcgaggcccgcgccatcgncgncggcgccttcgcactcgtacgtagt

SEQ ID NO: 3197 - DNA, 300 bp, Zea mays
  Clone ID: LIB3136-011-Q1-K1-E2
ccacaacacgctccactaaccctagcgacagtctcggctcgtttgatccccgcggggagctgtagggccgccaggcgtgcgtaccggcgtccggatccgggaccgaagatgacggagtccctggtgcggaacaagccggggatggccagcatcaaggagatgccggtggtgcaggacgggccgccgccgggcggtttcgcgcccgtgcgcttcgcccgccggatccccacctcggggcccagcgccaccgccatctttctcaccaccttcggtgctttcgcatattgcatgtaccaggtc

SEQ ID NO: 3198 - DNA, 294 bp, Zea mays
  Clone ID: LIB3136-011-Q1-K1-E3
gcattggtggcgagtacctctccgacgccacggcaggaagcctatcgacgatcttcgacggcggcggcgtgctgggaggggtcctggcgggccacatctccgaccgcctgaacgcgcgcgcgatcacggccgcgagcttcacttactgcgcgatccccgcgctcttcctgtaccgcacgtacgggagcatgtcgatggcgtggaacgtctcgctcatgttcgtcacggggatgttcgtgaacgggccctacgcgctgatcacgacggcggtgtcggccgacctcggcacgcaca

SEQ ID NO: 3199 - DNA, 374 bp, Zea mays
  Clone ID: LIB3136-011-Q1-K1-E5
gtcgacgacgcgtccgcggacgcctggggtcttcgtcctctctttgcccagctgtcggtcgcccgcgccgtcgtctgcgctgggccgcccggcctgcgaaaccctagcgaggcgagcgagagagaaactagcggccatgttcggctacaggaaggctgacccggacctcgaggccggcgggtcctcgctgttgtacccagggatgacggagagccccgagctgcggtgggcgttcgtccgcaagatctacgtcatcctagccgtccagctcgccatgacggccgcggtctccgccttcgtcgtcaaggtgcccgccgtctccaacttcttcgtctcctccaacgccggggtcgcactctacatcttcctcatca

SEQ ID NO: 3200 - DNA, 377 bp, Zea mays
  Clone ID: LIB3136-011-Q1-K1-E6
atcgttcctgatcatgttactgttggagcactgatgaaaacatgtattttggcgggccaggctgatggagctcgtgaggtgtacaaaatgcttcaggagtataatataaagggtaccccagaagtttacacaatcgcattaagaagctgtagcttgactggtgatttagggtttgcactgaagatatatgaagatatgaacaggattggagtaaaacctgatgagatgtttttgagtgctctagttgatgtagctggccatgctaggagggcagatgctgcctttgaaataatgaaagatgcaagagcaaaaggtttactcgttggaacaattgcatacagttcgttaatgggggcttgctgtaatgcggacgactg

SEQ ID NO: 3201 - DNA, 344 bp, Zea mays
  unsure (1)..(344): unsure at all n locations; Clone ID: LIB3136-011-Q1-K1-E7
gcccacgcgtacgccacaacacgggttggttatatcctaccactgcggttcgggttcgggttcgcgaggttctccggggggcggtttcgtgggtgagcggatcgagatggcttcgtcacatgttgagtaccgctgcttcgtcggcggcctagcctgggccacggacgaccactccctccacaacgccttcagcacctacggcgaggtccttgagtccaagattatcctcgatcgggagacgcagaggtacggcggcttcggcttcgtcaccttctccacggaggaggcgatgcggaacgccatcgagggcatgaacggcaaggagctggacggncgcaacatca

SEQ ID NO: 3202 - DNA, 385 bp, Zea mays
  Clone ID: LIB3136-011-Q1-K1-E8
tgaacttgatgggtgtctcaggagcgaagggaaaaggagtcaaaagacaaggcggcggcgggggagaattcagaagccccggagagtgagaagaaggagagctcagaaaccaaagaagctccgaagagcacgcagagtccagaaggcggcggcaaaggcgacaagggtccagacagcaaggcggatggctcagaggcgaaggctgagggcgagaaggaagcggcctttattgaccttaggccactgacgatggaagacctgaggcaggcaaagaaccaggttgcagcgagcttcgccgccgagggtgccgtgatgaacgagctcaggcagtggaacgacctgtacggcgaaggggggtccaggaaagaaacagcagctgacctac

SEQ ID NO: 3203 - DNA, 377 bp, Zea mays
  Clone ID: LIB3136-011-Q1-K1-E9
attatatggctacgatgctcccaaaacaaagaagccaccatcaagaacttgcaactgctggccaaagtggtgcatttgctgttgctgttttggtaacaggaagaccaagaagaagaccaagacctctaaacctaaatttgagaagataaagaaactttttaagaaaaaggaaaatcaagcccctgcatatgctcttggtgaaattgatgaagctgctccaggagctgaaaatgaaaaggctagtattgtaaatcaacagaagttggaaaagaaatttggccagtcttcagtttttgttgcatccacacttcttgagaatggtggaaccctgaagagtgccagtccagcttctcttctgaaggaagctatacatgtca

SEQ ID NO: 3204 - DNA, 313 bp, Zea mays
  Clone ID: LIB3136-011-Q1-K1-F1
ccgacatggtagagcttgagaaaagcaatattcttgtcatgggaccaacgggctcggtcagggaaagcattgctggcaaaaacactggcaagatttgtgaacgtgcccttcgttatagctgatgcgacaagcctcactcagtgtaccagacgatatttcgttcctgctacaatttttttatatagaacgcgcaggagaactgcgcatcttatacattagagaggaaaagaaaccttacaaaagaggagatgttgctgagcaaatctcccaaagacccacataaacccgaaggctggatatgttggtgaggatg

SEQ ID NO: 3205 - DNA, 360 bp, Zea mays
  Clone ID: LIB3136-011-Q1-K1-F10
gtcgtccaggccaacaccgtggtgcagtccctgaacgccttctcgtcggtggcgcgcgatcgcagggatgggcctcaaggtggtgccgatgatcgcgcccttctcaaccctccgggccgtcaacctctccagcaacctcatcgttcatatctcccctggatcgctgcccaagggcctccactctcttgatctgtccaggaacaagattgccagcgtcgagggcctccgggagctcacaaagctacgcgtgctcaacctcagctacaacaggatttcgcggattgggcatggtctgtcgaactgcacggccatccgggagctgtacctggcgggcaacaagatcagcgacgtggagggtct

SEQ ID NO: 3206 - DNA, 305 bp, Zea mays
  Clone ID: LIB3136-011-Q1-K1-F11
acgcgcagatgccccagtaggctccaaaaatccaaagccatccctcctcaggcctcccattcagggccgggagatggcggccggcaccgtgacggcccgatccaacggcgagggccacggccacggcggcgcggggtcctggtacccgcagcgccgcccgcactacgggtacggcggggggtccgcctccttccgcggctgctgctgctgcctcttcctgctgctcacctttctggcgctcctcgccctggccatcgcgctcgtcgtcgtgctcgtggtgaagccccgcaagccgcagttcgacc

SEQ ID NO: 3207 - DNA, 397 bp, Zea mays
  Clone ID: LIB3136-011-Q1-K1-F12
gcgatgatgagaaagggcaatgctggcggagcaggacggcggaccatgaggaacagcttgcatgtgagatcttggcgagctcctgaagcccaccgagacctagtttttttttttaaccagaggatcctgcttcccagatgcgccccatctgaagcttacctaccgtgtgcctcatccgctttcacagatcgattagttgatctctagtagcagcgccaaaagcggcttaagattttctcagtggtactagtagtgaggggaaaatagcatcctgtggtgccagtgagagattttaggcgctgaagacgacgtgctatgctactccgggagtcctgtggcttcttcttcttggtggtggtgatttcaaggttggactattactggaccttggtggaaa

SEQ ID NO: 3208 - DNA, 328 bp, Zea mays
  unsure (1)..(328): unsure at all n locations; Clone ID: LIB3136-011-Q1-K1-F3
ccttctnctcccccttctccttctcccgtccactcagcgtgcctgactgcccgtgcgcgccgtcgcgcagtcgctctcgcgcgcggcgacaactgagccaccgccgacggtccaactcttcgtcggaccctttgccggcgacgagcacccaccaggggtttcatggtagcgtgacctgtctcggcctagaaaatgtatataaagaaggtcgtaatcgaagggtttaagagctacaaggaggagatatcaacagagcccttcagtcccaaagttaacgtagttgttggtgcaaatggatctggcaaatcaaatttctttcatgctatac

SEQ ID NO: 3209 - DNA, 316 bp, Zea mays
  Clone ID: LIB3136-011-Q1-K1-F5
gtgaggctgcgctcggcttttcagcgtgaggcttatccccagcagcgctcgtttacagcgcgaggcttccagcagtggcgctcggactcctgtctccaccgccggtgctcgctgtccaccgaatgcagtaggcctccgtcccttgcctccggttcacgccaccatcgcaaaagatccagtgaggacgccatctagacatgaaagaaggaatctttttcttttgcgctgatggaaaatatgcatttgatgcttggttatctacttctatcttccgtcctggtcgatgaagctctgtgcttttgcgtaccttgcaaca

SEQ ID NO: 3210 - DNA, 399 bp, Zea mays
  Clone ID: LIB3136-011-Q1-K1-F6
ttcccttctcgctgccgtgctcctgctcgtgcgcgcgttcgcaatcgtagcgctggggttgagccgcgagtggataaaccctagccggtggtgtagctgggttggtggctttgatgccggcgacggcccgcttgtccccggaatggagtgaggtgacgaaggctgccatgggctctaactatgccacgattggattataggatagtagctggcagctaccagtttcctagaaccaatttgtggatagcgagaggagtgactgttgttcagtactttcacctcgatcatgggtggtgtctgctcaaagaagagaagccaattggtggatgaaggtgacgctctccagacatccccaaggttctcaaagaccagcagcttaaaatggcttgtgcttacact

SEQ ID NO: 3211 - DNA, 316 bp, Zea mays
  Clone ID: LIB3136-011-Q1-K1-F8
cgctgccgtgcccgccctgccgcgcaataaacaagtcgagtcgagtcgaggcggcggcggcggcggcggcggcattgccgagatttccgtgattctatcgcttgttggttgtgctgtgtatagtatatactacgagtctacgacctggttgtctcaactcatcctttcgtttctcttattggctgctgcgcttgggagttcgcttcagttgggccggccgggggtggttccgtacttccgttcagttccttctctgttggagtagtcggcggcgatgggtatcctcgcgctcatcaccggcaaggcgggcgccagc

SEQ ID NO: 3212 - DNA, 369 bp, Zea mays
  Clone ID: LIB3136-011-Q1-K1-F9
aagagatagaaaaagagtaaacagtccccctcgaacctttcagtttttccctgtctgtcttgacttcatgtgtctttgtttagagaccttgccttgttggggcaggggacttgggacgacagagaggggagggcggagttggtgagcgagcacgggatcagctggtgacctcagaggctgtttgcctcggggggcgggggaattctttagcaccccatcttccacatgtctttcgactggctgctgctctttcggttggtaatatccttggatctctgactctagaccgttccacgaaatctccagtcctttcttcctcttggaggaggagggctgcggcttgagcaggagacgggagacatgggtagc

SEQ ID NO: 3213 - DNA, 316 bp, Zea mays
  Clone ID: LIB3136-011-Q1-K1-G1
cgagatggaaggtcctgaacaggtacgagaagacgctgctaagctacgaagctctctatatgagtatgttccatcaatactgcgtgttgaaaaacttgggttttggctcaaatgcgacgatccatctcatttttattctgtcgtgaactctggctatttttcttcttctctaatatatatatggggattttaatgatcaaatttctgagctctatcttgtctagtccttgatcagactatttcagtgatgtgtgccactcttaatttggacgcagagcaacccttgcgccatatgcctgggtgccatgggcgccga

SEQ ID NO: 3214 - DNA, 228 bp, Zea mays
  Clone ID: LIB3136-011-Q1-K1-G10
aaccaaagcccgaactctcgagatcacaggacgcggatccaaaccagaggcccctgcctgggctccgccaccacaccacagcctaccgccatgtcggcgaccgctacggacgaggccgcggtggaggcgcgcctccaggagctgcgggggaggctcgggaagaagcagcacttcgaggaggccgtaaacgagctcgccgccgccgtccgggaccgctacgccggcgcc

SEQ ID NO: 3215 - DNA, 430 bp, Zea mays
  Clone ID: LIB3136-011-Q1-K1-G11
cggacgcgtgggtttcagagaagccttggaaccatccttgacattgacttcagtgctgatggaagacgaatttatctcttcaactgacacaaccagaagcaatattagtgagaacactataattgtttgggatgtcctgcgacaagttcctttatctaaccaggtttataccgaagcattcacatgcccgtgtgtaaggtaccacccacgtgaagcatcatttgttgcacagtccaatgggaactacattgctattttttcagcaaggccaccctttaagctgaacaagtacacgccggttgaaagacatggagtgtgggggtttcctgggaagtgcagctttttccttggcgggagagaactcgcatttgggtcattcgatgggtccatttacttctatgaatacaggtcggcaaggcttttgaggaaa

SEQ ID NO: 3216 - DNA, 404 bp, Zea mays
  Clone ID: LIB3136-011-Q1-K1-G12
gctgacgatcacggccggtgccaacagcctgcacccgccggagtgcagcgtgggcgagacgtgcgagaaggcgacgtcgtaccagttcgcggtgctcttcgtggccttcgcgttcctggtgctgggctcggcggggatccgcccctgcagcatgcccttcggcgccgaccagttcgaccccaacacggagtctggcaagcgcggcatcaacagcttcttcaactggtactacttcaccttcacggccgccatgatgatcctccgccaccgcatcatctacgtgcaaaagcacgggagctggcccaatcggcttggcaatcccaccggactcatgttcctggcatgcgtgctcttcttcgggggcacgcgcctatacctgccggtgacgcccgaggggagcccct

SEQ ID NO: 3217 - DNA, 302 bp, Zea mays
  Clone ID: LIB3136-011-Q1-K1-G2
cgaatcccgggcgccacgctccgagaaacatactattccctcagtgcttataacaaagaaattgggggaaaaccttaagaaaggccggaaaatggcgatatgctcagcgttcttctggactggagagaatcccttccccatcctgatgagcgtgtagagtatgagttctggacaaacagtaatgatgaatgtggtccaaaatgtgatatgcaaatggacttcgtgaggagctttagaggaactgcacaaattcttgagaaaaagggttacactcagtttactcctcattatatcacatggta

SEQ ID NO: 3218 - DNA, 255 bp, Zea mays
  Clone ID: LIB3136-011-Q1-K1-G3
gctatgcaaccatgagaaaaaccacaagttcagcttgcagtactgcatctgggaccattttaaggaggtagataatatggagtcaagtagatccatgaaccttgcgaagctagttgcggagatgctgttgaacttcacgctctccctcgcaactttgaaggttgttaacctggccaacccggtggagatgactcctgcaagggtctcgcatttacggatgctgtttgagaccttgctacataaagacgattcacg

SEQ ID NO: 3219 - DNA, 298 bp, Zea mays
  Clone ID: LIB3136-011-Q1-K1-G4
gtggagcagcagctgctgtcgcgggagatccgcaacgtgctggccgtgggcggggcggccggcaccggcgacgtcaagttcggcagctggcgcgagaagctggcgcagtccgggttccgcgccgcctcgctcgccggcagcgccgcggcgcaggcgtccctgctgctcggcatgttcccctccgacgggtacacgctggtggaggagaacggcgcgctgaagctcgggtggaaggacctctgcctgctcaccgcgtcggcctggcgccccatccaggtgccgccgtgccgttgatgag

SEQ ID NO: 3220 - DNA, 337 bp, Zea mays
  Clone ID: LIB3136-011-Q1-K1-G5
aagaagcgctccctacccaccgcggttgccccctttcggcctttccccttctcgagcgagcgcgggtccttcggcgacgtgcggatttttcgtccctcccgatgctcccggggttcattgtgaagctgaggtgagtatataggcataaagagagcatgaacactgttagtggtacaaagcgtgcaccaaggagacagtcgcaagatgggtctggtgataaactagtggtgatcgtggaagcaagctcccggggggtggggagccgtcgtggaccacatgcccctattcctggcgccctaaactcacccattgatgtggaagccatcgaagatgaagt

SEQ ID NO: 3221 - DNA, 305 bp, Zea mays
  Clone ID: LIB3136-011-Q1-K1-G6
gatgttttgtctccaacggaatcatacaatcatggtggaagaaagatgattagctggcagggcaagataggacgagcaaggtggaatgcggcggcggcccaccaaatgaccaaaccctaacagatttttttttctcttcgtcttttttctgcttgaggcgaccgccggagattccttccttctgctgttgtgtgcatctcgaatggttttttctctctactcccaatgcgacaaggtagcggcggtcgtggtccggagagctcagtggcggctcagcatggacagcgcaaccacctgcgcccact

SEQ ID NO: 3222 - DNA, 339 bp, Zea mays
  unsure (1)..(339): unsure at all n locations; Clone ID: LIB3136-011-Q1-K1-G7
cggacgcgtgggcggacgcgtgggcgctactggtggaaggagaaggagatgtcggggctgggcgtgcaccagagccaccagctcgtgtgggcgcgcgcccaccacctcgtctacgactactgcgtcgacaccgaccgcttccccgtgcagccgcccgagtgcgccggccgctgagttactgagtcctgaccgaccgacctcgatcggcgcggcgcggcgctgctccatgggtggtgggtggtacgtactagtcttgacaatggatggcatggcaatggatggcgtcnggtggggtggaaatggaactgcttgtttctgtttcagcaatggtgtctgtct

SEQ ID NO: 3223 - DNA, 411 bp, Zea mays
  Clone ID: LIB3136-011-Q1-K1-G8
agactgagaatattgaggagattgctttgaagatctctcaacttcctttggcttgaggcaggcaaaagaggattgctgtgattactcaaggtgctgatccagtggttgttgctgaggatgggaaggtgaaaacgttccctgtgatcctattgcccaaggagaagcttgttgacaccaacggcgcaggtgatgctttcgttggaggcttcctctcacagttggttctaggcaagggcattgaagactgcgtgagggcaggttgctatgccgcaaacgttatcatccagcgcccgggctgtacttacccggagaagcctgacttcaactagtgcaaaaactgaagcacgtcatgagaggcactgttatagacacactttatttgtaaccagtgcgtggttcggtgtctacaca

SEQ ID NO: 3224 - DNA, 359 bp, Zea mays
  Clone ID: LIB3136-011-Q1-K1-G9
aacatgatgttgtatggttctggttgaaaaaagacgagccgcatgagtgtccagtctgctggcaatactttgtgcttaaggtaattggtgatggtggagatccagatggccatgacgatgaagatgatggacatcactaaggatgccttgtggttctgaaaataagaatctgatgaggcagatgagtccatcacacttcttttttcttgaaccagactgcacggcatccttgtttatgaacagacatttggccatcaagcgggtggtagttaatcacctagggattttgtccagacaaaagcttattgagatttgacccatgcatttctttaagagcatcatcgaataaaaagatgact

SEQ ID NO: 3225 - DNA, 287 bp, Zea mays
  Clone ID: LIB3136-011-Q1-K1-H1
ggcagcagttctatttatggtgactccacctggaggttcaactcatctgaggttgatatacgtcctgttggtcatgatcttggaaatgttgatccagatattaaatcagaaatatcagcaaactatatgggcaactatactgttaataataatcagacaagcagaggtatcacttcctaggaagagtattattatattcatacatgacttgggataggtgaaatacccactactatatcaggctttcaggtgcatgactgtgaattggggatgtcagattaatatac

SEQ ID NO: 3226 - DNA, 415 bp, Zea mays
  Clone ID: LIB3136-011-Q1-K1-H10
acgcgtacgcccttattttaatagggtatgtgagcgctcttgctctatcgaaaattgactcttttttaacggtaacggaccaacggcagtatacgtcatgcatcatcctctcttctggagccctgaattgcgcctttcgtttctaagggataccagtgacagaattgagaaaaccagtgaaacggacctcataaacgcactggaaagcataagaacaaggggggttggtgggaaatggggagagaaactggatgctgctttagttacagacatgggtcgttatagaaaatataactttgagtctactcgtgatcttctgaagtatatcagaaataaatcgggtcattacagagaactttcaaatgatctcaaaggcatacttgggtcattgccagaaggatttgatcactatttt

SEQ ID NO: 3227 - DNA, 336 bp, Zea mays
  Clone ID: LIB3136-011-Q1-K1-H11
acgcgtgcgactcgaccagctagctctacgctgaactaagggagctgtttcagcttttgcccgggactgttcaggagcaacttatgcttgaaagagatccccatgggaacgttcaggttgcaaaaattgaaactgagaaaatgcttattagcatggtggaaactgaactggagaagagaaaagctgaggggagatactctgcacatttcaaaggacaagctcatttctttgggtacgaaagaagatgcggccttcctactaattttgattctaactattgctatgcattaagctatggggctggtgcccttctccaaagtgggaagacaggactta

SEQ ID NO: 3228 - DNA, 340 bp, Zea mays
  unsure (1)..(340): unsure at all n locations; Clone ID: LIB3136-011-Q1-K1-H2
tcccggtcgaccacgcgtgcggaagcttctgacatgtctgcactgcaagccattgttagttgtgacgaagaaagagtgaaggtggaagaggaagctgaaattttggctgcacaggatgatggtggtggtgaagcattggagcgtgtttatgagcgtctagatgcaatggatgctggaactgcagaaaagcgagctgctgaaattttatttggtctgggttttgacaaacaaatgcaagcaaagaaaactaaagatttctctggaggttggcgtatgaggattgctttagcaagagcactgtttatgaatncaacaatncttttgcttgatgagccccaca

SEQ ID NO: 3229 - DNA, 312 bp, Zea mays
  Clone ID: LIB3136-011-Q1-K1-H3
tgatgctcatccaccatatgatggtgctgcggtctcaaagagtcgctctgcacgtgtggttggtttgaagcaggtctcccctagagttccggctggaaattatcccgtttcacatatttcttacgagctaaatgttctgggctccagaggtccaagaaggatgaactgtgttatggattccatccctgcatcagctgttaaggaaggagggaaaactcctacacagactgaatttccacttagcagccttgactctttcccatcatttccattcttcagatctaaatcagctcggatagacagttcaacgtc

SEQ ID NO: 3230 - DNA, 429 bp, Zea mays
  Clone ID: LIB3136-011-Q1-K1-H4
cacagccctgctgtacccacgaacatgtttgttgtattgttaacttaccaagtttgcagagcaagcgaggggagcgtcctgcggatgattttcaaggtgctgcaagcgaggggagcgtcccatcgtaaaatcaatcaagtcagaacctgccgattattcttttccacacttgatctggcgtgggcggcatccagagttggggcagttgaggagcacatccagatccagagcgagagacatctgatggcctcctcattcatggcgccagcgcttacagtaatagcagtgatggatgggtagtgtctgattgcacaggaactgactgcacactgatggctccagtcagcaggcttgggggacggttctgtggcgctctcaagtctccagctacttgtgctttgtgccatctcccgttccatttttcagatc

SEQ ID NO: 3231 - DNA, 398 bp, Zea mays
  Clone ID: LIB3136-011-Q1-K1-H5
accgaccgtttccacttgggtactaccaaggatttcctgttccgcagtgcagtggcccttcatatgggaccgaatacatctatccacagggtacattaaactcatattccggtcagcaatatcttcctatttatggagtctcagctgcagcaaacacatccaaccaagcatttagccagctgagtccatccgtttctggtggtggcaatggttatttgtcggttcatagttacaacgtgcctggaaatcaatatgtgcagctcactggatccaacttcagcggtgcatcaccaaccgctcgaccttccattcagacttcttttttagtagcaacacccgttcctgcacatccacacctaataatttcagccccctcacctcagtttacacaagctagt

SEQ ID NO: 3232 - DNA, 357 bp, Zea mays
  unsure (1)..(357): unsure at all n locations; Clone ID: LIB3136-011-Q1-K1-H6
cgcgtccggcaggggcctggannngnnnnnnnnnngnttttttcacgtagctatggccaccttttaagtgggcgtggaggctgtcaccgggaaccccgacacgctcggcgattgcccgttctcgcagagggtgctgctcacgctggaagagaagaaagtcccgtacgaggtgaaactcgtcgacctcggcaacaagcccgaatggtttctgaacatcagcccagagggtaaggtgcctgtgttcaacggtggagatggcaaatgcattgctgattctgatgtaatcacccaagtcattgaggagaagttcccgactccttctctggtcaccccttcaaaatatgcattagtgggatc

SEQ ID NO: 3233 - DNA, 351 bp, Zea mays
  Clone ID: LIB3136-011-Q1-K1-H7
acaacagctagtagcgaggcaattgacctcatctcatcactatgctcatgggatcgtagcgggagaccaaaggccacagaagtcctccagcataccttcttccagggttgtacatgtgttccgcttcctgtccgtcggaaagcttcatcgcttcctaaaacacctccatgtgttggatcaaagagaatttccgagaacagtgttgctagaagattctcgaccgggactctatctacgatgaaatctcatagcaatgcacctgcaaaaatcaaacggtttatctaggactggtgtacaaagaaaacttcacttggatcgtcagccaccgcagaagagtacaaacccgaccga

SEQ ID NO: 3234 - DNA, 401 bp, Zea mays
  unsure (1)..(401): unsure at all n locations; Clone ID: LIB3136-011-Q1-K1-H8
cgnntccgggcctagcggcctttcgcccgctcgcttgctctcgtgcccaggtgtcctaacgccnnatcggcgtgcgcggagcgctctctgtccgttngttcgtcgacttcctaaacggcaccgggacccatcctccgacaagggagaatcctaaacgaatcgtcaagggagaacccttcgacttcagggccagggatcgatcatctcatcaacctcgactctcaagaaaggggcggcaaccaggttcatcaagaaccgccgcatacggctcactttggccgtgacgacgccgacttcacctgggaggtggtcaagcccctaaagaaggcatccgcttaagaatgtattgggaagttcactggacatgaggttcatcttcgtctggctctgctgatacctgc

SEQ ID NO: 3235 - DNA, 334 bp, Zea mays
  Clone ID: LIB3136-011-Q1-K1-H9
ctccaactaggttcgtttgccaccacaaggcgcatactgccggccttggttcggcgccgcgcgttagatcccagggccaactaggttgttctctaattcctaatttcttggccttttctcttccactctccgccattttagctgtcgcctcggttgttttagcttgccggcgtggacagactggcagatctggaggtcggtgcgaccagatccggtgctgctgtgcccgatggcagaggagatctctctggtttactctgctaagagtcaaagaggagctgatgacgacaactaagcttgggttaccgataattgagcctgttctctgcacgag

SEQ ID NO: 3236 - DNA, 346 bp, Zea mays
  Clone ID: LIB3136-012-Q1-K1-A1
gatccatctatggatctgtgagctgagctgatctgagctcaccaccaccacacgggggagagggctatagctagcatagcaagccacccactcagcgacttagcagcagctagctagccatgctgccgtccttcgtgtcgccgacggcgagcgccgcggcctcggtgacgccttcgacgcggtcgataccatgcagctacgggccgccggtgctgggcccgctgcgggaccggctcgactacttctggttccagagccaggacgagttcttcctgaagcgcgcggcggtgcaccgcaacaccgtgttccgcaccaacatgccgcccaccttaccctttctttgtgg

SEQ ID NO: 3237 - DNA, 276 bp, Zea mays
  unsure (1)..(276): unsure at all n locations; Clone ID: LIB3136-012-Q1-K1-A10
cccacgcgctccgatatatccaatatatcttaataaattactccacaatatttatattgaccaaatattatctacacattgattcttattaatcaaacctaatctnacaatcattcaaatcttttctattaataatctaatcttaaacatttaaaaaaattctacatattaccaaataactcctttttctcaaaccatatttcaacaatttccataacttacctttcattaacacataccaacttcttttctttaacatttctttatcttataaaa

SEQ ID NO: 3238 - DNA, 400 bp, Zea mays
  Clone ID: LIB3136-012-Q1-K1-A3
gtcattccgtgaaatccggtcctttccagaggtgaggaaccagaaagatgagctcgccttcggccagatgatcaaaatgatcagggtacgacacaccaatgtggtgcctgcgattgcattgggtgtgcagcagctgaagaaggacttgggcggtccaaaggcgttcccccccggaatccatgagatccatcagtttcttgaccgcttctacatgtcaaggattgggatccggatgctgatatggcagcacgtcgctttgcatgaccctgatccagagcctggtgtgatagggcttataaacacaaaaatgtgacccatgacagatgctcgaattgctagtgaagatgcacgtgctatttgcatgcgggagtatggatcatctcctgatgtcgacatatat

SEQ ID NO: 3239 - DNA, 263 bp, Zea mays
  Clone ID: LIB3136-012-Q1-K1-A5
attccgagaaatccagtgctttccaaacgtgacgaaccagaaagaagaacctcccttcgggaaaagagcaaaatgatcagggtacgacacaccaatgtggggcctgcaattgcattgtgtgcgcactagcttaataaggacttgggccggccaaaggcgttgccccccggaatccatcagatccatcaatttcttgaacgcttttacatgtcaaggattgggatccggatgctcatatggcataacgttggtttgcatgaccc

SEQ ID NO: 3240 - DNA, 91 bp, Zea mays
  unsure (1)..(91): unsure at all n locations; Clone ID: LIB3136-012-Q1-K1-A6
gcaggcgcgggccgtgggcaagcgcgtgcaggtggccggacccancgcggagcggaccggggacaacgagctggacaggaccaaggggcga

SEQ ID NO: 3241 - DNA, 446 bp, Zea mays
  unsure (1)..(446): unsure at all n locations; Clone ID: LIB3136-012-Q1-K1-A7
gatccatcgatggagctgtgagctgagctgagctgagctcaccaccaccacacacgggagagggctatagctagcatagcaagccagccagtcagcgacttagcagcagctagctagccatgctgccgtccttcgtgtcgccgacggcgagcgccgcggcctcggtgacgcctccgccgcggccgataccaggcagctacgggccgccggtgctgggcccgctgcgggaccggctcgactacttctggttccagagccaggacgagttcttccggaagcgcgcggcggcgcaccgcagcaccgtgttccgcaccaacatcccgcccaccttccccttcttcgtgggcgtcgacccgcgcgtggtcgccatcgtggacgccgncgncttcaccgcgctcttcgacccggacctcgtggacaagcgcgacatcctcatcgggccctac

SEQ ID NO: 3242 - DNA, 426 bp, Zea mays
  unsure (1)..(426): unsure at all n locations; Clone ID: LIB3136-012-Q1-K1-A8
acggaaanancaatcagagctttaacattgttgatgtgaaacctgcaaacatggaggatctaagtgaagtgatcacttgtgcggagttccatccaactcactgtaatacactagcatatagtagctcaaagggtactattcggcttattgatctgcgacagtcagcactgtgtgacaaccatgctaaactatttgaggagcatgaagcacctggatcaagatccttttttacagagataatagcatcagtttcagatataaaatttgcaagggatggaagacacattcttagtcgggattatatgacactcaagttgggggatctaaacatggattcaagcccagttgcaacttttcaggttcatgaatacttacgtcctaagcttttgggatttatacgagaacgaatcaaattttgacaaattt

SEQ ID NO: 3243 - DNA, 402 bp, Zea mays
  Clone ID: LIB3136-012-Q1-K1-A9
cttgcacggtgcacaattgtgtccgagctctccaacaaggatttcgactcatatgtcctcgctgaggcaagcttgtttatctatcctctgaagattgtcatcaagacctgtggcactaccaagctcctgctcaccattccaagaatccttgagcttgctgaagagctgtctatgccacttgctgctgtgaagtactcccgtgggacgttcatctttcctggtgcacaggcagccccccacaggagcttctctgaggaaagtgctgcacttaaccgctactttggcgggctgaaatctgggggtaatgcttatgtgattggagatccagcaagacctggacagaagtggcacgtcttctacgccactgagtacccagagcaacccatgggtaaccttgagaaa

SEQ ID NO: 3244 - DNA, 358 bp, Zea mays
  unsure (1)..(358): unsure at all n locations; Clone ID: LIB3136-012-Q1-K1-B1
ggccggcggaggcgtatcggatccatttattgaactgttaacttaacttttcttagctcaccaccaccacacacggganagaggtatatctagcatagcaagccacccaatcatctacttaacaacaactagctagccatgctgccgtccttcttgtcgccgacggcgagcgccgcggcctctgtgacgcctccgtcgcggcccataccaagcaactacgggccccccgtgctgggcccgctgcgggaccggctcgactacttctggtttcagaaccaggaccagttctttctgaagcgcgcggcggcgcaccgtagaaccgtgtttctgaacaacataccgcccacctttccctttt

SEQ ID NO: 3245 - DNA, 82 bp, Zea mays
  unsure (1)..(82): unsure at all n locations; Clone ID: LIB3136-012-Q1-K1-B10
cagcgccgtgccggcaaccttcccgttctcttcccgcgaacccagcnnngacgcctctctgcggccccgtcccgaaatcgcc

SEQ ID NO: 3246 - DNA, 361 bp, Zea mays
  unsure (1)..(361): unsure at all n locations; Clone ID: LIB3136-012-Q1-K1-B11
gacccaggcgtacgcggacataatgcgcaaggacacctnaacactaattgtatctttgccccatgcaacctcggggcggggagcccatcaggtccggggactccttcaagaccatcatcatgaacaaaaaatctaagcgtggaaagtcaaaccccgcagagctctatggtcaagtaacaaatgcaagcaaccatactcatcataacttaaaccgcccttctttcaatagtgaggacccccaataccatgcctcacttaacgaatgcgctgcttcccccattcccaacgcttttcggaaataccaagcaaggaatacccttcgctttctcaagggaatcaaaacaattcgccttgtgggtca

SEQ ID NO: 3247 - DNA, 399 bp, Zea mays
  Clone ID: LIB3136-012-Q1-K1-B12
cgggcaccacgcgtgcgacagatcgatggaaagtggaacttcgactcaagaaactctgtgttggaatggtctattctgcttagcgatcattccaatcggggtggttccatggaatttgttgttcccccagctgacccatcatcgtttttccccatctccgttggattttctgcatcgagtactttcagtgatctgaaggttactggaattcttcctctgaaggaaggcaaccctcccaagttttctcagcgcgctcgtttggtcactggtaactaccaaattgtttacgctttgacccccaagtgttgttccctttgaatcttccattaccgattgtttttgccgggaccttttccagcccttgcaccggaaaatattttttggttggaaaaatttttt

SEQ ID NO: 3248 - DNA, 456 bp, Zea mays
  Clone ID: LIB3136-012-Q1-K1-B2
cggaacgacccacgcacccacacgtatcacatacacaatttgacctttatatactattatctagtgaagatggccattactgtgatgctgtgcaccatgaatgatcattattattgaaaaatctcctacgcaagaacaaaattctagttctagacgaggcaacagcatccatcgactctgcaacagatgcaatcctgcagaaagtaatcatgcagcatttctcaagttgcacggttataaccatagctcacagggtaccaactgtgacagacagtgacaaggtcatggtcctgtcctacgggaagcttctataatatgaaacaccagccaagctgttggaagacaaacaatcagcatttgctaaacttgtggctgagtattgggctaataccaagagaaattcaacatgatctaccattattgcaggacattgataaagatatgatcatttttaat

SEQ ID NO: 3249 - DNA, 333 bp, Zea mays
  unsure (1)..(333): unsure at all n locations; Clone ID: LIB3136-012-Q1-K1-B3
ctcgctcgtcccagctgatcaggtcgagcacctagtagcgacctgctcgatcatcagtgtagagtgtcggtaggtgtctgtctctcttggtggctggttgcaacggtcatggcgacgtcgtctcgtcgggtgcccttgctgctgctgtgcctgggcgtgctggtgtcctgctccttcgcggcgggcagcttggaccaggagctggacatcacgtggggcgacgggcggggcaaggtccttgacaacgggcggctgctgacgctgtcgctggaccgcacgtncggctccgggttccagtcccggcacgagtacctgttcggcaagatcgacatg

SEQ ID NO: 3250 - DNA, 392 bp, Zea mays
  Clone ID: LIB3136-012-Q1-K1-B4
gacattcatcatgggagcgctgatcgatatataggcccccagatggacggggctctcgggcgcactgggggcgcttgtaattatgacggtgctgtctactggactaggcaggattgttccgaatttgatatcgaggaagcacactaacagcgcggcgacagtcctctatgcattttttgggctacggctcctgtacatcgcttggaggtcagattccaaggcattacagaagaaggaaatagacgaggtagaggaaaagctggaagcaggccaagggaagtcaacatttagacgtgttttctcgagattctgcactcctattttcctggagtcatttgtgttgaccttcttggcggagtggggcgaccgaagtcagatagctacaatagcgc

SEQ ID NO: 3251 - DNA, 400 bp, Zea mays
  unsure (1)..(400): unsure at all n locations; Clone ID: LIB3136-012-Q1-K1-B5
ctcgctcgtnccagctgatcaggtcgagcacctactagttacctgctcgatcatcantgtagagtgtcgctaggtgtctgtctgtcttggtggctgcttgcaacggtcatggcgacgtcgtctcgtcgggtgcccttgctgctgctgtgcctgggcgtgctggtgtcctgctccttcgcggcgggcagcttggaccaggagctggacatcacgtggggcgacgggcggggcaaggtccttgacaacgggcggctgctgacgctgtcgctggaccgcacgtccggctccgggttccagtcccggcacgagtacctgttcggcaagatcgacatgcagctgcggctggtgcccggcaactttcgtcggcaccggcaccgcctactacctggccgcgcagggc

SEQ ID NO: 3252 - DNA, 196 bp, Zea mays
  Clone ID: LIB3136-012-Q1-K1-B6
gcatagaacaatgtgacctttatgtgctattatctgttgaagtgtcccaatagtatgatgtgaggatccatgaatgatcattattattgaaaaaaaaaaaaaaaaaaaaaaaaaaaaaaaaaaaaaaaaaaaaaaaaaataaaaattggaaggacataactatatacattttttgggctacggcttatgtaacatt

SEQ ID NO: 3253 - DNA, 450 bp, Zea mays
  Clone ID: LIB3136-012-Q1-K1-B8
cggacgcgtgggtgcgcctctacatttcttctctctctgctcctccgcctccgcctgatccgtccaagacagggatcgccatgtcggactcggaggagcaccacttcgaatcgaaggccgacgctggggcgtccaagacctacccgcagcaggctggcaccgtccgtaagaacggcttcatcgtcatcaagaaccgtccctgcaaggttgtggaggtttctacctccaagactggtaagcatggccacgccaaatgccactttgtcgccatagacatattcaatgggaaaaagcttgaagatattgttccttcatcacacaactgtgacattccgcatgtgaaccgtactgagtatcagctgattgatatttctgaggatggatttgtgagccttcttacttcagatggcaacactaaggatgatcttagactcccaactgatgagactc

SEQ ID NO: 3254 - DNA, 375 bp, Zea mays
  Clone ID: LIB3136-012-Q1-K1-B9
cgaaggttcatgctcatatgttacggaagaccaaagcaacgccaatgactgcccaaatagagatgatgcatctcggataattggtgctactgacagtgactcaagaaaccgaactggtcctactcaaaaggccatgtcattgccttcttcgcctcatgaatataggggtcaagatacccaaaaaggtgatgattttataagtaaagaaaagattgcattggcatggaacaaaagttttcaaaactccccatttcttaataagcccttgctgccccttgaagaatggaacataaatttcttttaaataaccattggcaccccggttggaataagattcttcggagaagtttttcgtggtatatggaatggaaccca

SEQ ID NO: 3255 - DNA, 172 bp, Zea mays
  Clone ID: LIB3136-012-Q1-K1-C1
cccgcgcatatgccgacttttcagtccgcaatctttaccgcaaggaccctcaggcgacggtggcgaaccttgcgcggtgtgggggcaatcttcctataaacaactctccacttaatgattatgggctagccaagggaaaaagcctgcatcttgttattcgaccgcaagatct

SEQ ID NO: 3256 - DNA, 401 bp, Zea mays
  Clone ID: LIB3136-012-Q1-K1-C10
ctctcgcctctggttggcagagctctcttgaagcctcgagactcgtctcgccgctgctccggtcaggctgccgttgcgtgcctgcgttagctgttgcattgcaaccccgcgagccttgagctgctagctcgcccttcaccacagtcctcagacatggagttcgaagaccgctgccacaaggtccaggagcccaaattcgactgcctgctctttgacctcgacgacaccctgtattcccttaacccccggaacccaagcccttgtaagaaaaacctttaaaaataccttggtgaaaaacttggtatttaccaaacccaaaaccaaaaccttggccatctggttgacaagaactaccggacccccattgcttgacattaagggcattggctaccgcttttttt

SEQ ID NO: 3257 - DNA, 144 bp, Zea mays
  unsure (1)..(144): unsure at all n locations; Clone ID: LIB3136-012-Q1-K1-C11
caagatgccacnaatgttggtgacgaaggtggttttgctccgaacatccagganaacaagggaggagttgagctcttgaaaactgcaattgtnaacccagtcatcctggtcaaaaggatcttcaatactagttctagatcgcga

SEQ ID NO: 3258 - DNA, 390 bp, Zea mays
  Clone ID: LIB3136-012-Q1-K1-C12
ggttcatcagcgaaggacgttgctaagcagctgaaggagcaacaaatggtgatgccaggccgtcgggagtcaaacctgcaaagggaactgaacagatacatcccaactgctgcagcatttggaggagtgtgcattggcgcgctaactgtcctagctgatttcatgggcgcaattggctcaggaactggcattctgctcgctgtcactatcatataccagtactttgagacattcaagaaggaaagggcacccaacctgggttcttttggtttctaatcttcgtcgttggggaaaaaaactgattttttttgcaagtaacagtaaatccttggccgcttgttattgttggtaattgaaaacctattatccagttaaggtggcggcttaatt

SEQ ID NO: 3259 - DNA, 288 bp, Zea mays
  Clone ID: LIB3136-012-Q1-K1-C2
agcaaaacagaagcccaccgcgccggcaagccgaagcgagcgcggagctaaagatgccgcggaccacgggggaacagagctccgggtgcccgcctctccctgccctcaccaccgacatcctcagccatggcaaaggcttgacggcccacacgaggccagctggcgccgtacaagccggaaagactacgagcgcgcacagacctgcccatgccatggttgctgtctacaacgacaagaacgccgccgacccgcgcttggctgacgacacgctgaacagcgtgaatgagc

SEQ ID NO: 3260 - DNA, 394 bp, Zea mays
  Clone ID: LIB3136-012-Q1-K1-C3
ctcattttttagagtgaagagtttgtcaaagggaagcattgccaagaaagatgtgtctttggcggtgcctttaagagagtcgagcccttccccactgccttcagttgtaccctcattctctgcatctgaggtgatgaatgatatcaccgagagaaacaattttggttggcccaagcagcagtatgttaaagaacggcctgctccgacatttgttgaacgaatgcccaaagtgaaggatgccgtggagttcgcaacatcagacggtgcttatttgaagggacaaagaagccagggctgtatggcaccaaatatagctgaaataccggatacaatgtaccagcagagaaggcaaccagcaaggaaggctaaagataccactttgcggaataatatg

SEQ ID NO: 3261 - DNA, 378 bp, Zea mays
  Clone ID: LIB3136-012-Q1-K1-C4
gatcaaccagccagccgatctcagcgatccgccatggccaccgcgtattacgagaggccccgtggcggggccgtctaggaggcggacgacttctatgagttcgaccccacgccgtacggcggtgggtacgacctcgccgtcaccttcggtcgcccgctgccaccgtccgaggaaacctgctacccgtgctcggcgccctcgaccttctacgacgcaccgcactacgccgtctccgagccgtgcccctacggtcaccacgccaagccaaagcccaactatgggttgcgcccccagcaagagcaacagccgtcttacggcagcgggtacagatccaggcccgagcccgctgctgaggagggcgggggctatggatcttgc

SEQ ID NO: 3262 - DNA, 440 bp, Zea mays
  unsure (1)..(440): unsure at all n locations; Clone ID: LIB3136-012-Q1-K1-C5
cggacgcgtgggcggacgcttgggtgcgcattttcagttcaagggctttgtggcgacnaagcataagcttgtgctggatgggcatgatctgtcaagaaacaactccccagtcaaggattatgggctggccgagggaaatgttctgcatcttgttattcgactgtcagatctccgtgtgattaacattgagactgcaactggaaggaagtttcagtttcaggtggaccagagccgcaatgttaagtttctcaagaataagcttgaagcagagggtgatgaggatattggtaatcttgaggatcacaagcttgaatatgatggtgaggagcttgaggaccaccagctgatagctgatattagcaggaaggatgatgctgtgattcatttattcatccgcaaaccagcaaaggtatggacacaacaagttgatggagatactt

SEQ ID NO: 3263 - DNA, 430 bp, Zea mays
  Clone ID: LIB3136-012-Q1-K1-C6
cgaggcctgggccgtggccaaccgcctcgacctcgtcggacctatcgtcgagcagccggaggcaacctcttctccaggcacaaggttgagtctgagtttttgccactttacagcacctatggcatcggattgactacatggagtcctctagcttcaggagtactaactggaaaatataccaaagggaacatacctgctgatagcaggtttgcactagacaattacaagaacctggcaaataggtccctggttgacgacacgcttcgaaaagtgaatgggctaaaacctatcgccgctgaactcggcgtttcgttagctcaactctccattgcttggtgcgcgtcaaaccccaacgtctcatccgtgatcactggtgccaccaaagaaagccagatcgtggagaacatgaaggctctagatgtcatcccac

SEQ ID NO: 3264 - DNA, 336 bp, Zea mays
  Clone ID: LIB3136-012-Q1-K1-C7
ccacgcattctttaaagcgaagacgttctcaaaggtaaacacttccgagaaagatgtgcctttgggcgtggctttaaaagagttgagcccttacgcactgccttcagttgtaccctcattctctgcatctgaggtgatgaatgatatcaccgagagaaacaatttttgttggcccaagcagcagtatgttaaaaaacggcctgctccgacatttgttgaacgaatgcccaaagtgaatgatgccgcggagttcgcaacatcaaacggtgcttatttgaagggacaaagaagccagggctgtatggcaccaaatatagctgaaataccggatacaat

SEQ ID NO: 3265 - DNA, 422 bp, Zea mays
  Clone ID: LIB3136-012-Q1-K1-C8
accatgacagcagcttgaattgctcgtgaagatgcacgtgctatacgcatgccgcaggtgtggggatctcctaatgtggacatatatggtgatacgtcgattacattcccatatgttacaccacatatacatctcatgatttttgagctggtgaagaactcccttagggcaccacatgaacggtctatggattctgataagcttgcacctcacggttcgaatcatagttgctgatcgagcacatgacgtgactattaagattactgatgaacgttgtggtataccaacgagtggtgtctcaagaatttttacgtatctgtataggacaccagaccaccctccttatcttgatgtacataatgaatgagtaactatggctggatatggttatgggattcctattagtcgagtttatgctcgat

SEQ ID NO: 3266 - DNA, 355 bp, Zea mays
  Clone ID: LIB3136-012-Q1-K1-D10
atggttggctgaaaaggctggaaacgtttatcatcatccttataacctgggaatctatgagaaccgagtttcggtgctaggtgctaacatgttgtgttggctgtgcccaatatcaaggaacatcggaaatggtgttcgtttccgcacatcatatgacattccactatcaacttcagcaatgtgacgcacaccatataagggtacactcatgttggatatctgctaactcgcaaaagaaactcaggtgcccacacaaaagtgctaggtttgctattcttaacagtcttaattttaaccatttacccaacccgttggcttatctttaaaaggaaatggttttccatggctggacctt

SEQ ID NO: 3267 - DNA, 346 bp, Zea mays
  Clone ID: LIB3136-012-Q1-K1-D11
gggaaccataccagagcggcagagccttcccctccgctccccagtcccacccgcaccctaggcctgagcaaaccctaaccgctcgtcgccatgaaggacacctcgttcaaggccaccggcgccaagcgcaagaaggtcggcggcgccaagcgcgggctcacccccttcttcgcgtttttggctgagtttaggccgcagtacctggagaagcaccctgagctcaagggcgtaaaggaaggtagttgcttcttttcaccctaagcatgtagctgggtttcgcttaagtggctggtatatgcctttggtcggccgggactttgcttataagggaacaaggccgcttggg

SEQ ID NO: 3268 - DNA, 345 bp, Zea mays
  unsure (1)..(345): unsure at all n locations; Clone ID: LIB3136-012-Q1-K1-D12
gcccgactgtcantcagcctcagccatggccgcggatgaggagcagggcttccgcccgctggacggggcgtccctgctcgccgacatgaaggccacgccggcgctcgcctcccgcctcggcggcggtggcagtctagactccatcgagatcaaggaggtcggcgacggcaacctcaacttcgtctacatcgtgcagtccgaggccggcgccatcgtcgtcaagcaggcgctcccgtccgtgccctgcgtgggggactcgtggcccatgacgcgggaccccgcctacttcgaggcctccaccctgcggaagcccggccgcctgtgcccgaaccccacccccgaggg

SEQ ID NO: 3269 - DNA, 368 bp, Zea mays
  Clone ID: LIB3136-012-Q1-K1-D2
cttcggctacctcttctgctagatccgcgctggatacgtgggtcctgctccaaaatatgaggcgtctggtctggcgcgcgtgagttcagctcgtgtgtcttgtgtgtctctccgtgaggcgtcttgctgccgtgtgcatatgtatggagtccgccctggctgcagacgtcgaggaggtgtgcgcgtgcgctggtggtacgtgcttctacgcgccactgcttgtgccggcgagcatgtactaccctgctgcgttctctggttatcaatgagatgatttatttcattctctcaaaggaaagcaccaaaaggagcggaggaaaaagagacagaatcagcaagaatgtggacgaggaggagcccaaggggta

SEQ ID NO: 3270 - DNA, 410 bp, Zea mays
  Clone ID: LIB3136-012-Q1-K1-D3
aaaagggccacacgacgtcccgggccactggctggtgatcgcggcgaagcttgtgaaggagggagggaagatcgggatccatgtgaagtttgcactgctgggctatgaagggcagtcgcagggtaacagtttcatgagctgaagtctctgtacataacaacggctggctctgatctttgtagatttcaggattttggaagaagcacatgattaggatttttaatactggattttttttgtgtgtggagtcgacaggaactgtgtggagggcagtcggaaaatagaccaatcacctctttgttaggaatgcctgtggaattcccgtggcagtataattagagcacgtaattgtaaattgctcctttacaaggtgtgttttatttcagtaggaaacacctcagtttagaatt

SEQ ID NO: 3271 - DNA, 401 bp, Zea mays
  Clone ID: LIB3136-012-Q1-K1-D4
ctcctgttgtagatatatttgttcttgctggtggctgacgtcctgcaaactctcataaagcgtgatggtcgtgtcaaacaccccctagcccctgcagaatcctgtgctgtgctacaatatgcggatgatactatgattgtgatggaagggaacccagcccatgtgtgtgtactgaaacagctcctggacagcttcagcaaggcaactgggttgtgtataaattttcagaaaagtgtgctggttccaattcacatgaatgagactgctgtccaacaatgtgtatccctgctcggttgtcggcgcgaaggtttcccacagacatacctagggctctctctttccctaacaaagactaggctttcaacctttgttccatacatggcgaaaacagacaagtactt

SEQ ID NO: 3272 - DNA, 296 bp, Zea mays
  Clone ID: LIB3136-012-Q1-K1-D5
aaaaaaaaaaaaaaaaaccaataactaaacaatcacaacaaaaactaaaaaaaaagggacacggcgatcaaaatccacatcatactctcccctccttacctataaaacaccctcctatagtaacaccttcattaccttaactctctgtacatttcaaccgttggctctcatctttccctatcttatccctttttaataacctcttgattaatattctttttactggattccctttctccgtagagtccacacccactgattcttctgacacttttgaaatacaccattctcctttt

SEQ ID NO: 3273 - DNA, 445 bp, Zea mays
  Clone ID: LIB3136-012-Q1-K1-D6
gcgaaagtagcatagcataccacaaaaggtgctgcttgacagatggcaagcttcccagacctcaggcagatggagcatggcctagccagtggtgcctcccatggcacgccgagcttcttcttctgccatggcacagccacggcggattcagcctcgctggagacctcgtctggtgttctcgacacctgcccacgaggcacttcttctgacgacaacaaggcctgcaggaagcacaaggaagatagtggtgccagcttcagctctgctcgctccaaggactcaaactcaaaggaaagcagcaaaaggagcggaggaaaaagagacagaagcagcaagaaggtggacgaggaggagcccaaggggtacatacatgtcatggcgaggagaggacaagcaacggacaaccacagccttgcagagagggtactgtgcaccatagcatgcg

SEQ ID NO: 3274 - DNA, 305 bp, Zea mays
  Clone ID: LIB3136-012-Q1-K1-D7
gcgctcaccgcttctcggaccactctatggaaatatctgctacgatcctgcacgagggagggtcgatatctatccatgtcaatatatgaactacaaactatacatgtcagtctgacaaaaacaatgtcataagatcaactgtttgttcattgcatcaactatctctgctctatatggaattgatgatagaggacgatgcacctgcctaggattttcaatactggatgtttcacgtgattcgagacgagcctaactgagtacatggcactgataaaatataccaaggagctcatagtcaggaatgc

SEQ ID NO: 3275 - DNA, 426 bp, Zea mays
  Clone ID: LIB3136-012-Q1-K1-D8
gcggctcgaagatgaaaatatacccaatactgcacaaggtgtaccttgaaagaattcggaggagagcagaaatagatgcatttgcagaggagcttatgccgcatcaaaaagctttattaccagattagtctactgtgcttgaccgagcaatgatcgaacataatcttcttagtgccagtaaactttacacaaatatcagctttgatgagcttgggacattactggagattgatccaaggaaggctgagaagatagcatatcggatgatttatgaggatagaatgcggggctcaattgatcaggtggaggctgcgatacattttgatgatgacacggaagagcatgaagaatgggatcagcacattgctggactgtgccaagccctgaacgacatccttgacagcatgtcaagcaagggaataacta

SEQ ID NO: 3276 - DNA, 395 bp, Zea mays
  Clone ID: LIB3136-012-Q1-K1-D9
ctgcaaggctggggaggaccagtacagcctcgcctcccgcgacggcaaggtctgcctcgtgggcacggaccgtgatgacgacgcgcagcactggatcaaggacatgaagtacagcaccagggtgaaggatgaggaaggctaccctgccatcgtcctcgtcaacaaagccactggagaggctctcaagcattcccttggccagtcacaccctgttcttctgacccgccataatccaaacttcctggaccagtctttcctgtggacagaaagcaaggaccttggggatgggttccggtgcattaagatggtcaacaacatctacctgaactttgatgctttacatggagacaaggaccattgtggtgtgcgccaccggaccgcccttgtgctgtggg

SEQ ID NO: 3277 - DNA, 61 bp, Zea mays
  unsure (1)..(61): unsure at all n locations; Clone ID: LIB3136-012-Q1-K1-E10
cacaccgcgcgagatctntcgatccccgccaaaatccacgacgcccgcgcggcggccatgg

SEQ ID NO: 3278 - DNA, 285 bp, Zea mays
  Clone ID: LIB3136-012-Q1-K1-E11
acgcggatcttctgatggaacttgatagtatgaatgaggaagctaggctgcttgcactaattgggggtgtgcttgctgcaaatatatttgattggaggtctcgagcttgtgtagaactttatcacaagggaactataatagaaatctatcgcatgagtcgcaagaagatgcaacgtccttggcggattgatgactttgacatgttcaaaaagagaatgcttactgataggaaggaccaatcatacaaaagagcactgctttttgttgataactcaagtgctgatg

SEQ ID NO: 3279 - DNA, 272 bp, Zea mays
  unsure (1)..(272): unsure at all n locations; Clone ID: LIB3136-012-Q1-K1-E12
caggtcttcctctcgcgagttgcggtctcgcggccccctccgccgaccgccgcctcctcagaaccggggaagctgcttccctctccattggacgcggccagcttccatctctcggtcacctccctctacatcccacggccgctaccaccttccctctacctcacacggcagccggcctctccaaggtctgcacacgcattcagcgacgcatttgcctatatcagcactgtggtcataactctagtagagaaaggagaagatgcangcatcta

SEQ ID NO: 3280 - DNA, 232 bp, Zea mays
  Clone ID: LIB3136-012-Q1-K1-E2
gaaaaacaacttatcttggccaaaagaataaaagattacggatggataatgaggaatcaatggggttgaggataacatgggaggaagctcaagaattgcttccccctcctcctaaggtcccatccattggtattggtgatggccattagttttaggaatattaagggccccctatactttgaaggaagacttattttgtagcaaataaatcaagtttggaccaataatgggt

SEQ ID NO: 3281 - DNA, 402 bp, Zea mays
  Clone ID: LIB3136-012-Q1-K1-E3
aatgaatcggcgcagacgacgggcccgggagtctgagggaggcgtgccgggcggaggagcccctgtggatcgtcttcgaggtgtccggcaccatccacctccactcctacctccgcgtctcctcgtacaagaccatcgacgggcgcggccagcgcgtggtgctcaccggcaaggggctccggctcaagtcatgccatcacgtcatcatctgcaacctggtgttagaaggaggccgtgggcacgacgtggatggcatccaggtcaagcccgactccaccaacatctggatcgaccgctgcaccctcgccgactacgatgacggcctcatcgacatcacgcgccagagcacagacatcacagtctcaagatgccattttatgcggcacgacaagacgatgctca

SEQ ID NO: 3282 - DNA, 268 bp, Zea mays
  Clone ID: LIB3136-012-Q1-K1-E4
ttggtggtggtcttattggatcaggaatctccacataacataccggtagcaacatcaactggtgtgctgagggaagtataccctaaattttttacatggggactgaaaacaatgatacctaatctatggggcctggctacatgacgtgctctttcaaagaactatatgctcatggccatggacttgctaaagggtgcatctattgatttagatcccaaggatgaatgtatctgcactgaggctgccaatgagacaattcctatgtagc

SEQ ID NO: 3283 - DNA, 370 bp, Zea mays
  Clone ID: LIB3136-012-Q1-K1-E5
aaaaaaggcaagattggactgagatggaaaacagaaaaggaggtgatatctggcaaagggcgattcatctgtggtaataggcattgagatgaaaaacatggtctatgtagttatgaggtcaatttttcttatgttgaagcagacgagcagaaacaagcactagtgaaattggtagcttgcaaaagatgtgcagaaaagcttgcttataagaggcaaaaggagaaagagaatgaaaatgagctccctggtgaaaaggaaattgattttaaagacagctacaagagaaagagaaaacatgtggaaagtgaccacaactcacaggacgagaaatatagaagaaaggaaaaaggatttaaggatgccaaacatt

SEQ ID NO: 3284 - DNA, 444 bp, Zea mays
  Clone ID: LIB3136-012-Q1-K1-E6
cacttatgctgccaaaagcacctgaatctaccatacctggcaaaaatacaactctgtcaatgcctggatcatctgacagattttctacatccgcactgatggaaaggatacctagtagatggccacggcctacatggcatgctccttggaagaactatcgggtcatcagtggtcacttgggatgggttcgatctattgcatttgatccagcgaatgaatggttctgcactggttctgccgataggacaataaagatatgggatcttgcatcaggaaccctgaagcttacactgactggtcatattgagcaaattcgtggacttgctgtcagccaacgtcacacttatttattttctgctggtgatgacaaacaagtaaaatgttgggatcttgaacaaaacaaggttattaggtcctaccatgggcatctgagtggtgtttact

SEQ ID NO: 3285 - DNA, 198 bp, Zea mays
  Clone ID: LIB3136-012-Q1-K1-E7
acgatcgcaaccaaatcaagttacaaataaagtggataaaagtcgaccatgggcgaaggcagggaggaaattatgataactacactaactagcacatactggagtacatgggtatgactgcgaatatggctaagaagcaccttcttaaagtaatgatgaacaatgtatgcataatacaggatcgttgcaacagtactc

SEQ ID NO: 3286 - DNA, 418 bp, Zea mays
  Clone ID: LIB3136-012-Q1-K1-E8
cgcctcctcacgccattaaaccccacccgcgcgcgcggcggccggcggcgagccctcaccggtccgagcaagccgaggaggaagcgagcgcgcgaaagtatcaggaggaggcatgggtaccctggggcgcgcgatcttcacggtgggcaagtggatccggggcacggggcaggccatggaccgcctcggatccaccatccagggcggcctccgcgtcgaggaacaggtttcaaggcatcgtacaatcatgaatatttttgagaaagagccaaggatccatagagatgtgtttgttgctcccagtgcagcagtcattggggatgttgagattggtcatggatcgtcaatctggtacggatccatattgagaggtgatgtcaacagcattcatattggatctggtactaatatacaagac

SEQ ID NO: 3287 - DNA, 391 bp, Zea mays
  Clone ID: LIB3136-012-Q1-K1-E9
cttccgcctccgattgagtggctcaccttctttcccagccagcacgagcttgcaagcaagcgagctgctgagatttcagctcgcttctcctccagaggtcgagcagaccagactcctccgaccgaagctctaccacttcccagttagcctgtccaggaactgcttggccggagatccaaacaaacctctgtgttggggttctccggggttccttgcgcttgaaggaggtttccttctccctggccatggtttggctgaaaagcaacaacggcagcatcttgatgccaaatctctgagctttatgaagatcgccactcacctgcgccgctcctgcttccttcacttcttctcgggtggcttcctctactggctttatgtgaactcataactt

SEQ ID NO: 3288 - DNA, 264 bp, Zea mays
  Clone ID: LIB3136-012-Q1-K1-F1
acggctggaacctttctataacacgttcggggttaactactacaccccacggtcctacgaaagcgtggacatatcaccaaactactgacctgtgctcaacactgacgacgcctactccagtcaagaagttaacgggcctgacgggaaacccattggtccacctatgggaaattcatggatctacatgtaccctgacgtcttgaaggatctccttatgatcaaaagtaacaaataccgaaacccacctatactcatcaccgacaa

SEQ ID NO: 3289 - DNA, 309 bp, Zea mays
  Clone ID: LIB3136-012-Q1-K1-F10
cgagcggcgtctacgccaccaagatctcgcaggaggagtacctcaacgcgccaggcgagacgtactggcgtcaccctcaccgtgccgggaacctacggcttctactgcgagccgcatcaaggagccggaatggtcggcaagatcaccgtcaactaattaagctagctatcgatcgatatccattcatgtattagctgttgcttcctgctttgtactccgccgatctgtccatctctacatgttttcgtcttcacacaacaacctctgctacgactacgtatatatgcatgctactagctaattgatttt

SEQ ID NO: 3290 - DNA, 391 bp, Zea mays
  Clone ID: LIB3136-012-Q1-K1-F11
gcggtctggggctcgggctgctgccagcctcgcccgatcgggatggcaagtgccgccagcggcaggggtcatgcagcgcggccggggatgctgtggcggccccgaaggcggaagaaggaggcgggctcatgaagacgctgtggctcggctcgctcttcggcctctggtacctgttcaacatctacttcaacatctataacaagcaggtactcaaggttttcccataccctataaacatcacaaaagttcaatttgctgtcggaactgtagcagctctgttcatgtggatcactggtattattaaaaagccaaagatttctggagcacaacttgtagccatcctacctctggctattgttcatactatgggcaatctcttcaccaacatgag

SEQ ID NO: 3291 - DNA, 377 bp, Zea mays
  unsure (1)..(377): unsure at all n locations; Clone ID: LIB3136-012-Q1-K1-F12
ggaatntcccgggtccgaccgcacgccccgtccgcggagcgnnngtgggtcccagattgggggtgcgatctatgtcggtctggtgacccagaggatatttcctgacgncgcnttcggcgtatgcatctgtccgggcgggtggacagatcccctgtacctgtcacagccgacaccggccccggcgttcaaggggggtcggcgccccatcaacattgtctcgatctgtctccaccacggtgctgcgttgggcgcctggggtcccgtggagatcnttcatgnagccgccacttgcccgcttctggtaccgcctaccgcgtgccggcttcaagtggcttggagcgcttttgctctacaccaaaacaccatcgttgtacccc

SEQ ID NO: 3292 - DNA, 349 bp, Zea mays
  Clone ID: LIB3136-012-Q1-K1-F2
cggacgcgtgggctcgcccgcaacctgcgcttcgcctccaacttcgacctcttcaaggccggtgcgggggactggcgcgacacgctcttctgctaggtggctccgaacccgccgccgcgggaggagctgccggagccactgaggaacgtgatgctggagtacggcgcggcggagacgaaactggcgcggttcgtgttcgagctgctgtccgagtccctcggcatgcccagcgaccacctgtacgagatggagtgcatgcagaacctgaacgtggtgtgccagtactacccgccgtgcccggagccgcaccgcaccgtgggcgtcaagaggcacacggaccctggctttt

SEQ ID NO: 3293 - DNA, 305 bp, Zea mays
  Clone ID: LIB3136-012-Q1-K1-F3
gcagaactcgtcgtcggagggcaactcggggtccgccgccgaggtgggctgcgtgggggaggtcgtcagagcatgagcgcttcgccgatgaccggttcttcctcatctgcaagggccagcagaggttccgcgtcgcccgcgtcgtgcgcaccaagccctacctcgtcgccgccgtgcactggctcgaggaccgcccgcccgccgtgcactggctcgaaggaccgccgcccgccgagcccccggcacacgaggaggacgccgaggcgctggccaccgacgtcgaggccctcatgcgggatgtcata

SEQ ID NO: 3294 - DNA, 359 bp, Zea mays
  Clone ID: LIB3136-012-Q1-K1-F4
gccagtacctctacgacggcctcgtgctcttcgcccccttcacaccacgttttggtggatcagtggacgagaacgcactcctcgaatttattgatgctgggcatgacatgatcctggcggcagattcctctgcctctgatctcattcgtggcattgcaacagagtgtggggttgattttgatgaggatccagaggcaatggttattgaccatatgaactatgccgtcacagatgttgaaggtgatcacaccttgattgctggtgatgatcttatccattcggacatgatactagggtctgaaaagattgaggctcctgtattgtttctaggaattggacacatggctaatccatcaaac

SEQ ID NO: 3295 - DNA, 437 bp, Zea mays
  Clone ID: LIB3136-012-Q1-K1-F5
gctcgccggttcctataacatgttggggttaaactactacacctcacggttctggaaaaacgtcgacatctcaccaaactactcacctgtgctcaacactgacgacgcctacgccagtcaagaagttaacgggcctgacgggaagcccattggtcctcctatgggaaatccatggatctacatgtaccctgagggcttgaaggatctccttatgatcatgaagaacaaatacggaaacccacctatctacatcaccgagaacggaatcggggatgttgataccaaagagacacctctacccatggaggctgccttaaatgactacaaaaggctagattacatccagcgccacatcgctactcttaaggaatcaatagacttgggatcaaatgtgcaaggctacttcgcttggtctctgctggacaactttgaatggt

SEQ ID NO: 3296 - DNA, 408 bp, Zea mays
  unsure (1)..(408): unsure at all n locations; Clone ID: LIB3136-012-Q1-K1-F6
cccaaaagcgcgcgagggtcaaggctggggtttggagcctcacgaccctccttactatcatgttcagttacaaggtggctgagattatgcccctgccagtcaaacttgttgtctggtcgatggcagccgctaccacctgtggcggcttctacgctttcttcgtccacagcgagaagcctgtcatgccagcggtggcgccacggcccgccgcggccaaggatgcagcctccaactaggttcgtttgccaccacaaggcgcatactgccggccttggttcggcaccgcgcgttagatcccagggccaactaggttgttctctaatacctaatgtcttggccttttctcttccactctccgccattntagctgtcgcctcggttgttatagcttgccggcgtggacagact

SEQ ID NO: 3297 - DNA, 185 bp, Zea mays
  Clone ID: LIB3136-012-Q1-K1-F9
acggtactccggtccgatccggtcctgtgtgagccttatgtacgtgcaattttaatgtcttttgagtattgcaagactcgacggttggcggtgtaaaaaaataaaaaacaaagataaactaatcaacaaaaaaaaaacttataaaaaccttaactaacctactaaataataaaaaacaaaacagg

SEQ ID NO: 3298 - DNA, 359 bp, Zea mays
  unsure (1)..(359): unsure at all n locations; Clone ID: LIB3136-012-Q1-K1-G10
gcgacttccaccgcgccaagtaccagctggagcacgtggtgcgcacgcacaagggcgcggaggacggcgccttccgctccgtgtaccaggaggaggacgagcagcggatcaagggcctgtccatcagccgcgacctgctggaggtgggcggccacgcgctcaagaccaacatcaccacgctggggcccctggtgctgcccttctccgagcagctgctcttcttcgcgggcgtgctgttccgccacctgttcccgtccaaggcctccacgccggcgccgccgaccaccccaggggacgcctcggncgccgcgccctacattccggacttcaagcgcgcgttcgagcacttctgcatgcac

SEQ ID NO: 3299 - DNA, 351 bp, Zea mays
  Clone ID: LIB3136-012-Q1-K1-G11
tttcaatagatggaagagtgtcgaatggttcttcagatactatttcttggtctgttgaagaggctggacccaaatgcaagttttgctcaaatgtggcaaaaatgatagtcacattaattgtcagcacgcctgcttccaacaaagttctagagaaggagaagatgaatgaaactcacattttggtggccgcacaaacgtggggacttgaattcatatatatttggttaggctcaacattaacgcaaaccggtgatgaccaagtttttcaattagtattttaatttaaaattaaaggacacttatatatgagttatttgaccatgcttatttattagatattgaacgacactt

SEQ ID NO: 3300 - DNA, 365 bp, Zea mays
  Clone ID: LIB3136-010-Q1-K1-G4
cgaaaacaagcagagagagaaccccagcggtcaaacgcctcccccccccccccccttgccgtggggccccaaatccggccatccgggtagctccagcccttctccaatggcagtcaaggtctacgtcgtgttttactccacctacgggcacgttgccaagcttgctgaggagatgaagaaaggcgccgcttcacttgaaggcgtggaggtcaaagtatggcaggtcccggagattctgtccgaggaggtgctcggcaagatgggcgcgccacccaagaccgacgcgccggtcatcaccccgcatgagctggcggaggccgacggcgtcctcttcgggttccccacgcggttcggcatgatggcgg

SEQ ID NO: 3301 - DNA, 442 bp, Zea mays
  unsure (1)..(442): unsure at all n locations; Clone ID: LIB3136-008-Q1-K1-G10
cggacgcgtgggttttgctgcaaatctttctctgaattgtgggtctccgacaatggcggcgctcgctccatccaagattctgggcacccagctcaacttcgcgggctcctcccgctacgccaccgcagcgcccaccgcgggggctcagaagattgtctcccttttcagcaagaagcctgcccagaagcccaagcccgctgcggtatcgtcctcttctccagacatcagcgacgagctcgccaagtggtatggtcctgacaggaggatctacctgccggatgggctgttggaccggtcggaggtgccggagtacctcaccggagaggtccctggagactatggctacgacccttttggcctgngcaagaagccagaggacttcgccaagtaccaggcctacgagctgatccatgccagatgggccatgcctcgtgcccgctgc

SEQ ID NO: 3302 - DNA, 425 bp, Zea mays
  Clone ID: LIB3136-008-Q1-K1-G11
actacctgatactatccgtcaacacgccgcgctacgcgcaccacaacaaccacggcgacggtgccatgaacttcatgcaccgaaactaggaggtgtactactacccgaacaggcacgcgcctttgccttaggcaaaaccaaccacgccactgtcggccaaacagttcacgggaaggaaggagaaggcaaccatacgcaagcccaacgacttcaagcagacaggggagacgtaccgctcctgggacgcctaccgacaggaccgattcatgaagcgattcgccgactcgatcggacacccaaaagtcagtcaggagctcaggtccatctggatagacctcctcgacaagtgcgacgcgtcgctggcgatgaagattgccacccggctcaacatgaagccaaacatgtgatgcatcatgcttgtgctg

SEQ ID NO: 3303 - DNA, 442 bp, Zea mays
  Clone ID: LIB3136-008-Q1-K1-G12
cgcctccctggtacgcttcgtgccgccgccgcaacctcctcctccccgtcacagatggcagggcatttaacataaatggctgactcagaggacattcagcccctagtctgtgacaatggaactggaatggtcaaggctggctttgctggagatgatgctccccgtgctgttttcccaagtatagttggtcgtccacgccacactggtgtcatggttgggatgggacagaaggatgcttatgttggtgatgaggcccaatccaagaggggtatcctgactttgaagtatcccattgagcatggaatcgtaagcaactgggatgacatggaaaagatctggcatcacaccttctataatgagcttcgtgtagcaccagaagagcacccagttcttcttacagaggctcctcttacccttaggctaacagggaaaagatgacaca

SEQ ID NO: 3304 - DNA, 409 bp, Zea mays
  Clone ID: LIB3136-008-Q1-K1-G2
cccacgcgtccgctggggggccgatccacacgagggcgatcctcgcgctcgccgccgccgtgggtggacgacgaggacgacttgtccttcatggtggctttcacggcagccaactcggtttggaaaaactgcatcagctccatgaggtccttgatggtgggctcagccatggtgatggagtggtcggtggaggcggtgggcgtggaaggggatggtggagggcaagggcgggtgggtgaggatcgacgtgacgctgataccaggttgtcaagcgcctcgacgcccaacgtcgctgcaccgcggctacgcagttcgtagtcgcgctctagaccttcaccgtgagggattcctcaccggtggcttgagagaggcaagggagaagagcagttttggataattgatctttctt

SEQ ID NO: 3305 - DNA, 448 bp, Zea mays
  Clone ID: LIB3136-008-Q1-K1-G3
gccggccgaagcggcggacccaccataaattggtgctctctccgtccgaagtgctctctgaggatggccccccaaatatcccagccactgccgtcgtgcagtcaaagtgtcaaaccatgccggcagtagcgttcgcgtcggctcctgccatattcgcctccgcctccgcgcgttcctgccgcagcgcggctccgggcatcctttcctccgactccgggcggccccgccgcggcgcgcgtggcgccgtccagtgtgaggtcgcctcctcctcggcaccgtcggcggctggaccccaggccgcccggtgggcccagaggaccgtggtcatcccgccacagcgccgcgggtgccacctcatcaccaacaagatcgtaaatgagatagggaatgacctggccgacttcaagtgtggcatggcgcatctgttcttgcagcacacaagtgcgtc

SEQ ID NO: 3306 - DNA, 395 bp, Zea mays
  Clone ID: LIB3136-008-Q1-K1-G4
gaggcgcagaaggcagtcgcggacaggaggaagaggaagaagaagcggcagcgagcgaggatgccgtgcctgaacgtgtcgaccaacgtgaacctggagggggtggacacctccgccatcctcgccgaagcctccaagtccgtcgccaacatcatcggcaagcccgaggcctacgtgatgggttgttctcaagggttcggtgcctatggcatttggaggtacccaggagccagcagcttacggtgagctggtttccatcggaggcctgaaccctgatgtgaacaagaagcttagtgctggcatcgcttctatcctggagtcaaagctgtctgttcccaagtcgcgcttctacctcaagttctatgactcgaagcgctcggaccttcgttggaacg

SEQ ID NO: 3307 - DNA, 460 bp, Zea mays
  Clone ID: LIB3136-008-Q1-K1-G5
cgaataccggggcgccgacgcgtgcgaagattttcgtcattgaaggtctgcacccaatgttcgatgagcgagtgagggacctcttaggggtcagtatctacttggacatcagcgatgaagttaagtttgcatggaaaatccagcgggacatggcagagcgtgggcacagccttgaaagcatcaaggccagtatcgaggccaggaaaccagattttgatgcttttattgatccgcagaagcagtatgctgatgctgtgattgaagttctgccgacccagttgattcccgacgacaacgaaggaaaggtgctgcgtgttaagctcatcatgaaagaaggggtgaagaacttcaacccggtttatctctttgacgaaggatcgaccatcagctgggtgccttgtggaagaaagctcacatgctcttaccctggcatcaaatttgcctatggcccggacaccta

SEQ ID NO: 3308 - DNA, 438 bp, Zea mays
  unsure (1)..(438): unsure at all n locations; Clone ID: LIB3136-008-Q1-K1-G6
ggtaacttcatggtttttagcattatgttcttttccttccagacttatgttctatactttgggaaacattgttctctggtattagataaattttcatggtctactgacatttgaatgcagcacaccattccccttcccaaaacccatgcatgtggtcgtgggtaaacaattgaagtcaataagattccccatcctacaattgacgagattaatgaagtccatgaacagttcatcattgccatgcgggacctctttgagaagtacaaggcgaaagctggatatcccggccttcatctacgagttctatgacattccacaaccagactcaaagttagaattcagcaataacatggctctattactncttcctcaactggggtgtcaaactgcacctcgcangcacttcgggcgtagttgttgcattatggtgatgataat

SEQ ID NO: 3309 - DNA, 431 bp, Zea mays
  Clone ID: LIB3136-008-Q1-K1-G7
caggttgcgaggaccgctggagagcctatctcaaaacatgccgccatggcgcatgttggcggcaggttcgatgctgacgagctcgtcacggaagacagcgcggaggccagttcatccagtgacaacaacaagaccaccgaggttgagaagccaaagcactggacaaacaacatacccaaggttctcatgatcggcggcgccatcgccctggcttgtaccttcgaaggtggattgctgaccaaggccgccatattcggcacggcaaggaggtttgcaggggcaagaaggcggtaagtggatggagctggtcaccctagagcaatgccatgctaatcatgtgtagcaaagcgttggcttgatgggatgcctgaagtgccctaagcagtcctttttgtagcaatgcactgcagaggacagaatgccttgtctag

SEQ ID NO: 3310 - DNA, 443 bp, Zea mays
  unsure (1)..(443): unsure at all n locations; Clone ID: LIB3136-008-Q1-K1-G8
ggggggctcgtgggctcgtcggcgccctccgctaggcacgcccgggcacccatgctggacgagagccagatgcacctacagagcttgatgagctcgctggctgatgccggcggcatgttcggcggcgccaacagcggcagcatgattgacccgaggatgtatgacatgaaccaagatgtgaagtttagccagggccgtggtggcgctgagatgacgcgcgacttccttggcgtcggcggcgatggtgtcatgagaggcatgacagtggcgagagcggggcaccaagacggtgccggtgacatgagctccttggaggccgagatgaagtcggcctcgtcacccttcactggagacaggatgcaataagagttcccaataagagaaccttgtgtgctcgcatagtgagcgagtcctgtgcagcctgccatgcatgcacncatggg

SEQ ID NO: 3311 - DNA, 320 bp, Zea mays
  Clone ID: LIB3136-008-Q1-K1-G9
cggacgcgtgggcggcgcaatgttcctgtagaccttgtgtataaatttgctccagatgtgagcatgttagatgcttatgagactgttgaatcatggatgatggcgagaaacaggttgaatccagggaaactcataccagcaatgatgcgttatgtgagcgaaccacatgcaaagaatgaaacacatgaagttatcaaatatttggaattttgtgtgaaagatttgaacaatgtggaccctgaagggcataatctattgctatctttatatgccaagaaggaggatgaatcccagcttttgcaatttctcgacacaaaatt

SEQ ID NO: 3312 - DNA, 174 bp, Zea mays
  Clone ID: LIB3136-008-Q1-K1-H1
gtcgcccacgcgtcgaagccccactcccccagcctcgaaggaccttcagaacccagaatctaaggcctcagcgttccatcttcctgcccgggggtcgcctgagatcacataaacaatggtgaaggctgttgctgtgcttggtagcaccaatgggtgtaaagggcaccatctttt

SEQ ID NO: 3313 - DNA, 321 bp, Zea mays
  Clone ID: LIB3136-008-Q1-K1-H10
atttggtttggttgtttgtttggtggacgccttgcttttcacttcaccggaaaccaagggggcatccatcaagatccctccttgccatcttcaccctccttcttcttcctcctcctcctcctccatggccaccatctgcccaaggccaggcacaaggcagtcgtcggccttcaagttcaaggcctctgctcatgggagcggttcctcaccacacatctccttcactgctgtgacaggcaagaaggttaaggtgttcgaggaccagctgagagggatcgtgtgctacagagactaagacggggagatggtctgcgaggggta

SEQ ID NO: 3314 - DNA, 214 bp, Zea mays
  unsure (1)..(214): unsure at all n locations; Clone ID: LIB3136-008-Q1-K1-H11
atgacgcacaggntatctaataacttattgtgtcccttaggggacactgtgctctgaacgggggtgtttacaagattcagaccaacctgttaccctatacgaggatacactttatgctttctttgtacactctacacatatctgttgtgaaagcctatcacaagcacatctctgtgggtgtgataacaaacacagcgttttagacctattttat

SEQ ID NO: 3315 - DNA, 299 bp, Zea mays
  Clone ID: LIB3136-008-Q1-K1-H12
gtttatcactgttgatggcttcaacaataacgggcataccgaacacactatgggagttggtggaaccatattcacgaatcgatagtgctaaaagtgttgcacttcttgctgtggtgattcttatcctttcaaacgtggcctctaatgttcctacagtcctattgctcggtacaagagtggctgcatcagcggcttcgatttctcatggttcagagaggaaagcctggctcatccttgcatgggtcagcaccgtggctgggaacctcaccctcctaggctctgcggcgaatctgattgtc

SEQ ID NO: 3316 - DNA, 438 bp, Zea mays
  unsure (1)..(438): unsure at all n locations; Clone ID: LIB3136-008-Q1-K1-H2
agctcgtcctaatgatgagcgaagagagaagctacatgatcgcgagaaggataagcggcaggagagaacaagaagattctggatgcaaagcaactaattgatatgatcccaaggacaaaggaagagctttttgcctatgatataaactgggcgatatatgacaagcatgagttgcaagagagaatgaggccttggatttcaaaagataattgaatttcttggcgaggaggaatcaactttggtggactatattgtttcctgcaccaaagaccatgttcaggctgaaaagatgctagatcttctacagtcgattttcgatgttgaggccgagatgtttgtcctcaagatgtggaggatgcttatatttgagatcaagaaagtcgaatctggactatcangaagagcaaagtcatgaagcgaagcctgttaccctgtatg

SEQ ID NO: 3317 - DNA, 395 bp, Zea mays
  Clone ID: LIB3136-008-Q1-K1-H3
cggacgcgtggatcgtgcgccaaggcgcgaaccctatccgagatcagatcggaggcgagcgcgaccaccgaccggaggaagaggacgacacgatgctgcgggttgcggcgagaacgctctcgtctttcctcttctggcgccccgccgcggcggtagtcaggggccccctcggcggcgctggcgttcccgaccggtacgacgactcggctcgcggacggagccagtcgtggatctacatccactaccacttctttgtcgcttccaggggttgctcttctactgaaacagttgtcccaaggaaccaagatgctggcctagctgaccttccagcaactgcggctgctgcgaagaatgctaaccctaacgacgtttatgatgagtacaaccatgaacga

SEQ ID NO: 3318 - DNA, 448 bp, Zea mays
  Clone ID: LIB3136-008-Q1-K1-H4
attggagcttcattgcacaaccttactgatgcatatcatggaagcaggcgcagcttaagcgcgactatggatatcatgaatcagctggagagtaaagtcgatggacgacgcagtcagaacctcaggtcactatcatttggaaattcaagtcctacatcaccagcatcatatgcccaaaatggtcttggaaactatgctggacgtgaacacgtatccctcgatgttcctagaggaaggtacaagacgactagtttgcctgttcctggtcttggttcaagcagaggttatcagttgttgggtggctcatataatggaaaccatgatatgatctcaaccaataccccacaaaacatggctggaattcagacaggaccagcttggcttgaaagtgacgctgaggcaagcacatatttggaatcaaaggatgaagttcatgattttgcaagcc

SEQ ID NO: 3319 - DNA, 192 bp, Zea mays
  Clone ID: LIB3136-008-Q1-K1-H5
cggacgcgtgggctgccaacggatgggtgcaatcctatggatcacgctgtgtgaagccacgcgagtatctatggtgatgtcagccggccgaaccccatgactgttttctggtccaagatggcacagagcatgacccctcgtcccatgaagggaatgttgactggtccggtcacaatcctgaactggtcattc

SEQ ID NO: 3320 - DNA, 407 bp, Zea mays
  Clone ID: LIB3136-008-Q1-K1-H6
atgttgtacaggtcatctcatcccttactgcctccctgaggttcgatggtgctctgaacggggatgttaacgagttccagaccaacctggtaccctacccgaggatccacttcatgctttcttcgtacgctccagtcatctctgctgagaaggcctaccacgagcagctctctgtggctgagatcaccaacagtgccttcgagccatcttccatgatggccaagtgcgacccacgccatggcaagtacatggcctgctgcctcatgtaccgtggtgatgtggtccccaaggatgtgaatgctgctgtggccaccatcaagaccaaacgcaccatccagttcgtggattggtgcccgactggcttaagtgcggcataactaccagcctcctagcgttgtgcctggtgg

SEQ ID NO: 3321 - DNA, 443 bp, Zea mays
  unsure (1)..(443): unsure at all n locations; Clone ID: LIB3136-008-Q1-K1-H7
gcagctggccttcaccgccaccttcttcgccggcgtcttccaggcgtccctgggattgctggggctgggcttcatcgtggacttcctgtccaaggcgacgctgacgggcttcatgggcggcgccgccgtcatcgtgtcgctgcagcagctcaagggcctgctcggcatctcccacttcacctcccacatgggattcctcgacgtcatgcgctccgtcgtcaaccgccacgacgagtggaagtggcagacgatcgtcatgggctccgccttcctcgccatcctcctcctcacgcgccaaatcagcgccaggaatccaaagcttttctgggtatcagcaggtgctcccctggcgtcggtgatcatctncaccatcctctccttcatctgaaaatcccccagcatcagtgttatcggcatcctccccaggggagtgaacccttctt

SEQ ID NO: 3322 - DNA, 426 bp, Zea mays
  Clone ID: LIB3136-008-Q1-K1-H8
gaagataattgatccagtgtgcgcaaggcatactgctgtgctaaaagaccagcgtgtgatcgtcactcttacaaatggtccagaggagccatttgttcgaattttaccaagacataagaaatttgagggtgctggaaagaaggctacaacctttgccaacagaatttggctcgattatgctgatgcggcagctattaacaagggtgaggaagtaacccttatggattgggggaatgctattgttaaagagatcaaggtggagagtggagtaattactgaactagttggagaactgcatcttgaggggtctgtgaaaacaacaaaattgaacatcacatggctagcagatatagaggagctagttcccctttcattggttgaatttgattacctcatcagcaagaaaaagctagaggaagacgagga

SEQ ID NO: 3323 - DNA, 422 bp, Zea mays
  unsure (1)..(422): unsure at all n locations; Clone ID: LIB3136-008-Q1-K1-H9
ggcctncctctcctctgccgccgncaccgtcccttccttcgccgcaccagcgccagggcgcgccgtggtcagaaggaggtccttcaccgtgcgcgcctttctccgcaaggccaccggcaccgccgncgtggcaatggctgccagcgccctgcttgccggcggtgccatggcccaggaggtgctgctgggcgcaggcgacggcgggctcgtcttcgagcccagccagttcaccgtcaaggccggcgacaccatcacattcaagaacaacgccggcttcccgcacaacgtcgtcttcgacgaagacgaggtgccgagcggcgtcgacgccaccaagatctcgcaggaggagtacctcaacgcgccaggcgagacctactccgtcaccctcaccgtgccgggaacctacggcttctactgcgagc

SEQ ID NO: 3324 - DNA, 353 bp, Zea mays
  unsure (1)..(353): unsure at all n locations; Clone ID: LIB3136-009-Q1-K1-A1
ctccagtccntccggttttctagggtttaaagagcttgccgagcccgccgtgcgccggccggcacgggttcactactttccggcatcgccggagccgaccccttcgtctccgcacgcggcaatggcattctccttcgcctcgccggctgcgtcgaaccctctccagacgccggcgacgccgaatcccttttaaacaccgggtccgggcacctcgcaggcgccattcctatagcctttgccggttcaaatcaactttcagcagaagccgcagccacagcagcagttggcgccggcggcgcaacctccgcagncgcagncgcagncgcagtcgcagacgcagaaactgatgctgt

SEQ ID NO: 3325 - DNA, 282 bp, Zea mays
  Clone ID: LIB3136-009-Q1-K1-A10
gacccacgcctcacgcgacaacaaccaaatctaattctccatacactctatttattcatacacattgccaccctcgccgtcttagtgcaaaaaaagagccatcccaccctaaatctacatccacgacccgagccacgcaccgaagaagacaacaaccccctcgggaatcaagctaacccccccgacgcacgagacctcgcaagacaagacccagaaggccaccttcccccgctatgattactacatgcaggtctattaccaccgcttgatccttatctaccc

SEQ ID NO: 3326 - DNA, 386 bp, Zea mays
  Clone ID: LIB3136-009-Q1-K1-A2
tgaagaatcgggtgattcacatgttagtggagagtttgcggcttttattagtgcacttcctgggcgggaagcataaacttcgaatcaatcatcttcacagaataccagacaaaaaaatttagcaccaactggctgtggttgccccccactgggaaacttccagcctagttctgcttcagccaatgttattgcagtacttcctgatggcttccatggcaaatcaacgtctgggcagccgttgcctttgattgagaggtggaagtcaggaggagcttgtgactgtggcggatgggatgaaggttgcatgctgagtgtcctcactgatgcggccgaagaaaatgatgccgttcatgctaaccaggcaaaagatgggagccagcgatttg

SEQ ID NO: 3327 - DNA, 313 bp, Zea mays
  Clone ID: LIB3136-009-Q1-K1-A4
ggacgcatttaaacccaaatcaagccaccaccctctcctcctcctcagcggcgagcaccaccggcaagagcgagacacgatgaggccgatctttatgaacggccacgagcgcccgctcacgttcctgcgctacaaccgcgacggggacctcctcttctcctgctccaatgaccacacccccacagtctggtacgccgacaacggcgaccgcctctgtacctaccgcggccacaacggcgctgtctggacctgcgacgtctcccgcgactcggcgcgtttcatcaccggatccgccgaccagaccgccaagctc

SEQ ID NO: 3328 - DNA, 385 bp, Zea mays
  Clone ID: LIB3136-009-Q1-K1-A5
gcatggaattaggagcagaccggagacttgggggcttcacctgctgtatctcattaccaggtgcatctggttggccgttgattcacaaggaggagctgagggccatggcgaccgagaagcccatcctgtacaacgcctggatcagctcctgctcccaccgtgttcgcatcgcactcaacctcaaaggtgtggattacgagtacaagtcggtaaaccctaggacagatccagattatgaaaaaatcaatccaatcaaatatattccagcattagtagatggggacatagtcgtttctgattctcttgccatctcattgtatttggaagataagtatcctgagcatccactcctgcctaaagatctcaagaagaaagctcttaatct

SEQ ID NO: 3329 - DNA, 389 bp, Zea mays
  Clone ID: LIB3136-009-Q1-K1-A6
cggacgcgtgggcggacgcgtgggcggacgcgtgggggattcctcttgtcgcctcgctggggtccgagatcatcgcggcatacctcatgccccccatcgagtctggctcggttgatttcgccgaatttgagccccagctcgtttactgatcctgtacaaagatttatcctcgagttattcaccctgaaagacaagctggtggtgctttctgccgaaggggccttgaatgaatggtgaaaaccgctggatggttagaggatctgcatattcttgtgttcttctgtaaaatactgagacttgtgcagcataaaaagtttggcaaatttctgttgtgtggcatctccatgtaagtaacagtggactgcatgcagaagcgagcgtcccagttt

SEQ ID NO: 3330 - DNA, 287 bp, Zea mays
  unsure (1)..(287): unsure at all n locations; Clone ID: LIB3136-009-Q1-K1-A7
ccacattccatccatcttcacggtgaggctcgagcgatccgagaagggaaatcatccgcgtagcagcgacgcatgtttgttctctgatctctctgcatcttttatcagcagtgacgcagcacaacacacgaaatggtccgtttcattatgctcttctcntgggccttttagaatcctcatgataagcgtgttcttgggttaggattcttctgtgacctcatcacacctctcctagtacgaacagacatccacagaacctacattctcttctggatccttgacgtctt

SEQ ID NO: 3331 - DNA, 324 bp, Zea mays
  Clone ID: LIB3136-009-Q1-K1-A8
cggacgcgtgggcggagaaggaagagccagtgaagaaagaggctgagtctcacatcgcaacgaggaaggcttagagaaggggctctatcttttgtgattggcttagtacaagttttggctgattgtttgttgtctcatactgtttacctgagtattgtttgcaagtgctttatcactgtccgaactgtgcatgcaattcactggtctagagaattgttcgtggattgtttcatatttgtgcgtatggctcatgtctgttgctttgctttaatctgtaccgaacattaagtgtagcattaacaatctgaagcgaacattaagagt

SEQ ID NO: 3332 - DNA, 297 bp, Zea mays
  Clone ID: LIB3136-009-Q1-K1-A9
gcgagaacacttggttctaattctcgtcagcccctataagataacgcccatcttcacgggtcacgagaagcgttcgagctccttccacgggagaaatggtcaccgttcactacctccccgcatcttatgcctatgctccctccgcgcctgcgtacctttcctcacccgactacacacgtatctctcgctccgagccctcttcccacgtgcccatctatgtggctacctgcctttcgcctccccactcgcttcaggcggatacgggacctgggcggcgacttctttgtctttctcaga

SEQ ID NO: 3333 - DNA, 359 bp, Zea mays
  Clone ID: LIB3136-009-Q1-K1-B1
ggacaacggctgcatctcctgcatgtgccacaactccgacatgctgtacagcgccaggcaggccgccgtcgtgcgcgcctccgacgacttctacccgcgcgacccggcatcgcacaccgtccacgtcgcctccgttgcgtacaacaccgtcttcctcggcgagttcatgcagcccgattgggacatgttccatagcttgcatccggcggcagagtaccacggcgcggcgagggccatcggtggctgcccgatatacgtcagcgacaagccggggaaccacaacttcgagctgctcaggaagctcgtgctccccgacggctccgtgctacgcgccgcagcttccggggcggccacacgcg

SEQ ID NO: 3334 - DNA, 302 bp, Zea mays
  Clone ID: LIB3136-009-Q1-K1-B11
cggacgcataggccgacaccttgggaaaaggttaagcatgtcctctagaaatacttgaatagctggaggtacattcatttcaacggctagcgcgttcgcatgctgaaggactgaccattggcgtaatgcccgttttcttaaaaatgctcgaacctatcacagtatcttgccggtaggcggtatggcaggttagatgctgttactgccgctgtgacagtcacgcacattgatatcggcactagtccctatcctatgtatgtggaatggaacggaaactggagattggtttcatggctctagcc

SEQ ID NO: 3335 - DNA, 340 bp, Zea mays
  Clone ID: LIB3136-009-Q1-K1-B12
ctgtgcacaaacaaaaatgctactatcagcactctccctgagttctttccctgaccgaccccgaccgcttgcatgcatcaccagcatacgtctcttctaacctacccgccggcgcattatcgttacacgaccgagacccgcactcatcgccataactgcatggccgcttcgtcctcgctggcgctgtctctgctcctcttcgcgacgatgacggcgctgtctttcctgcctccgcgcctataaatgcttacccgcctgttcccaccggtagatgcggcggtgaccaggcctacgacctccctctttttcgtcatacgaatgtgaagacaaaggcgtcctt

SEQ ID NO: 3336 - DNA, 361 bp, Zea mays
  Clone ID: LIB3136-009-Q1-K1-B2
cgagaagatcccgaagcgcagcaggaactccagtggtaggaagggtaagcaggggaagaaggaaacccctgagaccgaagaagccaaagatgctgaaactggcaaggaggcagaggaggccccaagcgaagatgccgcaaaggagactgatgtggagatgaagcctgctgaagaggtgaagggggcctctgctgaaacagaagatgctgacatggctgatgctcctgcaccagcaccaatggaagaagataagaaacaaactgaagaactggcagaagctattgcagctcctcctgtgccatcggaggagaagaaagatgtcaagccagctgagcctgaagctgcagcaagcaacccaact

SEQ ID NO: 3337 - DNA, 359 bp, Zea mays
  Clone ID: LIB3136-009-Q1-K1-B3
ggtatccgcagagagtttgttccgtccaggcaaccagaaagcaagttgccccgccgcgcaggggaagaagagagcagaggaggatggctcgtacgaagcagaccgcccggaagtccacgggaggcaaggccccccgcaagcagctcgccaccaaggcggcgaggaagttggcgccgactaccggcggcgtgaagaagccccacaggtacaggcccggaacagtggcgctgcgcgagatccgcaagtaccagaagagcacggagctcctgatccgcaagctgtccttccagcgcctggtgcgcgagatcgcgcaggactttaagacagacctccggttccagagccacgccgtgctggcg

SEQ ID NO: 3338 - DNA, 271 bp, Zea mays
  unsure (1)..(271): unsure at all n locations; Clone ID: LIB3136-009-Q1-K1-B4
ccggcgcaatacacggtacactctcagatccgtttttaccaccgcagatccgacattatccaagcggagggaccttttcttttttgttttacacaacggtacatacaaaggtgtcattcagccaaagccacgcaccgcttttaccgatcggcgttgccgccaccnttagcattgtcngcttcanctccatccaaatccaccgccagcaagcaagccggctccatgtgtctgccgatgaagaggganaggcactctgaggctgatcttaacc

SEQ ID NO: 3339 - DNA, 346 bp, Zea mays
  Clone ID: LIB3136-009-Q1-K1-B5
gcgcgccgttgcagcagatggggagagagtgtggcatagcgagcgagctagagagcgcgggtcatggcgtcactgtctgtcgactcctaggcggccaccatagcgatgccaagcagcaaccttgggagaggtcgccgcttcatggtcttgttcatggccacccataaggtccagaagcccacgcccaataccttgtacggcacgagaagatcgcacactacgacggtgttccctgtgggctagccgatctccctgacggtgacgacgagcgacaaaacgccggataagctgatgacgaacgtgcttaagctgcggttgctgactaaggcggagctctcgggcctgc

SEQ ID NO: 3340 - DNA, 380 bp, Zea mays
  unsure (1)..(380): unsure at all n locations; Clone ID: LIB3136-009-Q1-K1-B6
gaccggttgtgtcaaggtattgattgtcgatgatggtagcactgatgggacctctaaagtggctttcagttttgtaaagcaacataagattgataatgttagagttcttctacttggaagaaatcatgggaaaggtgaagcagtccgaaaaggaatgcttcattcacgtggtgaactattactcatgcttgatgctgatggtgcaactaaagtgaccgatttggaaaagcttgaagctcanattcatgcattggctaagaaagctaagtctagcccagggacatctagttcatctcagaatctatctgatgttgaagttgctgtttttggttcccgggctcatctagagaagcaggctcttgcaacanggaaatggtata

SEQ ID NO: 3341 - DNA, 391 bp, Zea mays
  unsure (1)..(391): unsure at all n locations; Clone ID: LIB3136-009-Q1-K1-B7
caggcactctggtcangaaatcagtagcctgttttggctgctgttgctaatcagtggcgagagggagagatggccggggggaacatcggagtcgcagtggacttctcgtcttgcagcaaagcggctttgctgtgggcgttggcgaaccttgccaggaacttcttctggctcatactcatccacgtgaacagctcctgccagaccgagcggggcgccgttcatctctgggagcagagnggttccccattgatccctctggccgagttttcagacgtcgccaggacatactgtgtgtcaccggacaaggagacgatctatatcctcacttgagcgtctaaccatacatgggtatggatgggccgtggcttcgttctattcattcacagctttt

SEQ ID NO: 3342 - DNA, 419 bp, Zea mays
  Clone ID: LIB3136-009-Q1-K1-C1
gcgctcgcaagcgcgcccgcctccgcaaggaggtgctcctcgccggcgaggactggagctgggagccttcccgcggggagatgcgtaccaagcgcaagggccacaagtgcgaccgcatctccgccgagaagcgagcaaatactgttgagctgatgaagaagatgccccagatgctgctcgactacaagaaacgtaggtgggagaagaagatgaaagcggaggagagcggcaagaattgataccacgcggctcgtccagggtgcttctcttcctaaataaggtccaaactttatccaggaggtttgcagaacggctagattctgacgcgtcatttccttgtggattccttctctcctgtgatgcgactttggacgcactatcctgattgtgatgcttttcaacacttgtgccactggatc

SEQ ID NO: 3343 - DNA, 338 bp, Zea mays
  Clone ID: LIB3136-009-Q1-K1-C10
gcgtccgtgtcgcctaagagaaagcttacatttactactacaggggcagctctccaatccaatccaagagcgtgggttagctataaaagacaaaaggtgctactgtcattacctcatctgatgtaactaacatcaccaaagtgttgtatgtctgctctataccaaacaagaaatacattttggcccttttacttaaacacatagacatatcgactgtttcttggcattgcctcatcttttgtgtgcaaacattgaattgcatgaacaaatgactagatgcagtgcacctcatggaatctgacatcaacttgaaacttgctaaacctcttgatcccact

SEQ ID NO: 3344 - DNA, 278 bp, Zea mays
  Clone ID: LIB3136-009-Q1-K1-C11
gcgactacccatacataatcttaccatttactgagatatcaccccctattaattgcagggataggattttcaatcttacacacactgccactattatactgactaacctagactcaatatgaccgttcacgcgaggcctaccatctcactattataactttctgatcaaccatgctatatactattttaacatgctcaagtactggtactggaatttatcttccaccctttgcactatcatcaatcaaacggttttaacactgcagtactttgactac

SEQ ID NO: 3345 - DNA, 238 bp, Zea mays
  unsure (1)..(238): unsure at all n locations; Clone ID: LIB3136-009-Q1-K1-C4
gttcgtatacaattactccgcctatgcgcttaacctaactgttgtactcacttatcccagggcagcagcccatcaccaaatgctccactcaaatctacacataatcgaaccctgctcctcaatattcaagccggcatcacatatattccatgcgacctcccttggtataaagcncatgaacgtccattatatacacctacacatatctatctatctcctttataacctgcaatacatc

SEQ ID NO: 3346 - DNA, 306 bp, Zea mays
  Clone ID: LIB3136-009-Q1-K1-C5
tgcaccttgccatcctatgtgagagagagacgcagagcgagcgacctataaatcggtgggcattgcatcactgtctgtcgccatcgcgccggccaccatagctatgccaaacatcacccttgaaagagggcacaccctcatagtcacgtacatagccacccataatggccataatcccacccccaagaccgtctccgacacgagaagatcgggcacaacgacggttttacctgttgccgacccgtacccccgggcggctacgactatcgacaaagcgccacctaatctcctgactaacgtggagaa

SEQ ID NO: 3347 - DNA, 403 bp, Zea mays
  unsure (1)..(403): unsure at all n locations; Clone ID: LIB3136-009-Q1-K1-C6
gaaatatatatgttgcactcattgttgcatacgcaagacttggtaattttgatatgggcaggcaggttctactcgattaagaaataccatgtaagttcctcagtgacatcaagagcgcacttgtatgagcgctggcattaaatgggcaagtgtcgcatgcactttgcttgcatgatgagataatgcaatccagcggctccctggaaccaaaagctgccattgccttgattgagcatattcgaacagaaggtgaactggatataatgcatcaacttctcgatgggctgaatgactcanacagctggtttgatggctgtggcacagtacttttatactgtgtgcagcacaactatcctgatgctggaatagatctacttaagcagatcaaggagaaagaagaaat

SEQ ID NO: 3348 - DNA, 212 bp, Zea mays
  unsure (1)..(212): unsure at all n locations; Clone ID: LIB3136-009-Q1-K1-C7
ccacggagtgatctcccctttgcggtccaaaaccgacggctagcttcaccggcgttggtcggctcccntctcttttgcgcnntatttncctcccacgttaaggttgcaggcttttagcttgggattctgaaagatggggacctctnctggcgccaatttccatcatcaacctccttcgacccacgggatgttgcctccaaagcattgtccac

SEQ ID NO: 3349 - DNA, 356 bp, Zea mays
  Clone ID: LIB3136-009-Q1-K1-C9
caagattactcacgtctaagctcttcagtaatagctcacgagctgcaactaaaaaatggagggaccagatgggtggttgataccattgttggtaaagaggatggacttggttgtgagaatctccacggcagtggggcgattgccagcgcatattctaaggcatacaaagagacctttactctgacatttgtgactggaagagctgttggcattggggcttatctggctcgtttaggcatgaggtgtatacaacgtcttgatcaaccaattattttgactgggttttcggcactaaacaagctactggggcgggaggtgtacagttctcatatgcaattgggtggccccaaaatcat

SEQ ID NO: 3350 - DNA, 379 bp, Zea mays
  unsure (1)..(379): unsure at all n locations; Clone ID: LIB3136-009-Q1-K1-D1
gcggcgacggcgcctctggnaacggcgagcctgtcgtcctcgtccggggacggctaccgcggggcgggtgccgagtcggggggcgatagcaccggcacgagcaccacgagcgccttcgcgacgccgacgccgccgccctcgtcgaagaggggcgaaaacaagntgccgcggaggctnactaagggaggtggcgtcaggcgctggctatgggagcccatagtccaggggcgggagatgggcttcctcctgctccagctcggcttcgccgtattcgcgctacgcatgcttcgaccggagatcgcgttgcctggctcagagcccgggccgcataccacgtacggcagtgtaccgtacagcgacttcctggcaagcatagaca

SEQ ID NO: 3351 - DNA, 266 bp, Zea mays
  Clone ID: LIB3136-009-Q1-K1-D10
cgccgaccaccggatcgcgcttgatgcacaagttccaatctagatactatatccggcccggggtgctagccccccttctcctcgtccagtaatcgactgaaaaggaaggtggccctcgtcactggtggcgccaccgacatcggcgatgccatcgttccactcttcattgagcacctcgccaaggtctgcatcacggacatccatgatgaaggcgggcaatacatgcgctacgccctgggaggtgacccacatggctccatgttcat

SEQ ID NO: 3352 - DNA, 392 bp, Zea mays
  Clone ID: LIB3136-009-Q1-K1-D3
gatacatccagaaagaaaaggattcaacaactacaagacaagcatttctgcagctagcatggaagaatggcttgcctttattcatgctgtcttatggcgattctgatatcctggcagccactgttagaaggaagggcatctctgaaaaggatgatctggaaagcacatatgctgtattcactgttgaagaacctaagaaaaaaagtggagcttggatcaaggcagggggcaagaacaagaaacaccaccttttgtctagcatagtcggggaaataaaggttgcacgtcgaaaatcaagatgtcaccatacagcagatgttcatgtatacagggaatttgtgttgcttggttccggatttctaccatcatctggagaatcgcgtgattcacat

SEQ ID NO: 3353 - DNA, 134 bp, Zea mays
  Clone ID: LIB3136-009-Q1-K1-D4
ctctcgcccaccactacaccaccggcggcggtggcgacccagtcgagaacaccaatgcgatggcgacagcgctgaaccgcgggctccgctccgggctccgtcttctcaacgccggcgccgaagcgttcaagcca

SEQ ID NO: 3354 - DNA, 392 bp, Zea mays
  Clone ID: LIB3136-009-Q1-K1-D5
gcatccgcgacccggccctcccctttgccgacgtgctccgcttcccgggaacccgggccggggagctcgggtccgggtgcggaccggcaggacttggcctctcccgcctcggcctcaccgatctcgtcctcaccgacatcgccgccgtgctcccggcgctccgccgcaacctgcggcgcaaccgagtccacctcgcgcgcgcgccccgcctcgcccagctccactggaactgccccgcgcatctcgcgacgctagccaccccgcgccgcttcgatctcgtcgtcgccgcagacgtggtctacgtgcaggagtgcgtgccgcacctcatcgcggccatggatgcgctcgccgacgccgagcgcggcgtggtgctgctcggctaccagatccgg

SEQ ID NO: 3355 - DNA, 386 bp, Zea mays
  unsure (1)..(386): unsure at all n locations; Clone ID: LIB3136-009-Q1-K1-D7
aacggatgaaaatgcactnngagcaacgctcttattgctgctgtgacacgcacaatattggggggcgctgttccacaacactagcgggttcttgctactctgtacaaggatcaaagatgctcgaagttgaaaatatacccaatactgcagaatgtttaccttnnaagaattttttggaaaccanaaatcgatgcatttgcagaggagcttaggccgcatcaaaaagctttattaccacataagncgcctgcgcttgaccgaccaatgatcgagcataatctccttagtgccagtaaactttacacaaatatcagctttgattaacttgacacataactggggattgatccaaggaaggctgataatatagcatctcagatgattta

SEQ ID NO: 3356 - DNA, 384 bp, Zea mays
  unsure (1)..(384): unsure at all n locations; Clone ID: LIB3136-009-Q1-K1-E1
gcagcgcccgctgccgagacagaagcagaaccggcagccgctgagcccgaggctgctgctggggaggagcccgcggcggctgagcccgaggctgctgctgccgaggagcccgagaaggccgagccggccgctgaggtggccgagaaggccagcgagtgaggccgngcgtcgtgcgcacactgcggcggcggacagcgggtcgggagatcgatggctcatcgcgtggcctggcagacttgtcgcgcgcgcgcctacatggcacgggcttgctgttcagtacaacgcgaacgcgactgtttctctccatctctctgcgtgtgacagcgtgtgcgtcgtagctatagcagtgcccggtgcggactgcgagtgacatgggctaaataa

SEQ ID NO: 3357 - DNA, 141 bp, Zea mays
  Clone ID: LIB3136-009-Q1-K1-E10
gcacaagaacctatccttcttgctgggttacaaaaacaatgctccctccaaccactccatcatgttgctctaccaaggccatgacaccgacattgatctcgcaaacattgagcagatgaattctttcaacacgaccttcat

SEQ ID NO: 3358 - DNA, 412 bp, Zea mays
  Clone ID: LIB3136-009-Q1-K1-E12
gctgatgcggctctatgtaacaattcacactgatcatgaaggcgggaatgtcagggctcatactggtcatctggttgggagtgctctgtcacatccttatctttctttcgcagcggctctaaatgggctagctgggccactgcatggccttgcaaatcaggaagtgcttttatggatcaaatctgtaattgaggaaactgggagtggtgttaccacagatcaactcaaagactatgtctggaagacactaaagagtggaaaggttgttcctgggtttggtcatggagttctgcgtaagaccgacccacggtattcatgtcaaagggagtttgccctgaagcatttgcccaaggatccacttttccaattggtgtccaagttgtatgaagttgtaccttctatcctcactgag

SEQ ID NO: 3359 - DNA, 326 bp, Zea mays
  Clone ID: LIB3136-009-Q1-K1-E2
cggacgcgtgggagcgatccggatttgcccttgtcatggcaggatacgtgaacataacgcgggagcgcggcggcaaggtgtcgttcatcgtggacgacgcggcggacagcgtcaagcccgtcacttacgtgaagcagatcgagagccaccgctacgactactcggtgcttcaggtcagcggcgtcctgtcctccccggaggccgaggcacccgtcggcccgccggcgcccgtcaacctcaccgacatcctctccaagaagtactgcaagagcttcgcgggccttctcgccgccgaccccaaggtcttcgacaccctcaacgggacc

SEQ ID NO: 3360 - DNA, 381 bp, Zea mays
  unsure (1)..(381): unsure at all n locations; Clone ID: LIB3136-009-Q1-K1-E5
atgtcgcttggncgcacacgcgggctttcgcgtgggtcctccaccgactgatagcctgagggcgctcactgcctgctccacctccaatagcctaccgttctaagacatcatgcacaatccatatgccataagaagaacaagaaaacgcacatccaanaattacgagcttatccatcgccgncccttcacagctacacatcactgttttcgtctggaaccttaaattctagctagttgatcanngaccactcaactgccatatcaacattcaacactcatcttgcactttgtctgctcattgcactcgatggctgaaccatcgtctcacaaaaagtctgctactaaacaacacgtctaatcagccatagaaattttcacttg

SEQ ID NO: 3361 - DNA, 445 bp, Zea mays
  Clone ID: LIB3136-009-Q1-K1-E6
tcgaccttcaagtctcgctacgtagcagtgcaataaaaaaagcagccgcaatggcgagcaggaccatggccctctcctccacggccttcgccggcaaggccgtgaacgtgccgtcgtcgtccgccttcggcgaggcccgcgtgacgatgcgcaagacggcggggaaggccaagccggcggcggcgtccgggagcccgtggtacggccccgaccgcgtgctgtacctgggcccactgtccggcgagccgccgagctacctgacgggcgagttcccgggcgactacggctgggacaccgcggggctgtcggcggacccggagacgttcgccaagaaccgggagctggaggtgatccactcccgctgggccatgctgggcgcgctcggctgcgtcttcccggagctgctcgcccgcaacggcgtcaagttcggcgaggccgtgttgtt

SEQ ID NO: 3362 - DNA, 246 bp, Zea mays
  unsure (1)..(246): unsure at all n locations; Clone ID: LIB3136-009-Q1-K1-E9
acgtntttcaatttttattataaacccttgtacttattaaaaacacacaaaaatacgtgagccttttttttaccgataacccctttccatattaaaaacaacttttaaacacccaacacttctacgatacatatatttcttacttaatagaaaaaacttcaagaatttattctcctaaaaccccactattctttacaacaccattatggtgaaaacatgaagtttttacattctaactccacattt

SEQ ID NO: 3363 - DNA, 358 bp, Zea mays
  Clone ID: LIB3136-009-Q1-K1-F1
agatgagtaaccaaatttcgctacagcacatcgcaccgcacagcacaccacgatcagattgggaagggtccataattcgtccacactttcacaacccaccacgccaaatcacgacgagcacagctacagacgacgagcagagcagagcagagcagaccgtcactcgaccgtcactcggcgctctcacgattcatttcactacatttcactacgccttgacaggcacaaccttgacctggtccagcacggggccgcagagcgagacgccgtcggtgaccttggtcaggttgtctttggtcgggtacggcgcgggcagctccttgatggcgacagcgtccagcagcgggccgcacgcggg

SEQ ID NO: 3364 - DNA, 388 bp, Zea mays
  Clone ID: LIB3136-009-Q1-K1-F11
atatactcctataaaatatgttcggcttttttagtgaccactgataaggggtttggattgagtcttttcctagatataaatcgttaaagtgaatagtcttgtagatagttggagagaagtatgatctatctttgctccaatgtttgcaatgaatgatacttttgagctacatagcactttatttgcttgtaaagtaactgagcagtattatatgcttgacgcctttacatcactacaactacttagagcaaggctaataatataacctgctgttggttgtatagatctttgcatcttatctctcgcccactcatatagtagttaactcttgactattaatacatggctcacttactgtgacaaaatctcttgcatcttatgcttaagc

SEQ ID NO: 3365 - DNA, 387 bp, Zea mays
  Clone ID: LIB3136-009-Q1-K1-F12
tcgttgacacgtgtgtacaagtggcaagggctctaagtctggagcctcaataaggtgcgccggttgccaggactcaagcatgatattcactattcgttagcctttcccttacatgatacaccttatgcagcatccttgcaatgagtgcaaggggactgaatagtgcatcaatgagaatgaccgctacccagcgtgctaggctgagaaagtcattcacgagaagaaggttcttgatgttcatgtctagaatgtgatgctacacaacctataaatcacccttcctgctttagcaaatttatcgcctgatactacactggagacattgtattcactctccagcagagagatcactcctaatttaatagaatgtgtgaagatcttttctat

SEQ ID NO: 3366 - DNA, 427 bp, Zea mays
  Clone ID: LIB3136-009-Q1-K1-F2
gtcaaacataaatgagcatagttctgaggaatatatccggagcgtgccaaattctgtacatgacagcaatgagatagagtcagattctccacctcacgtctgtgagatagaaagtgtgaaaagcaaccaagaagggtaccaatcttcggatggtcgtgctttccccaagacaagatctgagcgaagcattgaccaatgggtatttgcaaagtcaaaatctgaggaaagcatggatcagtggtctgaaataccttcagatgtggaatccttcagagaaggtaaaaggtacctcagtagcgaggagctgagtgacgttgatagtgccaacgttgttgtcatggacaaatacatggattcactcctctctgaccggaggaaccttccctacgctagctcctcggggcgccgggattcagtcagacgaaaa

SEQ ID NO: 3367 - DNA, 313 bp, Zea mays
  unsure (1)..(313): unsure at all n locations; Clone ID: LIB3136-009-Q1-K1-F3
ggttcggtgagatcggnctcgtggccctggtgaactacgggaaggactattgccgtctcggggggggcgtgatgtggtcgaccagaacagggcacttgtggatgcccctgatatggtcaggtgccaggtgaacttcaagcggctctcacttactgacatntggantgacatcanacgtgtccccnagaagacaaccctgatcaaggcgatggaggaagctgatgtgaataccacctgggnngacagctcatggggcaagaagctgattgtccagaagaggagagcatcgctcaatgactttgataggttcaaa

SEQ ID NO: 3368 - DNA, 314 bp, Zea mays
  Clone ID: LIB3136-009-Q1-K1-F5
aacgacccaaccaccgatttcacccctgcctttgcttatccccttgtccagaccctggggggggatcattcccatgctgcaactgacaccctcctcctcactaatccaagtgcccaattcatcgaaagctccttcgccagcaactagcactcacctgaaacctggattgacctctacatttcacgacattatagcacctgtaatcatggcgctgagcaaagcaacactacacgctgtcccatggatgtacaatgtcactacatccttttgtatcatcatcgacaacaatgacttaatgactacgcatggtttta

SEQ ID NO: 3369 - DNA, 302 bp, Zea mays
  unsure (1)..(302): unsure at all n locations; Clone ID: LIB3136-009-Q1-K1-F6
aaccacaccaancctgtcttgttcacaatttatgacccgaactgcaccaaatgtacagcggtacattgtcaccatcttcaactctctactcctttaagccggaacaacgcagaccctccgatcctatccctcaaacccgcgtactacttctcacttcccgccattactcccacccgacccaaccctgcttgagcctgccatatcaaccccaatgttactgtacctgcactcactacacatctgacccaaaaactactcttcattgctcataacaatcccacttccgatcacacacctagttt

SEQ ID NO: 3370 - DNA, 117 bp, Zea mays
  Clone ID: LIB3136-009-Q1-K1-F8
gtcgtcattctagaccaacagctgtgattttaaggacatatgctccaaatatatcgggctggtaagctaccctgctctgatgactagtatattattatgggctatacacaagaccga

SEQ ID NO: 3371 - DNA, 350 bp, Zea mays
  Clone ID: LIB3136-009-Q1-K1-G1
ccagtaccccatcacaaagatcaatcagcgggtcttcaatatttacattaacaaccagacggcagtcaagggtgctgatgtgaatgcctgggcggccgtaagtggtgctaccacccttattggcactccggtgtatcaggactatgtagtgagcacatcgggtttaggggccatggatttatgggtagctctccatcccaatcccgactcgaagccacaaatatatgatgctatcctcaatgggatggaggtgttcaagctacagcttaccaatggcagccttgcagggctgaatcctgtcccaagtgttgccccggtgcctgatgggacaactaataaagaagtcaagt

SEQ ID NO: 3372 - DNA, 402 bp, Zea mays
  Clone ID: LIB3136-009-Q1-K1-G11
tcgccctaaccagaccgacagccgccgccgattctccatcttcctcgcagtgccagcaggacagggtggctcccaccccgactcgcgctcaacacgcaggcgacggcagcagcgctcatgctcgggctctcaaggacggcggggcagtcccagactcggcgtcgacagcagcggatacccttcccgcctgtcgccaatcgactggcgcccgcgactccggtcctccacacaccgggctgcgaccctgccaatagtgtataacttggagatatggatttgcaagagaagacgacccctactcataaaggagaaggaaagaaaaaagaaagcgcaaacaaaaaagaaagatcgaggaagagaacgtcatctgttttggattacactaatgacacagtcatcagc

SEQ ID NO: 3373 - DNA, 367 bp, Zea mays
  Clone ID: LIB3136-009-Q1-K1-G12
gcgttctcgtggtcacgactgccgctttcgccctacgccaggtgtgcaggtcatctcgggcccagtcttctgcgactagcaccccactagatcgaccgaaatatggaccgcctgtggcatctgggggacgagctccgcgggcagcccaaggtggtggaggaccgccagtggtcgctcatgacgaccaagctggccgagatcaccaggtccaggggcgagaggatgaacgatctccactacgccaggatgaacgccgcccccgactccaagcaatggggcaaggcggcgtcctaccagcaccacgaggagggcttgatggaccaccacgtgggcctcaggctcaagatgaacgatctcaagatgaacg

SEQ ID NO: 3374 - DNA, 367 bp, Zea mays
  Clone ID: LIB3136-009-Q1-K1-G3
aaatcgtcgaggccctaagcagaccgagcagtgaatcaaaagaacttactttcgccacgaagtatgctcaaccattttgtgctcagtatatggcttgcctatggaagcacaacctatcgtactggaggaaccctcagtacaccgcagttagattcttctacacagctattatttccttgatgtttgggacaatttgctggaaattcggttctagaagggggacccaacatgatatattcaatgcgatgggtgccatgtatgcagcggtgctgttcataggaattaccaacgccacttctgttcagcctgtgatctccatcgaaagatttgtatcttatagagagcgagctgcttggatgtattcagc

SEQ ID NO: 3375 - DNA, 257 bp, Zea mays
  Clone ID: LIB3136-009-Q1-K1-G4
attaaataggcgctgtcaaaattatttgatgttagccctacttcttcacgtgacagtagccgggagagttctacaaattccacaaaaaatgaaaataggaatgaaaaacacgaaacagctcccaaggaaaaaacatcaaacaagaacccgaagatggagaaagaagtcgcacacaccgttcctgtcaagcctaaaaaggaaaataggcctttggttctgccttttgaattatctgctatgggtatcttattgctcat

SEQ ID NO: 3376 - DNA, 258 bp, Zea mays
  unsure (1)..(258): unsure at all n locations; Clone ID: LIB3136-009-Q1-K1-G5
gccgtgaactacccncaaacgcccgacgcatacgccgtctccttcaccatgaccttgggcgagctctacagcaaggaggtgcgaaaggtgatcgttgacctcctcctccccgtcattgacagcgaccgggtcacggacatcctgtaggtgacctactcttacaagacggccgctaagctgatcgacgctcctcccagtacggtgacggtgcggcgcagttgtacggcttttcccgatgatgatcctccagggacgctc

SEQ ID NO: 3377 - DNA, 99 bp, Zea mays
  Clone ID: LIB3136-009-Q1-K1-G6
gtggtttccttccttctcttgtctaactcgtgcgacgccaccttcaccatgaccccggagagggataatgccccgccgccattgttcaagcctttcaat

SEQ ID NO: 3378 - DNA, 259 bp, Zea mays
  Clone ID: LIB3136-009-Q1-K1-G7
cggggcgagccacgcgtacgggagcggtcctcgtccgacctgctatttgatctgaagaactacctctacctacgcggtgcggtcttccacattctgctcacgatcttgaccgcctatggcatgcacacgcaaacgctctggatgaacccttactaccccgtactgagatccttgtacccggatattacctccctggagtttgggacaactctctttaaattcccgtgtataagggtgacccttcatactatattcattg

SEQ ID NO: 3379 - DNA, 318 bp, Zea mays
  unsure (1)..(318): unsure at all n locations; Clone ID: LIB3136-009-Q1-K1-G8
aaagcccggtgcgacccacgcgtacgatcgcnatcggcctcccttttttttttttttttttatagcagtantaaataacttcggatgggagcactaaatctttcgggaaattgctaataaccaacaagttacatgcaatccccatatgcttatgaacctctacattaacttaaaacaaaacatgcaattttactactaccccatctttcngatccctcagaactagctaccttaccttcccatgcatgcatgcactcgaaatgctattcccttattcacgggcatgaggccgtgatctgctggtttattattgacttc

SEQ ID NO: 3380 - DNA, 387 bp, Zea mays
  Clone ID: LIB3136-009-Q1-K1-H1
attccgatgacgaccgtgcccacgccacagcaggtggcgtactcacgggcacggctcgcacgccgcgcgatcggcgccttgctggagtttgccccagcctcctcctccctccgcttcgccgtgcaccgctgccgcactgctcgcctagaggtgaaggcatctggaaacacgtttggaaactactttcaggttgcaacttatggtgaatctcatgggggtggtgttggctgtgttatcagtggttgtccacctagaattccactcactgaggcagacctacaagttgaactcgatcgaagacggcccggtcagagcagaataacctccacaagataggagactgatacatgccaaattctgtcagggacacatgaaggggtgactact

SEQ ID NO: 3381 - DNA, 272 bp, Zea mays
  Clone ID: LIB3136-009-Q1-K1-H10
agcataccgttattgacagtgacccagttctggaccttagtgatgagaaaatcaccatgggcgagacgctctataggcttttaaacgacaagtcatctatattcatacagctagcatcggaatactccactcactcccgctgtatatatagaggcttagggggcgactgcataaccattaaaagacaatgctgcccatgaggaaacaaaataagaagattaggtgattgccaagcccttgtccactgtggcacttgaaaagtcactcgaggg

SEQ ID NO: 3382 - DNA, 393 bp, Zea mays
  Clone ID: LIB3136-009-Q1-K1-H11
taccatcccctgtgaaaactgccacgagttttcatctgtaccataggggaacacagggggtggcatctgtatcatattgtggcatcatatctttcctatactgtagctgcgcaaaaaggggctctgggactgggctgatccttgggcgcagaacaacatcacaaggcttgaagattgaatgcttggatcatcaaaacaaagaaaggatgcggatattatgaggtggcaagactatatacaccacatccatccatttaattctttttacactcaagcattgaaattttgatctggaagttttgtgactgcttaggtaggttctacatgatagtagtagagatgccattgcttctggagtcacctacaggataattgtacgattgctgacatact

SEQ ID NO: 3383 - DNA, 447 bp, Zea mays
  Clone ID: LIB3136-009-Q1-K1-H12
ctggaggtttgtagtcctcgtgcaaataatgaaccttctgaggttgttcgtggacgttgatgcgaaatcaaagcgcttatcgttaggaagagctagtacatttaaagaaccagaagaagtgctccatccccactcccatggtacatctactcccagctggcgtagatctaagtcaaaatcaaggactgaaaaggcaaggccaggcttgtctgctacacacgatgcaaaatcttctaaggttaatgcagcagacaaagaggacacgtcatccacaatttctgatcctggacctgtggctgtatgggattcaggaccaaagtgggacgatgaacctaaatgggataatcaacctaactgggaacccgagacttcaattgagctccatagccctcgcgaggatattgagctttgtctgactaaagagctggtacctagtttaaatgaaag

SEQ ID NO: 3384 - DNA, 394 bp, Zea mays
  unsure (1)..(394): unsure at all n locations; Clone ID: LIB3136-009-Q1-K1-H2
aattncgggtcgccgacgcgtccgctgtgctccactcctgatgctctcctcccagcagtaccttgagctgtatccccgagattccgtgagcagcgcgaaccaatatactgttgcgtgttctcctgcaaatgagatgttctgcacctatgcttgtaatgttgtatttctgggtttttaagctatccaacttggagatacaaccggtgaggaagcagcaacaataggtagttctacttctgagtgaggaaaaacaacttgcggctgagttaatgaagcttagtagctaccaccgttgtatgacagttgctcagagatgttatcttcattaagtgcttatattaccgctagtttcctgtgaaatttggtaaaccattatatgtaagttttgtttgac

SEQ ID NO: 3385 - DNA, 382 bp, Zea mays
  unsure (1)..(382): unsure at all n locations; Clone ID: LIB3136-009-Q1-K1-H3
cacaacttcagctgcgcctcgactcgtagcccgaaccctagccaccaagccggaggcgagggagcggccatggcgcggtgcctcgcgctcgtcnccctcctcgtactcggcctcgccgccgccgccgcctccgcggccgacgcgcccttcgtcgtcgcgcacaagaagatttcgctctcccgccccaagccgggcgtcgagcgcgtcgccgtctccgtcgacctctacaaccagggatccgcgactgcctatgatgtgtccattaatgacgactcttggccaacagaagtgtttgagcttgtcactggagagaaatcgaagacattggaaaggcttgacccgaggcatactcaactcccatctttccactggatattctcgc

SEQ ID NO: 3386 - DNA, 256 bp, Zea mays
  unsure (1)..(256): unsure at all n locations; Clone ID: LIB3136-009-Q1-K1-H4
cgcgcctncggcagcaagctgggcccgctcatcgacggctccggcctttttacaacccggtccgggccggcaaccgtggggagcacgaggtcnccttctatgaggcgttctccgcccaccccgccgtcccggcccgcatccgagacacctttttcccccggttccacggaacccaattcttccccaccgaggcgcagcccggggagccgcatcctcacctcgtcctcgacgacctcctcgcgggtttaaggcccct

SEQ ID NO: 3387 - DNA, 274 bp, Zea mays
  unsure (1)..(274): unsure at all n locations; Clone ID: LIB3136-009-Q1-K1-H5
acggcatcacatccccnnactgggtgctgagctttagtacagtacaattatttatcgcgcgacgcgtaagtttgctcgctctttctcttcccttcctccttgataaancccgcattctcttaggccttgggccatttcatcctcgatgaaaaatgcattgcttaaatctaatacaatcgacttttgaattactactctcaggacaagtccaggtgaggtggctcaccctgtaaaactccttcanctggctttataagcacaacacagtgctcaa

SEQ ID NO: 3388 - DNA, 145 bp, Zea mays
  Clone ID: LIB3136-009-Q1-K1-H7
tgtacttactacccaaaggtgattattattttttacattgttggtgctattgttatcaccgttttaatggttattaggttatgtataggatttgccatttgttagtatacaatatagtaagtatgaagaaagcatatggttgttc

SEQ ID NO: 3389 - DNA, 378 bp, Zea mays
  Clone ID: LIB3136-009-Q1-K1-H9
ggagcgccggacgtccgcggcggattgggatctacctctcccgtccgcccgttcggccgagcgctcgagactcgacggcacccgccgcatttgagctgagctgaggaggcgtgggggacggcgcggggatgtggcgcctgcagatcgcggaggggggcggggacccctggctccgcacgaagaacgcccacgtcggacgccaggtctgggagttcgacgccttcgacgaccccgaccccgccgtcgacgccacgcgccgcgccttcgtcggcagcaggggccacctcaagcacagcgccgacctcctcatgcgcattcagttcgccaaagaaaatcctcttgagcttgacctttcaacgatcaagctcggtgagcacg

SEQ ID NO: 3390 - DNA, 334 bp, Zea mays
  Clone ID: LIB3136-010-Q1-K1-A1
gaccacgcgtccgatgttgtttgagggtaccacgtctactgatattcctcaccgggaagaatggaaaggaaagccgtggtcaagaaatgggccatatggcatagctgcacaggtgtccgctacactgctgagctatatagttgtagctcctgtatattcagaaaacagtcactcggttgtaaagctagtgttacatatgcacgtgaaccattttctttttcttcctttgatgctgtgccgtataaaaagaatttggtggttcgatggtgtttatctcgcggtagcataataggcatccttgtattctagctgtatgtttctggtggttgtgact

SEQ ID NO: 3391 - DNA, 356 bp, Zea mays
  unsure (1)..(356): unsure at all n locations; Clone ID: LIB3136-010-Q1-K1-A10
gtaaaatctggcttttctccctccccataccccgcagtcccgcacacacactcgctttcttggggtcgtcctcctcgagcagccacttccgtctctaaccctacagcgacgacgagagcgaggccatgaaggggaagaagccggtcaaggagctcaagctcaccgtgccggcgcaggagaccccggtagacaagttcctgacggcaagtggcacgttcaaagatggtgagctgaggctcaatcagagcggcttgcggcttatctctgaggaaaacggggatgaagatgaatctacaaagctgaaagtggaagatgtgcacntatcaatggatgatcttgagatgattcaagtcatt

SEQ ID NO: 3392 - DNA, 346 bp, Zea mays
  Clone ID: LIB3136-010-Q1-K1-A11
cagagagagacaagtggtttccaaagccaagtgtgtactagcagtctagcaaccagctagctggggcggcagcaggcagccatcatgtcggaggagaagcaccaccacttcttcaaccaccacaagaaggacgaggagcagcccgccggcgagtacgggtactccgagaccgaggtggtcaccgccaccggcgagggcgagtacgagaggtacaagaaggaggagaaggagcacaagcacaagcagcacctcggcgaggccggcgccatcgccgccggcgccttcgcactctacgagaagcacgaggcgaagaaggaccccgagcacgcgcacaggcacaagatca

SEQ ID NO: 3393 - DNA, 414 bp, Zea mays
  Clone ID: LIB3136-010-Q1-K1-A2
gtttcgtttgattcaccgacccaacaaccagttagatgaaaggaagcgcttaagaatggcgctggatgtggctcgtggtatgaattatctgcataattgttcaccagttatagttcatagagatctgaaatccccgaatctactggtggacaagaattgggttgtgaaggtttgcgattttggtttgtcaagaatgaagaacaataccttcctgtcatcaagatcaacagctggaacagcggagtggatggcaccagaagtacttcggaatgaacgatcggatgaaaaatgcgatgtttttagctacggagtcatattatgggaactttgtacactactacagccttgggaaggtatgaatgccatgcaagtggttggtgcagttgggtttcagaatcgtcgccttgaaatccc

SEQ ID NO: 3394 - DNA, 390 bp, Zea mays
  Clone ID: LIB3136-010-Q1-K1-A3
cccgtgcctcacgagtcactccaggtccaggctgatcagcaatggcgccgcgaatgctcggccggaacgcggccccgctcctccagattctgcggtccctgtgcctcctggccctcgccgcggcggcggcggtgtccgggcggcgccacggggcctccccggcgcgcggcagcgggcagagcatgtacctggcgccggcctgccgggcgcacacggcgtcggtggcggacttcggcggcgtgggcgacggcaccactttcaacaccgcggcgttccggtccgcggtggaccacctgtcgcagtactcgggcgagggcggcggcggtggcatgctgtacgtgcccgcgggcaagtggctgacgggccccttcaacctgaccagccacttta

SEQ ID NO: 3395 - DNA, 428 bp, Zea mays
  Clone ID: LIB3136-010-Q1-K1-A4
gtgccgtcgccgatggagtccctgggcgtgctgctgctccaccccttcaacgcgtaccttgagcaggagctggaccgccgcttccgcctgtaccgcttctgggagacgccccgcgaggagttcctccgcgcgcacgcgggcgccgtgcgcgccgtcgtcggcaacgccagctacggcgccgacgccgcgctcatcgacgcgctcccggcgctcgagatcgtcgcctccttctccgtcggcatcgaccgcgtcgacctcgccaagtgccgcgaccgcgggatccgggtcaccaacacccccgacgtcctcaccgacgacgtcgccgacctcgccgtcgggctcgccatcgccgtgctccgcaggatcccgcaggccgaccgatacgttcgcgcggggctctggaagtccacgggagactacaccctaac

SEQ ID NO: 3396 - DNA, 412 bp, Zea mays
  Clone ID: LIB3136-010-Q1-K1-A5
gtcatgtcctgctcattcactaaccaggtcattgcccaacttgaactgtggaaggagaagagctctggcacgtatgagaagaaggtgtatgtgctccccaagcaccttgatgagaaggttgctgctctccacttgggcaagcttggtgccaagctgaccaagctcaccaagtctcaggccgactacatcagcgtgccgatcgagggtccctacaagcctgcccactaccggtactaggcagccagcacacggcttgcagctcactcgggccgttgtgtgctatgaagttcgctacactggcctgtcagttatcttttgcatgcatatgcattatcatatacgcagtcgcgtagcaggtttccttatggttatcgcttgagctgagggggagggaaggagctgtttgctttgc

SEQ ID NO: 3397 - DNA, 451 bp, Zea mays
  Clone ID: LIB3136-010-Q1-K1-A6
cgagatcgtgcgcgcctccgagatctccacgaagttgtggtaacatggggctcaccttcgggaagctcttcagccggctcttctccaagaaagagatgaggatccttatggttggtctcgatgcagctggtaagaccaccatcctctacaagctcaagctcggagaaatcgtgaccaccatccctacaatcgggtttaatgtggagactgttgaatacaagaacattagcttcactgtctgggatgttggaggtcaggacaagatcaggccattgtggaggcactatttccagaacacccaaggccttatctttgttgttgatagcaatgacagagatcgtgttgttgaagcaaaggatgagctccacaggatgctgaacgaggatgaattgagagatgctgtcttgctcgttttcgcaaacaagcaagatctaccaaatgcaatgaacgc

SEQ ID NO: 3398 - DNA, 451 bp, Zea mays
  Clone ID: LIB3136-010-Q1-K1-A7
cggacgcgtgggcggacgcgtgggcggacgcgtgggcggacgcgtggggtgtgttgggtgcatccgttgcagaaaaacgcgaaggttgtcactattgacagctacgaagatgtaccagtgaacgatgagaagagtctgcagaaggcagttgcaaaccagcctgtcagtgtcgcaattgaggctgctggcacagcatttcagctctacagctcggtaattggcgctcaccttgctgctgggttcatctgtggaccatttggttaaattccgagatgaatgattcaatcatctagtattctagtgtttgattatcagttggtggccattaaagaaataaaatccatctgccttgaacaagacatgcccatgttaggtcgaggtcacctaattgctttaaaactgtctctttcatatcgctttactcaagattattttctctggaaagaaatga

SEQ ID NO: 3399 - DNA, 417 bp, Zea mays
  Clone ID: LIB3136-010-Q1-K1-A8
ctctaatctaggtaaacaatgccgctatcggtggggttcagtcactccccgttgaagatgggggcgaaaagatcaagggcatggacgcgttccagatggcggagctgatgcggaagagctgccgggagacaaacgacaccgcaaaggcaggcgtccagacgaactactacggagtgaagaacgtgaccgaggcgctgctgcctctgctcctgcaggcctcctcctccggcggaggaagggtcgtcaacgtctcctccgacttcgggctgctacgcgtaagctgttcctgtatctgaccacaccgtttcagattccgttcctttccttcgaccaacgccagctgctgctgctgctggatctgaaacaaagaatgcagtatctcaagaacgaagaggtaaagcatgagctggacgacat

SEQ ID NO: 3400 - DNA, 362 bp, Zea mays
  Clone ID: LIB3136-010-Q1-K1-A9
cacaaattgcttcagatattttaagaatcttgtttctcttgaagtctgtggtgggttcggtgctgatgctggagtgaagaacatcaaggatctgaaggccctgacgttgctgaatctttctcaaaatgctaatctgacagacaaaaccttggagctgatctctggcctgactgctttgatcaacttgaacgtgtcaaactcacgggtgtccaatgctggtctcaaacacctgaatgacctgcacaacctgcgttcactgtctctagattccacccgggtgacggcaaacgagatgaggaagcttcgagcaacagtgctgcataatctgatcagcatgcggccagagtagtacccatttggca

SEQ ID NO: 3401 - DNA, 337 bp, Zea mays
  unsure (1)..(337): unsure at all n locations; Clone ID: LIB3136-010-Q1-K1-B10
ccaggtgctccggtgggctctcggttcagtggaaatccttttcagccggcattgccccctgtggtacggctacngaggacgcctgaagttcttggagagattcgcctacatcaacaccaccatctacccgctcacgtccctcccgctcctcatttactgtatcctgcctgccatctgcctgctcacggggaagttcatcatcccagagatcagcaacttcgctagtatctggttcatctctctcttcatctcgatcttcgccacgggtatcctggagatgaagtggagcggcgtgggcatcgacgagtggtggaagaacgagcagttctgggtcatc

SEQ ID NO: 3402 - DNA, 369 bp, Zea mays
  Clone ID: LIB3136-010-Q1-K1-B11
cggacgcgtgggcggacgcgtggggaaaaggagaagcatgtcctcgagaaatacttgaaggagtggaagtacatccatttcaacggcgagcgcgttcgcgtgcggagggacggaccattggcgtagtgcccgttttctgaaaaatgctcgaacctatcagagtatcgtgccggtaggcggtagggcaggggagatgctgttactgccgctgtgacagtcaggcacatggatatcggcactagtccctatcctatgtatgtggaatggaacggaaactggagattggttccatggctctagcctgtggaggagacgagcggatggggggtggctggctactaccggcgagatagtgatttaataggcact

SEQ ID NO: 3403 - DNA, 333 bp, Zea mays
  Clone ID: LIB3136-010-Q1-K1-B12
ctggcctggcggtcgtgtgcggctctgcgcctctccctccctcccttccccgatcgtaaccgccgcctccgatcgatcgccacgatgcggctcttctgacgtaccgccgggcgcgtcaccgttaccgaccgagacccgcgcccctcgcctggactccatggccgcgtcgtccccgctggtgctgtcgctgctcctcttcgcgtcgctgacggcgctgctggtcctcgcgccgcgcctatccccgccgcagccgccggcgcccgccggtggtggtggtggcgaggaggccgacgacctccgcctgttccgccgcgcggctctggagtcgtcggc

SEQ ID NO: 3404 - DNA, 391 bp, Zea mays
  Clone ID: LIB3136-010-Q1-K1-B2
cttcacactccttgccatcacataaaaccagtgcatgcagaagcagcgcaatggcgagcagcacgatggccctatcctccacagccttcgccggcaaggcagtgaacgtgccgtcgtctctcttcggcgaggcccgcgtgacgatgcgcaagacggcggcgaaggcaaagccggcggcgagctccggcagcccgtggtacggccccgaccgcgtgctctacctgggcccgctgtccggcgcgcccccgagctacctgacgggcgagttcccgggcgactacggctgggacaccgcggggctgtcggcggacccggagacgttcgccaagaaccgggagctggaggtcatccactcccgctgggccatgctgggcgcgtttggctgcgtgtt

SEQ ID NO: 3405 - DNA, 468 bp, Zea mays
  Clone ID: LIB3136-010-Q1-K1-B3
aaaaccgggccgaccacgcgtccgcagcgtagttggtactgattcacacaccactatgattgatggtttgggtgttgctggctggggggttggtggtatagaagcggaggctacaatgcttggtcagccaatgagcatggttttgcctggtgttgttggcttcaagttaactgggaagttacggagtggtgtcacggccactgatcttgttcttacagtaacacaaatgctaaggaaacatggtgttgttggcaaatttgttgaattctatggtgaaggtatgggtaagctgtctttagctgacagggccacaattgcgaacatgtcaccagaatatggagctaccatgggcttctttcctgtggaccatgtgacattggattaccttaaactgacaggccgcagtgatgaaactgtgtcaatgattgaagcatacctgcgagccaataaaattgtttgtggactaca

SEQ ID NO: 3406 - DNA, 435 bp, Zea mays
  Clone ID: LIB3136-010-Q1-K1-B5
ctcggtctcggatagacagcgacggataggagagcggcgggcggagagaagtggaggaagaggacgaggatggccacctatttcacgctcaacaccggggctcgcatcccctcggtagggctcggcacctacaaggccggacccggcgtcgtcgccgacgcgatcaccgccgccgtcaaggccgggtaccggcacatcgactgcgcgccgctatacaagaacgagaaggagatcggcgttgctctgaacaagctctttgatgacggcgtcgtcaagcgagaagaccttttcatcacctcaaagaggtgcagcgatctcgcacctgaagacgtgccgttggcgatcgacatcaccctgaatgatctgcagctagattatcttgacctgtacctgatacactggcccttccagataaagagaggcagcgagctcagt

SEQ ID NO: 3407 - DNA, 455 bp, Zea mays
  Clone ID: LIB3136-010-Q1-K1-B6
accaaggagagtacgtggaggagcagagccatggcttcatcggtggccgccgcggcgagcgacattcctgggcacccgcctggcggacccggcgccacagaacgggcgcatcgtggcccggttcgggttcgggttgggcggcaaggcgaagcctgctccgaagaaggtggcgaagacatcgacctcctctgaccggccgctgtggttccccggcgccgtggcgcccgactacctggacggctcgctggtcggcgactacgggttcgacccgttcggtctcgggaagcccgtggagtacctgcagttcgagttggactcgctggaccagaacctggccaagaatgaggccggcggcatcatcggcacccggttcgagtcctccgaagtcaagtccaccccgttgcagccctacagcgaggtgttcggcctccagcggttccgcgagtgcgagctca

SEQ ID NO: 3408 - DNA, 444 bp, Zea mays
  Clone ID: LIB3136-010-Q1-K1-B7
tgtttgtacaacctggagggatatgtgtaaggatattgttagaagtccagaacattgtgcggagctcacatttccagtatctcttaagcagcctggaccccgagacggggtaatccaatgtttcataaaaagggacaaatcaaagctaacgtaccggctctacttgtcccttagctctggtgtgcttgatgagaacgggaagttcctgctagcagcgaaaaggagccgcaggatggcgcacacggagtatgcaatttttatggactcgaggaatttctcccgatcgagcactggctacattgggaagctaaggtcaaatttccttggaactaaatttatcatctacgacacacaggctccgtacaatggcgggagagtttgcacacaggaacgtgcccccagccgtcgtttgtcttttcagaaagtttcaccaagagttccaag

SEQ ID NO: 3409 - DNA, 438 bp, Zea mays
  unsure (1)..(438): unsure at all n locations; Clone ID: LIB3136-010-Q1-K1-B8
aggccatctgggagctgttggttctgttgccttctcaaagaaaacaaataacttttttgtgggtggcagcagtgatcgaaccatcaaggtatggacctgggacgatgcacttggtgatgctgaggatgaagtccctcttaaagcaaaggctnntgtagctgcacatgataaagatannaannctctggcaatttcacctaatgatggccttgtttgcagtggttctgaggaccgaactgcttgcatatggaagctccctaacctagtgttancngttgtccttaagggacacaaaagaggaatctggtcaggtgagttttcttctgttgaacaatgtgtaatgacgtcctctggtgatagaacaatcaaaatatggtccgttgctgatggctcatgcttgaagacatttgaaggtcatacatcaagtgttctgcgagc

SEQ ID NO: 3410 - DNA, 273 bp, Zea mays
  Clone ID: LIB3136-010-Q1-K1-B9
cgtacacccatcgtaccctttatcatgcccgaagctgtaagagactatgtgagcacgactcacagaaattgaggcctgtgtgattctttctaaggaaaagggtgttgacacgtttcaccttccacattcttccacttgagccctgaagaaaaacctcctatttgtattgagttccacagctattccacactataaggagaaaagaagaaacctacgtacctatcgatctggtcttgaaatgataagggagaagaggggacctttgaaatataa

SEQ ID NO: 3411 - DNA, 415 bp, Zea mays
  Clone ID: LIB3136-010-Q1-K1-C1
cactttttcagccctgctcatattatgcccttgcttgaaattgttcggacggagaagacagcaccacaagctatccttgatctcatcaccattgggaagataataaagaaagtccctattgtggtcggcaactgcacaggatttgcagtcaaccgtacattttttccttacacacagggttctcatcttctagttagtcttggtattgatgttttcagaattgatcgagtaataagcacctttggcatgccaatgggaccttttcaactccaagatgtggctgggtatggagttgccttggcagtaaaggatatctacgctgatgcctttggagaaagaaatttggactctgaccttgtggatttgatggtaaaggatggacgacaaagaaaagtgaacggcaaaggttactaca

SEQ ID NO: 3412 - DNA, 294 bp, Zea mays
  Clone ID: LIB3136-010-Q1-K1-C11
cacgcgtgcgaagattactcacgtctaagctcttcagtaatagctcacgagctgcaactaaaaaatggaggggccagatgggtggttgataccattgttggtaaaaaggatggactttgttgtgagaatctccacggcagtggggcgattgccagcgcatattctaaggcatacaaagagacctttactctgacatttgtgactggaagagctgttggcattggggcttatctggctcgtttaggcatgaggtgtatacaacgtcttgatcaaccaattattttgactgggttt

SEQ ID NO: 3413 - DNA, 376 bp, Zea mays
  Clone ID: LIB3136-010-Q1-K1-C12
cggacgcgtggggggaagcttgcatttactacaagaggggcagtcgtagaatccaatgaaagattctgggtttgctataaaatacaaaaggtgcaactgtaattacctaatctgcagtaactaagttcaccaaagtgttgtagggctgctatataccaaacaagaaatacattttggccctttaacttaaacacatagacatatcgactttttcttggcatcgcctcatcttttctgtgcaaccatggaattgaatgaacaaatgacttgttgcagtgcacctcatggaatctgacatcaacttgaaacttgctaaacctcttgatcccactaatcatgcataagccagcagagcagccaaggcaacccagaatac

SEQ ID NO: 3414 - DNA, 355 bp, Zea mays
  Clone ID: LIB3136-010-Q1-K1-C2
attcccctacatcctctaaaaaattttcctgaatctctcagacatcaaagtgccatcaatggatactacagccacttatcggaagcaaaatatgaggatcagatgaaagagttggctagcggaggtgcagcaagatccacatcgaatttgaatggtaccgatgcaaccttctataccccttctggtcatccgatgagtaccttaatgaagcaagcaaaggccaacacggcagttaatgaggttgcagttgcgacacaacagtcaatgtacaatcaaccatgcacactttcgcagatacaggaaagagacgctgatataaaagctcttggtgagctatcacgtgctcttgataaaa

SEQ ID NO: 3415 - DNA, 416 bp, Zea mays
  Clone ID: LIB3136-010-Q1-K1-C3
gagcggcccgcgcacgcgtatctgacccgcggggttctcctctcctccctctcgcagctgggcggcggccgggggcgaagcccaggggcggcggcggcgcggggaagaggagcgcgtggttggcggcggacggcagcaagcgctggggggaggccttcttcctgctctacacgcccttctggctcacgctctgcctcggtgtcgtcgtcccattcaagctctacgagaggttcacggagctggagtacctgatccttggcttggtgtccaccgtcccggcgttcgtcattcccctattcctcgtagggaaggcagatagtgttagaaatttcaaagatcgatattgcgtcaaggctatatattggattataatttttagctatgttggaactacttctggacacattactttttac

SEQ ID NO: 3416 - DNA, 428 bp, Zea mays
  Clone ID: LIB3136-010-Q1-K1-C4
tgcccgactggcttcaagtgcggaatcaactaccagcctcccagcgtcgtccccggcgggggcgtggccaaggtgcagcgtgccgtgtgcatgatctccaactccaccagtgttgtggaggtcttctcccgcattgaccacaagttcgacctcatgtacgccaagcgcgccttcgtgcactggtacgtcggtgagggtatggaggagggcgagttctccgaggctcgtgaggatctggctgcgctcgagaaggactacgaggaggtcggtgctgagtttgacgagggtgaggactgcgactagggtgacgagtactagacgctctactggcgcggcgtcgtctggcttgtgtgccactgctatcctgtgatctgccctgagtggctcctatcgcgttatgtttctgtcggttcttatctatctgtcgt

SEQ ID NO: 3417 - DNA, 347 bp, Zea mays
  Clone ID: LIB3136-010-Q1-K1-C5
cagagagagacaagtggtttacaaagccaagtgtgtactagcagtctagcaaccagcgtagctcgggcggcagcacgcagccatcatgtcagaggagaagcaccaacacttcttcaaccaccacaagacggacgaggagcagtctgcctgcgagtactggtactccgagaccgaggtgggcaccggcaccggcgagggcgagtacgagaggtacaagaaggaggagagggagcacaagcacaagcagcacctgtgagaggccggcgccatacgcagacgcgccttcgcactatactagaagcacgaggcgaataacgaccatgagcacgcgcacaggcacaagatca

SEQ ID NO: 3418 - DNA, 457 bp, Zea mays
  Clone ID: LIB3136-010-Q1-K1-C6
atcgaggagcttggtgaggctggtaaagtggatgaagctgaggcacttatgaaacgggtggacattctaaacgctgagaagacagctttatctaaccaagcagacagcaaagtggctatgcttgagaagaagatggagctttgcgaaacgtgtggatcattcttagttgctgatgatgctcttgagagaacccagtcccacgtgactgggaaacaacacattggatatggtatggttagagatttcctggtggaatacaaggcggcaatagagaagtcaaaagaggaagataggcttgcaagggagcagaaagcagaggagcgtcggaagcagagaggaaaagagtatgataatgggggcagggatagagataccagaagggagaagtctggggagcgtgactatgaccgtgatcgtcagtatgagcgaagccgtggaagagacaggtcttatgatt

SEQ ID NO: 3419 - DNA, 405 bp, Zea mays
  Clone ID: LIB3136-010-Q1-K1-C7
acgaggacttattttgtgatatcactggtctctgatgatttctctcactctagtagcacggacgttggcaaactgaagccaaacttcctcggcacaaagttcacaatcttcgacagccagcctcctcctgacgctgtagtgctaccaaacaataagacaagcaaaaggcagtccaagcaagtatcaccgagactgccactaggcaattacaatgttgctacagtcacgtacgagctcaccgtcctacgcaacaggggtccaaggagaatgcaatgcaccatgcactcaataccagctgagtgcatccaggagggcgggaaggcccctacccctacaggcgccatccagtcgcttgacgagccagtgtccaccttacctagtgccaaagggaaggaagtggctgta

SEQ ID NO: 3420 - DNA, 388 bp, Zea mays
  Clone ID: LIB3136-010-Q1-K1-C8
atgcaggctgctttccagatgaagtggagatcccaaatatggatgccaatcaagttcgggaggaatgaatggatgagctatgttattgcactggatgaagggggtctggaaaaggtgtcactttcatgtcatttagtggtgtcatgaagtaatgaattcgtgagctactgtgggcaaatccagtgccgaaggctccccacatgagtaccttctggagaaagggctccccagctgctgcgaacccacgacctcagacagctcccatcactgcatcaggcctgaccttctgaatttgtgagctactgtataaaataaaattgtcctgaattcatgtgatcttgtaataagactagtcttaaataaaaactacgatttcaccgtcaaaaag

SEQ ID NO: 3421 - DNA, 99 bp, Zea mays
  Clone ID: LIB3136-010-Q1-K1-C9
aaaaaaaaataacataataaaatattcgggcgtcccttataaactatccataattaattacagatccatgcgacttcataattccattattgttaaaca

SEQ ID NO: 3422 - DNA, 53 bp, Zea mays
  Clone ID: LIB3136-010-Q1-K1-D1
ctctctccaccttccacattcgcttatgcgccgcaagaagcactttgaccggc

SEQ ID NO: 3423 - DNA, 366 bp, Zea mays
  Clone ID: LIB3136-010-Q1-K1-D10
ggcgaccaccggagcgcggaggaggcacaggcgcccatctagagacgatggccgccgcgggctcctcgccgtccttctcctcctcgagtaagcgactggaagggaaggtggccctcgtcactggtggcgccaccggcatcggcgaggccatcgttcgcctcttcatggagcacggcgccaaggtctgcatcgcggacatccaggatgaggccgggcagcagctgcgcgacgccctgggaggtgacgcgcagggcgccatgttcgtccactgcgacgtgacgtctgaggaggacgtgagccgcgccgtggacgctgcggcggagcggttcggcgcactggacgtgatggtgaacaacgccggcgtga

SEQ ID NO: 3424 - DNA, 358 bp, Zea mays
  Clone ID: LIB3136-010-Q1-K1-D11
gccgtctcccttttgcgtgagcaaagaaagagagcgagaagcagtcgccatgtctggcatcggccacaagatcgaggagaagctccacatggggggcgaccacaagaataaggaggaggagcaccacaagaaggccgaggagcaccacaagaaggaggagggggagcaccacaagaaggacggcggggagcacaaagaaagcatcgtggggaagatcaaggacaagatcaccggcgagcacggcgacaagttcggcgaccacaaggagaagaaagacaagaagaagaaggattagaagaagcacggcgagggccacgaccacgacggcggtcacagtagcagcagcagcgacagcgac

SEQ ID NO: 3425 - DNA, 398 bp, Zea mays
  Clone ID: LIB3136-010-Q1-K1-D12
cgccagcagctctctgccctcctccctcaagccctagccgagtttttccatggtgccctgggtgccagcccctttactcgatgcccctgctaggttccatagccgtcgctgccccagccatctccttggtgaccgacctcgcccctgccccagccacagcttccccttcggccctgctgctgcaagcactcagcctctcctatggcacatggtgctcatacagcccctttctactggtgtttgcaccatctctctggtgctcgacgaaatgaccatgaggagttttgtgttgtgtgtagccccacctgcgacaccgtcgacccccggtgaggttctgttcttgccctgtcgctttagtgctcgacgtcgattactaatgtgtgaattgtgtgtgttga

SEQ ID NO: 3426 - DNA, 461 bp, Zea mays
  Clone ID: LIB3136-010-Q1-K1-D2
gcgctgagctggtctgtttagttggaaagccatctgtactgtacgtttttcgccgatcatggggggggagaggaacacccagcagcaccagggcggtgagcaggcccaggaccaggagaacgaggtgaaggacaggggactcctggacagccttctcggcaggaacaagcacgacgaccaggagaagaagaaccagcaggaggaggaggagctcgcgaccggcatggagaaggtcacggtggctgagcccgaccacaaggaggagggacacgaggccgccgagaagaaggacagccttctcgccaagctgcaccgcaccagctccagttccagctcgtcgagcgacgacgaggaagaggaggtgatcgatgagaacggcgaaattgtcaagaggaagaagaagggccttaaggagaaggtcaaggagaagctggcggcccacaaggcccacgatgagggcg

SEQ ID NO: 3427 - DNA, 347 bp, Zea mays
  Clone ID: LIB3136-010-Q1-K1-D3
ctttcaggaaatatctgttgggaatgcaacacctgtgtggtataacatggtaaaacaaggggtgatagtgaccctgttttctctttctggtttaaccgacatgctggtgaaggagaaggtggtgaaattgtgtttggtggaatggattctagtcactacaagggtgatcacacctatgtcccagtcactcagaagggatactggcagtttaatatgggtgatgtcctggttgatggaaagtccactgggttttgtgctggtggttgtgcagcaatagcagattctggaacttccttgcttgctggccccacagccattattactgaaatcaacgaaaagatcggtgc

SEQ ID NO: 3428 - DNA, 248 bp, Zea mays
  Clone ID: LIB3136-010-Q1-K1-D4
cgcacccataacacgcaatgggcataactcaatagtgctcacctacgcagactacaacacggaggcgtgctacaataccaaggtcacatatcatgcatcaccgcccaaaaactgctaagccggcacagctttgcctaacatagacatcccgccatgggtcttaactcgcctgaagagcattatacgtttatccacgacactcccaaatcacactctccctgcaagacgtccgcagccaatctttatac

SEQ ID NO: 3429 - DNA, 362 bp, Zea mays
  Clone ID: LIB3136-010-Q1-K1-D5
cggacgcgtgggggagtacgcacgaaaccttcgtgcgataggaatagacgcgagagagattgattcctacagagctctatggcagtgtgttgccccaaaagacaaacaagagaacattcagttttgatgtaaagaacgctgtcagtacatataaagttgtctgcccgtagatctctcaaacatgtaggcgtatctgatgttgtccttttcggtttgaagtacttattatggatgcatacgtaaggtagatagagagctggatttggtacacattttattgttaggatggatggtcacctccagatataatccagaactggagaacgtgtaccagtatatgattaaattttcatgtgaaaaac

SEQ ID NO: 3430 - DNA, 457 bp, Zea mays
  Clone ID: LIB3136-010-Q1-K1-D6
cctctggtggatacgatgatgacctgattgccaggctgttgaagctcgggtgttgcagaggtaaggaaatagctgttaagacagtcaaaaccatcaagttcttgggactacatgaagagactcaaatacctaagggttgttcgagcccatttgatgtgatttgccagcgaatggaacagaggatggcctatggccacaatgagcaagacatggtactgctccaccacgaagtcgaggtggaatacccggacgggcaacccgccgaaaagcaccaagcgacgctactagagttcgggaaggttgaaaatggcaggtccaccactgccatggcgctgaccgtcggcattccagcagcaataggggccctggtactaaacctaaccacaattatacttgcacagtagtaaggaaaaaaagcaaagaaaagtcggggaggaggaatgatgtgtgctcattc

SEQ ID NO: 3431 - DNA, 447 bp, Zea mays
  unsure (1)..(447): unsure at all n locations; Clone ID: LIB3136-010-Q1-K1-D7
gccggggacaagcacaacgagttcgacttcgagttcctgggcaacgtgacgggcgagccggacctggtgcagacgaacctgtacatcgacggcgtgggcaaccgggagcagcgcatcgacctgtggttcgaccccacggccgacttccacacgtacgccgtgctgtggaaccccagccaggtggtgttcatggtggacgacacgcccatccgggtgtacgagaacgtcacgctgcaccaaggccacggccacggccaccaccggcacggcggcgcggcggcggagggcgccaacggcaccaacaccaccaccacgacgttggctgctgccccggcgccgttccccgggccgcagccgatggccgtgtacagcttcatctgggaacgcgacgactggcgacgcanggcggcgcgtgaagacggactggtcgcacgcgccgttcgaggc

SEQ ID NO: 3432 - DNA, 420 bp, Zea mays
  Clone ID: LIB3136-010-Q1-K1-D8
cggacgcgtgggcggacgcgtggggctggaagaaacagctggtgatagcaaaagatgctggacgattggatgtattgtgtcatcggatttatctcagtcataggatccttgtctccacagagaagtacttggtattgcatgatattgttgatacggcattgaagaaactggaggctgaggtcggtcctttatctggagctccaaatatgggtcgtggaattgtcagtcgacttactgttggtgccgaagttcagaaactttgtgctcaagcagtagatgctgtggaatcattgttctcgggtgtatctcctgctagttcaaaaattcagcggccatgcatgatgcgaccaaactttgtaaagtttgaagctataacccaaacatccgtcatggtattttggatttgttgattgcctatgc

SEQ ID NO: 3433 - DNA, 353 bp, Zea mays
  Clone ID: LIB3136-010-Q1-K1-D9
gcgagagagaacccaaacggagagagacaatcgagagagatggcaaactgttttggtgacatcgtggacaattacaagctagacacaatgccaaggtatatcggcaaaacgaagactcgagaagaccgggcacgagaggcctcccatctcagtaatgagaatgataagtccaagaaggctaaagactatgtgaacatgctcaaggactggtacggcaatggagcgtcgacgctgtgcgtgatctacaaccagacgggcggaaccctgcggtacgtcgacgacaaggactggctgggctacccggggccgacgccctacccgacggagatcggcaacgggcagtgggcgttctt

SEQ ID NO: 3434 - DNA, 355 bp, Zea mays
  Clone ID: LIB3136-010-Q1-K1-E1
cacgctagagaggaagagcgcgcggagagcgagagcccgggagaaacagcggccggcggcggaggggtgcagcggctcacctaccggaagcgccacagctacgccacaaaatccaatcagacccgcgtggtcaagacccctggtgggaggcttgtgtaccagtacaccaagaagcgcgcgagcggaccgaaatgcccggtcaccgggaagaagatccaaggaattccacacctgagacctgctgagtacaagaggtccaggttggcaaggaaccgcaggactgtgaaccgtccatatggtggtgttctgtctggtaccgcagtgagagagaggatcatccgtgcctttttggtcg

SEQ ID NO: 3435 - DNA, 341 bp, Zea mays
  Clone ID: LIB3136-010-Q1-K1-E10
cgacgatggctgactactgcagggtgccgtgcgagtacaagcacaggaacctgtcggtgagggtggaggacaggagccatgcccccggcgacctcgccatcaggttcctctaccagggcgggcagaccgacatcgtcgccgtagacgtcgcgcaggtgggttcgtccaactggaggttcatgacgcgcgacgacgggccggcgtggagcacgaggcaggcgccgccgggcccgctccagctcagggtggtggtgacgggcgggtacgacggcaagtgggtgtgggccgaccgcgaggtgctgccgcggcggcggcgcgccggcgaggtctacgacacgggc

SEQ ID NO: 3436 - DNA, 362 bp, Zea mays
  Clone ID: LIB3136-010-Q1-K1-E11
gaagaaggcaagcaaatcaaagaagaagggctcggacaagaagaagtcacagaagcatgtggggagttctgtgccagtgttcaaccttgaagatatagaggagggagttgaaggcgctggatttgacgatgagaaatcacttcttatgtctcaaatgagcttggagaagagatttggccaatccgcagcttttgttgcctccactctgatggagtatggtggtgttcctcagtccgctactccggagtctcttctgaaagaagctatccatgttataagctgtggctatgaggacaagactgaatggggaactgagatcgggtggatctacggttctgtgacagaagacattctcaccggat

SEQ ID NO: 3437 - DNA, 340 bp, Zea mays
  unsure (1)..(340): unsure at all n locations; Clone ID: LIB3136-010-Q1-K1-E12
cggacgcgtgggatcgtcgccctcaaattcgttccgtccaggcaaggaagaaatcgagcaggcaaggagaggagaagatggctcgtacgaagcagaccgcccgcaagtccaccggaggcaaggccccgcgcaagcagctcgccaccaaggcggcgaggaagtcggcgccgacgaccggcggcgtgaagaagccccacaggtacaggcccggcaccgtggcgctgcgcgagatccgcaagtaccagaagagcacggagctgctcatccggaagttgcccttccagcgcctggtccgtgagatcgctcangacttcaagacggatctgcggttccagagcca

SEQ ID NO: 3438 - DNA, 137 bp, Zea mays
  Clone ID: LIB3136-010-Q1-K1-E4
ggcaaggcctccgtgtcccacctcgtctgtggcgtggggcgctggatcccgctctggttggggggggaagccctttaaactgttgccacttgcattttaccttttccatcgatgtttattgtgagtggtcctatatc

SEQ ID NO: 3439 - DNA, 371 bp, Zea mays
  Clone ID: LIB3136-010-Q1-K1-E5
gcattggcaagattgataattttttgacttttgaaagggggtttctgcatggggatagaggcggccctgtttctgatccctcaagtcaccttggacgtgttgctggtgttgcaatgtttgttgacttggagacaagctcatgtgacataattaaagatgtaaacagcaagaagctatcaagagtgagatcttttgtttccggtgactgcgttgttatggggccatggattggacgagtgataagagcatttcatcttgtcacacttttattcagcgatggagcaaagtgtgaaatcctgttaagggattctgatgtactgaagcccattcctactgttctttttgaagatgcaccttacttttattatcct

SEQ ID NO: 3440 - DNA, 456 bp, Zea mays
  Clone ID: LIB3136-010-Q1-K1-E7
attttggtccctcgcagaagcttgattttgagcttgagatggctgccattgttggtgcagggaatgaattaggcaaacctattgatattaatgacgccgaagaacatatttttggcctaactttgatgaatgattggagtgccagagatatccaggcttgggagactatacctcttggacctttccttgggaaaagcttcagtaccacagtatcaccatggattgttaccctagatgctttgaagcctttcatgtgtgatgctcctaagcaggaacccgagcctttaccgtacttagccgaaaagaatcacataaattatgacattcctcttgaagtctggattaagccgaaagatcaaaatgacgcatcaattgtcacaaaaactaatttcaagcatctgtattggacgctgacacagcagctagcacaccacaccatcaacggatgcaacatga

SEQ ID NO: 3441 - DNA, 454 bp, Zea mays
  Clone ID: LIB3136-010-Q1-K1-E8
cggaccccttggccgaccccttggccgaccccttggtcccgcacccacttggaagcggagggggcttaattgcttctccaccttcaagagcctaccgttctaggagatcatgcagaatccatatgccagaagaagaagaagaaaacgcacaggtaaaaaagacgagcttattcatcgccgtcccttcacagctacacatcactgttttcgtctggaaccttaaattctagctagttgatcagtgatcactcagctaccatatcaacattcaacactgatcttgcagtttgtctgccattgcagtcgatggctgaaccattgtctcacaaaaaggctgctactaaacaacaagtctaatcagccatggaaatttccacttggccctagcaaacaataatatatttcccacgaaccaactaagcacatttttagacttttctcagtttctgtaatc

SEQ ID NO: 3442 - DNA, 384 bp, Zea mays
  Clone ID: LIB3136-010-Q1-K1-E9
cccaacctgttccaattggggcgctagccactgcacttgctaacgccccaccagatcagcggagacttatgcttggtgagaacctgtatcctcttgttgaacagctggaacgtgagcaggctgccaaggtcactggcatgcttttggagatggatcagacggaggttcttcacctgctggagtcgccagatgctctgaaagccaaggttgctgaagccatggaggtcctccgctctgcccagcatcttcagcagagcaatgtttctactgagcagcagctggctaatctatcattgaatgatggcgtcgtctccagctgaacgttaatgtttctgatgtttcggaagtgctgccagtttttgcttgaatactaccctatctaga

SEQ ID NO: 3443 - DNA, 388 bp, Zea mays
  Clone ID: LIB3136-010-Q1-K1-F1
gggtagtctttgtaactgtgatcacagacctcaacacatgccaccctacatggtttcatggggaggtgaatagatgttactgtccttcagaagaagttgccaagcgggcagcactggatgatctacaaccatctcaaatccgcgtgttcggtcttccgattcgaccatctttctgtcgtgcagttcttgttaaggatgatttgaggagggaacttgaattggatcctgagcttcctgcagtactgctcatgggaggtggagaaggcatgggtcctgtcaaaaagactgccagagccctaggagaatcattgtttgacaaagagcttggaaaaccaattgggcagcttattgtcatttgtggccggaacaaaacgctgagctcctcact

SEQ ID NO: 3444 - DNA, 120 bp, Zea mays
  Clone ID: LIB3136-010-Q1-K1-F10
tcctctctcatccgccttcctggcgattgcggcaacaaggtgacaatttagctgcccccgcggggaaaacggccaaaaaaggcggaggctgttagggaaaggaaacggaggaccaaaacc

SEQ ID NO: 3445 - DNA, 332 bp, Zea mays
  Clone ID: LIB3136-010-Q1-K1-F11
ttcaggttgaatatcctcacaatgtacacttaatccgagggaatcatgaagcagcggatatgagatgcgctatttgggttccgaatcgagtgcatagaaagaatgggtgagcgggatggaatctggacctggcaccgtgtgaacaggttatttaattggcttcctttggctgcactaatagaaaagaagataatctgtatgcacggtggtattggtcggtccatcaaccatatagagcaaatagaaaatcttcatagaccaattaccatggaagcaggctcagttgttctgatggatcttctatggtctgatccgactgagaacgatagtgt

SEQ ID NO: 3446 - DNA, 380 bp, Zea mays
  Clone ID: LIB3136-010-Q1-K1-F12
cagagctgggaatctagttgagagcatgaccgctgatttggctggtgaagtgacgtctgcggctggacctgtacgcttggaggatctgcagagaattctgagtgcaatacagtcatcaggtgctgcagctgaccctgatgctggagtaggactaggagacatcttgaagcctgatctggtcttgccattaattgaggacttgcccattgaacaattggcatcacatcttccggagggtggctcatggagtcctggtgatatcgttgagcttctccaaagtcctcctttgcgccaacaattagatgcattcacccacgttctgcggactgggcagatagatcttgctcaatttggagttgaccctgacaaatataagttca

SEQ ID NO: 3447 - DNA, 347 bp, Zea mays
  Clone ID: LIB3136-010-Q1-K1-F2
acatatcaattatatttatccacactgacattatcaaattccgctctatatacagtgatggtggggaaggtacaaggtaatgagatagcgaatacaaaatcatgaatataaaatgggtttatcaatgcccctgtaaaaagcgaaagagagagcttctcaactccaaactatagtaacactgcttgaaaggtgcatgatacttgctagtggacactgagggtatggaacgatttttcctgaaatagtgcttgcatgaacagcttgaagactcaaggcaaaggctagaaccactgaaccattgcatggcaaaacgagagaaccaaagctttacagacgagatgacaaaa

SEQ ID NO: 3448 - DNA, 180 bp, Zea mays
  Clone ID: LIB3136-010-Q1-K1-F3
cactttactacagaggagctgctgctgcaattgttgtctatgatataacaagtccggaatgattgagcaaagcacagtattgggtaaaggttaatggccgcatcatcaggaagcggatccatgtccgtgtggagcatgtgcagccctcccgttgcacagaggaagttccggcctgaggaa

SEQ ID NO: 3449 - DNA, 353 bp, Zea mays
  Clone ID: LIB3136-010-Q1-K1-F4
cctgccattacatacaatctcttcctgtacttgcggaatatgagataacaaaccttgcgtgacgggggatatgacaaggcgggggctacgataatgcccacgaaatgaccaaatgcattcgtgttcgacttgagcatatgcacaccaacttctacgcatataatgtccattttgtgccccttcattacatttaattggcggtgaatcgaaccctgttttgaagattactagcactcataggacggcaggaaaacacatactttacaggattgttctggttaccacacagttatacatgcactcctattgcttagctcgcatggaacaacatgacgggctggatctagagaaac

SEQ ID NO: 3450 - DNA, 412 bp, Zea mays
  Clone ID: LIB3136-010-Q1-K1-F5
tgaagcagcacctggtgggagatcttttgagaagctgcatctgggcgagtatgagtggaggtgttatgcagagtgcttcaagagcgtttgcaacttttcatctggactaattagagtaggtcaccagaagaatgaacgtgttgctatttttgctgagacacgggccgagtggcagattgggttgcaggcatgcttcagacaaaacattacagttgtcaccatctatgcctcattgggggaggaagctttgtgtcactcactaaatgagactgaggtcactactgtagtttgtggtcagaaagaactaaaaaagttgattgatataagtgggcaacttgacactgtcaagcgtgttgtctatatcaatgaagaaagcattctaactgaaagttctttagctcaaaactgcact

SEQ ID NO: 3451 - DNA, 367 bp, Zea mays
  Clone ID: LIB3136-010-Q1-K1-F6
ggcgaccacacatacgcggaggaggctcattctccaatctagagacgatggccgccggggggtgctcgccgtccttgtcctactctagtaagcgactggaagggaaggtggccctctttactggtggcgccaccggcatcggccaggccatcgttcgcctcttcatggatcacggcaccaaggtctgcatcgcggacatccaggatgaggccgggcagcaactgctcgacgccctgggaggtgacgcacacggcaccatgttcgtccactgcaacgtgacctccgatgatgacgtgagccactccgtggactctgcggcggaacggttcggcgcactggacgtgatggtgaacaacgcccgcgtgac

SEQ ID NO: 3452 - DNA, 349 bp, Zea mays
  unsure (1)..(349): unsure at all n locations; Clone ID: LIB3136-010-Q1-K1-F7
ctcgccttcgactgcccagagcgcccagcgcccgcgaagcttctagaacacgcgacgcgggcgagcgagctggcgggtgggcgaggcaaaactaaggaggcgggaggagcggcgatgcggggcaggtgacgctgcggcgcggcgtgggggatggtggcggcggagggtgggcccggcggggccgtcgaggagggcgtcggggagagctcgtccccgccgcgcgaggacgctgccccagcgcccgccggctccggcgggagcgggggcagcggaagcgcccgcgaaatctgtgcccaggtgctcgaccgcctcgtcgccgacggctacgcggaggcgtncgaccccgagt

SEQ ID NO: 3453 - DNA, 335 bp, Zea mays
  Clone ID: LIB3136-010-Q1-K1-F8
tcggcaggtaccataaaaaaaccgcagccagccgatcccgatgcggggcccactcgccgagcagggggtgtccaccgagacagcgaccgccccggcgccaccgggcgaccctgctcatcctcctccggctgaggcggtcgccgccacaccaagccgatcgagaccgtctgggttctagcaactagactgacaaggcaaggcttgtttgttggagaggatccagaacctgaaacatgatgtgcagaactggcactccaatggacagacgcatgtctatacatgcccaaatggactacacgatctcaagaaaggacttgactctgaagaggaacagc

SEQ ID NO: 3454 - DNA, 334 bp, Zea mays
  Clone ID: LIB3136-010-Q1-K1-F9
cgctgctcccacctctagcccgacaggtgaagccgccgccgttgcagtgtccatagccaccgcaggagactgagatggggggttttgtcaagacccacaagagcaatgcgtacttcaagcgtttccaggtgaagttcaagagaaggcgcgctggcaagacagactacagggccaggataaggctgattaaccaagacaaaaacaagtacaatacacccaaatacagatttgttgtgcgatttaccaacaaggacatcacagcacaaatcatctctgctagtatagcaggtgatatggttcttgcttctgcttactcgcatgagttgccacgata

SEQ ID NO: 3455 - DNA, 400 bp, Zea mays
  unsure (1)..(400): unsure at all n locations; Clone ID: LIB3136-010-Q1-K1-G1
agtcatccacactaacgaacgaactcttgctccgatcacgagctagctgaggtcgacgatggcggctgtgctgaacagcaggaagacgccgcaggtggtggccgtgctggtggtggtggcgctgctggcttcgtccgcgtcggcggcgatcacctgcgggcaggtggggtcgtcgctggcgccgtgcatcccgtacgcgacggggagggccagcgcgctccccgcgtcgtgctgcagcggcgtcaagagcctcaacagcgcggcgcggaccagcgcggaccgccaggcggcgtgccgctgcctcaagagcctcgccaacagcgtcaagagcgtcaacatgggcaccgtcgccaccatccccggcaagtgcggcgtctncgtcggattccccatcagcatg

SEQ ID NO: 3456 - DNA, 399 bp, Zea mays
  unsure (1)..(399): unsure at all n locations; Clone ID: LIB3136-010-Q1-K1-G10
cgaatccttcacaagggtcgatcctaccacacgagctggttctgaagtgaaatatggcacggacagtaaccagatgccaaactcctatttgccagttcttgtgcattatgagaataaccgcccatttgctgttgttgaggagcttgtacgcaaggtggagatttctcactggggaaacatccaaatcaccgagcagtataaactgaaacacggtggtgctcgtcacaaaggagtcttttccaggcttgagtatcaatctaggccatctatcagtggagcttcgtcctttaagaatcttcttgcaaggctgccacctcgggttcattcagtttactatcgtgatgagattggtaacatctnctcatcccatctgcgcactgattcacacaagtccgatct

SEQ ID NO: 3457 - DNA, 364 bp, Zea mays
  Clone ID: LIB3136-010-Q1-K1-G11
ctgattactcttacctgaagagactattccgcgatctctttattcgggaaggataccagtgtgactatgtgttcgactggaccattctgaagtatcctcagataggctccaacccgcggatgagggcaggtgaaaggactagtggagctgctggaccctcaatggaaaagattgagaaggccacaggagaagcagccggtagaaggaatcttagtggtcctgtgaaccagactgacagttatgcacaacgaccgcgtgagaccgtatctatgtcattaaaggaaattatgcatagcactgatcggtctggggaaaggaccatggagagaccacgtacattctcgcgcacaggcagtgcattccg

SEQ ID NO: 3458 - DNA, 378 bp, Zea mays
  Clone ID: LIB3136-010-Q1-K1-G12
ctcatttccatcccacccttgcgatcccggcagctgatccttcttccctttctctctatcggacttgccgatcgggcgccggcgccgtcgccttcttcttccctctcgcgctttcctcgcggcggtggagccaccaccaagccggctgcaattcgccgtggcgcgcctgactcgtggcgcgggaacgcggttgcacgcctcgaagaggggagacccctctcccgcgcgcgacggttcccgaacatcccggcgaaggacctgctcggtcatcgctgctgccggagctgctcatgttgaatccgagatctgaaatctaccccaccatagagtatcgccctatccagccctccgacctcgaagctcttgaaaagattcatc

SEQ ID NO: 3459 - DNA, 364 bp, Zea mays
  Clone ID: LIB3136-010-Q1-K1-G3
cccttccggatgattccattaaagctcttaaaggtgattaaacctgcccccaccttaaatggtccttggggggccttttgaatgggggtggtggtgcctgacaaaataatctctttgtagcatcctttttctttgatagggctgctgaggctggatttgtgaacgccaatgcacctgttgctaaggttaaaccctcagacttcagacaagctgctgagcgcgcttgctctttgagtgtgaagaacgccgaggctacctttcctggtgtccaaaaggataacattccatatatctgcatggaccttgtttatcagtacacattacttgtgcacggattcggcgttgatccagaccatgagatgac

SEQ ID NO: 3460 - DNA, 403 bp, Zea mays
  unsure (1)..(403): unsure at all n locations; Clone ID: LIB3136-008-Q1-K1-G1
ggtcttccgcccgccatggccgaggcccccacgtatcagatcctggtgcgtctcctcgacgggcggaccacatgtcttcgcttctccacgcccaccgtctccggcgccgtgctcctcgaagctgtcgcgtctatatctcgcgtncccgccgccgccctccgcatcgtcaccggccgcttcgacgtctcgccctccaacgtcctcacctcagcagctgatggccagttcccctccgccttcgcgctcctncgccttcgaggaggcaagggcgggttcggctccctcctcagaggggccgcctccaaggcggngcagaaaaagactagcaactttgacgcctgccgcgacatcaacggtcgccgccttcgccacgtcaacgctgagcgccgcctcgaggaatgga

SEQ ID NO: 3461 - DNA, 397 bp, Zea mays
  Clone ID: LIB3136-006-Q1-K1-D11
cgctcgccgccgcggcaatctacgcgctgcgggtctacatggcgcagggcttctacatcggcaccgaggggcttgggatctacctcctcaacctcctcatcggtttcctctcccccatggtcgaccccgagctcgacccctccgccgccgccgaggggccggcgctgcccacccgggggtctgacgagttcaagcccttcatcaggcgtctccccgagttcaagttctggtatgcaatcacaaaagcttttgttgtagcttttgtgatgactttcttctctgtgtttgacgttcctgtcttctggcctatactcctctgctactgggttgttctctttgtccttacaatgaagcgccagattgtgcatatgatcaaatacaaatatgtgcctttcag

SEQ ID NO: 3462 - DNA, 334 bp, Zea mays
  Clone ID: LIB3136-006-Q1-K1-D2
ccaaaccctagggcttccaaggtccaagcttgccgttgatggggcgcaagaagaacgtcgccatcgacgacgacgagtacttctttccgcaggacgacgcggccgacccagccccgtccaccgccgcccccgacgtcgccgacaaagagaagtccaagaagggccgtaagaagggaaagaaggggggcaaggctgccgcgcccgacgacgacgactacgagcccactgccccgacgacggcggccgacgacgaggacgatgacggcgagcccatcaacctcgacttcaccggcaagaaaaaggagaagaagggcgccactcccggcgctccctt

SEQ ID NO: 3463 - DNA, 406 bp, Zea mays
  Clone ID: LIB3136-006-Q1-K1-D3
aattccttcttcaactgttgtgtacttgcgtgggtgtctctctccctctgcccgagatgtggtctctgagctgcaactgcccaggggtgtcgtccatgagcaagacggcgctcgattcggggcacctggtggcctcctgccgcagccgctggcacggcgcgcgggcgccgaccagacggcggcgcacgccatgtgtttgcttggttgcctcaccgaccaccacccagcctggccctgctgctgttgatgtgccctcacggatggttcctgctgtcacaacatcaagcgcccctgaacgcatttctgtttctgcgctgctcgaggttgtctcagacgacttgctcaaccttaacaacaatctcaaatcgcttgttggtgcagaaaatccagttttagtttctgcagc

SEQ ID NO: 3464 - DNA, 377 bp, Zea mays
  Clone ID: LIB3136-006-Q1-K1-D4
caaaaacatcgacatctcaccaaactactcacctgtgctcaacactgacgacgcctacgcgagtcaagaagttaacgggcctgacgggaagcccattggtcctcctatgggaaatccatggatctacatgtaccctgagggcttgaaggatctccttatgatcatgaagaacaaatacggaaacccacctatctacatcaccgagaacggaatcggggatgttgataccaaagagacacctctacccatggaggctgccttaaatgactacaaaaggctagattacatccagcgccacatcgctactcttaaggaatcaatagacttgggatcaaatgtgcaaggctacttcgcttggtctctgctggacaactttg

SEQ ID NO: 3465 - DNA, 319 bp, Zea mays
  Clone ID: LIB3136-006-Q1-K1-D5
cggacgcgtgggcggacgcgtgggtgtcgatcagcaagaggccggggtcagaggagatggcggcgacgtcgcggctggcgctggccctcctgctggccgacttggtggcggcgtggcaactgccggcggctgcggtggcggccaactacacggtcggcgacgagaaggggtggaacccggacgcggactacacggcttgggtgaagaagcacaagccgttctacaagggagactggctcatcttccagtaccagaacggtccgtcggacttggtgcacgtggactcagtcagctactactacttctacaaggccaacgc

SEQ ID NO: 3466 - DNA, 371 bp, Zea mays
  Clone ID: LIB3136-006-Q1-K1-D7
ctctgtttcgtcctcatcgaatcggagtttcgcatggagtcatcgcggtctcgggagcgggcgcgccaagcgcatgactgtgccgccgctccgccaccaaagcgagaagtggtagccaggggtggcgcgtcgccaccatggagggaggatgaccgtgatggacacttcgtattcgaccttggcgagaacttgacccgccgatataaaatcttgagcaaaatgggagaaggtttgggttttctgcaatctgtcgtctcctcttctgctgggtatctccgttattattctaatgaagagggctacgagttggattttcgtaggtacattttggcgtgttttggaatgctgggaccgtgaaacacatgaatatg

SEQ ID NO: 3467 - DNA, 401 bp, Zea mays
  Clone ID: LIB3136-006-Q1-K1-D9
agctttcagccgatcgagcaccatcgtcacagtcagtagtagccaagcatatttctttctccgagggatttgcgctgagcgatcagttcatccagagcgagcggagcggagctgagctgagcgagcttgtgttgcttgagagaccctgccatggcttcccaccaggacaaggctagctaccaggccggcgagaccaatgcccgcaccgaggagaagaccgggcaggcggtgggggcgaccaaggacacggcgcagcacgccaaggaccgggcggcggacgcggcggggcacgcggcgggcaagggccaggacgccaaggagaccaccaagcagaaggcgtccgacaccggcagctacctgtgcaagaagaccgacgaggccaagcacaatgccggcgagac

SEQ ID NO: 3468 - DNA, 382 bp, Zea mays
  Clone ID: LIB3136-006-Q1-K1-E1
ccgcccggattccgggtcgccacgcgtccgggaagatgtggcaggggagcaacaagatctccatcctcagcgcagcagtcggcctccctagccagggcacccactacgagacgtggaacgtcggagtgctcggtccggtcacgctgtccggcctcaacgaggggaagcgggacctcagcgaccagaagtggacctaccagatcggcctccacggcgagtcgctgggcgtgcagtccgtcgccggtagctcgtccgtcgagtggggcagcgcggcagggaagcaacccttgacatggcacaaggcctacttcagcgcgccgtccggcgacgcgccggtggccctggacatgggcagcatgggcaagggccaggcgtgggtgaa

SEQ ID NO: 3469 - DNA, 427 bp, Zea mays
  Clone ID: LIB3136-006-Q1-K1-E10
agcgaaccgacggcggcgatggggatcggttagcacttcgagggcgtcaagcagcactgggcgagcgacttcgccttcctcgactacttcaagaaggtctacggccgcgccgagcccctccccaagtggtccgacgccgacgtcgacgagttcatcgcatccgacccggtctacgggccccagctcaaggccctgcgggagtcgaggaagttcgcgctcgccggggccctcgtccgcgccgtccacctcggcggcgtcgcgctcaagtactccaaggcgccgcacggcgtcctgctggcgaccggcttcggcgcgatcaccggcgccgtgctgggatccgaggtggcgtaccactggtaccagctctacgagatggacaagcatggggccaacctcacgttcatctactggtgggaggacaaggtct

SEQ ID NO: 3470 - DNA, 379 bp, Zea mays
  Clone ID: LIB3136-006-Q1-K1-E11
ggcaattactcctggcctgcctcttttcctctataactacaccactcaccagcttcatggggtatgggaggctgccagtttcggtgggtctaatatccatcccactgcatgggaggataagaagtgtaaaggtgaatctagattcccagcgcacgtgaggatccgcgttaggaagctctgcaagccgttggaagaggattccttcaggccagttttgcaccactatgatggcccaaagtttcgccttgagctctccatcgcggagaccctgtccctgctagacctatgcgagaaggaaggcatctgagctgttggctgcctcgtgaggttctagtaaatatcaatcatccttgtatgttctgtagatggtggttggcaa

SEQ ID NO: 3471 - DNA, 227 bp, Zea mays
  Clone ID: LIB3136-006-Q1-K1-E12
aatccctgactatatgttaaccgtcttcattcacttccaaaaaaaaaaaaaaagaaaaagggaaaaaaaaaaaaaaaaaaaaaaaaaaaaaagaaaaaaattataaggggggccgtttttcatgttcctgcttacatccgcgttcatgtaacatagttgctctttttttaggttcaccttaatttaattttatagccgaagtttttcaaaatccttactgttaaaaa

SEQ ID NO: 3472 - DNA, 372 bp, Zea mays
  Clone ID: LIB3136-006-Q1-K1-E2
cgcgatacccctcctccatccatattcatctgcccgcgaatcccatccccgcgccctcgtggccggggtaacgactaggcgaggatagacgtcgcacccgtaaatcacgcgaccatgccctttcatgcccgcaaatcacgtcacctccttgcatacatggcagccgagctcactgtacgcccttgcatgcatggtcgcggatccctgcgcgccacgattctttccatacgctgcctctgcgcccttccataacatggccgttaatacttgatagttgacatccgggagctgaagcgggagatctcgcgggtgccgctaacatagctagagcgggagcaggggctgatgaagcaacacgggaggatactcggc

SEQ ID NO: 3473 - DNA, 294 bp, Zea mays
  Clone ID: LIB3136-006-Q1-K1-E3
cgccgtcatgaagcgcgtgtcccaccccaacatcgtggagctccacgaggttatggccacgcgctccaagatctacctcgcgctggagctcgtccgcggaggggagctcttcgcgcggatcgtgcgcgccgggcgcgtcaaggaggacgtggcgcggcgctactttcggcagctcatccacgccgtggacttctgccacgcgcggggcgtgtaccaccgcgacctgaagctcgagaacctcctcctggacgacgcggggaacctcaaggtcggcgactttggcctcagcgcgct

SEQ ID NO: 3474 - DNA, 119 bp, Zea mays
  Clone ID: LIB3136-006-Q1-K1-E4
gctaccgcttacataagatccacagctgctttaccaccctccacatggccaagaccattcggcacagaggtaggacctccacccctccctggttcattaatcaaaacgccgtcttgcca

SEQ ID NO: 3475 - DNA, 362 bp, Zea mays
  Clone ID: LIB3136-006-Q1-K1-E5
gcgacccgctcctccaggtcgccgtcggtccgccgcccctccaggtcgccggcgccgcccggcatagaggaaggagcgccgcccctcctcggctcccccaccgcaacgccggctcgccacgcctacaggtatctctcctcaacactctcgtcacctgctacggtggcaggggcaccttcgtcacctgcaactacgacccgctggggatacgtcggcgtgcgcccgtactgaccggtgccggtcaagggcacctgcctctctccgttgattttggtgcttagttcatgtgcggttggtgttctatgttcgatcaaatgcccggttgagtttagctaagctttttgatgtttagagagaatttt

SEQ ID NO: 3476 - DNA, 368 bp, Zea mays
  Clone ID: LIB3136-006-Q1-K1-E6
gttttaacaagcaaatgcaagctaagaaaactcgagatttttctggtggttggcggatgaggattgctttggctagagcactcttcatgaatccaacaatccttttgcttgatgagcctacgaatcatcttgatcttgaggcatgtgtctggttggaagagacgctaaagaaatttgaccgcatactggttgtcatatcgcactcccaggactttctcaatggtgtgtgcactaacatcatccatatgcagaacaagaagctaaagttatatactgggaattatgaccaatacattcagacacgctccgagcttgaagaaaatcagatgaagcagttcaggtgggagcaggagcagattgcatcaatg

SEQ ID NO: 3477 - DNA, 355 bp, Zea mays
  Clone ID: LIB3136-006-Q1-K1-E7
ctagttctagatcgcgagcggcattggaagttggcttgagcatgtcttctggacgggtttggagtgctcgttcgatggacgtgaagacaaaggcagagcttgaggagattgctctcgctgaagctgatgttgcaaggttaaaacagaaggttgcagagcttcacctccaactcaatcaacaacgtcaacaccagtatggctctgtagtggatgcaaatgatcgtcatcaccgcctccctggtcatttctcacagcaaaactttgttcaacaaggatttgatatgaaccttgctttctgcaatcaagagaagcagagaaatgacgagagttcggtggagtcatcacaatggagaaa

SEQ ID NO: 3478 - DNA, 349 bp, Zea mays
  Clone ID: LIB3136-006-Q1-K1-E8
cgcgacgaaggtaagatgttcctgcggaggatcctgaccggcgggggcggcctgggggccgtgaaggcggcgcgcgccctgaaggaaaccacggggatcgtgggccttgaggtggtgcctaacgcgcgagaggttctggtagggctctacgagcgcacgctcaaagagatcaaggccgtccccgaagacgagggctaccgcaaggccgttgaatccttcaccggtcaccgccttcagatctgccaggaggaggaggactggaagcgcattgaggaccgaatcggatgcgggcaggtcgaggagctcatcgaggaggccgaggacgagctcaagctcatcgcttaaatga

SEQ ID NO: 3479 - DNA, 364 bp, Zea mays
  Clone ID: LIB3136-006-Q1-K1-E9
cggacgcgtgggctcgcccgcaacctgcgcttcgcctccaacttcgacctcttcaaggcggctgcgggcgactggcgcgacacgctcttctgcgaggtggctccgaacccgccgccgcgggaggagctgccggagccactgaggaacgtgatgctggagtacggcgcggcggtgacgaagctggcgcggttcgtgttcgagctgctgtccgagtccctcggcatgcccagcgaccacctgtacgagatggagtgcatgcagaacctgaacgtggtgtgccagtactacccgccgtgcccggagccgcaccgcaccgtgggcgtcaagaggcacacggaccctggcttcttcaccatcctcctgc

SEQ ID NO: 3480 - DNA, 291 bp, Zea mays
  Clone ID: LIB3136-006-Q1-K1-F10
atcttcatctagatgatccttgtctacgatgtcaggaaggcgctctgcaccaagtacccgaagttggtgcaggaggtacccaataatctaggttgtaccaatgccatccatttgtgaaaaaatgctaatgacacgatggatccgtgtcgacgactccagggtttcgtgtacctgctcggcagtgtgtgcatgtcgagcttgtagctggcgatgtcgctcgagcacgcctacgcgtaggacgtcctgagcgacgacaacacgccgcactgcctcagcttgatgttcgtgaac

SEQ ID NO: 3481 - DNA, 273 bp, Zea mays
  Clone ID: LIB3136-006-Q1-K1-F11
cacacactacacggcacgggcaccacatcccccaaggcaaggcgtacgtggcacgcgcgcgttcatgtgcacaacgacgaccttcatggcggtgccggccttcgcctccgccttcgcgtgcgcgcgcgccggcccgtcgcatccccgccaccgcgcgcgtagtgccgtcgcgaccgcggcggcgttcttgctccgccgccaccagcgaccgccacggcagataataaacatcgtcgacgaccgccgtgccagcttcgatctccgctggcggcg

SEQ ID NO: 3482 - DNA, 324 bp, Zea mays
  Clone ID: LIB3136-006-Q1-K1-F12
tgctctagatccgttcatcctggtggttttgtgaggtcgaaagcggcgagcgaattaggggatgctggacaagctgtgggacgacgtggtggccgggcctcgcccggagacgggcctcgagaagctccgcaaggccaccaccgcccgcccgctcgtcatcaacaaagacgcggacggcggcagctacaagcgggcgcagtcgacgccgtcgaccccgacgacgccggtgacgccgtcgtcgtcgacgacgccgcgcggcgccggcaacgtgtggcgcatcgtcttccacccggggagcaacctggccaccaagggcatgggcgc

SEQ ID NO: 3483 - DNA, 346 bp, Zea mays
  Clone ID: LIB3136-006-Q1-K1-F2
ccgacgagtacagcctcttcttcgccaactgcgcgccggagaccagcgtcagcatggaggtgcgcacgcgacatgtacaacaccaacccggacggcaccagggactacctctccgtcggcatggcctctgtcccaacgatctacgccttcttcgccgtctgctatgtcgtgttcctggccgggtggctctacgtcaccctccaccgcaaccgcctctccgcgcaccgcattcaccacctcatgtcgggtctgctcgtggcgcggatgctctattgcatctcggcggccgaggaccagcactacattcgcacggccgggacaccgcatgggtgggatgttatgttct

SEQ ID NO: 3484 - DNA, 198 bp, Zea mays
  Clone ID: LIB3136-006-Q1-K1-F3
aatttgttgatgaatttaaatttgaccctttctggcattcagttattgaagagtattggatgggtttgaccaattatatctgagattatagtgacagataacattgcttgagtttgggtctattgaccggaggaaaatcatttaagaaccttatctctgtggatggaaattaccttattggtattcacttcaattttt

SEQ ID NO: 3485 - DNA, 245 bp, Zea mays
  Clone ID: LIB3136-006-Q1-K1-F4
gcagttcttctgctcgttccagagaaaaaaataactgctaggaactcacaaggtagtaggggattgcgaaaagggatgtgaacagctgttttgatcgaagttgtctataaataccgtgctcacggactctgtattttaaaaaaaaaaaaaataaaaaaatgaaaataaaaaaaacaaaaacaaaaaaatataaaaaaaacttcaaaaaaaacggtttttatgggcagcggatttaaaaatatcaa

SEQ ID NO: 3486 - DNA, 344 bp, Zea mays
  Clone ID: LIB3136-006-Q1-K1-F6
cgtggaggaggtgatccagaaagcgaacaacacccggtacggcctggccgccgggatcgggaccaagaacatcgacgtcgccaacaccgtgtcgcggtccatccgcgccggcgccatctggatcaactgctacttcgcgttcgacccggacgcgccgttcggcgggtacaagatgagcgggttcggcaaggacatgggcatggacgcgctcgacaagtacctgcagaccaagaccgtggtcactccgctgtacaacactccatggctctgaccgaccgacctcatacctgtccgatgaacagttcaacatcacaaaacaagaagaaacatgtcttgtaagatac

SEQ ID NO: 3487 - DNA, 377 bp, Zea mays
  Clone ID: LIB3136-006-Q1-K1-F7
gcaaccggtccagcactttcacgctcagctccagcaatggctgcctccaccatggcgatctcctccacggcgatggccggcacccccatcaaggtgggctccttcggcgagggccgcatcaccatgcgcaagaccgtgggcaagcccaaggtggcggcgtccggcagcccctggtacggccccgaccgcgtcaagtacctcggccccttctccggcgagcccccgagctacctcaccggcgagttccccggcgactacggctgggacaccgccgggctgtccgccgaccccgagaccttcgccaagaaccgcgagctggaggtgatccactcccgctgggccatgctcggcgcgctcggctgcgtcttccccgagct

SEQ ID NO: 3488 - DNA, 318 bp, Zea mays
  Clone ID: LIB3136-006-Q1-K1-F8
ggagaattcttctcatggccgcactgttgttgtcaagggaaaggagaatggggggcccaaggatgaaggggccttcgatgtaagtaaactacagaagctacgggccaacaagaagaatggtgccactgacaatggaaccaagaagctgaccaaacctgacataaagaagaaagggaagcaagatagggtgtgggacgacaaaccttccaacaagaagctggattttacagacccggcagacgagagaggggacgaggtgacagacaatgtggcggtcatcgagggagaaagcatgatggataaagatgaggatctgag

SEQ ID NO: 3489 - DNA, 388 bp, Zea mays
  Clone ID: LIB3136-006-Q1-K1-F9
gcgcggacgcgtgggtctggatctcagcgaaaggaaaagatccaaggaaccttgtgggagctggaacaggggatgcttgctagcaatacctcatcagccagttctgacgtcaaaacatggcaggctttccctgatacacagactcaggcccgaccaaaggtcgatcatggaactaacggaagccaaaacataaccaagaacacaacatcaggtgcttcccccgacgcgtggggttttggtactgatagtttcagaacatcgtcagcaccagtaaaggctgctacacagatcaacagggctgcccaagggagctcatcccaaagatttaattctggtgtggccaagaaagtagagcaaccatctggatggggctgtttttaactccaca

SEQ ID NO: 3490 - DNA, 291 bp, Zea mays
  Clone ID: LIB3136-006-Q1-K1-G1
gccacggccggccggtggacgacagcaccacaccaccttcaactacccgagaccatcgacgagcatcttcctgcatctgcaatggctgccgctaccgtgtccgtcccccgcatcaagctgggctcccaggggctagaggtcttcgcgcagggcctcggctgcatgggcatgtccgccttctacggtccgcccaaacccgagcctgacatgatcaagctcattcaccacgccgtcgccgccggggtcacccttcttgacaccttcgacatgtacgggccgcacaccaacgag

SEQ ID NO: 3491 - DNA, 364 bp, Zea mays
  Clone ID: LIB3136-006-Q1-K1-G10
gcttctacaccaccaagtactttggatgtgagcttggtgcacagtccaaattcgatgagaagacagggatttccttggttaatggggctcatgatactgcaaagctggctggtctccttgaggtattcatcaagaagtatgtccaatgttatgggtgtgggaatcctgagactgagattctcatctcaaagacccagatgatatcactgaaatgtgcagcctgtgggtttgtctcagatgttgatatgagggacaagctcacaaccttcatcctgaaaaacccaccagaacagaagaagggcggaaaagacaagaaggccatgatgagagctgagaaggaacgcctgaaggaagtgaggctgct

SEQ ID NO: 3492 - DNA, 379 bp, Zea mays
  Clone ID: LIB3136-006-Q1-K1-G11
ggatgccttgcagtgcaaccctggacccggcgaccttgaacagttagttgactctcatgtgggctcggtcagatgtcaggatgcttatggcgcgcatgatctgagcacgagaattttcgtacaattttcttcttcagatgtaaagtctctccttcgctgccctgcttactcatattatttacgctgcacatgctcctggtgcctcctattaccatgtttatgctttcaacactccatgattattctttttccccccctgtacactgccatccgtgcatgtctgccatgactggcattgctcgctacttcctttgcgttgcgcccaacaatcgcgagggagaaaacgagtgcgggcgcggcccgagcgagcatggagtga

SEQ ID NO: 3493 - DNA, 339 bp, Zea mays
  Clone ID: LIB3136-006-Q1-K1-G12
caggacaaggagggcatccccccggaccagcagcggctcatcttcgccggcaagcagctggaggacggtcgcaccctcgccgactacaacattcataaggagtccaccctccacctggtgctccgcctccgcggtggcgccaagaagcgtatgaagaagacgtacaccaagcccaagaagatcaagctcaagcacaagaaggtgaagctctccgtgctgcagttctataaggtggacgacgccactggcaaagcgacccgcctccgcaaggagtgccccaacacatattgcggcgcgtgcgtcttcatggacaaccacttcgaccgccactactgcggc

SEQ ID NO: 3494 - DNA, 283 bp, Zea mays
  Clone ID: LIB3136-006-Q1-K1-G2
ctcattttttccctcctctcctcactagtatacgatggctcactaccgccgactattgtgggggattgacttacctctgccatgcctgacagtacctcctcctgtctcgccaatatggcgccgtctcagtgcccttactaaccccgcgcaggagcagcagtgcaagctcacatgcgtcttcaacatcacgctcaaatccgaggaccacatcatcaaggtcatgaaccacaccgtcttcgcctacatcaacgaccttgacacctcttacttgtacggggatccc

SEQ ID NO: 3495 - DNA, 341 bp, Zea mays
  Clone ID: LIB3136-006-Q1-K1-G3
ccaaggagctccttttctcggatggacatccacttgctaaagatttcaatcgcatagttggggcttggttcaatggtgcatcaaacattgcgcaagctggtggtttagcctgcctctctgcagacggtctaaaggctatgcaagatgttggtggcttctacaaggagaacactgaaataatcggtgagacatttacatcactcggattcaacgtgtatggcgcccagaacgctccatacgtatgggtgcacttccctggccgcaatttgtgggatgtgttcgctgagatcctggagaaggccaatgtggtcactactcctggcactggatttggaccgggt

SEQ ID NO: 3496 - DNA, 335 bp, Zea mays
  Clone ID: LIB3136-006-Q1-K1-G4
gggctgtccactctttcaggatcaccaactgcggagtccaggacaccacacacatccacggccacatgtgctactccaacttcaacgacatcatccactccatcatcgacatggatgccgatgtgatcacgatcgagaactcccggtctgacgagaagctactgtccgtcttccgtgagggtgtgaagtacggagctggcattggccctggtgtctacgacatccactctcctaggattccctccaccgaggagatcgcacaccgcgtcgagaagatgctcgccgtgctcgacaccaacattctctgggtgaaccctgactgtggtctcaagaca

SEQ ID NO: 3497 - DNA, 337 bp, Zea mays
  Clone ID: LIB3136-006-Q1-K1-G5
ggcgtctaactggcacaaccgacctccgccgcggatgtggtgaccacctctgagggcgctggggatcttattgacgcgcgctaggtacaacgacttggaggacgtcatcaccctgttctccgatggtgtctagctggactccacagattcgcaaggcctcacaaatcttcacatggattgtgccaatcagtcaccttgcctgggtggaatacttgattcaaaatggagcgaatgttaacgccaccaacatggagaacaacacaccagtccactgggcatgccttaatagacgtataaacagaatcatggctttcatcttaacggagactagcgtgag

SEQ ID NO: 3498 - DNA, 372 bp, Zea mays
  Clone ID: LIB3136-006-Q1-K1-G6
gagtaattctgcccgtggatcatcatctcaacctgttttggagaaccctgatgggctatgggatgaccaaaggatgagccagtcatcctctagtcttccaccttctacagctgatatgcaagaaaccatgaggaattctatgaaagaccctgcaatgcggcagatgcttacatccatgatgaagaacatgagccccgagatgatggcaaatatgagcgagcagtttggaatgaaactgtcaaaggaggatgccgcaaaagctcaacaagccatgtcgtcattatctccagaggatttggatagaatgatgagatggatggagcgagcacagaaaggggtagaagtcgcgaagaaaacaaagaactggctctt

SEQ ID NO: 3499 - DNA, 140 bp, Zea mays
  Clone ID: LIB3136-006-Q1-K1-G7
acgacatctacctagtatctcattactcaattcggcactggtcaacatttgatggcgtggagactgaacttatcaacgtccaaggacatgtggcaccaaaggagaaacatgcaagaaagttaataaaaggggtttattaa

SEQ ID NO: 3500 - DNA, 315 bp, Zea mays
  Clone ID: LIB3136-006-Q1-K1-G8
gctgcgagtctgtggtcacaagtggtcagcaccaccaacagcaaaacccagcagggccggggcctcagcgggacgcgaataacccagctggtctactagctattgctgaggagaccttggcagagttcctgtcgaaagcaacaggaactgctgtcgattgggtgcaaatggttgggatgaagcctggtccggattccattggaatcatcgctgtttcgcacaactgcagtggcgtagcagcccgagcttgcggcctagtgagccttgagcccacaaatgtcgcggagatcctcaaggatcgcccttcttggtacc

SEQ ID NO: 3501 - DNA, 379 bp, Zea mays
  Clone ID: LIB3136-006-Q1-K1-G9
ggatattgttgctgaattacggcctgatcttggtgaggagtggtggacatatgtttgtgggggtcgttctgatcctcaaccaaactggcaccttgggatgcgtggaacccagcaccgggcagtgatgtggcgagtgtggaaggaaggtgggacaggatttctttattagggttccaactgctatgagaaggctatgatcccaagtgctgagatctgtttccgacgcggccttcctcctggcgacggtgtcctgttttaccctggtgaagtgttttcttcgtcacatgaaccagttgcttccacccggctagagcgcattctcagtggcatgcaggacatcgaatacctgaagctttattcttcacggtatgggagggag

SEQ ID NO: 3502 - DNA, 192 bp, Zea mays
  Clone ID: LIB3136-006-Q1-K1-H1
ccctctcatttctacaccctctcacctcaaaattcatcctcctttctacagggatgcgtttaaatatatgaccattccccaaaccacatccttctctatggcctcatcttccaccatcattcacttcctatacctctatatctatccttctcacctcctctttcttaatttaacatatattactccatctct

SEQ ID NO: 3503 - DNA, 374 bp, Zea mays
  Clone ID: LIB3136-006-Q1-K1-H10
tgcaaatactcctacaaatggtgacagttttcctttcgtcactgatgctgctgtatctggatatcgggaagggtaccaggaggatgctggggttggtacaagtggccttggtttattgagcaacaatactggtgattttgaaataaataactggcaaatgcattcttatccacaaccagagcaagggttccagttttttgggactgatactgatgttggcaatccttttgttggtccgcataattcctttagtattacaccagaagactactcccttgactgtaatgttggcatagaggatccatctgcagctcacgatgtctcaatttgccgaaacagtaatgatgtgcatggaagcttggttgataacccat

SEQ ID NO: 3504 - DNA, 359 bp, Zea mays
  Clone ID: LIB3136-006-Q1-K1-H11
cttgatggcaatccagtgaagcccacgtttcataatggtccagttccaaatttctcttcgggtcgtggtcctcgtccccactccccacctgcgcagctgcgctgcgccatctcgaatcctctccttccaccatctcgaacctctccttccgtctcctccccggccgattcttccagtctccagccaccttcaactgccggccgcaagtggccccgcgtctcacccctaaccccagtgaagaatctaggcgtcgtctatccagccccgtcatcatcaccatggaggaggcactggatacctaactgcttgctttgcactgatggttggaccagaagggcgagcagttggtgtcggacata

SEQ ID NO: 3505 - DNA, 395 bp, Zea mays
  Clone ID: LIB3136-006-Q1-K1-H12
ccgaggttccccaaacacgcacagcacacgaacacacaccgcgcccagctccgaggtgaggttccggcggccggcgagatgagccgtggcacatgcgcgggctatgaccgccacatcaccatcttctccccggagggacgcctgtaccaagtcgagtacgcgttcaaggcggtgaagtcggcgggtgtcacgtcgatcggcgtccgcggcgcggactccgtctgcgttgttacgcagaagaaagtcccggataagttgctggatcagacgagcgtgacacacctgttcccgatcaccaagtacgtcggattgcttgccactggccttacagctgatgctaggtcattggtttcccaagcaaggaacgaaacagcgtgagttcttttcaaaagggg

SEQ ID NO: 3506 - DNA, 341 bp, Zea mays
  unsure (1)..(341): unsure at all n locations; Clone ID: LIB3136-006-Q1-K1-H2
gccactgncggccggtggacgacagcaccacaccacctccaactacccgagaccatcgacgagcatgttcctgcatctgcaatggctgccgctaccgtgtccgtcccccgcatcaagctgggctcccaggggctagaggtctccgcgcagggcctcggctgcatgggcatgtccgccttctacggtccgcccaaacccgagcctgacatgatcaagctcatccaccacgccgtcgccgccggggtcaccctccttgacacctccgacatgtacggcccgcacaccaacgagatcctgctaggcaaggcgcttcaaggcggcgtaaaggagaaggtcgagct

SEQ ID NO: 3507 - DNA, 294 bp, Zea mays
  unsure (1)..(294): unsure at all n locations; Clone ID: LIB3136-006-Q1-K1-H3
gccactttcagcctntttacaatacccccttatcccttatcaactaccccataccatctacaagcatgtttctatatttacactgcttcacactaccttntccatacaacgtatcaaactcttctcccattctctagaccaatcctcacatataccaaactcccatctactttcctcacttcaccttcatcccaaaccctatccttacatcataaacatcatctactactccttcttcttcacactcacccttcttaacaccttctacatatactccccactcaccaaccacat

SEQ ID NO: 3508 - DNA, 270 bp, Zea mays
  Clone ID: LIB3136-006-Q1-K1-H4
gccaatgccccaatcccgtaatcgcagcctcgccccgctcgcatcttcctctccctctcaggactggtgctcaatctacaggttgtgccgcttcctacacacccgcccttcggtgtgaacctccatgacgtccacaaccactctccggtatgaatcccgcgtgcgcttacacgaagattggtaatagtggcgacccagtcgcagccggggaccttctcctcctcatcgcttgctcgttgtcgtcttttgcctacgtctgcacccgacgct

SEQ ID NO: 3509 - DNA, 416 bp, Zea mays
  Clone ID: LIB3136-006-Q1-K1-H5
agcgctgtccccatccactccatgtagcctaccaatcgtcacatctaactcacgggctatgcgctctactaaatccacagaggaccaccagctccctacacacccgccctcccgtgggaacctccatgacccacacaaccactctccgaattcaataccccttgcacttacacaaacattgctaatacactccacacagtcgcactcggggaccttctgctcctcatcgcttagctagagacaactattgcctacgtgtgcacccgacgctgctacccttcactcacctgatcatcatcctttcaaatatactgtcgtgacctcatccagacgtgctgtggcaatggatcgaagttcgctccaactctgattgggggaaaatgacttcggtatcaaacggtaaaacataacgggac

SEQ ID NO: 3510 - DNA, 286 bp, Zea mays
  Clone ID: LIB3136-006-Q1-K1-H6
atcaaatgcgaactgactaggagctccggatgtatcatggaaacttaggacagggtcgccgctgcaacctgttaggtgtcttctaccggcacaatatattttttgtttggaatatgtaatgatgttacggttcaacgtttattctaccctactatactgttggatgttctttgggcctgtttcattttgcacaaggattggagttccaatatcatgcatgctacattttaaattcgtacaccatcgcaaattttaggatgtataccaaattataggatattccaac

SEQ ID NO: 3511 - DNA, 350 bp, Zea mays
  Clone ID: LIB3136-006-Q1-K1-H7
gcggcaggcacccaaagcccaggaccgcctcaccgccaatggccgaccgcgtctgccccggggccaagccgaacccgcctccaggcgcggcgggcaacagcaacggcgcgcaggcgtcgtcgttccctgcgcccaagtcgcagatgtaccagcggcccatctaccgtccgcaggcccccgcgaagcggcagcgcgggcggtcctgcaggtgcagcttgtgctgctgcttctgctgggcgctggtggtggtgatcctgctggcgttcgtggccgcggtgtgcggcggcgtcttctacctgctgtaccggtcgcagcggccgtcgttcagcgtgtcgtcggtgcggctggcg

SEQ ID NO: 3512 - DNA, 297 bp, Zea mays
  Clone ID: LIB3136-006-Q1-K1-H8
acggcagtgttgtgaatgaacattcaggtgtactccagtgttcattctgtaagtgtgcgtgcgggggtgtatgtgcgcgtggctttcatctgcacttgaccatcgcagacgacagtgcggatgtcttggcttggtgcgttgggcaaacggctgtcgagttccttcagatatctcctgacgaatacctggagctccccgaggatgaacggcctatgtatctctacactctccagaacgaaagctttgcggcggctattgcgaataccaggaagcgagtcgatggatgtgctgagggtg

SEQ ID NO: 3513 - DNA, 276 bp, Zea mays
  Clone ID: LIB3136-006-Q1-K1-H9
gcgcggacgcgtgggctcatacgcatgccacggtggcggtgatcaggcccggtatctcatcaggggcgagagtcccaggctcgacggcggcgtcagcatctccccttcccgcttctatccagtggcctcttgccctcgcctccggacctctgcacaccggccggagaccctgcatttctttatacgatgagctggagacttgctctattcggctcccagcagcagcaatcagatccacatttccaggacattcctacgcagtcttagtaccctacc

SEQ ID NO: 3514 - DNA, 107 bp, Zea mays
  Clone ID: LIB3136-007-Q1-K1-A10
aaaaaaaaaaaaaaaaaaaaaaaaaaaaaataaaaaaaaaaaaaaaaaaaaaaaaaaaaaagaaaaaaaaaaaaaaaaaaaaaaaaaaaaaaaaaaaaaaaaaaaag

SEQ ID NO: 3515 - DNA, 403 bp, Zea mays
  Clone ID: LIB3136-007-Q1-K1-A11
gcagccgccgttgctgctgccgcgtccacagaatggggggtttcgtgaagactcataagggcaatgcgtatttcaaacgtttccaagtgaaattcaagagaaggcgggctggcaagacagactacagggccaggataaggctgattaaccaagacaaaaacaagtacaacacacccaaatacagatttgttgtgcgatttaccaacaaggacatcactgcccaaatcatatctgctagtatagcgggtgatatggttcttgcttctgcctactcgcatgagttgccacgatatggtcttgaagttggtctgaccaactatgcagctgcctactgcactggccttctgttggctcgccgtgtgctcaagatccgtggtttggatcaggagtacgagggcaatgt

SEQ ID NO: 3516 - DNA, 349 bp, Zea mays
  Clone ID: LIB3136-007-Q1-K1-A12
cccgacccaggcggcggtagcgctggcggctacctgttcaacgtgtcgcagcaggcggcgcacatgcaggcggcgtttggcggccagagccagttcttcttccagaggggaccccttcagtccagtaaccagccctccgagcgaggatggccggagagcgtcgaagccgacaacccgatgcagcacggcgggctcagccccgctgtgtcggccatcgggttctcgcccggcgtcggcttctccgggatccgcatccccaccaggatgcatggcgacgaggagcacaacggcggctatggcgacaagccgccgccgccgtccgtgtcctcggcttctcaccactgacgac

SEQ ID NO: 3517 - DNA, 422 bp, Zea mays
  Clone ID: LIB3136-007-Q1-K1-A9
gcaacattggccactttgacaatgaaattgatatgctcggccttgagacctaccctggggtcaagcgcatcaccatcaagccccagactgaccgctgggtgttccccgagaccaacactggcatcattgtccttgctgagggtcgcctgatgaaccttgggtgtgctactggccatcctagctttgtcatgtcctgctcattcactaaccaggtcattgcccaacttgaactgtggaaggagaagagctctggcaagtatgagaagaaggtgtatgtgctccccaagcaccttgatgagaaggttgctgctctccacttgggcaagcttggtgccaagctgaccaagctcaccaagtctcaggccgactacatcagcgtgccgatcgagggtccctacaagcctgcccactaccggtactag

SEQ ID NO: 3518 - DNA, 318 bp, Zea mays
  Clone ID: LIB3136-007-Q1-K1-B10
tcgcaaacacgccccaactgtcctcaatccagcagccctcgagtctcgtccccgcacatcagcgtggagacgccactaccaccaccgcaagcgacgacggggagatgtttctgcgacggatcctgaccggcggaggtggcctggcggcgctgagggcggcgcgcgccgtgaaggagacgacggggatcgtcggccttgaggtggcgcccaacgcgcgggaggttctcatcgggctctacacgcgtacgctcaaggagatcgaggccgtccccaaagacgagggctaccgcaaggccgttgagtccttcaccaatcacc

SEQ ID NO: 3519 - DNA, 407 bp, Zea mays
  Clone ID: LIB3136-007-Q1-K1-B11
ctgcgtggccctgctggtctcgctgtgccggcacggtggggacaaggtggtggccctgggggggaggatgccggggctgatgtcgtcgctgtacacgctggtggccgacggcagcccgcagacgtgcaagcgggccagggcgctgctcaacctgatccaccgccattacgagatggacggccagcagccggcgtcggaggtgcccggcgagcgtgtcgttcgcgtgctatagccgcagattccggagccgtaagtacagtaaataggtgtagatctttacggtgtgccatttgagaccatttcttgttttctgttctcagctcgtgttttagaagagctgagaacgatttttgctgcttccgttttgaagactgctgtagtcacagacacacacacagacgcgagag

SEQ ID NO: 3520 - DNA, 379 bp, Zea mays
  Clone ID: LIB3136-007-Q1-K1-B9
cccctttgcaagtatagtctctctgctaagcgaagcgaagcttcaagctagtgtcggcgggtctagaagacgatgggcaaggactacgtgatcgagagcggcgctggcggcggcgagttcgctgccaaggactacacggaccctcccccggcgccgctgatcgacgcggcggagctggggtcctggtcgctgtaccgcgccgtgatcgccgagttcatcgccacgctgctgttcctgtacatcacggtggccaccgtgatcgggtacaagcaccagacggacgcgtcggcgtcgggcgccgacgcggcgtgcggcggcgtgggcgtgctgggcatcgcctgtgccttcggcggcatgatcttcgtcctcgtctactgca

SEQ ID NO: 3521 - DNA, 419 bp, Zea mays
  Clone ID: LIB3136-007-Q1-K1-C10
gtaaacctagaggatatgcattcattgagtatgtgcacacacgagacatgaaaaatgcgggcaagcaagcagatgggagaaaagtggacaacaggagggtattagttgatgttgagcgaggcagaactgttccaaattggcgtcctaggagattgggtggtgggttgggatcaagcaggatgggtggtactgatactgacaaaaaggattccactagggagcaacaacatggtggacgccctagatcagaagagcctcggagggatgatcgtcgtgccgatagggatcgtgaaaaatctcgtgaaagggtacgggaaagagaccgtgtggagaggacccgtgaacgttcgcatgaccggactcgtgatagagatctacgagatgagaagcatcaccatagagaccgtgagaggactcgg

SEQ ID NO: 3522 - DNA, 405 bp, Zea mays
  Clone ID: LIB3136-007-Q1-K1-C11
gcctggaagctttgtgaccccgatgccgaaagtgtatttaaagctttgaggaaagctgagattaaaactgcagtcgtctccaatttcgatacccgtctacggccactcctgcaggccttgaaatgtgaccactggtttgatgcacttgcagtctctgcagaggttgcagcatagaagccgaacccaataatattcttgaaggcctgtgagttactgggcgtgaagcctgaagaagctgtgcacgttggcgacgatcgtagaaatgatatatggggagcgagagatgcaggctgcgatgcttggctctggggcagcgacgttcgctctttcaaggacgttgccgagcggatcggtgttgaggtgacgaagtgactaagtgagctaggatggtgaatatacggacgc

SEQ ID NO: 3523 - DNA, 241 bp, Zea mays
  Clone ID: LIB3136-007-Q1-K1-C12
acccactcttttttttcaaaacaattttatccactctttttttttgtttcataacaattacaatgtctcttgtttacaatgacagcatcactaaacccccacaatgttcccccacatgatacaacacaccgcattatgtacctttggcatggtgctacactaacacgactcttacgagacatgattaatcattaccgatcgaaagaatggaaattattcctccaacaacaacaaaattcca

SEQ ID NO: 3524 - DNA, 363 bp, Zea mays
  Clone ID: LIB3136-007-Q1-K1-C4
ccgcgagatcgaattcctcaaggacgagctacaattacttgaaggagttccaccagtttcgagaaggggtaaagaggtaaatgactttgttggtactaaacaagacccactaattccgatttctattaagacacacagatcatgccgtcttttttggtggatcagatcaaaactgtgcatatgcgtgccatggttctgctgttcctgccattgcatgcccaactgcaaaaggccatgctgcttggattgctcctgctgttcatgcccagatctgtcatgctgctatcccagctgcaaatcatgcaacaaaccatgctttgggcccaacagctgctcatgttgcgatatatcatgctgcaagcc

SEQ ID NO: 3525 - DNA, 406 bp, Zea mays
  Clone ID: LIB3136-007-Q1-K1-C6
gcggattaaagttggaaatttctgttacgtgaaggagggacttgttcttggtcagctcacagtgaatcgatttacaattactctgaggggtgttactgcagaatctgaagacatgataaaaattgcagtagatggcctaggaaagaatggatttatcaactactatggtttgcagcggcttggaagtggttcaataccaacacatcttgttggggctgctttgcttagaggagagtggaaggttgctgtaaacttgattcttgatccaagggaaggagagcgtgatgacatcaatgaggtgcgcatacgttacaaagaacatggtgacattgatatggcactgagaaacttccctcgacacctcgtagctgagagggccatacttcaatgtctgaagaaatgccct

SEQ ID NO: 3526 - DNA, 424 bp, Zea mays
  Clone ID: LIB3136-007-Q1-K1-C8
gcggcaagcaactgcaaagcagcaagctctactcttcttctgtactgaacgtgtgacgagataggaacaatcgtgaaccatggcggacgagtactgccgcagcggcttttgtattttctgctccggcgactactacgacagcggctacaacagcaagtccggcactgatgactacggccgtggcgaaggtggctacaacaagtcgggcggcgatgacgactactgccgcagcggctgcgatgggtacggcaggtccggcggcgacgactacggccgtggcaccggcggcggtggctacaacaagtccggcggcggagacgactactgccgcagcggcggcgacgactacggccgtggcaccggcggcggcgggtacaacaagtccggagacgacggctacgacagcgggtacaacagatcgggc

SEQ ID NO: 3527 - DNA, 422 bp, Zea mays
  Clone ID: LIB3136-007-Q1-K1-C9
aggggggcacccgcatcttcggcccctcccagaagttctcctcccgcgacctggccgcgcgcacctccctcaagccaagaaaagacggtcaacagacccaagaggagttacagaagaggaatctcagggaggaacttgaggaacgtgagcgcaagcactactcttccaaggataagtcctatgccgaagaaagagaccggcggaaaagctctagccatctactcttagaaggttcaaagagagagacagaggataagatagttccacgagaaatcgatgctgatgactccgatgtggagcctaaaagcgatgacgagagcgatgaagatgatgatgacgacgacactgaagctctaatggcagagcttgagaggattaagaaagaaagagccgaggagaagcttataaaggagcggcaacaa

SEQ ID NO: 3528 - DNA, 367 bp, Zea mays
  Clone ID: LIB3136-007-Q1-K1-D10
gctggacgtgatgcgctcgcccgtgagcctctgcaccggcgtcacctacgagcgcgcctggatccagcgctggctcgactccggaaacaccacgtgcccggccaccatgctctcgctcccctccaccgacctcgtccccaacctcaccctgcgccgcctcatcgcgctctgggcgtccacggccgcgccctcctctccctcctcctcctcatcgcccgccgtcggccccacgccggccgccgcggcggccgagctcctccgccgggtcgctgaccccgccgcggacccctgccccccgctccggaagctcgcggctttcctctccgacgacgacgtggacgagttcgacatgaacgcgctggctcgg

SEQ ID NO: 3529 - DNA, 408 bp, Zea mays
  Clone ID: LIB3136-007-Q1-K1-D11
gccagcagcacaagaaccagagtccatagacatccatcaagccaagaagaatggcattcctgagcacgaacgcgttgatgagcgtccccatcacggcggcagccgctcctcgccaccgccgcagcttggtcgtggtaagggccgcggccgtcaaatctaacgagcacctgcaggaagagcaagcatccgtggccgacggagctcgtgggcgtcgccgagccatggtgttgttggccgccaccgctgctgtcactggatcatccgtagccatctgcaggtctgctagagctgcaggtgtcaccacgctgagcggacagtatgtcaaaatagagaacgtcaaggacccatatgtccagggtgtcggcgaatgggctgtcaaggagcacaacaggcagactggtgagagct

SEQ ID NO: 3530 - DNA, 353 bp, Zea mays
  Clone ID: LIB3136-007-Q1-K1-D2
cgcaagcactccacactgctgtgcagaacgagagccacaccatcagtagttagagcgaccaggagatgggttcctccccgtcctttggtctcctggctgtagcagcattactcctatctctgagcttagcacaacatggctccctcgccgcaaccgtcggccccagggtcatcgtcgtcggcgccggcatgtctgggatctcggcggcgaagaggctgtcggaggccgggataaccgacctgctgattctggaagcgacggatcacatcggcgggcggatgcacaagacgaacttcgccggcatcaacgtcgagttaggcgccaactgggtggagggcgtgaacggcggcaag

SEQ ID NO: 3531 - DNA, 389 bp, Zea mays
  Clone ID: LIB3136-007-Q1-K1-D4
ctttatcccaaattacaatgtatcagtggctgaagtgcttattcctggtagcgaattgtcggagcatggtagtactgctggtatggaagcaagtggaacaagcaacatgaaattctctctgaatggttgtgttatcattggcacccttgatggagctaatgttgaaataagagaggaggttggagaagataatttcttccttttcggtgccaaagccgatgaagttgctgggctgaggaaggacagagaaaatggcctgttcaaaccagacccacgttttgaagaagccaagcagtttataaggagtggcgcttttggcatctatgactatgaacctctcttggattcccttgaatggaattctggatttgggcgtggtgattattttc

SEQ ID NO: 3532 - DNA, 406 bp, Zea mays
  Clone ID: LIB3136-007-Q1-K1-D6
ctgacgcgtgggcaagaggatgcaaagggtgttttgtgtgaagtacacctatgaggggacgtatttagtctctggcagtgatgatacaaatcttcgtctgtggaagtccaaagcttcagaacaacttggagttcttcttccacgggagcgcaaaaagcaagagtaccaggatgctttgaaggagcggtacaagcatctcccagaagtcaagcggattgtaaggcatagacatctaccgaagccaatctacaaggcatccaacctacggcgtacgatgatcgaagctgaaagccgtaaagaggaaaggaggcgaaagcacagcgctcccgggagcatgcctgtgcagcccttcaggaagcggagaatcatcagagaagttgagtagacatgcatggtcgtggtgttt

SEQ ID NO: 3533 - DNA, 430 bp, Zea mays
  Clone ID: LIB3136-007-Q1-K1-D8
gacaaacactatccagaagaagttcaaggtctcatcaacccaactgctttaccagtcttgcgcttaccaatcactgaccctgtttctcattggccccttccttgatggctttttgactaaccaaaatgtctttgcttttaattatacatctcaagttgtgtttttcatcgtcctgtcatgcttgatatctgtttcagtgaacttcagcactttccttgtgatcggaaagacatctcctgttacttaccaagtcctgggccatcttaaaacatgcctcgttcttgcttttggttatgttttgcttcacgatccgtttagctggagaaacatacttggaatcctaattgctgtagttggaatggtcttatattcatacttctgcacagtggagacccagcaaaaaaatgttgaagtctccccacaacaagtg

SEQ ID NO: 3534 - DNA, 415 bp, Zea mays
  Clone ID: LIB3136-007-Q1-K1-D9
gcggcaggcacccaaagcccaggaccgcctcaccgccaatggccgaccgcgtgtgaccccgccgtcaagccgaacccgcctccatgcgcggcggtcaacagcaacggcgcgcaggcgtcgtcgttccctgcgcccaagtcgcagatgtaccatcggcccatctaccgtccgcaggcccccgcgaagcggcagcgcgggcggtcctgcaggtgcagcttgtgctgctgcttctgctgggcgctggtggtggtgatcctgctggcgttcgtggccgcggtgtgcggcggcgtcttctacctgctgtaccggccgcagcggccgtcgttcaacgtgtcgtcggtgcggctggcgtcgctgaacctgacgtcgtcggcgacggcgcccgtgctgagcgacgccatcacgctgaccgtga

SEQ ID NO: 3535 - DNA, 328 bp, Zea mays
  Clone ID: LIB3136-007-Q1-K1-E10
tcatatcttgtatcatcttattaagattatattttcttctcaattgtcgaaacttcacaaatgcgtttttattaatcaccataatccaaacaagccttttcttcttactgtcccatacttaattaatcatcactttatgccctaacttaactcttcactacattttttttattttcaccttcactgcccccccctcccctcctattatatcttcctctcccgtaaaacactttacttctctcaccttattctcctttctcccatttcctttaatttacctcacttcttaccctttacccccgtctcaaaagctctctcctattctttt

SEQ ID NO: 3536 - DNA, 362 bp, Zea mays
  Clone ID: LIB3136-007-Q1-K1-E2
gactgccctccacccatacgtaacacgttcttctcccacgcccccactaaaacagatgcctgcgccctgcgtgcgccacaacggaaaacccaccactcgcgagcaagtgcaggcaccgttgcccatccatcgttcatgatcccagcctgcctccgcggcctctgcacctgctttgacgtggacgacgacaaggctaacaaccacgagcaagagccgacgatggccgccgccgccgccgctacagtcgtcagcgccgacgacgaccagacggcaagcaccatcatcacccaccgcaccgtggagctgagcaccggcgtgcgcctgcacgtggcggatgccggcgcggcggcggcaacagcagc

SEQ ID NO: 3537 - DNA, 331 bp, Zea mays
  Clone ID: LIB3136-007-Q1-K1-E4
gcgagcacggtctccgtcagtcggtcacatttctcgcgcatcagcagcagcataagcagccatggtcaggagtctcgcgctcgcctccctcttcttcaacgccagcgagggcgagggaagccagtgcctttcctcctcggcctccttcagcacggcggcgtcgtggcagtggccgtcttgcacgcatgcgaggacgcgctccttccggggcgagatcgtgtccatgcgccacgtctacaccagcagcaagcgagaggagcaggaggggtacaagacgagcatgaacccatcctacgtcgttcacgactgctactccagctccctcttcgac

SEQ ID NO: 3538 - DNA, 388 bp, Zea mays
  Clone ID: LIB3136-007-Q1-K1-E6
tcttccatcctccgccgcgtcctttttgccaagcgcagcatccgccgcatcacggggctgtgttgatctcatccatggcggatgtgtatcatcaacaggacacgccgaagctcttcaaccgctggacctttgatgatgtccaggtgaacgacatctctctgaacgactaccttgctgtgaactcgtcttatcacgctatgtacctgccgaacaccgttgggcgctactccaagaagcggttccgctaggcgcagtgcccgatcgttgatcgccttacatactccctcatgatgcacgggcgcaacaacggcaagaaggtcatggctagtcgtatcatgaagcataccatggagatcattcacctgctcaccgattccatcaccatcca

SEQ ID NO: 3539 - DNA, 394 bp, Zea mays
  Clone ID: LIB3136-007-Q1-K1-E8
gctccaattacccgcgccgcatccaccacctcgcttcgtcgctgccgtccgtggcggcgcgcccggccaggatcggctgctcgcaggggttcaccgcgctgtacgcgggtggggccaaccccaacctactcgtcggtgccgtcgtcgggggacccgacatgcaggacaggtttcccgacgagcggaacgaccacgagcactcggagccggccacctacatcaacgcgccgctagtcggcgccctcgcctacctcgcgcactcctacggccagctctaagctccctagcgttaattgttgccgtgttgattgattgttcggaaattagagcatcgcgatttgacgaccccagtgcaagcaaaaccaaggacgcttcgcttgtgggtcttaatata

SEQ ID NO: 3540 - DNA, 179 bp, Zea mays
  unsure (1)..(179): unsure at all n locations; Clone ID: LIB3136-007-Q1-K1-E9
tctctgactctnttttcgctcttgttttaatatttcaacaaactccccntttctaggggatcgtgacatttacaggacgatgggatctctctctctcctccttctcctgatctctaagaatggtctatcacatacacacattccacccgcttctgtacaaccccctctataatgacttt

SEQ ID NO: 3541 - DNA, 334 bp, Zea mays
  Clone ID: LIB3136-007-Q1-K1-F10
tcgctgacgcgtgggcgacggcgttccacttccaccccctaccctcttttcccgcgggcgcgggtccttcctctgcggtagccccgcgcgaagcacacggcggtggtcctcgtcaaccaaatcgtcgccacatcgcgttctccccggcgaggatctgtaggcgagctcgccgtccatatccgcccaagtcacccccagctcgtcgcagtagcagcaacacaacaaccatgagtcttgcttgtcttgtatgccatggcatgagcagctcctcacactctcttagaagctactcggcgtcaagttcagaggaggaaagccgatgtggagctgctgt

SEQ ID NO: 3542 - DNA, 420 bp, Zea mays
  Clone ID: LIB3136-007-Q1-K1-F11
caaagtgttccactttcgacgtggtcaccgccatgatcttcaaatgtcgcgcgttggcgttcgacttcgcacctgacgctgaggttcgcctgggctttgcagccagcactcgccacctgctgagcaatgtgctgccctccgtcgatggctactacgggaactgtgtgtacccaggtggtctcaccaagaccagccaggaggtgaaggaagcttcactggtggagatcgtgaccgcgatcagggaggccaaggaggctctgtcgtcgaggttcctcgactggttgagcggcggcgccaaggagaaccactacaacgtgtcgctggactacggcaccctcgtcgtgaccgactggagccacgtgggtttcaacgacgttgactacgggttcggtgagccaagctacgtgttcaccctgaacg

SEQ ID NO: 3543 - DNA, 287 bp, Zea mays
  Clone ID: LIB3136-007-Q1-K1-F2
cacgcgtcgggcgaggagcgtgcaattccgtagctgcaactgcaagtctgcaacgaactccctccctcccgcgaccagatcgcccgctgctcctctatccctttcctgctgctgctactaccttaagctatcatggccttgatgctgctagcgcgcaacctgcgctcccgcctccgcccaccgctcgccgccgccgcggcgttctcgtctgccgcggcggaggcggagagggcgatactggacgggccgcggaacgactggagccggcccgagatccaggccgtcta

SEQ ID NO: 3544 - DNA, 416 bp, Zea mays
  Clone ID: LIB3136-007-Q1-K1-F4
gcggggttaaccatcgctggtttctactacgtcttcttttcttgcagcgatggctccattaatggattttgttatgatccaaatagcagtccatttcataagctcgagctgaagtgtaccaatgagaaaaatccgggttcaccttttcatcctacgagctgcagtgacaggacagatgccctcgacagacaactttctgttagcatatagtgtgtgtactgaactcgtactcccaaatgaaaggaatgagtggtcgtttacgtaacagtttgttttctagcaagactaagcaaactgtcactttgttatctgcagaagcatcttgtcctttctaaaatctaccttttgtattacgttcctattccacaattgttatctgcaatcggggatatacacattgtgcgtgcgttctgatt

SEQ ID NO: 3545 - DNA, 418 bp, Zea mays
  Clone ID: LIB3136-007-Q1-K1-F6
cccagattctgcaaccaagaccgctcaggcattattagacttcaaccgtgaaggattgccgctgttcatcctggctaattggagaggcttctctggtggacaaagagatctctttgaaggaattcttcaggctgggtcaacaattgtcgagaaccttaggacatataatcagcctgcttttgtgtacattcctatggctggagagcttcgtggaggagcttgggtcgtggtcgatagcaaaataaatccagaccgcatcgagtgttatgctgagaggactgccaaaggtaatgttctcgaacctcaagggttaattgaaatcaagttcaggtcagaggaactccaagactgtatgggtaggcttgatccagagttgataaatctgaaagcaaaactccaagatgtaaatcatggaaat

SEQ ID NO: 3546 - DNA, 441 bp, Zea mays
  Clone ID: LIB3136-007-Q1-K1-F8
ctcggtttcgcttaactcgcccactagcaaagatggttctgttgacaacaaagttggtcgggatgtgcagaaccagtccctttttagccctcaagtcgactcttcctccctactgtacaatatggtacctaatcttacctcaaatgttgctgataataatatatcagcgtttccctctggatcaacatatctgcaaagtccaatgtatggttgtctggatgactcttctggtttattgcaaaatacaggagagaatgatccgacaactagaacttttgttaaggtttacaagtcaggatcagtggggagatccttggacatcacccggttctctaattatgctgaacttcgagaggaactgcgtcagatgttcggcattaagggtcagttggacgaccctgatagatcatgctggcagcttgtatttgtcgacagggagaa

SEQ ID NO: 3547 - DNA, 403 bp, Zea mays
  Clone ID: LIB3136-007-Q1-K1-F9
cgaggctgctgctgctgcgcccatggccgcggaaggcaagacgccgtccctcgccgaggggtgttcacttccaccacaggaagttccagtggaaaaggcagctgaggagaagccctctagtggtactgagtctgaagctgctccctcaaccaatgatgaaactcctccatctgtagaagacaagaatggaacttctgaagtacaagatgctgctgaaaatccagaggcagaagaaactaacactgctgcagaggaaacacctgctgtagaggaagcaagtgagactaccaaggaggaagaggctgagaaacctgagatcaagatcgaaacagctccagcagattttcgtttcccaacaacaaaccaaacaaggcattgtttcacacgctatgttgaatatcac

SEQ ID NO: 3548 - DNA, 377 bp, Zea mays
  Clone ID: LIB3136-007-Q1-K1-G10
gatagccaaaagctgtttgctgatgcattggtaaagaaagcatatgataactggatataggtcattgaatatgatggcaaaggtctattgaaccttaaaccaaagaaaaaggctgcatccactggtcaagctgagacgcatgcttctgcgggtggttcgacttcgtatcaacaacacctctcctcaacgagcatgccagggtcatcaccatcaggtggaactgattccgtagggtatggtgccgaccattcagcagcacatctacctcaactccagagttcatccaccaatgtccaggcgccatacgatgacacattttctttcttaccgcctaacatgctgacagggtctgcatacgatgccatgggtctggaact

SEQ ID NO: 3549 - DNA, 406 bp, Zea mays
  Clone ID: LIB3136-007-Q1-K1-G11
gcaggggcttgccacctaagtaaggcctgtgagccatggcatccaaggccgtcctcttggtggctctcaacctcctgttcttcacggtggccaacgcctgcggcagctgcccgaccccaacgcccccggtcgagccaccgccgtcgcctcctgctaccccacccccttcgtccagcggcaagtgcccgctgaacgcgctcaagttcggcgtgtgcgccgatgtgctcggcctcgtcaaaggcgaggctggcaaggtgcctgccgagccatgctgtaccctcatcaaaggccttgcggacttcgaggccgccgtctgcctctgcacggccatcaaggccaacgtgctcggcgtcgtcatcgatgtccccatcaagctcagcgccctcgtcaactactgtggcaagtg

SEQ ID NO: 3550 - DNA, 381 bp, Zea mays
  Clone ID: LIB3136-007-Q1-K1-G2
gcgcgggcctgtcatctctgaacattgtcgtagagttcaaacagtggaacagcaagcagtttcagattcctgtgaacagcaaaatactccagcagtgcgtgcacttggctttttgccagaagaaggtcatggtgtttatgttgctagatgattctgaactatagctcatttagatatgtctgggaatgagcactaagcaacaatgattttattcagatggtgtcatggaagtccggtacatagatatggcctctatgctctccagtggatcatcgaaattaatgggcaaccaacaactgatctggaaacttttataaaggtggtgaagggtctcgaagatggtgaatttgttagggtgaggacggtccatttaaatggaaa

SEQ ID NO: 3551 - DNA, 120 bp, Zea mays
  Clone ID: LIB3136-007-Q1-K1-G4
tgctggttttcgtgctccaagcctgctgcttcttccagggaaaaaaagacctgcccttgttgcagcgttgttgtttagaatgacctatatttgactggtattctgttacggtggctttgc

SEQ ID NO: 3552 - DNA, 430 bp, Zea mays
  Clone ID: LIB3136-007-Q1-K1-G6
gatccgctccgaaagatacctttcccccccttcctctcgcgccgccgttttggtgcgaccggggcggcggagggggaggccaagaacccgtccggcggtggggaagggggtaacccccagcaccagcaggcagtgcaggctgcgccggcggagccgccaacggcacagggggaagcggtgcaggaggctggagcgcatgtgacggaacaagagccggagggggagaaggcgaatcgagatggggagggcggcgcgggggataaggacgacggcgcgtgcagagatctggttctggttgaggatccggaggtgctcgccgtcgatgatccggaggaaggtacaacgcccgttcttgcagtctctctctctctccggccttggctctagtaatagttgcccctgttggtgcttgtgtctcagctgtcagatg

SEQ ID NO: 3553 - DNA, 429 bp, Zea mays
  Clone ID: LIB3136-007-Q1-K1-G8
cggtgctgttaattcttcgcgtaccggagaaacaggctacatcgattctccaacctccctgcacatggatagcgtcgaaggccaaacaacggtgagggactcaagatctgtacagcaagcagatgtcaccatggccaccaaggagcagacccttccctccacctctggcacaaccgattcttcgagcggcagcgcctcaagtcagcctgctttcaaggggaacccaggacgtgccctcaaagttagcagcagcgatgcactgacggtgaaagctacctgtaacggcgacaccgtgcggttcaagttcctgccggcaatgggctggtaccacctgctggaagaggtagcgaagaggtttaagctggcgacaggagcgttccatctcaaatacaatgacgacgaggacgagtgggtgatcctggcgaacga

SEQ ID NO: 3554 - DNA, 387 bp, Zea mays
  Clone ID: LIB3136-007-Q1-K1-G9
gaagcaggacgccgccgcggaccagagcgacgtctcgcgccgcgccgcgctcgcgctccgcgccggcgtcacggccgccgccggcgccaaggtgggtcccgccgccgcggcatacggagaagcagccaacgtgttcggcaagcccaaggcgagcacggagtacatcgcgtacagcggcgacggcttcaagctgctgatcccgtccaagtggaaccccatcaaggagcgggagttccccgggcaggtgctccgctacgaggacaacttcgacgccaacagcaacgtgtccgtcatcatccagcccacgtccaataagaccatcgccgactacggctctcccgaggagttcctctcccaggtcgactacctgctcggcaggcaggccta

SEQ ID NO: 3555 - DNA, 321 bp, Zea mays
  Clone ID: LIB3136-007-Q1-K1-H10
gctggcgctcgtctccctcgtgctcctcctcatgccgcgctcgcccgccggcgccacgtgcggcgccaggaggtccggcccgcccgtggccaacatgtacgccgtcatcttcgacgccgtgagctccggcagccgcgtccacgtcttccgcttcgacgccaacctggatctcgtccacattggcagcgagatcgagctcttcgtccagataaaaccggggcttatccactacgccaacgatccccgggaggccgccgagtcgctcgtctctctccttgacgatgccaagcgagtggtgcacgaggaattgcgcgaccaaac

SEQ ID NO: 3556 - DNA, 407 bp, Zea mays
  Clone ID: LIB3136-007-Q1-K1-H11
cgacgattgctttgcatatgcagtgcgacgcgtcgctggggatgaagattgccgcccggctcaacatgaaggcaaacatgtgatgcttctgctgaatagaataataatgaagacgcatgcatgtcgtcgccaggaacaagagaaataatacaagaccaccacgcatgggcatactccatatatatatgtatagcccgtgcccgtgtccgcctttgtaccaatacaagccaagactagtggatgtattattattattattattgcgctatcacatacatgtacccctgctacctgaagatggatgtgtatcgagttatcaaattaagacacctgcagcaaaaaaaaaaaaaaaaagggcggccgcgggcgccccaaacccagggcagagtctcatggtgacggggaga

SEQ ID NO: 3557 - DNA, 425 bp, Zea mays
  Clone ID: LIB3136-007-Q1-K1-H4
caaaagggaaggaattagtgcgatatgaatcccctattgaacactgcccgagtgtatatgaggttaagcgagtgcttaatggaactgcaaacagcttcaatataattgatgcttacccaaggtactttcgagttactggatcaggtgaagtccggcgattagaagcagcgatagattcagtaagtggcgaattgctattaaataatggcactccttggtggtcattctatgatacaaacccatcagatttggcaggctgtcaagggctgaatggtcccatggctatagttgtttctgaagagacacctcatggcattattggcgaaacactcagtaaatttagcatatggagtttatatattacttttgttctagctgttgcgagatttattatgcttcagtgctcatacttgagaatgagaata

SEQ ID NO: 3558 - DNA, 431 bp, Zea mays
  Clone ID: LIB3136-007-Q1-K1-H6
cagatccctctccactgtctcaccctttctctctcctcgaccctcccgacgcggcaaagcgaaaacacagggaggagaggagggagagaaggaagaagacgaggccaaaaatcccctcctcctccccaaatcctagcccaataatctctcgatcaggggattcttaggtctgatcaggtcggaggattcggcagggcgcagccatgaacgagaaggcgtccgtctccaaggagctcaacgccaagcacaagaagatattggaaggtcttctacggcatcctgagaatagagaatgcgcagactgcaagtcaaagggtcctcgatgggcaagtgtgaatctaggtatctttatatgcatgacatgttctggcattcatagaagcctgggggtgcacatatctaaggtaagatctgccaccctggatacatgg

SEQ ID NO: 3559 - DNA, 342 bp, Zea mays
  Clone ID: LIB3136-007-Q1-K1-H8
ctgagcatgctgcgtgggaggctttccggctgcggggcgtggacctggtggtaggaaaccgtgtgctggtggtgggccccctgctgcatgctacggtgaacgccagcatcgcgcacatcctcaagtacctggacggctcggcccgcaccttcgccaacgccgtgcaggcgtacgtggacgtgcgcgacgtggccgacgcgcacctccgcgtcttctagagcccccgcgcgtacggccgacacctctgcgccgagcgcgttctccaccgcgaggacgtcctccgcatcctttccaagctatttcgcgagttccccgttccagccaggtgctccgacgaggtga

SEQ ID NO: 3560 - DNA, 411 bp, Zea mays
  Clone ID: LIB3136-007-Q1-K1-H9
cacgcacaagcgcactctagcaatggcttctgaggttgtccgccctagcgacgccgagctgctaaaggcacaagccgacatatggcggctcaccctctcctacctcacgcccctgtcactgaggtgcgccgtggagcttggcatccccacggcgatctaccgacatggcggggctgcctcagccgctgagctggtcacggagctgtctctcccctacacataagctgccgttcctgcgccgcctgctgcgtctcctagccgcgtcgggcgtgttcaccgtcgacaagcagagcacggaggacgagcggtaccgcatcacccccgtgtcctacctactggtggacggcatccctcacgaggaccacatgaaccacaccgctctggtgctcacctgcaccttgacgcgctaca

SEQ ID NO: 3561 - DNA, 433 bp, Zea mays
  Clone ID: LIB3136-008-Q1-K1-A1
ggcgaattcagctcggaccaggcgatcctgtagagtcgacctgtaggcatgcaggcgtgtgtgaagatctttgtctaatatctggggagggcatcgatgtcaattttgcttatcagctgcatcatactcctgatgagagcgtgggcatagaaaaccatcgtgatagaatactgagaatggtcaagagcctctctcctaaggtggtaactcttgtagagcaggaggcaaacacaaacacagcacctttctttcttagatacatggagactcttgattattacacagcgatgtttgaggcaatagatgttgcttgccccagggatgataagaagcgcattagcacagagcaacactgtgttgcaagggatatcgtcaatttaattgcttgtgaaggtgcggaaaggatagagaggcatgagcctttttggaaatg

SEQ ID NO: 3562 - DNA, 437 bp, Zea mays
  Clone ID: LIB3136-008-Q1-K1-A10
ggaaatcccaggtgatgcatgagcatgagcgtgatgcagtaacagcaaaccaagatggagggggctctaggaaggcaaaaaagagagcacaactcaacaagaatggccaaatcagttcactgagtggctgcttcacttgccatgctttctgatacatgtaattccaaaattgagaatcaggatccgacaaattccttcgcattccatgcaccaccttcatgttccccacatcaaaatctgggtgaagttcggagatccatcacatatcagtacataatatgatgatcccacagctggagattagacagagatctttcgaagatgctagctgcaggctccagctgctatgatagggacaatgccaaggggacaaataaaatgcagcacgaatgaaaggaggaacagtactgcgtacaccccatgtgctcgggtcgatg

SEQ ID NO: 3563 - DNA, 412 bp, Zea mays
  Clone ID: LIB3136-008-Q1-K1-A12
caacgggtgagctttatacatggggagatggaacttacaatgttggccttctcggacaggggaatgatgtaggacactggatacctaataggatttctggagcactggaaggtcttcaagttgcttatgtttcatgtgggacctggcatacagccttgataacatccatgggccagttatttacctttggggacggttcatttggtgtattaggtcacggacatctgaaaagtgtttcttacccaagggaggtagagtcactatcagggttgaaaacaattgctgtggcatgtggtgtgtggcacactgcagctatagtggaggttattgtcactcggtccagttcaagtgtaaagctatctgctggaaagctgttcacatggggagatggtgacaagcatcgacttggtca

SEQ ID NO: 3564 - DNA, 432 bp, Zea mays
  Clone ID: LIB3136-008-Q1-K1-A2
gcgacgccaccaccacacgttcacggtagcgagagcttatcgtcgtcggcggcgaagatggggtcgctgaagctgcagaagcggctcgccgcgagcgtcctcaagtgtgggaaaggcaaagtctggcttgaccccaatgaagtcagcgagatctccatggctaactcccgccagaacatccggaaattggttaaggatgggtttatcatcaggaagcctcagaaggttcactctaggtcccgtgcaagaagggcacatgaggccaagcagaagggaaggcactctggatacggcaagcgcaggggtaccagggaggctaggctccccaccaagattctgtggatgaggaggatgcgtgttctgaggcgcctgctccgcaagtaccgtgaggccaagaagattgacaagcacatgtatcatgacatgtacatg

SEQ ID NO: 3565 - DNA, 414 bp, Zea mays
  Clone ID: LIB3136-008-Q1-K1-A3
ttctgcgagtccggcagcggcgtgtttagttgccccataggcaagaaccccatgtacacctggcgggagcgcatcgtcctcggggagaccgagtgcggcatcgccgccgttaaccggatcctgcgggagctcagccgcgagtggccgggccactcgtacgatctcctctccaggaattgtaaccatttctgcgacgtgctctgcgagaggctcggcgtccccaagctcccaggttgggtgaatcgctttgccaatgccggtgatactgctgtggttgttgctgagaacacagcagttaagttcaggcaggctaaaacagaaatcgtgaatgccagtagagtagcatacagatttatggcaggcctgacttccaaaaatcaagcctcacctgagtctccgggtaacaatcaaaat

SEQ ID NO: 3566 - DNA, 342 bp, Zea mays
  unsure (1)..(342): unsure at all n locations; Clone ID: LIB3136-008-Q1-K1-A4
tgaaaacccaccgncaactattngaaccccaaccttaagaggttgaagatgatggtgatgaggcggctctctcaagacgaggcagtactgggattttccagtgcaatgatttggctgggagtcatgaccctgatgacagcactcctatcacaggttggtgtgagcacaattgaggcagcatcggaatcttgggagctatctgtcaatttcattaacgtcatcttgattccaataggtggtaatgcaacaaaacatgctggggcagtgatatttgcgtttaaaaacaatctggacatcaccctctgagtatctttggggtgcgctacgcacattttcatgttt

SEQ ID NO: 3567 - DNA, 266 bp, Zea mays
  Clone ID: LIB3136-008-Q1-K1-A5
gtgatacaaccagcaagtcctaattgcggcgctcgtttgggtggccctcgcgatacgtatgcacggatgaatgaacctacggtctgcgtgtccaccacgaacaggaacttcccgggcaggatggggcacaaggaagggcagatctacctggcgtccccctacaccgttgccgcctcggccctgacggggtacgtcacggaccccagggacttcctcatgtgaacgatcttgaaagagccacagagtgcctgcactgctgtttttca

SEQ ID NO: 3568 - DNA, 397 bp, Zea mays
  Clone ID: LIB3136-008-Q1-K1-A6
gggttcttcctgattcatacttggatgtcaaaaacaaggactatggaggcgaacccttcagggaggggcaagctgttccttatgatcctaaatatcatgaagagtgggtgagaaacaatgcccgtgccaatgacagaaaccggcgcaatgataggcctcgcaactttgacaggtcaaggaactttgacaggagaagggagaacatgcaaaactaccagaacagagatgggcctcctgcccaaggtttcaatggccccccacctccacctggccagaaccagatgccatcccaccatagtcagggcaacatgtctccgcaaccaccacatgctggtggtggccaaccaaactatcagccccaaatgcaaaacccacagacgggctacaacccttggcg

SEQ ID NO: 3569 - DNA, 402 bp, Zea mays
  Clone ID: LIB3136-008-Q1-K1-A7
cacctcaacccaggaacagagcgaggcgactccgcggcacctcttctccggcgaagggaaggggcaaccgttccaggggatctgatctggcaagttgtgaggaagaacaactccttccttgtgaagcagttcggcaacggcaatgccaaggtgcagttcaccaaggagccgaacaacctctacaacatccactccttcaaacactcgggtttggcgaacaagaagactgtgacgatccagccagctgcaaaggactcggctgtggtcctctctactaccaagaccaagaagcagaacgcacctgcgaagctcagccacaagtctgtgatgcgcaaggagttccgcaagatggccaaggctgtgaaaaaccaggttagtgacaactactacaggcctgatctg

SEQ ID NO: 3570 - DNA, 405 bp, Zea mays
  Clone ID: LIB3136-008-Q1-K1-A8
tcggcaaattccggcgagccggtgcggtgcggccgaggaggccgagggagacacccgcgcgggagggagcatcaagaggaggcagaccaaatgcatcctgactcggtgaaatcgactctttctaacctggccttcggcaacgtcatagacgtcgtcggccgtgaccttcaaaaggaaatggtggctaaagacaaggctcaatcaacacctgcaagccatgatgaatttcatcttgatgagctgttggatgacccataacttgagaagttgcacgcggagagaattgctgcccttaagaaagaagttgagaaacgtgaagtgctaaaaaagcaaggtcatggtgaatacaaggagataactgaaggggactttctcggggaggctactggcagtgaaaaagtcata

SEQ ID NO: 3571 - DNA, 401 bp, Zea mays
  unsure (1)..(401): unsure at all n locations; Clone ID: LIB3136-008-Q1-K1-A9
cgccagtcctcactcctcaccatttcccaaaccctacccatacccccgccgccgccggcgcgatgccgtccaagctcgacccgtcgcangtggtggaggtcttcgtccgggtgacgggcggcgaggtcggcgcggcgtcgtccctggcgcccaagatcggcccgctcgggctctccccgaagaagatcggcgaggacatcgccaaggagacggccaaggactggaagggcctgcgcgtcaccgtcaagctcaccgtccagaaccgccaggccaaggtctccgtcgtnccctccgncgncgcgctcgtcatcaaggcgctcaaggagcccgagagggaccggaagaaggtcaagaacatcaagcacagcggcaacatcagcctcgacgacgtcgtcgagatc

SEQ ID NO: 3572 - DNA, 439 bp, Zea mays
  Clone ID: LIB3136-008-Q1-K1-B1
ccggttcttgcaagcaagagcctatggcgtggtgccacggcgcgttgcccatacatcatgcgtccggcgatgatccatcctcacttgctataaaaagaggtgtccatggtgctcaagctcagccaagcaaataagacgacttgtttcattgattcttgaagagatcgagcttcttttgcaccacaaggtcgaggatgtcttgcaactgcggatcaagctgcggctgcggctcaagctgcaagtgcggcaagaagtaccctgacctggaggagacgagcaccgccgcgcaggccaccgtcgtcctcggcgtggccccggagaagaaggccgcgcccgagttcgtcgaggccgcggcggagtcccgcgaggcccgccacggctgcagctgcggtggcaactgcaagtgcgacccctgcaactgctgatcacatcgatcgac

SEQ ID NO: 3573 - DNA, 412 bp, Zea mays
  unsure (1)..(412): unsure at all n locations; Clone ID: LIB3136-008-Q1-K1-B10
agaaacatgtatgcaactaggagatctatgatccatctcgaagatgaagaattagatggggagcttgaccacctcatgcttctcatgatgggtgaatatcggaagaggaagcataagcagcgaaagaagcatcgaggttcagtttttggacacaaggtttacaatcaaaatagagatgaacacggtatgaaattataccttgactattttgctgagcacccaacatatcctgagaagatgttccgacgccgttttctaatgagttcctctcttttcaaacggatagctaaagctgttgaacaacatacctctagattcttgtcgaattgcatctatggcagtgtttagcgaggagcttcacgaccctttcgtggcttgtccggctttctttgatccatgncgatgagtttga

SEQ ID NO: 3574 - DNA, 400 bp, Zea mays
  unsure (1)..(400): unsure at all n locations; Clone ID: LIB3136-008-Q1-K1-B11
ctcaaaaaagagttctgctgcaatggtactgtagtccaggatccagagctaggccagggcgttcaactgcaaggtgatcagcgtaaaaatgtcgctacttttctagtccaggccggaatcgtgaaaaaagatagcatcaagattcacggattttagactgcaaatttgaagtgcttgtgtgtgcctatcatatgataccatatgataccaggtattgaagcttcggaagcttgttggccttcgtaacatcagtagtcgttattcatctgaatatgtgtcattatttgatttgataagactggtattgatgcaagttgtccttgcagtatgttttgtaagtgttacctgcatgaaagtatcgtttgtctggngaactgtctactactgatattgaataaca

SEQ ID NO: 3575 - DNA, 443 bp, Zea mays
  Clone ID: LIB3136-008-Q1-K1-B12
cgctctggttggaaggtttggagaaactccccggctcgaggagatcgtgacattgagagggggatgggagggcgcgcgctcctcctcctcctcctggtctcggcgttggtctttcacatccacgcctccgacccgctgctgtacgagccgttcgatgaggactttgaggggagatgggtcgtctccaagaaagattaataccaaggtgtgtggaggcatgccaagagtgatggtcatgaagactatggccttcttggtagtgagaaagcaaggaaatacgccataatcaaggagcttgatgagccagttaccttgaaggatgggaccgtggtcctgcagtttgaagtgagacttcagaatggccttgaatgcggaggtgcctacattaagtacatccgccctcaggatgctggatgggatgccaaagagtttgataatgagac

SEQ ID NO: 3576 - DNA, 359 bp, Zea mays
  Clone ID: LIB3136-008-Q1-K1-B2
gaggaattagaatctgcaatatccctttgtagtgcgttggagttccttaatgtgcattctggtccagagatcaatgctttggattttggcagactccgtttgggttgccccagtctgaagcgcatccagagcagcctcatctcataatacagaggctgctaccatataaaggagggcaattcatgcaataagccgctgctcagatttgaagaaaaaaacaaggggattgttgggttctagggacttatttttaagccctaccttttattcttatttaagcttttaaatggttaaatatggaaactaaaactctattttagttttcgtatttggcaatttaggaactaaaatggaataaa

SEQ ID NO: 3577 - DNA, 393 bp, Zea mays
  Clone ID: LIB3136-008-Q1-K1-B3
ttgtaaagcaatggtatagtcaggacgtgttcacagaagcagcaactggcattactgagcagagggacactgaagatgaaagggagagtttgcaaaggaatatgaagaaaatggttactggcaaaacggaaaaagtggctaaagcacagcgtttgcaacgagatgatattgagattgtaccagcagaacctgtccgagatgaagaggatacgtcttcatcttctggtgaatcagatgtttcggaggatgaactcgatgattacagaaaggctgaagtactagcctatgctaagaagatgctgaggaagaaacagagagagcagatacttgatgatgcttacaacaagtacatgtttgatgatgaagggttacccaactggtttgttgaagatg

SEQ ID NO: 3578 - DNA, 482 bp, Zea mays
  unsure (1)..(482): unsure at all n locations; Clone ID: LIB3136-008-Q1-K1-B4
tcggcgcccgtgtcgccagcccatatgatcaaagagcctatgctcagagcncnnagagctgagnangtccgaggaggggaaagcgaagatagcggcccatgngtcgatgaagcggctcggcgccgctagcgactccacactctgccacctcgagggagggcggcacgggtgggagggccgagcgttcggagcttacttcgacaggcgtctgcgccgagggcgcccggccaagctcgccgcgcagcgacccgtcggtggacaccttcgcggaacccgccgccgtcgacgccggggaccacgacttgccggagctccgcaagctgcgcgacctcgaggcgaagccccagaagctggtgttggacggagggggaggggacgtggatggcggngaggattacgtggagacgcgatactacgatggcctcataggcatcgacaagcagcatcacacgactgggacagggcttatcaaagtggagaga

SEQ ID NO: 3579 - DNA, 337 bp, Zea mays
  unsure (1)..(337): unsure at all n locations; Clone ID: LIB3136-008-Q1-K1-B5
ttataaatactcccacaccactctcctttggcgccgcgattcgaccctcttacangggcgatatgnttccaccacgacagtggctgcacgtccgtgtaccctcttctccacctttcaaacttccaaataaatgattggcctgagctttcagcaaaaagctttgcaatcatggttttgatgcttccatctgatagtgcaagaaaatggcatgtacatgaattggagctggttgaggtcgttgctgatcaggtagcagttgcactatctcatgcggctattcttgaagagtccatgcgagcacgtgatttactaatggagcagatgttgccctggattt

SEQ ID NO: 3580 - DNA, 293 bp, Zea mays
  unsure (1)..(293): unsure at all n locations; Clone ID: LIB3136-008-Q1-K1-B6
aaaaaaaaaaaagaaggannggagaaacttttcggctcgaggagatcgtgacattgaggggggcgatttaagacgcgcgctcctcctcctactcctggtctcggccttcgtctttcatatccacgcctccgacccgctgctgtacgagccgttcgatgaagactttgaagggagatgggtcgtctccaagaaagatgaataccaaggtgtgtggaagcatgccaagagtgatggtcatgaggactattgcctccttgttagtgaaaaagcaaggaaatacgccataatcaaag

SEQ ID NO: 3581 - DNA, 400 bp, Zea mays
  unsure (1)..(400): unsure at all n locations; Clone ID: LIB3136-008-Q1-K1-B7
acctagcctagcaaccagccgccgacctcctctctaccatggatatgtgccttggagccaggggatccatcatcaccaatcttttcctcttctatacctcctcatgccgcggcatggatctccttgttcggttgtcatctagctaggagtatctggctagctcgccggccggccggaggaggaggagaaagaaatggaagtgtgactatggtgttggctcggctcactcagaagttgaagccgaatctaaatggtagctgccggcgtttctgattgagccgtgccaatatctcagtactctttcatgctgatctcgcgtcacgccagcatcgatctcttcctgaagtcgtgtagtctctctctcgtactctcatgcatnctnggcatgtgttcttatact

SEQ ID NO: 3582 - DNA, 263 bp, Zea mays
  Clone ID: LIB3136-008-Q1-K1-B8
agtacgcatggggtctgcacgaggagctcatgtcgaacaccaataacgttagtcgtgggcgaccaccagtaggcagtagccacagcaatcatggggtcggtgccgccggcagagggggacaggcgccagccccagcagcagccgcacgtgatgatgatcctgtacccggcgcagggccatgtcacgccgatgctgcagctggccaagctactccacacacgcggattccacgttacctttcgaaacaacgagtttaaccaccg

SEQ ID NO: 3583 - DNA, 307 bp, Zea mays
  unsure (1)..(307): unsure at all n locations; Clone ID: LIB3136-008-Q1-K1-B9
tctccgccgcttccttggaagacgaagaaaccctcctcctccaccaacccgatccaggtacgatccgttgaggcccggccagggagcanctagccgacttcgatcgatccgttcgcatccccaacgcagttcggtttgtaaggttttactcggttggctcttagtatttgctgctcgatcggctagattgttctgcggcttctcggcgatttaatttggggattggctggtgcatgtaggtaggaaggagcgtgatggccaagacaagctcgttcaagctggagcaccccctcgagaagaggcaatc

SEQ ID NO: 3584 - DNA, 428 bp, Zea mays
  Clone ID: LIB3136-008-Q1-K1-C1
cccggagcagcgccccggcttcacgcgccgtcgccgtcgtcctcggcgtcctcggtcgcgcgcgcgaggattcgatcgcagaggaggtcttcgtccgattcgccggagagggcgccactgttcaggtgttcaacgccatgatgggcgtttatgcgcgctctggccgattcgatgacgcacggcagctgcttgacacaatgcacgaccgggggatcgatcctgacctcgtcagcttcaatactctaatcaatgccaggtccaagtctgggtgtttggctgctggcgtcgcccttgacctgctatttgaagttcgacaatctgggctaaggccagatgttatcacttacaacacgctcatcagtgcttgctcacagagttctaatctcgaagatgctgtgacagtgtttgaggagatgatagcttcggag

SEQ ID NO: 3585 - DNA, 348 bp, Zea mays
  Clone ID: LIB3136-008-Q1-K1-C10
aggacctcctatgggtggtcgatatggacgagctgaacctatgcaaccagctgccatgggcgctccagcaggaaactttggtgcctcggcgactgccaagatcagtgtggacgcctctctggccggtggcataatcggcaagggtggggtcaacactaagcagataagtagaattacaggcgtcaagctctccatccgcgaccacgagtctaaccccaacctaaagaacatcgagctggaaggcaattttgaccagatcaagcaagccagcgacttggtgcgtgatctcatcgcaaccatcagcgcaagcatgccagcgaaaaatccatctgctgccgcggcaccagc

SEQ ID NO: 3586 - DNA, 430 bp, Zea mays
  Clone ID: LIB3136-008-Q1-K1-C11
ctttgtcaatgaatactttgccccaagtgccaagaagaggtggtgcgtttctctgtatggcgatggccgtcaaactaccggagttttccctcacgatgtttggcattgtgagatatgcaataggaagccagggcgaggttttgaaacaacggttgaggtcttgccacggttgtgccaaatcaaatatgccagtggtacactcgaggagcttctgtatgttgatatgccgagagagtcccagaattcatctggacagattgttttggactataccaaagcaatccaggagagtgtctttgagcaactgcgtgtagtccgtgaggggcatctaagaattgtattcaaccaagactcgaagattgcatcgtgggagttctgtgcccggcgtcacgaggaacttattcctcggagatcaatcataccacaggtc

SEQ ID NO: 3587 - DNA, 443 bp, Zea mays
  Clone ID: LIB3136-008-Q1-K1-C12
ggcgggggtccacggtcttatagtgcctgatctcccgtacgtggccgcgcactcgctgtggagtgaagcgaagaacaacaagctggagctggtgctgctgacaacaccagccataccagaagacaggatgaaggagatcaccaaggcttcagaaggcttcgtctacctggtgagcgtgaacggagtgacaggtcctcgcgcaaacgtgaacccacgagtggagtcactcatccaggaggttaagaaggtgactaacaagcccgttgctgttggcttcggcatatccaagcccgagcacgtgaagcagattgcgcagtggggcgctgacggcgtgatcatcggcagcgccatggtgaggcagctgggcgaagcggcttctcccaagcaaggcctgaggaggctggaggagtatgccaggggcatgaagaacgcgctgccatgag

SEQ ID NO: 3588 - DNA, 437 bp, Zea mays
  unsure (1)..(437): unsure at all n locations; Clone ID: LIB3136-008-Q1-K1-C2
gagaaaatccccgatgaggagtacatctgctgcctggaggaggcagagatggtgcggccaggtgggcacgtgaccatcctcacgtactcccgcatgaggtaccacgtgatgcaggccgccaagaccctggtgaacaaggggtacgaccccgaggtcatcgacatcaggtcgctgaagccgttcgacctgcacacgatcgggaactcgatcaagaagacccaccgtgtgctgatcgtggaggagtgcatgcggacgggcggcatcggcgccagcctgcggtcggccatcatcgacaacttctgggactacctggacgcccccatcatgtgcctgtcgtcgcaggacgtgccgaccccgtacgccgcgacgctggaggacgccaccgtggtgcagcccgcgcagatcgtggccgncgtcgagcacatctgccaatgatc

SEQ ID NO: 3589 - DNA, 440 bp, Zea mays
  unsure (1)..(440): unsure at all n locations; Clone ID: LIB3136-008-Q1-K1-C3
atccaatccccttgccaagctctctctttgctgccgggaggtcgaggcccggagaggtcttcggggaggggatcaagaaaggggtggttccccgtggccctcctgctgttggccgactctgccctctggccgccggtcgccgccgccgccgccggaggcggcgaggccgaacacgccgttcagcagcatagcgagcgcatctcanggagtgctggtgatgtgttagaagataatcctgtgggtaggttgaaggtcttcatttatgacttaccaaggaagtacaacaagaagatggtcaccaaggattcacggtgcctcagtcacatgtttgctgctgaaattttcatgcatcgtttcttgctctcgagtgctgtccggacactaaatcccaaggaagctgattggttctatacaccagtttacactacttgcgatttaac

SEQ ID NO: 3590 - DNA, 391 bp, Zea mays
  unsure (1)..(391): unsure at all n locations; Clone ID: LIB3136-008-Q1-K1-C4
gcggcggcgagatgcangtgtggagggagctcatcttatccccaacaccggcgatccgacgcgtggtgctgtcggccgtcggcctgcacttcttccagcaggcctctggcagcgattccgtcgtcctgtacagcccgagcgtgttcaagagcgcgggaatcaccgacgacaacaagctcctggacctgggcgtcacctgcgcggtgggcgtcgccaagacgctcttcatcccggtggccacgttcctgctggaccgcgccgggcgtcggcctctgctgctgaccagcacgggtggaatgattgtctcgctcgtcggtctcgggacgggcctcaccgtcgtggggcaccacccggacgccaagatcccgtcggccgtcgcgctgtgcatcgc

SEQ ID NO: 3591 - DNA, 295 bp, Zea mays
  Clone ID: LIB3136-008-Q1-K1-C5
agtttatcccaaatttgcaacacctgcatgattcactttctttcgaaaactattgagtttaaagacataattaaaattggacctacacatacccaaaattccaccccattgactctttgccaagaattcagtggctacactacacaggtcaaatatggaattgaccgcattaattgtacattacctcggatgtaccaccttgctcaaggtggaactgcagttggaactggcttgaacaccaagaaaggatttgatgccaaaatagctgctgcagtggctgaggaaacaaacctac

SEQ ID NO: 3592 - DNA, 438 bp, Zea mays
  unsure (1)..(438): unsure at all n locations; Clone ID: LIB3136-008-Q1-K1-C7
cggacgcgtggggtgaatactgattgaagatttgtactaggtcattcgagctgctaagtcggattcccgccttgcaaacaaccaccttcctcctgacattcagaagcttcgttgtcgggcttttttccaagcactgagatttgctcccccaattgaagctctaggcaaactattggtggagaggatgaggtcatttgggaagtatattgctttgcatttgcgctatgagaaggatatgcttgcctttagtggctgcacatatggtttatcacggacagaatcagaagaacttgcaatgatcagagaaaacacaacctactggaaggtgaaagacattgatccattagaacaaagatcccatgggtactgccccctgacaccaaaagaagtcggtatgtttctttctggactanggtatccatcaagcaccccaatcta

SEQ ID NO: 3593 - DNA, 437 bp, Zea mays
  unsure (1)..(437): unsure at all n locations; Clone ID: LIB3136-008-Q1-K1-C8
caaacatactggagcagttatttcttaaactagaagattcaattagggattctggaggctggcctggatgtccacagaaggagcctccttccacactgttgtggaccctgtttttgatttctcagcactacgacagaagagggcaatatgacattgctttgaataaaatcgatgaggctatctcacatacaccgactgtcatcgatctatattcagtaaagggaaagatattgcaacatgctggaaatttcacagcagcagccgcattagcagatgaagctaggtccatggatcttgctgatcgttatttaaacagcgagtgtgttatgcagatgcttcaggctgaccaggttggccttgccgagaagactgctgtcttgtttacaaaagatggtgatcaacacaanntatctcatgacatgcagtgcatgtggtat

SEQ ID NO: 3594 - DNA, 362 bp, Zea mays
  Clone ID: LIB3136-008-Q1-K1-C9
gccacaactcttgctcagggaattgcgttcttgcacgacaaggtaaagccgcaggtggtgcgccgtgacatccgtgcaagcaacgtcctactcgacgaggaattcgggtcgcatctgatgggggtggggctttcgaagttcgtgccgtgggaggtgatgcacgagagaaccgtcaaggccgcgtcctacggctacctcgcccccgagttcatatacaggaacgagctgacgacgaagagcgacgtgtacagcttcggcgtgctcctcctggaaatcatcagcgggcgccgccccgcgcagtcggtcgagtccgtcgggtggcagaccatcttcgaatgggccactccgctggtgcagtccca

SEQ ID NO: 3595 - DNA, 432 bp, Zea mays
  Clone ID: LIB3136-008-Q1-K1-D1
cggacgcgtgggcagatccaagaagagggaagagcaccaaggaccttcggcgcccgttcaggatgcacatcttcccgagcgagttcttggttggcctcttcctcttcggaccacctccaaggctcttggtgtaacttgccactctcaccaatcaagttttcatgtctgatctcgacattcagatcccaactgccttcgatcccttcgctgaggccaatgctggggactctggtgcggcagcagggtcaaaggactacgtacacgtgcgcatccagcagcgtaatggtcgcaagagcctgactaccgtccaaggattgaaggaggagttcagctacagcaagatcctcaaagatctcaagaaagagttctgctgcaatggtacagtggtccaggacccagaacttggacaggtcattcagctccagggtgatc

SEQ ID NO: 3596 - DNA, 289 bp, Zea mays
  unsure (1)..(289): unsure at all n locations; Clone ID: LIB3136-008-Q1-K1-D11
gtggacccattcgtaatccgtcacccatagggccacacagttccgaggctcgatgacnagantttagtggtcatgcaccgtttccttgagaagattgagggggaggtacttgagtattcgtccaaagatgtcaacgaaaccgaagtgggcatgtgataaagactttagaccattagtacttgatgttggcgaaaaggctatacttgtactatttatttacagaatgaacatgtgatgtaacctcgattttcatgaggcatgattatgaaaaatacagaataattgtttt

SEQ ID NO: 3597 - DNA, 398 bp, Zea mays
  Clone ID: LIB3136-008-Q1-K1-D2
catgagtggaggcattgcctatgtttatgatgttgatgggaaattcagtgctcgctgcacggggagttagttgatctatatcatgtggaggaagaggatgacatcatcacattgaaaatgatgattgagcaacatcgtcgcaacactgagagtgttttggctagagatatactctccgattttgataaccttcttccaaaatttgtaaaagtatatccaagggactataagagggttctagaaagcatgaaggtggaaaaggctgttgctaagcatgcaaaggagcctaagatggcaaatggaatttctgtgacaactaagaaagtacaacctgatcagtcagcaagccgaccaacacatgttgccaatgccaaaaagtacaggggctttattacata

SEQ ID NO: 3598 - DNA, 435 bp, Zea mays
  unsure (1)..(435): unsure at all n locations; Clone ID: LIB3136-008-Q1-K1-D3
gcagggccagctcgtaggcggagaanatggttccgttgacgacgaacgcgcgggcgacgggggggccgaggccgcgccacagcacggggaagccttcctcccggacgctcctctggaagcagtcgacgacgccgcggtacctgggcgccgacgccgacgccgcgccctgcgcctggagccgcgacttgaccacgtccagcgggtagcagcacacccagctggcgaccccggccaggccgccggccacgagcatggtgcccaggccctcgtccccgtcttggtcctggctgctgctgctgcggcggcaccccgggtgcaggcgctcccgggcgcgctcgtacgtncagaagtagacgccgtgcgccggcgcgtcgcggagcgcggtcaccgncagcccgcggtacacgccgggcaggccctcgcgccggaggatgt

SEQ ID NO: 3599 - DNA, 434 bp, Zea mays
  Clone ID: LIB3136-008-Q1-K1-D4
ttcagttattagtcagcagattgtgaagaaacagctgtctccaaagcgagaagacgaagagaggggaaatcgagagatgagctaccagagagtccctcccgaggaaccctaccctcctccaggacatcctcgatctcaggcgcacccttacccaccgccaccagatgtgtacccgcctccccctcggggccatggacatccaccaccaccccatggcgtgtacccgccgccgccgcagggtccttaccccccaccacagcagcctccaccggggtaccagggctacttcaacgaccagcagcgtccttactacccgccgccgcatggagagcatcaacacaaccaccaccagggaaaccagggtagctcctctgggttcctcaaaggatgtttggctgctctctgctgctgctgcgtgctggaggaatgctgcg

SEQ ID NO: 3600 - DNA, 421 bp, Zea mays
  Clone ID: LIB3136-008-Q1-K1-D5
gaccaacgcgtccggccttttttccttttggccggccccgaataaagagcagcaccgcaagaggtcggtagagcgagaagaaggcaatggcggccgagagcttccttttcacctcggagtccgtgaacgaggggcaccccgacaagctgtgcgaccaggtgtcggacgccgtgcttgacgcatgcctcgcgcaggaccccgacagcaaggtggcctgcgagacctgcaccaagaccaacatggtgatggtgttcggcgagatcacgaccaaggcgaccgtggactacgagaagatcgtgcgcgacacctgccgcgagatcgggttcacctccgacgacgtgggcctcgacgccgaccgctgcaaggtgctggtgaacatcgagcagcagtcccccgacatcgcgccaggcgtgcacgggca

SEQ ID NO: 3601 - DNA, 402 bp, Zea mays
  unsure (1)..(402): unsure at all n locations; Clone ID: LIB3136-008-Q1-K1-D6
gtcacgtctcccacatctaactgccccccgactcacgaatcccaaagcctccatggcgacggaggcgccactgcctcccactcctcctcctcgtggccgccgccctcgccgccgtccctgctcgcgcggcgctgggcggcgggcgcggcccgctgctgggcgggtggaacccgatccctgacgtgagcgactcgcacatccaggagctaggcgggtgggcgctggggcaggcgaagcaccagaagctggccgccgacgggctgcggttccgccgcgtggtgcgcggcgagcagcangtcgtgtccgggatgaactaccgcctctacgtcgacgccgncgaccccgccggccgcaccgtgccctacgtcgccgtcgtgtacgagcaggtctggacccgcaccc

SEQ ID NO: 3602 - DNA, 417 bp, Zea mays
  unsure (1)..(417): unsure at all n locations; Clone ID: LIB3136-008-Q1-K1-D7
cttctccccctcttctcttctcgtagacggtagatctccaggggtgtcgccgtctcgggccacggcggccggcgctcggagcatcggtggggttcggtgcggaggtgggcggccatgtacaagaaccagctgcaggagctggcgcagcggagctgcttcaacctgccgtcttacacgtgcctgcgggaggggcccgaccatgcgccgcggttcaaggcggcggtgaacttcaacggggagcagttcgagagccccggcttcttcagcacgctccgccaggctgagcacgccgncgcggaggtcgcgctcgccgcgctcgcgcggcgcggnccgtcctactcgcttcgccgccgcatcctggatgaaacaggggtttataagaaccttctacaggacgtagctcaaagagttggggcg

SEQ ID NO: 3603 - DNA, 81 bp, Zea mays
  Clone ID: LIB3136-008-Q1-K1-D8
ggaaattcaatgctcgctgcaacggtggagttaattgatccctacaacacggaaaaaaaaaattacatctatccatttaaa

SEQ ID NO: 3604 - DNA, 430 bp, Zea mays
  Clone ID: LIB3136-008-Q1-K1-E1
ctctcgtggccacgactgccgctgccgccctacgccaggtgtccaggtcatctccggcccgggcggcggcgacgagcaccccactagatcgaccgagatatggacggcctgtggcatctgggggacgagctccgcgggcagcccaaggtggtggaggaccgccagtggtcgctcatgacgtccaagctggcagagatcaccaggtccaggggcgagaggatgaacgatctcgactacgccaggatgaacgccgcccccgacgccaagcagtggggcaaggcggcgtcctaccagcaccacgaggagggcaggatggaccaccacgtcggcctcagcctcaagatgaacgatctcaagatgaacgaggccgccgctgccgctgtcatgaagctccccttacgcggcgtgccctacaacgtcaacccgatgt

SEQ ID NO: 3605 - DNA, 431 bp, Zea mays
  Clone ID: LIB3136-008-Q1-K1-E11
atttgcgccgccgcagcccgcagtcgcttgcgcgcagcagcacctcgcaccgccgccccgtcccatcgccgccagtggctgctccatccgatggctcccacgaagaagtcgaagaagagcacagagagcatcaacaacaagctgcagctggtgatgaagagcggcaagtacaccctgggctacaagaccgtcctcaagacgctgcgcaactccaagggaaagctgatcatcatcgcaaacaactgccctccacttaggaagtctgagattgagtactacgccatgctggccaaagttagcgtgcaccatttccacggaaacaatgttgatcttggcactgcctgcggcaagtactacagggtgtgctgcctcagtatcatcgacccacgtgactcggacatcatcagtaccacccctggcacccagtgagc

SEQ ID NO: 3606 - DNA, 386 bp, Zea mays
  Clone ID: LIB3136-008-Q1-K1-E12
aagacatccaccatgcaagacagcgcctttcacttccgcaagcaatccaagaggctcccgacggctctttggatgaagaatgccaagcttctagttgtgttgacagttgtcatagtagtgctgctctacttgatcatttctgctttctgtggaggcctttccttgtcatcatgcacatcatgagtaacacaccagatggctttgcccctcccttaaatggagggtagaacaccatggaatgatgcctgctgtgttgagcaccggagcttccggaggcaaaaaaaaaaaggagatcgatggataccactggggtttccaataacttggatcagtttgtacagtggacgagtggaagtggccggtgctgtttttgatgtcgccatggt

SEQ ID NO: 3607 - DNA, 84 bp, Zea mays
  Clone ID: LIB3136-008-Q1-K1-E2
gctacgccaactacatacattatcggcagagtgaactactccgaacctgctgctaatatccgctggctgaacctgcataatcag

SEQ ID NO: 3608 - DNA, 402 bp, Zea mays
  Clone ID: LIB3136-008-Q1-K1-E3
ggcagaccattgactactctcttcaagggtcaagttgctgaggagaagggtggaatcaagactgacgcttcctttgaaacaagcgttcctggagtatatgccattggtgatgtggctaccttccctttgaagatgtacaatgagttgagggagagtggaacatgttgaccattctagaaagtctgcagagcaggctgtaaaggcgatcaagggcaaagagtccggtgaaccagttccggagtatgactacctgccatacttctactcccgatcattcgacctggcgtggcaattctacggcgacaacgtgggcgaaaccatcctgtttggcgacagtgaccccacctccagcaagcccaagttcggctcgtactggatcaaggacggcaaggtcttgggcgc

SEQ ID NO: 3609 - DNA, 454 bp, Zea mays
  unsure (1)..(454): unsure at all n locations; Clone ID: LIB3136-008-Q1-K1-E4
ccgtccggctactcctaactactcaaatccatnccttattgagccttagtgtttcgatccatgngactcggagaggagtagctagcaaacggtggcacgatgagaactatctataaccggcanagccaagaaagaacggcgagagcaagggccgggatgactcgattnctgctgatgctgaccgacaacgtcgcagctttgcaggcgctaagcgatnngctgctgcggaaccaacgaggnnagctcatgatgagccaagccgatcaacgtcggagaccggagcgcgttgagtacctcaagacggtgagcgactgctacacgcggacaatgaagctccttgacgactccatggccgccaggatcacgtacgagcgttcgggcggaacgaggagcctcgtcgcccgggacatggacgactacgtcgtctacggcctcaacgcgtgcttgcagaacg

SEQ ID NO: 3610 - DNA, 420 bp, Zea mays
  unsure (1)..(420): unsure at all n locations; Clone ID: LIB3136-008-Q1-K1-E5
ttcatttttcaaggagcccggagtcggcagcaagagagaatggccgccgacgccgncgccggcgccacccttcgtactgctctctcccaagcaacagggcaagagcagagagcttcactgctgtgcacaccgaagcaccgagttgctgccagcaggagaagcttgagattcaccactagggccagctcgaatgcgggcgccagtgtgagcatccctaagcaatggtataacctcatcgccgacctgccggtgaagccaccgccaccgctgcacccgcagacacaccagcctctgaatcccagcgacctctcccctctgttccccgacgagctgatcaggcaggaggtcaccgacgagcggttcgtcgacatacccgaggaggtcatcgacgtgtacaagctcttgcgcccgacgcccctg

SEQ ID NO: 3611 - DNA, 439 bp, Zea mays
  Clone ID: LIB3136-008-Q1-K1-E6
aaagaattccctcccctagccgccgccgccgccgctcgtctccctgagaggtgccgggacggaggaactggccgagtactaggtagagaatcggtttttcttgtctcagcccggggtctgctgcgtctggtggtggtgaaggggagaaattcgtgagatctgttccggatcaggcgtgcgagctcgggaatcaggggtttcacacatagcttcgtcgatttgaatttgatgtactaatggagtctaagggtggcaaaaagtctagcagtagtcgttctatgatgtatgaagctccccttggctacagcattgaggacgttcgacctgccggaggcgtgaagaagttccagtctgctgcttactccaactgcgcgaagaagccatcctgatatcccttttggcttcctcattctagtagtttaggatttcttttctgaca

SEQ ID NO: 3612 - DNA, 312 bp, Zea mays
  Clone ID: LIB3136-008-Q1-K1-E7
caacactgacgactcctacgccagtcatgaagttaacgggcctgacgggaagcccatgggtgctcctatgggaaatccatggatctacatgtaccctgagggcttgaaggatctccttatgatcatgaagaacaaatacggaaaacccacctatctacatcaccgagaacggaatcggggatgttgataccaaagagacacctctacccatggaggctgccttaaatgactacaaaaggctagattacatccagcgccacatcgctactcttaaggaatcaatagacttggcatcaaatgtgcaaggctact

SEQ ID NO: 3613 - DNA, 438 bp, Zea mays
  Clone ID: LIB3136-008-Q1-K1-E8
caactcatgtttatttgagtttcaattattttcagggagtttttatcaattgtgcatggagggaaccatttggactcaccttgattgaggctgctgcatatggtctacccatggttgccacccgaaaatggtgggcctgtggacatacatcgggttcttgataatggaattcttgttgacccccacaatcaaaatgaaatagctgaggcactttataagcttgtgtcagataagcacttgtggtcacaatgtcgccagaatggtctgaaaaacatccataaattttcatggcctgaacattgccagaactatttggcacgtgtagtcactctcaaacctagacatccccgctggcaaaagaatgatgttgcagctgaaatatctgaagcagattcacccgaggactctctgagggatattcatgacatatcacttaac

SEQ ID NO: 3614 - DNA, 242 bp, Zea mays
  Clone ID: LIB3136-008-Q1-K1-E9
ggccgccctcggcctcggcctcgccgtcgccgccgcacctctcctccgctaggacctgctaggtgggatggagggggccgggcactactactctcattttatcccgctgtctggcgtaccctacgtccctgcgccttcgctgggttttcatccatcatccgtcatcaccatatctcttcgtggattactagcagcactgcgtttactgttattcaactgaccctcttgttcttccccgtgct

SEQ ID NO: 3615 - DNA, 416 bp, Zea mays
  Clone ID: LIB3136-008-Q1-K1-F1
cggacccgtgggttcctcgtttcgccgcctccgccgacaccgactgcctacctcagctggcgtcgccatgggcagaaggcctgctagatgctatcgccagatcaagaacaagccataccctaagtccaggtactgccgtggtgtccctgaccccaagatcaggatctacgatgttgggatgaagaggaagggtgttgatgagttcccctattgtgtgcaccttgtctcttgggagaaggagaatgtctccagtgaggcgcttgaggctgcccgcattgcctgcaacaagtacatgaccaagtctgcaggaaaggatgctttccaccttagggtccgggttcacccgttccatgtcctccgtatcaacaagatgctttcgtgtgctggggctgataggctccagactggaatgaggg

SEQ ID NO: 3616 - DNA, 409 bp, Zea mays
  unsure (1)..(409): unsure at all n locations; Clone ID: LIB3136-008-Q1-K1-F10
aatttgttgatgaatttaaatttgacccttcctggcattcagttattgaagagtatgggggttgtttgaccaattatatctgagattatagtgacagataacattgcttgagtttggttctattgacagtaggaaaatcatttaacatctttatctctgtgtatggaaattactttattgttattcacttcaaattttttccaagaggaccttatcatcattacaccttgatgttaggaagctttgaaatgggtgacagatcagcctgcttggcaacgttcagaaggcagggatcatgtcattcctgttcatcatccatggtcatttaagtcagtccggagattcgtcaagaaagcaatatggcttctacctgatatggactccaccgngaactggtgtggtattcatt

SEQ ID NO: 3617 - DNA, 432 bp, Zea mays
  unsure (1)..(432): unsure at all n locations; Clone ID: LIB3136-008-Q1-K1-F12
atcagctcgacgctcaagattgcgcaagcaggctgaatgggaggaagtagccaatcgggcggatttgctaaagcaggaaaatagttcacttaaagaagaattgaaacaacttcaggagaagtgtgatggcttgacctcagaaaatacatctttacatgagaagcttaaagcgctcgtggatgagaaatcaaatggaaattggtacaaggattaaaggctgaaacttctctctctttctgactgctgatgtaaggttacttgtgagctgccgttaggcttacagaataccaactctgattgccggtgtaatgttctccatattttttttccagataacttggtggtaacctgataggacgacaactaaagaggtattcatatacggtattagacttttgtccgagggggtaaaattgtatcatangatttgac

SEQ ID NO: 3618 - DNA, 358 bp, Zea mays
  unsure (1)..(358): unsure at all n locations; Clone ID: LIB3136-008-Q1-K1-F2
ggattttgttgctgaattacggnctgatcttggtgaggagtggtggacatatgtttgtatgggtgcttctgatcctcaaccaaactggcaccttgggatgcgtggaacccagcaccgggcagtgatgtggcgagtgtggaaggaaggtgggacaggatttctttattagggttccaactgctatgagaaggctatgatcccaagtgctgagatctgttttcgacgcggcctttcttctggcgacggtgtcctgttttaccctggtgaagtgttttcttcgtcacatgaaccagttgcttccacccggctagagcgcattctcagtggcatgcaagacatcgaatacctgaagctttat

SEQ ID NO: 3619 - DNA, 412 bp, Zea mays
  Clone ID: LIB3136-008-Q1-K1-F3
ctcccgaaaacccacagtcccgcccgtccctgtccgtccacagccagctccgcctcccatgcagggcccgtccacagccgccgcagttccagtgagatcgagcgaggtaagcttagatctgagcgatttctctcgcgcgtcgcaggtaaagttcactcgacttcgactctctcatcctcttctgttcttcctggttccgtcttcttcctcgagcagacagcgagagacccgtggccttttagatcccgggcttcagatctgctgtttcttcttcggtttggttctagttctagcagtgtactagtactagtcgttaggttggtagccaagagaggttctttttccacacctcccttgcgcaagtgagtcctgtcctgagtggatctacccaccactgccatctgtttttact

SEQ ID NO: 3620 - DNA, 409 bp, Zea mays
  Clone ID: LIB3136-008-Q1-K1-F4
cggcgagccctacacgctgcacaccaacgtgttcacgcgggggcaggggcagcgggagcagggggtccgcctctggttcgaccccaccgccgacttccacacctactccatcctctggaaccccaagcacgtcatcttcatggtggacgacatgcccatcagggacttccgcaacctggagagcaagggggtggcgttccccaagagccagccgatgcggctctactccagcctgtggaacgcggacgactgggcgacgcagggcgggcgcgtcaagacagactggtcccacgccctcttctacgactcctaccgcgggttcaaggccgacgcttgcgtcgccgtcgcgggcggccggacccgctgcggcgccaccgtcggcaccgagggcaccggcgcccccgtcttc

SEQ ID NO: 3621 - DNA, 369 bp, Zea mays
  Clone ID: LIB3136-008-Q1-K1-F5
cggacgcgtgggcggacgcgtgggcggacgcttgggttgtggcgcagcagggctcctccagcggtccagttcctctgcttccggtgattgattggtccggaggcgcctcgccccgctcctccgccgccacaggatggcgctgctcacggcgccggcggtggccgcgctgctgctgctcttctggtcctcggcgtacggcggtgaccccccaaggcgagggcgtgccgccgccgtaccaggacgccagcaaggacgtggaggtccgcgtcagggacctgctcgcgcggatgacgcttgccgaaaaagtcggccagatgacgcacatcgagcggatcgtcgcgtcgccgcaggcgcttcaggactactaca

SEQ ID NO: 3622 - DNA, 328 bp, Zea mays
  Clone ID: LIB3136-008-Q1-K1-F6
cgggtccgacccacgccgtccggcagaagagccggtaccttgatccctcttccgccctgtctgtcgtgtgctctctactggcgcctcctacagcaggcacgttgtcggatcactcatgtccacgactaccagacttctccggatcaggcacaggtatcgttaacaagtagcctcgacttagagcaggtctacagggaaaggaactgggaccaccagatcctgctgacggatctggtctttttacacatagaacgcggcagtgccagtggctcaactaatgccgtcgtaggactcgagaaagcttatcatggcggcgcttctgcacgtt

SEQ ID NO: 3623 - DNA, 440 bp, Zea mays
  unsure (1)..(440): unsure at all n locations; Clone ID: LIB3136-008-Q1-K1-F7
gtacgtacaagcctcatcagcaatggagtccaccaagctctccgcgctgctggtgcgcgcggtgctcgcgctctcctcgtccccgctcgctctcgcgtgggagaaggcggaaccggagtgccactcgtgcgagtccggctcgccaccctcgaccggcggcgtccccctgcctcccgtcagcataccgtcagtcccgctgccccctgtcagcataccgtcggtccccctgccccctgtcagcataccgtcagtgcccctgccgccggtgaccctccctcccattccgatcgttgggggaagcccgagcccgacgaagaagggacaccggaaggcgtgcccaccgcctccgtctnccccgacgccgacacccacgcncacgccgtnctcggacaagtgccccatcgacgcgctcaagctcggcgcctgcgtggacgttctcg

SEQ ID NO: 3624 - DNA, 411 bp, Zea mays
  Clone ID: LIB3136-008-Q1-K1-F8
cactgcagtgcttacgagagtccattttagtagaaatgagaataaatcatcagaattgagggagatcaatgcattggtggtagatcatagaccggtccgtgccaaggttactaagtatcatttgcagagactgggagttcagactgaattgacaactgacctacatcagtatatttctaaaaataattgtggatcacagattgcaaagcttgtgctcattgacaaagaaacctggctgaaagaatcccactccatgcctcttttggttactaaattgaggaacaaagatcagccagactctacaaagttatttcttttggagaaccctaaaagttctgtcaagagcaattcacatatattcagggaatataacttgaatgtaattatgaagccacttcgtgcaagcatgct

SEQ ID NO: 3625 - DNA, 422 bp, Zea mays
  unsure (1)..(422): unsure at all n locations; Clone ID: LIB3136-008-Q1-K1-F9
gccggatgctctcccgtcccgtctgtgcaggtgataagcgaaacgctgcgcgtggccggcgtgatcagcggggtgttcaggcgtgcgaacaccgacatccacttcaaaggctacgtgatcccaaagggctgcaagatcttcgcgtcgttccgagccgtgcaccttagcctggaccactacgagaacgcccggaccttcgacccttggagatggcagcagggcaagagcaagctgcagagcgcggaaggggccagtctgttcacgccgttcggcggcgggccgcggctgtgcccgggctacgagctcgcccgggtggtggtttccgtcttncttcaccacctcgtcacgcgctttagctgggaggaagccgangaggacaggattgtcttctttcccaccacccggacccttaagggataccc

SEQ ID NO: 3626 - DNA, 349 bp, Zea mays
  Clone ID: LIB3136-006-Q1-K1-D10
aggacctcctatgggtggtcgatatggacgagctgatcctatgcaaccagctgccatggggcctccagcaggaaactttggtgcctcggcgactgccaagatcagtgtggacgcctctctggccggtggcataatcggcaagggtggggtcaacactaagcagataattagaattacaggcgtcaagctctccatccgcgaccacgagtctaaccccaacctaaagaacatctagctggaaggcaattttgaccagatcaagcaagccagcgacttgttgcgtgatctcatcgcaaccatcagcgcaagcatgccagcgaaaaattcatctgctgccgcggcaccagca

SEQ ID NO: 3627 - DNA, 390 bp, Zea mays
  Clone ID: LIB3136-004-Q1-K1-D7
tcgctccattattcgacctctccttgccaccatccatggctgccgtgaccgccgcagacatcggtctgtcctcctcctccgcctcctcccctgcggatgctgccaatgccaaagcagcgtccccgtctgtcgtcaccatgcaagcacctccaaattctgtctagcggcgagcccgctgcagcggtggcagtccatgcgcccgggcggtgctggcgcacgtgtccaccacctagaccatcgtggcggtgccggcgaagacgtccaataagcatgacgaggggctggtcaccaacaagtacaagcccaaggatgccgacgtcaggaggtgcctgtgcaacaccaggatcacctgcgacgacgcgcccggagagacgtggcacatggtcttca

SEQ ID NO: 3628 - DNA, 385 bp, Zea mays
  Clone ID: LIB3136-004-Q1-K1-D8
cgaaagcatgtgccaaggacccaccttctgttccaaaagatcgtgtccctggggaaccatttgcaaggaagccatcaaaggatgctgagatggaaaagatattgagatcaatggagggtatgccgggagccccaagcatgaaaatgtactccagggacgatctgatgaaaaataactttggtactgaagacgacgacgaggaggatgatgaagatgaggatgacaacttcccaaagaacttggggaaagctctgaaaaacaagggctctcaaaagaaagatttgaaacagcaagtcgtgcagcagttcaaggataccagcaagaatgtgaaagggcatgtaaacaaggtgtccggtatggtaaagaaatggtggaaaggggcaaa

SEQ ID NO: 3629 - DNA, 414 bp, Zea mays
  Clone ID: LIB3136-004-Q1-K1-D9
gcggggcagttttgtgcgattaaggaggttcaagttattatggatgatccacattcgaaggaacgagtcaaacaattaaaccaggaaatagatatgcttagacaactctcccacccaaacatagtgcagtaccatggaagtgagctgagtgatgaatcactttccatttgtcttgagtatgtttcggggggttcaatccacaaattattaagagaatatggctcttttaaggaacctgtgattcgtaattacactgggcaaattcttgctggccttgcctacttacatgggcggaacactgtccacagagatatcaaaggagcaaacatactcgtgggtcctaatggtgaagtcaagctggctgactttggcatggctaagcatatatcatcttttgctgaaatacgttctttc

SEQ ID NO: 3630 - DNA, 422 bp, Zea mays
  Clone ID: LIB3136-004-Q1-K1-E1
ctcaagtggagaaagaactgctgccaaaccacatgatgacagaagtagcagtgatcaaactgaatgtgcagctaagttggcacctcttttattacagaagggtgtcctcaggacaaattgcatagactgcttagatcgcacaaatgttgcacaatttgcatatggtttagctgctttagggcgtcaacttcatgcattggggcttactgaagcacagaaaattgaattgcacgatcctctggctgatgatctgatggacttctatgaatggatgggtgatacattagctattcagtatggtggttctgctgctcacaacaagatcttctgcgagcaaaggggtcaatggaaggcagcaacccaatctcaggagttccttcggaccattcaacgctactataataacgcctacactgatcacg

SEQ ID NO: 3631 - DNA, 400 bp, Zea mays
  Clone ID: LIB3136-004-Q1-K1-E10
cacaaactgccctcgcggcctcgccgccccgtcgcccctctcgatcacttctctcccgacactcactcggtcactcccgtgtcgtgtctagcgccgacggcgttgctaccggagccgggcagcggccacgatgcctacaatgcacgcgctccgcctatgcccgctgctctccaccatccgatccacaccaccgcgggccactgccgcagcccgccagggcgcgctcttcgtcgcccgctgctcctccgccgggacgccgtcagccgcccaggcgctcaagatcagttcgatcccgaccaagccagttgaggggcagaagactgggactagtggcctgaggaaaaaggtgaaagtgttccagcaggagaactaccttgctaattggattcaggctctattc

SEQ ID NO: 3632 - DNA, 388 bp, Zea mays
  Clone ID: LIB3136-004-Q1-K1-E11
tgatttactaaatttcagaaaagatggatctccagtgatgaacagattgcatctgacccctatttatggagatgatgaaaccataacccattatatgggcattcaattcttcactgatgctaatgttgatttgggaccattgccctgttcaatgacaaaggaaccagtgaggtcaacacggtttgctctagataacacatttcgacccatttctacgaggccagagcacagcaatttctgccgggaatattctagtctcttccaattaacggatgaagtgctttgccaaagtatactgtcaagattgtcaccaagagatatagcatctgtgagctctgtgtgcaggcgattgtatgatttgacaagaaatgaagatctctggagaatg

SEQ ID NO: 3633 - DNA, 413 bp, Zea mays
  Clone ID: LIB3136-004-Q1-K1-E2
caaagtttgtgcccactgtaatgaacatctttaagagattagccgacgagggccaagcacctgcagccgccccagagaggcagagagagatggagctccaaccaaaacccaccaggaacggttcttcatacaccaatgcgacgtcggcggggtcatccagcgtaaccacttcggagatcggacctgagtattcgagcccggtggcgcaatgatttagctgatctttagcctttggctggaagcccactctagcgcagttgagggaaacagggtgcctctcgagaacataggaagattttaaggacagtcaggtgccttgcagttttttctaagcctgcccttcccccaaactgatgcaaggtggtgatggggtggcactgcccatcactattatttaaagatctttgggggct

SEQ ID NO: 3634 - DNA, 361 bp, Zea mays
  Clone ID: LIB3136-004-Q1-K1-E3
cacccggttccgcgtgcctttccccacctactctcgcggctctcgccagccagtctagggtttcggtcccggcgtgcttatccgcccccgccggccatgtcgaagcaaggagggaaggccaagccgctgaaggcgcccaaggccgacaagaaggagtacgacgagacggatcttgcatatctgcagaagaagaaagacgaggaaaaagcactgaaggagctcaaggccaaggcacaaaagggcgcgattggaggctcgggtctgaagaaaagtggaaagaaatgagactggtcacccgtctccattacctagaggatgataaggcagctgtctatctgtgttgcgcttcactacgtgtgat

SEQ ID NO: 3635 - DNA, 270 bp, Zea mays
  Clone ID: LIB3136-004-Q1-K1-E4
gtggcgcagccagagagatcggagaaggggtagaagatggtgcgggtggcgacctacttggcgatgaccttcggggcgttcctcttctggcagtccatggacagggtccacgtctggatcgcccttcaccaggacgagaagaaagaaaggatggaaagggagctggagataaagagaatgcaggcagagttactggcccaagctaaagagaatgaatcatgattgtcatttgtccaatggtttcaggcagttcctttatcgtatttcctc

SEQ ID NO: 3636 - DNA, 314 bp, Zea mays
  Clone ID: LIB3136-004-Q1-K1-E5
tcgctcaagtggagaaagaactgctgccaaaccacatgatgacagaagttgcactgatcaaacgtgaatgtgccgctaagttggcacctcttttattacagaagggtgtccataggacaaattgcatacactgcttagatcgcacaaatgttgcacaatttgcatatgggttagctgctttatggcgtcaacttcatgcatcggggcttactgaagcacagaaaattgaatcgcaccatcctctggctgatgatctgatggacttctatgaatggatgggtgatacattacctattcaccatggtggatctgct

SEQ ID NO: 3637 - DNA, 358 bp, Zea mays
  unsure (1)..(358): unsure at all n locations; Clone ID: LIB3136-004-Q1-K1-E6
gcgggaaattgaacaaggaatcaatttaagattgtctaggaagcttgataggaaatggaagcagagcattgtggtcagaccaccaccatctctaagggggaacaaagaggagtagaaagccgcaaaaagagggcaatgtgcaaaagtcgtttcatgcgagtgttgcaggaaggtcccttcatgatttcaacccttattgcgttgttatgtattccatgtttacattttgctaagcattgctatctgaatctgaatttcagttgttagtctcttctgtaaattttgacttatttaaatttacacttctatctgtgttatcagtnnnntaaaaannnnntttntncacaaatataataat

SEQ ID NO: 3638 - DNA, 273 bp, Zea mays
  Clone ID: LIB3136-004-Q1-K1-E7
tcgcacccggtttcacgtgcctttccccaactattcttgcgggtctcgccagccagtgtaaggggtgggtcccggcgtgcttattccccccccccggccaatatcgagcaaggagggaaagcccagccgctgaatgcgcccaagggcgacaagaaagagttccaacagaccgatcttgcatatctgcggaagaagaaagaccagggaaaagcactgaaagaactcaagggccaggcacaaaatggcgcgattggaggctcgggtcttaagaaa

SEQ ID NO: 3639 - DNA, 162 bp, Zea mays
  Clone ID: LIB3136-004-Q1-K1-E8
caaagaagtgaagtattgaaataaagctgtagctttctagtccagtactgcactttcttttataagctctagtcaaattttggagcgcctgaactgttttgctgttatataacctagtgtattgataaattcgactatcacatctggattattctgctggat

SEQ ID NO: 3640 - DNA, 210 bp, Zea mays
  unsure (1)..(210): unsure at all n locations; Clone ID: LIB3136-004-Q1-K1-E9
gccgtncgaatctgctgccagaatgcggtggttctaccacaaaggctcatcgggcttctgcgcgccttcaccgtgagatgtcaccgccgcgtgacggccaagttggtccccgatacagtcctaaaacacctttatctgccattacttcacccgcttgacttgcacaaacatcaacttttaacggagacgcataggcctgacgctgacctg

SEQ ID NO: 3641 - DNA, 455 bp, Zea mays
  unsure (1)..(455): unsure at all n locations; Clone ID: LIB3136-004-Q1-K1-F1
atgacgtgtcgagttgtgacgacgacattgcagggatcgcgggcgtcgacgaagagagcagcgatggtgactacgatgggattggtctcggtggctgcaacgtggatggagctgctgatccccaggctagcatcggtgaggtgaggaggaaggccccctggaagcggtggaggaagcctgtgaaggcgcggtcgctcaagtctttgatgtgagcacgcaagcgcccgcgttactcttccatctccgtggtgtagatgtagaagataagttaatcggcagcttggcttattcgcttgctaactcctgttccttctgatttgtagctgttgttgattgacggactgtttgacttcttcgngttggttggttgttccatggttgtacaactttggttgccaacttgccattccttttcatgttggagtattgcgtcttggaaagttggaagcaatatc

SEQ ID NO: 3642 - DNA, 374 bp, Zea mays
  Clone ID: LIB3136-004-Q1-K1-F10
ctcggaattggtgaagtttacaatggaagcaagcatagacgacagcatggaatggttcgaggacaaggtcacgacagtctcccttctggaggcaaatggattcagtgtgcaatctatacagagcgtcttgaccgaactgatcgagatcaaatctgagcgcgcccgttaccatggagagatcggcaagctgagttcaaagctagcggagaacacggcttcctcctcccgagtcggtgcactgctcgatgaaaaagatggagcggcagctcagctcgagcaagaactcgggcgcatccgccaggaaagccagaagatggcacaggagaaggagaaaatagatgcagagggcgtgagtatcaagacagcatgcagcg

SEQ ID NO: 3643 - DNA, 397 bp, Zea mays
  Clone ID: LIB3136-004-Q1-K1-F11
gcctatggttttgatcttgtccgtggaacccaaactcttgggcttgtcacgagtgctggtttccctgctggaaagtacctctttgctggtgttgtggatggacgcaacatctgggctgatgatcttgctacatctctcagcactctccagtctcttgaggctgttgttgggaaggacaagcttgtcgtatcaacttcctgctcgctcatgcacaccgctgtggatcttgtgaacgagactaagcttgacagcgagattaagtcttggcttgcttttgctgcccagaaggttgttgaggttgatgctcttgctaaggcattggctggtcaaaaggatgaggcttacttcgcagcaaatgctgctgctcaggcctcgaggaaatcctcaccccgtgtga

SEQ ID NO: 3644 - DNA, 430 bp, Zea mays
  unsure (1)..(430): unsure at all n locations; Clone ID: LIB3136-004-Q1-K1-F12
agcttgatgaatccgtatctgctgcaattactgagaatgatattgttgctgctgctgtattggccggaaacaggaattttgaaggacgtgtgcatcccttaactagagcaaattaccttgcttcccctccattagttgttgcttatgccttggctggcacggttaatattgattttgagaaagaacctattggcatctcgaaagatgggaaagaggtttacttccgggatgtttggccatcaacagaagagatagccgaggttgtcaagtcaagtgtgcttcctgacatgttcaagagcacatatgagtccatcacccaaggaaatcctatgtggaatgagctgccagtctcaacaagcactctctatccctgggatccatcatctacatacatgcatgagcctncttacttcaaggatatgacaatgac

SEQ ID NO: 3645 - DNA, 423 bp, Zea mays
  Clone ID: LIB3136-004-Q1-K1-F2
cggacgcgtgggttcttacacaccaatgcttacaaacaaacacacacacacagcacgcgatcccgctgtcccagcagctggagtacttcagggagtaccagacgaagctggcggcggtggccggcgccgggcaggcgcgctccatcctcagcggcgcgctgtacatcgtcagtgccggcgccagcgacttcgtgcagaactactacataaacccgctgctgttcaagacgcagacggccgaccagttctccgaccgcctcgtggccatcttcggccgcaccgtgcaggagctctacggcatgggggcgcgccgcgtcggcgtcacgtcgctgccgccgctgggctgcctgccggcgtccatcacgctgttcgggcacggcgccgccgggtgcgtgtccaggctcaacagcgacgcgcagagct

SEQ ID NO: 3646 - DNA, 449 bp, Zea mays
  Clone ID: LIB3136-004-Q1-K1-F3
cggacgcgtgggtgcagccggcctcaccgccggcgacgggacgcggagacccgggctgccggtaccgtcagccgtgctccttcctctcttcgtcgcccccgccaaaaccttcatctgccggggctgcaccggcggcgcggggacaacaaaagctcgagatccggtgactgatctcttcgttcctcggttcactttgatattccaacaaaggtcacattgctagactcccagattggttcctaacaatgagggcacatgaacgagctgccagtttggctcttgcctgtctgagcttggctccacttctggttaacgtaaacccaaatgtgaatgtggtattgacagcatgccttactgtctatgtgggttgctaccgatctgtgaagccaactccaccttctgagaccatgtccaaggagcatgctatgcggttccctttagttggaagc

SEQ ID NO: 3647 - DNA, 428 bp, Zea mays
  Clone ID: LIB3136-004-Q1-K1-F6
ggcgtaaacaaaccagggtgtggagcaggtcttcttcgccatggctagggacgtgaagcgaatgctcaccgagaccgttgccgccgcggccgagcctgcggctatccagatcagcaggccggactcgggccaggccggcgcaacctcgtcgacgaggtggtcatcgtcctgctgtagcacctgatctgacgccgagtgtgtggctgactctggctgctataggttactgcttaccgcgcggtgtgtgtgtgtgtttacttcctccggtgccaagccaagatttaaattacgctccaaagatctgccggagcaaacgtgtatgcagatagctaggctgctgtgctgggtttgcttgcttctgtcgtgtaaacaaaacccttgagagacagcagtgtctgattgcgttggaacatgacatgcttgtacat

SEQ ID NO: 3648 - DNA, 366 bp, Zea mays
  Clone ID: LIB3136-004-Q1-K1-F7
ccgtggtcatggctggtgtgctcggtatctacggcctcatcatcgccgtcatcatcagcactgggatcaaccccaaggccaagccatactacctctttgacggctatgcccacctgtcgtctggccttgcctgtggtcttgctgggcttgctgcaggcatggccattggcatcgttggtgatgctggtgtcagggcgaacgctcagcagccgaagttgtttgttggcatgatcctcatccttatttttgctgaagcgcttgccctctatggtctcatcggcggcattatcctctcgtctcgtgccggccagtcccgcgcagattaaaggcacgttttagatgttaacaccgtgccgtcgacagttg

SEQ ID NO: 3649 - DNA, 422 bp, Zea mays
  Clone ID: LIB3136-004-Q1-K1-F8
cggacgcgtgggcggacgcgcgggcggtctcttgggaaaagactcctcccatctgcggcgtggccccttatcaaacatccccgcggcgatggatcttcgtctggcccactaacccgtcagcgcgaccgtgggtgtgggtgggtacggggatgggactcctcgggcggagaccgtggctgctgctcctcgccctcgcttacgcggccgtcgccgtctccgtggaagccttcgagggcgacgctgatccgctctacagagcatgtgtggaaggatgccaaaaaacaggctccctgaaggaggcttctattaaacactgtttggtgccaaccgatggccagcctgctgacaaatcgtggtacgcgcactagcccgttgtacttgcaatggaaggactggtactgcaagagcgaatgcagatacca

SEQ ID NO: 3650 - DNA, 380 bp, Zea mays
  Clone ID: LIB3136-004-Q1-K1-F9
gcacgcacgaactgaacggagctgacgccgtgctttgtgattgtgactgtcacgcatgttcttcgtgtcactgtgacaactttcgtgacgaccatgtgcatgcatgatcgaccggaccgacggatgcagtacgagaggcacgaggcgaagaaagacccggagcacgcgcagcggcacaagatcgaggagggcgtggcggcggtggctgccctgggcagcggcggcttctcgttccacgagcaccacgacaagaaggaggccaaagacgcggcggaggacgccggggaggaggaggagtccggccgccgcggcgaggggaagaagaagcaccacttcttcggctgatcgggctgctgctcgatcgatctacttgcgtacgt

SEQ ID NO: 3651 - DNA, 307 bp, Zea mays
  Clone ID: LIB3136-004-Q1-K1-G1
tctgggactctttgtcggacgcgtgtgcgtactcgtggactgcggcggaggatccaccggggcagggtcatgcgccgaggtcgtgtgcgctgcttacctaaacacgatgtgccacgacgagctccgagcctgtggcggaggggcgtgcctgagcgcatgcgacgcgttctagcggtcctagtactgctgcagcggagccttcaagtacacagcgtagtgccgttcgacggcctactggcaggtgttgaagactgcgagccctaacacttacaactacgcattatacgattccaccttcacattcacc

SEQ ID NO: 3652 - DNA, 274 bp, Zea mays
  unsure (1)..(274): unsure at all n locations; Clone ID: LIB3136-004-Q1-K1-G10
gcgacccacgcatcggcgatgcggaacgccntaagggcatgaacggtagaaactggacggtcgaatcataccgtggcgagagcccagaccagggaggccgtggaggctgctgacgacgtacaaatcttgacgttgaagttgattctacggcagttagcaggcaccgtgatgccagtcagatctactgtgtgaagaaccctatctactttttcaacgatagctacgaaggtggtttttgcgtttactggaaattgaaccaacacatatgctacag

SEQ ID NO: 3653 - DNA, 134 bp, Zea mays
  Clone ID: LIB3136-004-Q1-K1-G11
atgcgtccactacaaaacgattcctttccatcaccatcgttgctgatcgagcccgacttctacaggcgggactagtattttactttggatgtaacaaaagtatacagaaaccttatatactacaaatttcatga

SEQ ID NO: 3654 - DNA, 382 bp, Zea mays
  Clone ID: LIB3136-004-Q1-K1-G12
attccacgtgcgttctgccggtctctctcgccgctgtctcgctctccggcgactggtgggccgccgccgccgccggcccgccaggtgcggaggttttcgttggtccttcgccagcgacgagcacccaccaggcttgttgtatatgtgctgcaatggcgtctctggggcgaagagccgggagctacatctgctcggagctgtgtggcacaactctgaaccagagacgctactccacttcgagggtggattggaagcagctgcggccaatgatccttaagaggattaagaaccggacaaaggaatacccaatcaagagcatgatcccagtcgcggaggaggtggtcagggctagggagattgtcaatgagggcgtctccagact

SEQ ID NO: 3655 - DNA, 402 bp, Zea mays
  Clone ID: LIB3136-004-Q1-K1-G2
caccacgccgtcgccgccggcgtcacccttctcgacacctccgacgtgtacggtccccacaccaacgagctcctcctcggcagggcgctccgggcggcagacggggtgcgggagaaggtgcagctggcgaccaagttcggcatacgcgtggacgccgccgacgccgcccgggagatccgcggcgacccggcgtacgtgcgtgcggcgtgcgagggcagcctccagcgcctcggcgtcggctgcatcgacctctactaccagcaccgcatcgacaacagggtgcccatcgaggtcacggtaggtgaactgaagaaactagttgcggagggcaagatcaaatacatcggcctgtccgaggcgtcggcgtcgacgatcaggagagcgcacgcagttcacccaatc

SEQ ID NO: 3656 - DNA, 374 bp, Zea mays
  Clone ID: LIB3136-004-Q1-K1-G3
tcgctcagccgacgccgccgcctaaggagaagagggtcctgccgccatctttccacgatttcgggcgagattattcattctaaccctagtacaaagatcttggtgcaaaaaatcatggataatacatccgttaagaaaggtttatgttcacatcttcttatgtaccatttacacaataaaaatgcccctcatgttgacaataaagcacattttgatttacttagctccaacgtatcatcttgtagcgagccacattataaaaagaagccctcctacatgaatgcatttgatattattatcttattaactggcttggaacactctggtttatttgtagaatcttacaacaagtgagatttccaattttcattttc

SEQ ID NO: 3657 - DNA, 235 bp, Zea mays
  Clone ID: LIB3136-004-Q1-K1-G5
ttgaaagatcactagcagtcattacttgattcaattgccagacttgatgaatcatgggagggcgataatgaacatatcgccatggaacgcctaatgggttctgatggggaaaggaaccgcatcactacatagtttcttttggcatgttcgtattgtccgatttacatacttatattccgcatcttctttgaccgaagtacatttttacttcattatggccaaacttaccaccata

SEQ ID NO: 3658 - DNA, 431 bp, Zea mays
  Clone ID: LIB3136-004-Q1-K1-G6
gacaagatgacgacgcacacgcggcaagaggcgcaggagttggaggagcgcatgacctgtctgcggttgctattcgaggacgcagcagatgacagaattctcgccagaagggagcttggagcagcagccgacgagttcctgctccgcttgacgacgcgtcaacaggccttgacgcgcgagtactcgcgcctcgccaacctgaagaggcctctggatctctccggcatgactgatgccgaccgggcggcggaggcggagaggctgagggaggagaagctgcagaaggcgcgtcaactccaggaccagtgtgacatgagcggcgcccgcgagtgtgaaggtctggcacgcatcatcgacttcgatgtcaagcatggcggcgaatacctcaacagtatctgctgtgtcggcaacatctacaccttcgaccacac

SEQ ID NO: 3659 - DNA, 454 bp, Zea mays
  Clone ID: LIB3136-004-Q1-K1-G7
gaaagctgacttcaaatgtccaagttggttttctaccgatgttcggaggcttttgcaaaggattcttgatcctaaccctagtagaaggatctcggtggaaaaaatcatggagaatccatggtttaggaagggtttaggtgcaaagctacttaggtacgatttacagaataagaatgcccctcatgtggacaagaaggcagattttgattcactgagcaccaacgtaacaactgagagcaagcaacatgaataaaagaagcctaccaacatgaatgcatttgatataatatctctatcaactggtttggacctctctggtttatttgaagaatctaacaagaagagagaatccatattcacatctaccaacacatgctcgacaatcatatcgaagatcgaagatattgcaaagaatttgcgcgtgaatttgacaaaaaaggatggtggcttgtta

SEQ ID NO: 3660 - DNA, 420 bp, Zea mays
  Clone ID: LIB3136-004-Q1-K1-G8
cattcccggccatgtcaagcaaatcgccccaaagttccaggacgggattagggcgctggcagacagtccgattataggggagatacgtggcttggggatgattatggggaccgaattcacaaacaacaagtcaccgactgatctgttccctgccgaatggggggttggtgccatcttcggcgaagagtgccagaagcgcggcatgctggtcagggtcgctggcgacgccatcatgatgtcgccgacgctgatcatgacgcccggcgaagtcgacgagttggtgcgcatctactgtgaagccctcaaggccacggatgagagggtggcagccctgcagtccaagaagaactagccaaaagggcggcgacgacgataacgataaacgccgggcgacgacggaccatatttgatgtacaggtg

SEQ ID NO: 3661 - DNA, 337 bp, Zea mays
  Clone ID: LIB3136-004-Q1-K1-G9
atggcccgcgtgcgcaagtcctacgtaaaggctggcgagatcgccgaggaggtgatcgggaacgaccagaccgttcaagctttcgtccaaaatgaaaatgcaccgaggctctacccggaggcgcttcttaggacgctcacctaccgcatgaggggccgtcatcgcaagggcctcgggctcggctacatgcactatgtgctttttctctgggaagcgcgtgtcatatgattcaacagagtcgctctccacaaacgtatatggaatggcgtagagtgctttacctccatgcgtcaaggccaaattcatggctctgtgctcggtcaggcggttcctaaca

SEQ ID NO: 3662 - DNA, 430 bp, Zea mays
  Clone ID: LIB3136-004-Q1-K1-H1
cttaggagggcaacgaccgaaggaatttgggtcgcggtatgcaagaatcctaacgttgttgtgtgggatatagaaggagccgatggtcaagaacatcaagatgatgcatgatttgagaatcaagctgcattgtttgccttgtcgatatccgatgtaatattttttaacatgtaagtgtcgaatctagcttgcaaataactgctttcgttccttgatcattcatatatgttacgtacgctccgatatcgaaccgcttaattaattcagcacaacacaggacacatatatatatatatatatatatagtcttcttttttcagtaatgtgcaggacatcggtcgactgcatggcgcgagtattcctcttcttcgtacaacatttctggagagacataatcacgatatgcatatgacgaaagtggtgatcgctg

SEQ ID NO: 3663 - DNA, 355 bp, Zea mays
  Clone ID: LIB3136-004-Q1-K1-H10
gaaaacggggataactggagcgtgggacagcgccaacttattgcactgggtagggcgctgctcaagcaggcaaaaattttggtactcgatgaggcgacagcatctgttgacacagcaacagacaatcttatccaaaagatcatccgcagtgaattcaaggactgcacagtctgtaccattgctcaccgtattcccaccggtattgacagtgaccttgttctggtccttagtgatggtaaaattgcagagttcgacacgccccagaggcttttagaggacaagtcatctatgttcatacagctagtatcggaatactccactcgggcgagctgtatatagagaggcttagcttaaa

SEQ ID NO: 3664 - DNA, 339 bp, Zea mays
  Clone ID: LIB3136-004-Q1-K1-H11
cggacgcgtgggctgcaatgttgcagaaaggaaccgtgctggattccggtggcagccaggccagcttcctgatgcaggcctgcaccctgaccaagcgctccttcatcaacatgtcgcgggacttcgggtactactggctcaggctcctcatctacctcctcgtgaccggttgcatcggcacgatctacctggacgtcggcaccaaatacacatctatcctggccagggctgcctgttccgcgttcgtcttcggattcgctacattcatgttcattggagggatcccttcgttcgttgaagaaatgaaggtcttccaccgggaacggctgaacgggcact

SEQ ID NO: 3665 - DNA, 364 bp, Zea mays
  Clone ID: LIB3136-004-Q1-K1-H12
ctctgatgatcttggaggctgtgctctatgcaaacagaaagatttcaacaatgctgtgtttgatgagcgcactgtgatactctgtgaccaatgtgagaaagagtatcatgtatgatgcttgaagaatcaatggcaagtggaactaaaggaattgccagagggggagtggttctgttgcagtaattgctctgagacacgatcttcattagacaagataatctccgacggagctcaactgttggtggagccacatcttgaaatcataaagaagaaacatgtgacaagaggtttatgtatggacaccagttaagatctcaaatggcaattactttctggtaaaaggactactgtagacggaagcata

SEQ ID NO: 3666 - DNA, 352 bp, Zea mays
  Clone ID: LIB3136-004-Q1-K1-H2
tcttgcctcacctcccggtccatcctcgctgctcacgcgtgcctcacctcgacagcagccttccctcgcgacagggataaggacttaaggaggcgtcgctcggtgcaaagaatccatggcatggggaggtctgttcttgtgcatgggccgccccacgcaggagcaacagaagtcctgccttgcagccgctggtggcttcaactacgacacagctctccaaggcgccacacgcccaaagtcagtgtctaccttgacctctgacgaagctggtggcgaaataggtgacaaggatcttaccgagcgtggattctttgtgaaccgatcgcgtgttctggtcggctcacgttctgac

SEQ ID NO: 3667 - DNA, 352 bp, Zea mays
  unsure (1)..(352): unsure at all n locations; Clone ID: LIB3136-004-Q1-K1-H3
gcctatggttttgatcttgtccgtggaacccatactcttgggcttgtcacgagtgctggtttggctgctggaaagtacctctttgctggtgttgtggatggacgcaacatctgggctgatgatcttgctacatctctcagcactctccagtctcttgaggctgttgttgggaaggacaagcttgtcgtataaacttcctgctcgctcatgcacaccgctggggatcttgtgaacgagactaagcttgacagcgagattaagtcttggcttgcttatgctgcccanaaggttgttgaggatgatgctcttgctaaagcattggctggcaaaaggatgaggcttacttcgcagc

SEQ ID NO: 3668 - DNA, 285 bp, Zea mays
  Clone ID: LIB3136-004-Q1-K1-H4
ggcagggcactgcactgcacgcatgcactgacctgacgacgacgcgcgccacagtccacagctcctcactcatacatggcgatgggcgccgcttccatcctactgatgatggtttcgctggagaccctgcttctcgccgccggcgccggcgccggcgggaccatccgtctgtccagcgatgtcggaggcgttgctgcagaccttgtcacggcgatggcgagggcgagggcaagggcaaagcatcagcttcgcgacgaggagaggccgtggggggaatgctgcgac

SEQ ID NO: 3669 - DNA, 403 bp, Zea mays
  unsure (1)..(403): unsure at all n locations; Clone ID: LIB3136-004-Q1-K1-H5
agattgccagggttgaggcagaatgccgcatgctacagcatctaacgcggaaaacaacactgatcaataattctagatccacacaaaacaattgctgcatggaatcactgactgacagccagtccgaccatggggagcatatggtgggtgttgataatgatctgcaaaattccgattcatgggcattagctttgattgctgagcttgatcagttcaagaatggcaaggatggttcaagaaatattgtgaacaatcctgttgagattgacataatggatgatttccttgagatggaaaggttagctgcattgcccgaatcagatggcacaagctctaactntgaaatggaaacagattctgacaaggctgtcacaagaaacagctccttgaaggtcaaaaatga

SEQ ID NO: 3670 - DNA, 254 bp, Zea mays
  Clone ID: LIB3136-004-Q1-K1-H6
gtatctggcctgtccgggagtaaagaggaggcacagagtcaggtactgatcggaatggggctgcttgctggttccaccgccttcctcctcaccctgctttgggggacctgcgtgcgctgcggcacacgcgaccttggcccaaaccgtgaggcagttgatgtaacagacaccaagggcttgagcttgactggcactggcattacaaccgacgtgcagaccagctatgcagcgcggatcatggagctatctattat

SEQ ID NO: 3671 - DNA, 409 bp, Zea mays
  unsure (1)..(409): unsure at all n locations; Clone ID: LIB3136-004-Q1-K1-H7
ctctgttacagggttccgcaaatgttggaaaatctgcatttatcagtgcaatgctaagaacaatggcgtacaaggacccggtggcagcggcagctcaaaaatacaagccaatacagtctgctgttcctggaacaacccttggccctattcaaattgaagcatttttaagcggagggaaattgtatgatacacctggagtccaccttcaccataggcaggcagcagttatccatgctgatgatctgccttctcttgcaccacaaagtcgtttgaaagggcgatgttttccggtatgtatattccatttggttgaacacatgttcctttctctaaattttcgcactaatatttttcttcagaacatgatgttatgttcaggctaatgatacagatgttgaatngagcggga

SEQ ID NO: 3672 - DNA, 423 bp, Zea mays
  Clone ID: LIB3136-004-Q1-K1-H8
gatggatcacattcctgaccttacaccaagtgagaacgggaatcatgctataaatggaactactgtattcgaggagctcaaaagtctgcgcttaacatcagatagacagcctaaggcagaatctattatacatagtgaacggccaccatataggagtacatctgatggccctacaagttctagtggtttctcttgcccagacaataatgctggtcacaacggtgaactagagtcatatgtagctgcattttttgaaaactcactatcacaagccaggcagatggttgacgaagccatccaggcaaactctggtggtagtgatgatgaaaaagtatgcatgttaaatcaagtgacaagatgtctaagctcagattctcgtggcgtgcaacttccatctgacatgatatcaaactgcatcgcaac

SEQ ID NO: 3673 - DNA, 329 bp, Zea mays
  Clone ID: LIB3136-004-Q1-K1-H9
ctgaccggccatttaaattgaactgggcatcgtatagcatgggtgaaaagcgatctgaagtggcttctgatcactcgatatttgttggcgatctagctgctgatgtcactgatgaaatgctgctggagctcttctccagcaagtaccgctcggtgaaaggagctaaagttattattgatgcatacacaggccgttccaggggctatggatttgtcaggtttggagactacaacgacaaatctcatgccatgtctgaaatgaatggtgtatattgctctacgaggccaagtcctatagtgcctgctacttccagaagatctttaggtgat

SEQ ID NO: 3674 - DNA, 218 bp, Zea mays
  Clone ID: LIB3136-005-Q1-K1-A1
ggacgcacgcgtccggtgggttggcttctcctccccctccggttcgggttctggttcgtgaggctctccgagggtcggggtcgtgggtgagcggatcgagatctctgcgtcatatgttgagtaccgctgcttcgtcggcggcctcgcctgggccacggacgaccactcccttcacaacgccttcagcacctaccgtgaggtcctcgagtccaacatca

SEQ ID NO: 3675 - DNA, 392 bp, Zea mays
  unsure (1)..(392): unsure at all n locations; Clone ID: LIB3136-005-Q1-K1-A10
gattgttcttgctcancatcaacacttactgcaaacttttggaaatttcaatgctggacttgtgaattcttctttcaattcgatgaacggtgggaatacatctgtgcttccagatattttcaattcaagcgatcaacctcaaaatcatgttgcagtgatgagcacctcgacaaaagatgacaataaaacttttgattttgcttcggatcaccttgcagcagcacgtggttcgcgaaagtgaaacaagaagcaatgaacatgtccagatgctggaaagagctcaagcgctggatcgacataaaagatgggaattccaaaaactgcatctcgtgacaccctcccacattggatacgggactcacacggcttggtttgcattgtctgaacacatg

SEQ ID NO: 3676 - DNA, 310 bp, Zea mays
  Clone ID: LIB3136-005-Q1-K1-A11
cggacgcgtgggctcgtctccccttaacacatgcaactatatcttcagctagcttctccctgcctcgccaccaccatccctgtctccgggaaccttcctgtcacctcggaggccatggcttccatggcctatatagctgcctgtgccgcggcattggcgatcttcgtcgctctgctccgctgggcgtaccgatggagccaccccaagtcgagaggcatgctcccgccgggctccatgggcatccccctcctcggcgagacgatgcagttcttcgcgccgaacccgacctacgacgtgtcccccttcgtga

SEQ ID NO: 3677 - DNA, 375 bp, Zea mays
  Clone ID: LIB3136-005-Q1-K1-A12
ctccattattcaacctcaccttgccaccagccatggctgccgtgaccgccacggccatctggctgtcctactcctacgcctgctcccctgcagctgctgccaaagccaaagcggcgtccccgtcgtcgtcaccatgcaggcacctccacttcctgtcggcggcgatcccgcggcggcggtggcgggcccgcgcccaggcggtgcgggcgcaagtgtccaccaccgagaccgcggcggcggggccggcgaagacgtccaagaagcaggacgaggggctggtcaccaacaagtacaagcccaaagagccgtacgtcgggaggtgcctgtccaacaccaggatcaccggcgacgacgcgcccggggagacgtggcaca

SEQ ID NO: 3678 - DNA, 106 bp, Zea mays
  unsure (1)..(106): unsure at all n locations; Clone ID: LIB3136-005-Q1-K1-A2
cggaannnnccgggtcgacgccacgccgtccgtgcaagatcctgtacacacctaccgatcgcttttctctaccgggtcagtgagataaatgtcacggagagagggg

SEQ ID NO: 3679 - DNA, 340 bp, Zea mays
  Clone ID: LIB3136-005-Q1-K1-A3
gggagatgttcgggctcagctttgcgccgcagcagtagccgccccctcgccggcgatggtccagtggctggagatacgggatcccttcgttcggctgatcggatcggatgaacggtgcgagcgactgaccaaagagatgtaactaccctccccccactttttttttttttaatcttggggtggtgtacggtaccttctgatttctgtagttttttagtaggatacctaccggggccatcatttgtttgtgcggctggcttcgtgcatgcttttctgcctagccgccgccgatcaggcctcaattgctgacgacatcgtcctatcctacgacctgtattgt

SEQ ID NO: 3680 - DNA, 327 bp, Zea mays
  unsure (1)..(327): unsure at all n locations; Clone ID: LIB3136-005-Q1-K1-A4
gacccacgcgtgcgngcaagtggagaagagaggtcccggagggtagaaatcaagctgcaagatatccaaaggggatgggttgcatttaaccgatgggctgaaactgcccagtttgcgcttgctagaagcctcacatcatcacatagtgacctccttgcattataagctgccgagggaaataatattctgaggagaacaaangatgctgttatcactctgcaaagcgtactggaagggaagcacaatactgaaatcgatgaatctctaactcaatatcaggtcccaactgatcgatggtggtcttcactttacaaagtgatcgaaagc

SEQ ID NO: 3681 - DNA, 326 bp, Zea mays
  unsure (1)..(326): unsure at all n locations; Clone ID: LIB3136-005-Q1-K1-A5
tcacaagccgacatatggcggctcagcctctcctacctcacgcccctgtcactgaggtgggccgtggagcttggcatccccacggccatctaccgccatggcggggctgcctcagccgctgagctggtcacggcgctgtctctcccctccactaagctgccgttcctccgccgcctgctgcggctcctcaccgcgtcnggcgtgttcaccgtcgacaagcagagcacggaggaggagcggtaccgcatcagccccgtgtcctacctcctggtggacggcatccctcacgaggaccacatgaaccacaccgctctggtgctcacctg

SEQ ID NO: 3682 - DNA, 390 bp, Zea mays
  Clone ID: LIB3136-005-Q1-K1-A6
ccggcggagccacgcgtccggcttataatacttacaacaaaagataagcccacgaattattacatctatgtcgggcccgttccatttaaagcacacacggacatgtcccagctgagctctgctggccacatggctgcgacgttcctcctcatccttctcgcctccgcagcagcaacggtgtcagctgaccaacaagtctctgcctgccagaatgacatatacgcactgtggcgcagctgcaagcagttcgtccagaaggaggggcccaagatgcctccgtccgaggactgctgcaaaaccatcaatgccttagacgcgcacgcgtcctgcatctgcgactacgtcggctccccggacgccaggaataagctagacctggacaaggtgttc

SEQ ID NO: 3683 - DNA, 181 bp, Zea mays
  Clone ID: LIB3136-005-Q1-K1-A7
cggcacaaaacttggattgcaggggtggttctaggggcgttagtcacccggggaaaagtgataaattctttagaaaaacacacttaaacttcaagaaaatttgtatcatgtagcaaacctgaccttgctacccgataatatctttggttagattcgccatttattggatggtgggcagccc

SEQ ID NO: 3684 - DNA, 369 bp, Zea mays
  unsure (1)..(369): unsure at all n locations; Clone ID: LIB3136-005-Q1-K1-A9
atttttgaagaggcgttatagaattaatgagatagcaggatgttttctagtggcaattgtgttcataataactgtagcaagtggatctggtactagcgcttcatttaaaagtagtggaattttatggccgctgctaatgataatatcggtctttttccaagctgccgatacaatattgaaggaaataatatttatagatgcttctaagaaattgaagtgtggctcggttgatctttttgttgtcaattcatatggctctgcttatcaagccctttttatgtgtatcttgctgcctttcctgtcaaagntatggggaagtccattccatgtgttaccaacctacataaaagatggggcagcctgcttttt

SEQ ID NO: 3685 - DNA, 407 bp, Zea mays
  Clone ID: LIB3136-005-Q1-K1-B10
cggacgcgtggggtcttcgtcctctctttgcccacttgtcggtcgcccgcgccgtcgtcttgtctccttcgcccggcctgcgaaaccctatcgaggcgagcgagagagaaactagcggccatgttcggctacaggaaggctgacccggacctcgaggccggcgggtcctcgctgttgtacccagggatgacggagagccccgagctgcggtgggcgttcgtccgcaagatctacgtcatcctatccgtccagctcgccatgacggccgcggtctccgccttcgtcgtcaaggtgcccgccgtctccaacttcttcgtctgctccaacgccggggtcgcactctacatcttcctcatcatcctgcctttcctcgtgctgtgccctctgcgctactaccaccagaagca

SEQ ID NO: 3686 - DNA, 307 bp, Zea mays
  unsure (1)..(307): unsure at all n locations; Clone ID: LIB3136-005-Q1-K1-B11
cccacgcgtncgaaatgattgctatacagattaatccagcacaagatgtctcctccctgttgtgttggtaaatccatacaaatggtgcttatgactcaaaaattgaaagaaatgccgctgccatgcctgttttaactggcaatccaagcacatctaggagccagagcatgagtgttaatcactcaatgagcaagagtatgagtatcagtccaagaagaagcccaatgaaaaggtcatgtaccaacccgaacaggtcacttagcaggagccctgttgacaattatcacagtagaagccctatgcgtac

SEQ ID NO: 3687 - DNA, 410 bp, Zea mays
  Clone ID: LIB3136-005-Q1-K1-B12
cggacgcgtgggtgaagatgtggctgttaatgttgccctgtcactgagatatgacatcagcgtgggctttgctaccttaagggagattgggcatggccagcatctgaaaaaattcctaattgttattgcaggtctctggcttctttcaattctcgggagctgctgcaacttcctgacactgttctatattgtctttgtggcactgtacactgtaccagttctgtatgagaaatatgaggacaaggttgatgcttttggtgagaaagctatgactgaactgaagaagtattatgccattttcgatgagaagtgcctatcgaagattccaaagggcccccttaaggataagaagcactagattggtagtaaagtatttgctatgaatcaacatctacattatgtcactagct

SEQ ID NO: 3688 - DNA, 341 bp, Zea mays
  Clone ID: LIB3136-005-Q1-K1-B2
ccccactttaccgcgcggaaaaaacaaagagattcccctttgctctacaggaagcgccggcgccgttgatggaattcggaaggaccaaagctgctgccgtagccctgatccccgaagcgaccttccgccggtccagtctgtccttctcggcctccgcgacgccgtggtcccgggaggtgtgggtcaacgcatccaaataacggctctttcagaggaaaacactgctgaatttctcagctggtgcctagtggtgggaaataaagctagggacccaacatccttgtgatagcaatcacatcattggtgttgttttttcagcttacgctgaaactagactgatc

SEQ ID NO: 3689 - DNA, 391 bp, Zea mays
  unsure (1)..(391): unsure at all n locations; Clone ID: LIB3136-005-Q1-K1-B3
gggggacccacgcgtccgatcgcgatcggccgccctttttttttttttttttgtacatgcctatatatttattacggataaggacgtttaaccaatatacaagacaccgtgaacccatgcgatgaatgctcttgttctcctaacaggacaactttagttcagctgtaaccaacatgccatcttctcgctcgccagaaacctcgncccaacaaggacagctttagtttcaactgtaagtctgttacaacacgccatcaccttgcgagaaacctcgttctaacgaagacaggaagcgtatggtaggtggtagcctacttttactcctgttggctgacagctaacagcagctaccttatcgcctgataattggaacctttggctcaatcaaaaa

SEQ ID NO: 3690 - DNA, 336 bp, Zea mays
  unsure (1)..(336): unsure at all n locations; Clone ID: LIB3136-005-Q1-K1-B4
gcacattcacccgncgtcacgcatagtacgaactcccggtccgaaaggcaaaccagggaccgggcccaccaccaccaccctctgtcttctcctccgctgccgattcaaaagcacccgtcctgtcccctcgcaaaaccctagctccagccaccatgaagggcaaggctgacacctccaagaaggaccagggcatgctcctggcgggcggcgccgctccaaagcgcaagaaggccgccgcgagcgggaagaccaaacgcccgcccttcggctttttcgtcttcatgtgtgaattcaagcacgaagtataagcgctgcaccctggcaacaagagcgttt

SEQ ID NO: 3691 - DNA, 391 bp, Zea mays
  unsure (1)..(391): unsure at all n locations; Clone ID: LIB3136-005-Q1-K1-B5
gagcatctggaccaccatggcctcgccgctgctcaagtcgcactctcagctgggcgcggccgccgccgccctgcactccgtgaggagagccgaccgctgccctgcgacaatacacctgggcaagttccatgaccacgggctcatgtccggccgttctaagagatccggttcagcgagggtgggcgccttcccgccgctggacgtggtgccgctgatggtgacgatagtggagcacgtggacatgtcgcgggactacgtcgtgaccaagtccatctggcatctcagcgacgtagccctcaagagcgtctataccttctacgccacgttcaccgnctggggagtctgcttcttcgcgtccatgaaggatcccttctaccacagcgagacgtac

SEQ ID NO: 3692 - DNA, 319 bp, Zea mays
  Clone ID: LIB3136-005-Q1-K1-B6
gccacatcgagaacacgatcgagcacacatgcacgaagactcgtttaggagagaccacgaaccaccaagccgtgaaagcatcatggagtacggtcagcaggggcagcacggccacggcgccacgggccatgtcgaccagtacggcaacccagtcggcggcgtcgagcacggcaccggcggcatgaggcacggcacgggaaccggcggcatgggccacctgggtgagcacggcggcgctggcatgggtggcgggcagttccagcctgcgagggaggagcacaagaccggcggcatcctgcatcgcttcggcagcttcagc

SEQ ID NO: 3693 - DNA, 422 bp, Zea mays
  Clone ID: LIB3136-005-Q1-K1-B7
cggacgcgtgggctacaattctggtgggcgtggtggtggaggcgggggcaggggagggtacaatcaaagtggtggtagtgaccgtggttttgatgaccaccgtggtggcagaggtggcagctatggaggacgagaccaggagaaccaaaagggtagtgaaggtggctacaatgctggtggttatggacaaactcctcaaggtcctccttcctacggtggtcctgcaggtgactatgcagcacctacgagctcttatggaggcaacaatgcttatggttcagaatctgcagtgccgcctcctaatagctacagtggtggcccaggctcatacccaccaagctattgtgccccgcctccacaccaatatggtggtgccccatgcgggcaaggcggcctgccttctacatatgctggtggatatg

SEQ ID NO: 3694 - DNA, 396 bp, Zea mays
  Clone ID: LIB3136-005-Q1-K1-B8
cttctgcattaatagatgaaaaatttggttaccagttgaagaaggctgttaaagatgtgtaaatggttaatgttaatcttgattggagggaggctgttccacatccagatgaccgtgttgagtatgagttatggacaaacagcaatgatgaatgtgggcctaaatgtgatatgctgatgaattttcttaaggaatttaaaggagctgcccaactacttgagaaaggtggctatagccaattcacgccccattacattacttggtactgtcctcaagcatttgtgatcagtaaacaatgcaagtctcaatgcataaaccatggaaggtactgtgcacctgatccagagcaagattttagcatatgctacgaaggaaaggatgtggtggtagagaacc

SEQ ID NO: 3695 - DNA, 267 bp, Zea mays
  unsure (1)..(267): unsure at all n locations; Clone ID: LIB3136-005-Q1-K1-B9
gcggcggcgctcgcggcactcctcgtcgtctgatttaacaccgcgtttggacctacccacntggctcccaacgacttccataagaaagatccacttttggtgaaggtgaataagctgacatccacgaagacgcaacttccctactcatattactctcttcctttctgtaaaccaaacacgatagttgacagtgcagaaaatcttggagaagttctgcgtggtgatcgcattgagaactctccttatgtgtttgagatgggggaaccc

SEQ ID NO: 3696 - DNA, 278 bp, Zea mays
  Clone ID: LIB3136-005-Q1-K1-C1
ctccgctcggccaccacttttgaccgcttcccttcccttccgttccgttcctgttctgccttagccaattcccccgaaggaccgggccgccgccgccaaaggcaaagccagaaggtccggcccccccccaaaaaaaaccgacacccccaagtctctccgagtctctgggtgcgcccaagtgggcgccccaacacaaccaaaaaaagctcccccacgggcgctatctagaaccacccccacacgggcggtgacaccccgaaaagaaagagatctcacac

SEQ ID NO: 3697 - DNA, 445 bp, Zea mays
  Clone ID: LIB3136-005-Q1-K1-C10
gcgccggcgcctccatttcgttttcctcactctctcctccaactcaaggtccggcggcgatgtgaaggcaagatgtacaccgcgaggaaaaagatccagaaggagaagggtcttgagccctccgagttcgaggactccgttgcccaggctttctttgatctggagaacgggaaccaggagctcaagagcgacctcaaggacctgtacatcaacaatgctatccagatggatgttaccgggagtaggaaggctgttgtcattcacgtaccataccgcctgcgcaaggccttcaagaagatccatgtcagactcgtcagggagctggagaagaaattcatcggcaaggatgtggtaattgttgctacacggaggattgtgaggccacccaagaaaggttcagctgttctgcgccctcgcaccaagactctgactgctgttcacgatg

SEQ ID NO: 3698 - DNA, 324 bp, Zea mays
  Clone ID: LIB3136-005-Q1-K1-C11
cggacgcgtgggcggactcgtgggcggacgcgtgggaaacagtttatcagttgtgcaaacggtctgtttcacaggctcgtgccggtgctgatgttgtcagccctagtgacatgatggatggccggattggagcacttcgctctgctctggacgccgagggcttccacgatgtctccattatgtcctacaccgcaaagtatgccagttcattttatggccctttccgagaagctttagattcaaatccaagatttggagataagaagacgtaccagatgaacccagctaactacagagaagccctcatagaaaccgcagcggacg

SEQ ID NO: 3699 - DNA, 446 bp, Zea mays
  unsure (1)..(446): unsure at all n locations; Clone ID: LIB3136-005-Q1-K1-C12
ccctatatgaccaactagttttaacttttgcttaacactcccaaccaaatcacccacacacgcataacctatcataaatccaccaaacgagttgcacccacacacaacacgccctcaaaaccaacggttcaaattgctggataaccctcctctctcttactcacttaaatccaattgctaatattatttggatcatcgttccgccatcattcctcacacgcaaagtaacctcctgtctcctcccctcctcctgccccgccatccctcccctacctcgcgctgccccctccctgggaccgtagagttagcaccgatattagactagtattgaaagaagaagagtcatacattgacccaaactctcacacacacctgtgctacttattatctaaatcaccggntacaagacatactacgacccaaatgcactacagcaagcctttaat

SEQ ID NO: 3700 - DNA, 378 bp, Zea mays
  Clone ID: LIB3136-005-Q1-K1-C2
cgaaaagttggagcgacgagataacagtgttgattgattctgatatgctgaaaagtctgccaaagttaagtcgccaggagcttgaagtggcctgtgaggattttagcaacatcattggctcaactccagagacagtagtctacaaaggaaccatgaaggatggacctgaagtttctgtgatatcgctgtgcgccttcgaaggtcattggactagccaccatgaactcttttaccaaaacaaggtcattgatctggcaagattgaatcatgagaacatagcaaagttcttatggtactgcacggagagtgatccattctctcggatgctagtcttcgagtacgcaccaaatgggacggtatttgaacatctacattatg

SEQ ID NO: 3701 - DNA, 310 bp, Zea mays
  Clone ID: LIB3136-005-Q1-K1-C3
ggcccgccagcgttcacagcgtgctgctgtgcaaagggctcaacaggaagcccgtgagagggctgcagtttaggccaaagaaagagcagctctggtagcttcataagcaagggagagagctgctgcagaagcaaaggagagggctgctgctgaagccaaggagaacgcagcagctgaagccaatgagagggagagggctgctgctatggagagggcagccacaaaaagagctgctgctgagagagctcagcacgaagcaaagaagagagctgaaccagctgcagtggaaagagctgctactgaggctcga

SEQ ID NO: 3702 - DNA, 343 bp, Zea mays
  unsure (1)..(343): unsure at all n locations; Clone ID: LIB3136-005-Q1-K1-C4
cttctccgcgctctcccgagcccatccgcccgcgcattccccagaacactanccttccgcgcgaggcccctcccccgcggtctccgcctgacccctccgcacgccgccgcggaggcatcggcggcagccacggcgttgggcgggcttctggcgtcgccgctctcgactctggaggccgccctgcggggcctcaacctctcgccccttcgcgcccccgtggcggcagcgatgtctgcggccgtgcggtggctgggagtgtaccgggaggtgctgctcgtcggcgtgctgctctcctggatccccaacatccccttggaccgacagcccttttcgggcctgcgcg

SEQ ID NO: 3703 - DNA, 329 bp, Zea mays
  unsure (1)..(329): unsure at all n locations; Clone ID: LIB3136-005-Q1-K1-C5
acccacgcgtccgcgtggctttgtgtctgggggcaccattgtaggagacacacggcctgcacaggctgccgccactttcgtaactgcatcctggccancacatgctgccccctccgtccctgcatcccgccctgctgctggaaataacaatgaaaatgggaacccaaatcccaaaagttcacgggatcggcccacgtagagaaaacaaccatcacgttgggatcgttagtccctgctaaccggcgtcttgaattgcgactccttttcctctttggtacattgatgtaatctcttgggggacatcctataaaaagcatattgatgtacac

SEQ ID NO: 3704 - DNA, 285 bp, Zea mays
  Clone ID: LIB3136-005-Q1-K1-C6
caccaaaggattgctaccgagacattcacctggcttgagctggcttttgctagagcgtgcaaggggttgctgggtgtcgtacctacctgacttatcattatctgtggttacattctggaccctgtattttctatgctttcatgtctctctactttctagtattaattatcaataagttggtttggaatggttgaattgcatccaatgcatgaagtttctttggttacctttctctttgctcgattgttctgcttccagtgttggtgtatactgtagtttctgagt

SEQ ID NO: 3705 - DNA, 359 bp, Zea mays
  unsure (1)..(359): unsure at all n locations; Clone ID: LIB3136-005-Q1-K1-C7
ccttcctcttcccctcgttgatcgttcgctgttgccgattcgccatcccctccaaagggggacaagattgagtgggtcttgcgcccttgtccctagctgcattgcgaattgaggcgccaatttgggagacgactgcattgatgaatgccggaggccacagcactcactgatttagggattcnatgtcacgggcacccggatgtcattgccgatcgcccttgtagtcggcattgccggtggcgccaccttgctcgcggtggcggccgtgctgctcgcgctctggtgcgctgcgcggatgagggcgcggcgtaaccgcaactncgacactggctccttcgaccccttgacgctagtggagt

SEQ ID NO: 3706 - DNA, 411 bp, Zea mays
  Clone ID: LIB3136-005-Q1-K1-C8
tgcaagctccaatgcactgccaaaatactatggggatttgatgagtgatccagattcagcgttgaagtctttctacccaaaagattttgagatagacatgaatgggaaacgttttgcatggcagggtgttgcaaaattgccttttattgatgaaaggcgtctgcttgcggaaacaagaaaacttgaagatactttgacagaagaagagaaattcaggaataggactatgcttgacataatttacgttagagatactcatccattgatcactcagattatcttcctgtatcagaactattaccatctatcaagaacagacccttatgttattcccattgagcctgctgctagtggtggaatgaatggattcctatgtttatctgaaaggaactggtatagtgtcactgtcac

SEQ ID NO: 3707 - DNA, 383 bp, Zea mays
  unsure (1)..(383): unsure at all n locations; Clone ID: LIB3136-005-Q1-K1-C9
ggccggaanacccggtcgacgacgcgtccgcggcgagcggatcatcgaagagctggccaatctgctggagaagcccaacgtggattttgtggcggttgacgcctttgtgcatgagctcaagggaagcagtgcaaatattggtgctcagaaggttaagaacacttgcattcagttccgcgaattctgtcagcagaagagcagagatgggtgcctcaaggtactggagacaatgaggattaacttctatgagctgcgtggcaagtttcagaccatgcttcatctggagcgtcaggtcaatggctttccccccaacaagtaaaccagatggtggagtggaccttcatgttaagatgatgtttgcacctttcaagttcagaacattc

SEQ ID NO: 3708 - DNA, 394 bp, Zea mays
  Clone ID: LIB3136-005-Q1-K1-D1
ctaatgtgcataaacacatatatgctgaatatgctgttattgtccaagcacctctcgggaccaatgaatgttcgggcttgaaggatagcgtgcccaacatatctgagatcataagttctggttctcgagacaatctaaccaaggaggataggttcgcgccttgtggtgttgaacaagaagcacctaagctggggcgtgctccaagggccccctcctcaccatggatgcccttttcgatgctttttgctgctatttccacgaaagtgcctcgttcggacatggagttggtcatcagatactatgaagaattcaagaggaagaggatgagccggagcgatctggtggtacggatgaaggcaaatagtcgtgataagatattggttctacaataatg

SEQ ID NO: 3709 - DNA, 364 bp, Zea mays
  unsure (1)..(364): unsure at all n locations; Clone ID: LIB3136-005-Q1-K1-D10
gcgctgaatgcctgcagcgccagcgcagcgcctctctgctactgtgctggctgacgccggtgtggtgtgagcgaactgcgagctgctgccacccctgctgccgcggtcgaccgccggccccggaccgagatggacgctcggtgggcggtgctgctcgcgctgctggtcgccagcggcggcgtccgtgtctgcgccgccgctggggccaagggcgccaactggctgggcgggctgagccgcgcgtcgttccccaaggggttcgtgttcgggacggcgacgtcggcgtaccatgtcgagggcgccgcgtncaccaacggccggggcccctccatctgggattcattcgcgcacgtgccaggaaata

SEQ ID NO: 3710 - DNA, 337 bp, Zea mays
  Clone ID: LIB3136-005-Q1-K1-D11
ctcgctccctgatggtctgatgagggccactgacgttatgatcgccggaaaggttgccgggggctgcggatacagcgatgtgggcaagggttgtgctgctgccctcaagcaggctggtgcccgtgtcattgtgaccgacatcgaccccatctgtgccctccaggctctgatggagggtcttcacgtccttcccttggaggacgttgtctctgaagctgacatcttcgtgaccaccactggcaacaaggatatcatcatggttgaccacatgaggaagatgaagaacaatgccattgtctgcaacattggccactttgacaatgaaattgatatgctc

SEQ ID NO: 3711 - DNA, 402 bp, Zea mays
  Clone ID: LIB3136-005-Q1-K1-D12
ctccgcctgaccgcgggatgtcggcggtggtgccgcagccgcagtacgtggaggagaggcggcccagatcggaactggagcctcagccacccatgtcgcccccgccgcccaaggagatgaggccccccatggacctgccgcctcccgcgccgccgtcgccgcagcacccgccgccgccaatgccgatgccgatgcctgggaacgagaggccgccgccgatgctgatgccggcggagtgcgtgatcccgacggtggacatcccgtcgtggccggcggcggggccgtgcgggtgcccgtgctgcgcgccgtgctaccatggctactacgaaggctgcaagtgctactgctgcggcggcaggctgtacggcacgaccgtccgcccgttgacagcgccgtgcgggg

SEQ ID NO: 3712 - DNA, 434 bp, Zea mays
  Clone ID: LIB3136-005-Q1-K1-D2
cgagttttgccatttgagaaggagagggaaaatgatgacctcgtggcttctgggccgggggggcgcctccggcttctcctggagttccaccgccgaccaagtcacgcagggcatctccgccgccggcctcaccgccatcgtcactggggcgtccagcggcatcggcgcggagacggcgcgaacgctggcgctgcgcggggcccacgtcatcatggccgtcaggagccttcccgctgcccaggccgtcaaggacgccgtcctcgcccaggcgccgggggccaagctcgacgtcatggagctcgacctctcgtccatggcctctgtccgcgctttcgcgtcccaattcatcgacaggggtcttcccctcaacatccctatcaacaatgcaggagtaatggccataccttttgcgctttcaaggatggaattgagat

SEQ ID NO: 3713 - DNA, 248 bp, Zea mays
  unsure (1)..(248): unsure at all n locations; Clone ID: LIB3136-005-Q1-K1-D3
aggcgtccgcgagttttgccatttgaaaatgatagggataatgatgacctcgtggcttctgaaccgggaggggcgctccttcttatcctgcagttccaccccccaccaaatcacgcatggcatctccgccgccgtcctcacccccatcgtaactggagcgtccatcttcatcagcgcggagacagtgcgaacgctggcgctgcgcggagcccacgtcatcatggccctcangaaccttcccgctgccc

SEQ ID NO: 3714 - DNA, 342 bp, Zea mays
  Clone ID: LIB3136-005-Q1-K1-D4
cgtgcggcaaggtcatctgagtacccagaggtgcttcgtgtcacccataacttgcttgagacgcgggaaggatttattatggaccgggcaaataagcccaagagcccatcaccggagcctgaacctgagcctgtcaaggaagaacctgagccagatatgaacagcatcaaggcgcttccagcaccagaagattataaggagcctgaacctgagaaggtggaggaagaggtgaagccagagccacccctgcagccacagggtgacttggtggatctcatagaagatactgttagtgcacatgagcaaggtaacaggcttgctctaactctgttccaggggcca

SEQ ID NO: 3715 - DNA, 393 bp, Zea mays
  Clone ID: LIB3136-005-Q1-K1-D5
atcagtacaacactgcactacatgtcgtttgctgattcttcatgaaaacatagatcagggcttccttgatcagcttgtttacgtatacaaacaaatacgaattggggatccgctggagaaaggcaccttactgggaccactgcacactcctgcttcaaaagataactttttgaaaggcattcacactatcaaatctcagggagggaaaatcctctttggaggatctgccattgaatcagaaagaaactttgtgcaaccaacaattgtggaaattacaccttctgcaccagttgtgaaagaagaactctttggtactgtcctttatgctgtgaaatttcagaccttgaaggaaacacttgaaatcaataactctgttcctcaaggattgagcag

SEQ ID NO: 3716 - DNA, 95 bp, Zea mays
  unsure (1)..(95): unsure at all n locations; Clone ID: LIB3136-005-Q1-K1-D6
ggaacctcccgggtgcgacgccacgccgtgccgcgcccagcaagctagccttagctttagcatggcccggtgtaaagagccttacngnnctgctg

SEQ ID NO: 3717 - DNA, 340 bp, Zea mays
  Clone ID: LIB3136-005-Q1-K1-D7
cggacgcgtgggatcgcaactggtcttgctattgatgcttatggtcccatcggggacgatgctggtggtattgctgagatggctggaatgagccacagaatccgtgagagaactgatgctcttgatgctgctggcaacacaactgctgctattggaaaggggtttgccattggttcagctgctcttgtgtccctggcgctttttggtgcctttgtcagcagagctggagtgaaggtcgtcgacgtcctgtcccccaaggttttcattggtttgattgttggagccatgcttccgtactggttctctgccatgaccatgaagagtgttggaagcgccgccc

SEQ ID NO: 3718 - DNA, 373 bp, Zea mays
  Clone ID: LIB3136-005-Q1-K1-D8
attcacatcacatcgtagcagccaaggattccgcgctccgggggtgccatgagagctggtctcctctctccctgccttctcctcctcgccttctttgccaccgcggcgtacgcggcgtcggcgtcggcgtcgcgcgcggcggccgtcgtcaggggcgcgggcgccccgtcgcagtcggagttggagtcggacccggagaaccagtgcgtgtacacggtgtacgtgcggacggcgtccatctggaagggcggcacggactcgaccatcggcgtgacgctgctgggccccgacggcacgggcatccggatccgggacctggcggggtggggcggcctcatgggcgccggccacgactactactagcgcggcaacc

SEQ ID NO: 3719 - DNA, 387 bp, Zea mays
  Clone ID: LIB3136-005-Q1-K1-D9
cgcttcctcccgttagactaggttaggcttgtttgtcgaccagctcgcggaaatggtgggcgtcaagttccatcagtaccaggtggtggggcgcgcgctgccgacgcccggcgacgagcaccccaagatctaccgcatgaagctctgggccaccaacgaagtccgcgccaagagcaagttctggtacttcctgaggaagttgaagaaggttaagaagagcaacggtcaggtcctggccatcaacgagatcttcgagcgtaacccgacgacgatcaagaactacggcatctggctgcgctaccagagcagaaccggctaccacaacatgtacaaggagtaccgcgacacaaccctgaacggcgctgtagagcagatgtacaatgagat

SEQ ID NO: 3720 - DNA, 394 bp, Zea mays
  Clone ID: LIB3136-005-Q1-K1-E1
cacacctcctgtcttccttcaccttcgcgctccgccgccgccgtcgattcgtgctgctgtcaccgctaacctgtccaacatcgccggggagggaagcagcagaagaagctccccttacctccggctatcgcctgaggataaagtggggtctgtaggggagtcttaggggggagcaaaagggataggatagggagagatgaagcaatcaatttcttcgtccgccttcgcccctgcttacgtccccgctactaaccctagttatgaggttgaacgccttcagaagcttctctactagattagtgtaaatagtagacttgttcgagtttagcttggctggaagaattagtctctggtccgtggttatatctgctagcaataatggctgcgatgaacg

SEQ ID NO: 3721 - DNA, 269 bp, Zea mays
  unsure (1)..(269): unsure at all n locations; Clone ID: LIB3136-005-Q1-K1-E10
cggacgcattacatcccatctcaaaactcttttcggtggcggccggcgaccggcgacatccgccggtatcgactcccgtgggggggaaccttnaaccacgctgcggacctgcattcaccaatccgccgcttccttcgccttctccgcgtgatccccttgctctggccactgatggccggcgacattacttgcgcatccttgctgcaaaaattgcagctgatatgggatgacgctggcgagagtgatgagcatcgtgacaaggtccttta

SEQ ID NO: 3722 - DNA, 328 bp, Zea mays
  unsure (1)..(328): unsure at all n locations; Clone ID: LIB3136-005-Q1-K1-E11
cgggccggaanacccgggccggccgacgcgtacgcaaatgctgangactccattgctggtgctgtatcaaaggactatgtgcacctgcgtattcgtatctctacaaaaggaagaggctgacaactgttcanggcttgaagaaagagtacagctacaacaagatcctcaaggatctcaaaaaagagttctgctgcaatggtactgtagtccaggatccagagctaggccaggtcattcaactgcaaggtgatcagcgtaaaaatgtcgctacttttctagtccaggccggaatcgtgaaaaaagatagcatcaagattcacggatttta

SEQ ID NO: 3723 - DNA, 279 bp, Zea mays
  unsure (1)..(279): unsure at all n locations; Clone ID: LIB3136-005-Q1-K1-E2
gcagccatgggtttatctttggccgccgtttcgagcacattcctgggcacccgcctgggggaccgggcgccacagaacgggcgcatcgtagcccagttcgggttcaggttgggctgaaaggcgaatcctgcttcgaaaaaagtggcgaagacatcgacctcctctgaccggacgctgtggttccccggcgccgtggctcccgactacctgtacttgctcctggtcggcgactacngattcgacccgttcagtctctggaagcccgtggagtacctgcag

SEQ ID NO: 3724 - DNA, 323 bp, Zea mays
  Clone ID: LIB3136-005-Q1-K1-E4
gtgcttccttctcttcctggtcagctgtattctctcctccggaagcttgcaactagcgtgatcgtgttaccacatgtgcacttcttcatggttgtatttgctccactgacctcactgggctcccagcagtaccgcgctctcaccgtgccagaactgacccaacagatgtgggactccaagaacatgatgtgtgctgctgaccctcatcatggccgctaccttacggcatctgctatgttccgtgggaagatgaccaccaaggaagtggattaacagatgctgaacgtgcacaacaagaactcttcctacttcgtggagtggat

SEQ ID NO: 3725 - DNA, 376 bp, Zea mays
  Clone ID: LIB3136-005-Q1-K1-E5
ctcacttgatatacatattgcatcggcataaaaactgaatttaccatggcccgcttgatctcttctgcaatcgcaggcgcgggcaacttggtcgctgatggaatcagtggtgtcactggcgtagcgtcgcaggttgtagaaggcgtagaggacactttaggcagtatcgtagaagcaatcgaccaaggagtcaaggatgaggaccaactggatttgcccaagtacgtgtgtttcaagggagataacggtctgtacctgagtgctcgaacggttgaaggccatccctacctgcagtttgcatcggaagacattggcgacccaagtgtgaagttcatcacctacaaccacaaggtgaacggcaaacgggtggtgcgct

SEQ ID NO: 3726 - DNA, 281 bp, Zea mays
  Clone ID: LIB3136-005-Q1-K1-E6
aggccattcacaacgcgaatggggtttgccgccgccgccgccgtccgggaggggggcggcgctgttcaacaggaggaggcaagccgaccggccaccgtcgaggtcctcgcgcccgccagccattctttggtctctcgctctcttctttctgccgctctctttccccccgaccgtacttgtacttgtacttgccccaaagattatcccgctcttaccttcttctggcgcgccttgagaagtcttgcttctgcggctcttgcttgcgtcggcgcattgatatt

SEQ ID NO: 3727 - DNA, 378 bp, Zea mays
  Clone ID: LIB3136-005-Q1-K1-E7
gcaccctttcatcagcctgcctgtccactgttggcttggtgacttcctccgctccgcggcgctcccctccgctcccgaacggtcgatctttgcatggcagcagcagctggctccaaggggcgggcgatcgctggaagcttcgtcagccgcgtcctcgccggcaaggccgcctcgccgaggagggccgtgcacgcctcggcgtacgacaagaacctggaggaccacgtgcgcccggcgttcgtgccggacgatgtgatcggcagcgccgggagccccgacaagtactggagcccccaccccaagaccggcgtgttcggcccggcggcggttgaccccaagctggcagctggtggcgcgccggacgccggcgcggatgct

SEQ ID NO: 3728 - DNA, 383 bp, Zea mays
  unsure (1)..(383): unsure at all n locations; Clone ID: LIB3136-005-Q1-K1-E8
gaaaacccggcgggagccacgcgtccgattggctgtgttacacctactgtccctataactacttcccataggaaccgggttacatgtatatcacgtgcttttggagatggttcaaaattactgccagaagaccacgtgttgactggctttgctggtggttctaagaaaccacgaagtcaagtttcatactcagtttctcctaaaagngaggaacttggcataaaaaacaaaggtcatttccgcaagatacaatctcatgttagtgcaaagataaatgatgcaaagaaacttcctgatagttctagaagtgggcatagcagcccggagtcattgacttgcgttgcaaatgttcttgttacagtggtggatagaggttggatgga

SEQ ID NO: 3729 - DNA, 321 bp, Zea mays
  unsure (1)..(321): unsure at all n locations; Clone ID: LIB3136-005-Q1-K1-E9
gttgctcaatacaatgccagccagctgatcacccanagagaggctgtgagcagggagatttgtaagattctgactgagagggccaacaacttcaatattgctctggatgatgtgtccatcacaagcctcagctttggaaaagagtttactcatgccattgaagccaagcaggttgctgcacaagaagctgagcgtgccaagttcattgttgagaaggctgagcaggacaagcgcagtgcagttatcagggcacagggtgaggctaagagcgctgagttgattggccaagccattgccaacaaccccgccttcctggctctg

SEQ ID NO: 3730 - DNA, 422 bp, Zea mays
  Clone ID: LIB3136-005-Q1-K1-F1
gccaggtcgtgctcatgggcgccgtcgagggctaccgcatcgccggcggtccgctcggggagggggtcgacccgctctaccccggtggcagcttcgacccgctcggcctcgccgacgaccccgaggccttcgccgagctcaaggtgaaggagctcaagaacggccgcctcgccatgttctccatgttcggattcttcgtccaggccatcgtcaccgggaagggcccgctcgagaacctcgctgaccacattgccgaccccgtcaacaacaacgcttgggcctacgccaccaacttcgtccccggcaagtgagggaggcgccgcccgtgacctttatgtgtccggatgcatgtgagcgcacgctggttttcagtttgtaccatgatgtaaactattgttcaatcgacaaggaataattgtgtc

SEQ ID NO: 3731 - DNA, 276 bp, Zea mays
  unsure (1)..(276): unsure at all n locations; Clone ID: LIB3136-005-Q1-K1-F10
cggccgaaaaaccgggccgccgacgcgtccgggccgtgctacacaacatccaacgggggggcttcacagtggcaggcatcntaccacacagggtggtcttcctaggcaaaaagcgctccctcaacaaacaccacctcacctccataccgatcgtgctatgcggcgctgcgccacttggcaaagacctccacgacacactcttagcccgggtggcacaggacgacttccgacaaggatacgggatgacggaagacaggccctggctgttcatatgcc

SEQ ID NO: 3732 - DNA, 300 bp, Zea mays
  unsure (1)..(300): unsure at all n locations; Clone ID: LIB3136-005-Q1-K1-F11
accgggntggaaaacccgggccggccgacgcgtacaaancacactnatnttgctgtcctgctcgacaatgangccatctatgacatctgccgcctttgccttttcattaagcgcccaacgctacaccaacctcaacangcttgtctcccaagtcatctcatccctgaccgcttccctgaagttccatggtgctctaaaccttgattttaacgacttccagaccaacctcgtgccctacccgagcatccacttcatgctttcgtcctacgctccatacatttctgctgagaaggcctacca

SEQ ID NO: 3733 - DNA, 141 bp, Zea mays
  unsure (1)..(141): unsure at all n locations; Clone ID: LIB3136-005-Q1-K1-F12
cttttaaaccaactatcacaacacccncccttgctttttataaagcacgcagcccccaccaaacacaacacactttaattccataacaattcatcccttactcccttcctcacttttcaacggcctataaaccacattttt

SEQ ID NO: 3734 - DNA, 394 bp, Zea mays
  unsure (1)..(394): unsure at all n locations; Clone ID: LIB3136-005-Q1-K1-F2
caacgcgccccaaccccaacccagtcgagtccccctccgctctctctgcagttctgcgcggcctggcggtgccggccatggcgcgcgccccgagctcgtggacgccgtccctcgccatggtgctcctcgtcgtggccgccgtggtcgcgtcgtcggaggcggccagggtgcccgccgccgtcggcaactggacgggggaggagctgcgcggtgccgcggcgaggcggggcggccggcacgggtggcgctcccggcgccgcgcgttcgagaacggcctcggccggacgccgcagatggggtggaatagctggaaccacttcggctgcnggatcaacgagaacctcatcaagcagacagctgatgcgcttgtcaacaaccgtctggcgaaactggc

SEQ ID NO: 3735 - DNA, 209 bp, Zea mays
  Clone ID: LIB3136-005-Q1-K1-F3
gacccacgcagccagcacaaggaggcagggttccacgaccgctttggacccagacggagcaacaatacctgcggcctggggaagacgccgaccaccacgcccactgtctccaaacgccacaccgaaatgatacctaatcacgaacaggacgaactgggtccctcacctatacaccgcatcgtgcacggcaccctcgacgaactacctcc

SEQ ID NO: 3736 - DNA, 280 bp, Zea mays
  Clone ID: LIB3136-005-Q1-K1-F5
tggtgagggatgggcgatggcttttgcatatgaaggagcgacagttcttgcggcctgaggaagacgccgtcctgcgcgcctacattcggcagtacggcccccgcgagtggcacctggtgtcgcaacgcatgaacgtggccctcgaccgcgacaccaagtcgtgcctggagcgctggaagaactacctccgccccgggatcaagaagggctcgctcaccgaggaggagcagcgcctggtgatccgtctgcaggccaagcacggcaacaagtggaagaacat

SEQ ID NO: 3737 - DNA, 389 bp, Zea mays
  unsure (1)..(389): unsure at all n locations; Clone ID: LIB3136-005-Q1-K1-F6
gtcggtttgccggtactgttccaaacgctacggcaacaggacatatccacagcgtggggatgtattccggtcagggcgtggggctaatcacggagatcataccagctgctcaagttgtcaaaagtctggtcgctgaagcgaaggaagtcatcagagaaaagctttctaattaccaatagaatccttcgtgaactgcaaactagaagtatctgcgcgtgagtagtcaccgatcagaataatggcaagcaccaacgattaggtttgattcttgtgctatttttaagtacagtaaagtaaaaaatgatgaaaataaacgagactaacaaaggtattatgtcacacattcgggtgtgtgtgtgcgcacancatatctgtaatagttttggagt

SEQ ID NO: 3738 - DNA, 203 bp, Zea mays
  unsure (1)..(203): unsure at all n locations; Clone ID: LIB3136-005-Q1-K1-F7
gagccccagnacaaggagaaacagccgaaaccgtaacacaccaagaacaacccgctccaggtgcgcaagctaaacgaccaaaaacagacgctgaccaagggccnnttcaaaaaactcacaacactaccacccctgacgaggcctgcgaccccgncacagcagcaacagaaaaaaaaacaacaaccacacccattgccacacaa

SEQ ID NO: 3739 - DNA, 364 bp, Zea mays
  unsure (1)..(364): unsure at all n locations; Clone ID: LIB3136-005-Q1-K1-F9
ggaanacccgggccgacggacgcgtccggccggcgnccatgtccgccgccccgccccgtcgcgtggtcatctgcggcggcggcgtggttgtcgcgtgcacagactacttggtcgccacccacgccgcgtgccccaccgtcccgacgctcgtcgagaggtgcgccccggcgtgcgccgcctcggggaaagctgggggctttctggcgctggactggtgcgactccaccccggcgctctccaagctcgcgcgggcctccttcgcgctgcaccgccgcctggccgacgccctcggcggcgccgacgcctacagcttncgccccgtacacaccctctncgtgctgntgcccccggaccccggcggctt

SEQ ID NO: 3740 - DNA, 333 bp, Zea mays
  unsure (1)..(333): unsure at all n locations; Clone ID: LIB3136-005-Q1-K1-G1
acccacgcgtccggatgttttgtctccaacggaatcatacaatcatggtggaagaaagatgattagcnagcgttttagagataggacgagcaagggggaaggcngcngcngcccaccaaatgaccaaaccctaacagatttttttttctcttcgtcttttttctgcttgaggcgaccgccggagattccttccttctgctgnngagtgcatctcnaatgagtttttctctctactcccaatgcgacaaggtatcggcggccgtggcccggagagctcagtggcggctcatcatggacagcgcaaccacctgcgcccactgcttcagccgcatc

SEQ ID NO: 3741 - DNA, 369 bp, Zea mays
  Clone ID: LIB3136-005-Q1-K1-G10
gaaaacccgggccggccgacgcgtacgcaagaaccgcgagctggaggtcatccacttcctctgggccatgctgggcgcgttcggctcggtgttcccgaaactgctcgcccgcaaccgcgtcaagttcggcgaggccgcgtgcttcaaggccggctcgcacatcttcagcgagggtgggctggactacctcggcaacccgaacctgatccacgcgcagagcatcctcgccatctaggcctgccacgtcgtgctcatgggcgccatcaacgggtaccgcgtcgccggcggcccgctcggagaggtcgtcaacccgctctaccccggcggcagcttcgacccgctcggcctcgccaaccaccctgaagcctt

SEQ ID NO: 3742 - DNA, 403 bp, Zea mays
  Clone ID: LIB3136-005-Q1-K1-G11
gagagagagaggagagttgccgccggagggtggaggtcgccgcggaggggaggggctcgcggtgaggggacatcggcggcgcgtggagagctcgtggaggggacagccaccgtcaccgccaggagacaagcgccgccgccgctaggaatcaggagacaagcgagcgcgatggtgagctccgcactgaggcgctgtctcccctgccatgcctctctctgtcatgccttccctccccatccgctgctggccgctgccggcgtcttccgtcgttcattccagtccggggatggtgagactatggacgaattcgaagaacggttgtttgggggcaaggacacagacaaaagatcactctacgagaagctcgatagggctgagaacactggtaggagatacaattttg

SEQ ID NO: 3743 - DNA, 414 bp, Zea mays
  unsure (1)..(414): unsure at all n locations; Clone ID: LIB3136-005-Q1-K1-G12
gaaaacccgggccggccgacgcgtacgcgagttccggagagagtcgagtccccatgcatgcaaggtctcagcagacgttcttccgttgctgactatgaacctaaggatggtggtgagggtggcaccacgcatgatgttggtaccaagggaagtgaattggaggacaccatcaaacacgaacagcttgtctcaagcgtggtcctccctgcggatttggcaacggatcacgtcaagatcgacgcagatctttctagcagcaaggctgtagaatcaactgtcaaacagagagatgagactgccgagcttccacgtaagggtgccagtgtgttgtactgcgtgcttcctgtgagaagtagcgattctgctgcaagtacatctattangcaagaccaggattcactttcagtgcatgtg

SEQ ID NO: 3744 - DNA, 318 bp, Zea mays
  Clone ID: LIB3136-005-Q1-K1-G2
ctcggcggaagtggagttcaactacgatatcgacactggcctcgtgtccgtcgactgggcttcgggggagcaggagctatacctgtggacactggagattatgatctagaggtcgtgatgctgtgcgccgacgccaacgtttgccttcgcgactgagccattctgagtcggacgacattgtcatttgctatgtgcacgagagatagatgtattgtggtggtgttgtataattggtacgggaagactttttttcttgttatgtcgtatctgtatatcatacgtgctccgaatgttatataatacttgataataaaggat

SEQ ID NO: 3745 - DNA, 186 bp, Zea mays
  Clone ID: LIB3136-005-Q1-K1-G3
atcgaaaaaagtggaaaaaaaaatacaatatctacactggcctcaaagtacaaccacagggggcgcgggggaacaaagatctattcttttcctcactagaagatcatcaactagaggacgcgaagctgagcgccgacgccaacgtttgccttaaagactgagccattctgagtcagacgacattgt

SEQ ID NO: 3746 - DNA, 162 bp, Zea mays
  Clone ID: LIB3136-005-Q1-K1-G4
cacgtgcatgcatcgtcgactgtctcatgccgccgctgcgccggcgccgctcgcatgggttgctgccttggaccagcagtcgtcgccgtcaggctgaactgcttgtaaccgtgaatttcggacccgtttgcttctgtaagatttgtgcatttgcctgagtac

SEQ ID NO: 3747 - DNA, 383 bp, Zea mays
  Clone ID: LIB3136-005-Q1-K1-G5
ggagggagagcacaagccgcacttcccggcgccggcgcctcccccgcatgtggggacggtgtaccttctccgtcgtcgtccacaaaatcgaggacgacgacacgaagactcagaccccaccacaggcaccggaggaggagaagaaagacctgctggacaagatcaaggagaagctacccggtggccacaagaagccggaagacgctgtcgccgccgccgccgcgccggccgtgcacgcgccaccgccgccgccgccgcacgccgaggtcgacgtcagcagccctgatggcaagaagggcttgctgggcaagatcatggacaagatacccggctaccacaagagctcgggtgaagaagaccgcaaggacgccggcggcgagcac

SEQ ID NO: 3748 - DNA, 390 bp, Zea mays
  unsure (1)..(390): unsure at all n locations; Clone ID: LIB3136-005-Q1-K1-G6
cggacgcgtgggcagcccggcgccgcgcctcaagatctgcgacttcggctagtccaaggcctcggtgctgcactcgcgaccgaagtcaacggtgggcacgccggcgtacatcgcgcccgaggtgctgtcgcggcgagagtacgacgggaagcacgccgacgtctggtcgtgcggagtcacgctctacgtcatgctggtgggggcgtacccgttcgaggatccaaaggacccaaagaacttcaggaagacaatacagcgcatcatgtcggttcagtacaagatccccgagtacgtgcacgtcttccacaactgccgncaccttctcttccgcatcttcgttcagaacccgtacaagaggatcaccatgagcgagatcaagacccacccctg

SEQ ID NO: 3749 - DNA, 390 bp, Zea mays
  Clone ID: LIB3136-005-Q1-K1-G8
ccaagatccaggacaaggagggcatcccgccggaccagcagcgcctcatctgggccggggagcagctcgaggatggccgcaccctcgccgactacaacatccagaaggagtcgacgctgcacctggtgctccgcctcaggggaggcgccaagaagcgcaagaagaagacgtacaccaagcccaagaagatcaagcacaagcacaagaaggtgaagctcgccgtgctccagttctacaaggttgacgacgccaccggcaaggtcacccgcctccgcaaggagtgccccaacgccgagtgcggcgcgggggtcttcatggccaaccacttcgaccgccactactgcggtaagtgtggcctcacctacgtctacaaccagcaggcgtaggatg

SEQ ID NO: 3750 - DNA, 415 bp, Zea mays
  unsure (1)..(415): unsure at all n locations; Clone ID: LIB3136-005-Q1-K1-G9
gaanacccgggccggccgacgcgtccggacgaatagcgtggagttcatgccgttcctgctctccctggccgtgttcctgtgcggcacggcctggttcatctacgggctcgtcggccgcgaccccttcattattatcccgaacgggtgcgggagcttcctgggcctgatgcagctcatcctgtacgccatctaccggaaaaacaagggccccgccgcgccggccggcaagggagaggccgccgccgccgccgcggaggtggaggacaccaanaatgtggccgctgccgtggagctggccgacgccacgaccaacaaggcggcggacgccgtccgcggcgacggcaaagtcgccagccacgtgtaagcgggcaaagcttatttgctgtcgtctgggactgggaagaacatcctaaac

SEQ ID NO: 3751 - DNA, 396 bp, Zea mays
  Clone ID: LIB3136-005-Q1-K1-H1
ccatctccggctgacgacgctgcagcagatgcacaagatcctgacgccgcggcaggcgggcaggggcctcctggcgctcggcgactacttccagcgccttcgcacgctcagctcgatgtgggcggcgcgcccgcgggaggcggccatcagctagatgcctgcggcgtggcaggccaaaagctcgctcactggtgaggcgaccgtaccaaagaacacgacgccgacgacgacgaagactaaagagtggtagcagttcgctgtatacttgcccccccaatgcaaggtgtaaagcccagtggaggacgaagagatcgaccttgctgtacgagtacgacgaacggaagggatgcttctcggtcggcggcggcggcgatctctctttacaaagcgattagt

SEQ ID NO: 3752 - DNA, 384 bp, Zea mays
  Clone ID: LIB3136-005-Q1-K1-H10
acgacaacagctattatcgaggcaattgacctcatctcatcactatgctcatgggatcctagctggagaccaaaggccacagaagtcctccagcataccttcttccagggttgtacatgtgttccgcttcctgtccgtcggaaaacttcatcgcttcctaaaacacctccatgtgttggatcaaagagaatttccgagaacagtgttgctagaagattctcgaccgggactctatctacgatgaaatctcatagcaatgcacctgcaaaatcaaacggtttatctaagactggtgtacaaagaaaacttcacttggatcgtcagccaccgcagaagagtacaaaaccgaccgagaacagcaataagctagctacaaatcgggtc

SEQ ID NO: 3753 - DNA, 438 bp, Zea mays
  unsure (1)..(438): unsure at all n locations; Clone ID: LIB3136-005-Q1-K1-H11
cgggcggaanacccggtcggcgacgcgtacggaagctctcaactacttatttctcctgattcctctgatcaacgttatgattccattcttctgtaaatcctttgctggtgttgggtcaacacatacacttgctttcttcgtgatgtatgcatggaagcttggatggctgcaaaggttgaaatgaagatttttggtgtgctctcttggtgatgtgtgtatgaaagcttggatatttggtttgaaaaggtggagtcggtagcttttttgctgagagaaacatttgtcctcaaaattttcacatcttttggagggagctgcatgattaatttattccaagatttagttcatatagccttttatatcttgtgtatatgcacggagtatgaaaaaacagcctttcacatttaagtgataaatatatgtacctgaagtctgaac

SEQ ID NO: 3754 - DNA, 405 bp, Zea mays
  unsure (1)..(405): unsure at all n locations; Clone ID: LIB3136-005-Q1-K1-H12
accgggccggaaaacccgggccggccgacgcgaacgctgcatcgctcgctctctcctttcactgggaacatctatcagctcgcgctcattggccatggttggcttccatggagaggctgattgccagcctacttggcttcctattggttgcatcggtaggaagccatgcagctcgtgctccgcatcagtactggaagtctgctcttcccaacactcccatgccgacctccctctcccaactcctcgacaccgctccagccggcggcggcacgaccgtcaacgtcggctggggcggtgttcacgtcgatgctgggcacggtaagcccgggggtacgacggttgacgtangcaanggcggcgtcggcgtcaacgttaaccctggcaagagcggcaaacccggcggca

SEQ ID NO: 3755 - DNA, 378 bp, Zea mays
  Clone ID: LIB3136-005-Q1-K1-H2
ggataagcgttacaagaaccgtgagttgctgaccatgcgccttattgaccaccctaagggtgtgggtttgaagcattgcttcttttcaactactgagaaggatgagctttatctgaacttggtccttgagtatgtgccggagacagttcatcgagttgtgaagcatcacaacaagatgaaccaacgcatgccacttatttatgtgaagctgtatatgtaccagatatgtagggcattggcttacattcatggcactattggtgtctgccacacatatattaagccacaaaaccttctggtgaacccacacacccaccagcttaaactatttgacttttgcatggcataagttctggtcaagggggaaccaaacatatc

SEQ ID NO: 3756 - DNA, 269 bp, Zea mays
  unsure (1)..(269): unsure at all n locations; Clone ID: LIB3136-005-Q1-K1-H3
ggcttcaggaactctggttttttatcattgtacccatagtaaaacctacatgtagttggggtatgccgtatgcgtctatattcttttgctccaatgtaaatctggatgcatatatgcatctgtttggtttcatttaggcctttccttggtttcgtgattaatgacaacataagcttattgctgtgatcaaagtatattttgtagaggtaattaaagctagtcacaccgtnnagaaaagaattacattcatagaactattgatatattgg

SEQ ID NO: 3757 - DNA, 387 bp, Zea mays
  unsure (1)..(387): unsure at all n locations; Clone ID: LIB3136-005-Q1-K1-H5
ggaggaggaggaacaggaggagttcagggacatccacgcgctgagccagccggcgtcggaccgccgggcgcgcggcggttatccgtgggggtccgccgcgggcggcagcaggcacacgtccgtccgctccgtcgggagcgacaccgcgcccagcgagcccttcccgactatgaccagggagttctcggccatggtcgccgcagcagccagcgccgcagcagccagccgtgacgccgacagcgacgtcgtgggcagggccgaggaggaggaggaggaggagctggaggagaccaacccgctggccatcgtgccggacagcaaccccatcccgtcgccgngccggggcccgccggccgccgtcccgggcgccgacgcggcggcgctggt

SEQ ID NO: 3758 - DNA, 420 bp, Zea mays
  Clone ID: LIB3136-005-Q1-K1-H7
gcggcacagctatgccacgaagtccaaccagacgcgggtcgtcaagacccctggtggcgagctcgtgtaccagttcttctataagagagccagcgggcccaagtgtcccgtgaccgggaagaagatccagggcattccccatctgaggccagctgagtacaaaaggtccaggttgtctaggaaccgcagaactgtgaaccgtccctatgggggagtactatctggaactgcagttagagaaaggatcatccgtgctttcctggttgaagagcagaagattgtcaagaaggtgttgaaattacagaagaccaaagacaagacttcctcaaaaaagtaactctgaaacagaagtgagccactcttctacagcaagggaagacatttttgtcgacagttattatcaatggcttagtctcttct

SEQ ID NO: 3759 - DNA, 358 bp, Zea mays
  Clone ID: LIB3136-005-Q1-K1-H8
acggcgcaagttctacctgggcgctctggtggacctggtgcgcaggtacgtgatgaccatggcgcccttcgtgccgcccatcgtggtggacatcgccaagagcccccgcgtgaccgccggcgacctcgcgtccatccgcatggtcatgtccggcgccgcgcccatgggcaaggagctccaggacgccttcatggccaacatccccaatgccgtgctcgggcaggggtacgggatgacggaggcaggccccgtgctggcgatgtgcctggccttcgccaaggagccgtacccggtcaagtccgggtcctgcggcaccgtggtgcggaacgcggagctgaagatcgtctaccccgacacc

SEQ ID NO: 3760 - DNA, 399 bp, Zea mays
  Clone ID: LIB3136-005-Q1-K1-H9
cccctcctcattctcctcccggtttcccctcccccattcgtcgcgatccaattccggcgccgtggaagacgcgcgcaggccccacccatccgcctacaggcgctccgctcccacagacggacagcttgggctcgacggatgaacatgtgtgagaaagatcagaatttgccatggggatacgacctgttccgcgacccttttgctcctcccaacgggtactacgggcctcctcccggttactgtgatggccactgttgtgacctccatcattacggtggagcatcacatccagatgagactcagttgcattcttctcaactcgcatatgatatgtacaacccatcagtaggcatctaccatcctggaagcacccatgagcacgagcacgagacagtatat

SEQ ID NO: 3761 - DNA, 371 bp, Zea mays
  Clone ID: LIB3136-006-Q1-K1-A10
gtcaagaagcatctgcgagcacaggaaatagcttcggagtgcaaactgccttgcatatatgtcgtggacagcggaggtgctaatctccccaggcaggctgacgttttccctgaccgtgataattttggccggatattctacaatcaagctaagatgtcttcagatggtatccctcagattgcagtagtcttgggttcttgcactgctggtggggcatatattcctgcaatggcggatgagagtgtaatagttaagggaaatgggactatatttctagcgggtccaccacttgtaaaggtcagaatattctggaaccattttgtttattttctaaatgataaaatttgggtggctaaatctctaatatatta

SEQ ID NO: 3762 - DNA, 361 bp, Zea mays
  Clone ID: LIB3136-006-Q1-K1-A11
gtggtgtgcctccattttgggctgaaactgaaaaggggatatttgatgctattctgcatgaggagagggactttgaaagtcaaccttggccatcaatttctgagagtgctaaagacttggttagaaagatgttgacacgagatccaaagaaaagactgacttcagctcaagttcttcaacattcatggctcagagaaggtggaggtgcatctgataagcctatcgacagtgctgttctttctagaatgaagcagttcagagcaatgaataagctgaaaaagatggccctaaaggttattgcctcaaaccttaacgaggaagagatcaaggggctaaagcaaatgttcatgaacatggacac

SEQ ID NO: 3763 - DNA, 199 bp, Zea mays
  Clone ID: LIB3136-006-Q1-K1-A2
cgcgctagagaagaacttgataaggccaggtccgacattgaagggggcgatgggcacgaccgagatgcagttccagtgcctcggctgaaccatgcttctgaaatgtttgggtttgttaaggaggtgttcaattgctgtgctcaaaactggagtgctgagacacaaattaaagagctggactttgttaagaaagatattt

SEQ ID NO: 3764 - DNA, 302 bp, Zea mays
  Clone ID: LIB3136-006-Q1-K1-A3
ggaaaccctagccgccatatctcacgatccactcgagcaccaagccgagggaaggggaggagcgatggcgcgcggcgtggtgtcctcgaacggcggctcggtcgcgggcaagaagaaggggtcggtttccttcacgatcgactgcaccaagccagtggaggacaagatcatggaggtcgcctcgctcgagaagttcctgcacgagcgcatcaaggtcgccggcggcaaggctggcaacctcggcgactacgtcaccatctctcgcgagaagaccaaggtcaccgtcacctgttacgggccct

SEQ ID NO: 3765 - DNA, 337 bp, Zea mays
  Clone ID: LIB3136-006-Q1-K1-A4
cctctactgaaaacttgttttactcaccatcccacactccaagcctcaaaacgctcaagcgagatgctgctcctagacctctggattaaacatgcctctcacacatactccattaaaaaaattgattccactagctgatctaatacctgaacaactgcctactagaccattaactttgcacttataccgaatatctttcattttcacttatgattaacaaccaaaagttcttcctgcctctgcatataaatatccacccactctcaaaaaaatacttaatccaccatcttgtgctacccataccatgctatcaatctttaaatcctgttcaattact

SEQ ID NO: 3766 - DNA, 361 bp, Zea mays
  Clone ID: LIB3136-006-Q1-K1-A7
ctctaaacaaggattggtgctgctttgcaatccatgtccataaattccattgcgggggaaggacatgttaacccaaaaataagcgcattccagaaagcacatgattgtcttctgcccatggtaattacttctaaaaatgttgcccatcgatatggtgtaactaggcaagatcaagatcaggccgctgctgagtctcataggagagctggtgcagccacggcctctagaaaattcaaggatgagatcgtccccatgccaacaaagatcgttgatcctaaaactggataggagaacgaagttgtgatattagttgatgatgggattaggccatctacttacctgctatattttttctgagcaa

SEQ ID NO: 3767 - DNA, 385 bp, Zea mays
  Clone ID: LIB3136-006-Q1-K1-A8
gatgtaccatccgctggctttgagaatgttcttacttggcacacactacaggtccgcaatggactacacaatagaacaactcaatgtcacatcagacagattgtactacacatatcagaccttgcttgattgtgaagagatttgtcagcagcaacaaagcaacactggaaattcattgcctgctaataccttaaattacatccaaaaacttcatgaggaatttgagacctcaatgtcagatgatcttcacacttcagtggcattggctgctatttctgagccattgaaagttatgaatgatctgttgcacactcgtaagggaaagaagcaagacaaaaggctggaatctctttctgccttaaaagagaaaataagagtagttctc

SEQ ID NO: 3768 - DNA, 373 bp, Zea mays
  Clone ID: LIB3136-006-Q1-K1-A9
gcgggagcagcagcagcaggcggcgccgaggagcggcattccactcagtgcttgcaaccatggctagggggttgaagaagcacttgaagaggctcaatgcgcccaagcattggatgctcgacaagcttggcggagcttttgctcccaagccatcttctggacctcacaagtccagggagtgccttcctctgatcctcatcatcaggaacaggctcaagtatgctctgaactaccgtgaggtcatttctatcctgatgcaacgccatgtacttgttgatggcaaggtcaggactgacaagacctaccctgctgggttcatggatgtcatttccatccctaagacaatggagaactacaggctgctttatgacac

SEQ ID NO: 3769 - DNA, 365 bp, Zea mays
  Clone ID: LIB3136-006-Q1-K1-B1
gcaggtgataggcatgcacttcttcaaccctcctccggtaatgaaactgatcgagattatgggaggagccgatacgtcagatgaggtgtttgctgcggtcagatctttctccgaaagactcgggaagtccgttatatgctcgcaagattacccaggattcatcgtgaaccgcatcctcatgccgatgatcaacgaggccttctgggctctgtacaccggagtggcaaccaaagaggacatcgacgcagggatgaagctgggcacgaaccacccgatgggcccgctgcagctcgccgacttcatcggcctggatgtctgcctctcagtacttcgggtactccacagcggcctgggagataacaagt

SEQ ID NO: 3770 - DNA, 348 bp, Zea mays
  Clone ID: LIB3136-006-Q1-K1-B10
gtatttaccaggcatgggaccttacaactcggcagtgtgtccaaacactctctgagcataaagctggtgtaacatctgtgctttgttgggatgagaagttattatcttgctcccttgacaagactgtaaaactctggactctgtcagagtcaggaaaccttcaagtcaaatatacccatgctgaggagaatgtaagaactgcactcctgccgatcatgcgttatttttgttttgttggatgctgcatactgtctatacctaaatagtttatggcaacaacatttttatcggtgtagtaactaagttttactattaaggttcagagttaagagcaacaattacattttc

SEQ ID NO: 3771 - DNA, 371 bp, Zea mays
  Clone ID: LIB3136-006-Q1-K1-B11
gcggtacagaccggcggcgacaggtgggcgcaccctctagcggagcccgagaaggggtgtctcttgggcgccacggagaagctggacggctcgcacatcttcgagcgcacggtgatcctgctgctgtcgtcgccgtcgtcgctgggccccgtcggcgtgatcctgaaccgcccctcgctcatgtcgatcaaagaggcgtcagggtccatcttcgcggacgacgccgacatcgcgcgcgccttcgcgggccggccactcttcttcggcgggccgctggaggagtgcttcttcgtcatagggccccgagcggcggccggaggcggaggcgacgactcggtggcgcggacggggctgttcgaggaggtgatgcc

SEQ ID NO: 3772 - DNA, 269 bp, Zea mays
  Clone ID: LIB3136-006-Q1-K1-B12
ggtgacccacgcgtgcggttgaaagcatagttctgacattatatcaatgctctttactccaaatgactagtcttcagcatacgttgaggcatctgtaactttgactaataatatactttttactgatttgttttacttgacctttactttttttggctgctgtaatatcaaatatttcttcaatcccaaattacaaggcgttatatcttttctaaataaatacgtcttgctatgcatctaatctctcttagtaatgggtcctgtctttc

SEQ ID NO: 3773 - DNA, 347 bp, Zea mays
  Clone ID: LIB3136-006-Q1-K1-B2
atctctcccctgccctgagcacgcttgctcgaagcaagcaccaccatccgccatcgtcgacgagggcgattttccagaaaccctagctccagaagaaggacaagagtccgacctccccgaagcagagcctctgacccatgagaacttcgatgaaggcaagaccattctacccttgatgcataaattacccagtcttttacaccaaaaacctaagttgggtgattgggaagggattttttgcatatgtgagaagcgttttggcctgcataaattatacactatgttttcaatatgaaatgagggaaaatggttgattttagaaaggaaaaatgtttgtgaaaatttgg

SEQ ID NO: 3774 - DNA, 390 bp, Zea mays
  Clone ID: LIB3136-006-Q1-K1-B4
tgataatggaatcatacaattatcaaaaggctgcccaagcttgcaaaaactggaggtgaggggttgtgtctttagtgagcatgctttagctttggctgcactacagcttaagtcactgaagtatctgtgggtacaaggattcaggtcatctccaactggaactgatattatggcaatggtacgccccttctggaacattgagtatattgttccagatcaagatgaaccttgcccagagcataagagacagattctggcatactactcccttgctggcaggaggacagattgtcctccatcagtaactctgctttacccggcattttgagtgtagatacttgctttttgccggactgaatctcatggtactaagttccattggtcccagta

SEQ ID NO: 3775 - DNA, 366 bp, Zea mays
  Clone ID: LIB3136-006-Q1-K1-B5
cgaattccctgcgattcctctcccctcgccttctcgtctccccctaggggatcctgggagaggaatcgcaaagaaggcccgctcatccgagttaaagaagccatggagcacaaggaggctgggtgccaggcccccgagggacccatcctctgcatcaataactgtggcttcttcggcagcgcggcgaccatgaacatgtgctccaagtgccacaaggagatgataacgaagcaggatcaggccaagctggctgcctcctctatcgacagcatcgtgaacggcagcgacgccgtcatggagccggttgttgctggcagcaacacggtagtagcttgtgcccaagtcgagttgcaaacaatgaacgtg

SEQ ID NO: 3776 - DNA, 280 bp, Zea mays
  unsure (1)..(280): unsure at all n locations; Clone ID: LIB3136-006-Q1-K1-B6
cttgagcagtcaataagaaagcaaaagagagtcatcgactctcaattttattctcgctacgctgtcttttgcctgtggcaatgaatagcgcattagcatcatagaagtattagcttggtcaatggaagttgttcatgcgcttcttcattgctgaaagtgttgtcatcttgtcgaactcacaataagcttagataagtgctgggtttgtgggaacatcgtttgtgcaatataaatgagatcttgcacctaanaaaaaaaaaaaaaaaaaaaaaaataaagg

SEQ ID NO: 3777 - DNA, 432 bp, Zea mays
  Clone ID: LIB3136-006-Q1-K1-B7
gtgccatgctagagtgtgatggaatatgaagagcatgagaagagagcatggagtgttgatggttctcgcacagactcttcaatgctagtatctgggagtgatgattgcaaggtgaaagtgtggtgcacaaatcaagaagcaagtgtgatcaatattgatatgaaagcaaatatttgctcggttaaatataatcctggatcaagcttctacgttgcagtcggatctgctgatcaccatattcattactttgatttacgtaatccaagttcgcctgtccatattttcggggggcacaagaaagcagtatcatatgtgaaattcttatctaacaatgagcttgcgtctgcatcaacagatagcacattacgcttatgggatgtcaaggataactgcccggtacggacattcagaggacacaaaaatgaaaagaac

SEQ ID NO: 3778 - DNA, 423 bp, Zea mays
  Clone ID: LIB3136-006-Q1-K1-B8
ttttagggagcctacatttggataaaatggaaatcctcaaaaagtagcatgcaggcgaatgtgcatttcacactatagttgatttcttagcttgatttgaattccttgatccctgcatatctgaccattttggaacatttaggtattgtgttgctgccctcttcattcattctttgtccttgtaattgaattcttttcaatccaatagtctgcttttcttgcaagtatttttggcttacctttctacattttctttgtaaatccatgtttaatttgtttagaattaattggagcaataattcttttcagagatgtattgcaaaattttaggcataaaacatttgtatacaaatgacaatatcaatttcaaatatatttgcttgcacaaatgcacattcttcatgagtagcatgtccatggatc

SEQ ID NO: 3779 - DNA, 423 bp, Zea mays
  Clone ID: LIB3136-006-Q1-K1-B9
attataactcacaaccagacaattggggcattgagaaactgattgccatgtgtgtgcaagaagaggggagaattaaggcttcacgtggtgattctatcaactatgttgggatgtataaggcacatggcaaggctccacagaatgatcaccatctgaaaaacaaagaggtggacatgaatgcttgctactggtgcgaaaagtcagggcatcatcagaaggattgtccatccttcctgaagcacttgatcaataaagagattccatacgaggaggacccttcaaagaggagaaagatgcattaaagtcgtcaatggtgttgataatgaagttgaagtgatagaacttccattattattgaataatagcttcattcttcacttgaataatgttctctatgtatcatctttcctgtcatgcgaattt

SEQ ID NO: 3780 - DNA, 230 bp, Zea mays
  Clone ID: LIB3136-006-Q1-K1-C1
ctctgagcatatcaggcatgaattgtttcaacaattgatgcttgatcacaatgatcactccgttgtggagtatctgaagaacacctacagatattcaaccctaaatggtaatgaagaccggccttcaaaacaaaaacctttaaccctaacattaaggtcattccaaaaaagtaaaaaattttatttaactaacccaaagaccttaccttgtaattgttgaaaagccctca

SEQ ID NO: 3781 - DNA, 350 bp, Zea mays
  Clone ID: LIB3136-006-Q1-K1-C10
cgcaaaaattgctatgcagtacctggcttcccttggaggtggaagtggtattgaatacgggattctggagacaaatccaatactcgaggcttttggcaatgcaaagacattgagaaatgataactcaagtcgttttggaaagcttatagaaattcatttcagtaccactggaagaatatgtggtgccatgattcaaacatttttgcttgagaagtccagagttgtgcaatgtgcagttggtgagcgatcataccatatattttatcagctgtgcgctggtgcacctgcctctctaaaagagaagttgaatttgaaaaaggtggatggatacaaatatcttaagcagagct

SEQ ID NO: 3782 - DNA, 338 bp, Zea mays
  Clone ID: LIB3136-006-Q1-K1-C12
acaagacaatttaaaccatgcatttttattgtttcatcacaattccatctgctcttgttcgttctgacagcagcaggagaccccacgagtggccccccacgtgacagagcacacggcatggtgtagctgtggcatggtgctacacgaacacgacactaacgagacagattaaagctaaccgatcgaaggaagggaattcattcgtccaacaacaacaaagtcccagattaaaagaaaccccgtgatggcgccccggcccagataagacactgcttgcatgctggcacgtggatgctcgctcatgcgtccacgacctcgtcgtcccttgacgcaatcac

SEQ ID NO: 3783 - DNA, 329 bp, Zea mays
  Clone ID: LIB3136-006-Q1-K1-C2
cggagcagccgcagtcccaccgaccccgccgccggtcgccctccatctcctcgccgctgccgctcgagctttgtacagtttctcttttcaataatcaagatgagccgtggtggtagtgccggtggtggtcaaagttctctgggttatctctttggaagcggtgagccccccaaaccagcagtggcaccagctgcaagtgctccacctgttgagaaaccatctgctgcaaagactgatgcggccaagcaagttgctgctggggttaccagccaaaccaataactaccacagggctgatggtcagaacactggcaacttccttacggaccg

SEQ ID NO: 3784 - DNA, 303 bp, Zea mays
  unsure (1)..(303): unsure at all n locations; Clone ID: LIB3136-006-Q1-K1-C3
gatggatctcccagtcatatgctatccgcaaacagcgagacacatactataatgaaaggggtaagatggggcctgtattatatggaaagccagacgcctcgaacagcttangccatatggacacatgtggtgtagaacagtagattgatccaaggaacaacatcacagtgacagtgatgatgttgtcagaagttgccatctgagatggtatataggtgagaaggttggagaaacccgcctaatgatgtattaaagaaaaacaaaaagactgccgatggtgctgatgaggataacgtaaaaaca

SEQ ID NO: 3785 - DNA, 407 bp, Zea mays
  Clone ID: LIB3136-006-Q1-K1-C4
gtccccggcctccttaccgtcgcgtccaaatcatcctcacaccccgcagcatctccacgccgccacacctcgtcgcgtcgcgtcgtctccgccgagaagatggtcggaccaggcctctacaccgagatcggcaagaagaccagggatctgctgtacaaggactaccagacagaccacaagttcaccctcactacctacagctccaatggcgttgctgtcactgctactagcacaaagaaagctgacctgatcttcagtgagatccattcacagataaagaacaagaacatgaccgtagatgtgaaagcaaactcagagtcaaatatcattactacagttactgtcaatgagattgcaacaccaggactgaagactatcttaagctttgctgttcctgatcagagatc

SEQ ID NO: 3786 - DNA, 392 bp, Zea mays
  Clone ID: LIB3136-006-Q1-K1-C5
cgagctcgagcgatcccactcccgatcagcagctgatcgctcactcttgcagctggatcggtcttagctgctctagctctagctctagctctagcctctagccctagcccctagctagtagctagccactcgatcgtgtagtcatcagccttctgatcgtcacccatggccactgccgaggtccagaccccgaccgtcgtggcgaccgaggaagcgccggtggtggagaccccggctccgcccgccgtcgtgcccgaggaggctgcccccgccgccgaggccaaggtggaggagccagctgccgccgctgagcccgaggcggcccccgtggcggcggaggaagagacgccaaaggaggaagagacggcaaaggagccggagccggccgcggc

SEQ ID NO: 3787 - DNA, 376 bp, Zea mays
  Clone ID: LIB3136-006-Q1-K1-C6
aaaaccggttgcagtcatttgctgtacgaacatataagaaaacgccaatctacagggttgagtctgaaggccagtctcatcagcctaagttcacatgcacagtggaagtgggtgatcaacagttctcatcaactggtagttttagtcgtaagaaggaagcagagcaagacgctgcgagagttgcttatgagatcttgacaacagttagtgagagtgacgttaaggaggcatttgagctaattgatcaggtacgccttttgactttgctccttgatctggtcattcaccatcttttcatcttatgagcaatgacacaggtgcatttttcagtggtaatatgcatgcacttgtgcattttttagtggctacacaagtg

SEQ ID NO: 3788 - DNA, 354 bp, Zea mays
  Clone ID: LIB3136-004-Q1-K1-D5
gctgctccggcggtcactgcctgtacggcatccagtacggcgacggctcctacaccatgggcttctacgcccaagacaccctcaccctggcctacgacaccatcaaggtacgtacctaccgtacgtggccgatgggcgcctctagccctcgcctagctagggcgcggcatgacttcgccatgacatctcatgacgcgcgcgcgcgtgcactgtgcatgcagaatttccggttcgggtgcggcgagaagaaccgtgggctgttcgggagggcggcggggctgctgggcctcggccgcggcaagacgtcgctgccggtgcaagcgtacgacaagtacggcggcgtgttcgcgtact

SEQ ID NO: 3789 - DNA, 390 bp, Zea mays
  Clone ID: LIB3136-006-Q1-K1-C7
caaacagtttcaggcatgtcagatgaagaacttctcactgtgcaaaactacaagaggcaaggaatggattcgacagacacccttgaaaggctgaacactggtatcaagtttgtagaacataacatcggaatgatagccgcaaggcttgccattcaaaatatatgatcctcattggcagtgtttagttcatatgctaaatgatgtccgtgatgctaactccatctggtcgtaaaaaagaactcagcttttcaagtttcaactgtaaacgtggaaggtctgatctggtacattcggataacttctgacataactttgatatacattcagagaacagtacgaagatgaagaacacaatatgaagttgcctgctcaaaaaaaaaaacacaacat

SEQ ID NO: 3790 - DNA, 403 bp, Zea mays
  unsure (1)..(403): unsure at all n locations; Clone ID: LIB3136-006-Q1-K1-C8
cgcccgccctccagaccgcacgcacgcacggcacgagctcgccgcgatgtcatgggtcgcgcgctccatcgctgccacactttcatctgcccactctgacgacgatgaatccgagcccgcctccggcgacaacagcccgccgcgcgcctccgaccccaccagcgccgagaccggtgagtccgatgagcagccggacaccccgagccgcggcgttaagggcgacatctcggagctgaccgagtccctcacccgccggttctggggcgttgcctacttcctcgcgccaccgncaactgaaggagagactgaagaggaggaggaggagacagccgccgtcgcggaggtgcctcagtccccacggatcgacgggatccggagtgacctggccgagatcgggggcagg

SEQ ID NO: 3791 - DNA, 336 bp, Zea mays
  Clone ID: LIB3136-006-Q1-K1-C9
gttttttttttttttttttttttttttttttttttttttttttttttttttttttttttgttttttttttttttttttttttttttttttttttttaaaaaaggggcaaaacaaacccccccttttttttttaatacaccccacccaatttttacccccccacctttaaaaaccatacttttttttaaaaaaagcggtggcgggggcacaataactattttttttaacccccctaaaaaaaaaataaaacggctttttccttaaaaaaattaacccaaactttttttaaattctataccttccccccaccctttttttttttattttggacccccc

SEQ ID NO: 3792 - DNA, 359 bp, Zea mays
  Clone ID: LIB3136-006-Q1-K1-D1
gtcaaacataaatgagcatagttctgaggaagatatccggagcgtgccaaattctgtacatggcaagaatgagatagagtcagattctccacctcacgtctgtgagatagaaagtgtgaaaagcaaccaagaagggtaccaatcttcggatggtcgtgctttccccaagacaagatctgagcgaagcattgaccaatgggtatttgcaaagtcaaaatctgaggaaagcatggatcagtggtctgaaataccttcagatgtggaatccttcagagaaggtaaaaggtacctcagtagcgaggagctgagtgacgttgatagtgccaacgttgttgtcatggacaaatacatggattcac

SEQ ID NO: 3793 - DNA, 324 bp, Zea mays
  Clone ID: LIB3136-002-P1-K1-E12
cgcagcttggcgccgatccagagttcgtgtactaggaagggcagtcgtctgaatccgtgaggaacacgttctatccgcgcccgtccaccgacaccgacgactgctccgacacatcgctcaggctcgggctaccactcttcagctccaagtgacggagatttgacatgtccggtagcggagcggtgccgattgcttgcccttctccactctagataggtctggattgggggagagcaagcactgctggatcgggaagacccaagtgaccaacgcgtcgcatcagaataaggcattttgagtgctgtatgatgcgtgtattctggc

SEQ ID NO: 3794 - DNA, 327 bp, Zea mays
  Clone ID: LIB3136-002-P1-K1-E2
gagaacaagcctgtcacgaacagccgtgacactcaagagatacacctagaacaaggccttcaggtgctcaagatattcaaggagcatgtcagcaagacgtccatcctggatgacttcgccttctatgagagtcgccagaagctgatgcaggataagaggtcgaaacagcagcaggtccaaaagcaggtctgggacagtaggacccccatttctgtcactggaagcgagcaacagcaggaagctgctaatgggaagcccaatccgtctgcaccagcaccaaacggtgtccctgcagaggtgaaggcagcgaaggcttttgcagagaac

SEQ ID NO: 3795 - DNA, 342 bp, Zea mays
  Clone ID: LIB3136-002-P1-K1-E3
cgatcagaaggtgcctgccttctcctcgtcggttaaatagatggcgctgccgctgctgacgaagagcagcgtgaagaagcggttcaagcagttcaagaggccccacctcgaccgctacacgtgccttaagccaagctggcgcatgccaaagggtattgactcccgtgtcaggaggaagctcaagggatgcaccttgatgcccaacattgcttatggctctgacaagtcgaccaggcactaccttcccaacaagttcaagaagctcgctggccacaacccttctgagctggagttgctcatgatgcacaacaggacctactgcgctgaaattgcttacaacgc

SEQ ID NO: 3796 - DNA, 419 bp, Zea mays
  Clone ID: LIB3136-002-P1-K1-E4
gtgccgtcgaagcctggcgctgagtttcctaatgccgtccgctggtacgagaccgtctctgcggctgtggcctcaagattccctggtaaggctgttggtgtaaatctgcctgcggcatcagctcctgcggcagctgctcctgcggatgaggctgaggacgatgatgaccttgatctttttggtgatgaaactgaggaggacaagaaggcagctgatgagcgtgccgccgctgccaaggcctcttctaaaaagaaagaacgtggtaaatcctccgtccttatggatgtcaaaccatgggacgatgagactgatatgaagaagctggaggaggctgtccgcagtgtccagatggagggtctgacttgtggagcatcaaagcttgtgccctgtggatactgcatcaagaagatgactatcat

SEQ ID NO: 3797 - DNA, 337 bp, Zea mays
  Clone ID: LIB3136-002-P1-K1-E5
ggcaagacaaagtcaatggcatcaaggtttacctaatgtgccaagccaggttccatcataggtgggatcgaggttatggctccacctttgcaccaactgcagcagcgcctacttcgccccccacccccatgcctggcagtgccaagcaaagcaagacttctgtagagttatgcgtccttgcttgctttcacatttgggtgtgttctgctataatttacggtgattaattttcccctgcaatttggcaggcatacaaacattttctctctatttttctatccaacataattcatgatttaaataaaggaactatttcttaaaaaaaaatttaatctat

SEQ ID NO: 3798 - DNA, 368 bp, Zea mays
  Clone ID: LIB3136-002-P1-K1-E6
ggaaaccctagccgccatatctcacgattcacttgagcaccaagccgagggaaggtgaggagcgatggcgcgcggcgtggtgtcggcgaagggcggcgcggtcgcgggcaagaagaaggggtcggtttccttcacgatcgactgcaccaagccagtggaggacaagatcatggaggtcgcctcgctcgagaagttcctgcaggagcgcatcaaggtcgccggcggcaaggctggcaacctcggcgactccgtcaccatctctcgcgagaagaccaaggtcaccgtcacctctgacggacccttctccaagaggtacctgaagtacttgaccaagaagtactttgagaagcacaacgtgcgggattggc

SEQ ID NO: 3799 - DNA, 235 bp, Zea mays
  Clone ID: LIB3136-002-P1-K1-E7
atcttgaccatgatcgagattttagtcctttgtttgatgctatcaaagaaagctgtgttggttctaggttgttttctggttacgaacacacaaactggttataacaagatatgtattagatttattttttgcgagttcaacttatggtcccaatgtgtttatcaatggagctgtcagcaaccctttgtaaaaaaataataattatatataattttaattttattaataaagtgct

SEQ ID NO: 3800 - DNA, 287 bp, Zea mays
  Clone ID: LIB3136-002-P1-K1-E8
cacactagagccgccgccgtcgccgcctctgttttttcgcgcaccgtaccctagccctggtcagcggcggtttcgagctcctccagccataaccttcaagcgtaggaatggcctacgcaacaagcacttacgcgatcacgtcaagtacattcgctgctccaactgctccaagtgctgccccatggataaagctataaagccgctcttgctgaggaacactctatagcatactgccatcagagacgagcacaaggactacgtacatgactaatatgtcctaaccatat

SEQ ID NO: 3801 - DNA, 296 bp, Zea mays
  Clone ID: LIB3136-002-P1-K1-E9
aggacccgtacccagatacgtacttcgcatttcttagtcaaccaccgcgacctgacctcctgcagaccctgcacatgtcatcgccatcatctcacccttaatctcaagcatgatccaatacctcctaatgctcccatattccacaatcttgatctactggcactacactatgcacacacagtacctgtcttctcgatccttcgacgcacgactggaccccacacacactttgtgcttcattcagtggatcacaccttacgtgtgctcgcgagacttcactccttcatacgttcatt

SEQ ID NO: 3802 - DNA, 366 bp, Zea mays
  Clone ID: LIB3136-002-P1-K1-F1
cgcacacgttgctcccccattccttccctcccctctccccagtccccagccctgctcgctcccgcgggcgtaataatatctcacgccgctcctcctcctcggcctcagctgccgccactccccacactcgcttcccgtgggctgcgcgggtgaaggagcgcgcgcgtgcgtacgtacgtgcaggtggttggactcggatctgctgctgcgtggtgcgcgggatggcgtcgttcgctgtgtccggcgcgaggctcggagtcgtgcggcctggcggctcggcgcgatctggcggtgagcgtaggagtgcggtggacttgccgtcggagctcttcaggaggaaggacaccttctctcgcaccgatctga

SEQ ID NO: 3803 - DNA, 287 bp, Zea mays
  Clone ID: LIB3136-002-P1-K1-F10
gaacatttgtggtataagatttttctcgagatgtttgcaggttatttttccagcacttgagagtccagtgaaaaatgtcgcagggacatattctcttgaacataaaggagaaaatgatctcttcgcacatcagacaaggcttctactctttcagaaggcttgatcagttggctctttatcctatagaatggtggacgggatctctatgtcattgagatatttttatttggccttgtagaaagtcatctttaggagaatcgtgaacaaaatgaccagatgcttaggcc

SEQ ID NO: 3804 - DNA, 451 bp, Zea mays
  unsure (1)..(451): unsure at all n locations; Clone ID: LIB3136-002-P1-K1-F11
cggacgcgtgggcggacgcgtgggcggacgcgtgggagcgtcgtcattcatttcctcactgagcgaggctaggcaagctggccgtcaagctcaggccgtcaggcgatacaactacaagcctacagtgcctacccctccgccgcctagagagagagaggccagcgatgacgaagacgacgccgncggcgttcgtgtaccggatcagcacggccgacgagtgggcggagtttcagcgcacgggcgccacccttggaggcgacctcgacagctccaccggctgcatccatctcagcgacctaaaccaggtgaagatgactttaaaaaactttttccttggaaggaatgatctgtacctactgcaaattgatactttcaagcttgcagatgggttaatttatgagctaagtgatggtgataactattttcctcatttctatggccctggtcggag

SEQ ID NO: 3805 - DNA, 289 bp, Zea mays
  Clone ID: LIB3136-002-P1-K1-F12
gaaatacctgctgcgtaccattcagtactgcactatgcatcgtactttgttcacattattacggaaatcgcaacaacgaaccgtggatagacgctgaacgatgagctggagtccactttctcatcgaccattccggatgacgcgcgtgtatgggtgctgtatccttataccgactttgcacgaggttggttgtaagaggcactgcactgcaatctaccttccacaatgtctgtgctgtgagatactctgtacagatctactctgaaactgttcacaagaattctatacc

SEQ ID NO: 3806 - DNA, 158 bp, Zea mays
  Clone ID: LIB3136-002-P1-K1-F2
acccaccccgtcgcgtctcggcctggcttccttctcctcgaggaccgccgtgcaggagcggagcgccgcgccgcttctctctccggcgtccgagaggctcgacccctgataccacgctgagggcggtggtattaggagattagcgatggcgaagtggc

SEQ ID NO: 3807 - DNA, 60 bp, Zea mays
  Clone ID: LIB3136-002-P1-K1-F3
ggatggtgaggtgggagatgatgtgtctgacgatgactctaaggctgacgaaactgataa

SEQ ID NO: 3808 - DNA, 417 bp, Zea mays
  Clone ID: LIB3136-002-P1-K1-F4
caattaactagcttcttctagctctagctaggttcgtctgctgcaagaaggtaacagcgcaggcatggaggggaaggaggaggacgtccgcctgggcgccaacaagttctcggagcgccagcccatcggcacggcggcgcagggcacggacgacaaggactacaaggagcccccgccggcgccgctcttcgagcccggggagctcaagtcctggtccttctaccgcgccggcatcgccgagttcgtcgccaccttcctcttcctctacatctccatcctcaccgtcatgggcgtctccaagtccaccttcaagtgcgccaccgtcggcatccagggcatcgcctggtccttcggcggcatgatcttcggcctcgtctactggaccggcggcattttccgcgggcacattaaccccgc

SEQ ID NO: 3809 - DNA, 459 bp, Zea mays
  Clone ID: LIB3136-002-P1-K1-F5
caaatcttttgtgagcgaataccccattgtttttattgaagatccttttgaccaggatgactgggttcactatgctaagatgactgaagaaattggagagcaagtgcagattgttggtgatgaccttctcgtcaccaaccccactagggttgctaaggctatcaaggagaaatcatgcaatgcccttctgctcaaggttaaccaaatcggatctgtgactgagagtattgaggctgtgaagatgtcaaagcgtgcgggctggcgtgtgatgactagtcataggagtggtgagactgaagacactttcattgctgatctggcagttggtttgtccacgggtcagattaagactggagcaccctgcacatcagagcgtcttgccaaatacaaccagcttcttaagattgaagaagagcttggcgctattgctgtctacgcaggtgccaaaattcgtgcacc

SEQ ID NO: 3810 - DNA, 146 bp, Zea mays
  unsure (1)..(146): unsure at all n locations; Clone ID: LIB3136-002-P1-K1-F6
cttatcggntcccctctctggccctccttgcctcactcaccagcatcggttcttcagtcgtcagcatggctcgcgcccacttcctggccgcttggccctccttcaccgccttgcgccctcctttccgcctccgttttccacagctt

SEQ ID NO: 3811 - DNA, 464 bp, Zea mays
  Clone ID: LIB3136-002-P1-K1-F7
cacacctgctcgcttccacttcgctcgtttgactactcgtcccgtcctttcgtttcgaagcctcggtagccttgacgatggccaccgccgcggtgtcggtcgacgagaagttcgacaagcttcgcgccgtggtcgccatgctcgaccagatcatctagaacgagaagttcggtttcatcagtctcgtgtcactctacctcacgtatgttgaattatgatcctcgtaggttcactgtttatgattgctattttttcattctattttttatccttgttatttgttttatttctttctttctttttttttttttatttttttttgtggttctttgatttttttctcttcttattttttgattattttttttatttttttttttctttttttttttattttattttttttattcttttttttattttttttgtttttttttttttttttttttttttttttattattt

SEQ ID NO: 3812 - DNA, 320 bp, Zea mays
  Clone ID: LIB3136-002-P1-K1-F8
cggacgcgtgggctggtgtctccatggttgccttcctgtcactggcgatctcgtacccggcccgtgctgctgtgccccacatgtgcatcaatgggtacaagaatgtgcttgctgttgctgtcgagacagactactcgtacccacatgctgacaagatcaaggagtacctcaaggacccaagcaagtttgctgttgccgctcctgttgctgctggggactctggcgcttcagctgctcccaaggaagaagagaaggctgcggagcctgaagaggagtctgacgaggacatgggcttaagtctcttcgacaacttgagctgc

SEQ ID NO: 3813 - DNA, 225 bp, Zea mays
  Clone ID: LIB3136-002-P1-K1-F9
gaagtgcgtgttatggacatgactctcgaactttataacgtgaatcatgactagccgtcgtgcgagcaacagtagcatcaatagcacctgcttgatcgccgtttacaacaactcaaattgatactatgcatactatcataatgacaataggcaactatcgtcaacatagcattccaaccacgatatctagcatgatgctgaatgaccaagattgctgatcgatga

SEQ ID NO: 3814 - DNA, 227 bp, Zea mays
  Clone ID: LIB3136-002-P1-K1-G1
cccacacttgatgttataatttatcaaactctttttatttagcaaggctaacatcgaataaacagaaaagagatacttcaaaacaacagaaggaaataaaaaaaaaaaaaaaaaaaaaaaaaaaataataaaaaaaaaaaacaaataaaataaaaaaaaaaaatgacaaaaatatgaaattaaaaaaatgaacataattacaaagaaatataaatactaaatacaaa

SEQ ID NO: 3815 - DNA, 310 bp, Zea mays
  Clone ID: LIB3136-002-P1-K1-G10
gcgtgacgttgatatcacgaaatacattaaacttgaaaaggctcctggtggtcagttggaggattctagagtccttaaaggagttatgttcaataaggacgtcgtggctcctgggaaaatgaggagaaagatagttaacccccgcatcatcctgttggactgtcctgttgcgtatacgaaaggagcacatcagaccaacgctgagtcgatcaaggatgaagattggcccctctgctagagatggacgaaggattcataaagaacctgtgcggtcaaattctaagattcaagcctgacttagtcataactg

SEQ ID NO: 3816 - DNA, 106 bp, Zea mays
  Clone ID: LIB3136-002-P1-K1-G11
acgcggacgcgtgggttctcgggtcactgaaggatgacatcttatcgacgcgttagaccttcttgcggttggatgattgtgctttaagtgttcaaggggtggatta

SEQ ID NO: 3817 - DNA, 300 bp, Zea mays
  Clone ID: LIB3136-002-P1-K1-G12
cctttgcacttggagctattgacgttcttgccacttttggtacaaccatgttcttggacagagctgggcggcgcatgcttcatattatttattctgctgcgatgactctaagtcttattgcattgctattgtattctacatcaaggcatgcatttgacatgactctgacttgcatgacatgttaagtataggcgtcttggttgacgtcgtggcttatgtcattgccttctactttggaatacgagccattccttggatcataaagcctgacatcctgccaggagcattcagagtcctgca

SEQ ID NO: 3818 - DNA, 419 bp, Zea mays
  Clone ID: LIB3136-002-P1-K1-G2
aggcattcctatttaccaaggagaaatgtcattgacatgtattcatttgataagtgtgcacatgtgcgcaaaagcatggtgaaaagattgaaagcaaaaggacaagcaaagaaaaaattcatgagagcacaggttttagacaaggacttatctaatgggcagacttcaaatcactgtgaaggtgctattgggttaactcaatctgacccggaaggagataagtttggatctatggaagcggcatgcgaaaaggggaccagttcagagactatgaaacagcgaatagggaggccaaagaaaatcttgaagcaaacaaatgatagcatttcggatcgtgacaagggttcacatcaggagcacatcgaggccaaagaggaaagtgatatctgtggtgggaaagacttgacgcatttgaaaac

SEQ ID NO: 3819 - DNA, 394 bp, Zea mays
  Clone ID: LIB3136-002-P1-K1-G3
ccatcttccaggtctagcagagattggggacgcttggtcatcggagattgcctcgggagcgcgtgtcctggtcaactaaggccggcatgaagggctgctcagagcgcttgctgtttctgctgctgctgctggcatcgtcatcgtcactgtccgctgtgattgccgcgcagcagacttgccccgccgacctcgacagcaaatgcgatggtggcgcgtctgatgatgattgggagggggagttcttccccggcgtgccgaaaatcaagtatgagggtccaacaagcaagaaccctcttgcttataagtggtatagcaaggaggaagtggttcttcgtagaaggataaagattggatgcgcttcagtgttgcgttctggcacacgttccgtggtact

SEQ ID NO: 3820 - DNA, 458 bp, Zea mays
  Clone ID: LIB3136-002-P1-K1-G4
gttcccgaccacgacaactatctgcggctcgcattacacttaatagacgtgctgttgacgataggctgcttctctgtgctccggttttgcaggatctaggcaggaacaaggcaggcccctcgtcccgcggctgaccacgcagagatcgcacgagtgtggcattggccgtcgtcgcgacgacactttgggtcatctatcatcctccgatccgtcgcctcgccgccggccggcgagcccgagagtaggaggccatgacgcttgcgagcacggacaaggtggtgctgggatgcgtcgcgttcagcatcttctgggtgctggccgtgttcccgtcggtgccgttcatgccggtggggcgcaccgcggggtccctcctgggcgccatgctcatggggcctgtccgcgtgatgacccccgacgaggcgtacaaagcgaacgaccttccgatcctgggccttctc

SEQ ID NO: 3821 - DNA, 467 bp, Zea mays
  Clone ID: LIB3136-002-P1-K1-G5
ccttgccctgtgtgtccagcctgaaccataatttaggccaccaatgtcagaggtggtgcaagcagtggttcgacttgtgcagagggccaacatgacgaagaggatgcttgatggggatacttctcggcgaccagatgacctggaccaagatttcatatgacaagctgaactcttgtcagattgtatttatttcgttcgactagcggcccagcagagacataatcacacaagaggaagaaacagaactctgtcagcttcgccagtacataatcacaagtttttcttggtagcaaagttgtgctatatggttgtactgtgtctacaaaatagtaccttgatcttacgctaatggcatattgttataattctttggtaacttatatgcaaatgccccagattaacaaaactatggtgaaatgtgcccaatgttaaaataactgattagtccagtactggtgcatcaactg

SEQ ID NO: 3822 - DNA, 384 bp, Zea mays
  Clone ID: LIB3136-002-P1-K1-G6
agaacaacatgtcatggttgttccacagtatatttccagcaaggatttggcttcgaatgcttctgaacaaaaggatactattgtgctacctaaactacaaggagagtctctggtacccaaaagtagtgctggtaaaaaaagtgggcgcatcttgcgagctgtcatttttgtgcatggtttccagggccaccatttggatttacgtcttgttagaaaccaatggcttctattggaccctggagctgattgcctaatgtctgaggctaatgaagataaaacatctggagacttcaaagaaatgggtagcaggttggccggagaggtaattgccttcctgaagaagaaaatggataagctttctagatatggaggctgcaaagagct

SEQ ID NO: 3823 - DNA, 265 bp, Zea mays
  Clone ID: LIB3136-002-P1-K1-G7
ctccgttgcccgacagttggaagctgaaggagatctttgctacgggcatcgtgcttggaagctagcttgctctgatgactgtcattttcttctgggctatgcacaagaccgacttcttctcggacaaattcggtgtgaggtcgatcagggacagcgagcatgagatgatgtccgccctgtacctgcaagtcagtatcgtgagccaggctctgatcttcgtcacccgttcccgtagctggtccttcgtggagcgccttggactgtt

SEQ ID NO: 3824 - DNA, 406 bp, Zea mays
  Clone ID: LIB3136-002-P1-K1-G8
cccacgcgtccgatagagacatcttacctgactctagagtacggcatggccgagctcagcaaggacaggcacgtcatggagaagctacagacggaggtcaggacgacgatgcgctcgccggacggcaagaagctcgacatgctagcggaggaggacctcggcagcatgccctacctcaaggcgaccatcaaggagacgctgcgcctgcacccgccggagccgttcctcctcgcgcactactccaccgtcgactccgagatcgacggatacttcgtccccgccgatacgcgcgtcctcgtcagcgcatgggagcttgggagggacccgacgacgtgtcagacgccggaggagttcatgccggagcggatcgtgcatgaaccgtgcgccgaggacgtccacatgcagg

SEQ ID NO: 3825 - DNA, 170 bp, Zea mays
  Clone ID: LIB3136-002-P1-K1-G9
ctctgtcaaagtcagaggatgggagactgagaatatagaggagattgctgtgaagaactctcgacttccttcggcttcaggcaagcataagcggatagctgcgattactcaaggtgctgatccagtggctgttgctgaggatgggaaggagaaaacagtccctgtgatcc

SEQ ID NO: 3826 - DNA, 303 bp, Zea mays
  Clone ID: LIB3136-002-P1-K1-H1
agaacacgtggcctcacgatatctcatgcacgtttgtctgtcataactactgcttgacacatcagaatgagtagttgatagaggacacattcaacgctttcttcttatggcgttcggaataactctaaggtctgcttctcgccgcacgtcatgtccagagtacatcgcaaacactcaaggtgacgaaaacaccgcttcttccatggtcttagcaggaaagctaaccccaccctgtgactcgttagctatataggagcaaagctggtgccaagccgcaacaaatgcatcgtgactatcatcctt

SEQ ID NO: 3827 - DNA, 231 bp, Zea mays
  Clone ID: LIB3136-002-P1-K1-H10
cagagctccaagaccgcggataccgccgcgcctacgtcggaggttgcagccaccggagaggcggatacgggcgcggcttcttcaacaccggcacaaaaccctaacgctgctgcaaccgcagtggacggggccacggatctagagacgatgatgcgccgcgcggagcgctttgagacgccagtactagagccacaggagcatctgcgcaagatccgtgccaagcgaattccg

SEQ ID NO: 3828 - DNA, 320 bp, Zea mays
  Clone ID: LIB3136-002-P1-K1-H11
aaacactttacaggatctctctacacttacttttctttttaacgcacagtgaaatgcggccaggccggagacaatctctcttgcgctcttgtcatacaatggatcatattcaacatccatctgtcatgcagaaggtagctgtccagctactttcttctagcacttccctagattttcaaaggtatgataggtctttcaagaagcctgctctataccaaggacattttgcatataggcaatattccaatgctggaatgcactatcctattgtttcatcaacaactaccgccatctgtgttctagcccctgcataaaaagga

SEQ ID NO: 3829 - DNA, 329 bp, Zea mays
  Clone ID: LIB3136-002-P1-K1-H12
gcgcggacgcgtgggcggacgcgtgggcgggcggcaggtgcagctgtacctggacaagtccaccggcacgggcttccagacgcggggctcctacctcttcggccacttcagcatgcacatgaagctcgtcggcggcgactccgcgggcaccgtcacggccttctacctgtcgtcgcagaactcggagcacgacgagatcgacttcgagttcctgggcaaccggacggggcagccctacatcctgcagaccaacgtgttcaccggctgcaagggcgaccgcgagcagcggatctacctttggttcgaccccaccaaggagttccactcct

SEQ ID NO: 3830 - DNA, 427 bp, Zea mays
  Clone ID: LIB3136-002-P1-K1-H2
ggttactcgcagaaaagatttattagctcgctgcgggggtcgaaccgaggctcctagctgatggcgcgcgcacagggcgagcggacaagaaagcttgctttgtgctcaccggcggcacggaccccctgcgatggaagccgtcggcgtcactcctgcccccgtggcggcgccggagaagaagaagctgcttgacctcaaggaccccttccccgccgccgcgaacggcggcgccaaggcgtccccggcggcgaagtgggcgatgaagaagaagctggtgggcggcgacgccggctacgtgctcgaggaccttgccgcacctcacggattacatgccccagcttccgacatacccgaatcctctccaagacaacccggcgtattcagtcgtcaagcagtatttcgtcaacccagacgacaccgtcacgca

SEQ ID NO: 3831 - DNA, 448 bp, Zea mays
  Clone ID: LIB3136-002-P1-K1-H3
ggaaaattcaggagagagacgacgccatcgagccgggcgcacggcgagctcagcgatctggaggcggaggtggcggggcacaagactggcccgtcgctaccggcggcaacgccggctgcggagctgatcgtgccgccagcacacgagatccaggagttcttcgccgccgccgaggcggtccaagccaagcgctttgcttccaagtacaacttcgacttcgtaccgggcgtgcccctcgacgccggcggccggttcgagtgggcgcccgtggtcagcatttgaagcgagcgggcgtgcggtgcaaggcgaagctagaaagagaaaagatgccccccaacaaacataacggagaagagaaaaccgaacaattaagcagctttatatagcctaagcttaccaccaccattcatattgttccaatgcatgccttgcttttctttggagctag

SEQ ID NO: 3832 - DNA, 377 bp, Zea mays
  Clone ID: LIB3136-002-P1-K1-H5
cggacgcgtgggcgccgactaaaccagaccatctaacaagtgccagcgccctctcgcaggggccgcaatggagagcaccttcatcatgatcaagcctgacggcgtccagaggggcctcattggtgagatcatcagccgttttgagaagaagggcttctacctcaaggccttgaagcttgtgaacgtggagaggttttttgctgagatgcactattttcatctcgttttcaagcccttcttccagggcctttgtggactacatcatctttgttcctgtggtggccatggtctgttaggtcaagagctgtcattctactggccgtacgatcattgctgccaccaactccctggcttttgagcccgttactaatccgtgt

SEQ ID NO: 3833 - DNA, 358 bp, Zea mays
  Clone ID: LIB3136-002-P1-K1-H7
gatgcatctccccatggctccacctcccattgctgtccctcacagtcgcgccaccctccacccgtcttcctcgcgcccagctccatgttctccacttcccagccatggccccgcgggcaggctccctgctgctgctcgtccgtggtctggaagctccgattggtgggcgccatcgtctcctacctccgtctgaaacaccacatcgagctcccatcgtcgcgcccctccttgctcctctgctggccatcgctgctccctggtgctcggactcgccagtcatcgccccagccgagatcccttctcagtatcgctcgcccaatccgaggggcactggacatgtttgttacatgggaggttc

SEQ ID NO: 3834 - DNA, 316 bp, Zea mays
  Clone ID: LIB3136-002-P1-K1-H8
ctcgagaggcgtgaagaacctagaagccctgttagcgcgcggcgccggcgccttgcttactctgcgacggtacgctgattgcattggtactgttcttctcctgatcaccacacatgacaagggtcatccatgactccggagatgacatgcagaaggaggcacttgacttggtctcatctgacgttaatttccccaagggcccatttccagactataggattggaccaaacaaccaaatcatcgatccagaggagacacatgaggctgtacctctcaaggagattgtttgaaaggaaacagcgcagctgctagagca

SEQ ID NO: 3835 - DNA, 249 bp, Zea mays
  Clone ID: LIB3136-003-Q1-K1-A1
gatgtatccggcatatgcaaatggccctggatatgttatatcatctgatattgctgattttgtcatgtcaaaattcatgaagcaaaagctgacggtacaatcttatattttcctcttgagaaaatatcctccatagaatggtcacaacaaaaaggcattccatgcttcttttttttacatttcacaaaagtgccgtctgaatgtcagacacttgtcaaacagcactttgaataacaaattgccaaaatg

SEQ ID NO: 3836 - DNA, 377 bp, Zea mays
  unsure (1)..(377): unsure at all n locations; Clone ID: LIB3136-003-Q1-K1-A10
ctgtggtgccactgatgtcaagtcaccagaaacgattcttgagcatgagcatgtgggcatgctcttttttccctgagtcgtatcatttggcttgggggtttgaattatcggattgccctatcatactgcttagctaaagcccttgtcgaaatgcataagcaactgttagagaaagatcagcttcagatagagtgaagatgcgggtgcattttccagggatggaaagaaggcatgattaatttcctccgatatataaatactcattcaactcggatcgtaactctggtgcgatcacattatgtggcctcttgcagtcgtcctacatccgangagagtctcgcttctctgaccacagaccagtgtacaaccttttcatg

SEQ ID NO: 3837 - DNA, 454 bp, Zea mays
  Clone ID: LIB3136-003-Q1-K1-A11
gtctccaaagaccttcctacctccatcacttattgctggagcacttgcaggagtgagctcagccctgtgcacatatcctttggagttgattaagaccagattgacgatagagaaagatgtctataacaacttcctccatgctttcgtcaagattttacgagaagaaggtccatcagagctctaccgtggtctgacaccaagtctgataggagtggtgccatatgccgcgactaattactacgcctatgacaccctaaagaagctctataggaagacgttcaagcaggaggagatcagcaacatcgcaactctcctaattggttcagccgctggtgccatctccagcactgccaccttccctcttgaggtggcccgcaagcaaatgcaggtaggagcagtaggagggaggcaggtctacaagaatgtgttccatgcgctctactgcataatggag

SEQ ID NO: 3838 - DNA, 139 bp, Zea mays
  Clone ID: LIB3136-003-Q1-K1-A12
ctcttcaatcacctatttaactgcattaattactactctcgcacctgatcacatctgctcagtcttacacacatatcctctccactttcattataccatttatactatagaaaaacaccatcatactaacctcctccat

SEQ ID NO: 3839 - DNA, 314 bp, Zea mays
  Clone ID: LIB3136-003-Q1-K1-A2
cccagccaagctaagaatggtaacatcattctcatcaagctaaaaagtaaccaagatccccagtcagttcttttggagaaaccaagggttctggagcaaccactggtccaacaaatgagttcggtttcatccctgtcgagcaaacaaaattcaatcaatcgtaaggtgaatgtgagatctacagctggccagcagtgggtcaatggtgactcccaagcagtacaaaaatctttggttacagaaaccctgtcaagggcaatgcagagaactgtcccccagcctgcagtgaaggtcacacgtcgggctgatcccca

SEQ ID NO: 3840 - DNA, 400 bp, Zea mays
  unsure (1)..(400): unsure at all n locations; Clone ID: LIB3136-003-Q1-K1-A3
ttttaattttagggtatgagaatatggacattgctttacattatggtgctatgttgagggaatgtattcgccaccaaagcattgcaaggtatgttttanagtccgaacatatgaagaagttcttcgactatatacagcttccaaattttgacatagcttctgatgcttctgctacctttaaggaactattgacaagacataaagcaaccgtcgctgaatttctctccaacaattatgattggttttttgaagaattcaactctaggttgctgtcatcaaccaactatataacaaaaaggcaagctatcaagttgttgggagatatgctgctggatagataaaaatgtgcagtgatgatgcgctatgttagttccaaaagacaatcttatgattctgatga

SEQ ID NO: 3841 - DNA, 270 bp, Zea mays
  unsure (1)..(270): unsure at all n locations; Clone ID: LIB3136-003-Q1-K1-A4
ccggcgacgcgnccaatcccctttccaccgccggcgaagatggcgccctcacccccgcggagaccctcggagagaggcccatccgcatcgcgaccttcgcgaacaaacgcaccagcacgtcagtggaggacctagggcaccacgcgggggattaccggcttcgcagcacccacgaccccaggacaggctacgtacatctacagaggaggggccacaaagacgaccccgaaacgatctggctcacgggcgggcccagccgcagcagcgagc

SEQ ID NO: 3842 - DNA, 448 bp, Zea mays
  unsure (1)..(448): unsure at all n locations; Clone ID: LIB3136-003-Q1-K1-A5
attgagattcaagccctattctatatggcattaagatgtgctctccaaatgcgcaagccagagggcgaagggaaggatttcatagagaagatagggcaacgactacatgcactaacctaccacatgaggaattacttctggctagattttcaccagctgaataacatatacagatacaaaacagaagagtattcccacactgctgtgaacaagttcaatgtaattccagattccattcctgattgggtgtttgatttcatgccatgtcgaggaggctactttcttggcaacgtcagccctgctatgatggatttccggtggtttgcccttggcaattgcattgccattgtatcatctctagctaccccagaacagtcagntgctataatggatctgatcgaggaaaagtgggatgagctagttggtgagatgcctctgaagatatgct

SEQ ID NO: 3843 - DNA, 288 bp, Zea mays
  Clone ID: LIB3136-003-Q1-K1-A6
gaagagtctcaagattctgcaagtgttgtgttactcctaattcagttaccttactggcaagaggatgccattgcaacttctgaaagtgcaaccatctgattgaagcggatttaattatacaagatagatctagaattgctttacttgagatccaagcaatgttggatgcttttgtgactgatcatctctagagcttttgtaaatgatctagctagctatctgtaaatgatctagttgtgaatgatattataattgtgatgcttttgtgaaaaaaaaaaaaaattgaca

SEQ ID NO: 3844 - DNA, 398 bp, Zea mays
  unsure (1)..(398): unsure at all n locations; Clone ID: LIB3136-003-Q1-K1-A7
attgtcttgagggcaaatgataatggccaatgtggaacatttgctctttactggttgctttgccggcatgcaaagataaacactattccgaatcagcatagaacagatgaagaactaacaacatacagccgccacacatatgatgagaaatctcttgctgcaaagatcaaaaggtggttagaggggcaccaattcagaaagaatgtcattcttattcttgttctttttggtacttgtatggcagttggagatggaatcctcactcctgcaatatcagttctttctgcaactggaggaatacaagtggaagagaaaaaaatgaaaaatgatgcggntgtcatcgtctctgtggtcatattgattggattattcagcatgcagcactttggtactgataa

SEQ ID NO: 3845 - DNA, 295 bp, Zea mays
  Clone ID: LIB3136-003-Q1-K1-A8
gtcgaagtatattggtcacagatgccaatacgttcctcacaattatccaacgcgtgctactagcaaccactatggaagcttgggaagtggccactatacggcttatgtttattacgataggaaaaagggatcgtgttacttgcatgaccgacatgtggaccccataaccaatgacagggtaaagacatcttctgcttatgttcttttttaccgaccgatacacgacgatagcttatatacagctacagacatagattctgatattcccaccttaggaagcagtggaagcaatttt

SEQ ID NO: 3846 - DNA, 449 bp, Zea mays
  Clone ID: LIB3136-003-Q1-K1-A9
gccgtccccgggatcctggtgccgtaagctctgggcctgggcaactgggtgaattgacaggagtgggctgccgtccccggcggacactccacgtacctgggcgccccggtgccgtggggcacgctgccgaccatcctggtgatcgagttcgtggccatcgccttcgccgagcaccagcgcaccatggagaaggaccccgagaagaagaagtaccccggcggcgccttcgacccgctcggcttctccaaggaccccgccaagttcgaggagtacaagctcaaggagatcaagaacggccgcctcgccatgctggccttcgtcggcttatgcgtccagcagtttgcgtaccccggcaccgtcccgctggagaacctcgccttccacctcgacgacccggggcacaacaacatcggggacatcatcatccccagatcaatctttccttgagc

SEQ ID NO: 3847 - DNA, 333 bp, Zea mays
  Clone ID: LIB3136-003-Q1-K1-B1
aatatatggagatgccagttcgacgcagtgatgatgaacccctgcaaaaattgtttgtagctgttagaagcgagttaaatctggacttaaagaacattaagacagaacaagcaaagttctggaagcagcatccatcactagtaaagatggaactgctgattcaggcgcatctcacttgtgagtcattcgctttgacgccagcacttcttaaagattacagacacatgcttgaacttgcacctcgtcttctggaagaactcgttaagattgcagttttaccaaggaatccccatggttttggatggctccggcctgcactcagtgttattgagc

SEQ ID NO: 3848 - DNA, 342 bp, Zea mays
  Clone ID: LIB3136-003-Q1-K1-B10
catgcggtacctcttggagactcgtttgaccgtcgccgcagtcgtcaccgcgccggagtggggcacaccaacttatcgcgctacttcaccgactccttctgggacgaccccgtcctcggcgccagggtcttcgtcggacgacgccgcgcgccctgctacttgaacacgggtgtcatggtcatcgacctccggacgtggcgcgttggcaactaccgccagcacatcgagcgctggatggagatgcagaacgagaagaggatctacgagcttgactccttgccccccttcctgctcgtcttcgccggcgagatagaggccgtcgaccaccggtggaaccagcac

SEQ ID NO: 3849 - DNA, 441 bp, Zea mays
  unsure (1)..(441): unsure at all n locations; Clone ID: LIB3136-003-Q1-K1-B12
cttctccacctccacctccacccatggcggcctccaccttcagcggcgacnagacggggcggttcttcggcttcctcggcgccgccgccgcgctcgtcttctcctgcatgggcgccgcctacgggacggccaagagcggcgtcggcgtcgcctccatgggcgtcatgcgccccgagctcgtcatgaagtccatcgtccccgtcgtcatggcgggagtactcggcatctacggcctcatcatcgccgtcatcatctccaccgggatcaaccccaaggccaagccctacttcctcttcgacggctacgcgcacctctcctccggactcgcctgcggcctcgctggcctcgctgccggcatggccatcggcatcgtcggagacgccggaggtagggcgaatgcacaggcagcaaagttgtttgtggcatgattctgatccttat

SEQ ID NO: 3850 - DNA, 374 bp, Zea mays
  Clone ID: LIB3136-003-Q1-K1-B2
cggacgcgtgggctgatacacaagtcatttcggactatgtacgttatttcctccaccaacagacaatccagcttggacaaccagctactgttaaagttgcagctaacttgattaggttgctagcttatcagaataagaacatgttgcaagctggcatgattgttggaggatgggataagtacgagggaggtcaaattttctcagtccctcttggtggaacgatcttgaaacaaccatttgcaattggaggctcaggttccagttatctttatgcacttcttgatcatgaatggaaagagggaatgagccaggaagaggcagagaaatttgtggtgaaggtagtttcccttgctatggcccgtgatggtgctagc

SEQ ID NO: 3851 - DNA, 371 bp, Zea mays
  Clone ID: LIB3136-003-Q1-K1-B3
ccccccggtgttccacgtgtccgtcaactccggcaccgtgctcatggacgccaacttcgtggccaaggtgacagtcaccgacaactggcacaacgccgctgccgcagacgctgttaacttgtgccgcacgttctgaacccgaattccgaaccatgcgtgtgtgtgtgtgtgtgttttgtttggcagctatcggatgtcggcgtggtcagccacgacgtgaggctcgccaccaccgactccttccaaggtctctctatccgctccccaactcttcccaccccccacagcccacaggttcccgatctgcgccggccgcgctcatacctatcttcttgctgcgttgttcgctcgcctgctgtgcctgtgcatgc

SEQ ID NO: 3852 - DNA, 379 bp, Zea mays
  unsure (1)..(379): unsure at all n locations; Clone ID: LIB3136-003-Q1-K1-B4
gtgacagcgacgcctcagaggagttcgagctgccgctcctgccatcctcctcgggcggcggcggctcaccgatggacattgaggtgggggcaacggcgagatctgatgatctgccgatctcgccgaggttgcttgcgaaggtcatcgggttgatagcgtgttggtacacactgagcacgtgcttgacgctgtaagtaacacgtattgttcgttaatactcgtgcggattttccggctaccttcgtgtgcggatgtgtttgttgctagtgttcattccatgcgcgtgcgcatgtggtcaggtacaacanggagatgctgngaaagcacatgtggaagttcccggcgccattcctgatgaacacagtgcatntcacgatgc

SEQ ID NO: 3853 - DNA, 394 bp, Zea mays
  Clone ID: LIB3136-003-Q1-K1-B5
cacctgctcactgacgccaatcccatccaggtggtcgtggacgccattatcagcagtggaccacgtgaggatgccacccgtattggttctgctggtgttgtgagaaggcaggctgtggatatctcacccctgagaagggtgaaccaggccatctacctcctcaccactggtgccagggagagcgctttcaggaacatcaaaaccattgctgagtgccttgcagatgagttgatcaacgctgccaagggctcttccaacagctacgccatcaagaagaaggacgagattgagcgtgttgccaaggccaacccgtgagtggagcttgtatcctggtgcacttgctctagagctacgtttctggcagccgtgttttttcttgtttttacccatgttt

SEQ ID NO: 3854 - DNA, 301 bp, Zea mays
  Clone ID: LIB3136-003-Q1-K1-B6
ctcaaatacacaggactggtatagactctgtcccggatagaattcgccagcaggcaatatgggtgggtgcaccagctcctaggtaaattcactgtttacttagtccacatgcttgcctatccaacataagagcagggttgaagcttctgtggtcattagtagtaagaagaagaaccatgcaggtgctaatgagaaaatccaatgtgtcatgcccagtccaaatagctcatgttcactggaacgctaatgatagaacattcatcatgcgaacggggtattatcccagaatataagctgcgct

SEQ ID NO: 3855 - DNA, 394 bp, Zea mays
  Clone ID: LIB3136-003-Q1-K1-B7
cccgaccgcggtgaggactactgtcatcggtatcgcgagctcagtgggcagggtcgggggggtcctctgcccactcgtcgctgtcgccctggtgcacagctgccatcagacgacggcgatcctcctcttcgagcttgtaatcttcctctccggcctggccgtctcgttcttccccttcgagacgaatgtgtgtaggctcaacgacaccgacggggacatgaactgatccggtggctgggtgtagtgtgactctcagagcaattttcctgtggcggttaccggaattgcatatggattggatatttttagcaacacgtatacgtgttatactacccgtctagggtttatgttattccccttgtaatgaccgttatacccactgtgtaatgggcct

SEQ ID NO: 3856 - DNA, 297 bp, Zea mays
  unsure (1)..(297): unsure at all n locations; Clone ID: LIB3136-003-Q1-K1-B8
ggccgacccacgcggncgacaggctatataagaagctggtttccatcttttcggntctctcacagntngaggcagtcctggattgcgacatttacttgaactgactctttatcattgaaatccacatactggaaatatttttgcaatgcaggattatcgtattgattatgtcgactaacaaaatgtagacgctcttagccagcaaaacaaacaaatactaattgacactcttgctcatgcttgtaacaaacactattctgaaatggcaaatgacttcacatggtttgctttccttgc

SEQ ID NO: 3857 - DNA, 446 bp, Zea mays
  unsure (1)..(446): unsure at all n locations; Clone ID: LIB3136-003-Q1-K1-B9
gaagttgtactagctttggaatatttgcactctatgcacatagtccatagggatcgaaatgctgacaacttgttgatagcccatgatggacatattaagtggggcttcactgtatggagatgatgagcctcagatgaatgaattcgagcaaatggatcaccgagcacggagacaaaatcgttctgctgttggaactcctgattatttagcaccagaaatcattttggggacaggacatggttgcagtgcagattggtggtccgttggtgtcattctatttgagctcattgttggcatacctccgttcaatgcagaacacccccagacaatttttgacaatattctgaattacaaaataccttggccgcatgtcccggaagagatgagntttgatgcacaagatntaattgacaaattattgaccgaagatcctcatcaacgactag

SEQ ID NO: 3858 - DNA, 360 bp, Zea mays
  Clone ID: LIB3136-003-Q1-K1-C1
cggacgcgtgggcggacgcgtgggcggacgcgtgggcggacgcgtgggcggacgcgtggggggagaagttggacccaagaccattcatgttcctactggggagaagctttctgtttttgatgcggccatgagatacaaatctgagggccatgctactataatcctcgctggcgctgagtatggaagcggcagttctcgtgattgggctgctaagggtccgatgctcctgggagttaaagctgtaattgccaagagctttgagcgtatccacagaagcaacttggtggggatgggaatcattcctctgtgcttcaaagctggtgaggatgctgattcacttggcctcactggacatgagcg

SEQ ID NO: 3859 - DNA, 405 bp, Zea mays
  unsure (1)..(405): unsure at all n locations; Clone ID: LIB3136-003-Q1-K1-C10
gggcgacccacgcatcctctnataccttaatctctaccaaaactctcaattcttccctatccttcacatcttaagatgtgtttcatcactaaacaccctccacatctcatttatttatctttattctcctccaatttacaataacattacctatatctcacaccctacttctaaataacctcttatcataaataactttatacttcaaaccaacaaccttctattttacaaaaccaatattacttcaataaagcctcttatacaacttctcactcttaactcctttcaacattcaacactaatccatcatacttttagaacaaaacgctgcgcatttcaagtaatccgttaaaacacactctctccattctctataaatctacaaattccttgcactacaaacta

SEQ ID NO: 3860 - DNA, 380 bp, Zea mays
  unsure (1)..(380): unsure at all n locations; Clone ID: LIB3136-003-Q1-K1-C12
gcggcagggtatcttcctttcaaaagaaacttggctgggtgttgacgcacgcanccgacggcaggctgtacggggagcgccaagggctccaggaaagaatcggccgcgggctcgccatcgggaaggggagcggggcgcatgcgcgagcactggcacggcgacggcgacggcgaggacgagcatgagccccagccggggtgcggggagggcgcggggcatgcggcggcgaactgcgcggcggtgtgctgctgctgcccgctggcgctgctcgacgtgctgctgctcgtcaccgtccggctccccgcgggcgtcatgcggcggatgaggaggaggagccggcgccgccgtggtcacggaggtgccggagccaaccggaagag

SEQ ID NO: 3861 - DNA, 301 bp, Zea mays
  Clone ID: LIB3136-003-Q1-K1-C2
cacaccccccgagctgagcttagctccactctagctccaatcacaggcgcgaccagagcgcgggagctagctagagggccgcgaaaatgccgatcaataggatcgccctggggagccaccaggaggtgtaccacccgggcgccctcaaggcggcgttcgctgagttcatctccaccctcatcttcgtcttcgccggccagggctccggcatggccttcagcaagctgaccggcggcggcccgacgaccccggcgggcctgatcgcggcggcggtggcgcacgcgttcgcgctgttcgtggc

SEQ ID NO: 3862 - DNA, 352 bp, Zea mays
  Clone ID: LIB3136-003-Q1-K1-C3
gccgtcctctcccgaaagatctccaacatcgattaccacctcaagggcgccaagatcttctgcaagaaggccaagaccctcatcactcgagaggcggtgaacggcaccagcacggacagcaagaccaccatcaccctcaagtacagcgtcatcaagggcaagctatgggattcgagcaagtccatgaagctgggggtcaccaccaccattgaagctggggttcctgtggtcttacccgcaaccattgaggtccagagcgagttcaactccacctacagctggggcgagtccatcatcgagaaagaagagtactccaacgcctacgagggtcgtgtgcctgcatactccgtcg

SEQ ID NO: 3863 - DNA, 300 bp, Zea mays
  Clone ID: LIB3136-003-Q1-K1-C4
gcgcgccactcggtcaacatcatgtttaaactcatatcaagacgtgttgagtaaatcatcctttgacatgttggcaggagtctaagaaactgcagtttgcaaggagctgttccagatttgagtgtcgtacctaaatttggctacttggatcttagctggaaccagttgaaaggatctataccgactaataggcttgcttcaaatattactacaattgatttatcacacaactttcttcaaggaactgttccatcaaacttctcagggctacctaatattcagtacttgtcagtcaatggc

SEQ ID NO: 3864 - DNA, 371 bp, Zea mays
  unsure (1)..(371): unsure at all n locations; Clone ID: LIB3136-003-Q1-K1-C5
ggagagtggtgccaagggttgttaggtgatcgtgagtggaaagctcanggccgggagagccgggtccatgaagttcaaggatggctacatgatctcatctggtcagccagtgaacgagtacattgactcggctgtgagacacgttcttctcagacagggtgttcttggcatcaaggtgaagatcatgcttgactgggacccgaagggcaaggttggcccgatcactcctcttccggacctggtgaccattcacaccccgaaggacgaggacgagccgcgccctccggtcttggcacctcctgaggtgtaaggtcccaactgtgtccttgaaatggcagtttgatcgggtcctagataggtttctatcttac

SEQ ID NO: 3865 - DNA, 379 bp, Zea mays
  Clone ID: LIB3136-003-Q1-K1-C6
tgggaatgttcttactgtcgatcataatcagtgccgggttcagtttgatcgggctgaactgggtgttgagcttgtgaaggatatctactgcatgcccctacatcctctggaaaattttcctgaatctctcagacatcaaagtgccatcaatggatactacagccacttatcggaagcaaaatatgaggatcagatgaaagagttggctagcggaggtgcagcaagatccacatcgaatttgaatggtaccgatgcaaccttctataccccttctggtcatccgatgagtaccttaatgaagcaagcaaaggccaacacggcagttaatgaggttgcagttgcgacacaacagtcaatgtacaatcaaccatgcacactt

SEQ ID NO: 3866 - DNA, 373 bp, Zea mays
  Clone ID: LIB3136-003-Q1-K1-C7
cggcgatctatcttcttctatcataccgtgtgtttgagatcacgaatgtcttgaagtcgggtgttatccccaatagggataatagccgtctgtaccaaaatttcgttgctgggatcgccatctcagtgtgcctgtatctctgctcacttattcttctgaagattcctgttgtatagggatgaacatacaccaagcaatcttgatagtacaaggtttcttgtaaagtgtttgcttgatatgatgtttccagctctggcctggattcccttttgcttggtaggattccaacatatacagggaactgcgagattcaattgtcagaggctgcatatacagaaatccgatctttgatctctttgttggttcaaaacac

SEQ ID NO: 3867 - DNA, 427 bp, Zea mays
  unsure (1)..(427): unsure at all n locations; Clone ID: LIB3136-003-Q1-K1-C8
cccacgcgtccgaagagcagacccatgatagattagcttgtattgttgagatggagagaatgcaagtttgaatggctctgtgccacttgatgtacatgagagattggtatctgaccgagaacaattatttcgtgatgattggggtaattgggctgcccggtgtaggcaagtcaaccatcatgaacgagctttattaatatgatgcaagctacctgtgacaaaaacgattccaagaaaccacttcttgtcttcctccactggctgtctgtcatcttgctctaaaacaatcgcagtcctgcaagttgttgctgctgctcctacccctgcctctgcaattgggtttgagggatatgagaagcgcctcgagatcagcttctatgaggcacctgtcttcgctgaccccaacggaaggggatngtgtgcactc

SEQ ID NO: 3868 - DNA, 334 bp, Zea mays
  Clone ID: LIB3136-003-Q1-K1-D1
caagaagacagaagaagggagagtcgtactgaggtgtaagaatggcgagtgcacaggcaggggggcaaggagaacgaggccacttcgttctgaagagcggacacaccattccggccgttggtctatgcacttggagggccggctcagataccgctcactctgttcggaccgccatcgccgatgctggatatatgcacgtggacacagctgtccaatacggagtagaaaaagaggtcggtagaggacttaaagctgcgatggagggcgggatcaacacgaaagatttgtttgtgacgtcgaagctatggtgcaccgagctggctcctgatagggt

SEQ ID NO: 3869 - DNA, 449 bp, Zea mays
  Clone ID: LIB3136-003-Q1-K1-D10
gccgtcctcttccgaaagatctccaacatctattaccacctcaagggcgccaagagcgtcggcaagaatgccaagaccctcatcactctataggcggtgaacggcaccagcacggacagcaagaccaccatcaccctcaagtacagcgtcatcaagggcaagctatggcattcgagcaagtccatgaaacttacggtcaccaccaccattgaagctggggatcctgcggtcttacccgcaaccattgaggtccagagcgagttcaactccacctacagctggggcgagtccatcatcgagaaagaagagtactccaacgcctacgatgtcgttgtgcctgcatactactgcaacacggtcagcgtactctccacacagggcatctgccaagtccccttctcttatactcaggatgatgctttgactaccggagagaggaagcgtttcaa

SEQ ID NO: 3870 - DNA, 279 bp, Zea mays
  unsure (1)..(279): unsure at all n locations; Clone ID: LIB3136-003-Q1-K1-D11
caccggtccaccgctttcacaatttactccgctccgctccgtttccgtcgctcccatgccagggagcctcgccacgcgagagggggccacggacggtagcagttttctgtttcggtgggcggggacgtcgtcgacgaccgaccgtagcggaaggccggagatgatggaggagggggcgcgtccttttantttgctattacgcccaccatttgatcttgtgctaatgcggtcttacacgtgttcattgattgctcgagcgcgttctatttcatctacagc

SEQ ID NO: 3871 - DNA, 382 bp, Zea mays
  unsure (1)..(382): unsure at all n locations; Clone ID: LIB3136-003-Q1-K1-D12
ctcatctccgccgcatctacgtcgctatccttccgactagccgcggctgcctcccgtccaggttacaatcagaggatggaaggcgcaagcaatgatggcaacccgttgaggaattatcggattggcaagactctcggaattggctcattcgggaaggtgaaaattgccgagcatatcagcactggacacaaggtggcaatcaagattctcaacccgcgtaaaatcagatgcatggagatggaagagaaagttaaaagagagattaagatattgaggttatttatgcatccacatattatccgcctctatgaggttatagacacaccggctgatatttatgttgntatggcacatgttaagtgtggggaattatttgattaca

SEQ ID NO: 3872 - DNA, 297 bp, Zea mays
  Clone ID: LIB3136-003-Q1-K1-D2
cctccttcctcttcccgcccgctaaaacccacgccaccgccgcgcgccgtcggcagcgcaggggacgcacgatggccatgcaggtggtgcgcaacctcgacctggagcggtacgcggggcggtggtacgagatcgcgtgcttcccgtcccggttccagcccaagacgggcaccaacacgcgcgccacctacacgctgaacccggacggcactgtgaaggtggtgaacgagacgtgggccgacgggcgccgcggtcacatcgagggcacggtctggcgcgccgaccctgccagcgacg

SEQ ID NO: 3873 - DNA, 311 bp, Zea mays
  Clone ID: LIB3136-003-Q1-K1-D3
gcgctatgcagctcgtccttcttatggtggtggtggtggtgggaggaaccggcgatcagggggagggagccgctttggtggccgtgacttccgcaatgattcttcgtcatttggcaaggggggatcccgtggtggtggtgactactatggtggaggcagcagtggtggttatggtggtggctcctcatatggtggtggcggacacggtggagctggggctccgagtgcctgggattgatgttacagttgctcccaagtagaggggtctgccaagtttaggtcactttttactctagttctatttaggtata

SEQ ID NO: 3874 - DNA, 298 bp, Zea mays
  Clone ID: LIB3136-003-Q1-K1-D4
ggccgcgtgggtggttacccgcaccatctcatcttgggtcaccgtatgcgtcgactttaggggagattatgtttggttgcttatatgtgggagtcacaacctgcatgagtggatgcaaaataagtcattttaatgttattaacctgcatccacccatacgtttaaaattatcgtgtttaaaattatcgtatctggctgaccaggacggcggcagcctgcgcatagacgcgcagccatccaatcaggctgatatctccttcaccatatgtcatatcggacttcattcaatcaggatata

SEQ ID NO: 3875 - DNA, 358 bp, Zea mays
  unsure (1)..(358): unsure at all n locations; Clone ID: LIB3136-003-Q1-K1-D5
ctaacggcccctccgagctcgccgtcaaggaggccgcgtgggggctcgcacgctacgccgccatctcacaggacaacgggcttgtgccgatcgtggagccggagatcctgctggacggcgagcacggcatcgagcgcacgttcgaggtggcgcagaaggtgtgggccgaaaccttctacgccatggcggagaacaacgtcatgttcgagggcatcctgctgaagccgtccatggtgacgcccggcgcggaggccaaggacagggccaccccggagcaggtggccgcgtacaccctcaagctcctccaccgtcggatccnccccttcgtgcccgggatcatgttcctctccggcgggca

SEQ ID NO: 3876 - DNA, 415 bp, Zea mays
  unsure (1)..(415): unsure at all n locations; Clone ID: LIB3136-003-Q1-K1-D6
cggacgcgtgggtcctgccccgccaccacgccgcggcagcacaactgcacaaggcctcctgagatctcaatcccggcgctccctccctccctccctcctcgcctcgggacagcgagcgccgccgtccgccgtccatggagcacgacgccgaggcgcgccgcgggttcgccaggatgggcttcgggtgcaagcactaccggaggcgatgccggatccgcgcgccctgctgcggcgacgtcttccactgccgccattgccacaacgagtccacgaaagacgggcacgagctggatcggcacgacgtccaatcggttatctgcctcgtctgtgacaccgagcagccgatcgcgcaggtgtgctgcaactgcngcgtctgcatgggggagtacttctgcgcagcctgcaacttcttgga

SEQ ID NO: 3877 - DNA, 411 bp, Zea mays
  Clone ID: LIB3136-003-Q1-K1-D9
gcgtggtggctaccgttatgattatggctatgcccccagaggcgggtactatgaagagcaggacgaatactatgatgagcccgaggaatatgctcctccccctggccgcggacgtggcagagggagaaggggcggcatgccttggcgtgggcgtggaggccgctggccaccgcgcggtggccgagggagctactactaggcgcgagaaatgcgacgtgccgaatgcgtgtgcttattagttatctgttagcgtttgctgcagtgctcttctatggagctccgaccccggactggaattatctcgtaggcccttccaggtgctactctacttcagctgctgtccctgtgcaactcgtccggacaaagtttgtggctcgctcgtgttttgtagctagttaaacgagtgaagta

SEQ ID NO: 3878 - DNA, 295 bp, Zea mays
  Clone ID: LIB3136-003-Q1-K1-E1
acagcatgtgccaaggaaatgacaaagctctctggcatctctgaaatcatccccgagatggagatctgcgattttgactttgaaccctgtggctactccatgaatgcgatccatggctctgcattctctacaatccatgtgacgcccgaggacggtttcagctatgccagttacgaggttatgggcttggatgccactgctctatcttatggtgaccttgtcaagagggtcctccggtgctttggcccctcggagttttccgttgccgtgaccatcttcggcgggcgtggccatg

SEQ ID NO: 3879 - DNA, 384 bp, Zea mays
  unsure (1)..(384): unsure at all n locations; Clone ID: LIB3136-003-Q1-K1-E11
caccgcttcccgtgcaacgccctccctctacattcccccatttcctgtgttggcggggattgcgcggcactccgtgctcaacaccggaaccaatatcccatacgtggggctcgtcacctgacagtctgaccccggcgtccttggcaacgctgactacgccgtcatcaaagctgcttacctacatatacattgagccacattctacatgtacgaaaagaagattgcattggcgctgaagaagctatttcaacacggtgtaatgaagctagaagatctgtttatcacctataagctatcgaatgatcataatgctcctgaagatatgcctgangcactaaatgacagcctgaatgatatgcagcttgagtacctgcatctttatct

SEQ ID NO: 3880 - DNA, 362 bp, Zea mays
  Clone ID: LIB3136-003-Q1-K1-E12
tcctaccttcatatcaccaaaggctttctatactggcctttctcggaccaaccgaggatccaatcctaatgatcatgccgttcctgccgcatagtttatcaaagtagcattgagagtgagagaaaaaaaatggagcggggaaagtaggtcttccatacagttccaatgcttgcatacttgtacatctccatttgattgtattcatttgccatggacgtacaaaggtgtgatagtaggtcgcacaaaggcctgatttcttgatttgtcaggatggggggtataaatatgaaagttgttacgcacagataatcatgtatattgtgtgccacaaatagtttacaaattctgctcgaacagcttct

SEQ ID NO: 3881 - DNA, 386 bp, Zea mays
  Clone ID: LIB3136-003-Q1-K1-E2
gccagttcagcttcagcaggtgacgtcggttcggcacatgcccgccctgacgaggctcgccgcgccgccggcgctggcggccccgtccgcacgccgcagttcgctgacgctgccaccgccgccacgtcccccacactgctcctcctcctggtacagcgggaggcgctcgccgtcaaggccctcggccaccgccggcggcgccccgcgcggaggcccgctcccggagccagaggaactcgaccagctcctcctcaccgccctccgggctgctcgcatccgcgacgaggagtctcgccgctcagatcctctttttatcgatccatatgctgccattcttctttcacatgacgtggcacatcatgatatgggatatctagattcacatg

SEQ ID NO: 3882 - DNA, 288 bp, Zea mays
  Clone ID: LIB3136-003-Q1-K1-E3
cggacgcgtgggcgcccgcgcgctccacacgttcccgccgtggcgctcgcctttcatcctggtccccacgcctccttccatcctcgcccgcgcgctccgcacgtacccgccgtcgcgctcgcctccctcctctttgttgcctccgcgtcggcctccaccccgctatgacgcaagcaagggcggcgcttgccatggcatcgacgggaaccaggcatcactcttcctatctctcgggatggtacgggcaggaggatcaggccaccgtcgaggaacgcgctctccgctgtg

SEQ ID NO: 3883 - DNA, 377 bp, Zea mays
  Clone ID: LIB3136-003-Q1-K1-E4
gcggaaggggttaagaccagtgttgtggttgacaccggatttccctctgaagacagatgaactgatccctctgcttgatgtcctagcaaacaaagtgaaggctatcaggaggcttagggaactcttgacaaccaaacttcctacaggcacatttccagtcaagatcgccatccctattgttccaacgatacgagtcatcatcacattcacaaagtttgaagaactacagcctctagacgagtttgccaccccaccttcaagcccgacacagtttcaagacgcgaaagccaaagaaccagaaagatcaggctcatggtattcatgggtaaagggtggccgacgtacgcagtccggtgacagtggtgatggcccgaact

SEQ ID NO: 3884 - DNA, 251 bp, Zea mays
  Clone ID: LIB3136-003-Q1-K1-E5
ggctcggcgtccccaagctcccatgtcgggttaatcgctttgccaatgccggggatactgctgtggttgttgctgagaacacagcacttaagttcaggcaggctaaaacagaaatcgcgaatgccagtagagtagcatacagatctatggcaggcctgacttccaaaaatcaagcctcacctgagtctccgggtaacaatcaaaatacacgcagccctagtttccagggagccttggtcaagaacatcgtc

SEQ ID NO: 3885 - DNA, 419 bp, Zea mays
  unsure (1)..(419): unsure at all n locations; Clone ID: LIB3136-003-Q1-K1-E6
tgccttttgaattatctgttatgggtattttattgctcatcgtattaggtggggtctatggggtccattgtgtatgggcggcagctgaagcgtactccgcgccttcaattgtgttgacatctcgttcacgagatgggttgcatgtttttgatgatttccgtgaagcttacgcatggctgagccataacacagatgttgatgacaaggttgcttcctggtgggactatggttaccaaacaactgcaatggccaacagaactgtgattgtagacaataacacctggaacaacactcatatagcaacagttggtacagcaatgtcgtccccagaaaaagcagcttgngaaatcttcaattctttagatgtcaaatatgtgcttgttgtctttggaggacttgttggataccctagcgatgat

SEQ ID NO: 3886 - DNA, 264 bp, Zea mays
  Clone ID: LIB3136-003-Q1-K1-E7
agcaatctctatcagcagatcctcgtgcgaagcaaagcgctagcccccttcgggctgtccggatggcccgcacgaagcagacggcgaggaaatccactggcggcaaggcgccaaggaagcagctggccaccaaggcggcgcgcaagtctgccccggcgaccggcggagtgaagaagccccaccgtttccgccccggcaccgtcgcgctccgggagatccgcacgtaccagaagagcacggagctgctgatccgcaggctggcgt

SEQ ID NO: 3887 - DNA, 392 bp, Zea mays
  Clone ID: LIB3136-003-Q1-K1-E8
gattcttcttgctcagcagcatcagttactgcaaagttttggaaatttcaatgctggactggggaattcttctttcaattcgatgaacggtgggaatacatctgtgcttccagatattttcaattcaagtaatcaacctcaaaatcatgttgcagtgatgagcagttcgaagaaagatgacaataaagcttttgattttgtttcggatcaccttgcagcagcacgtggttcgagaaagtgaaacaggaagcaatgaacatgtccagatgctggaaagagctcaagtgcttgatggacataaaagatgggaattccaaaaactgcatctcgtcacagcctcgcagattggatgcgtgattcacacggctggtttggcattgtttgaacacatg

SEQ ID NO: 3888 - DNA, 328 bp, Zea mays
  Clone ID: LIB3136-003-Q1-K1-E9
cttacgcttagactcaaacgcacctttctctatcccaagccgcacaccgagaagagtaagcgctcttcctcctatgagggctccgcctacctacacatcagcgtggttatgacggcgtcaaatcggcacgcaaagcatgctatcaaactatgatctcagacagagattacaccgagttctagaacttctcaaaatggcagggcgtatctcagtaatttatgctctacacttaaaaaattatggcagacaactcatcattatcacttttgttttaatgattttgacatgttatatgttgactgcctgatagaataatatcatttatctt

SEQ ID NO: 3889 - DNA, 361 bp, Zea mays
  Clone ID: LIB3136-003-Q1-K1-F1
gcaaaaggggatattgattttgtgggtggtttcattcattggaatgctcttcaacttccttgcgctcatgtacattggtgagtttgttagctatgtcttcatggatgtttggatatactgtttttaaaaaggtatataatgttcttttatgataactcgatgtgcatagggcatacgacatactaaacttgtcaatttttctaggtgtaatgctctctctgttggttccaccactctatgagaagtaccaggatgagattgatgagaaagttggtgtagcttacagtgtactatcgaggcacatagataccatcattaccaggactcgacaatcagccaagtagaagaagactgagtaaaa

SEQ ID NO: 3890 - DNA, 354 bp, Zea mays
  unsure (1)..(354): unsure at all n locations; Clone ID: LIB3136-003-Q1-K1-F10
ccgctacatcgctgggctgcagcagaagtatacgcagagtggtggagtccgccccgtcggcgtttccaccctcattgtcggcttcnacccctacaccgacaagccagcgctgtaccagaccgatccatccggtaccttctctgcttggaaggccaatgccacgggaaggaactccaactctatgcgtgagttcctggagaagaactacaaggagacctccggcaaggagaccatcaaacttgctatccgtgcacttctagaagttgttgaaagcggtgggaagaacatcgaagttgcagtgatgacaaagaaggacggtctccgggaactcgaggagtctgagattgatgagta

SEQ ID NO: 3891 - DNA, 366 bp, Zea mays
  Clone ID: LIB3136-003-Q1-K1-F11
gagattatttcacatggttggattctcaacctgtgaactcagttttgtatgtctcgcttgggagttttgcttcagtctcagcctctcaacttgaagagatcgcattgggcctaatagccagtgaggtcaggttcttgtggattcttcgagaacaatcccctcgggtgcaagaactcttctctggcatcaataatgggatgatactgccatggtgtgagcagcttgaggtgttgtgccatcattcagttgggggcttcatgacccattgcgggatgaactcgacacttgaaggcgtcttcgctggtgtgcctatgcttgccttaccactgttttttgatcaaccgattgatgggcgattaattgtgg

SEQ ID NO: 3892 - DNA, 398 bp, Zea mays
  Clone ID: LIB3136-003-Q1-K1-F2
atttcagtactctcagggtacctggttgatgccattcagggtgcgtctgaatcattaaactggccagtggcctttattagtgttattctgcttcctattgtggggaacgctgctgaacatgcaagcgccatcatgtttgccatgaaaaacaaattggacattacattgggagttgcgatagggtcgtcaacacagatctccatgtttgtgattccattctgtgtggtaattggctggatgatgggacaagaaatggacttgaattttcaactgttcgagacagcgactctctttataactgtactagtggtggcattcatgctacaggaaggcacatcaaactattttaaaggtcttatgctcatcttatgctaccttatagttgctgcaagcttttt

SEQ ID NO: 3893 - DNA, 231 bp, Zea mays
  Clone ID: LIB3136-003-Q1-K1-F4
gcgcacatacacaagcacaagcgcactctagcaatggcttctgaggttgtccgccctagcgacgcggagctacgaaaggcacaagccgacatatggcggctcaacctctcctacctcacgcccctgtcactgaggtgcgccgtggagcttggcatccctacggcgatctaccgccatggggggctgcctcagccgctgagctggtcacggcgctgtctctccccttcacta

SEQ ID NO: 3894 - DNA, 274 bp, Zea mays
  unsure (1)..(274): unsure at all n locations; Clone ID: LIB3136-003-Q1-K1-F6
gggagcacaggcagacggatgatatcaagaacatggaaacattcctcactgcggtcagctggaccaagacgctccagttgcacttatcgactgaatactccgaggttttggacatggtcaaggcttcaacgttgacgagtttgcccaagaaaaagtacctgcatggcttgaaatcactcagccttactctggaccacaaccatgcagntcttgctactctagtctcatgcttgctgaacagctctcccaacctcaaggatctcagaatcattga

SEQ ID NO: 3895 - DNA, 368 bp, Zea mays
  unsure (1)..(368): unsure at all n locations; Clone ID: LIB3136-003-Q1-K1-F7
gcggctggccaggatacgtcatgtgggtgggggagaggggactggagcgagagcggcatcagtggtggctagaagcggatgaagagggggcaggctagcaggctggccaaggcgagttcctcctcttcggcgtcagtggcgtcctcctccgcgtcatgggcgagtggctccactgtcatggactggggcagcgccgaggaggcccagctgcagagcggcgacggcttctccctcctcgtctacgcctggaagaactagtgtgacgggctagcggcggcaattcagtgaaccngcttttggtcttaaattagtgaggatttctcttcccattgttgtaaagttgcaaattgttcagcgagcaaatgttc

SEQ ID NO: 3896 - DNA, 453 bp, Zea mays
  unsure (1)..(453): unsure at all n locations; Clone ID: LIB3136-003-Q1-K1-F8
agccgctcgtcgtcaccgtcgaggaccgtgtcgcgccaggccgcgacgagaggctaggccgcattttcctgcccctcgcagcagcaatgccgcggcacgaccacttcggcaaacccgtggagccgcggtggtacagcctcatgcgcccctctgatgaccctgataagaaggaagtcaagttcgcaagcaagatacagattcggatgtcgcttgattttgggtaccatgtccttgacgagtccacctactacagcagtgatctgcagccatcatcaaaacctgcaaggaaaccaagcattgggatgcttgagctgggagttctgggtgcgcgaaactnggtaccgatgaagcccaaggagggacgcaccacggacgcctactgtgtggccaaatatggaccaaagtgggtgcgcaccaagactattcttgacacgctgaatccgcaatggaatg

SEQ ID NO: 3897 - DNA, 318 bp, Zea mays
  Clone ID: LIB3136-003-Q1-K1-F9
gtcacttctccacaaacaaaagcgcatcgatctcgctgtcgtcactcctcgtcagcgagccgcgaacagaggcaccacccagcatggcccttcatgcggcgctcctcccatccaccctctcatgcgtccccaagaagtgcagcctcgccgtcgcggcgaaggacacggcattccttagcgtatcccataagaaggtgcaggcggcgtctctgtcagtgagaacgcgggtggcgacgacggcgcctgtggccacgccggggtccagcacggcggccaaggatgggaagaagaccgtgcggcaaggcgtggtggtgatca

SEQ ID NO: 3898 - DNA, 407 bp, Zea mays
  Clone ID: LIB3136-003-Q1-K1-G10
accaggtgccgccctgggtctccggcgacgcgcgccgctcatcgcgcgcctgtgcgcgggaccccgccaagcgcgcctccatgccgagatcatgtgcacgccgtggttcaggaagggcttcgtgccggccgtcctttcgcccccggtgacgcccaagaaacagcagctggacgaaggcgctgccctcttcgacaacgacgacgacgacaacagcaacagcaaccactctggcgccacctcccctcggtcgtgcaacgcgttccagctcatctcgtccatgtcctccgggttcgacctgtcggggctgttcgagagcgagcagaagaccgcgaccgtgttcacggtccgcgcgccggcggacaccgtggcggagaagctggagtccgtggcgcgcgccctatgattcg

SEQ ID NO: 3899 - DNA, 411 bp, Zea mays
  Clone ID: LIB3136-003-Q1-K1-G11
gtactacgctggtagtcacgggatggacatagtgacatctgcagcagcacatgctgctgagggggtttccaagtgcctcatggaggtcacgagttcaattgaaggtgcaagggtggagaacaacaagttctgtgtatctgtacattaccgcaacgtagcagagaaggactggaaagtggtcgcaggactcgtgaaacaagtcttggaggccttccctcgtctcaaagtaaccaacgggcgaatggttttagaggttcgcccggtgatcgactgggacaagggaaaggctgtcgagttcctgcttcggtcgctcggcctaagcgactccgaagatgtggttcctatctacatcggagacgatcgaacagacgaagacgccttcaaggtactgcgagagcgaagctgtggata

SEQ ID NO: 3900 - DNA, 316 bp, Zea mays
  unsure (1)..(316): unsure at all n locations; Clone ID: LIB3136-003-Q1-K1-G12
cacaagtcctcgtatgcagcgagcgtctctcctctcccacgcatcgcgccaaggaggagatgtagatcgccgctccccttctcggcatcngtggtgcgggtgccctccctcctcgagcgagatctgtctggtcacacatctatctgacaaaatggtgaagatctgctgcatcggtgctggctatgtccgtggcccaaccatggccgtcattgccctcaagtgcccagacattgaggtcgtcgtcgttgacatctccaagccccgcattgatgcctggaacagtgacaccctgccaatctacgagcctggtctcgat

SEQ ID NO: 3901 - DNA, 344 bp, Zea mays
  unsure (1)..(344): unsure at all n locations; Clone ID: LIB3136-003-Q1-K1-G2
cagatagtantgtcgcttggagcacgtccatgggacgctctgtatggaggagggaataccggggcgttcgtcttggcttccgtcttctccctggcagcaagtgtgctcgcagttctcaagctgccaaagctgtccaactcgtaccaatctgccgggttccatggatttggctgatgctcatgcccaaaacacccccgtctgccatgtaaaacatcacaccaacacttggccccattttgccattcgtttacagagaaatgattcttttttcctcgtacaactacagaataatgacagtgaaagtangagtttaagtgagagagagaggctaggtaagttgatgt

SEQ ID NO: 3902 - DNA, 416 bp, Zea mays
  unsure (1)..(416): unsure at all n locations; Clone ID: LIB3136-003-Q1-K1-G3
atctccgccgnggagaggagatcggacggccagaggaaggtgtgagccacgagggcggggtcgtcgcgtgctccgaggcgcccagatctggcttgccgacttgttaacttgcggtgctgacgtgcgtgcgtcgcacacgtggcgcgcgaacattggttgctaggagaacaaagcgttgctggtgtgcgagcacatcaaaaggacgaatcaaaaaaaaagtggagaaaagcgtggtgaaaattgaaaagagagagagagttgattaggggaaaggtttggaggaggtaaaaaggcagggctaatctgtgtgctgatggggggtttgcatcatatgttatgtgccaaaacagcatctacttgggagaagcccaaaaatatgggtcgtgcagcacacgattctaaaaatttggtgattc

SEQ ID NO: 3903 - DNA, 362 bp, Zea mays
  unsure (1)..(362): unsure at all n locations; Clone ID: LIB3136-003-Q1-K1-G4
gtaaaatgaaatcattttactttctcttgtccgtacccgttttgtgggtcatcttcntgatgtcagaagagttattgtagctatgtcccgtgctcgtctgggcttgtacgtgttctgccgtcgttcactgtttgaacaatgttacgaattgcaaccaacattccagctgctccttcaaagatctgataagcttgccttgaatcttgaggagtgcactccttttaccgagcgacctttggaggaaactggaaacatccattacattactggtattgaagacattaatcatttagtaaagttcacgctggaacatcttcggcaagtgcaatacatgcagtattatgctccttcggcaaatgtac

SEQ ID NO: 3904 - DNA, 344 bp, Zea mays
  Clone ID: LIB3136-003-Q1-K1-G6
gggaaccgtcaaattcgttgcaattgggcaacgaaaggtgctaatgctggtggagagaaggaaattctggacactaatgttgacctgtcaaatggttcatcagaatctggaaaagagaatccaaatgatgatggtcctgaaaataaccctcagtttactactgtttatgttggcaatcttactcacgaggctaccatgaatgatgtgcacctgtttttccattcactgggggctggttcaattgaggaagtccgtgtaactcgtgataaaagctttggctttgtgaggtacagcacccatgatgaggctgcattggcaattcagatgggtaatggccaacttat

SEQ ID NO: 3905 - DNA, 261 bp, Zea mays
  unsure (1)..(261): unsure at all n locations; Clone ID: LIB3136-003-Q1-K1-G7
aagaccgggccgcccacgcgtgcggtccagatacaacatgaccgcctccctaaattctaagacgatacttcgctagagaatcactgctacctgtcccctaaatctcacataactactatggacctcacctaactaacggaacagcgtagctcacccggtaccctagactgacatactatccaaacacagccaatgctatattccagcacatctactattacaaatcaaaaaaaaaagnggagaaaatcgtgttgaaaattg

SEQ ID NO: 3906 - DNA, 376 bp, Zea mays
  Clone ID: LIB3136-003-Q1-K1-G8
ccgtcgtctaagttaggctagggttcgaccagctagcggaaatggtggccttgaggttccggcagtaccaggtggtggggcgcgcgctgcctacgcccggcgatgagcaccccaagatctaccgcatgaagctctgggccaccaacgaggtccgcgccaagagcaagttctggtacttcttgaggaagttgaagaaggttaagaagagcaacggccaggtcctggccatcaacgagatctttgagcgtaacccgacgacaatcaagaactacggcatctggctgcgctaccagagcagaaccggctaccacaacatgtacaaagagtaccgcgacacaaccctgaatggcgctgtggagcagatgtacaacgagat

SEQ ID NO: 3907 - DNA, 308 bp, Zea mays
  Clone ID: LIB3136-003-Q1-K1-G9
gactcctacaataaggggtacaacttccaatgaagaaaagttgcttcaatgatggggagagggcattgcagccattaaatcaagtataggatctgttgtgcttcatcttagaaagttgcctatcggtctctgcatgcaccgctcattgctatttaaaaggggacggcaaggccgaggggttgccgctgatgtcgttattggtgaggttgacggtggtgatgccgtggatgctcgagtggcgcttgtccttgacgctggagttgaggcggatgatgtacttctatgcatggttggccaactacattgga

SEQ ID NO: 3908 - DNA, 371 bp, Zea mays
  Clone ID: LIB3136-003-Q1-K1-H1
gacgccgacttcacctgggaggtggtgaagcccctcaagttcgacaaggcatcggcttaagggtgggagtgtcactgtggacatgaggactaccttcctctggctctgctgttacctgcaagcattgctgctgctggatgtgtgtgtttgatcagtgactggctgctgctccatagaagatgaacggagagaaggatgatgaagggctttggcaatcgccgctgcaactgcaacccatgccatgccggcttagtgattgggtataatttggcttggcagcagccagcattattatgtgctgatctgttatcttttactagtttggtcgtccgatatcttttctttctttttcccccttttcgactctgtac

SEQ ID NO: 3909 - DNA, 384 bp, Zea mays
  Clone ID: LIB3136-003-Q1-K1-H10
atccaatccatgttgattatcatgttcaggttcaaactgaccatcacgccatgaggggagagtacactatgaaatactccttatcaattgcaataacatgtcctggatgatccctaactcattccacgcagtatcctacgatgcattttctccatatttgctggacctccagtggattccaatgacttatgtgccattcaagcccaacaagaagcttctctactacaaaacaatatattgagaccacctacactatttagagcacggggcgtatatagctactatgtactccctttcttctataacgaataagattcaaaggctcacagtttgtcctaaaataaataatattttacacacatatgaaagatctgctcctaatat

SEQ ID NO: 3910 - DNA, 400 bp, Zea mays
  unsure (1)..(400): unsure at all n locations; Clone ID: LIB3136-003-Q1-K1-H11
ctccgccacctgctctctcagtagacgctgaatcagaccagctgtcacagccgtgggatgcgaacaaagcaacggatgccccagcggcaagcagcgatcgctctcctaacgagacagagagccggcaagccaggagctgcaccaaggtaatcatgcaaggggtggcggttggcagggcggtggacttgacgaggctagatgggtacgatgacctccgccgcaagttggaggagatgttcgatatcccgggagagctttccgccagcctcaagaaatggaaggtgatctacacagacgacgaggacgatatgatgctggtcggngaccatccatggagtgagttttgcaggatggtaaataggatatacatttattcctacgaggaggccaagtctttgac

SEQ ID NO: 3911 - DNA, 259 bp, Zea mays
  Clone ID: LIB3136-003-Q1-K1-H12
gggaagggcaaatctgcagggcctgagagggtgaggtagagcgcgccaaccaaaatgcaggagcaagcggcgagctcgcggcctttcaccatcgagaggtcgtccagctccgggcaccacgtggacatggaggtcaaagaaagcaagctagctactacctctggcatggcaccccgtgctgtggaactatcctgtgcatcttctttttggcttataagcttgagtttatcaccaatcccagttctttcattgttttttt

SEQ ID NO: 3912 - DNA, 298 bp, Zea mays
  Clone ID: LIB3136-003-Q1-K1-H2
gcctgatggaacttatagggcgcccttgctaggtggagttccttctgctggttacctggacgcgacatatgggtatgacagcacaagggcacaatttgcatggtatgatggctctgcttatgcaaatggacagcaaagaacaaccacaactaatcgttttccatcctcgtcattcaatggtaatggttcatcagcaagatatcaaaacaagagctccaccacgcagcacatgggtatgcagaatagaagacctacaactacatcagcagctcctacctatcccaataggatgtaccct

SEQ ID NO: 3913 - DNA, 250 bp, Zea mays
  Clone ID: LIB3136-003-Q1-K1-H4
gcaagaagatcgaagaggtttgatcaaagagatgcatagtgtagactgtatagctctctttggttaagcaagcatttagtatgctttttgtttggaaatgtaagctgcaactcatgaatagcaccttgtagggccatttgataatatcattatagcaggtgaatggtggttatccatgcttatactgtctgaggcaacgtaagtttcaaatgtgctgcaatcatgttcatattatttaattggttgcatg

SEQ ID NO: 3914 - DNA, 364 bp, Zea mays
  Clone ID: LIB3136-003-Q1-K1-H5
gagtttttgcaggcagggacctggtcggcagtaagctcaacttctcaatgatgcatggagagctaaggcttcttggtgtatggcccctctttgtgaagagccaccgtatcgaagcaggacacgtgtgtgctttcatgttccaggaagaggaagaggaagagggcgaactgtcacttagggtgcacgtgctgggtactatgccagtgccaacaatctagcctttgcttgtttcgttgatgaggcacgtgatgaacgtcgctaacgaattatgcatcagacattagtattggaaacagcagcatgtggctatcttgctctggaattagttgttgttgttctatctagataactatgtatggacata

SEQ ID NO: 3915 - DNA, 425 bp, Zea mays
  unsure (1)..(425): unsure at all n locations; Clone ID: LIB3136-003-Q1-K1-H6
gtggcggcaacgcgtccgcggcggcggcgagcgagctgtcgctgactctgtggtccaactggatcgcttcctcggacagcgcgctgaacgcgacggagcagtgctcctcgggagcgagccggtccgccctgaccgagctgccgcgggcgcggtcccggatggcgctgcacttcgccgcggtggtggcgcgctcgcggtacgcggccgtggtccaggatttgctcaacgacgtcgtcggccacatgctggacggcgtcgccgacgtgaccgacgactcgtgcagcggcatcggctcggttggcgcgccgtccgcggtgagctccaacaggttcatggcctcgaccgaaagacccggcgcgcgctggggccaggcccagagggtccggagcaacctnctcaagacgcttcagctgatggacgagaag

SEQ ID NO: 3916 - DNA, 370 bp, Zea mays
  Clone ID: LIB3136-003-Q1-K1-H7
cggacgcgtgggttggaatgtatgaaaattctccaaatgttttgaattaaaaggattactagcttttaagttaattttctaaaacaaatagatgataatattaaatcttggatagttcaaatttaggcttgaattttcaaactggcctacaactttagcttataagatggcttgttgttacagcatacagttcccgtgtaagtttatgataaataactttagcttataagatgggctgttattacataaattaagatattagtttaacttactttaaatataaacaatccgagttgaaccgagctactctggaatcctggatcaaaatgaacgtgctagtaagctactagcttttagtcatgccctaatt

SEQ ID NO: 3917 - DNA, 326 bp, Zea mays
  unsure (1)..(326): unsure at all n locations; Clone ID: LIB3136-003-Q1-K1-H8
aagaaccgggccgacgcacgcgtncgctccgaggcatcacataaaaccagtgcaagctgaagcagcgcaatggcaagcgggaccatgggcctctcctccacagccttcgccggcaaggcagtgaacgtgccgtcgtctctcttcggcgaggcccgcgtgacgatgcgcaagacggcggcgaaggcaaagccggcggcgagctccggcagcccgtggtacggccccgaccgcgtgctctacctgggcccgctgtccggcgcgcccccgagctacctgacgggcgagttcccgggcgactacagctgggacaccgcggggctgtcggc

SEQ ID NO: 3918 - DNA, 363 bp, Zea mays
  Clone ID: LIB3136-003-Q1-K1-H9
attagtgctagttgtattaccattgttagtgacttaattaccctcacgcgaagcggcctacctttgctagtcctcctacgtctcctcttcgcttaatcttggtgatttgattcttcacttcttgcgcgcattgcagagggtgctcggtctgcagctatcttaggttaaccagtcgtgtgtggtctatcggtttcgatatagtattactactgctctgttataatcagcggggaggaggaagatgacggtgacgccacggatcacggtgagcgacgggcggctgacggtgcgcggccgtacggtgctcaccggcgtgccggacaacgtgtctgcggcgcacgctgccggtgcagtgctcgtcta

SEQ ID NO: 3919 - DNA, 441 bp, Zea mays
  unsure (1)..(441): unsure at all n locations; Clone ID: LIB3136-004-Q1-K1-A1
tggtggtaccgtggtagctcctaaatccttcggcgagcagttaacccccaatcattgatccctcaccagcttgggggcggtttcgctccggttcttgcgcttcggctccaggccatggagcagcggaggtggctcgcggtagccgttttgatgtgcttgctggtgctttgctccgggagagaactgaagaccaaacatgtgcccatatatgacccagtgctagcccggacacttgctgaatatacttctgctgtctatactgctgaccttacccaactgtttacatggacatgtgagagatngttgtgactaacagagctcaggggttcgaggtgatagagctgattgttgatgtgaaaaattgcttacaggcatatgttggatttgctagagacatgaatgcagttatagttgtggtcaggggcactcaagaaaacagca

SEQ ID NO: 3920 - DNA, 333 bp, Zea mays
  Clone ID: LIB3136-004-Q1-K1-A10
cctgttggcaaaagatgtggttttgttcaatatgctaacagatcttcggcagaggaggcattggtaattctgcaaggcaccttggttggagggcacaatgtgaggctttcatggggtcgcagcccttcaaacaaacaagttcagcctcaacaggactccaaccagtgggccggggctaatgctggatattatggctacggtcaaggctatgaggcctatgggtacccccagtctcaggaccctaatatgtataattatggagctggagcttatgctggctattcaaattaccaacaacaaccagtagcacagcaaccgccgcagcaacagtga

SEQ ID NO: 3921 - DNA, 250 bp, Zea mays
  Clone ID: LIB3136-004-Q1-K1-A11
agagaggcggcaaccagggccgggggagaaccatgtgcaagctcatgtgcaccaaggagtggggggggtgctacctgctggtgatcctggtcatcgaacttctcgtcggcgtgctcttcggcctctgcgtattcaagcacggctactacaggatcactgaaatcgggcgcaaccacacctgcttggactgctacacaacaggtaccatctgaccgagccaccggccgtgccctgcttctgcctgacttgg

SEQ ID NO: 3922 - DNA, 178 bp, Zea mays
  Clone ID: LIB3136-004-Q1-K1-A12
tccgatttaactcttgatcgaatatagcgtctgttatagcctcttcccccgctgcaacggtgggtgtgtttaacgactgcaaaacctactcctacaagttctttaatggctcttaatccctcttcaagtttagaaggcttcattccagacgatacatgcccaatgtatcttacacggc

SEQ ID NO: 3923 - DNA, 389 bp, Zea mays
  Clone ID: LIB3136-004-Q1-K1-A2
tggaaaccctactcgtccccttccgcagccgtcgccgcccaattcccccacccaattcccactctccggtcgacagatccatacatgatgggagaggccaaggagaacgacgtttatgaggaggagctcctggactacgaggaggacgacgacaagacggtcgatggctccgctgctaagcccaccggagaggtcgcatagaagggctacgtcgggatccacagttccggcttcagagacttcctgctcaagccagaactgctccgtgctatccaagattgtggctttgagcatccttacgaagtgcaacacgagtgtatccctcaagccattcttggaatggatgtcatctgtcaagctaaatctgggatggggaaaactgctgtttt

SEQ ID NO: 3924 - DNA, 341 bp, Zea mays
  Clone ID: LIB3136-004-Q1-K1-A3
gccggttgccgagatgaaccctgtgcttagtccatcagcaccctatcctaccgatcacaggtggtccatgacctaccttatgctattgcagcagcagcacttgactacagtgccctctacacccagccatagtctacctctgcgctcgtcacgaagccggttgccctacaatcctgtcatgtcaccgtactacaagcactgagctgcttccatctcgttgaacgccatcgtaccttttttcaatgaggactcgacatgcaccttatggcgcacacatacactgcgctctggccctatccctccatcacgcgctcgagacactcctgcaccttcagacttag

SEQ ID NO: 3925 - DNA, 360 bp, Zea mays
  Clone ID: LIB3136-004-Q1-K1-A4
cggtaatcgtcgacctgctgatggcgccttgcccggcgcaagggctgctgatcaaatgggtgaccgagcctactagctggggagcagcggcaagaagcggaaagcaaccgcagacgcctctcaccatctgggcagagcagcagcagcagcacattcccggaatgtcgccgcagcctccaacccgaacggcggcagctacccgcacagctcttcacaggccatataagacgccgaatgctcggttgccagctgcagcgtggacgacctttaccgcctcggcaatggcggcaacgccaagcgtcgccccgccgctgcagggtgcctccctgacgacgccatgttcgcgtgcccgtgcacgcc

SEQ ID NO: 3926 - DNA, 273 bp, Zea mays
  Clone ID: LIB3136-004-Q1-K1-A5
gctggtctccttttgtccccattacactggacacttccatgctgactgtacttctgttgcgtctctaagtacagattgcgaaatgtccctgtgattgagcctgaaaagcctatcatcaggaatttcattactcagactggtgttgtcaaagggctgcagcaatgtaaaggaagggactggtttgactacatttctgcacttcctctttcagacttaggacttccatttatgttcatttatgacgttatcaccgtcaacagtgatcatcttatc

SEQ ID NO: 3927 - DNA, 442 bp, Zea mays
  Clone ID: LIB3136-004-Q1-K1-A6
ggaggctgagcgcatggtccgcctaggcgccgactggctacatatggacatcatggatgggcacttcgttcctaacctgactattggggctccggtgatccagagcttgaggaaacataccaaagcatatttggactgccatcttatggtcacaaagccttcagattacgtagaaccatttggaaaggctggcgcttctggattcacattccatatagaagttgctagagacaactggcaagatctcatccaaagcattaaatcaaagggtatgcggcctggtgtatcattgaggccaggtactccagtggaggaagtttttcccctggtggaagcagaaaatccggtagatttggttcttgtgatgacagtcgagcctggttttggtggtcagaaatttatgccagatatgatggataaggtgcgcacactgagaaagaag

SEQ ID NO: 3928 - DNA, 349 bp, Zea mays
  unsure (1)..(349): unsure at all n locations; Clone ID: LIB3136-004-Q1-K1-A7
atcaccagacaccaactaggatcgatctctcgacagcaaatagctagctagcaatggagaagtacaccaaagccctagcgtcattgctcaccatgctggtgctggcacctctcctcgccatggccaccgacccagaccccctgcaggacttctgcgtcgccgacctcaacggcaagctgtcagtgaacgggtacccatgccagccgccgtcgtcggccggcgaccagttcctcttctcgaccaagatcgccacgggaggcgaccccctggccaacccgaacggctccaacgtgacggagctggacgtttccgagtggcccggcgtgaacacgctgngcgtgtccatgaa

SEQ ID NO: 3929 - DNA, 435 bp, Zea mays
  Clone ID: LIB3136-004-Q1-K1-A8
tggcagtggagtagtggtaggaaaagctcgtcgccgagtcgccgtacgggggctcggctcgggtgagcgagcggcgggtactgatgcctgagggcgaggcgatggaccgcctccgcgacgggcgagccttcctccaccgcgcgcttgtcctctcgtcgctgctccttctcgcctccggcgaaatattcttcgaggaacggttcgatgatgggtgggatagccgctgggtgaaatctgattggaagaagagccaaggacaagctggaaccttccgacacacagcgggaacctactctggagaccctgacgataaaggtatacaaacaactggggatgccaaacattttgctatatcagcaaaattcccacaatttagtaacaaggaccggacattggttatccagtactctctaaagattgaacaagatattgaat

SEQ ID NO: 3930 - DNA, 356 bp, Zea mays
  Clone ID: LIB3136-004-Q1-K1-A9
gccctccatcgtctccctcaccaccagtcaccaccgccagctccccgcctctgcctcctccaggcgaccaggcccccagctttggcgtcgacggacagatacagcggcgccatttccaaagagagacacagatcgcgctgcccaaggaaaagaagccgcgccttctcccctctcccttctttcttcccttttattgacgggatcgtccgccggttccattccaacactaattcctcacgggggttccatttggattcggcctggatccgcgagatcaagaaaaacgcctgcaattaaactgccaagattaacaagaaaaaaaataaccaaccttgattggctgcaatctttctttc

SEQ ID NO: 3931 - DNA, 320 bp, Zea mays
  Clone ID: LIB3136-004-Q1-K1-B1
caaaaggaagaggaagaatcaatacaggggtatccgccagcgcccttggggtaagtgggctgctgagatcagagatccccagaagggcgttcgtgtttggcttggtactttcaatagtccggaggaagctgcaagagcttatgatgctgaagcgcgcaggattcgtggcaagaaggccaaggttaactttcctgatgcaccagcagttggtcagaagtgccgttctagttcagcttctgctaaagcactcaagtcatgtgttgaacagaagccaattgtcaaaacagatatgaacatccttgccaacacatatgcaccct

SEQ ID NO: 3932 - DNA, 347 bp, Zea mays
  Clone ID: LIB3136-004-Q1-K1-B10
cgctgcgaacgcggcggaagagctgtaccgcctccgtgacacctttttcccgcgggacccttccgagaaagtcgccgcactccgcgcccgcgccgacgccgccctcgcgctcctcgacgccttcccgtccgaacaaaagaagtctcgacaactgcgtggtgtttatgaatttttgaggggaaaaatactggatgtctttcctgattatcataaggaggctgaagatcatttatccaaagcagtaaagttgaacccatctcttgtagatgcatggttatgtttgggtaactgcatttggaagaagggggatctatctgcagcaaagaattgtttttcattagcactaa

SEQ ID NO: 3933 - DNA, 404 bp, Zea mays
  Clone ID: LIB3136-004-Q1-K1-B11
cagcgacaaggccgcggatatcctggtcaacttctttgacaaatgcaagggagatccgagctactgggacaagatctcacaaggcggcctgcagagaatctatgagaagtacacctggaagctctactccgagaggctgatgaccctgaccggcgtgtacgggttctggaagtacgtgagcaacctggagaggcgcgagacccgccgctacatcgagatgttctacgccctgaagtaccgtagcctggcaagccaggttccgctgtccttcgattagtacggggaaagaaggagaagaagaagaagaagcccaggccggagaaccatcgcctgcatttcgatctgtttcaccgcaattcgcattgttagtcgtgtattggagttatgtgtacttggtttccaag

SEQ ID NO: 3934 - DNA, 282 bp, Zea mays
  Clone ID: LIB3136-004-Q1-K1-B12
atttgttcttggtggtgcaaagggtcctgaagaaaatccaattggcaaatctgttagaatagggtctggcaacgctgggcaagggtatacttcagatgaggtcaaggtcctttttcttatactggttgacctatgtcgaaggacatctaccttgccgcatccattgcctgcctctcaggttggttccagtagcattatcataaggctgcactacattgacggcaactacacagtgctccctgaagtagtggaagcgtctcttggtccccatatgcaaaatat

SEQ ID NO: 3935 - DNA, 398 bp, Zea mays
  Clone ID: LIB3136-004-Q1-K1-B2
cagctcgctctgtaatctgcatcagcctcgcccgccgccgtcgccgccatggggaggggaaagttcaaggggaagcccacaggccgccgcatcttctccacacccgaggagatcgctgctggtacttcaggtcggccacgcacctttaagaagaaggaggaagaggaagatgaggaagaggtagaaagagaagagtctgaggaagaatctgaagaggattctgatgaaaagactaaacataaaggcactgagggtattattcagattgaaaatccaaacttggtgaaagccaagaatataaaggccaaggaagttgattttggcaagacaactgaactctcaaggcgtgaaagagaggagcttgagaaacaaaaagctcatgaacgttatatgaagct

SEQ ID NO: 3936 - DNA, 319 bp, Zea mays
  Clone ID: LIB3136-004-Q1-K1-B3
aacaaggaggagcagattacctgtgagcagatcatctccgcctgatgtgtcacccagtgtcaccaaaacatatagtccttcatccatcaggaacaagaagctgtcaccgccttcatatcgcaaagcgcgccaagcaaataattgtaactacaaggttgagatagctgttgctccggatgctacaccaatcaaagtggtgacggaggagaagctcctggaaggaggcaatgtgagaggcagactggaggctaggagggcactcttccaaggcagccaggataggtcggccaatctggctggacacaaagcatggtcacga

SEQ ID NO: 3937 - DNA, 283 bp, Zea mays
  Clone ID: LIB3136-004-Q1-K1-B4
ggaagaggaagaaccagttcaggggtatccttcggcgcccgtggggcaaatgggctgctgagatcagagatcctcgcaagggcgtgcgcgtctggctcggtacattcaactctcccgaagaagctgccagagcttacgacgccgatgcacgcaggatccgcggcaagaaggctaaagtcaacttcccggatgaggttcctacggcggtttctcataagcgccgtgctgctgggcttgcctctctgaaagcgcctaagatggacgttgaggaggagaagccgat

SEQ ID NO: 3938 - DNA, 314 bp, Zea mays
  Clone ID: LIB3136-004-Q1-K1-B6
tccgaccgaggtgaggacgacggtcatcggcatctcgagctcagtgggcaggatcgggggcatcctctgcccactcgtcgctgtcgccctggtgcacagctgccagcagacgacggcgatcctcctcttcgagctcgtaatcttcctctccagcctggccgtctagttcttacccttctagacgaaggggtgtaggctcaacgacaccgacgtggacatgaactgatccggcggctgggtgtagcgtgactctcagagcaattttcctgtggcggttaccggaattgcatatggatcggatatttctagcaaca

SEQ ID NO: 3939 - DNA, 164 bp, Zea mays
  Clone ID: LIB3136-004-Q1-K1-B8
gggaaggaattggtggaccgacccacgcgtgaagaggatgaaccaattcatgactaccttttttttcccgagggtcagatgacctgtggagatgagatatcttccacacggcgttctcgttacggctcgtacatcaaagtctgccgaagaagcaggcctatctt

SEQ ID NO: 3940 - DNA, 373 bp, Zea mays
  Clone ID: LIB3136-004-Q1-K1-C1
ctgacaaggcgaggggagcactcggcggcgatgggcggcggcggcgcacatggcggcaccacctacaagggctacaccatcccgcacaacaagcgctggcacaccgtcgccggcaagggcctctgcgccgcgatgtggttctgggttttctacagggctaagcaggatggtgctacgctcttgggtttgcgtcatccttgggatggacatgatgaccactctcatggtcatggacacgggcatgaggcatcatcatcgtcatcttcacattaagttccttactggctgcggacgatgcttggcatgttccaacagctaaagtttgagttaataaattctatcaccctgcatgggactcatgttgtttgcaact

SEQ ID NO: 3941 - DNA, 384 bp, Zea mays
  Clone ID: LIB3136-004-Q1-K1-C10
cccacgcgtccgaaggagagtacgtggaggagcagagccatggcttcatcggtggccgccgcggcgagcacattcctgggcacccgcctggcggacccggcgccacagaacgggcgcatcgtggcccggttcgggttcgggttgggcggcaaggcgaagcctgctccgaagaaggtggcgaagacatcgacctcctctgaccggccgctgtggttccccggcgccgtggcgcccgactacctggacggctcgctggtcggcgactacgggttcgacccgttcggtcttgggaagcccgtggagtacctgcagttcgagttggactcgctggaccagaacctggccaagaatgaggccggcggcatcatcggcacccggttcgag

SEQ ID NO: 3942 - DNA, 425 bp, Zea mays
  Clone ID: LIB3136-004-Q1-K1-C11
tccacgcgttcgaaggagagtacgtggaggagcagagccatggcttcatcggtggccgcggcggggagcacattcctgggcacccgcctggcggacccggcgccacagaacgggcgcatcgtggcccggttcgggttcgggttgggcggcaaggcgaagcctgctccgaagaaggtggcgaagacatcgacctcctctgaccggccgctgtggttccccggcgccgtggcgcccgactacctggacggctcgctggtcggcgactacgggttcgacccgttcggtcttgggaagcccgtggagtacctgcagttcgagttggactcgctggaccagaacctggccaagaatgaggccggcggcatcatcggcacccggttcgagtcctccgaagtcaagtccaccccgttgcagccctacagcga

SEQ ID NO: 3943 - DNA, 407 bp, Zea mays
  Clone ID: LIB3136-004-Q1-K1-C12
ccccagcccaagctccagccgccgcttggctcctgccgtcctgcgtcctggtccagcgctggctctccagctccagcgccgcagcgcgctcgcccgtgcctcatctccagctctccagcgccgcagcgcgctcacggcccaccagcgccagccgccaggccgccaccgcgggaccgccaggcgcccaggcgcgctcgcccgccgaccgccgttgtccttgtacagccgccggagtccggagcaccgagcacgggagcagccgaggcgagcaaccgagcaccgacattgagcaacagtgaccgtgagccaagccgggctctctcaatatcaccacaggaacaaaggatcagaaatggctatgcaggccgcaaggaggctagcatctttgaaactccaacgacgcctac

SEQ ID NO: 3944 - DNA, 437 bp, Zea mays
  Clone ID: LIB3136-004-Q1-K1-C2
cgatcttgctggagatgggacaaccacctctgtggtccttgctcaggggctgattgctgagggtgttaaggtcgtagcagctggtgctaatcctgttcagattactcgtggtattgagaaaacagctaaagcactagttgaagaactacggaagttgtctaaggaggttgaagatagtgagcttgcagatgttgctgcagttagtgctggcaacaactatgaaattggtaacatgatagcagaggccatgagcaaggtcggtcggaagggcgttgtcacccttgaagaggggaagagttctgagaactttctctatgttgtggagggaatgcaatttgaccgtggttacatctctccgtactttgtaacagacagtgagaaaatgactgcagagtacgagaactgcaagctgcttttggttgataagaaaatcacca

SEQ ID NO: 3945 - DNA, 278 bp, Zea mays
  Clone ID: LIB3136-004-Q1-K1-C3
gtcattacatacatattgggggttggagacaggcatctggataatcttcttctaactgatgatggacgcctttttcatgttgactttgcttttatccttgggcgagacccaaagccattttcgccaccgatgaagttgtgtaaggaaatggttgaggccatgggtggtgcagaaagccaatattacacaaggttcaagtcctactgctgcgaagcatacaacattctgaggaagtccagcagtctcattttgaatctattcaagctgatggagcgatc

SEQ ID NO: 3946 - DNA, 203 bp, Zea mays
  Clone ID: LIB3136-004-Q1-K1-C4
ggcggccaacatcaaggtcgagtcctactgtccggcgctcttcgctaagctcctggagaagcgcagtgttgaggatctaatcctctccgttggatctggtggtggcgctgctccagttgctgctgccgccccagctggaggtgctgcatctgctgctgcccctgctgcacaggagaagaaagtttgagcccacggcggagtct

SEQ ID NO: 3947 - DNA, 327 bp, Zea mays
  Clone ID: LIB3136-004-Q1-K1-C6
cactagttgctggtttggctattgcatttgtgtcaaactgggagctatgcctcatcatcgtagcttttataccactcattggcctaaatggatggatgcagatgaagtttattcacggtttgagtgcacacgcagagatgatgtatgttgaggcacgccatgtggctgatgacgcactacgcatcataagatcagcgtcgtgactctcagctgaagagaaggtgacggatctgcaccagaagatacgtgaaggtcctctaagaacaggaatcaggacagggattataagtggaatcggctttggagtttcctttttcttgctatttg

SEQ ID NO: 3948 - DNA, 334 bp, Zea mays
  Clone ID: LIB3136-002-P1-K1-E11
cagaagcagaagccaccgatcggcttgccgcttgcgtgaggcgatcggagcattccatccggaggaggaagacaaccgtctacgcagcaagaacatggcgatgactcccaattgacataataatgtagcatatgaacattcttacttccataaaaattctctatcaaatcactgctaatagctttaaacttattattacatattgccatgattgaagatttattaactatgattgttcaaccatattcttcactgatacttcctcttaaaatttagaaaattattttgcaaacaacaatgatttaaggtaactactttttaaatatttgagaat

SEQ ID NO: 3949 - DNA, 433 bp, Zea mays
  Clone ID: LIB3136-004-Q1-K1-C7
gacgccagggccgattctccgcgtgacttggggcgtcgtcgccgagctttctccggccgagggcggcgcgaccggacaaccagcgtgagcgcgaccggcgacatgactcatatccttcccaaaccccgattatggatctgcgcatagggaaactcttgctctaatccatcttttgcttgtatacgatctcgatctgtttcgttgtttcgattccctgttcctccttccttaacttgcgcgcacgcggcaaccagcgtgaccgcgaccgtgagcgcgcggcggcgcggaagcccaacgccaagaactcccaggacgggctcaccccggagcagcgccgcgagagggacaagaaagctctggaggagaaggcggccaaaaaagcgcagcatgcatcggccggcggcaccgggacctccacggacaacaacaagaa

SEQ ID NO: 3950 - DNA, 443 bp, Zea mays
  Clone ID: LIB3136-004-Q1-K1-C8
gagttgctgtttttaaggatactgaaaaggatcgtagtgacccagactacgatcgaaactacaaaaggtatgttaggagctcagtgcctggcttcaacttgagcccaggtgtttttaactttgttgtgcctcagtttatgcagtatggcattggttatgtgcaatctcctggcatgtccacaaaccagcatactatgtactttggccagcctgatctaacaatagggtcttctagagctgctgtttatcgacattggccaaccccaacaatgatgtatccccattgctatgataatgttagtccaatgatgtctcaggttcctctgtaccagtctttcaaccatgattaggagattctgcttgctggatagttgggaacaattctctgttgaacttgctatgttgtgttgtcctatgttaagtggagttcctttaaattcgag

SEQ ID NO: 3951 - DNA, 393 bp, Zea mays
  Clone ID: LIB3136-004-Q1-K1-C9
aaaaaaagggtttccaaactagcccttataggatggttttttggaagattaaaacatgcctatcgccgcgtgaatttcctacggtttgttataaaagctgtaggaagttaaaaaaccgcaggaagtgtatgattttggtgtagtgaggtcgggtggccactagctggttaagcttggacattggcacgatgggaccttgcccatggttgtctgtcctggcacgcggtgacaccctgactacgatggattgaagcctcagacgacggatgacatacgacgcaacaacgaggccagatgcaacaatgacagttagtcagtcaagtgtgggctcctaacttcgtcgtggagccaccatgtctcaacagaggtgctggattctccatggcacgtggg

SEQ ID NO: 3952 - DNA, 350 bp, Zea mays
  Clone ID: LIB3136-004-Q1-K1-D10
cattcccggccatgtcaagcaaatcgccctaaagttccaggacgggattagggcgctggcagacagtccgattataggggagatacgtggcttggggatgattatggggaccgaattcacaaacaacaagtcaccgactgatctgttccctgccgaatggggggttggtgccatcttcggcgaagagtgccagaagcgcggcatgctggtcagggtcgctgtcgactccatcatgatgttgtcgactctgatcatgacgcccggcgaagtctactagttggtgcgcatctacggggaagccctcaaggccacggatgatagggtggcagccctgcagtccaagaagaact

SEQ ID NO: 3953 - DNA, 419 bp, Zea mays
  Clone ID: LIB3136-004-Q1-K1-D11
ctcaggcaacccagctttggctgcccttgcttgctgctcagatctttgccccctgttcctcctgctactcttctcgcacttcggcgcttgcttcggcatcaactgcgagcgagatggaagcgcaagacgactgcaagtggcgccaggtcccagcgatcggcgactggaacctgtgggacgacatgcccgtcacccagtactttcaggcagggaccttcttcttcgccgcgccgacggcagagaaggacgacgactaggatctcttcaaggtgccccagttccctgccacgccctacagctacaagaagtgcgtcgttagagtgaagggggagaaaggagctgccgtgcctccggcggcgaggaagggaggcaggaggcgccgcgtgaacgagcagcagaagtggaagcccaagggagct

SEQ ID NO: 3954 - DNA, 376 bp, Zea mays
  Clone ID: LIB3136-004-Q1-K1-D12
ctctggtgttcagaagctgctgcttgatcagaacgcgttctctggtgccatacctccggagattgggcggctgcagcagctctccaaggctgaccttagcagcaacaagtttgagggaggtgtgccaccggaggtcgggaaatgccggcttctcacttacttggacatgagccaaaacaacctctctgggaagatacctccggccatctctggaatgcgaatactgaactacctcaacctgtccaggaaccatcttgatggagagatacctccatccattgcaaccatgcagagcttgacggcggtggacttctcgtataacaacttgtctgggcttgtgccaaggactggccagttcagctacttcaatgccaca

SEQ ID NO: 3955 - DNA, 412 bp, Zea mays
  Clone ID: LIB3136-004-Q1-K1-D2
gaagaaactttctccagagcaattagcagcttgctgaaagcacaatatgtgaagaagggagactacgtcactcttgttcagagcggagtgacttcaatctggagagaggaatccactcaccacatccaagtgaggaaagttcaggtctgatgtgccggtgggaattggtcgtctgagaaattttgatagcgccgcctgatgtgttatcatcattatatgtgtaattttactgctttaccaggagattgctacgtcgagttatatgttgtgtcgaattcacgtgtaggctctgaatcttgactgtgttcgttcattttcgcttgtttcacactgaagtgttataagctcaactttactgcttttgttttcttgtgaaacttgagtttagtttcttgttacaaaaggagctagc

SEQ ID NO: 3956 - DNA, 375 bp, Zea mays
  Clone ID: LIB3136-004-Q1-K1-D3
atttccatcttggaaagcatgcattctaattgatatgtgcatggagacgtcaaacctgagaactttcttctggggcagccttcaacgcctcatgaaaagaaactttatcttgtggatcttggattagcaacaaagtggagagatactgctaatgggcagcatgttagttatgatcaacgtcctgatgcctttagaggaacagtcagatatgctagtgtccatgcacatttaggaagaaccgctagcaggagagatgatttggagtcacttgcctatacactagtattccttcaccggggcacgttgccatggcagggatatcagggtgataataaatcatttttggtgtgcaagagaaagatgagtacctcacct

SEQ ID NO: 3957 - DNA, 158 bp, Zea mays
  Clone ID: LIB3136-004-Q1-K1-D4
gtgcacaacgcttcaagtatgtatcccctttctgttcaacaaaaacacgttcttcatggaacgggaggctgtaatccttcttagcatgggacgttggaagcaactataacgttcctatcttgggttttgctacaccgtagccacatacctgttgtgct

SEQ ID NO: 3958 - DNA, 335 bp, Zea mays
  Clone ID: LIB3136-001-P1-K1-A1
cgagttccacctagattgtattgggtctgcattcaatgcaaaaggagcgatgcaatgccctagctgtcggaagattgagaaaggtcgctggctttatgcaagcggacatcgcgcctctgttgatattgatatgggtggctgcgtgaccagtgacaactatgatatcacctccgagcttccttttggatttcaatggtgcccctttagtggattcacccggctagcatccatgtttgaggagcgtgaagctgagcttacttatcacacaactggagatcgctcaagtgctgcaagcagttcacttgtttgcccatatcttgccctgcgtggttttc

SEQ ID NO: 3959 - DNA, 160 bp, Zea mays
  unsure (1)..(160): unsure at all n locations; Clone ID: LIB3136-001-P1-K1-A10
accgtccgaattccccgtcacccacctcccggaccgtcctttccattgtctctacctccaacgacagaaggggnncccgcagccgtttttcctgtcccacgactcccncactggctctatgcgcgccctccttctgtcttctcaacccttcacaataccc

SEQ ID NO: 3960 - DNA, 149 bp, Zea mays
  unsure (1)..(149): unsure at all n locations; Clone ID: LIB3136-001-P1-K1-A11
gtccctgagcgtttgtagtgtaaagtaaatacatagcactttcagagacttttagaacgcatcatttcttggagcaggtggaaaaccctttacaaatgttgtgtnggntataattagtggtatttttcttgttcctttatttgtacata

SEQ ID NO: 3961 - DNA, 354 bp, Zea mays
  Clone ID: LIB3136-001-P1-K1-A12
gcaagtatcaagatgctgggcatcatcccggtgattctgttgatcatccttgtggcacggctgacagaggcatccatcgacatgcttgtaaggtgcagccaccagggcaagattacatcatatgggtggctgatgggcgaggttttcgggcagtgggggagaattgcgctgcaggcctccgtcatcataaacaatgtcggcgtgctaattgtttacatgattatcattggtgatgtattatctggaacaacatcaggcgatgttcatcatcgtggtatattggagggctggtttggagctcatttgtggaattctcgtgccaattgccttcttggcacaactcctttgggggtc

SEQ ID NO: 3962 - DNA, 232 bp, Zea mays
  unsure (1)..(232): unsure at all n locations; Clone ID: LIB3136-001-P1-K1-A2
atcgcaaacgactagctcaccaaacacctcacttcatctcgccatcgcggcacggnggcgccagtccacctcgactcgctgccttcaccacaaatatcgcctcttcgagtctcgccatcacataatcacccccagccactcccctcatctcccatcccctcccttccacttaccctgaatcggcgcgtaaaggatggcgttccggcggtgcaacaacaccttgttcgctctg

SEQ ID NO: 3963 - DNA, 257 bp, Zea mays
  unsure (1)..(257): unsure at all n locations; Clone ID: LIB3136-001-P1-K1-A3
cttgtcgtttgcacggacagcgcgcgcttatgctgaattaccagctcgtccaacaggacgtgctgctgctatagcaatgctcattggtcctaatgctccgatttccttcgagagcaaatatagagcttctcatatggctcatgtttatgacttctacaaacctcatcttgcacgtgaatatccgcntgttgatggtaaattatcccaaacatgctacctgatggctcttgactcatgctacagacagttctgcaaca

SEQ ID NO: 3964 - DNA, 424 bp, Zea mays
  Clone ID: LIB3136-001-P1-K1-A4
gcctcctgcctccctccccctttgcgagcgatcgttaggcgatcgagatggcctcagcctcgcgacgagatcggagcccctcgactccgctgccaccagcgacaccgacgccccctcagataacattccagatttaccatgccccccctatcatatcgttaccaaacctggtcaactcccggtcgagtttcttgaaccctcagctgcccagaagttggtaattggatttgactgtgaaggtgttgatctctgtcgcaatggtgctctctgtattatgcagcttgcattccctgacgctgttcacctagttgatgctattgagggtggaaaagaacttattcaagctttgaagcccgcacttgagtctgatcatatcacccaagttattcatgattgtaaaaggcacagggaggctttgtatttt

SEQ ID NO: 3965 - DNA, 377 bp, Zea mays
  Clone ID: LIB3136-001-P1-K1-A5
cagagcaggaggctgctcctcagcagaagtgtgcttagatacacgacttttgcctagggatacgctggggtggacttttactctccatgggccttattggatttctcttctggaggagccctgcgagtcttacctttggcgttgcacctggccttgccatattggccctggctgtacttagcctcaatgtctggaggagcgggaagtccagcttaccgttcatactggcgcaagcaggcattgccgctgccgtagcatggaagcacggccaggcgtacaccactacgaggaaactgcttccgtggggattctacgtcgcgctgagtgccgcaatgatctgcttttactcctacgttcttcttgccggaggggaatcg

SEQ ID NO: 3966 - DNA, 351 bp, Zea mays
  unsure (1)..(351): unsure at all n locations; Clone ID: LIB3136-001-P1-K1-A6
gagaatacactacactacatggcgaagcagcatcattagcagggcatggcggcagtggcactggtggtgctgctggtgctggcggcggcggcggccgagacggcgtcggcggcttcgtgcaacgccgggcagctgccgcggtgcgcgcctntgatcactgtcggcgcgacgccctccgcgtcgtgctgctccaacctcaaggcgcagcaggggtgcttctgccagttcgtgaagaaccccacctacgggcgctacatcaacagccccaacgcgcgcaaggtcgtcgcctcctgcggcgtcttcgtgccgggctggtagtactagtacgtgtgctgcgcatgcatgtacttg

SEQ ID NO: 3967 - DNA, 385 bp, Zea mays
  unsure (1)..(385): unsure at all n locations; Clone ID: LIB3136-001-P1-K1-A9
accgggtgcgacccacagcgtccgagaaattttntggagggagctttccagtatctgataatccacttctactcatncttcactttcagaaaggtatactctgtacttctgtggtttgctgagctgtgtggaatgctttcactttcttggttatcccagctagggcaatatntgccatattnctcaggcaccttgagaacgttggcaccacatatacagcagcttagcatggagagtaacgggaagggtgtttccattgatggcgcccaactttcctttgagacaggtgaaattgattttggtgaacctggaactaatgggcagcacagcttttatcaattaatccatgagggatgggttattcctttggactttattgggggtc

SEQ ID NO: 3968 - DNA, 298 bp, Zea mays
  unsure (1)..(298): unsure at all n locations; Clone ID: LIB3136-001-P1-K1-B1
actcacaagtcacacagccacacttgaaccgctgctcgcagcggagggagcttgcacgggccgacggacacataacacaagctcgtcgtcgatggcgcggtgggctgcggtgctggcgctggccgcggccacggncatcgccgtggcgtccgtggcgggcggcgacatgagcgcggacaagacggagtgcgcggaccagctggtgggcctggcgccgtgcctgcagtacgtgcaggggcaggcccgcgcgccgncgtccgactgttgcggcggcctgggccaggtgctgtggaagagc

SEQ ID NO: 3969 - DNA, 370 bp, Zea mays
  Clone ID: LIB3136-001-P1-K1-B10
gcttctcctccccctcttaccaagtccttctttggttagggttccttagggttttgtggaggggcgatggcggcggctgatgtggagtaccgttgcttcgtcggcgggcttgcctgggccaccagcaacgagtcgctggagaatgccttcgcctcctacggcgagatcctcgactccaaggtcatcaccgaccgggagacggggaggtctcgcggcttcggcttcgttaccttctcctccgagaactccatgctcgacgctatcgagaacatgaacggcaaggagctcgacggccgtaacatcaccgttaaccaggcccagtcccgtggcggtggcggtggcggccgtggctacggcggccgtcgcggcg

SEQ ID NO: 3970 - DNA, 385 bp, Zea mays
  Clone ID: LIB3136-001-P1-K1-B11
ggatgaggtttgaaggattagaggcgcctgatcagaggtttactggtacaatagttgggggtgaaaatcttgacccactatggcctgattccagttggagatacttgaaggtgcgttgggacgagccttctactatcccgcggccagatagggtctctccttggaagatagagcctgcttcatcgcctcctgttaatccactcgtgcattcttctagagccaaaagacctagacaaaacgttcctccaccttcacttgaatcatctgttctcacaaaagaaggtgcaaccaaggtcgaaatcgattcagctcaaacacaacaccaaaattcggtgttgcaaggtcaggaacagatgaccttgaggaacaacctgactgaaagcgc

SEQ ID NO: 3971 - DNA, 404 bp, Zea mays
  Clone ID: LIB3136-001-P1-K1-B12
ctgaatattcacgaaagtcgtgggctgatattctggattatgttgaatgtgaagaaggaaaagattattcaaatgccttgaagcaactccaaaagtttaagaagtttaaatatagaaaatggttcgacaagagacaatctaaacggcagtgtatcatggatactttgggactcaagtcaaggagctagtgtggtgagagcatctcaatcaccaggtcgggttcgaagcagcatctccattttttagagagaaaggtttgccccgatttctcctcctaggagttctcactcacgtgggactgtgggagcctcgggcactagatcagtcgcctctaaagtcaagaagctagtgtggcgaatctagttttttagagagaaacgtcgtcgcgattcaccaaggaagca

SEQ ID NO: 3972 - DNA, 392 bp, Zea mays
  unsure (1)..(392): unsure at all n locations; Clone ID: LIB3136-001-P1-K1-B2
ccgtcttctctccctccgcatcgtcagatttgctgtctctcgccgagccctagcgccgccgatggtcagcccgtaccagtctggcggatcgacatcncnccgcggcggcaagaacgatggccgaggaggccaagtacctggagacggcgcgggccgaccgctccgtgtggctcatgaagtgccccccgggcggctcccgcgcctggcaggccgcctccgcctccgcctcttcctgcgacgccgctaacgccaaccccgttgtcgccaaagtcgtcctttccctcgacctgctccgcccaaaaaaacgccccgaagagcgcccggaaaagcccacgctccagttcaagatggaagtggcacaaactaacactgggaatacacctaagagctac

SEQ ID NO: 3973 - DNA, 382 bp, Zea mays
  Clone ID: LIB3136-001-P1-K1-B3
atgaaatggattcctgttaaggagaaattggttgttctcaagaaaaatacagaaccttatgtgacagaaggtatcgacaagatcagtggagttttatgagtcatcaagggatgctgtgacacctcacgttgtcaaagttaaagagtttgctcatccctactaccaggaagccaagaagttttctaagccttacattgatcaaattgctgagatcactaagccacatgttgagaaagttagaactactctgaagccatacactaagagagcagttcatgcgtatgggtcatttcttgcgtctgcaaccacataccatcgacaggctcaggcgaccatcatggactacctccatcagcatggggtacccaagtcatttgcaacg

SEQ ID NO: 3974 - DNA, 306 bp, Zea mays
  Clone ID: LIB3136-001-P1-K1-B4
gagagagggaggagcggcaccttagcctggatgggtgatttcgcttggcgcactagggagtggagagcgatagagttggaaggtggaatcagaaatccacggcgaatacagggagtaggggggatctggagctcctgaggagtagtagtacgtaggagctgtaattgtaacggttggcataggggatcctctccatctgttcttgagctggaagactcccatcttttgagccgcggagctgtacaaacttgcatctcgaggcccttcaagagaaaccgtttctcgctgctaccctcctgcattgct

SEQ ID NO: 3975 - DNA, 321 bp, Zea mays
  unsure (1)..(321): unsure at all n locations; Clone ID: LIB3136-001-P1-K1-B5
ccgacgcgtccgatttcctgtttctaatgctcgtttgaaggcttcataaaggctcgaagcagcctacccaacgacgaangagttgctcttgccggtcctcctggctcaaaaactgtgaaacaagcatcacaacagcttttacctttgtgtgcaaaagcaatgcaagaaaacaacgcagagctcaccagggaggctcgtgatgttttcatttggtgcttaactcaaaatgcagagtcgtacaagcagtgggaaagaatttatcttgaaaatattgaagccagtgttgctgtcctgagcaaagttgtgattgattggagggtt

SEQ ID NO: 3976 - DNA, 355 bp, Zea mays
  unsure (1)..(355): unsure at all n locations; Clone ID: LIB3136-001-P1-K1-B6
cgactccagcactaacacttgattgatcattgggtgctagctagctgaatcacaatggatggctagcaagtttcgtccgtccagcaggcacnacacaacggtgacgacgacgaacgcgggcgctcctgtgtggaacgacaacgaggcgctgactgtggggcctcgcggtcccatcctgctggaggactaccacctgatcgagaaggtggcgcacttcgcgcgcgagcgcatcccggagcgcgtggtgcacgcgcgcggggcctccgccaagggcttcttcgagtgcacccacgacgtgacgtcgctgacgtgcgccgacttnctgcgcgcgcccggcgtgcggacgcccgtgatc

SEQ ID NO: 3977 - DNA, 441 bp, Zea mays
  Clone ID: LIB3136-001-P1-K1-B7
atgaaaggaaacgcatgattgaattgctatgtcttgagaaagaggaggagaaaagagcgagagaaaaaatccgccagaaattagaagaagataaggctgaaaggagaaggaaactaggattgccaccagaagacccagcagctgccaaaccaagtgcaccacctcctgttgaagagaagaagagtgcattacctgtcaggccagccacaaaggcagagaggatgagggactgtctaagaaatctcaagcaacagaataaggatgatgatgccaaagtgaagagggcattccaaacactgcttacttacattggaaacgttgctaaaaatcctgacgaggagaaatttagaaagatcaggctgacgaatgcaacatttcaggagagggttggaaatctgcatgggggcataaagttcctggagctctgcggatttgaaaaac

SEQ ID NO: 3978 - DNA, 371 bp, Zea mays
  Clone ID: LIB3136-001-P1-K1-B8
ctaccccacacagaagcggcggcggcggagcttacgcaggcgaaggcgagggtgtgagggaaggagcaccagccatggtgcacgtcaacttctaccgcaactatggtaagacgttcaagaaaccaaggcgtccttatgagaaggagcgtcttgatgctgaactgaagctggttggtgagtatgggctgaggtgcaagcgtgagctttggagggtccagtatgcactgagcaggatccgtaatgctgcaaggcacttgctcacccttgacgagaagaacccccgtcgtatctttgagggtgaggcacttcttcgccgcatgaaccgctatgggctgcttgctgagggtcagaacaagcttgattatgttctt

SEQ ID NO: 3979 - DNA, 441 bp, Zea mays
  Clone ID: LIB3136-001-P1-K1-B9
cttttacattgataagatgatggaggggggttggatcctgaggcactgagacgttgcatgagcttcggattttcagataaacagtctgatgctttcattgggcaatatggcaatggtttcaagactagtacgatgcggcttggagcagatgtgattgtttttacacaaaaccaaaataactgggtgccaagtagaagtatcggccttctttcttacacatttttgatggaaacaggttgcgatgatgtgctggtgccaacggtagactatcagtatgatctaacaacaacttcatatgttcagatgttgcgtcatgatcagaagctcttctcttctaatttggcaatccttctcaaatggtcacctttttctactgaagctgagttgcttaaacaatttgatgatatgggagatcatggaacaaaaataattgtattcaac

SEQ ID NO: 3980 - DNA, 268 bp, Zea mays
  unsure (1)..(268): unsure at all n locations; Clone ID: LIB3136-001-P1-K1-C10
ccgaaccccgacgaccctttggtccctgagttagctcacatgtacaagacggaccggcacagctacgagaacaccgcgaggacgctggacccagaggtatgccatgtagtattttctctacctggcctttggggtcgctgctgccgggacctggacgngcctccatgtattcgttctatccttcctgtataatgatgaaccgaattgggtttgcagtacagtgccgcgtgtggtgctgaatgcataaagctgctcgattgtgtcactt

SEQ ID NO: 3981 - DNA, 405 bp, Zea mays
  unsure (1)..(405): unsure at all n locations; Clone ID: LIB3136-001-P1-K1-C11
ccaaattccaatcccaccccgccccctttcattaactctagtatcaaccaaccgtccagcgaagagcaggagtcgcatcccagatcccccgcgcatcagagacaggcagggagggaaccgagatccgtccgtccgtgtcgatggagtcaacggtggagcggataagctcgtcggtgcagtcctgggtgaaggaccacgagctcgcagccatcggaggcgtgtgggctgcggcggtgggcacttcggtggcgtacagccggaggaaggcgccgcagcggggcacgggcctgcgcctcatccacgccaggatgcacgcgcaggcgctcacgctcgccgtnctcgggggcgcccgcctcttccactactacggcgacggcgggcgcaggaagagggccgacgacatcg

SEQ ID NO: 3982 - DNA, 420 bp, Zea mays
  Clone ID: LIB3136-001-P1-K1-C12
cgccgagctcggcctctactcctccctatgctcgccttgctccgactaggtccatccatggggcttgcctgcgatgcccggcgtcctgtctactctgctcgcccgcgcctgctgcttgcctgtgctccaactcgtcggtcgcggtcttgccttggtttatgctgcagctcgccatcgaatcgcctgctcctctgtccgcccatggccactgcactgaactcctccctgctgtctgtgatgcacacgtgatggacgcgatgaggtcgctgcgtgtgtttgtgtccgagcccacccggccgcaacctcgctttgctcctcgcgttgctgctcactgagtctttccccagtccacactctctccctgcctgccataacgtcatttcgcgtcgagccttgctgccaatcgcggagttccctact

SEQ ID NO: 3983 - DNA, 383 bp, Zea mays
  unsure (1)..(383): unsure at all n locations; Clone ID: LIB3136-001-P1-K1-C2
cgccatcatcctgcacgccaccagcgacgaacacgcacgcgacgcgacgcagccttgtcacgccaggacaaatccagcgctccccaaagcagaaagaccgcgacccaaagcaagctcaagccgctccgctcctccagtctccagtctccaccgcccgccaaccccgagatatacctcccttcctctcgaagcttcgtctgcagacgaagtcgccggctcttccctcggcgctggtgccggtgggttgcctgtggcggtgggtgggtggccccgtcgtgtgnntnctgggatgcccgccgngacggcgaccgcaggccggcttcgcgtgccgctggcaaaagccggccaccactcgccctgctcgagccggcgccaccccgact

SEQ ID NO: 3984 - DNA, 193 bp, Zea mays
  Clone ID: LIB3136-001-P1-K1-C3
ctcattccccttccacctctctctttctttccacttctcgccctctctctcttgcgcgcgccggaggacatccctccacgggcgcgcggcgcgggagcacccaccgacttatcgccggtggggcggggcgggggcgatctgatgccggcgcggcggtgatggcagcgccgtccggcggtgggggcggcggttc

SEQ ID NO: 3985 - DNA, 362 bp, Zea mays
  unsure (1)..(362): unsure at all n locations; Clone ID: LIB3136-001-P1-K1-C4
gaccgcgcgtgcgacccgagtacccgacncgctagctagttctattgctgcgcaccccacatctccaggagggacgcgggcgttcatctaactacactgcgcgcaatggccaccacggcgaccgaggcggcgccggcgcaggagcagcaggccaacggcaacggcgagcagaagacgcggcactccgaggtcggccacaagagcctgctcaagagcgacgacctctaccagtacatcctggacacgagcgtgtacccgcgggagccggagagcatgaaggagctccgcgagatcaccgccaagcacccatggaacctgatgacgacctccgccgacgaggggcacgttctgaacatgctcat

SEQ ID NO: 3986 - DNA, 274 bp, Zea mays
  unsure (1)..(274): unsure at all n locations; Clone ID: LIB3136-001-P1-K1-C5
accggnccgacccgacgcgtccgccacaggataacccttgcgcctggtataccctgcttgtcatcacaaggacacaaatcagcatcgccccgcaacttgaacactgctgctgcacgtgctgtacctttggcggtgtggcatctggtttggacgtggatggctcgatgctatctgtgatgcttggcgtaagtgtgattggtgacagacatgcatgtttgacgacatcaagctcttgctcattgagagacctgattgaaagggttagccctctatg

SEQ ID NO: 3987 - DNA, 401 bp, Zea mays
  unsure (1)..(401): unsure at all n locations; Clone ID: LIB3136-001-P1-K1-C6
gaccgcgcgtccggtcctcctcccaacctcctccaagttgcctcgttctctgcttcttcggttttcaggagcggccgccattgctgctggaaaagcagaccattgngactccctcgtgcgttttccaaatcaggttgatggcgatggagggaccagttttatgccgccctgcaatgcaagccaaatcgcctgctgctgcgctggtcaacaactccctgaccagattcgggcagcttgggaccatttcaaaatacaggaacgtttcaagattcatttctcccatctctcagccatctacgaagaacataggtccatgctgtagcttcagctcgtcttctgatggcaatggatacatggctggaaactttagcgacagtgatgaagattatgttaattctact

SEQ ID NO: 3988 - DNA, 428 bp, Zea mays
  Clone ID: LIB3136-001-P1-K1-C7
ggccagaacggcaacgaaggcagcctgtcgttcgcctgcaactccgggctctacgcctgcgggaacatcgcgttcctcacaaccttcggcaacggacagaccccagtcctcaacctcgccggacactgcgaccccggctctggcggctgcaccggccagagcagcgacatccagacctgccagtcgctgggcatcaaggtgctcctctccatcggcggcgccatcggcagctacggcctctcctccaccgacgacgccaacagcgtggccgactacctgtgggacaacttcctgggcggcagcggctcgtcccgcccgctcggcgccgccgtgctcgacggcatcgacttcgacatcgagaaccgcccgtcggcgcactacgacgacctggcgaacgcgctcaagggcaaggggagcgtgctggtgac

SEQ ID NO: 3989 - DNA, 289 bp, Zea mays
  Clone ID: LIB3136-001-P1-K1-C8
gtgctgtagcactctgtctagtttccaggaatttctggaaggcaagtgtaatctcgttggaagctgtatcttatctgtcaccaatatagaattggtcatggcctatcagcaatgccttgtatgctcttaccattcagcacattttgtactgtactgatgagccacggcccacgggtggtgttgttgggttcaatctcatgagatgatttattcatcctgaagcttttgcaggtctatggggttaggtttgctgttatgtttttcaagacttccaatcgatcccgttgag

SEQ ID NO: 3990 - DNA, 400 bp, Zea mays
  unsure (1)..(400): unsure at all n locations; Clone ID: LIB3136-001-P1-K1-C9
cgcagagatacggcgtcttcgtactcgtcctacctctcgcggnctcaaaacctttcccccttctcgccaattccttccgcgcggccggcgctccactccgtacgatcgacanctcatgagggagtgcactttccgatccacaaatcggccaggccggtatccaggtncggaaaccgcgtgctgggatgctgtacctgccttgagcataggcacttcaggctgacggtcagatgccccggtgacanagaccattgggggacgggtgatgatgctttcaacanccttcttcagtgagactggtgctgggaagcacgtgccccgtgctgtttttgttgaccttggacccactgtcatcgatgaggtgagaactggcacctaccgccagctctttcaccctgag

SEQ ID NO: 3991 - DNA, 192 bp, Zea mays
  unsure (1)..(192): unsure at all n locations; Clone ID: LIB3136-001-P1-K1-D1
agctctagcaaagcacttgccatctactgaccgccgcattccaaacagcccgacganctagcatagcggcaggcacgtcctccaggaacatggcccgcacgcagcagttggcagtagtggcgacagccgtggtggccttggtgctgctggcggcggcgactgtttatgcggtcattagctgcgggcaggtgg

SEQ ID NO: 3992 - DNA, 284 bp, Zea mays
  unsure (1)..(284): unsure at all n locations; Clone ID: LIB3136-001-P1-K1-D10
accgggnccgagcccacgccgtcccgcgagacgagttctctttgataaccttagnccaattatagtatccatcccactcctngnngccagccggtntaaccggcnncctatcngttcatacgctgtgtgcgtcgttggaccttcgttgacctctttactggaaaagatanntgcccctcactttcccgtttacacgtganntggaacgtctccaaaccacgtctcttactgnnatggccagcccacgtcttcaactactcgtnngcttcacgtttaaaaaagaa

SEQ ID NO: 3993 - DNA, 266 bp, Zea mays
  unsure (1)..(266): unsure at all n locations; Clone ID: LIB3136-001-P1-K1-D11
gatcttntttaaggatggcaattatgngcagctgcaggcttcttcaagtccttgacagggaggagattggcaaggagattgaggagaanaaggcagaactggagcccaaggttgcggaggcttatgaagcatctcctcctgaggtcaaggctctgttcaaggataagaagccagtcaagatcagcaagaagaactcgactgcagttaccaagttcctcgatgagctggctaagattgacttccctggagccaaggtggtgagcgag

SEQ ID NO: 3994 - DNA, 392 bp, Zea mays
  Clone ID: LIB3136-001-P1-K1-D12
gccgtgcctggtgtggtggctcctgaccaaaacggagtccctcgccgccgccgcttcccggggtccgccaaatccggagccaatgccgccgtcccctcccaccccggcggcacccaaaactatcgccgacttcttcgcgcgccccgccaagcgcctgcgcgctgccccggccgcctccctctcctccaactcctctccctcctcgctgtcgccggagcagcgccgtcgcgccgacaccaacctggcgctcgcccgcgcgcggcgcaacctccgcctcgccgagtccaaagcgcaagcatcggggggcgcaccgaagctggaggagctcctggtggaagagacgtgggcggaagccctctcgggtgagctgcgcaagtcatacgcgctcgagc

SEQ ID NO: 3995 - DNA, 369 bp, Zea mays
  Clone ID: LIB3136-001-P1-K1-D3
caagaaaccaccgccgagcccaaccgcacaagcgcgcgaggcaggagagagagagagagaggcggggagcaaaacaatggaggggaaagaggaggacgtgcgcctgggcgccaacaagttctcggagcgccagcccatcgggacggcggcgcatggcgccgctgacgacaaggactacaaggagcccccgccggcgccgctgttcgagcccggggagctcaagtcctggtccttctaccgcgcgggcatcgccgagttcgtcgccaccttcctctttctctacatcaccatctctaccgtcatgggcgtttccaagtccacctttcagtgcgccaccgtcggcatccatggcattgtctggttctttgg

SEQ ID NO: 3996 - DNA, 210 bp, Zea mays
  unsure (1)..(210): unsure at all n locations; Clone ID: LIB3136-001-P1-K1-D4
gaataangancgacccacgcgtcgggagcgcaagccgataatgtgttcgtgccatcatcaccagccagttccaggccctcgtgcccgtctcgcttctggagatcctgtgcagccactcctccgacgaggtgtacctcggccagcgcgacaccaaggagtggacgtcggacgccaaggcgcaagatgcgttcaagcggctcgcagcgcgac

SEQ ID NO: 3997 - DNA, 345 bp, Zea mays
  Clone ID: LIB3136-001-P1-K1-D5
tttttattatttttttatttttctttttttttcttttttttcactttttttttttattttaattttttttatttttttttcatttttattatttttctatttttatttttttatttttttttttttattttttttttattttcttttaaatcttttttttttttttttattttttttttttttttttttttttatttttttatttttttttatttcttttattattttttttttttctttattttttacatttaattaatattatctttatcatttttttttttatcttatattttttcattttttttttttttcttttattttttattctttataatttttttt

SEQ ID NO: 3998 - DNA, 248 bp, Zea mays
  unsure (1)..(248): unsure at all n locations; Clone ID: LIB3136-001-P1-K1-D6
gttctgtcagcantttaacacgtttcagctgcatcnataatttgatgaagggaaaaagagctccgcctcgcgtctagcacaacatagtgcaaggagaangaaagttcaaccacaacctgttgtgaatgggaattccatgagtgaaaatcaatctctaagtagcaccttaatccttctgttaaaacaactttccaagctagagtgtacagacatagtcattctaaatgtgtgctcgtatggatagtaac

SEQ ID NO: 3999 - DNA, 359 bp, Zea mays
  Clone ID: LIB3136-001-P1-K1-E1
ccgggccgacccacgcagtccgctgctggttacatcgagcaagtcctcccagtgtcctttggcagttctcttggtcttctctttgatggaaaggacattgaaccagcatgggtcctcaaggaattcttgaagttcattattttgatcaactccgtctgtggcattcttgcattttgctttgctattggactctactacgtcactggaaaggagagcttccttgtcacaccactttctgggtttcactcttgccttgctggctttcttgttgccttgaagcagctcttaccaaaccttgagcttcctatgtgttttttctggaaaataaaggcatagtggatgccattctttgttgtatg

SEQ ID NO: 4000 - DNA, 322 bp, Zea mays
  Clone ID: LIB3136-001-P1-K1-E11
cgagagccacacggataaaccctagctgcgctgagccccccggcgatgtcggtggccaggcagtccggcgagctccttgcgtgcgccgtcgcacttcggcgggcgcccttggctgtgtctgtggtgtcggtgcggatgagggctaggggcgccgtggctgtgcgggcggaggcaacggccgagggggtagggaaagaggggaagaacgcggcggggaagaagaagccggcgagcgggatcaccaagccgaagcccatctctacagagctgcgggagttcgtcggcggcgcggcggagctgccccggactgaggccatcaagc

SEQ ID NO: 4001 - DNA, 87 bp, Zea mays
  Clone ID: LIB3136-001-P1-K1-E12
ccgcaagcaagagagtgaattcgcttttagttcttaaggttgtgttgtgcgtgttggattcgattgattaaaatcgtagtttcgtac

SEQ ID NO: 4002 - DNA, 309 bp, Zea mays
  Clone ID: LIB3136-001-P1-K1-E3
atccgttatgtatctttgctcgcatctggcctcaatcccctcaggcctcagctcaccaccgctagccaaccgacagaaagagggacgaatggccagctctcagtgctgcgataacccgccggccctgaacccggcctgcggggagggcaaggtcgtcgacagcttcggcgggctcaaggcctacgtcgccggccccgaggactccaaggccgccgtcgtcctcgtcgccgacgtcttcggattcgaagcgccgattatgaggaagatagccgacaaggttgcttcgtcagggtactttgttgtggtacc

SEQ ID NO: 4003 - DNA, 388 bp, Zea mays
  unsure (1)..(388): unsure at all n locations; Clone ID: LIB3136-001-P1-K1-E4
attctgtcaatgttgaaagggcttggctaaggttccattctgcctacacagnaaatgcattcgatgagggagggcatannttaccactgctccatgnctctggaaggggtgcctcggtgaaaatgaaattggtgcaagagcagaaaatcttttggatacactagccaataatgaaaataatggtgatggcttccttggagagaagattcaagagctgcggcacgctacaagggatgagatgcgtcgccgtgctcttgagaaaagagtgatgctacttcagggaatgggaatgcgccaagaatttgcttctgatggaggtagacgtattgttgtatctcagcctacaattgaagcgttggatgatgtggaagaagaggaggatggtgta

SEQ ID NO: 4004 - DNA, 345 bp, Zea mays
  unsure (1)..(345): unsure at all n locations; Clone ID: LIB3136-001-P1-K1-E5
gaccacgcgtccgaggaggtggcncctaaggtggagtacccgcatcctgaatgccagagctgcccaagcctgactgcncccgtaccctacggtgcgcgggactccctaatcctgatgagctaccgccacatccggtcctgccggagctgccaaagcccgaggtgccagtgcaccccgccgtgccggatctgccgaagcccgagctttctcctcaccccaccgtgcctgagctgccgaagcccgaggtgcccgcgcaccccgccgtgccggagctgtcgaaacccgagctatctccttaccccaccgtgcctgagctaccaaaacccgaggtgccgcatctttcaa

SEQ ID NO: 4005 - DNA, 442 bp, Zea mays
  Clone ID: LIB3136-001-P1-K1-E6
gcgggagacaacgattgcccttcctactaccactttgttagtccaaccacagccgtcggaggagaacggagccacagcttctcgaccaacgggaacaccatcacctttgggacgcagcatgccctggaccctctgaccactgtgaaggcacgcttcaacaactacggcatggcaagtgcactgatccaacacgagtggaggcccaagtcactggtcaccatctccacggaggtggacaccaaggccatcgagaagagctctaaggttgggctctccctggtcctcaagccttgaggtcaccagcttctgcttttgggatgttaggtttatttttattttttatcagcagctgaagtccagtaaacaagcttggactaaacttgtcaactttggtgcccatcccacaaactcaattcgttgcctgttaccctatacttaacta

SEQ ID NO: 4006 - DNA, 443 bp, Zea mays
  Clone ID: LIB3136-001-P1-K1-E7
gaccgacgcatgcgttgcatgttacagtctaatcatgtcatcaaagtatactgtgtcaggtctcttggacttctctggcgtggaaaggacattgaacctatcttcatgctgcagtcttcaatagggcaactcaccattacgtggccccaaaaccgttgggttcagaacaagctcatggaacgtccagattagggtcaggcaccaataccattgccttgatcgtatcgtatctgtgattctatactgagggcacatccataagctaaactgctttcaagtcagacacccagctaagtggtgatatgcagactgcaagtgcctgcaaaaggccttctacctctgttcatggaaaccgaacagtgaaataaccaaactgcatgtgttgttgcatcaatctacttgtcccccttctcttttgatgctttcctaagacttaatttgac

SEQ ID NO: 4007 - DNA, 387 bp, Zea mays
  unsure (1)..(387): unsure at all n locations; Clone ID: LIB3136-001-P1-K1-E8
gaatnnaangggtcgaccgacgcgatgcggcttgccatcaacaatcatctttgaagcgcaacctctaccaccatcaangaactataggcactctggcggccgctgccagnagcagagactcggttgactacaacactgtacanaggaagtaccgcgacaccacctctgaacggcgcagtggagcagatgtacaacgagatggcctcccgccaccgcgtgaggtccccctgcatacagatcatcaagacagcgacggtccacttcaagctgtgcaagagggacaacaccaagcagttccacaactccgagatcaagttcccgcttgtgtaccgcaaggtcaggccgcctaccaggaagctccggaccactttcaaagctttcaggccc

SEQ ID NO: 4008 - DNA, 346 bp, Zea mays
  unsure (1)..(346): unsure at all n locations; Clone ID: LIB3136-001-P1-K1-E9
gtcgcgccnccgccttcgtcgaaactctcatctctctctcgatctcagccatggcgcaccgccagcattcccaggacgcggcgagagctcttcaaccgctggaccttctacgatgtccacgtgaacgatatctcgctgaacgactacctggctgtgactgcggcgaagcacgcgacattcctgccgcactccgcggggcgctactccaagaagcggttccgcaaggcgcattgcgccatcgtctagcgccttactcaactcgctcatgatgcacggtcgcatcaacggctataaggttatggccttccccttgaggaagcacaccctgtaaatcaattcacccttc

SEQ ID NO: 4009 - DNA, 336 bp, Zea mays
  Clone ID: LIB3136-001-P1-K1-F10
aggagatcgatcttcatttgctttgcttgtttttgtttttttataaaggaagcatttttagtaataaccaagggcaataagtggatttgctttgcttgtgtgtacatcttacaggacaggatgggatgggatccatacatccatgcatcgtctctgcaggtttctgccgtctttccgtgatctgtggaagacattggtgtgcactgttgtggacttggactaaacgagatgcatgctagcttttctggtgcgtgtgggaatctgtggaatcacaacgacgcaactttcgttcggttcgtgtcgtgcaacagcgaaacgtctttcgaactccctgtt

SEQ ID NO: 4010 - DNA, 205 bp, Zea mays
  unsure (1)..(205): unsure at all n locations; Clone ID: LIB3136-001-P1-K1-F11
cagtgatccacactaacgaacgaactcttgtttccatcacgagctagctgaggtcgaccagcccggctgtgctgaacagcaggaagacccctcacgtggtggccgtgctggtggtggtggcgctgctggcttcgtccgcgtcggcgagcatcacctgcgggcaggtggggtcgtcgntggtgccttgcatcccttacgcgtcctt

SEQ ID NO: 4011 - DNA, 350 bp, Zea mays
  unsure (1)..(350): unsure at all n locations; Clone ID: LIB3136-001-P1-K1-F3
cgaattaccggccgacccacgcgtgcgcccggtcagccacancaagtgcccagaaggctagatccagaaccaagcagcccgtgcaacctgataggatcccctgccacgcacctccgtccgccgcgccatggaatcgaggaggagggccgtgcccaccgtgacggcggttgcggcggcgacgctgctggtgacgatgatgatgtcgtcgggcgtgggcggcgacttcgctgcggaccgggctgagtgctcggagcagttggcggggctggcgacgtgcctgacgtacgtgcaggagcaggcgacggcgacggcgccgacgcccgactgctgcgcgggcctgaaggcggtgc

SEQ ID NO: 4012 - DNA, 387 bp, Zea mays
  unsure (1)..(387): unsure at all n locations; Clone ID: LIB3136-001-P1-K1-F4
gcgctttactactttcattgntgaaagaatatcttatctgaaacttggaaatggaacatcacttgttagatttacaagtataatatcatatttgcctgcatcatttgggaggacagttgcgcaggcatttcaagatgggaattatgttggacttctcacaatcatattgtcattcttactattagtccttgggattgtctatgttcaagaagctgagcgcaaaatacccctcaattatgcttctcgttacagcagtcgaactggggaacttcagcgatctgcatatttaccatttaaggtcaacagttctggagtcatgcctatcatattttctacatcttcactggctttgcctggtactttggcacggctttctggcttagactt

SEQ ID NO: 4013 - DNA, 336 bp, Zea mays
  Clone ID: LIB3136-001-P1-K1-F5
cgaaaaatggagctcccgttggagccattcttaattaaattaaaggcccactatatcctacagttgcgagttcatagtcagggtgaagagttgactgtaaactttggaaaggaaccattctgttttgacattgagggttatattcttgaagagaaaatgaagcagcaatcggtgtctgataaattgaacttggagacggacatcagtcattggattgtccgctcatatctcctacattatggataccaagatacattaaatgcttttgatatggcaaatgcaactgacccccccaccaatcgccaaaatggtcatgcagaacctcccgaaacgtat

SEQ ID NO: 4014 - DNA, 284 bp, Zea mays
  Clone ID: LIB3136-001-P1-K1-F6
gccgccgcctcttccgtctctctcatctccgttcttctgcaatctcacccctccctctaaacggcgaggccgcagtagcgccgctacggtttgctcaggattcgaaccccaccttctgattgctccgaatccgaggcggcggttgcgcagaagtttgcggcatggcggggtacccggaggacaaccagcacgcgttgaacgggtacgacgatgaggaggtcgacgaggaggggcaccccgggcggcggggaggtcgggatggggcgtctgggtacggcgatgct

SEQ ID NO: 4015 - DNA, 445 bp, Zea mays
  unsure (1)..(445): unsure at all n locations; Clone ID: LIB3136-001-P1-K1-F8
gcgtacacatacacaagcacaatcgcactctagctatggcttctgaggttgaccgccctaacgacggcgagctactaaaggcacaagccgacatatggcggctcagcctctcctacctcacgcccctgtcactgaggtgcgccgtggagcttggcatccccacggcgatctaccgccatggcggggctgcctcagccgctgagctggtcacggcgctgtctctcccctccactaagctgccgttcctccgccgcctgctgcggctcctcgccgcgtcgggcgtgttcaccgtcgacaagcagagcacggaggaagagcggtaccgcatcagccccgtgtcctacctcctggtggacggcatccctcacgaggaccacatgaaccacaccgntctggtgctcacctgcacctcgacgcgctacatcgaggcggggatagggctggc

SEQ ID NO: 4016 - DNA, 347 bp, Zea mays
  unsure (1)..(347): unsure at all n locations; Clone ID: LIB3136-001-P1-K1-F9
ccacaaanaaaagtcaggtgttctcaactgctgctgacaaccagacccaagtgcgtatccggcccttgcaaggtgagcgtgaaatggctacagacaacaagctccttggtgaatttgacctcgtgggcattccacctgccccaagaggcttgcctcagattgaggttacattcgacatcgatgccaatggaattgtgaccgtctcagccaaagataaggctaccgggaaggagcagaacatcaccatacgatcctcgggtgggctgtcagaggctgacattcaaaagaaggtgcaagaagcttatctgcatgcccagaaggaccaggaacggaaagctctcattgac

SEQ ID NO: 4017 - DNA, 296 bp, Zea mays
  unsure (1)..(296): unsure at all n locations; Clone ID: LIB3136-001-P1-K1-G10
ccaggaagctgacatattatcagatgtatttttcctcattgaaaggctcaaccaacgcagctccttttttaatgctgatgacgaccattangacnacnagtgaagtttagtgccatcgaagtagtgctatctcaatccagccatcagcaattgcgtactgtcttatgcggggacctgtagtactgcaataagcatttttgttttaaagttttgcgaggtgaacataactgctcctgttagtttccagcttgagctcttaatgtttactctttacattgaaatgctgtcttttggac

SEQ ID NO: 4018 - DNA, 310 bp, Zea mays
  unsure (1)..(310): unsure at all n locations; Clone ID: LIB3136-001-P1-K1-G11
cccgccgaccgacgcgtacgcgtacgcctnntcttattctatctcangtagncctcacctctcatcctctccgtctctcgccccttcttctacatccaaagccgcncgtaaacagtaacccacatctcctttcctcgccgcggccacggcgccgactgagcgaggtcttcatctgcgcttcaccagcgaccattatccactacgtaggacatcatcccatcatgtccagcgcggcggtgaacgggctttcccgctccgaccgctgcatcatcccccacatcatcacctacccctttcaaacccttaacac

SEQ ID NO: 4019 - DNA, 176 bp, Zea mays
  unsure (1)..(176): unsure at all n locations; Clone ID: LIB3136-001-P1-K1-G12
aaaaccgggccgaccgcacgcgtacgattcttttgaaaaccttgtcactgagttcttttcatcgacgatggaanncntatccccgcacatgtatacttttgttcgtgggtcaaaacaaacttgnntgcccatcgnattgtcatgcntgctgagatggactgctgtcatgcaactga

SEQ ID NO: 4020 - DNA, 393 bp, Zea mays
  Clone ID: LIB3136-001-P1-K1-G2
ctgagcagcggtgtcctgagtccgtgaccgtgttctctcccccgcgcttcccttcaacgccggctccctaaagatccgccgctggtctgccctctgctcgtcgattcggcgcctcctctccttcacgcgcccacgctgccgtcgcctcctcctcactgtcgtccatgccgctgtagccgcctacggccatggccgctggagccagcgactatttgacggtggagtaccactccagagagctcccctctttcctctccgacgacgagggagccaccgccggcagcggcgtcctcgtatgcagaacagcagaggacgctcgctcgctctgcgcgcatcgaaccaaaaaccacacctcggcggcagctatataaaagccttcacctgacccgggcg

SEQ ID NO: 4021 - DNA, 360 bp, Zea mays
  Clone ID: LIB3136-001-P1-K1-G3
gcgccttagtaaggtccgattattcaccttgatgtattgtcctatattggatgcaatatgtgacagatgaagacaaaacttgtatatgagtggaagtgacattctttaccaaggtggtactgttgaaaagatggtcttcatagtgagagggaagctggaaagcatcagtgcagatggcagcaaggctccattacatgatggagatgtatgtggagaggagctcctcacgtggtacttggaacactcttcagcgaacagagatggtgggaaaattaaattccaaggtatgcggttggttgctatacgtacagtaagatgtttaacaaatgttgaagcttttgtactcaaaacaagtgatct

SEQ ID NO: 4022 - DNA, 387 bp, Zea mays
  unsure (1)..(387): unsure at all n locations; Clone ID: LIB3136-001-P1-K1-G5
gaccgacgcgtccggccggaagcgagcgnagaccgatgggagagtgtggtgaagaagcaacgagacgcagcgagcaggcgaaagcataccagagcaccaagcatagggacgcgcgcgcttctccagttctccctccctgccctgcaaggcggctgcaactgttccagctagcccctctcccagcctctgcgtcgtagacgtggtagtagcagccgcagcagcagaagcggcggcgagcatgctcttggcacccctccccggcgccgggcggatctgccggagggcggcggccggggcgcttggagcgcggcgctaaccgcgttcgaaggacctcgggatctgacgccgcgcctnccctaatcgatcgactccatcggtggcggcggc

SEQ ID NO: 4023 - DNA, 464 bp, Zea mays
  Clone ID: LIB3136-001-P1-K1-G7
ccggggcgaccgacgcgtccggtggggaaggaccctacctcacgtccctgatcccatccggcggccaaggggagttacacgctggccggcagtcggccaggcgccgccaaccgcctcagccccaacagtcgcaccgccgccgccgaggcaaactcgaagccacccccgccgccgcagccacagccgcgccgagcttgagccgtcgttgctccgctgaatcgcccccatcgtctctcctgaagagagaggacatttattgagacagcatgcctaagataaagacaagtcgtgtcaagtatcctgaaggatgggagcttattgaaccaaccatccgtgagttggatgccaaaatgagagaagctgaaaatgatccacatgatggaaaagaaaagtgtgaagctctcttgcctaattttcgtatttctcatcaaaggagccgctacatatatgatccttactacaga

SEQ ID NO: 4024 - DNA, 294 bp, Zea mays
  Clone ID: LIB3136-001-P1-K1-G8
ggctttgcacttcctatgttttgcttttttctgcataatactacagaagctaagagccacgcaaccactaataactgcaagatacaatgaatatggcgaggttgaaggacgaggaataagaatggcaaaaagagtagtccgtgctctgggtttgatttttggatgtgtgttcactgcatccctggcttatacagcagctagtaacatggttgagctttcattgcagtatactccccgtatgttttactactatcaggagcttattgttactgtggctgtcttcgttcttttgta

SEQ ID NO: 4025 - DNA, 336 bp, Zea mays
  unsure (1)..(336): unsure at all n locations; Clone ID: LIB3136-001-P1-K1-G9
gcgacttaatactcaccaactattaccgacactttatttttataacaacacaaaggtcatccccttcgctggtttaataagacacctggcccggaaaccttacaaccataacaaagagctaacctcttgccctgcaaagcaacaagctaacgcgaccaacngtgtgcagccttcaacatgcaccacatcacatgacagatcatcccgtaacgccacatcaaaactcgtcttttgctctgacggtaaccgaacctaaacggcacctctaaaggcagcatatgagcccaagaaagaacacccaaaattcgcagcattcacaggaaagaaatactcact

SEQ ID NO: 4026 - DNA, 396 bp, Zea mays
  unsure (1)..(396): unsure at all n locations; Clone ID: LIB3136-001-P1-K1-H10
cggacgcctggngtcgactactgggctaccttcgcctccaccctccgcctggtgtccgtcggcgtcgactagcgcacaccaggacntattgctcgtgatttgtgtaactacggagcaagctgcatacagcacaagatagaagatgggtatccttgagaggatcaaggagattgaggccgagatggctcggactcagaaaaataaagcaacagaatatcatcttggacaactgaaggcaaaactagcaaagttgaggacacaactattagagcctccaaagggttccagcggaagtggagatggttttgaagtcacaaaatttgggcatggtcgtggtgcacttattggaatttccaatggtggaaagtcaactcttttaacgatggtgactgggac

SEQ ID NO: 4027 - DNA, 246 bp, Zea mays
  unsure (1)..(246): unsure at all n locations; Clone ID: LIB3136-001-P1-K1-H11
ccggnctggaaaaaccgggccgaccgcacgcgtccgtctcgctccaancacacctccactctatagttcacttcactctacagcaaccacagacgaaggagcagtatacagcagcagctgctcccatgaaggcgtggacatctctcctcgcgagcttcgtgctcgccgtgctggccgcgcaggctttggtggccgtggtcgagtccaggaccggccccgtggagcaggctagccaaggtgacgacg

SEQ ID NO: 4028 - DNA, 345 bp, Zea mays
  Clone ID: LIB3136-001-P1-K1-H2
ttctgaaatgaacaaaccagctgttggatcataaacttctgatttaaaccataatttgaagagctgaaatggtaaaagtaaacatacgctttcagaagcagtatgtaccagtgcaaaggttcctggaggtcatcagtccaacagcacggtcgaaatttctgaaaatgttccagtgtctgttgacagtagtaagatgggatcaagtatgaaacatgcaaatgcaaattttggtgaagatggttcttccaccaaggacttaaatggggtgtcaccatgtaagtctcagtcttctccatcaaacataaatggtcaatagaagtttgtaaacgatgaattctgcaatca

SEQ ID NO: 4029 - DNA, 155 bp, Zea mays
  unsure (1)..(155): unsure at all n locations; Clone ID: LIB3136-001-P1-K1-H3
aacttctccgtcatttaccacaaggaaacctnacncccagcccgttttattatatagataaccgccccaacaaancanctnnttnaacatccttttaacttaattaaaaccttctcttatcacttcttcttatacatttccaattctttattttt

SEQ ID NO: 4030 - DNA, 295 bp, Zea mays
  Clone ID: LIB3136-001-P1-K1-H4
gaccgacgcgtgccgcttttaagcgcgccctctggtcggtagcaaccattgatgttcgttgaagccttctgggacagcaaagcagggcagaagttcgtttctgcgttctggaaacaatgtttgcctccaatgtaaacagcacaatttcaatgtctgtgcccccaaggccttggcagcaacaaggctatgaaaactcttatggcgcttatggctccagtatgtatagctcttaccgcagatatagtggaccctatggaaataacatgtactcaggttatggacgaccctatggcgg

SEQ ID NO: 4031 - DNA, 356 bp, Zea mays
  unsure (1)..(356): unsure at all n locations; Clone ID: LIB3136-001-P1-K1-H6
agggtagccacaccaagacaggatgcatacagcgaaggtgaaggcgaangacatggtgagctcggcgaaggagaaggtgaaggaggggtcggcaaagatgcagggcaagacgggcgaggcgacggcggccacgcacggcgagaaggagatggccaaggaggcggcccgcgccaagaaggaccaggccaacgccgacaagcaccaggagaaggccgaccaccgagcggacgccgtcactggccaccacggcacgcgcgtgcccctcaccggcccgcacggtcaccacggcgctggcgcggccgtcgaccccgcgtacccgtccttcggcaacacgtacccggcgtcgggcaagtaca

SEQ ID NO: 4032 - DNA, 263 bp, Zea mays
  Clone ID: LIB3136-001-P1-K1-H7
tcgggcctggggggttcagatcggatcggaagctttcataagtttccatcgggcttcgccactggccggtatggcgatccgcagggggtcttcatacgccgtcgcggcacttctcgcgctcgcctctgtcgccgccgtcgcaggggaggtcttcttccaggagaagttcgaagatggctgggaaagtcggtgggtcaagtccgagtggaagaaggatgagaacatggctggtgaatggaaccacacttcgggaaaatggaatg

SEQ ID NO: 4033 - DNA, 346 bp, Zea mays
  Clone ID: LIB3136-001-P1-K1-H8
ttctgaaatgaacaaaccagctgttggatcataaacttctgatttaaaccataatttcgagagctcaaatggtaaaagtaaacatacgctttcagaagcagtatgtaccagtgcaaaggttcctggaggtcatcagtccaacagcacggtcgaaatttctgaaaatgttccagtgtctgttgacagtagtaagatgggatcaagtatgaaacatgcaaatgcaaattttggtgaagatggttcttccaccaaggacttaaatggggtgtcaccatgtaagtctcagtcttctccatcaaacataaatggtcatagcagttttgtaaacgatgaattctgcaatcat

SEQ ID NO: 4034 - DNA, 432 bp, Zea mays
  unsure (1)..(432): unsure at all n locations; Clone ID: LIB3136-002-P1-K1-A1
cagctcatcacatccatctcattctactactgtctcagagaccaagctgctgcaaccggagaaggagagctactctactcttcagagcactgtgcattgggacatggaaaccgtcgtgggagacctcatggcgaccgagctgaggcttggcctgccgggcaccgtggacgactgcagccagcaccagcagcagacccagctgaaggtggccgcgccgccgtccaaccctactaggggcaagaagcgccccgccgtcgaggaggaggaggcaaacaagcgcgacgcggaggcagcacccccggcggccaagtgagtagctaatagatctgagcacccaaacgttcagagtgaaccgaacgtgtgtctctcggcgcccgaggtcggatggccaccggtgaggtcgtaccggaagagctgcttncagcatgcaaa

SEQ ID NO: 4035 - DNA, 192 bp, Zea mays
  Clone ID: LIB3136-002-P1-K1-A10
tacaaattcactatctactttgctctcacattaacaccgactgaatggctttcaggccggagacaaattctatcgcactcttgtcatacaatagatcagaatccacatatcactggcatgcaaaatgtaactcaccagctgctttcagctagcatcttccatgatccacaagggtatgatgtctcgatcatg

SEQ ID NO: 4036 - DNA, 299 bp, Zea mays
  Clone ID: LIB3136-002-P1-K1-A11
ggaggatgagctaaaacttgttgatgctgagattggattgcttcaagaagatttagatgcagcaactgccaaataggataaggcatatgaatcgttgcaagaattgagagcagtgcgtgatgcaaaaaacgcatcctccatgcataaccgtacagttttaaccagagctagggattatccttcaaggaatatgctgacagaattgcaagagctccacaaaactgaggtcgacaagttcatgacccaatggtgagaaagtaaggccttcagagaggattatgaaaagagaatcctcacat

SEQ ID NO: 4037 - DNA, 302 bp, Zea mays
  Clone ID: LIB3136-002-P1-K1-A12
tcgttacactgttgcagcttggatccgacatgccgaacacttgacccttttccagtgaacgtgggacgttccgactctgccggcaaataccacgctcgcgtacataccgatccgtggtagcacatttgtgttgtaccactcgcttttactccaaagcgagcgatgctacgcgttacgccggagctcgtttgcgccgcggtggatgagagcggactgggaggagatgaaggccatggagcgagctacactgatgaggagcctcctgcacgagacgggtcaactgcgtttactcgtcatcgtta

SEQ ID NO: 4038 - DNA, 410 bp, Zea mays
  Clone ID: LIB3136-002-P1-K1-A3
atgctgggtatgaatatgcgatgaacgagttgtttgttacatcgattgataagtttcagcctcgactgttgtttcttgtggtcgggcaagattccagtgcggaatatatgtgggcgatgataaggtgatccatttcacaagaggaagaggacaggaggtcggaacaggaactgtcgtcgatattattcttgtgagttccaccccaaaacgaagcaacacgccttgcccggcgtgcaccgacgaaaccagcgacagcagcacagagacgaacggcgtggtatcctcctgcctcagctgcttcctagctgggggtgctctctaccgtttcgagtacgcagtcaacccggcgctcttactcgtcaaagcgcgaggagggacgtgcacgctcgcttcctctgaccctgacgaca

SEQ ID NO: 4039 - DNA, 462 bp, Zea mays
  Clone ID: LIB3136-002-P1-K1-A4
ctgggaaccatctactacgacgtgggcaccagttacacggccatccaggcgcgcgcctagtgcggcgggttctagtcggacttcatgaccttcatgtccatcggcggcttaccgtccttcatcgaggagatgaaggtgttcaccctcgagcgccagaacggccactacggcgtcgtcgtctacatcatcttcaacttcctctcctccatgcccttcctgctcgccgcgtcctgggccagcacgtgcatcacgtattggatggtcaagttccgggcgggctacagctacttcgccttcttcgccctcaacctctactgcggcgtctccgtcatcgagagcctcatgatgatcatctccgtcctcgtgccaaacttccttatgggcctcatacttggcgccggcgtcatcgggaacatgatgttgacctctggggtctttcgactgcttcccggagctccaaag

SEQ ID NO: 4040 - DNA, 451 bp, Zea mays
  unsure (1)..(451): unsure at all n locations; Clone ID: LIB3136-002-P1-K1-A5
catagtacctatgatcagtagccccactgggttttgcagagatggtgaagatgtaagtgtgaggcaagaagggggtggtattcagtttgatatatcattgaaccaagagtttgacagttttgcgcataactttggtcaaacatacaatacagaggataggcaacaagagccacaacataatgctgcagatgtcattgttcttagtgattctgatgaagaaaatgacccaattgttcgcctgccagctgtctatgcaaatactcctacaaatggtgacagtttccctttcgtcactgatgctgccgtatctggatatcctgaagggtaccaggaggatgctggggttggtacaagtggccttggcttattgagcaacaatactggtgattntgaaataaataactggcaaatgcattcttatccacaaccagagcaagggttccagcttttt

SEQ ID NO: 4041 - DNA, 307 bp, Zea mays
  Clone ID: LIB3136-002-P1-K1-A6
aaagcaagcaccagaactcttttttcccctaactcgcaagtcgcaacggccatgtctccggtgcgccgccgcctcgtggtcctcgtgctcctcgccgccgccgtcgcggccacggcgtccgccgcgtccctcagcggcgcggcgaacgacctgctgcccaagtacggcctcccgaaggggctcatcccggactccgtcacctcctacagcttcgacgaggccacgggcgccttcgagatccaccttgccagcacctgctacgtccacttcggctcccacctcgtctactacgagaggaccataaccg

SEQ ID NO: 4042 - DNA, 432 bp, Zea mays
  Clone ID: LIB3136-002-P1-K1-A7
gcgacgcgtccggcttagcgctccaacactcagtctggtgtaccactctcacccaactgctcacctcaccgtggccgagacgcttggagcaattgcatccccgcttggtcagaacagtgccacgctgccgcagaacagagtcgtggacagctccactgctggctttccaatccatgttgatctcgaatgatcttgtgcgagcactgaaggtatggtcgtcgacgtcgtggccagcgagggcgggtgcttggctcgagcatgaaaacattggagcttgttaacatggacgtgttttgacggtgattatgatgcgcctgaggtcagcgccgctgtggctgcgtgtgccggctgagtgagttcgggcctgatattgctctaagctgtgccacttctattagctgagagattttgaatggcgccacactttgtaga

SEQ ID NO: 4043 - DNA, 450 bp, Zea mays
  Clone ID: LIB3136-002-P1-K1-A8
ggggactacatggaggattatgaggtcatggtcccattccaggctctccaagctcttggctgcgatgtcgatgccgtttgccccgacaagggagctggggagacgtgcccgacagccattcatgatttcgaaggtgaccagacctacagcgagaagcctggccacgattttactctgacagcgtcgtttggaagtgtggatgcttcgagctacgacgcgcttgtggttcctggcggacgggctccagagtacctggctctgaacgataaggtcatcagcttggtgaaggccttcgcggagagcggaaagccaatcgcgtcgatctgccacggccagcagatattatccgctgccggagtcctcaaggtgaagaagtgcaccgcatacccagccgtgaagctgaacgtgttgctcggtggcgggacctgtctggagcctgacccgatccac

SEQ ID NO: 4044 - DNA, 457 bp, Zea mays
  Clone ID: LIB3136-002-P1-K1-B1
ggtgatttaggaatggaaattcctatagagattattttctttgcacagaaggtgatgattttcgagtgcaatattcaaggcaagcctgttgtgactgcaacccagatgttggaatctatgatcaagtctcctcgccctactcgggcagaagcaacggatgttgcaaacgcagttcttgatggcacagactgcgttatgctcagtggtgagactgctgctggggcttatccagagttggcggtgcagactatggctaacatctgcctgcaagcagagtcttgcgtagaccatgctgctattttcaaatcaatccatggcttcagctccaattccaatgagtccattggagagccttgcatcatcagctgttcgcacagcaaactctgccagggcagcacttatcttggtcctgaccaggggaggaactactgctaggcttgtagccaagtataggcca

SEQ ID NO: 4045 - DNA, 286 bp, Zea mays
  Clone ID: LIB3136-002-P1-K1-B10
aacgaggtctatctaccgacatacgtaaatgcgatttctgcatcacgcgactggaagtataagagctggttaatggggactagccaaagtagcccgacgtctgcttgcagcgtgcctcgatgaccaggcctataggatccgtgcgatgacatgcatccacatggcccccatggttgctacgtcttcattgtagagcttgcccgaggcatcacggatgtggatcctcctgatctgtacgaaccgctcgcagatacatatgagctgaggctgacctaagatgatgaca

SEQ ID NO: 4046 - DNA, 262 bp, Zea mays
  Clone ID: LIB3136-002-P1-K1-B11
agaacattagcttcactgtctgggatgtaggttgtcaggacacgatcaaacctctttcaagggattacttccagaacacccagggaattattatcattgaagacagctatgaccgtgaccatgctgttgaagacagagattatctccacaaaatgctgatctgttgatgagctacgtgatgctatgctgctcgtttttgccaacatgcatgatcttgccaatgccatgaatgcttgtgatattactgacaagcttgcattac

SEQ ID NO: 4047 - DNA, 367 bp, Zea mays
  Clone ID: LIB3136-002-P1-K1-B12
gcgtaccattgatcgttactgaccctcataacttgttccacagagcggatgcctcaactcctgcgaatatacaaagcctacatatgatgcatatgcctgaacaagcactgcctgccatcacagactgctgaaccaagctcaccggacgtttctccaacctatcaacattgatctagtacttatcgagcattatggtggtaacccaagcaagatatactttgcgactaggcctacatgaagtgatagctcacaagtatcatatgcacatccagaccaatatgatagatgctgttctcaactaccgatacaatcatatggacctgcactcattcttgaatgcccaaataatggtcactgcattagcaac

SEQ ID NO: 4048 - DNA, 254 bp, Zea mays
  Clone ID: LIB3136-002-P1-K1-B2
atactttcggatggacccactacctggacgaatttcacttttaccatcccagccaggggagaaaagtgggcagtatcctattcgtccagtagatactacaacagattttgaaggaacaacaagccttcaaccaactcaaccgccatcagggaacgctcctcctggaggtcaatctgtagcaagacccatgccacgacaaatgccgcaagaacctatggttggggggattccaagagtggcaagtggagtaacca

SEQ ID NO: 4049 - DNA, 404 bp, Zea mays
  Clone ID: LIB3136-002-P1-K1-B3
ctgagatcacgtgcgatccatgttctcatgtttatgttttacacgacaacagtcatcaatgttggggggattattttatgaaagacgggtgcgtctgcgatactagatgcatgatactaggaacaagtcacttggctgataatgatgaagagaaacgtatgaagcaccacgcattggcacatggcacataatgccttaagcactgcgacgacaatgctgactgggcgaatcctatactagtggtgctctctattcataacaactgcctacatgatcaactcatgccataacatatcgttacttctacaacaatcatgtctttagcgtgaataccaaagtgtcccatggtgagtcccacatcatcacattatcgcacaggcaactttgctacgtcattacctatc

SEQ ID NO: 4050 - DNA, 299 bp, Zea mays
  Clone ID: LIB3136-002-P1-K1-B4
cccaagaagctgacatatgagcagaggaaggcttgcctcattgaaaggctcaaccaactcaactgctcgggtggtgctgatgacgacgatgaggacgacgagtgaagtttagtgccatcgaagtagtgctatctcaatccagcgatcagcaattgtgtactgtcttatgcggggacctgtagtactgcaataggcatttttgttttaaagttttgcgaggtgaacaaaactgtttctgttagtttcgagcttgagctctcaatgcttactctttacattgaaatgctgtcgtttggacc

SEQ ID NO: 4051 - DNA, 63 bp, Zea mays
  Clone ID: LIB3136-002-P1-K1-B5
aaaaagaaaaaaaaataaattaaaaaaattttttataaaaaaaaaaaaaaaggacaaccgagg

SEQ ID NO: 4052 - DNA, 137 bp, Zea mays
  Clone ID: LIB3136-002-P1-K1-B6
caaaaaataaaaaataataaattaaaaaatttaatttttaaaaaaaataaaaaaaaaaaaaagagtaggaaatttttaaaaaaaaaaaaatggccaccccttctaatttttccaacctaacttacccttcctttcaa

SEQ ID NO: 4053 - DNA, 435 bp, Zea mays
  Clone ID: LIB3136-002-P1-K1-B7
gttatgatgagattgtgaaggaagtctcatcctacctcaagaaagttgggtacaaccctgataagattgcctttgtccccatctctggttttgagggcgacaacatgattgagaggtccaccaaccttgactggtacaaaggcccgaccctgcttgaggctcttgaccagatcaccgagcccaagagaccttcggacaagcccctgcgtctccccctgcaggatgtgtacaagattggtggtattggaactgtaccggttggtcgtgtggagactggtgtcatcaagcctggtatggttgtcaccttcggtccaactggcctgactactgaggtgaagtctgttgagatgcaccacgaggctcttcaggaggcccttcctggtgacaatgttggcttcaacgtgaagaacgttgctgtgaaggatctcaagcgtg

SEQ ID NO: 4054 - DNA, 463 bp, Zea mays
  Clone ID: LIB3136-002-P1-K1-B8
agcccagtggcaaatatgtcatggaagatctacataagattggtgggacaccggcagtcattcagtatcttctggagcaaggtcttcttgatggtgattgcatgactgttactgcaaaaactctagctgagaatgccaaaattttccctcctttgtctgaagggcagcaaataattcgaccacttgacaatcctatcaaaccaactggccatattcaaatactttatggcaatcttgcaccagaaggttctgtagcaaaaataactggcaaagagggactatacttctcaggtcctgcattagcttttgagggtgaagagtccatgattacagctatctcagaaaacccagcaaatttcaagggaaaggtagtagtgatccgaggagaaggaccaaaaggcgggccagggatgcccgaaatgttgactccaacatgcgcaataatgggtgctggtcttggaaa

SEQ ID NO: 4055 - DNA, 123 bp, Zea mays
  Clone ID: LIB3136-002-P1-K1-B9
aacaaactatcttatcgaatactatagcatcttcctcatcgatagaatatataagatgcactagggagcgaaatacgtcgttccttaatgcagatccggcgtccaccaacctcctgcgatcac

SEQ ID NO: 4056 - DNA, 327 bp, Zea mays
  Clone ID: LIB3136-002-P1-K1-C1
agttcccggagagactcgcgtacatcaacactttcatctacccgctcacgtacataccgcttcggatgtactgcattctgcccgccatctgcctgctcaccggaaagttcatccttccagaggcaaagcatgcataagagcgttctttctttattacagcaggggagcatttggacaacgtacggtgctgatgacaaagaatctaccttggaatggaatgcatgcagatcagcaactttgccagcatctggttcatactcctcttcatctcgatcttcgccacgggcatcctggagatgaggtggagcggagtgggcatcgactagt

SEQ ID NO: 4057 - DNA, 249 bp, Zea mays
  Clone ID: LIB3136-002-P1-K1-C10
atgcgactggcttgagctgattgaggcttgtctatgttgaagccagcatgatgcgtctgagaaatggacacttgaaccaaacgattaagtccttctgtctgatccaccaattggactctttgatccaatctagatctcaccttatgatcttgcacacaatactaaccctgatgagccactgtcacctatgtatgcaaattacacattctatgatccagtcttgactggaaaatgccatgtagatttttc

SEQ ID NO: 4058 - DNA, 342 bp, Zea mays
  Clone ID: LIB3136-002-P1-K1-C11
cccacgcgtgcgacagggtccaaattcctgtgcggcttttgcttttcaccacttactctcacatggttcgtatgccaaactacccggaacactgccgtttcgcctctctcgtcctcctcttggtggctatgttctactgtcttctggtctatgcggatgtttccacactattgaaccccaccgtaaatcctcaggattccagctttgagtctttggaatccgaggcgggtattgattttggggaaaagaacggctagtgttgcagaggcattgagaatttggagctgtggggtgcagctgtgaaatggcggtctgacttcaagtttaattcctctgtggaat

SEQ ID NO: 4059 - DNA, 209 bp, Zea mays
  Clone ID: LIB3136-002-P1-K1-C12
gcgaaaggaaaagatccaaggaaccttgtggtagcttgaacaagggatgcttgctagcaatggctcatcagccagttctgacgtcaaaacatggcaggctgttcctgatacacagactcaggcccgaccaaaggtccatcatggaactaacggaagccaaaacataaccaagaacacaaccataagtgctttccccgaaccgtgggggt

SEQ ID NO: 4060 - DNA, 400 bp, Zea mays
  Clone ID: LIB3136-002-P1-K1-C2
ccttgcaccacctggaacaagggtctcaggggttgatgtcattattgggaagacatctcctattgcacaagatgacgctcaagggcaagcttctagatactcaaagcgtgaccatagtactgctctgcgtcacagtgaaagtggcatggtagatcaggttctgttaacaacaaatgcggatggtctaagatttgtcaaggttaggatgcgatctgttcgcataccacaaattggcgacaagtttagcagcaggcatggacaaaaaggaactgttgggatgacttacactcaagaggatatgccatggacaatcgaaggcattacacctgatattattgtgaatccacatgctattccatcccgtatgactattgggcagctgattgagtgtattatgggt

SEQ ID NO: 4061 - DNA, 364 bp, Zea mays
  Clone ID: LIB3136-002-P1-K1-C3
ctttgatccaatttcacacgcatactagcgccgttggtagcagcaccggcagccgcgttcctcgccggcatggatcccgcgaacagcagcgcgggcgccgagctcgacgacgcgtccgagtggcgcacccgggcgctgggtggcacggagtacagctggctccgcgccgtgccgggcggcaccggcaccacgctgctcgcgctccgcctatcccacggcgacgcggccgaggcggcgctgcgctccctgcgggacgcgcaccccgtcctccgcgcccgcctccggacctcttctccctccggcccgacgctggcgttccccgatccggcaccgccgttcctgctggcgcccgatcccgccccgg

SEQ ID NO: 4062 - DNA, 383 bp, Zea mays
  unsure (1)..(383): unsure at all n locations; Clone ID: LIB3136-002-P1-K1-C4
gcgagacggcaaaccgatcggtggaacggaacttccctcagtctcagcctccaggcgagcgagcgagcgctgctcacgtccacagggccagcaacagtaggctgtaggccccgcccgctccagatccataggcagccgcgcgcgatcgcggcgtgatggataaaagcgtgcgcgctgcgccgctgtcacgatgtcagagaggcttacgagcgtaagctaatgtcaccaccatgcttttatgggaccatatatataaatataacaaataaagttttattggaccaggtctttgaccatgccattggtatcaacgttccaaggtcccgctttctaccagntaatgcgacatcacatttgcagctcgtacagtctgatctatatac

SEQ ID NO: 4063 - DNA, 93 bp, Zea mays
  Clone ID: LIB3136-002-P1-K1-C5
cttctctgggcacattgcttcagcgcagtatctttctagcaccttgctataacgtcttttgtgggatcaatttatcacacttgatggccatca

SEQ ID NO: 4064 - DNA, 462 bp, Zea mays
  Clone ID: LIB3136-002-P1-K1-C6
ggaacctatgccccacaggactgcacaacacgtgggataggtaatgcaggtattgcccccgctggctgtggctggccggtgtgcaattcaccaggctgccaaacgagccctaaaggccccagcatgggcgaccctctccagagtgattcttatcaatcttgcattggaaaaacacggagcctattattatcagggaagcatttgagccaaagtactatgtacatcaccatgcttttatgtgactatatatataaatataacagataaagttttattggaccagttctttgaccatgccattggtatcaacgttccaaggtcccgcttcctaccagttaaggcgacatcagatttgcagctagtacagtctgatctatataccttggttgatggcttcgttacacgtaattcagccagaacaaatccatcaaatccctcaattgaacttggtcctgagttcaa

SEQ ID NO: 4065 - DNA, 468 bp, Zea mays
  Clone ID: LIB3136-002-P1-K1-C7
ggcctgcaccagatccgatgccttctttttcgttcttgctctgctctcatgggcagggcagggggtgcccatctacttgaattgcgatgcgtacatacatcgctgtctccatctagctgcacacatatatacatacatgcatacagagtgagagagaaacagatcgatctcacttagctgctgctgctgctgctgcttgctggtggcctgggcctggctgctgcgtctgtatcgatgcgtccgtattttctccatctcgtctgcatacgctgcacttggtaaggagctagctggcctttcatgtcttccatgctgccatagccatacggacggccggcaggcaagaaggtaccccatcggtcgctgcacatgcatgaatgcatggggatacacgttcatcatcagcagcacagtggctctgtatcccccatcccaatctgatcctatataggaggagaaggaggagca

SEQ ID NO: 4066 - DNA, 450 bp, Zea mays
  Clone ID: LIB3136-002-P1-K1-C8
tgcagatcccccatggcaggctccaccttcctcgttccccttcccgtccccgcccctccgtgctcgccaccgcttccacacgtccacgtccgcatccccccgccacctgcgcccctcccctgctacacgcctccgcgctgcccggcgtcggcatcccgacgccgtcgttgtcgtcccagatgcccgcccctgggtcggcgatctatcgggcgccgccgcgtcctaccgggacggaagtgaggaggacgaagacgacgcagatgaagatgaggacgaagacgaggaccgcagcctggacctactggcccggctcctgcactccgtattcaggaaggcctcacgccgcgcgcgccgcgctgccaggtccgtgctgccgtcttccgtacccgtcgagctggtgaagctttcggtcaatggcgtgcttgtcctgacgatcttatggatcctgaa

SEQ ID NO: 4067 - DNA, 269 bp, Zea mays
  Clone ID: LIB3136-002-P1-K1-C9
ctgacaacccacgccactacgacacttcagatcttcaccacttcttctcccatggtctctaggccaaacgacccataacactccagactctcctctctcgtgctccttttggtggctctgaactcctgccttctggcctatgcccatgtttccacactattgaaccccaccgtaaatcctcaggattccagctttgagtctttagaatcggaagcgggtattgattttggggaaaagaagggcgagtgttgcagaggcattgagaattt

SEQ ID NO: 4068 - DNA, 459 bp, Zea mays
  Clone ID: LIB3136-002-P1-K1-D1
cagcaaacgtgggatatggtgattggcccagataccgtgacagtcagtatcctgatgacttcagtgaagacattcgcgttaagagccaccagttgctcgagggcgaggacatgcagcagctgctgagggtcttcagcatgggtggagcttctggcagtttgccagacgacaccttcaacttccagtcctacatgccctctccgatgcccaacctcgggttcgaaactgagcgtagccattcgtctggcaaagctgttgttggctggctcaagatcaaggcggcgatgaggtggggaatcttcgtcaggaagaaagctgccgagagaaaggcacaagttgtcgaacctgaagattgacaccgtggctttactatggtcaagggtggcttggagattactaggagttatctggccccatacctttctggtacacgttaaaccagtttctgaaactcttttc

SEQ ID NO: 4069 - DNA, 283 bp, Zea mays
  Clone ID: LIB3136-002-P1-K1-D10
tttctttttcacagggatggactttgctggttccagacggaagcctaatctcatggcgaagggtgccgtggctgctgccctcacggtcatgtgcataatcctgttgaaacagtcccctagtttcagcgctaccagcgtgatctctcgccatgaaactgaggtgacccatgtgttagttacagggcgtgctgggtatatagtctcacatgctactctttgtcttcttagagacacgctcctagttaccattgcggataacctatccagcgctaacatgggagca

SEQ ID NO: 4070 - DNA, 258 bp, Zea mays
  Clone ID: LIB3136-002-P1-K1-D11
cttgggctatctctttggcagtgacgaagcttcaaaatcatttgagaagcctgcaccagctgaaaagccaactcctgcatcctctgcatagagactactggatatcgctcctggaattcaaagttctaaatcaaacaattacattggatctgtaagccagaacttcagaaatgtacgcaccatccgtccgatcactactgttcaagaagtacaaggtctcgcatctatactcatttacaaaccatgtaacgatgatgc

SEQ ID NO: 4071 - DNA, 394 bp, Zea mays
  Clone ID: LIB3136-002-P1-K1-D12
cttttcctgccttcctcctcactagtcgctcccccgcggctcgcgcaggcaggcgacacagggaggctaaatccctatcgcgaggaggcgtgtgaggccagcggctttgcgatgacagcaccagcggacaaggggaagaaggccaagactgatgccgacggcggcgaggagaacgaacagatcgacggcgtcctcgtcctctccatcgagaagctccaggagatacaggacgagctcgagaaggtaaatgaggaagcaagtgacaaggttatggaggtggagcagaaatacagtgagatccgcagacctgtctatctcaagaggggtgacattatcaagaccatcccggacttttggctcacagcgtttatgagccatcctctattaagtgagc

SEQ ID NO: 4072 - DNA, 455 bp, Zea mays
  unsure (1)..(455): unsure at all n locations; Clone ID: LIB3136-002-P1-K1-D2
gtggacggccgcgtcgtgcgcgctcctggcgctcgttcgcaccgacgcgctccgggaggacgtcggcgaccaggccgcaaacagggtggacgagccactgatctcccacccgggcctcgccagctaccgcgtccgtgacctcccagacggcgtcgtctccggcgacttcaactacgtcatcaacctcctcgtccaccgtatggggcagtgcctcccgcgctctgccgccgccgtggcactgaacacgttcccaggcctggacccgcccgacgtcaccgcggcgctcgcggagatcctgcccaactgcgtcccgttcggcccctaccacctcctcctcggcgaggacgacgccgacaccgncgcaccagccgacccgcacggctgcctcgcctggctggaccgncaacccgggcgcggcgtcgcgtacgtcagcttcggcacggtggcgtgcccgc

SEQ ID NO: 4073 - DNA, 389 bp, Zea mays
  Clone ID: LIB3136-002-P1-K1-D3
gacgaaatgggtcagaggctgctcgaccgcttgtcgggcttccttcttgtcgtcgtcgtcgtcggcggggtcctctatggcggaacagagcagcggatagcagaggcggcggatggagcgaacccgcacaggctgctggccaccgtctcggtgtccaagccgtcgtaccccacggttgtcaccacgccgatgtcagcctacggcgccgacccggcctccaagccgtcctactccacgttcccgtcgctggcgaccgggaacggcggtgccggtgccggtgccggtgcaggcggtggtggtgcagcttgaagcagtggcccgggcggcgggacgtggtgcgtgggcagccagagcggcaggccgaccgggcttcaggtcgggctggacta

SEQ ID NO: 4074 - DNA, 310 bp, Zea mays
  Clone ID: LIB3136-002-P1-K1-D4
agctggatcacgttggcggatatggtgaagtctttgctcaaggactacccgaagctgaagctgaggcagggcaggatggtgttcgaggtccgccccaccatcaagtgggacaagggcaaggccctggagttccttcttgagtcccttgggtaccccgacttgacccaccttcttgcccggttccatggggaacaaccgaaccgacaaggacgccttcaaggtgttccgaaagcccggcaaggcctgggcattctcgtgtgcaagcaccccaaggacacctgtgccttctaattgctgtaagagacccccc

SEQ ID NO: 4075 - DNA, 351 bp, Zea mays
  Clone ID: LIB3136-002-P1-K1-D5
gcggcgaaaagagggaaaagaaagccagttagtgagacggaaaggggaagatgagccggagcctggggatcccggtgaagttgctccatgaggcagcgggtcacgtggtgacggtggagctcaagaccggcgaagtgtaccggcggtcattggtcgagtgcgaggataactggaattgccagctcgagaacataaccttcactgccaaggatgggaaggtttcgcagctggagcacgtcttcatcagaggaagcagagtgagatttatgactatacctgatatgctcaagaacgcttccatgttcaagcgcttggaagcgaggattatcggcataggatcacctattggag

SEQ ID NO: 4076 - DNA, 465 bp, Zea mays
  Clone ID: LIB3136-002-P1-K1-D6
ccaatttggcacttgatatcattggattgggtgtgttcaattttgattttgactcggttactaaggaatctcctgtaataaaggcagtgtatggaacacttttcgaagctgagcaccgttccaccttctacatcccctattggaatcttcctttgacaaaatggatagttccaaggcagcgcaagttccatagtgacctcaaagtgatcaacaattgccttgataaccttataaaaaatgcaaaggagacgagacagacttgctatataggaagctgatgtggaaaagctccagcaaagggactactcttctctgaaggatgccagcttgctgaggttccttgttgacatgaggggagctgacgttgatgatcgccagcttcgagatgatcttatgacaatgcttattgctggacatgaaacaacggctgctgttctgacatggtctgtttttttgctagcccag

SEQ ID NO: 4077 - DNA, 469 bp, Zea mays
  Clone ID: LIB3136-002-P1-K1-D7
ctccttttcgatcccttcgtaaagcgccttcgtcgccccatccggcatggctccgaagagggatgaggccccgcccccgtcgtcgaagcccgccaagtccggcggtggcaagcagaagaagaagaagtggagcaagggaaagctaaaggagaaggtgaacaacgcggtgctgttcgaccaggctacctacgacaagctgctctctgaggtgcccaagtacaagcagatcaccccctccatcctatccgagcgcctcaggatcaatggctccctggctcggagggctatcaaggacctgatggcgcgtggcctcatccggttggtctcggttcactcaagccagcacatctacaccagggcaacaaatacctaaggatgggatttccttgcttgccctttctgtaagagctcgtcttctttagaacagttgccatctcttgtaagagtttgctaatgctatggtagatga

SEQ ID NO: 4078 - DNA, 284 bp, Zea mays
  Clone ID: LIB3136-002-P1-K1-D8
ggctgctgctcccgaggagctcgccgtttactgtgccggaggctcctgctcctgctcctggtgggccccaggagccggccgccgaggcggaggctgctgctcctgaggagcccgagaaggccagcgagtgaggccgtgcgcacgcagcggcggcggccagggcccaggccccaggggatcggcgtgcgcgcatggcgccgtagactcttgcgcgcgtacatgggagactgacacgtgattttgatggtcactacgctacacgttactgtcgggactctgagtgt

SEQ ID NO: 4079 - DNA, 97 bp, Zea mays
  Clone ID: LIB3136-002-P1-K1-D9
gcacatgccatggcgtccatgaccggcctctcttagggcgttctgcccagcaggcgcgccgggaacagctccagtacggtcagcgtccttagggcat

SEQ ID NO: 4080 - DNA, 323 bp, Zea mays
  Clone ID: LIB3136-002-P1-K1-E1
cggacgcgtgggcgcccgcgttcgcccccggctgcgatcaccgcgcgtttgccggcgccatggcggtcgcagtcgccgtcgccagccaaaatccactagcagcgcgtaacctcctgccgatctaggagacggaggatttcttctcgcccttttcctcgccttgcggctgcggaataccggagccggcctggatttgctcgagagtgagaggaaggcgtaacagtgtgaaggaggcgcgggggacaatatggctgcggaaatggtgaaagccgcgacgagcgacaagctcaaggagatggattgggcaaagaacatcgaaatct

SEQ ID NO: 4081 - DNA, 87 bp, Zea mays
  Clone ID: LIB3136-002-P1-K1-E10
cggacgcgtactcacatacttacttctaattttataaacaatacttactaccatatatatagaaaattttgaaaagcatgaaataac

SEQ ID NO: 4082 - DNA, 289 bp, Zea mays
  Clone ID: LIB3136-001-P1-K1-A7
atgtagttgagatgcttactgaaatacttcatcactcacatccgggaaactcaaatgtccggaatggtgccaccgcatattcccaattcaagaaacttgcattctatcagaagaagacctgcatgccactgtgtcaaagttattccttgacttctcgaggagcaagacaaacgaagacaagcctataaagtttgcggttgcctataatagaaggggcattgatgagacagagaagaacagttatgaagggtcaaaccagcaaactttgatggatagggagcaatgtttc

SEQ ID NO: 4083 - DNA, 306 bp, Zea mays
  Clone ID: LIB3136-001-P1-K1-A8
gacggactggtcgcacgcgccgttcgttgcctcgttccgggaggtgcgcgtggacgggtgcgcctgggcggccaacgccacggacggcgacaccgcggaggcgcggcggtgcagcgagtcctcgtggggcaaggagggccgctactggtggaaggagaaggagatgtcggagctgagcgtgcaccagagccaccagctcgtgtgggcgcgcgcccaccacctcgtctacgactactgcgtcgacaccgaccgctttcccgtgcagtcttccgagtgtgccgtccgctgatttattgattcctgacc

SEQ ID NO: 4084 - DNA, 448 bp, Zea mays
  unsure (1)..(448): unsure at all n locations; Clone ID: LIB3136-001-P1-K1-D2
aacggcggacgcaacaagcacgggcgcggccacgtcaagtacatacgctgctccaactgcgcgaagtgctgtccaaaggataaggctatcaagcggttcttggtgaggaacattgttgagcaggctgctgtgagggacgtgcaggaggcttgtgtgcatgatggtatcatagtcgcccttattagttgcataatttagtcggatgatctatttataggttatctagagaaaccgnccttaatatcttcatttgcacaggatatgttcttcccaaattgtacgcaaaggttcatcactgtgtctcatgcgcaatccatgcacacattgttcgtgtccgctctcgtgagaacaggaagaaccgtgagcccccgcagcgcttcaggcgccgggtataattcttgcacatgcttatcttgataaccatatcgattggatccctttgttttat

SEQ ID NO: 4085 - DNA, 369 bp, Zea mays
  unsure (1)..(369): unsure at all n locations; Clone ID: LIB3136-001-P1-K1-D7
tacactgtggcaggttctatgtggccgttactgtgctagccctggagtacctgcacatcgtcgggtttttatacagggacgtgatccctcatatcttgctgaagaacattgttgatcaaaanatgcttttttactttttacattttcttatgttttactattattatataattcccttattaattgcataatttagtcggatgannnntctntttatctatttataaatacccctccttatattttcattttcacacgatatttttcttcccaaattgtacgcaaaggttcatcactgtgtctcatgcgcaatccatgcacaacattgtcgtgttccctctcctgagaacaggaagaaccgtgagcccc

SEQ ID NO: 4086 - DNA, 174 bp, Zea mays
  Clone ID: LIB3136-001-P1-K1-F7
aagcaatgctcctatgttttattgagataagaccgcgccttgagactggaacctgtgcttgcaactgttcatttcccctgggatgtttgaccatctgaggcatgcgagcctgttgttgaagatgcaaggttacatacttgtacgacaatgtgacctgtgtaactgattattcta

SEQ ID NO: 4087 - DNA, 268 bp, Zea mays
  Clone ID: LIB3136-001-P1-K1-G6
aaaaaaaaaaaaaaaaatttatttaaaaaatttaataatcaaaaaaaaaaaaaaaaaaaaaaaggccgcagttttttaaaaaaaaaggcgcgcccaataatacccccccccttttacatactccaactttacaccccatacatcctacataataacttttaaattaattcacctaacttaaattcaccacccctcgtattacaaaaaccttactgaaaaaacccttactttccccaatttaaatacctttaaaaacatccccctttat

SEQ ID NO: 4088 - DNA, 51 bp, Zea mays
  Clone ID: LIB3136-002-P1-K1-A2
tcccggtcgaccacgcgtccgcgcctgcctcctcgatcctcggacgaaacg

SEQ ID NO: 4089 - DNA, 280 bp, Zea mays
  Clone ID: LIB3136-002-P1-K1-A9
tataaagatacagttgtgttgaactgatggtcttgaacgctatacgaccataatgaggcaggtgctaacgtggagctgatggcaggatctgagtgtatgatgttactgaccacgatagctataacaatgccatgctgagtactgaatgaagtttataggaatgccgatgaatgtgtgacacaagctttagtgtgtggacaagggtgacctgcctaggaacagagtatttacttacaaggctgtcctggtatttgctgatgacatggcattaccattcctt

SEQ ID NO: 4090 - DNA, 89 bp, Zea mays
  Clone ID: LIB3136-002-P1-K1-H9
tagaggagcggcacctgagaacagatcaccgtcactggaagcgatatttcattactgtagagactgataaggctagagagagagagaga

SEQ ID NO: 4091 - DNA, 479 bp, Zea mays
  Clone ID: LIB3136-003-Q1-K1-D7
gaagacccgggccgacccacgcgttcgcggacgcgtgtgtagaaactctcctcctgatggacataggcatgatgaccatgacaaaagggcggcttatagatgaaaaagaatggagcgagctcttcaccaaagcagggttcagcgaatacaagatcctgaaggaatttggagctcgtgttgccttcgaagtctatccgtgagatatatatatatatatttacatacatatatgtatgtgtgtgggtgccttgcgtggcttggcgtgatgatgtcataaataaagagggtgggcgtgcttgcggtattcatggatggccatggatctgagcacatgacgttggatgctttcttaatgctctcgtggatcttctatatttggaagaagctgtaaaataatataatcgcatctagtggtggcgttggcttgtatgtactttgtacctgctttattattttggtgcatatcgagtacctaatgt

SEQ ID NO: 4092 - DNA, 403 bp, Zea mays
  Clone ID: LIB3136-003-Q1-K1-D8
taaacaccttgttaagctgattggatattgtattgaggatgatcaaaggttagttgtatatgaattcatggcacggggaagtcttgaaaatcatcttttcagaagatgaagattgctctaggtgccgcgaaaggactagccttcctccatggaggtcccaaacctgttatttacagggattttaagacatcgaatgttcttcttgatgtggagtacaacgcaaaactatctgatttcggtttagcaaaagctggtcctcagggtgataaaactcatgtatctactcgggttgttggcacctatggttatgctgcaccagagtatgtaatgacagcttcggagttgtgctactcgagatgttgactgggagaagatcaatggacaagaagcggcctacggggga

SEQ ID NO: 4093 - DNA, 447 bp, Zea mays
  Clone ID: LIB3136-003-Q1-K1-E10
taaacaccttgttaagctgattggatattgtattgaggatgatcaaaggttacttgtataggaattcatggcacggggaagtcttgaaaatcatcttttcagaagatgaagattgctctacgtgccgcgaaaggactagccttcctccatggaggtcccaaacctgttatttacagggattttaagacatcgaatgttcttcttgatgtggagtacaacgcaaaactatctgatttcggtttagcaaaagctggtcctcagggtgataaaactcatgtatctactcgggttgttggcacctatggttatgctgcaccagagtatgtaatgacagcttcggagttgtgctactcgagatgttgactgggagaagatcaatggacaagaagcggcctacggtggagcagaacctggttgcatgggcaaggccttacctaaatgatcggc

SEQ ID NO: 4094 - DNA, 362 bp, Zea mays
  Clone ID: LIB3136-003-Q1-K1-H3
taaccagcctcaaggactacgtgaccaggatgaaggagggacagaatgacatctactatatgactggtgagagcaagaaggcagtggagaactcccccttccttgagaagctgaagaagaggggctatgaggttctgtacatggttgatgccattgacgagtatgctgttggtcagctcaaggagtttgagggcaagaagcttgtctctgccaccaaggagggtctgaagcttgatgagactgaggacgagaagaagaggaaggaggagctgaaggagaagtttgaggggctgtgcaaggtcatcaaggaggttctgggtgacaaagttgagaaggtgggggtgtctgatcgcgttgtggac

SEQ ID NO: 4095 - DNA, 449 bp, Zea mays
  Clone ID: LIB3136-004-Q1-K1-B9
aaacagtcgcgcagcctccaccgctccacgtgacctcccaaacctagacctagttgtccttcctgttcaccctgcatagcggcggcgcgtcctgccttcagagagagagagagagagagagagagagcgctagatctccgtaggcatggcgtgggaggaggaggcggtagaagaggaggaatacggggaggagatggcggcttcggagtcggaggaggacgtcgtggtggggcagatgccgacggtgatggtgccaaagcatatcaataagcggtccctgaagaacaaggcgctgtctgtaaccctcgacaagaaagcgctcagggatttcgtgactgggttccacaagcggaagaaaaagagaagaaaggaggcgcagaagattttgcaggagaaggagaggaagaagaaaatacaggaccgcaagaggaggaaagaagagaacgaga

SEQ ID NO: 4096 - DNA, 359 bp, Zea mays
  Clone ID: LIB3136-004-Q1-K1-D1
tgtcgcactcgcacagtcgcactccataaggcaaggaggaaaacagagagacgaccaccgcttcgcgccggccggccattccatccggcaatggcctccgccgccggtgctgcgttcgccgccatcaccctcctcatcctggtacccctcgccgccgcctcggactccgaccacaagtaccaagcagcggagcctgtgacgctctgggtgaacaaggttggtccgtacaacaatccgcaggagacatacaactactacagcctcccattttgccatgcgtcagaaaaccatgtgcataagtggggaggactcggcgaggtccctggtgggaatgagctcattgacagccagatcgacat

SEQ ID NO: 4097 - DNA, 372 bp, Zea mays
  Clone ID: LIB3136-004-Q1-K1-E12
attgatttggcgacgctgaccggcgcttgcgttgtcgcactcgggcctagcattgccgggattttcacgccgagcgacgagcttgccaaggaggttgccgctgcttccgaggtatccggcgagaagttctggagactcccgctggaagagagctactgggagtctatgaagtctggcgtggctgatatggtcaacactggcggctggcagggaggttctattaccgtcgcgctgttcctgaaacagttcgtcgacgacatggtccagtggctgcacatcgacatggccgggccagtgtagagcgacatgtagctggccgccaccgggttcggcgtttccaccctggtggaaggggttttcaacaactatttc

SEQ ID NO: 4098 - DNA, 403 bp, Zea mays
  Clone ID: LIB3136-005-Q1-K1-B1
tacaagtccgacgaggccgtggccgccgaccccgagctgagggcgttctgggacgaggggcgcggcgtggggcacggcgacaagaaggacgagccgtggtggcccgtgctggacacccgcgacagcctggtggagacgctgaccaccatcatgtgggtcacctccggccaccactcggccgtcaacttcggccagtaccacttcgccggctactttcccaaccggccgaccaccatccggaagaacatgccggtggaggagggcgggccgggcgaggagatggagaagttcctcaagcagccggagacgacgctgctggacatgcttgccacgcagatgcaggccatcaaggtcatgacgacgcttgacattctctcgtcgcactcgcccgacgaggagtaca

SEQ ID NO: 4099 - DNA, 388 bp, Zea mays
  Clone ID: LIB3136-005-Q1-K1-G7
cctagttgaaaagagctatgatctaccttatggccaagtaatcaccattggggcagagagattcagatgccctgaggttcttttccattcattcatgattggtatggaggctgccggaatccatgagacaacatacaattcaatcatgaagtgcgacgcggatatcaggaaggacctctaccgcaacattgtgctcagaggaggttcaactatgttccctggaatcgctgatcgtatgagcaaggagatcacttcccttgcaccaagcagcatgaagatcaaggtccttgcaccgcctgagaggaagtataatgtctggataggagggttcattctagccttcctgagcactttccaacaaaatgtggatatctaaagaagagtacca

SEQ ID NO: 4100 - DNA, 362 bp, Zea mays
  Clone ID: LIB3136-005-Q1-K1-H6
gtcgaggagtgacggaccacaagttctaatcgcggcggcggactcgccccgtccgcgcgccctttcaagctctcgctggctcgcttcctggccccgaagctccaattcagtctccgccactcgtgctctcgtagcgtaaaagcaaggccagggcggacccaccgtgcccagcaaaagggaatggcggcctcggccgcgtaccctgcgtccgttaccaccgtgtgggcaatggccaaggccaccggcaacaaagagcgtcagaggcggcggctccgcgggcaccaacaaggtgacacgacctcctaggattacatctaatgttaagcagaacttaaggattctaaaattttgggaggaatttg

SEQ ID NO: 4101 - DNA, 282 bp, Zea mays
  Clone ID: LIB3136-006-Q1-K1-A1
tacggaagcatcggcattgtgtcgcgcgcgtatgggatggaccgtccgagctggctgtgtgggcgcaggtcgacggacaatagccccggagagacctacacctctgcgtacgaaaagattactgatgaacatgattctgccaagagctctccaaactcgactcgatcgcctgagatcacgttcaatgaactggaggacgataacgacgtgaaggtgaaggtattgagtgagaggctatcatgcgtacttctggatgatcgtgcgaaggatgatctcgtgaac

SEQ ID NO: 4102 - DNA, 318 bp, Zea mays
  Clone ID: LIB3136-006-Q1-K1-B3
aagcaagccatgtggaggagggcttcaacgatgggccggttcatggttggcgcctcgctgcgacgcggggccggcgacagccggcgcgcaaaactgcgtatgcagcatcataacacggtccatgttgcagagcatgctgagacaccggggatacagagggtgccagggcgccttctacacctacgaagccttcatcgaagccgccagcaagttgctcggctttagcaccaccatcgacgagcatacgcacatgccgtagctcgccgccttcttcggccagacgtaccacgagaccacctgtggatgggcgactgctcc

SEQ ID NO: 4103 - DNA, 300 bp, Zea mays
  Clone ID: LIB3136-006-Q1-K1-D12
aagcaccggagcaggcgaaacggctccgactacaatggcagcaacaagggcttccccggggcttctcttgctgctgctcaccgtccaactgagcttgctcttccgcctacccgactccccctacaccctcgccctcgccctcgccctcgccgcggaaccagaccaacagaacgccaagcagcatcgacagcccgcgctgctggtgcagtctacctgcaactccaccagcttctacgacctctgcataggcgcgctcgacgtcgaccccgccagctacaccggcgacgtcccaggcctggg

SEQ ID NO: 4104 - DNA, 335 bp, Zea mays
  Clone ID: LIB3136-006-Q1-K1-D6
aagcaccggagcaggccaaacggcgccgactacaatggcagcaacaagggcttgcgcggagcgttctcttgctgctgctcaccgaccaactgagcttgctcttccgactccccgactccccctccaccctcgccctcgccctcgccctcgccgcggaaccagaccaacagaacgccaagcagcatcgccagcccgcgctgctggtgcagtcgacgtgcaactccaccagcttctacgacctctgcatcgccgcgctcgccgtcgaccccgccagctacaccgtcgacgtcccgggcctgggcggcatcgccgtgtccgccgtcgcaaacaacgcc

SEQ ID NO: 4105 - DNA, 361 bp, Zea mays
  Clone ID: LIB3136-006-Q1-K1-D8
tattaagcaagctatgaagaaagctgaagctgcgggcaatgataattgtcctgtgaggaggaaactagttgctcctccactttatgttctgaccacacagacccttgacaaggaccaagggatttcagttctcactgatgcagtcaaggcttgtacagcagagattgaaaaatacaaaggaaagttagtagtgaaggaaccaccaagagctgttagcgagcgggaagacaagctattcctcgaccagattgattccctaatggaacaaaacgcagaggtcgatggtgacgcggacagtgaagaggaagaagatacaggaatgggcaacgttgatcttacaaattctggcgtcactgcttac

SEQ ID NO: 4106 - DNA, 254 bp, Zea mays
  Clone ID: LIB3136-007-Q1-K1-D12
acgcgtccgaagcacccgatcaagctaaacagctccccctacaatttctgcaacaagggctttcccgttgcttttgtttctcctgctcaccgtccaacttaacttgctctttcgcctaccctactccccctccacccttgacctctccctttacctctgcgggggaccagaccaacataacgccgagcaggatccacagcccccgctgctggtgcactcgacgtgcaactccaccaacttttacgacctctgca

SEQ ID NO: 4107 - DNA, 444 bp, Zea mays
  Clone ID: LIB3136-008-Q1-K1-D10
tagcacagtccattattgccgtctccctttttcgtgagcaaagaaagagagcgagaagggcggtcgccatgtctggcatcatccacaagatcgaggagaagctccacatggggggcgaccacaagaaggaggatgagcaccacaagaaggccgaggagcaccacaagaaggaggagggggagcaccacaagaaggacggcggggagcataaggaaggcatcgtggagaagatcaaggacaagatcaccggcgagcacggcgacaagtccggcgaccacaaggaaaagaaggacaagaaaaagaagaaggataagaagaagcacggcgagggccacgaccacgaccacgacggcggccacagtagcagcagcagcgacagcgactgacatctggtgtcgcagcacacgtgcaacacaagtatgcttgctggatggaggattcata

SEQ ID NO: 4108 - DNA, 184 bp, Zea mays
  Clone ID: LIB3136-009-Q1-K1-A12
acacatcaactaccaaattttattcgcttaccattctctctattaataccgcactccaccgtcgtcggcttatatcaataacccagccaactcaccgaaaaacttcattccatgcacaccacgctcacccgtgtagacgaccagcccctcctcaattattgaatcccgcccgacattcgacacc

SEQ ID NO: 4109 - DNA, 388 bp, Zea mays
  unsure (1)..(388): unsure at all n locations; Clone ID: LIB3136-009-Q1-K1-B8
taccagcctaccgatgtgttcagcatgagggagagtttgtcctaacgttccctcgggcatgggatgctggtttcaactgtggcttcaattgtgcagaagctgttaatgtggcaccaattgattggttaccaattggacaggatgcagtcgagctttatcgtaagcaagctcggaaaattactgtttcccatgataagctgttgctaggggctgctagagaagcaataagagctcattgggatattctgttccttaagagaaatactgctgataacttgaggtggaaaagcatgtgtggacttgacagcactatatgcaaatcgcttaaggcaagaatcgatttggagttggcgcanagacagaatatatgctctccatcttaatctag

SEQ ID NO: 4110 - DNA, 322 bp, Zea mays
  unsure (1)..(322): unsure at all n locations; Clone ID: LIB3136-009-Q1-K1-C8
cccacgcgtccgtacacatactccgccacttatttcttaaactagaatattcaattacggattctcggggctggcctgcatgtccacagaaggagcctacttccacactgtcttgnaccctgctcctgatttcttagccccacaacagacaaggtccatatgaccttncttttaataaaacccataaagctacctcacatacacctactgtcatccatctatcttcattaaaagcaaagatatcgcaacatgctagaaatttcacaacaacaaacacatcagcagattaagctaggtccatcgatcttgctcatcgctattt

SEQ ID NO: 4111 - DNA, 250 bp, Zea mays
  Clone ID: LIB3136-009-Q1-K1-D12
acgcacaatagctatctaaccttacttttcaatccataacaaacacattacattgttacctatggtccagtccatttactatacgcccacgcttcttttcataaccatcctttaccaagtcatttttttctttatcgacattttccacatcccacacacaacttccacttactacctattcatgaaacccctcaacctttcctattgcacaacgagttaatccagcccctttctactccagtttacacca

SEQ ID NO: 4112 - DNA, 392 bp, Zea mays
  Clone ID: LIB3136-009-Q1-K1-F10
gcctctctcatacgccttcctggcgattgctgcgacgaggtgacgatatagctgccccctggaggaaaacggacaagagaggcggacgctgatagggagaggagacggaggaccaagagcggcgtccatctaaaagcgttggcggcggccatggccaccgcggaccggacccggactttcatgaaggacgtcaaacgcgtcatcatcaaggtgggcactgcagtcgtcacgaggggtgatgatgggcgactggctgtgggccggttggggtgtctttgtgagcaggtaaaagagctgaatgtcttaggatacgaggtgatccttgtgacctcaggtgctgttggtgtggggaagcagaggctcaagtacaggaagcttgtcaatagcaactt

SEQ ID NO: 4113 - DNA, 192 bp, Zea mays
  unsure (1)..(192): unsure at all n locations; Clone ID: LIB3136-009-Q1-K1-G2
caccgctgacccaaagaaaacattgcacctgactgcgttggatggtgctaaggataggctgcgcttatttaaagctagcctgctagaagagggttctttcgatgctgcagttcatggatgcgacactgtatttcatactgcctcttccttttatcacaatgtcaaggatgctaangcagagttacttgaccc

SEQ ID NO: 4114 - DNA, 371 bp, Zea mays
  Clone ID: LIB3136-010-Q1-K1-A12
aagccaacaaccaaatcgaattcgccgacgactctctttattcctcccgctcgccaccgccgccgcctgagggcaagaagcgagcgagcgcaccgcggatctccctcccggccccgccgcgcgcaccggtgaagacgacgagcccctcgtgaatggtgggagcccgcgcgacgtccgtcgcctcgcagccgcagccggaggaggcctccttccgcggcttcggttactgcatgcagggctggtaccaccgctgcatcggtctcgacccctgaaccccgccgccgcttgcttctttgatttgatttgatttgattcggttcgttctgtccctcccgtcctggatctgttgcgcgagagcgcggcagcgcgcg

SEQ ID NO: 4115 - DNA, 338 bp, Zea mays
  Clone ID: LIB3136-010-Q1-K1-B1
taacgaacgaactcttgctccgatcacgagctagctgaggtcgacgatggcggctgtgctgagcgagcaggaagacgccgcaggcggtggtggccgtgctggtggcggcggcgctgctggcttcgtccgcttcggcggcgatcacctgcgggcaggtggggtcgtcgctggcgccgtgcatcccgtacgcgacggggagggccagcgcgctccccgcgtcgtgctgcagcggcgtcaagagcctcaacagcgcggcgcggaccagcgcggaccgccaggcggcgtgccgctgcctcaagagcctcgccaacagcgtcaagagcgtcaacatgggcacc

SEQ ID NO: 4116 - DNA, 380 bp, Zea mays
  Clone ID: LIB3136-010-Q1-K1-E6
tccggggttcggtttcgtgggtgagcggatcgagatggcggcgtcggatgttgagggccggggcttcatcggcggcctcgcctgggccacggacgaccactccctccacaacgccttcagcacctacggcgaggtcctcgagtccaagattatcctcgatcgggagacgcagaggtcccgcggcttcggcttcgtcaccttctccacggaggaggcgatgcggaacgccatcgagggcatgaacggcaaggagctggacggacgcaacatcaccgtcaacgaggcccagtcccgcggcggccgtggaggcggcggcggcggctaccgtggtggccgtggaggcggcggctaccgccgtggcgggcgccgtgatggcggcg

SEQ ID NO: 4117 - DNA, 424 bp, Zea mays
  Clone ID: LIB3136-010-Q1-K1-H6
tagaactctgcttcacgggccgaactacaccggaaaagcatagcacaaatgaagatggagagcacaatctgttcaagatatgcatatatatgctgatccttcacatgttcctgctgttcttatagaacaacatgtcatgggtgttccacagcatagttccagcaaggatttgccttcgcatgcttctgaacaaaaggatactattgtgctacctaaactacaaggagagcctctggtacccacaagtagtgatggtcaaaaacgtgtgcgcatcttgcgagctgccatttttgtgcatggatctcacggccatcattaggatttacgtcttgacagaaaccaatggcttctagtgcaccctggagctccgtgcctaatgtctgaggctaatgaacataaaacactttggagacttcaaagaaat

SEQ ID NO: 4118 - DNA, 327 bp, Zea mays
  Clone ID: LIB3136-011-Q1-K1-A1
tagcaaccggtccaacactttcacgctcaggcgctcagctctagcaatggctgcctccaccggggcgatctcctccacggcgatggccggtacccccatcaaggtgggctccttcggcgagggccgcatcaccatgcgcaagaccgtgggcaagcccaaggtggcggcgtccggcagcccctggtacggccccgaccgcgtcaagtacctcggccccttctccggcgagcccccgagctacctcaccggcgagttccccggcgactacggctgggacaccgccgggctgtccgccgaccccgagaccttcgccaagaaccgcgagct

SEQ ID NO: 4119 - DNA, 354 bp, Zea mays
  Clone ID: LIB3136-012-Q1-K1-F8
tttggctgttgccttgcgggtggcggctgctttggtgcgctgcgcagtgcgctccgtccgtccgtcgaccggaaggccgtcccctggcccctgctcgtcgtcttcctcgggcgctcgtcttcctccgaacgcgcgcgggccgccgacctgcttgttctcctggaggagcgcgcccggcgggcaggcgacgcagtccagcggcgggttgaggaagaaggcgagcgaccggtggatccccgtccagccgtcccctgctcctcttcctcgggtcgggcgctcgtcatccactctttctacagccctccatctgatcctcgtacgaccgacccctgctcgtctttctggtgctcggct

SEQ ID NO: 4120 - DNA, 233 bp, Zea mays
  Clone ID: LIB3136-013-Q1-K1-D12
tcgtatgcgaaactggagctccaaatatggaaaggctgctgaaagcgatttacgagctgtacacagacttcgttctgaagaatccgttctatgagatggagatgccgattcggtgcgagctgtttgatcacaacctggctcaggtgatccagaaggaccgtgttgcgctcctgggtcggtgaaattggaaagcttttggtcctaaccataccatgtatcttgacacccccccc

SEQ ID NO: 4121 - DNA, 321 bp, Zea mays
  Clone ID: LIB3136-014-Q1-K1-F8
tacgccttcataatacatgaggactggacgtattactcctgaaagtgtcggacacagcttgggaaccttactgattgatgttcttagtgggaaacatattcctactagccatgcccttgacctgattcgggaccgaaacttcaatatgctcttagactcatgtttagagggtcaatcttcaaatgaggaaggagcataaatggtacgattagcttcaaggtgccttcactatgaaccccgtgaacgacctattgtccgatcactagtgcaagcattgactcctctacagagggatgttgagactccatcttatgtgctgat

SEQ ID NO: 4122 - DNA, 378 bp, Zea mays
  Clone ID: LIB3136-014-Q1-K1-H4
atgcagttgaagatagctcccaacctagtcatgcttctgaagggaagtcgcatccaaaagggagtgttctggcaccgatggctggcttggttgtgaaagttttgcttgaagacggggctcaggtggacgcagggcagcctgtcatggttatggaagcaatgaagatggagcatgttgtgaaggcgcctcgtgccggatacgtgagtggcctgaaggttactgcaggccaacaagtttttgactccagtgtccttttcacaatcaaggacagctctgcaaactgagatggagcgatcactgccctagagtagttgcactgcaactgcatcaagcacccagcggatgctcgtccagatagagaagcgaaggaaataaact

SEQ ID NO: 4123 - DNA, 355 bp, Zea mays
  Clone ID: LIB3136-014-Q1-K2-F11
ggcgtgcggaaggagtctgagggaaccgtttactcagggtctcgaatttcctaggagcgggggcgatggctgggaagggaggaaaaggattgctcgccgcgaataccacggcggtcaagtcggcggagaaggacaaggggaagaaggcccccatctcacggtcctcccgcgcgggccttcagttttctgttggacgaatccaccgtcagctgaagcaaaggactcatgcaaatggccgcgttggtgccactgcagccgtctactctgccgccatcctggagtacttgactgccgaggttttggagctggccgggaacgctagcaaggatctgaaagtgaagcgtatcacccctcg

SEQ ID NO: 4124 - DNA, 408 bp, Zea mays
  Clone ID: LIB3136-014-Q1-K2-H11
tggaccactgcctgtttacgccagcggcggcctgtacctggtgcggacggccccggacgtcgccgtggacgacttctgcgggcaggtgtgcggcttccactacttcaccttcgcgtcggtggtcgggtccacgctgccgtacgcgtgggtgggaaactcggcgcgcatgtgccccgaggtgtgcgcgtacccgttcgcggtcccggcgtacgtgcgcgggcgcacgcccgagtgctcgcccaacggcgacgtctgtgtggacggcatggtcagcgtcatcgcgcacgagctcgcggagatggcgtacaacccgctcgccaacgcctggtacgccggcggcgacccgtcgttccccacggagatcgcagacctctgcgagggcatctacggcaccggcgggggaggggc

SEQ ID NO: 4125 - DNA, 377 bp, Zea mays
  Clone ID: LIB3136-014-Q1-K2-H5
atgcagttgaagatagctcccaacctagtcatgcttctgaagggaagtcgcatccaaaagggagtgttctggcaccgatggctggcttggttgtgaaagttttgcttgaagacggggctcaggtggacgcagggcagcctgtcatggttatggaagcaatgaagatggagcatgttgtgaaggcgcctcgtgccggatacgtgagtggcctgaaggttactgcaggccaacaagtttttgactccagtgtccttttcacaatcaaggacagctctgcaaactgagatggagcgatcactgccctagagtagttgcactgcaactgcatcaagcacccaacggatgctcgtccagatagagaagcgaaggaaataaac

SEQ ID NO: 4126 - DNA, 300 bp, Zea mays
  Clone ID: LIB3136-014-Q1-K2-H9
cggaccactgcctgtggacgccagcggcggcgtgtacctggtgctgacgtccccggacgtcgccgtggacgacttctgcgggcaggtgtgcggctttcactacttcaccttcgcgtcggtggtcgggtccacgctgccgtacgcgtgggtgggaaactcggcgcgcaagtgccccgaggtgtgcgcgtacccgttcgcggtcccggcgtacgtgcgcgggcgcatgcccgagtccccgcccaacggcgacgtctgggtggacggcatggtcagcgtcatcgcgcacgagctcgcggagat

SEQ ID NO: 4127 - DNA, 396 bp, Zea mays
  Clone ID: LIB3136-015-Q1-K1-A10
gagcagtctcccaacaagcacaaccgtctgtacatggaagcgcgccccttggaggagggtctcgctgaggccatcgatgacggccgtattggcccacgtgatgatccgaaggtgcgctcccagatcctctctcaggagtttgggtgggacaaggacctggccaagaagatttggtgttttggacctgagaccactggcccgaacatggttgtagatatgtgcaagggagtgcagtatctcaatgaaatcaaggattctgttgtggctggtttccagtgggcatcaaaggagggtgcactggctgaggagaacatgcgtggaatttgctttgaggtatgtgatgtcgttcttcatgctgatgctatccacaggggtggtggtcaggtcattcccact

SEQ ID NO: 4128 - DNA, 74 bp, Zea mays
  Clone ID: LIB3136-015-Q1-K1-A4
cggaattcccgggtcgacccacgcgtacgctttgcggatcagtatggtcgataccatgccgtcgcattggcttt

SEQ ID NO: 4129 - DNA, 415 bp, Zea mays
  Clone ID: LIB3136-015-Q1-K1-B8
tatattcttagccgtgattatatgacgctcaagctatgggatctaaacatgaattcaggccctgtttcaaccttccaagtccatgaacatttaagacctaagctctgtgatctgtacgagaatgactcaattttcgacaagtttgagtgctgtcttagtggggatggacttcgtgttgcaactggttcttatggtaatatatttcgtgttttcggtcgtcctccgggaagcatagaggcaacaactttggaagcaagtaggaacccaatgaggcgtcagattgcaaatccagcaaggcccacacggacactaacttcttttgcccgtggtgttcggagaggtggagaaaatcaaggcgttgatgctaatgggaattcactcgacttctcaacgaagctgctccacctcgcatggc

SEQ ID NO: 4130 - DNA, 410 bp, Zea mays
  Clone ID: LIB3136-015-Q1-K1-G2
taaggagccagggaaagttgtcgatgaattcaagctgcgtgtggtttatgtgccaacaactatgcccaacccaatccctgaagaatctgaactagggagttccactccctcattttcacaagaaaatgggatcgatcattccatgacgccactatctgtatctagatcgtctgctgaaacagcaaaggagaagccctctgaggcaacttctgtgatctccaagctaactgaagagaaaatgtctgctgttcagcagaaccagaaattacgccaagagctggagcttctacggaaagagagcagcaaaaccggcggcggtttctccatcaccttcttgtttgtcgtgggcctactgggcatcgtcgttggctacatcctcaagagaacatagtggaacggtgtctccagca

SEQ ID NO: 4131 - DNA, 445 bp, Zea mays
  Clone ID: LIB3136-016-Q1-K1-A8
ccgtgctgcgagaaggcgcacaccaacaagggcgcgtggaccaaggaggaggacgagcgcctggtcgcgcacatcagggcgcacggcgaggggtgctggcgctcgctgcccaaggccgccggcctcctgcgctgcggcaagagctgccgcctccgctggatcaactacctccgccccgacctcaagcgcggcaacttcacggaggaggaggacgagctcatcgtcaagctgcacagcgtcctcggcaacaagtagggccgccgcgcgcctctccctctccctcctacccctcgtcattcgtttcgtttcctaaactggccgggtacgttacgtgcaggtggtccctgatcgccggaaggctgcccggcaggacggacaacgagatcaagaactactggaacacgcacatccggaggaagctgctgagcagggggatcgacccggg

SEQ ID NO: 4132 - DNA, 322 bp, Zea mays
  Clone ID: LIB3136-017-Q1-K1-A5
gcctttttgtatgaagagtaatcagagggaacaaactggtagcactgtgctgtgtttcatccagtgttgctaattactctgtgttgttattcggtcaattgaatatatatgtgcttaatgtgctacaatgcttcggacgcgtgggtgagaaccatattattgttggagagcttcttgaacaaaaatcaacatctgaggttgataatgtaaacacacctcatattgcaaatggggatgcaagctggaatccagactctgaatctttccaagctactggtggtttcagtgttgcattctctctatcagtcgtgcagagtgagtg

SEQ ID NO: 4133 - DNA, 418 bp, Zea mays
  Clone ID: LIB3136-017-Q1-K1-F11
aagcaacaaggcagcagcacaagcaagaaccacacctcctcccttcgcctgtgatcatgtcgtcttgctgcggcggcaagtgcgggtgcggctccagctgctcctgcggcagcggatgcaacggctgcggtatgtaccctgacgtggagaccgccgccaccagcagcgtcaagaccacggtcctcgccgcgccgaccaccaaggccagcgccggcggcttcgaggcggccaccgagggcggcggctgcgactgcaacacctgcaagtgcggcaccagctgcggctgctcctgctgcagctgcaactgagccggcccggctcgcgatgcgcacgagagtcagagacgagacgaggagcgataatataatatatagcgcgtcagaatagatctgcactgaccgcatatcatgtcgtcgtc

SEQ ID NO: 4134 - DNA, 352 bp, Zea mays
  Clone ID: LIB3136-019-Q1-K1-A4
tagggataagggctatgacggtattgtgctcgagtcctggtcaagatgggctatttatggtgtgctggatgaccaagagctacgttacatggcacttgaatttgttaagcagctgggagaggttttgcattcagtcaattccaaaatcaagtagccaccatttggaattaatttatgttattccagctccaagaatgcaaaagctcaataataaggactttggacccaaagatctcatgcatctggctgacactgtagatgggttttctcttatgacatacgacttctcaggacctcagaatcctggtcccagtgcacctctgaagtggatacatcattctttagcagcact

SEQ ID NO: 4135 - DNA, 441 bp, Zea mays
  Clone ID: LIB3136-020-Q1-K1-B4
gaagcgacggcgctgccggagatggagacggttacggagacggaggcggcagcggcgaggcgggcgaaggagtctctggagctggctttccagatgtcccacatcctcgacaccggcctcgaccgccacaccctgtcgctgctcatggcgctctgcgaccgcggcgccaaccccgaggcattggcagccctcgtccgcgagctctcctctgctgctcccccaacctcctccgcggcttcctctaccgtgagcaacggcgccgcgggaccggcctcggcaattgcgcccacgttctcctccggccttcgccgtccctagggtgctgctaaaaagtctgaatggaaccggtgtagttttccaagcaagacaagatctcgctgctggaatcgctggatgaaaaggattgcctttacaattccatgtgcgcgctgctgtggtggt

SEQ ID NO: 4136 - DNA, 403 bp, Zea mays
  Clone ID: LIB3136-020-Q1-K1-D10
tgcggttcaccatcaccggcagcgcccacttcctgcaggtgctcatcaccaacgtggcggcggacggcgaggtggcggccgtgaaggtgaaggggtcgaggacggggtggatcccgatggggcggaactggggccagaactggcagtgcgacgccgacctccgcgcccagccgctgtcgttcgaggtcaccggcgggcggggcaggacggtcaccgcctacagcgtggcgccggcggactggatgttcgcgcagacgttcgagggcaagcagttcgccgagtagagatcgacgccgaaaaccaagtctccggcggtggtgatgtaagtagaattatacgggtggcttcttgctcgcgagtcgtgaccggtgactcgacaaaacgagacgtattgaatggcgaa

SEQ ID NO: 4137 - DNA, 406 bp, Zea mays
  Clone ID: LIB3136-020-Q1-K1-D11
gaacggtgagaccttaccttgcctttttaaacccatgccaaatgaacttatttgctgagaaagcttcagggttgttccttctgaatctataaaatttatcatcaattatttttcagtagtatagtaccatatagttgaattgaagattataactagtatcaatatgcatcaaatatgttctgtagtaagatcttgagttggcgcttcataccttgcattcccgttgtccttattctctctctctctctctctctctctctctcacacacacacacacacacacacacacacacacacacacaaactcaggtgctggccgttaagaagtttgatccattgagcttctcgggaagcagcgacttcatggatcttgtgaacagcattttcaaactgcatcattcaaaca

SEQ ID NO: 4138 - DNA, 443 bp, Zea mays
  Clone ID: LIB3136-020-Q1-K1-D3
cgcctggctgagctctcccactcccacgccgtttccacgctctctcctcagctcctgctcgagaacgcacgcagctcgagctgccggcgctataaaccttcgctcccttcgctgtactacggccggctgctgctactgctgcttgtcggggttgagttgtttcttggtgctgggatggagctggggctgagcctgggcgacgcggcagtgccggacgccggcagggcggctccggagctgggcctggggcttggggtcgggattggatccaacgccgccggaaccggcaggggaagcaaggcggcggggacgacgggaactactgggtggtgggcggcgccggccacaccggagtcggcagtgcggctcaacctcgtgtccagcctcggccttcagtggccacctacggacggcggcatctgtcatgtatggcgcgacgaggc

SEQ ID NO: 4139 - DNA, 439 bp, Zea mays
  unsure (1)..(439): unsure at all n locations; Clone ID: LIB3136-020-Q1-K1-H3
ncggtgccggcggcgaccacttgtggcgatccatccctcaccatgtcgtcggagaaggagggggcgctcgccgccgtgcgcgatgacagcccaaccatatttgacaagatcatcaaaaaggaaataccttctactgtggtttatgaggacgagaaggtactggctttcagggacataaaccctcaagctccaacacacattctcatcatccccaaagtcaaggatggactaactggcctggcaaaggctgaagagaggcacatagaaatacttggctatctcctctatgttgccaaggttgttgcgaagcaggaaggacttgaagatggctatcgcgtcgtcatcaatgacggcccaagtggatgtcaatctgtttaccacatccacgttcatctcctcggaggcaggcaaatgaactggcccccaggctaagaatatc

SEQ ID NO: 4140 - DNA, 224 bp, Zea mays
  Clone ID: LIB3136-021-Q1-K1-F2
gtcttcctttcccaactcggtcgacgctttcgctactgctgcgcaggcctcctcctgggcggggtgattcgcctgcgatcccctcccttcttcgactatacaagcacaccccctcatcctcttcgtaccttcaccgacacctaatcctcttcctctccgagcccacacccaccgcgctctctccttcccgtgcaggctccgctaccctgttgccgcgttcacac

SEQ ID NO: 4141 - DNA, 274 bp, Zea mays
  unsure (1)..(274): unsure at all n locations; Clone ID: LIB3136-023-Q1-K1-E1
aataatacaatagccatgcgttctttttattgcaagagtcagatggtaaaagcatgacagaaagcagaacaacttttggacgtgcttcaggtgtagacaatatctcaagggttgcttcagtatctgttcatcccaagtcaagcgaaacagcattcaaaatacttaagcaacttgacagaactattccttcccctacatcaaagccactagggctgagacagacattagccaagaaaaatactttntctggtgctacctacagacagattaaaga

SEQ ID NO: 4142 - DNA, 431 bp, Zea mays
  Clone ID: LIB3136-023-Q1-K1-E9
aagcagcccgcgggggacgagaagaaggacccctacgcagacctgtacgtggtgcgctggacgctggctcatggtgacgcccatcatcatcatcctcgtcaacatcatcggctccgccgtggccttcgccaaggtgctggacggcgagtggacgcactggctcaaggtggccggcggcgtcttcttcaacttctgggtgctcttccacctctaccctttcgccaagggcatcctgaggaggcacggcaagacccccgtggtggtgctcgtctggtgggccttcaccttcgtcatcaccgccgtgctgtacatcaacatcccacacatccacgggcccggcggcaagcacggcggcgcgatcggaaggcacggcggcgacgcacaccaccatggcatgacgttcgacggctactacctctggccgtgaagcg

SEQ ID NO: 4143 - DNA, 336 bp, Zea mays
  Clone ID: LIB3136-023-Q1-K1-G2
ggaggcagagactacatgaataaagacaagcttaaaaggacaaatgccttccttcttgcacgagctctgaacggagatgataatatatcggtggtacatctccacaaccttgacgacgacatataagacgatgcacaacggggagatcacttatttggcggctaggtgcttgatggccttgatcaggttttggaaggtattccagatgacatgaatcccaaagatcatagtgttcttgcctatggtgatgtcaatgtactcactgacatgctggacaacattgcgattgttgagcccatacacaaagatgaatcttatctggctgtccagaataaa

SEQ ID NO: 4144 - DNA, 417 bp, Zea mays
  Clone ID: LIB3136-025-Q1-K1-A11
actgcgatgctgtttacctacgggcgcttccttagccatcagcttgttaacacgatgactgcagataagttgttgtacaagctggtgagcaggctcatcaagtaccagatgtttatttgctactttctttacatagcaggttcatcctcccagcttcgttaattgctatcaatgatgttgctgcatatttctttgggttcttctttgggaaaacaccactgatcaagctctctccaaagaaaacatgggaaggctttataggtgcattagtgacaacattgctttctgcatttgtggttgctaatttcatgggccatttccagtggtttacatgcccaagaaaggatctaataactggattgctttattgtgacccaagtcccatgtttacaccaaaaggttatgatctaacgggat

SEQ ID NO: 4145 - DNA, 396 bp, Zea mays
  Clone ID: LIB3136-025-Q1-K1-A4
aagccaagttggttgtgccatgaactgccagttttgtttcactggaaggatgggtttgagaaaacatctctcgacagctgaaattgtcgagcaggctgtgtttgctcgtaggttattctcagatgaattgggatcaattaacaatgttgtatttatgggcatgggtgaaccatttcacaatattgacaatgtaataaaagcctcagcaataatggttgatgagcaaggtcttcattttagccctcgcaaggttactgtctccacaagtggtcttgtccctcagtaaaacgctttctccaggaatccaattgctccctggctgtcagtcttaatgcgacaacagatgaggttaggaactggataatgcccataaacagaaagtacaatcttaacttg

SEQ ID NO: 4146 - DNA, 437 bp, Zea mays
  Clone ID: LIB3136-025-Q1-K1-A6
tacaaactaaatgccgaggtttaaaaaaactcaagaagcatgtgctcttagctaaaactggttgtatgaaaactgatgtggctttaaacaccgtagaccagcttttgtctaaaccaacttatagaaactagatataaaaactggattcttaaaagactagtagattccaaccagggcctgatgagacttctaaacttgatagccaagctgaagaaagggtgcatcgaacctacaagcttagcaaatggcactacagctccaggatattctggtgcctccatctatagggagcgtcctatgctttatcttcaaataggtgtgtagcggagcagtgcaatcaacttctatgaactggacggctctgataggaccttcttgcttgacattactgactgtgagggataaacagatggatgctctaatttcctactgactgc

SEQ ID NO: 4147 - DNA, 414 bp, Zea mays
  Clone ID: LIB3136-025-Q1-K1-D5
tagtcacctgcctatctatctagcgagagagagagaggaaagctagctagctagcatggagtgcggcagcaagaaggcagcaggcggtgtgttggcgctgctgcttctccagctggtgttagctccgacgacggcgacggcccgcctcctgcaggcggatacctccaccgtggttggcctggacatcatcgcgagggagtttggccatccagtgagaggcatcctctgtggtgaaacctgtgtcttcctaccatgctatacggcagccatgggttgccaatgcattggccaaatctgcatgatgtgatatctggactagcgctatttgtaatttgtgttgggagaaacacaaggacggtacggtggtgttcaacttattgcatgtgtatggtgatctaataagtaaagtataat

SEQ ID NO: 4148 - DNA, 258 bp, Zea mays
  Clone ID: LIB3136-025-Q1-K1-H10
tgaagggctgtctacctgtggactctgcccatgttccattgcaatggttggtgctacacttgggcgctggcagcgttctgcggaacaagcatatgtcttcgccaggtgagcacaaaagctatatacgaaggcatcaccaagcaaggagtgacgcacttctgtgccgcacctgtcgtccttaacaacctgatcaacgctccggcaagcgagaccttcctgccgctgccccgcgtcgtcaatgtcaacgtggccggagcc

SEQ ID NO: 4149 - DNA, 363 bp, Zea mays
  unsure (1)..(363): unsure at all n locations; Clone ID: LIB3136-028-Q1-K1-C3
aagcacaccaccgctcgctccacagcagaggacaagaggaggagcaagcgagcaccgagcagaggcagcagctgctatggaggcgcggaggacggggagagatctcctcgcgagcttcgtgctcgcggcgttggccgcgcaggcattcgtggccgtggtcgagtccagggccagccccgcggagaaggctagccaaggtatagtacatcttcttgagctctgcccactccagatgaaacaagcaccaatgccgatgtcccatgagggcggcgccgaggcgagcaagctagcatttttttacctttgagatggcgtcgccgcatgcangcgacgacgtgaagaaagccgactgtgtgctgggga

SEQ ID NO: 4150 - DNA, 281 bp, Zea mays
  Clone ID: LIB3136-028-Q1-K1-D6
gcttatcgtctccaggcttcactcggacgagccgcccacggacagtacgaccacgagcacgaccgcgtcgtcgacgacgactttgagcatgatgggacggagcctcgccagcgtggagtcggacgagctgaccccgagcagcgtcttctcgcagctcatgcattcaggtggcagatgaaaacggaaagtacaactggagtagatatcgtctgatcgatgtgctatatatatgtttctagtccatgctatatatatgtggggcaaccaggattagttatgct

SEQ ID NO: 4151 - DNA, 340 bp, Zea mays
  Clone ID: LIB3136-028-Q1-K1-G10
aaggagtatgtctttgttgcaaactcagacaacttgggtgctatactcgacatcaagatgggaaaccatctgatcaataaccagaacgagtactgcatggacgttactccaaagacgctggctgacgttaagggtggcactctcatctcttacgaaggaagagttcagcttttggagattgcccaagtacccgatgagcatgtgaatgaatttaaatcaatcgagaagtttaagatattcaacactaacaacttgtgggtgaaccttatagctatcaagagactcctagaggctgaggcacttaagatggaaattattccaaaccccaaggaagttgatg

SEQ ID NO: 4152 - DNA, 253 bp, Zea mays
  Clone ID: LIB3136-029-Q1-K1-A11
cacgtacgctcgctcctactaccacccctacggcatctttacgcccgaccacctcgccacggggcggggcagcaacattaagaacgtgccaaacatcattagtgatcacctcgacgcgtagaccgtgctgccgatacatgaacccggagctcgacggtaacaagatgctctgttatgccaacttcaccaacggccgcgtgtagattctatatgacaacaaaagccacatttccaacattattcatatttacaa

SEQ ID NO: 4153 - DNA, 396 bp, Zea mays
  Clone ID: LIB3136-029-Q1-K1-E10
ccacgcgtgcgtacgtcactgccatcaaggaggaaatcaacttggtcgtttagctccaagaagagcttgagggtgatgggcttgtgcatggcgagcctgagagaaacgatatggttgagtactttggtgagcagctctccggttttgcgttcactgccaatggctgggtgcagtcttatgggtcaaggtgcgtcaagccttcgatcatctacggtgacgtgagccgccccaaccccatgaccgttttctggtcttagacggcgcatagcatgacgtctcgcccaatgaatgggatgctgactggtccagtcacaatccttaactggtcctttcttcggaacgaccaaccgatgtttgagacttgctaccagatcgctctttgcgatcaaaaaagga

SEQ ID NO: 4154 - DNA, 280 bp, Zea mays
  Clone ID: LIB3136-029-Q1-K1-H3
cgggcaggggcaccattaccgagtagtttaattagtgctagttgtattaccattgttagtgactgaattaccctcacgcgacgaccttacctatgctagtcctctacgtctcttctcttcgcttaatcttggtcggtgatttgattcttcacttcttgcgcgcattgcagagggtgctcggtctgcagctatcttaggttaaccagtcgtgtgtggtctatcggtttcgatatagtattactactgctctgttataatcagcggtgaagaggaagatgac

SEQ ID NO: 4155 - DNA, 141 bp, Zea mays
  Clone ID: LIB3136-030-Q1-K1-C11
tttgcctgcgccgccgccaacacaacccttgagccccaatccctcacagcaacggtggggggcgctcaagaatacctctctctcgtgggcaccatgcgcggccacaacggcgaggtgacggtgatcgcgaccccgatcgac

SEQ ID NO: 4156 - DNA, 345 bp, Zea mays
  Clone ID: LIB3136-033-Q1-K1-C2
aagccaacaaacagagctccaactcagaaagcatccgtcccttggcagcagcaacaagctagtagctatgtgtgtttagagcgagcgagggaaaaaaaagaaaacatctaagatatactccatcatcttcgtttgattaacccgcccagtaaagccatgggtactaatgatagagcggtcatttctctggtactcctcgtgtgcatcgctagccgctcgtccttgggtgccgctgaaactgacgttgagcagaagcgcttgtcagtcccgttgatgtttgtgttcggtgattcgctggtcgatgtcggaaacaataacttcctgccgccggctgcaccccgtgct

SEQ ID NO: 4157 - DNA, 386 bp, Zea mays
  Clone ID: LIB3136-033-Q1-K1-C7
tccgggttcattccagtaaatctatccatcaagttgtagaaggagacacaggtcaggctgaaaaatatgcagttttgcatcttcgttttgataaggatatggctgcacattctgcctgtgactttggaggtggcagagctgaacagctagctcttgctaagtacaggcaagtaatatggcaaggaagggtattaaattcacagctaactgatgaggagcttcggaacacaggacgctgcccattgaccccagaagagattgggctgttactggtagcccttggctttgacaacagaactcgactctatcttgcttctcacaaggtatatggtggagaagccaggatctctagcttgcgcaaactatttccgttgatggaggacaag

SEQ ID NO: 4158 - DNA, 378 bp, Zea mays
  Clone ID: LIB3136-033-Q1-K1-G6
cacacacacacacacacacacacacacacacacacacacacacacacacacgcagacgagtggtttacaaagccaagtgtgtgtactagcaaccagctagctcgggcggcagcaggcagccatcatgtcggaggagaagcaccaccacttcttcaaccaccacaagaaggacgaggagcagcccgccggcgagtacgggtactccgagaccgaggtggtcaccgccaccggcgagggcgagtacgagaggtacaagaaggaggagaaggagcacaagcacaagcagcacctcggcgaggccggcgccatcgccgacggcgccttcgcactctacgagaagcacgaggcgaagaatgaccccgagcacgcgcacaggca

SEQ ID NO: 4159 - DNA, 322 bp, Zea mays
  Clone ID: LIB3136-033-Q1-K1-G8
aagcgctcgcgagctgctgtcatggcaggcgccggtgcgcccgcagttgggcaggggggtcgcccagcccccaacttcgacgtcatcgtggtgggcgccggcatcatgggcagctgcacggcgcacgcggcggcgtctcgcggcgcccgcgtcctgctgctggagcgcttcgacctgctccacccgctgggctcctcgcacggcgactcccgcatcatccgcgacgcctacgcgcagccgcggtacctccgcatggtgcgcctcgcccggcgcctctgggccgcctgcgaggccgatgctggctaccgcgtgctcaccccga

SEQ ID NO: 4160 - DNA, 350 bp, Zea mays
  Clone ID: LIB3136-034-Q1-K1-D5
ctgagatggtccgtggcttgatgctaactctcaagtacttcttcgagagaaacgttaccgtaactatccgtttgagaagggtcctctgagtccccgcttccgtggtgagcacgctctcagacgttacgaatctggggaagagcgttgcattgcttgtaaactatgcgaagctatatgcccagctcaggcaattacaattgaggctgaagaacgtgaagacggcagtcgccgaaccacaaggtatgatattgacatgaccaaatgcatttactgtgggttctgccaagaggcttgcccagtcgatgctattgttgaggggcctaactttgacgttgctactgagacacacg

SEQ ID NO: 4161 - DNA, 320 bp, Zea mays
  unsure (1)..(320): unsure at all n locations; Clone ID: LIB3136-034-Q1-K1-G3
tacagatctgacgctaccttccgttcgattcccttcgcgtctttcttcctctgctggacgcaagtactcccatggcggtgttgttgcttcactgcaaattagagcagaaaattctgtgtctagatcaagatgagctcatgtctacttggatcagtttagcatagtcagtgtagaactgtttgacttccgagttcagatatttagctagcatagcctagtgaattttgttcctccagtgggtcatcaaggtgtgcatgtgtcctgngagagaaagaagaagatccagtctgcaggatggatgcaatggcacctgaaaaata

SEQ ID NO: 4162 - DNA, 380 bp, Zea mays
  Clone ID: LIB3136-034-Q1-K1-H1
tgcagctgtacctggacaagtccaccggcacgggcttccagacgcggggctcctacctcgtcggccacttcagcatgcacatgaagctcgtcggcggcgactccgcgggcaccgtcacggccttctacctgtcgtcgcagaactcggagcacgacgagatcgacttcgagttcctgggcaaccggacggggcagccctacatcctgcagaccaacgtgttcaccggcggcaagggcgaccgcgagcagcggatctacctctggttcgaccccaccaaggagtaccactcctactccgtcctctggaacctctacatggaccgcgtcttcgtggacgacgtgcccatccgggtgttcaagaacacgagcgccgacctgggc

SEQ ID NO: 4163 - DNA, 420 bp, Zea mays
  Clone ID: LIB3136-036-Q1-K1-C12
tacctacgcagcagaggccagccacctccccgtcgctctcacgctcttcgtgcccgccgccggtcctccgtctctgcctctctccctctcccctcccgtctgacgcacatggcctccatcgccggatcttcggccctctccttcgccaggcccgtcaaggcaatcaacacaaattctctagctttctcaccgttgaggaagggcaacatattcctccgcctgcaaccaatgcctatgagatctgtttcctgcgctgccaagaaggatacaacagacaaggtttgtgagattgtgaagaagcagcttgctcttcctgaccatactgaagtttgcggtgaatcgaaattctctgaactcggtgcagattcactggacacggttgagattgtgatgagtctcgaggagcacttcgatattagc

SEQ ID NO: 4164 - DNA, 449 bp, Zea mays
  Clone ID: LIB3136-036-Q1-K1-F10
gacggcgcgcaagtactacgccagctccaatgtgccgttcccggcgctgcgcctcggctcggcgccgtcgaccggaactgctccctcggcaggcgcctgacggagagggacctgctcaggctcgccgccaggggagccccgagccgcgccatcaacctggtgctcacggccgccgacgtggccgtggacgggttctgcgagtcccggtgcggcacgcacggcgcgtccccgcggtcccgctccggccggttcgcgtacgtgtgggtcggcaacccggcgtcgcagtgccccgggcagtgcgcgtggccgttccaccagcccgtgtacggcccgcaggcggcgccgctcaccccgcccaacggcgacgttggggtcgacggcatggtcatctcgctggcgtccatgctcgtcggcacggtcaccaacccgttcggcaacgggttctacta

SEQ ID NO: 4165 - DNA, 249 bp, Zea mays
  unsure (1)..(249): unsure at all n locations; Clone ID: LIB3136-036-Q1-K1-G3
acggctactcccgcccatgctctctcctttaccggcgctctcgctgccgccgccgcttggggctcgcatccacgtccgcacgtcggcggtgagaggcggtgcggcggataacgcggcggcgtccgggacgacggcgagggagcggcgcctggtcaaggtgcgggaggagcgccgccgccgcgagtacgaccgggagcacacctaccccggatgggccaaggtactggagaacgcctgcanggatgatga

SEQ ID NO: 4166 - DNA, 73 bp, Zea mays
  Clone ID: LIB3136-037-P1-K1-C10
accgggaggaattcccggtcgacccacgctcggaagagggggtcgcggaatatttagcgcgttcaacgttcaa

SEQ ID NO: 4167 - DNA, 58 bp, Zea mays
  unsure (1)..(58): unsure at all n locations; Clone ID: LIB3136-037-P1-K1-D3
accgggccggaaatnccgggtcgacccacgccttcggagacacttggagatttatttt

SEQ ID NO: 4168 - DNA, 145 bp, Zea mays
  Clone ID: LIB3136-038-P1-K1-F5
gtatgggaagacattgcaagaactgcaagttttatttgaacgaaagcagacccttgcattgacattctggcaagaaccagatacaagatggagatttgcagtcccatggcgcttttatagaagatttgtgtttagattataactc

SEQ ID NO: 4169 - DNA, 393 bp, Zea mays
  unsure (1)..(393): unsure at all n locations; Clone ID: LIB3136-039-P1-K1-A10
gcacaccggggacattggttatgtggacgatgacgacgagatcttcatcgttgacaggctgaaggagataatcaaatacaagggcttccaagtacctcctgcggagcttgaagcccttctcatcacacatcctgaaatcaaggatgccgctgttgtctcgatgaaagatgaagtcgccggcgaagtcccggtggcattcattatacgcagngaaggctctgagatcagtgagaacgagatcaagcagtttgttgcaaaggaggtcgtgttctacaagaggatcaacagagttttcttcacggattctatcccgaagaatccctccggcaagattcntaagaagggacctgagagcgcggcttgccgcgggcattccgagcagtgacaacacac

SEQ ID NO: 4170 - DNA, 395 bp, Zea mays
  unsure (1)..(395): unsure at all n locations; Clone ID: LIB3136-039-P1-K1-A12
gacgcgctccccagtccccacccccctctcgtgtcgtggcgacgactggggggctgtcgctgccgccctacgtcaggtggccaggtcgtattagggcacttcgccggcgacgagtaccacaaggcagtggacactttctctggtatcagaggatcaatgtccaattattatgatgactacgatgacattgacgggatggaggatgattatgatatggatgatcccattgatgacatggtagacgagcagcaagggattagggattctgatgtggaagataatgattatggacaaccaaatgataagatcccagatacttcatcagcagatgcangaaaaggtagggacattcaaggaataccctgggagcagataaacataacccgtaaaaattc

SEQ ID NO: 4171 - DNA, 394 bp, Zea mays
  unsure (1)..(394): unsure at all n locations; Clone ID: LIB3136-039-P1-K1-B12
gttcaccaaagcaaaccgaagccgcactctaccgcgctcctcccgaaccacagctatgctcgcccaccgcctcctcctcctcctcgccgtcgccgcggcgagcggcaccgccttcgctaagccgacggcgtacgaagccctcgctgactacgacttcccgccggggatcctccccaagggcgtggtcgcctacacgctcgacaacgccacgggcgccttcacggccacgctcgacgccttcgcgtccggcagcgggtcctccgtctgcgagttctccatccagggctcctactcgctccgctaccagaccaagatcaccggaaagatcgcccccnaccaccttaccgacctcgagggcgtctnctgcaaggtcctcttcttctggctcaacatc

SEQ ID NO: 4172 - DNA, 277 bp, Zea mays
  unsure (1)..(277): unsure at all n locations; Clone ID: LIB3136-039-P1-K1-C10
cggacgcgtgggcaccaccaccggacgctagctcaccaccaacctcagcacatcgaggagaagaggagtggccaatggcttcgtcggtggccgccgcggcgagcacattcctgggcacccgcctggcggacccggtgccgcagaacgggcgcatcgtggcccggttcgggttcggcggcggaaagcccaaggctgccgtcccgaagaaggtggcgaagacgtcgatctcctttgaccggccgttgtggttccccggcgccntggcgtccgactacct

SEQ ID NO: 4173 - DNA, 445 bp, Zea mays
  Clone ID: LIB3136-040-P1-K1-A6
tcacttccaatttcctatcccttctcaattgactttcctctggaccatacactaaaggcttcatgctgcttagatgatgctgggtacgtcccgccatgttcagataattctgacaaagtgaaccgaccaccagcgaccttcgtgaaggtttacaaatctggaacctacgggaggtcgcttgatatcactaggtttagcagctatcacgagctccgtagggaactggggcgcctatttggccttgagggccagttggaagacccattgagatcaggctggcagcttgtattcgtcgaccgtgaggaggacgttcttctcgtgggcgacgacccttggcaggaattcgtgagcacggtgtcctgcataaagatcctctccccgcaggaggtgcagcagatggggaagcagggcctggagctcctgagctcgtcccccgcgcggaggc

SEQ ID NO: 4174 - DNA, 397 bp, Zea mays
  Clone ID: LIB3136-040-P1-K1-B5
aagctctgcaacctcgagctcttcacgcatttccgcctcgaggcgctcaggcccatcctggaggacttggtcaccgccatggtcgagtccgtctacaaggccgtcaccgcgcctgggaagccgttggtggtaaagaaccacctctcgatggtggccttcaacaacatcacgcggctggccttcgggaagcggttcgtggacgcgaccggcgagctggacgagcaagggcgcgagttcaaggggatcgtccacaacggcatcaagatcggtgcgtccctctccatcgcgcagcacataccgtggctgcgctggctggccccggtcgacgagcaggccttcaaagcccacggcgaacggcgcgaccgcctcaccgtgaagatcatggaggagcacgcca

SEQ ID NO: 4175 - DNA, 118 bp, Zea mays
  unsure (1)..(118): unsure at all n locations; Clone ID: LIB3136-040-P1-K1-C8
gccgcgctcttcttcccaatccanctcttctccccccttctacttccaccctaccaaagaatgttttaaaaacactcgtctccttccccctcttcaacataaccccttcccaatcctt

SEQ ID NO: 4176 - DNA, 218 bp, Zea mays
  unsure (1)..(218): unsure at all n locations; Clone ID: LIB3136-040-P1-K1-D6
ncaggctccacaccaccccgaccacaccttatacaacaatgcccaccttcctcttcagacgccgctctccaaccttcttcttttcgaccacctccctccgcgccgccccgtcacctaccaccttggcgctgcctgcttccaacatggtcatcatgtcccgtatcgccatcatcatgctcattcttctctcgcaagccacctacaacttgaatcttatc

SEQ ID NO: 4177 - DNA, 397 bp, Zea mays
  unsure (1)..(397): unsure at all n locations; Clone ID: LIB3136-041-P1-K1-A11
catttgactactacgagagggatgtagcgtcgtcgcgctcggggtgggcctggggaagactcctccgcgagaaggagcttcactctgtgtaccacatggatgggcacgcacacattaagacccttgctactttcgttactttatttcccaacaagaacaggcctgggctcggatttgacgatgtgcctgtgcttaactttgatgcaggccttgtactgtatgggcagcaattcatatacatctattggacaatcccttcgtatgccagcggtgtaaacaggcttgaagtagcttgattggacgacacggggaaagcaactattcttgatatcgnaactaccacaagccttagagagtcaggcgaaagcacatgcatgaacaggagttctatatactt

SEQ ID NO: 4178 - DNA, 62 bp, Zea mays
  Clone ID: LIB3136-041-P1-K1-A9
gccccggaaccggttccttcttaagtacgaagaccttcgggcctacacttgaattttatgag

SEQ ID NO: 4179 - DNA, 337 bp, Zea mays
  Clone ID: LIB3136-041-P1-K1-B11
gtctgcagtgtggaaatacttgcctaccaagagaaaccgggagatacaaaagctagatcaagaagtccggtcactaatcctggatctctcaagggaagacaggagccgaagccgcagcaataatgccggcacgcatgtgtccacatacgacaaccttctgcatgccattgtcgatggtgcaaaccagagccccagctactgcagtgcccctgaagatttcatcgtcgacaactgcaagaacatctactttgctgggcatgaaactacagcggtcactgccacctggtgcctgatgctccttgctgcacacccagactggcaggaccgtgctcgggct

SEQ ID NO: 4180 - DNA, 154 bp, Zea mays
  Clone ID: LIB3136-041-P1-K1-B9
aatcgctgcccgctctccactccttcggtccttacgccggcgggcacgcgccgggcgagatggaagcgggaccatgcggccggaccttccccccgttatcggtcttctccgcggggcctagacactggcttctgatcgcgggcccggcctcgcg

SEQ ID NO: 4181 - DNA, 150 bp, Zea mays
  Clone ID: LIB3136-041-P1-K1-C11
cgattatgttgggctacaactgcactgttttgaaggagcttgaggatgccttgcgttgctgttgacgtgtttctgtcgatatgcccttcactcttgatcaagtgaagacgaagccagcggggatatgccggatgtatagctctgtgctat

SEQ ID NO: 4182 - DNA, 383 bp, Zea mays
  unsure (1)..(383): unsure at all n locations; Clone ID: LIB3136-041-P1-K1-D11
aagggctgtcacggtcccgccgtcgcttttcattccgcgcggcgaactctctgacgccatcgtgggctgaggctgttgatgttttnttattttttttttttttnttttnttttttttttgttttttttttttttttttttttttttttttnnnnntttttttgtttttgtattttaatttttttttttgttttttttttttttttttttgnntgnntantttttttttttttattttgttattttttttttttattttttatttgttatttttttttttttttttcattttntatnanctattttttcttttttgatttttttttttttttttttttttttagtgatttttttttttttttcttttttttatttttttttttt

SEQ ID NO: 4183 - DNA, 258 bp, Zea mays
  unsure (1)..(258): unsure at all n locations; Clone ID: LIB3136-041-P1-K1-D9
cntgtcggtcctactggtttaaaaactttgtaacaagcatcacaacagtttttacctgtgcgtgcaaaagcgatgcatgaaatcaacgcatagctcaccatggaggctgttgatgcctaacatttgtgcttaacttaaaatgcaacgtcttacanncccnatgcaccaatttatcttgaaaatattgaaaccagtgctgctgttcctgagccaantcatgattgattggaggtatgtgtatcctaagcccagatccga

SEQ ID NO: 4184 - DNA, 150 bp, Zea mays
  Clone ID: LIB3136-041-P1-K1-E11
aagaaagtcaagatgaagctgttgaggttgaggctgagggttcaactgatggtgctgtccttgtgaatggaaacagtagcgaggaacagtggggtacgaaaaatgaagaaccatcagcataaaagctgtagttgagcaagttgttgactg

SEQ ID NO: 4185 - DNA, 266 bp, Zea mays
  Clone ID: LIB3136-041-P1-K1-E9
cccacgcgtccggttcaggagagccttattcatgcaatggagactggtaggtacaaggacttgcatgggggacgagtgactgatcttaatgactcgattgtggtgttgtctacaagaatgatccaaggatgccaggatgcttctcttggggtggaagaaggcaatgctttttcagaagaaaaggctgtggcagctcgggggcatcaactgaagatcatagttgagccgggcacaaccaacattggtgggggcaacgttgtagtttc

SEQ ID NO: 4186 - DNA, 264 bp, Zea mays
  unsure (1)..(264): unsure at all n locations; Clone ID: LIB3136-041-P1-K1-F10
ttaagaagctgcccggaggccacaaggacttccagcacgccacttctactaccggcggggcctactggcagcagggacacaccggcagcgcctacgggcagcaaggacacaccggcggggcctacgccaccggcaccgagggcaccggctngaataaaggcattatggacaagatcaaagagaagctgcccggacagcactgagcgcccataagtacagtggctgtgctggcgcgtcaaaaccgtaatggtcagtgttccatat

SEQ ID NO: 4187 - DNA, 321 bp, Zea mays
  Clone ID: LIB3136-041-P1-K1-F11
tgcattctcttgccaatggcccagaggatcttctgtttttggcttgtagtcatctagataacagaactacaatgactagagtgtccagaatggattttggagattttgatatctaaccatgaggtgagtgtcacaggccttttatcatatttttctaacaaggatcatgctcagatgacataaactgtatttcttcattccatgtattcaaactgtagatgggcacaaataaaaatgataattttgaagcaaaacaacctcagtaacattcatgtttcgtagtgtcatggccatctgcccatcccttctttggggataagt

SEQ ID NO: 4188 - DNA, 370 bp, Zea mays
  unsure (1)..(370): unsure at all n locations; Clone ID: LIB3136-041-P1-K1-F12
cgcaaggatgcagaggtagccgtaaggaaagctgaagcagctcagaagcgagctgatgatatcgcttcgggagcggtgcagatgaacggccgcgagctgttccaacaagagccctgggtgtttgacaaccacatttactgagatcgtgtcgggctactgttcctgcattagtccaagctccagcggtggtttcattttgtactgctatatcagctttgcggaactgtggattttatttcaccgtttataagattattctctcaataggtatttgaacttgtttcaaatacgttttgtcaaatctttgtgcagtcaccgaattgatttttagnttcgttattctttttttaaaactcttacaaacaaagag

SEQ ID NO: 4189 - DNA, 307 bp, Zea mays
  Clone ID: LIB3136-041-P1-K1-F9
gattcagctcagcttcaccaccaagaacatgatctcgacgaagcagccagacgacaggggggcagcaccggggggaacgcggcagacaaacaggctctcccgctcgtcagctagcagccatgagtaccatgaagttttgccgtgaatgcaacaacatcctgtaccccaaggaggaccgggagcagaaggtgctcctctacgcctgccggaactgcgaccaccaggaggtcgtgggcaacaactgcgtgtaccggaacgtggtgcaccacagcgccggggaggtcacccaggtgctccaggacgtggt

SEQ ID NO: 4190 - DNA, 301 bp, Zea mays
  Clone ID: LIB3136-041-P1-K1-G10
aaaaggctctcgcctcggcttggcagtcggcactccctctccaccgcgctgcaggggcgacgcaaggccgagcgctcctcgatccagatccaaggtaggagatggctctcacgagaattggcctcgccggcctcgcggtcatgggacagaaccttgccctcaacatcgcggagaaagggttccccatctcggtctacaacaggacaacctccaaggttgatgagaccgtgcagcgtgccaaggtcgaaggaaacctcccagtgtttggttttcacgaccccgcgtccttcgtgagcttcat

SEQ ID NO: 4191 - DNA, 395 bp, Zea mays
  unsure (1)..(395): unsure at all n locations; Clone ID: LIB3136-041-P1-K1-G12
gctagctcttgtcttgtcactgagtgagcagaaggagtgtgtggtggagtgcaaaccaaatcaaattaagaaaagtgggagcgaggaggaagaaaagaagaagaagaagacgacgacgacacccaccaccagcagcaaccagcataacgaaatgtcgatcaagtactgcgaccagcacaaggactgcgagcggcagcgtctgtaccgncgcttctgcgccgccctggtgggcgtcatcgtgctcgtcctcctcatcgtgctcatcgactggctcgtacttcgccccaccaagccttgcttcttcctcaacgacgtgagcatcgtgtggcattttttttaggtccggcttctaccttaccgtcaccatgcaggccacgctggcgttgcgcaacacc

SEQ ID NO: 4192 - DNA, 295 bp, Zea mays
  unsure (1)..(295): unsure at all n locations; Clone ID: LIB3136-041-P1-K1-H12
cgcagattgggtggatctatggttctgtgacggaagatattctcactgggttcaagatgcgcgcacgaggctggcggtcgatctactgcatgcctaagcggccggccttcaagggatcggctcccatcaatctctcagaccgtctgaaccaggtgctccggtgggctctcggttcagtggaaatccttttcagccgtcattgccccctatggnacggctacggatgacgccttaagttcttggagagattcgtctacattaacaccatcatttacccgtttacgtgccttccgtt

SEQ ID NO: 4193 - DNA, 310 bp, Zea mays
  Clone ID: LIB3136-042-P1-K1-B4
tcgcgcagcgaaagagggagcttgcacgggccaacgcacacacaacacaagctcgtcgtcaatggcgcggtgtgctggggtgctgacgctacccgcagccaccgacatctactcggctgccagggagaaccatccattagcttctctactacctctcttgcttcacgttccttcagcgcgttctggtggccagcgcatcgcaatcaccgtgctcaactgtaaggcacgcgctagcggcttttcggtcgtctctatgcacagtgaaacgggcaccgcatacctcgccgtcagcgagctcatcccttctggc

SEQ ID NO: 4194 - DNA, 52 bp, Zea mays
  Clone ID: LIB3136-042-P1-K1-F7
aataccgggccgacccacgcgaccgatcaggaggtagtccgagcaactacaa

SEQ ID NO: 4195 - DNA, 195 bp, Zea mays
  Clone ID: LIB3136-044-P1-K1-F4
gttcagacaagctcgtcgtatcaacctcctgttagctcatgcacaccgctgtggatctggggagcgtgactatgcttgacagcatcattatctcttacctttccttctactacgaccttaacaccgtcgaggcccgatggtaggtgagcccttaactcgttctgagatagcattctcaggttctttacatattgt

SEQ ID NO: 4196 - DNA, 380 bp, Zea mays
  Clone ID: LIB3136-044-P1-K1-F8
taaaagcactgtccaaacaggaaggagcaatggatttaaaaactacgtcttcttaacacagatagggctgccacaccatctcttcttttggatttgagcttatattttttttatctcctctgttttctgttcttaatgattgtgtaaaatggtaactatgaaactttacatgaatgatataaacaaaaaagtgatctgatagtatgatgtactttggttgatgggtttcttatcgattgctttttccacagccttgctttgtataccataacattcatttttctttttggttattgctgattcagtatttgtatttaatttttgcatttaattgcttttctttttattgttatgttttttatctttcttgtttttatttt

SEQ ID NO: 4197 - DNA, 382 bp, Zea mays
  Clone ID: LIB3136-045-Q1-K1-B6
tagacttttccatctgacaacgggtggtgtcagtaaggcatcaaagagtatcaatttaagtgaagacatttttgcaggttataactcaactcttcgtggaggcaatgtaacacaccatgaatatgtacaagttggtaagggaagagacgtcggattaaatcagatctctaagtttgaggctaaaatagcaaatggaaatggtgaacagactcttagtcgtgatatctaccggcttggacaccgctttgattttttcaggatgctttcatgctacttcacaaccgtggggttttatttcagtacactgttgacggttgttacagtttatgtatttctgtatggacgcctttatcttgctctcagtggacttgaagaggggcta

SEQ ID NO: 4198 - DNA, 56 bp, Zea mays
  unsure (1)..(56): unsure at all n locations; Clone ID: LIB3136-045-Q1-K1-F11
cggnncggaanncccgggtcgacgcacgcgtccgctcttccattcaacatactcta

SEQ ID NO: 4199 - DNA, 321 bp, Zea mays
  unsure (1)..(321): unsure at all n locations; Clone ID: LIB3136-045-Q1-K1-G12
atcgaggcggcgcatagcatangtaaacccctngccgtatcccttctttccgcacagcagctcgagtcctcgttctcttccgcatcctcctcctcgncaactccantcgtcttcagcccttcaccacaatcaggcccaccgtcctcntccacatttcttctcatccaaccgccccgtaggatcacagagaaaggggatggctagcggcggggcggtgagggatgtgtgctcgccggcggagctggaggcggcggtggccgtngctcnagcggtggccgtgcacttctgggcgtcctggtgcgaggcgtgcaagcagatgga

SEQ ID NO: 4200 - DNA, 434 bp, Zea mays
  Clone ID: LIB3136-045-Q1-K1-G6
tatgggcctcctatccaggccttcctgtatcaaataccaatcattggttggattctgcagtacccattccagctgcttggtcagttgaggcgtaaacgcacctgaaatgttctgcaactgccaagatactctttgactcttcatggttaaagtaccgtgttgttgtgatgtttatacatgattctcacttgtacccttcaatccttcacgttgcgtcttcaactcttgtgcatattcgtactctgagtcattctggcattgtccctttttgcgagcaggctatggtttattgttcatatttagacaataagagttcataagttgatggatggtccgactcttgaagcaggacctcagtgccttttggtcatcacaacaacaacggggccagagtgatcacacctgatttatatctgattctggaatctggacaa

SEQ ID NO: 4201 - DNA, 436 bp, Zea mays
  Clone ID: LIB3136-047-Q1-K1-B8
tatcaggataaacttatggaacggacaaaggacaggaagaatgcattagaatcttatgtatatgacacccgtaacaagctttctgagaggtaccggagctttgctactgattcagaaagggaacaaatctcatttaatttacaacagactgaagattggctttatgaagaaggtgatgatgagacagaagtggtttacagtagcaaacttgaggagctgaaaaagcttgtagatccaattgaaaatcgttgtaatgatgacgaagtgagagctgaaatcgcaagggagcttttgaagtgcattgttgaccacagaatggctgccaagtcattatccgcacctgaaagggatgctgttgacaatgagtgcaataaagctgagcagtggctaagtgaggggtccaaacttcaagaatccttgcccaagaatgtggact

SEQ ID NO: 4202 - DNA, 410 bp, Zea mays
  Clone ID: LIB3136-047-Q1-K1-C6
tagcaacaaagcccagagcttgtagtaggttttcatggcgtggaagatggggcctgcttctggcgagctcttgcgcgcgagcgtccggtccggcacagccactccttcccggccacagccaccagccgcacgcaacagcccatcgcccaccgtccacaggcacgcccctcccgcggcacggcttggcagcgcggagacggtgctggtggtcgacgtcgacggcgccctgctcctgtcgcgttccctcttcccctactttatgctggtcgcgctcgaggccggcagcttcctccgcggtctcgttctggagctcctataccccgccatccgatgctgctactgctgcctcggcggaggcgacctgaccgtgctggccgtggccgcggtcgtcttatagggtctgggcgcgc

SEQ ID NO: 4203 - DNA, 439 bp, Zea mays
  Clone ID: LIB3136-047-Q1-K1-E3
aagcaactgcaaagcagcaagctctactctttttctgtgctgaacgtgtgactagataacaataagcgtgaaccatggcggacgagtacggccgcagcggctacagcaggtccggcgccggcgacgactactacagcggctacaacagcacgtccggcactgatgactacagccgtggcgaaggtggctacaacaagtcgggcggcgatgacgactacagccgcagcggcggcgatgggtacggcaggtccggcggcgacgactacggccgtggcaccggcggtggtggctacaacaagaacggcggcggcgactactacggccgcagcggcggcgatgggtatggtaggtccgtgggtgacgactaccgccgtggcaccggtagcggcgggtacaacaagtgcggcaacgacggatacgacagcgggtacaacagatc

SEQ ID NO: 4204 - DNA, 241 bp, Zea mays
  Clone ID: LIB3136-049-Q1-K1-A3
gagcagacaacagacccgcaccggaatggccggggcgctcctcttgctgctcgttccgaccgtcggcctactcgccgcgctcgcattcctcacgcggccccgcgccctgatcgcgctcaaagacagccacgacttcatgaccggcgggtccagcgacattaggctcgccatggcctcagacgatgcacgggagggcgcgcgggtctccatccaggcccggaaccttggccgactaaaggag

SEQ ID NO: 4205 - DNA, 55 bp, Zea mays
  Clone ID: LIB3136-049-Q1-K1-H3
ggtcgacccacgcgttcgtggtcacgtgcacaacagagtacagtatctagctgtt

SEQ ID NO: 4206 - DNA, 61 bp, Zea mays
  Clone ID: LIB3136-050-Q1-K1-H10
accggtccggcattcccggtcgaccgacgcgtccgtattaacgttggagccataagagaag

SEQ ID NO: 4207 - DNA, 334 bp, Zea mays
  Clone ID: LIB3136-050-Q1-K1-H11
tattaacgttggagccataagagaagtaaaagaagagaccgggattgatgcagaatttgttgaagtgctggccttcaggcagagccacaaagctttttttgataaatcagatctatttttcgtgtgcctgctacgaccgctgtcatatgacattacgaagcaagactcggaaatagaagcatgccagtggatgccagtagaggaatttgcagcacaaccatttgtccagaaacatgagcttgtgaagtacatcctcgaagtaggcctggctaaagttgacaagaaatatgcagggttttcgccaatctccataaaatcggcgtttacagaacaa

SEQ ID NO: 4208 - DNA, 129 bp, Zea mays
  Clone ID: LIB3136-050-Q1-K1-H12
tattaacgttggagccatcagagaagtaatttaagagaccgggattgatgcagtatttgtggaagtgctggccttcaggcactgccgcaaagctgtttttgattcatcatatctatcatcatagtgcct

SEQ ID NO: 4209 - DNA, 354 bp, Zea mays
  Clone ID: LIB3136-050-Q1-K1-H6
tattaacgttggagccataagagaagtaaaagaagagaccgggattgatgcagaatttgttgaagtgctggccttcaggcagagccacaaagctttttttgataaatcagatctatttttcgtgtgcctgctacgaccgctgtcatatgacattacgaagcaagactcggaaatagaagcatgccagtggatgccagtagaggaatttgcagcacaaccatttgtccagaaacatgagcttgtgaagtacatcctcgaagtaggcctggctaaagttgacaagaaatatgcagggtttttcgccattctccataaaatcggcgtttacagacaaattgtcctaatttacatgaa

SEQ ID NO: 4210 - DNA, 290 bp, Zea mays
  Clone ID: LIB3136-051-Q1-K1-H10
cacggacgtccgatcaggcatgtacaacgacttcccggacaccggggagcgccagcacctgtccgcgggagcctcggcgctgcccaccttctacttcatcttctggctcgctaactctggcctacccgacgcctgagattacatgctggcgcgcacgcgggccggcgtattccggaaccactactatatgctcgacgcgctcgagctcaaggcgctcaacctcctctccaaggccgaggacaagtcaagcatcgaacacaccggcacggcccacagatgggacgtgctct

SEQ ID NO: 4211 - DNA, 430 bp, Zea mays
  unsure (1)..(430): unsure at all n locations; Clone ID: LIB3136-056-Q1-K1-G2
cggaannnccgggtcggccggcgcgtgcgcggacgcgtgggcacgcacagaaacaccaaagccccaaaggcccaaactcaccacctcccagtggaggggggcgacgaaaccctcgcctcccccacggccgccgccgagactgacgcgctcaacggcggtgtctcggaggaggagcacgtccccatcacccaccccgcaaagtcctacgttacgctcgccgacgacaaccccgctcctaacggcggcgtcgtgaaagaggaggagggcggcgcccacaccggcgcgaagtcctacgcagctgtcgccgcccaagccgagatcgaggacctgcgcgccgccaagctcgacctggaggagaaactcgctgaggcccgccgtgagaacaagtccctcgccgaggagacgcaccgcaacgaggggatcttcacgt

SEQ ID NO: 4212 - DNA, 284 bp, Zea mays
  Clone ID: LIB3136-057-Q1-K1-D8
gacggcggcagctacaagcgggcgcagtcgatgccgtcgaccccgacgacgccggtgacgccgtcgtcgtcgtcgtcgtcgacgacgccgcgcggcgccggcaacgtgtggcgcagcgtcttccacccggggagcaacctggccaccaagggcatgggcgccaacctcttcgaccggccgcagcccaactcccccaccgtctacgactggctctacagcgacgagaccaggagcaaccaccgctagatcgggcgagatggatggacagtgaagaggccatgttt

SEQ ID NO: 4213 - DNA, 387 bp, Zea mays
  Clone ID: LIB3136-057-Q1-K1-H6
cacggaatcgatcgatcggtgctttgatctctgagcctgagcaagcggtcgagctcaccaaccgccacgctcaagacaggtcgagtagctagctagctgccggagcggaaaaggaggcggtgcagtggcatggggaggccgtcgtgctgcgacaagatgggggtgaagaaaggcccgtggacccccgaggaggacctcatgctcgtctcctatgtccaggagcacggccccgtgaactggcgcgccgtgccgacaaacaccggggtgtgatgaataatttgtggtgcagggcttgatgacacgcgccggcgattgaattggcctttaaagatccaagctccgagcttacttgatttttttttatggtgggtttgaacggcaccgggt

SEQ ID NO: 4214 - DNA, 402 bp, Zea mays
  Clone ID: LIB3136-058-Q1-K1-B10
tatatatccaccgatcatggtgaagggtggtagcaagaaggaggtggtggtggccatactgctggttctgcagctgatggcagctccaccgacggccatggccgcccgctcgccgcgcggagccgtgccggatggctccctcgccacgacgcccaaggtgacgatgctgtcagccacgctgtgctacacgggggagacatgcaaatacattacctgcctcactcctgcttgctcctgtaactatgatgatcgtcgctgctacatcatatttactcctgctgctgcttgaggccattctgtacgtgaatgaagccactacgatctcacacagcatgcgccggccgacgacgtacgtacgtacgtatatatatacgctacctcgtgagcttttgttcgagtgat

SEQ ID NO: 4215 - DNA, 428 bp, Zea mays
  unsure (1)..(428): unsure at all n locations; Clone ID: LIB3136-058-Q1-K1-C2
tccgggcccacttgtcatcggactgagtggcgtcttcctcctcccttcgtaactttgcagacccgaccgcagcagcccggggcaacaagcgaaccgacggcggcgatggggatcggtgagcacttcgagggcgtcgcgctcaagtactccaaggcgccgcacggcgtcctgctggcgaccggcttcggcgcgatcaccggcgccgtgctgggatccgaggtggcggaccactggtaccagctctacgagatggacaagcagggggccaacctcaggttcatctactggtgggaggacaaggtctcaggccagaagagctgaaccacatcgagtgatgcctattctactgagcacaccagcgtgacaacaaaacattgacgtctctcatgccgagttcttagttgttctttcctagctntctctaataa

SEQ ID NO: 4216 - DNA, 420 bp, Zea mays
  Clone ID: LIB3136-058-Q1-K1-G3
tagggatcttaagtcagataacctcttgatatctggtgataaatctatcaagatagctgactttggagtagctcggattgaagtaaaaactgaggggatgacacctgaaacgggaacctatcgttggatggcaccagagatgattcagcacaggccatatgaccaaaaagttgatgtctacagctttggcattgtgctgtgggagctcataactggcatgctcccttttgctaatatgacagcagtgcaggctgctttcgctgtggtgaacaagggtgtccgcccagctataccccaggactgcctgcccacccttgctgagatcatgaccaggtgctgggatccaaatcctgatgtccgtccgccattcactgaagttgtgaggatgctggagcatgctgagatggagatcctgagcac

SEQ ID NO: 4217 - DNA, 403 bp, Zea mays
  Clone ID: LIB3136-056-Q1-F6-A2
atgcgcaggaattccctgcattcaaatatctctatctccgttgactccctatcaggctttgcattaggaaccttggtcacggactccttgtggacctggaggacgtgtatggccatgccagaggcggtggagagcttcttgtggcatacgtggcacttgaagtgcttggccttctggtgctggacgaggatcttctcgtcgtcgaactcgcggtcgcagtagtagcagaagaccttatcgacgcgcttcttcttcttccccatcggacgccctttgatgtgcaagtctctctctcccttgggcggcggcggcggcggcggcggggtctaaggtaggttagggtttcgccgagaggtcgcggcagcggtcagggaggggaggaagaagccgagggcgagacgtc

SEQ ID NO: 4218 - DNA, 750 bp, Zea mays
  Clone ID: LIB3136-056-Q1-F5-A2
tagcagctgctgatgtatagtgagtaggcacattctgaattgggaatagtggctgttgtggtgggagcccagcaactatgggaggaactgaaacagctgattgttgtggatatgctgcttgttgcgaataccaagcttgcgctggtgcagcaggccaaattggaggccgggccatcaaaggattgagtgcaggattatagattggaggtgccacaccataagctggtcgcggaggaaatgccatgcctagcgaattaggcataataacaggccttacctgaggcacttctactttgggtacctttgttgaagggtcttcctcttctccataatgagcagccaatacatgcgcaggaattccctgcattccaaatatctctatctccgttgactccctatcaggctttgcattaggaaccttggtcacggactccttgtggacctggaggacgtgtatggccatgccagaggcggtggagagcttcttgtggcatacgtggcacttgaagtgcttggccttctggtgctggacgaggatcttctcgtcgtcgaactcgcggtcgcagtagtagcagaagaccttatcgacgcgcttcttcttcttccccatcggacgccctttgatgtgcaagtctctctctcccttgggcggcggcggcggcggcggcggggtctaaggtaggttagggtttcgccgagaggtcgcggcagcggtcagggaggggaggaagaaagccgaggcgagacgtc

SEQ ID NO: 4219 - DNA, 410 bp, Zea mays
  Clone ID: LIB3136-056-Q1-F3-A2
tattcagaaagtcggctggcaggaccgcatggccctatgaagaagctgggctttgctcggtagattatcccccttgcatttcaccgaaggactctgcctgcgcttgtatctcgctgtgcagcagtctgccctcttcatttagttagcgaatggagttgctgcagttaagaggaatgtgttgtttctgacttgtttgagtgtcgagcctttgttcttctatgtttccagcatcgacaagaaaatgaattagtagcacttaggagttattttggtccaactgtcgcctcattgggaatatattgatgaacacctcaatccctgcccgattgtaacctggtcatgtgctattgccaattgaagcctaatgctgtgcattggcttgaaagcaacttaaaaatgttacggattat

SEQ ID NO: 4220 - DNA, 811 bp, Zea mays
  Clone ID: LIB3136-056-Q1-F4-A2
agattacctcattcgtagctggttgggcaccagacgccttattattggatactgcaggtgaagatccactgctggatctctagtgccttggttattggttccatatccaattcctgcaacaccgactgctgctgaagagcttgctggaatggttccaggtgcaacagatgctaaaaatggggaatttacagctccattgacagctgaagtgttaacaggaaacaaaggctgggaaacatgaggggcaacaggtgaaggtactcctggaggggccataggaaacgatgtttgaagtacattagcagctgctgatgtcataggagtaggcacattctgaattgggaatagtggctgttgtggtgggagcccagcaactatgggaggaactgaaacagctgattgttgtggatatgctgcttgttgcgaataccaagcttgcgctggtgcagcaggccaaattggaggccgggccatcaaaggattgagtgcaggattatagattggaggtgccacaccataagctggtcgcggaggaaatgccatgcctagcgaattaggcataataacaggccttacctgaggcacttctactttgggtacctttgttgaagggtcttcctcttctccataatgagcagccaatacatgcgcaggaattccctgcattccaaatatctctatctccgttgactccctatcaggctttgcattaggaaccttggtcacggactccttgtggacctggaggacgtgtatggccatgccagaggcggtggagagcttcttgtggcatacgtggcacttgaagtgc

SEQ ID NO: 4221 - DNA, 292 bp, Zea mays
  unsure (1)..(292): unsure at all n locations; Clone ID: LIB3136-005-Q1-K1-E12
gagaacaccatcgatcacacaagcacgaagactcgtttaggagaaaccacaaaccaccatggcgtgaaagcatcatggagtgcgggcagcangggcagcactgccacggcgccacgggccatgtcgaccagtacggcaacccaatcggcggcgtcgagcacggcaccggcggcatgaagcacggcacgggaaccggcggcatgggccagctgggtgagcacggcggcgctggcatgggtggcgggcacttccaccctgcgagggaggagcacaagaccggcggcatcctgca

SEQ ID NO: 4222 - DNA, 318 bp, Zea mays
  Clone ID: LIB3136-007-Q1-K1-F12
tgctctagatccgtccatcctggtggttttgtgatgtctacagcttccatctaattagagagtgctgggcaagctttgggacgacgtgctgaccatacctctccccgagacgggcctctagaagctccggaaggccaccaccgcccgcccgctcgtcatcaacatagacgcggacggcggcatgctactaccgggcgcagtcgacgccgtcgaccccgacgacgccggtgactccgtcgttgttacgacgccggacaaggccggaaacgtgtttcgcatattctttcaaccacagagctacctgggcaccaagggcat

SEQ ID NO: 4223 - DNA, 97 bp, Zea mays
  Clone ID: LIB3136-009-Q1-K1-C3
ccaaaatcgccattctcttctctccttttcttatcctctctcctgagctcgctcgtatctccgctctggacgaacagaaaggttaccagcagcacca

SEQ ID NO: 4224 - DNA, 285 bp, Zea mays
  Clone ID: LIB3136-010-Q1-K1-C10
ccttggcgggccaagaccgacggcgagcttcaccggcgttggtcggctccaatctcttcgccgttttattttcctcccaggtcggtctcctccactatccccacagaggttccccttctccttccttcgctttctttttttcccctgtcgccggcggcgatagggtcctgtttttcttgcttcggcgggctgtaaatgcttccggccctctccggcggtccagatccggcggtgaccgtgctcctgttcgttcttctggtcttgattcgattgggaggggaaggg

SEQ ID NO: 4225 - DNA, 429 bp, Zea mays
  Clone ID: LIB3136-010-Q1-K1-E3
ccgtccggcttggaggtaagacgtgcggtgtacccggttgagggaagactcttcctacacattcctttgtccgcagttcagggtggggggttctatgctagagagcgccgtgccaaacatctctttagaggcgtctgttcgctttacagtctggatatgcgacaccggaatctgttctcagctatatcaaacgttttatataacattatgagaaacaatctcggcttaagaatctgttctcgactccaccatatctcgacacacaaacgaacaaggcgcttagatcttctgggaaattttgttatagctcgatttttatggcttcacccagcattgtctttgcccggcaaggcgccgggccgtttcaagattgcgttcttcatatcttgtgacctttgccggggagggtgttcccagaaacccattctt

SEQ ID NO: 4226 - DNA, 86 bp, Zea mays
  Clone ID: LIB3136-011-Q1-K1-F2
aaaaaaaaaaaaaaaaaaaaaaaaaaaaaaattaaaaaaaaaaaaaaaaaaaaaaaaaaaagggagggggggcgctctaaaatgta

SEQ ID NO: 4227 - DNA, 208 bp, Zea mays
  Clone ID: LIB3136-013-Q1-K1-G12
tagatcgcgagcggccgccctttttttttttttttttttcaaaggaaaatgcagggtagagagatcaagtggtcagcaaccaatccataccatcacggggtgcaaacgaaacaagacgaagggatacgacaacaacttaagatgaaggttcaggcacacgacttgccgtgaaatttagagacagcttacagccccatgcaagacggga

SEQ ID NO: 4228 - DNA, 353 bp, Zea mays
  Clone ID: LIB3136-020-Q1-K1-E11
gcggccctctcctctcgctctcgctctcccgttcctgcaccgtatcagttgccatatattccggcacccttccgatctcaagcacctaccccgggcctttcctggccatcgagttgccaccagacaactcggctcggctcgtcgcccaccgatcctcctcctcgctccaagcttccctctcccctcccctcccccttcgtcagctggggagggcgccggcggctgatcgaccggacagacagctgaacggccggaaatggcggcggggcgcgcgccgtggcttcgccccggcctctttgccgtgctgatggtggtggccgcgcccgtgcccccgcgcgcgcggttcgtggtgg

SEQ ID NO: 4229 - DNA, 363 bp, Zea mays
  Clone ID: LIB3136-022-Q1-K1-G1
cggacgcgtgggtggccccgtcctctgttttagcgtttgccgccgctctgcacaagggctggctaccgatgtccgtcgcgtccgtggccgccctccggacggccggctccggccgccgccgcggcgcgggttcccagcagaccggccttaacgggggcaggttcctgatgatgcagaggagggagctggtgaccaaggccgggatcccgctcgccgtctcctgctcgatggctacctcaccggcttcagccaacggcgctgctcaaggcatcgtcagcgactccgtctctcctgtcgtgcgtgcagggctggagattttgccgttcaaagctgacgggtacaacttttggacgtggcggggtc

SEQ ID NO: 4230 - DNA, 209 bp, Zea mays
  Clone ID: LIB3136-028-Q1-K1-B10
aaggagagtgcgatcaccaacagctagtgctagtaccccttccttccatccatgcatggcatgcgtcagcaccttgcagagctgccccatcgccagaagagcaaagatcaacacgaggtccatgggctgcagcagtagcgtggcaaatgggtcaccaccaccagacttccagttccagtgcagggccgtcgactttcgcagcggacacc

SEQ ID NO: 4231 - DNA, 330 bp, Zea mays
  Clone ID: LIB3136-032-Q1-K1-A10
cagtattgaataataataattgttctttcggcccggccggtgatgacagatgacgggcggatccgtattgatccacggaaagagaataatataagaaactacatgactgtgcacgcgtctacgttgtcgtcgttgaacatgttcatgtacttgagctccggcgcgccggggtccgccatggcctgcggcgcgctgcggacgaataccgcgggcgccttcttgtcgtatgcgccgccgacctatgggtaggtggtgagcgcgtatggcacgtaaggccacatctcggcgttcttgccggtggccttgacgcgttccagcaccttggcgggc

SEQ ID NO: 4232 - DNA, 418 bp, Zea mays
  unsure (1)..(418): unsure at all n locations; Clone ID: LIB3136-032-Q1-K1-C1
gcgcgcctgggccttcacgactaccacgccgtcatttagcgtcccatggacctcggcaccgtcaacgaggggctcgccgccgggaggtacgcctctcacggcgacttctcggccgacgtccgcctcaccttcaccaacgcgctgcggtacaacccggtcggccacgaggtccacaccttcgctggcgccctcctcgcctacttcgagaggatgtacaaggaggcgctcgcggaagactgcaaacgccctgagccgccaaggccagtgccgcctcaattgacacctccacccgcagctgagcctgttgaggccaaggttaagccgagagcagggaatgtgaagatgcggaagcccaaggccagggagcctaacaagagggagatgagcctggaggagaagaacatgctcanggtggggc

SEQ ID NO: 4233 - DNA, 232 bp, Zea mays
  unsure (1)..(232): unsure at all n locations; Clone ID: LIB3136-038-P1-K1-G5
cggacgcgngggcaaacccaaaggcatctcccaggcggaggcgccccaaggccccacccaccgaagcnccctgccggcgggagccttaaccctaatgcgatcggctcctcttccttctccaggtcctcgaaggcccagcagacaacagcccctcggtctgctcagccatgtcggaggaccaagcgaacgccgctggtgcgcccgcagagggaaagaacaggcggcggaaggg

SEQ ID NO: 4234 - DNA, 384 bp, Zea mays
  unsure (1)..(384): unsure at all n locations; Clone ID: LIB3136-039-P1-K1-G5
tcttgctggtactcttggttgtggggccaacaagcatgttccctcttgcttatatgtggtataactaggaagtagtgactctctnnnnnnnttgaaggattggatgcgcttcagtgttgcgttctggcacacgttccgcgggactggcgctgatcctttcggagctcctacaaagactaggacttgggaggatgggacaaattcgttggacatggctaagagaagaatgagagctcactcagagtggatggagaagtagggagttgacaaagaggtcgaacaatgacagggatatcgccaagggcagggaagactctgggaggagcaaagaatagcttggaggagatagggaaactggaagagcagagtgggggagagaccaag

SEQ ID NO: 4235 - DNA, 443 bp, Zea mays
  Clone ID: LIB3136-040-P1-K1-D5
cttgtatccctcctccccttctggccgactttaaccctacgcgcgcgcgctgccaagcccggtccgtcgacgcctactccgactccgacgccgcagtcgtgatgtacgccgacaggacctcgggcaggaaacgctctgtaatggaccgcctcggctcgggcggcggctcgcgctcgcggtccgacgacgcaaaaaggttttgccaggatgatgggacatggagacgtgagctttataaggattctagaggaactcagacttcatctgaacctacttccagaaatctggaatcgaacaaaaaatcccaagtgcagcaaaaggttgtgaagaaattaccagtttcagatcttcgtgggaagttatctggtgtcgcgagccagcgccctcaacttagcagtactgttcaggtcccaaaaccttgtaaagaggttattaagagcaac

SEQ ID NO: 4236 - DNA, 421 bp, Zea mays
  Clone ID: LIB3136-041-P1-K1-D10
ccctgtcccaagtaccctctcacagcgttttcacagccgacaaggctgtagcagatagttcaaacacgaatgacgcttcaacttctttttcaaaaggacctactatggaggatgaccaaacagccgtgctgccaagcgctgctaacgaactggctagccaatgcgcctgcataaataaagcggtggaacaaagcaacatcgttccaaatgcagatcaagtggctgctgctgcaaatcaatccagcaacagtatcccacttctgtcagcgaatgagcaaatgcaggacctttctatggaaactgctgtgaatttgccaagcccatctaaagacaccttcattaacagcgtgcaaaagcaccatgaactgcagtttgatgatagcaaatgtcaccctgcacagaaaccagagactcctctttg

SEQ ID NO: 4237 - DNA, 344 bp, Zea mays
  Clone ID: LIB3136-044-P1-K1-A4
gcttccaccatcgaccattcatcacctcacctccaagctccaaggaatctaccctcgttgtgtgtggaaagcgctgcagcggacagcagcgcagcacgagagagccgagcgcgaggtgcaggaccgcaaaacagaggcgaagcgaaggacctaacctacgtagcaacgctccgctccgcggcgatgggccacgaggggtcgtgccgctgcgagctctgcggcgcgcccgcggccgtgcactgcgcggcggacgaggctttcctctgcgccgcctgcgacgccaaggtgcacggcgccaaacttctcgcgtcgtggaaccgacgtacgcgccttcgccttggggg

SEQ ID NO: 4238 - DNA, 401 bp, Zea mays
  unsure (1)..(401): unsure at all n locations; Clone ID: LIB3136-044-P1-K1-D10
accgcccggaannnngggcgacccacgcgtccgacggcttcatcatcactccactagccagtctatctactggcctacagctagccgcctcctgtcctctcatcccatcccatctcatctccgacaagcgaagcanagcactggcatgagcatggaccgcatggcgcggcgttccgtgtccttgctcctcgctctggctctcctggccgccgcggcgtcggcggactcgtggctgtacgagaagttcacgacggagggcaacgtgcgcgcggactacaacgcgcaggggcagcaggtgacgtctctnatcctgacgcaacagtccggcggcgccttcagctcgcggcagaagtacctgtacggggaggttagcatccagatgaggctgatcccgggcaact

SEQ ID NO: 4239 - DNA, 398 bp, Zea mays
  Clone ID: LIB3136-045-Q1-K1-E1
acgaagaggaagagctcgctgagagcgagagcctttgttaaacagccgccggcggcaaaatgggggagcggtttagctgcagcaagcgctacttcttcgcctcaaatttcaatctgactcacgtgtgtgagaccctagctgtgaggcgatgtgttccagtaacaccaaaaatcgtgctagcggtcacgatatgcctggtcaccggggagattatacacggtattccacaccttagactttgtgatttcaatatgtgaccgtctgaatggaacctaagaattcttaaccaaccatatcgacgccttctgtgtacgtccggtgttagagataatttcatccgtgcttttttgttctatgagcagaagataggtaatagcgtatttattattcaaaattct

SEQ ID NO: 4240 - DNA, 210 bp, Zea mays
  Clone ID: LIB3136-050-Q1-K1-A2
tcggttgagaggctattgcctaagcttccacgtgcagattacttcacagagcctattatagaggagcttgcggccaaagaacgtgcggaggcaggctactgcggtcgagtgagggactttgttgtggggcgacatggctacggcagcatcaagtttcttggggagacggacgtgaggtgcctggatctggaatcaatagtggagtttaac

SEQ ID NO: 4241 - DNA, 238 bp, Zea mays
  Clone ID: LIB3136-057-Q1-K1-E8
cagcagaccagcttcccaacagagataagatttgggctaggaacgtgagagagctctcctacgacatagaggttagtattgacgcattcatggtgcagtccaagggtaggaagctggttaaacaatatggtctccagaaagtcattggtatgtgtctcgactggttgttgcagcccaagattcgccataaaatggctactgaaataggacgatcaaaagcgcatcgttgaagtgcacg

SEQ ID NO: 4242 - DNA, 592 bp, Zea mays
  Clone ID: LIB3136-018-G10-F5A
acacctgtttgggagggctccggcaaggagccagagccggagctgctcaagagccctcccaaacgggcttattgcagatagctgtatatttatagcaaataacatcaactccagcaacaaaacttatagcagatagctgtatatttaccaggatttccagtgttagaaaccatatacatcagtatctgtcgtgaacatttgctttccgcctgtgaacatgctccctgcatcacctagctttgttacaaagcaatgaagttagcagttgaacaaggctaatacatactcatgctctttctcgctctccaggaggagtacgttgatggagacgatctcgggaggctggactgcgggcacgacttccatgctggctgcatcaagcaatggctgggggtgaagaacgtgtgccccatctgcaagaacaccgcattgaaagcctgaaaccgaacaaaggcgacacacccatgttccatgtccattcgatcggtcgcaagatcatttacccgattggtttttactatgcgttttttggttgggaaaattttgccatttcacctgggaaagtggtgggggggtgttggaggtggaagag

SEQ ID NO: 4243 - DNA, 463 bp, Zea mays
  Clone ID: LIB3136-028-Q1-K1-H2-M1
tttttgttcggctatcgaccaacatacgggcgagaaggtagccagcaagaagatacagaacatcttcgagcacctgtccgatgctgctaggatcctccgcgagatcaagcttctccggctgctgaggcaccccgatatcgtcgagaacaaacacgttatgctgcctccgtcgaggagggactacagagatatttacgtcgtgtttgagctgacggataccgatcttcaccaagttattaaggctaacgatgacttgacgaaggaacaccaccagttctttctctatcagatgctgcgtgcatcgaaatatattcatactgctaacggtcatcatcgtgatttaaagccaaaaaatatattagcaaatgctaactgcaaactcaagatatgtgattttgggctagcaagggttgcatttaatgactctcataccacagatttctggacggactatgttgctact

SEQ ID NO: 4244 - DNA, 535 bp, Zea mays
  unsure (1)..(535): unsure at all n locations; Clone ID: LIB3136-028-Q1-K1-H2-N1
tgcgatgccattgaagggagcaacgccatgaagagcgctcctatggagggtggccctgtctgttagatcagctttgggcaagccccttgagacatagtactgtgacgggcgtatatcccggcccatctcaggggctaccttggcatccatgaaatgctgccctggcctatactgccttcgatctttctcacgctctagatgatgctcctgcctgtcggagctgtccgacttgaggtggtagcagtagactgacgaggtgttcgttgctggaggaacagctgggttccttgccacccgtcgagcgatgtgttgatcggtgacgcttgcgctctcgaatggcaatactgggcctaccactcttcctggtctagctgctggaatcctttgagcaacctgngaggttgctgctggaccttcctttgcaggaattggagtggagtgaacggttgttgtccttgggagaagaacatgtttcctgtcaagcgcggcattcctctctccattttcttctaagctagcaaattgcctacggaac

SEQ ID NO: 4245 - DNA, 656 bp, Zea mays
  unsure (1)..(656): unsure at all n locations; Clone ID: LIB3136-032-Q1-K1-H7-M1
atatgatcgaggcgcacgccaggaactggaaggacgttgattacctcatcttcaacacctacatctggtggatgaacaccgccgacatcaaagtcaggagaccgaactcgaggtattggtctgagaacgacgaggttcccaggattgaggcgtatggtcgggtgttcaagacgtggtctgattggctcaataacaacatcgatcctgcccgcacgtccgtcttcttcatgacgatttctccaattcacatcagcccgcagaattggggaaacccgggagggatcagatgcgtgaaggagacgcttccttatcagaactacagccaacccctggatctttaccatgatatgcggttgtatgacctagtgatcaaggttgccagctccatggagaaggtcccggtgtcagtgatcaatatcacaaagatgtcagattaccggaaggacgcccacgcgtccgtgtacaccatccggcaagggaaactgctgacgccaaagcagaaggcagacccagagaaattcgcggactgcatccattgggtgccttcccgcgtgccngacgtgtggaaccaaatactctacacgaggattctttcaaaatcaccatgcgttctaatttagtccccctcgtccagtccacacctttcctccccatga

SEQ ID NO: 4246 - DNA, 442 bp, Zea mays
  Clone ID: LIB3136-032-Q1-K1-H7-N1
acttggggtatagtatagtatcatatccatggtgcaccttgtactagatcgctgttgtttcctgaattggctgactcacaactaacttacacttcagctgaaccttcttacataccatcagtaatcagcacatccattttcctttctccgctaacctatactcaatctaacctaaaaagtaaaacaaaaaggataatcctacattctccaatcattggggaggaagaggtgtggactgggacggagggggactaaaattagaacgccatggtgattttgaaagaatcctcgtgtagagtttttggttccacacgtccggcacgccgggaaggcaccaatggatgcagtccgcgaatttctctgggtctgccttctgtttggccgtcagcagtttcctttgccggatggtgtacacggacgcgtgggcgtccttccggaaatt

SEQ ID NO: 4247 - DNA, 59 bp, Zea mays
  unsure (1)..(59): unsure at all n locations; Clone ID: LIB3136-047-Q1-K1-C8-F2A
cattctctagccctacctgcatgcatgcaancttgaatactttatagtgtcacctaatt

SEQ ID NO: 4248 - DNA, 422 bp, Zea mays
  Clone ID: LIB3136-047-Q1-K1-C8-R2A
gttgatcctttgatcaaggtggcttcgtcctcacaacgggagtcaacatcgcatacgttctactatactctggatcaatcatggtccctctaggctggatcggcggcacatgcggcctactcctagctgccgccatatccatgtacgctaatgctcttcttgcacggctccatgaagccggaggcaaacgccatatcagatacatagaccttgctggacacatatatggaccgaaaaattacgggcttacatgggctctgcagtacattaacctttacatgatcaacactggcttatatcatattagctggacaaagctctcagggacaccgtaaggactgttcagggatgatggagccctgaaactcccttactgcaatgcgaatatcaaggattccgacctgggctcttttcgccattgg

SEQ ID NO: 4249 - DNA, 330 bp, Zea mays
  Clone ID: LIB3136-011-A11-F5A
cgggctaaactgggctctagttcgtgccgccacgcccccagagctggaggctcccctccaggatacattggaggccacactgcctcctcctgcagctgatggggctcacaccgatatgttctgatcatacattggtccatgatgctacatgttaatttgcttaaaggaagaaaaaatattagatgatgaagatgcatgactttggcatagatgagaacaataatgtatgttaaggactaattatcttgatccatctatgcatgctcacaattagaataagattggatgtgtatattgtttctgtggttgcaatatacgcacgagtctatg

SEQ ID NO: 4250 - DNA, 139 bp, Zea mays
  Clone ID: LIB3136-011-A11-R6A
tttaatacgttcaagtgtggtagccaaatctatgccctttctcatttctttcttcctgaaatcgtcatcgaagctatctggtctctcatcatcgctatcaagtaggggatcttcccttggttttagaatgttcttctct

SEQ ID NO: 4251 - DNA, 412 bp, Zea mays
  Clone ID: LIB3136-040-P1-K1-B6-F2A
gtctccgcgtacgccttgcgggacgctaaccggatcgtcttctcgaaccgcctgctcttgcgcttctcccggaaccgcatcagccgcgcctcccgctccaggcccctgctgaccactgccaccatgggcgccatgccagacgccgcgtcggacacaaccgctgcctccgacgatgacacactgaggctcacggagtgatcggagtagaagagcttggtgccggcgaggtcgagctctggagacccgctctgctggacgccgatggactggatatcgtccatggaacgcgcgaaggcgaggtcgaggaacgggtcggagcccgagaaaaacacctccgccggggcgccttcattctgcccggggtcgggctcggggaggagccacgacgcccgccctcgtgctcgttgctccc

SEQ ID NO: 4252 - DNA, 321 bp, Zea mays
  Clone ID: LIB3136-040-P1-K1-B6-R2A
acgctcatgctgtattcactggtcgccggctatctacatctggagatccattattgagcgtaacaccaaagatacgatcggctcccctgctttctgggacatgggcccctagacgcgatacatacgggggatagagagcgcggcggcgtactgggtgaccttctccaagcgcctgcgcgtactgtgcaagaaggcgtaggaccttgccgtgctgtgcgacgccgacgtctcgctcgtcgagttctccgacaccggcaagctctagcaattcgtgagcctccagtgttgaatgacatcgttgacaggtacaggccacatttc

SEQ ID NO: 4253 - DNA, 437 bp, Zea mays
  Clone ID: LIB3136-027-Q2-N1-A10
ggaaaacaacaaacatttatgaccatactggtcaaacctatggcataatcaaacatggccacttggggtgaccaccaaaatcctggggcctattttaccattcttacagaatagtaataatgctctgaaactcctctccctaaaaaatatttttgatcgtctccctaccaatatcaatcatccaaccatccagttgaggacccccaatccttatttttggatctaaaaccatactttcgagtttattggcactccgaaaaatgtagtatgccagctccattagcccctcccatacactggctcctgaaataaggacccttttgagcctattgtgtgagtacggtaacatattccgtttgagtgcccacccaacatccacgccaccgccattcaccttgagaaaatctataacagattatagagttagtaagccactc

SEQ ID NO: 4254 - DNA, 466 bp, Zea mays
  Clone ID: LIB3136-027-Q2-N1-A12
caacatcaagaccagctgttattctgtttcaatgcaccaaacgtttcaaccggtgccaccacaaaggtacagtttactgtctacactgtcgtgaaagcagaactctcatggaatcacactagaaacaccatccgtacagtatgcagtatagaaagtcgctgagaacccatccacaatcatctgaggctgctctggagttaatcggtagagggaataagaaacttgaggaaaggttcagccttgggagcgatggatctcacgtcctcaaatttggccatttcaaaatcctcgtactggaagccaggggcacaggtgcagccaacaagggagtaatgcagctcagggtccctcttccgagacttgacaagaacgctgccatcagatgcgaacgactcgacgtctagtgtggggaacgacccaaaccacacgttcggtggcacggtatactgggggcgctgacctgcct

SEQ ID NO: 4255 - DNA, 488 bp, Zea mays
  Clone ID: LIB3136-027-Q2-N1-A2
cgtgtactctctagagcgcgcgctcttttttttttttttttttttttatttttttttcttactttttttttttttttttgcaagagccgccccaaattaaaattcaaatagctgtatccattttacactaccacagtttgattacaaaggttagggcttgcaggatcgcgtttaaaacccttggcctcaccctgcgaccgttggtgtccccgccgtcaaaaagctgcccccatacgctttggtttttcacgccggtgctacattgttcctcacatccggcaactgtccgaagtatttttgactgcagggatgggcagttgtctttgaaatagtcgaacccctcggtccggatcacagccgaaaggttttcagcagcaaattttaggcaaacagatttaagctcgatagcatggtatcgatcagccaatgctagagtagttgccacggagtttacagaaacatgcttgcccaagtaagattcacacaac

SEQ ID NO: 4256 - DNA, 438 bp, Zea mays
  Clone ID: LIB3136-027-Q2-N1-A3
ccagcatagcttccaaagttgatcagaagtctaaaccatacggcaggtgatgacagcaccctctaggcaaacaaaaattatggtaacagaacacgaaaaaagaaaaaaaaaacttgataaaaacatgtataatacttattccttacaatcactaaactccctggtaaaatatatgattaagtcttggaacttaagacactagaaagaatataggggggctctaactaccatggcttatctcgattgtgtaggagagcagaggagacctgaagcatctgccccaaccgcaccaagctcacatatggtacaaagctgcccttcgatggaaggaacaaatcgggatccacagtatgggcaggaaacgtccttttggccacgatagataggaacatatgtagcaccacaaacaacgaatggatttctgaagtcatagttcag

SEQ ID NO: 4257 - DNA, 450 bp, Zea mays
  Clone ID: LIB3136-027-Q2-N1-A4
aaaaaaagttcttgggtcttatccaaccccagaacgagcacactgcagctattattatggtcatctcaagtttctgacagggtcagtcccatttgccatctacgcaggccggctcacacacagagctcagtctccgcagaatcaaatcaaggagccgcggcgcccttgccgtcgccgttggagtggctgggctcccacagcatggttgtctccgcgatcagcgaggtcaccacgtacgggtccatgttggacgccggcctccggtcctcgaagtagcctttgccttccttctcggtgtcgcggcccacccgcaccgacgccccgcggttcgcgacgccccagacgaaggtgttgatgtcggcggtctcgtggcggccggtgaggcggcgctcgttgccgtccccgtacgcggcgatgtgctcccggtgccggaggcccagcttgccgatc

SEQ ID NO: 4258 - DNA, 343 bp, Zea mays
  Clone ID: LIB3136-027-Q2-N1-A5
aaaaaaaaattggggtaaataaatgattcaaaaaccaatccaaacgaccctggaaaatttccaaaacagacaaaattggggggggggaaactttctgaaaaaaactaactttcccacttcctaaaatcattttaacaatgccaaagggttaacatttaggttttaaaccttttttgttttggaaaaggggaaatacccagatggtccccaataaatagataaaagggcccttgctaacagatttcaacggttcccccgataaccgcaacgttcacaaacaaaatttgggatgatgaaaactaggttttgctaaagccggcccaggatcccttttttttttttt

SEQ ID NO: 4259 - DNA, 463 bp, Zea mays
  Clone ID: LIB3136-027-Q2-N1-A6
agagagcatacgtcaggcacacgcgcatggtattcttctgaactcgataacactatccatctcaaggaacaggcatcaaactgccgctctgcttgctgacagccagccacacaggcttctaatccacatgccactcaacacatatacggcggacaacaaggagagaccaaaccaccaggcaggtcactagagtactactactaggagtataatacaaggcggctaatacggacacgcacgcttgcttgctaggaggtcgaatcgggtcagtcaggggcctggaaactctactccacggcgcgcacgcagacgcggcagcacttgcgcggtttcctccggacagacaggccggctcctcctggcgaggccgacacgggcgcctcctcaccttcgcctggccgtgtgcgccggcgcccacaggtcggccccgttgctctgggtcagctgcagcgtcaggtccacc

SEQ ID NO: 4260 - DNA, 365 bp, Zea mays
  Clone ID: LIB3136-027-Q2-N1-A7
acggaaagagcttacggatgtccctcttattgctgtttactcagacgatgtataagcacggattaaacaggcgtccaactcgcgattcggtcaccgaacaaacaaacaaacaaacaacaaacccctccgcggcactcatcttcagtccaaaacgacacttccaccccggcaacagtcaagctcactttccgcgagcaggagcgataacttttgataaacatgcagtgcagcagcagcagcaacatcaacaggtggtgaggtcatcggagccggccggccggcggcccctcactccttcagcttatggatggtctccatgtccacggcctcgccgagggtgcctttctcgacatggtcccaccagc

SEQ ID NO: 4261 - DNA, 261 bp, Zea mays
  Clone ID: LIB3136-027-Q2-N1-A8
gcaaaaatcctcccattttatcattcaaattgctgtttcctttttactctaccacagtttgattacaaaggttagtgtttgcaggatcttgtttaaaacccttggccttaccttggaaccgatggtgtaaccaaggtgtttaacccggccctataccctttggcttttgaccccggtgctttttttctcaaaacatccggaaattgtccgcaatatttttcccttccagaatgggcagttgtttttgaaatatttaaaccc

SEQ ID NO: 4262 - DNA, 413 bp, Zea mays
  Clone ID: LIB3136-027-Q2-N1-A9
accggcctgaacttattaacggaggcttcatgtccatttcagagggtaggctttgctctgccttttcataacagcgaatccctctccttagcctccatttcggggaagccgcccgcaccgtgtttcataatggcaaatttctctaaaccaggtctccatcctttttcagttgaggaaggcgcagtcgcggcggacgtcccccaacgacgggtcggtcttgaccccgacccggccgaacctggtgatggcgtcaacaaaggcctgctcgaaggcggtggcgttctgcgcccacgccaccacggtgggctgcgaccgcgcgtcggagaagagcacctggtcggaggcgaagagcccccggccgtccaccaggttggcgaaatactggttgtcgaaggcctgcggcgtcacggggt

SEQ ID NO: 4263 - DNA, 398 bp, Zea mays
  Clone ID: LIB3136-027-Q2-N1-B1
ctcaaagcagctgtagagcatgtagcttccttcatcgtttcaaaagcattacataagcagcaaaaccagaaataatcctctaggtgaataagcagacacaatacgaccccgcacacgtaccacttattaggacagtgacagtacagtacaaatgataagcaaggggcagatcaagaatcacaacacgtaggagccataaaaaagcatgatagagcgcaggcagaccagaccaaaagcttcttccgaaacagaggaggcgcctcatgcagaagacggcttctccgccttgaggggcttcaccacctcccaggtgaagtcggggtcgtccctcccaaagtgcccgtaggccgccgtcttgaggtagcgcccgttgccgcctttcttgaggtcgaggttga

SEQ ID NO: 4264 - DNA, 460 bp, Zea mays
  Clone ID: LIB3136-027-Q2-N1-B10
ccgaaacactactttagacatatccatttatattggtcttcaagtatctggctagtttacagcatctggtcgcgcaagcagtgcggaacctgggatggagtctcctggcgtgctacttttatttacaaggaaaaactcctatacatggtagatctctttgctgctactcagaaacaccatgcccgggcacatctacatatttacaagaggctgtggcttccgagcatgggtatctgcgctcctaaatcttcaacatgccttccaacacgcgaagaacatcagcgcgggtaactatacctattactttttcgtcctggtttacaactggtaatctgtggatcttcttcttgagcatgagaacagcagcatccatcacggttttgtcagacgatagtgtgatagctggagatgtcatcacttccgatatcttcgtcttggacccatgagaggctcttgcccg

SEQ ID NO: 4265 - DNA, 326 bp, Zea mays
  Clone ID: LIB3136-027-Q2-N1-B11
aaaaaaaaaaaaccccccccaagggtttttttaaaaagggggccccgggcccaaccacatggaaaatttttttttggcccccccccccccctttttttttggggggtggtccccccccccaaacccccccaaaaaggggggaacccccccccgggggggccccaaggggggttttttttttttttccccccatatttttaaaaaaaacctcttctggggggggggaaccccttattttttcccggcggggtttccccctttttttttttaacccccggggggcttttgccccccccttttttggggaaaaaacccccttttttttt

SEQ ID NO: 4266 - DNA, 443 bp, Zea mays
  Clone ID: LIB3136-027-Q2-N1-B12
cagcatgaacctggcgacccaaaggcacgcgccatccacatttattctcggcatacacaagcagcaaccatccatgagaagcaggggggaaaaacccctactgggtcttgaacatgtggcggatcaggtcgacgacgcggttgctgtacccccactcgttgtcgtaccacgagacgagcttgacgaagtggtcgttcaaagcgatcccggccttggcgtcaaaaatgctcgacctgctgtcaccaaggaagtcggtagaaaccagatcctcttccacataacccatgatacccttgagtggaccctcggaagcagccttaatagctttcttgatatcctcataggaggcccccttctcgattctgacggtgaggtcaacaaccgagacatccacagtaggaacacggaaggacataccagtgagcttgccattcagatcagga

SEQ ID NO: 4267 - DNA, 402 bp, Zea mays
  Clone ID: LIB3136-027-Q2-N1-B2
ggttgcttgattagcccattttggcatcttgttaggttttacaggcatcattcagcacgaatttttgcgaactcacatacatgttgtacatataaataatcgacgctaaccaggtccgtccaactctgttttgattgatacttaacaaataattattagtcactgctcgatagccatgcagcgcgccatcgatatggatgaaggttgatcatttttttggcgcagcagcagagccactattgcccccggcttccttgccgtccttcttcttggccttggtggacagcttgaggtgcacccccaggtcgccgccgtggcaggaactctgcagcagcagcgagttgttgatgacctgcacgttgctgttgacgaaagctgtcagccctttgccggccccagctt

SEQ ID NO: 4268 - DNA, 381 bp, Zea mays
  unsure (1)..(381): unsure at all n locations; Clone ID: LIB3136-027-Q2-N1-B3
cagaagtatccatgctactttttatataaattcggtcacataaaaagagactaactcaaaacaactcgcacattaactactcttcacggatcatagtgccagatacttactacctgactgtaagactaacaaacaggatacaagtatgccgcacacacaggcttctcgtacgatcatttttaggtgtaaatatgagaacgccaatctcatacatcagctacgattttggtagcaaggtacaggttacgtaggttctattggaacgtcaaactggaaatattcaggcacttatcgcaagaactcagctgtctaatttcactggcttcactttctccttgagaaactgccgaatgtgctctcgcttccagntatcaatcctta

SEQ ID NO: 4269 - DNA, 460 bp, Zea mays
  Clone ID: LIB3136-027-Q2-N1-B4
ggaagtacgctttgtttacatagatgcaaaacttaaggacgggaacagaaaaggttttaacagtcttatacgtccagcacactgattaatgacaatacatctcagtaagactatactacaccgtctgacaagtcgaaacagcaccgcctaggggaactaaacaagaattacaccaggatgtgccaaagcagctgaaggggatcataattactctacgaagccattacaatatattaccagaaaacaatagaacaacagaaaaaggtccacttatatctaatatatgatgctaggttaaagatcatggtgtgctcggaaccagatcggtgacagaaatttgggaggcggcgtcttctttggctgttgctgtcaaacccacaggtgcagttgcagctgcactgttcccaggagatgctgtcttcgccgtgtctttcttgctatccttccctccagacctgac

SEQ ID NO: 4270 - DNA, 482 bp, Zea mays
  Clone ID: LIB3136-027-Q2-N1-B5
tgctgccgcgacatgtgacgcccgccggggtggcgtccatgctgctgggggcgtccatggcgctgatgctctgcggctcggtcaccttcatgctcggcttcttcctcatgccctgggttgtcgggctcggtttcctcttcctcttcgtcggcttcatcaccaacctctccgggatctggagggacatcatcctctggccctccgtcgcgtgctccgcatcggactcacccaaggaggcaccctccccatggcatatgttttccaagccttcatccatgtcgacgtgaagccaagtacaaagtaaggctcccacggaggtccacagaagcagggagttgttggagcagcagccattgccaacctatattttccttcctggacaacccttcttttacatgtgacaccgcagcaagttgccaagttttaaatggttttgtactgtgtctaggaggatacgggatacttgcttgtacatacggaaa

SEQ ID NO: 4271 - DNA, 457 bp, Zea mays
  Clone ID: LIB3136-027-Q2-N1-B6
gtaacttaacttaattcgcacctgtacacgactacaaggtaccgcttaaacgaatacaacgaatctcgaaatgcctaactccacagaccacaggccagacacgcagttcagaaaagagttggatcgtcgagctgtacgtccactgagagagttagctatcgaacaacttgaggccgaagccgacgtcctcgcagtgccggacgtacggcttgacagcggcgacgtcgacgtccgtcttggccctgcacccgaggatcggcggcgagtgcaggcacggctccacggacgtggaccggacgcacgcgacgtcggaggtctccctgttccagtccggccggatcaggatccacggcttcacgccggcgaagctgtacgcgacgtagccgaaggtggaccaggcgctcatcgtgatcttgtcgcagtagctgagcaggtagatctcggccagcgccttctg

SEQ ID NO: 4272 - DNA, 370 bp, Zea mays
  Clone ID: LIB3136-027-Q2-N1-B7
ataaaaagaagtccggttttagtatatatatatatatagtatcaaatcatatcatcgtggaccaattaatatatggttacagcagacgcaatcggatcaaccaacatgcttgtagacacacgtacatgagcacaaagactgacgccaaacatgcagagagagagatagcaaactgaagaactctgtttttctctctctttcacacaccacacaatacctatgtatggcagccagctcggcctcgtttattattgttcaaccaccaccacaagctagatagataataatcatatccatggtcgtcgatcgatgtgatcagcagttgcaggggtcgcacttgcagctgctaccgcagccgcaggcgtgggcg

SEQ ID NO: 4273 - DNA, 240 bp, Zea mays
  unsure (1)..(240): unsure at all n locations; Clone ID: LIB3136-027-Q2-N1-B8
ggaggccaaacagttcgcacaacggggtagggcgcgcaaatggagctttgtttgacaacccaccactcgagagcatttttggcccctcgccaaatgggaaagccctacccctagtacagggcgccttccttggggggggggatgacccaatcggactttgggtaggaaacgcatgtaancacataaccttcctcctgctgccgcgaataaaggaaggacccatccaaccggacgcgtggg

SEQ ID NO: 4274 - DNA, 459 bp, Zea mays
  unsure (1)..(459): unsure at all n locations; Clone ID: LIB3136-027-Q2-N1-B9
acaaaataatcatgtatttcatgttaaatgattctaatcaataaattagattaggtatagacatcaacactaggttaatactcctgatgctcatactgtacacttgcacaggctctaaatgtttacaacctaaataatgaattattttttaagaaacgatggaaaagggttgttgggcgatgtcgtcgccgtgcttcctgtggagtgggaacaacacaaatggnatattttcttttcttttctttcccagacagtgatatgttgcactcaaaactgttgttaggacaactgcaagccagaccatccgtcatgtccagatgcatgatacatggcccagagtggaggcagcaaccaatgtgtatactactccattccgctccacctgagccatcaattctctcaatggatggatggcaggtgaacctagctcttttccaactgcacccgatacacaccccc

SEQ ID NO: 4275 - DNA, 448 bp, Zea mays
  Clone ID: LIB3136-027-Q2-N1-C1
aacgcaatagaggatttgacataaaatttcgttcaaaaatgaataaatacacctgtttcgtgcatgccaaaatataaattacaactatattttgtcacgcgacagacattgaaacttcgacaaacaacagcaaaatgcaagatgtacagagctttcctgtttctccttatttcttctatactccaattgctttgaactggattggtcataaacctatacatctatccatatcaaacagtcgatatgtaagcctgacaaatgtcataatgcattattcttagcatggtctctcctcttttgaagtcatgacaacatcaatgctcgtggaattggctgatttttttcacgcgcgatgctgcagagaccgacttctcccgccttttcttcgtactcatagataggtattagaccatcaagacctttcagatctaccaacctttacatgtta

SEQ ID NO: 4276 - DNA, 460 bp, Zea mays
  Clone ID: LIB3136-027-Q2-N1-C10
catcacaaaattcataaatcttgttaggcactaaaacgacaccatcaggcaatggtacatacggtagagctgagacagggttaaaactggtctggatacaggcaacccggacggcaaaccaaaataatgttacgcacaacatcaggattaagaatgatcgggatgggagcaggagagaataaacaatggcagcaccaaagcagcctagaagatcttgttgaactggccgctcagggtgtccttgaggttggagtagagcccgtagagggagtactgcctcaggttggacacctcgtaccacgagttcagaaccgactcgtgcttgtccgtgccagagaaagccagctggatgccgacgctgcagtcgacgggcccttggctcttgcagctctgcgtcctgatggcgcatgtctgtttgccgaggcagacgaagttcgacttgccggagcaagcgccacag

SEQ ID NO: 4277 - DNA, 425 bp, Zea mays
  Clone ID: LIB3136-027-Q2-N1-C11
aacaaaacagcaatgcaattttttttgccaaaacaaaatacaagttccatccaacatgcaacacgatttttatacagggagttgctggatttcaggaaaacagtccatcgttttttgctattaaaagggtcattttgcgttggaaacttttttttctacatgaggctaccgtcatgtggatcacgaggagaatcgattatcaagccatcacagtaggacatgtccaaaaaatctgatgcgttcgcctcatgcatttcgagagaaaatggatcaactggtgtcgctggtgaatggtggttactaacagccagcggtgtgatggcatccgcacgctctggtggaacattctgtgaaatgtcttgacatgcatctgacggagagatgttctcggccactggacccggttgatccattttctggggagg

SEQ ID NO: 4278 - DNA, 436 bp, Zea mays
  unsure (1)..(436): unsure at all n locations; Clone ID: LIB3136-027-Q2-N1-C12
actaaatcttcagatttaaggtaccagctgaaatcacaacattgcatatagtgacatgaattcaaaacatagctaaggcggtgtccaattcttggtaaactagatgtaaaatctactgcttgatatcagccttcttcttttgccacagcctgtccaaggagctgtctgcgtcaccctgagcacggacaaacccagagagagcaaacgttgtgaagtgaccatcatacaggccattcgcatccaagtggccaatgttgatctggacagaggcatggtccttggcagtgatgatcctgtttgtggccgagcacttcctggggacatagaggtccacagtcttaccctcctcgttctgcatggngacagttgggggaactaccgcaagagcaactgaaatacaagaggaccaactatcaggcacataaaaagagaacaa

SEQ ID NO: 4279 - DNA, 293 bp, Zea mays
  Clone ID: LIB3136-027-Q2-N1-C2
gaggaaaataattttggggctttaataaaaacttttggcaattttgcccaatgtcttttgccaagttgttttttttaaacaataggggtttgggtggccttcccccaacacaaaaataggggtagattccccttctttatgttttgaaaaaataccttgggttcggcctcaaaaatttttttttgaactttgggggaaatttcaaatcccgggagttttttttttcccaaggggacttggtttttgggggaacggggcgggccttactttactgaaccccacaaagttgtttt

SEQ ID NO: 4280 - DNA, 475 bp, Zea mays
  Clone ID: LIB3136-027-Q2-N1-C3
gccgtcggacccgcccgccgcagcggcgaacgcgtcgctcacctgctccgtcgtgtaggggaagcccgaacgggtcatggagttgagcagcgcggcggcgccctcgcgcagcagcgagcccgcgccgtccgaccgcgtgttcgccagcgcgtcctggatgctcacgtccgtcgtcccgcctaccctgccagccgcgccgaagaagtggcccatcgtccccatcgacgacgacgtgcccgggaaccgcccgccgatcgccgaccagatctccatcgggtgcgacctccagtagtcgcaggagcccgggagagagccgaagctgtgggggtcgaacggcgtcggcgacgaggtccctatgccgccgtgcgagggggcgtctccgtacgcggtcgtcggtgagcttccgtaggcgccgccaccatgggccggcgagggagacccgcctccgtatgcgccaccgctgccggaagtggac

SEQ ID NO: 4281 - DNA, 219 bp, Zea mays
  Clone ID: LIB3136-027-Q2-N1-C4
gcactctcttttttttttttttttttttttttttttttgggggacccagaattcaaaaacgggcaatcaatggggggggaaaaaacaaacgtttatttccccatcccccagttgttggggcgggggtctttttctttgcccggggggggggggggggggttcccggaaaaaaacccggggggggggggggggttttcgtgggggaaaaaattgcccccc

SEQ ID NO: 4282 - DNA, 481 bp, Zea mays
  unsure (1)..(481): unsure at all n locations; Clone ID: LIB3136-027-Q2-N1-C5
gtcctgccgcccattctgctgctggagcttcttgagcaccgcgtcgctgacgtggaaggagtagcacgccatgtcgcggcccgcggggaccagccacaggtcctcgatgggcccgacctgcttgacggagcgcggcgccgcggcgcccgcgggggactggccctgcagcggctggttcggcggggtgaggacggtggcttccggcttcttgccgctgaggatctgcgcccacttgttgaagcaggtggcggccgacgggatgtcgccgatgaggtgcgcccagctgaaccccagcgccagcccaccgcatttgaagtttgtgatctgtgaccagagaaacgatgtagccgaattttttttaacaaaacaaataggcgatgacattgtcactttgctcgatagcagaagagttcatgatcctggacgtagagcagcggcgagaagaagagctcggngccgagcaccttgtcgtagcagagct

SEQ ID NO: 4283 - DNA, 463 bp, Zea mays
  Clone ID: LIB3136-027-Q2-N1-C6
ccaaaccaacttattgataattaatactagaaagtagagagacatgaaagcatagaaaatacagggtccagaatgtaaccacagataatgataagtcaggtaggtacgacacccagcaaccccttgcacgctatagcaaaagccagctcaagccaggtgaatgtctcggtagcaatcctttggtgatacacttcttttccgatttaagttgagatacagtagggttccgtctccaaagccaaggaagttacttggggccaacatccttcaacgcgcagatctgctcctcccccatcgcagactggacagtcacaacaagatccttcccgctttcgaacccttccttaatctgggccacaagagtctcatcagttgggagtctaagatcatccttagtgttgccatctgaagtaagaaggctcacaaatccatcctcagaaatatcaatcagctgatactcagt

SEQ ID NO: 4284 - DNA, 270 bp, Zea mays
  Clone ID: LIB3136-027-Q2-N1-C7
aaaaaggggggcggggcccccccccaaaatttttgggaaaaaaaaaaggggggggtgttttttttttgggcaaaattttaaaaaagggggggcccttgggggggtttttttttgggggcggggggtttggcccccccaaaaaggtttcccccccccccccttgaaaaaaaaaaaaaaagggggcttttacccctttaaaatttttttttggccccggggggcccccccgggattttcgggccggtttttgggggggaaccattttttttt

SEQ ID NO: 4285 - DNA, 407 bp, Zea mays
  Clone ID: LIB3136-027-Q2-N1-C8
gacgaaacacttcaatggtccaaaaagtacggcagctgcatgtgcgtggtttaatttgaagaaagagaaacaccggatacaatttcctcgcaaacgtagacacctacgatacagagaacaaacagcagcctccatgcacaagactgatgcaagaggcttcatagttgctgcttcccacagggttttctatgtcaagtcggctggttcctccctttctgcattcctcgcccacctcctgacacccatctcatggttccgccaccaccttggacgccgatgtgtctggttcctcacgcttatccactggaggtaactgcttatcttggagacgcattatcgtcgatattagcactctatcaccaactacatgcctcagcttcttcactagttcacctcggcttattttc

SEQ ID NO: 4286 - DNA, 387 bp, Zea mays
  Clone ID: LIB3136-027-Q2-N1-C9
catgggatacaaatcgatgaaacaaatggtccaataaatccatttggtgcaagtcaagtatctcactccatttgttctctattaaaaaaataggcatcacattgcaaatcctataacaatttacagcgagaaaatcgttttgatgcaattgtaccagtcagaatagtctgtaaatcctttccagctgaaagtaactatacttcggcaacagtgcacttcaagagttgaagatatttccaggtgagacagatctaccattcctctcatgagtagctcgtctgcgcaatggaggtgtgtaaacagttaccgggagcacccattcacccttctctcttttatcaacaaggagtgggtgctcgtacctagctgggtctgttccttccggag

SEQ ID NO: 4287 - DNA, 456 bp, Zea mays
  Clone ID: LIB3136-027-Q2-N1-D10
cacgagtaactggctagttctataatataagcccaggtctttggatacagagatgaaccagatacatcatttcataacaagcatcagcgatagcaaaaaataatctcacattattacagcataacaggcgtcagcgacagcaaaaagtaatctcacattattacagcataacaggcatcagcgacagaaccacatggttgggttcgaatgttcgatgttcaatagcccggaacaaaaagatgttccatgtcactacaggcgcttaagcagcccaacagagattcgctcatttggattcgtggcaaatactcggtagccatgtacatgtacactgtttttgatagtaacatgttacagtatgtgccttcaacactggggctcaacaagcatcgacagtcctgattcctaacaggtaccggaaccccacattccaaattggcaatttccagatgtgct

SEQ ID NO: 4288 - DNA, 437 bp, Zea mays
  Clone ID: LIB3136-027-Q2-N1-D11
aaaaaaggcatcactgttattacccaaacgcaaacatcccaacccaacgtacgctgcgcaatgtgtgcggggtacacaattcgccgcccgtcaccccaaccaattcaaaagccaaagcctaacgcccgcccacaaatacacagttaactcacaggccacatccaatccgagcgcctaaaactcactcacttcgtgcccttgggggggagtccaaacccgaacggaaaaagcggttcgtagtgcgcgtcgcccacgttcatgggcagctggtccaccgacttgaaccacgtccgcggaagcttccccgtgaacccgtagtcgccgaacagaacgtccgccacgccctgcccttccgaccttggaagccacgccgccaccagcgcgtccatgtcgcccaggtacggttccaccaccagcggcctgccggagatgaggac

SEQ ID NO: 4289 - DNA, 479 bp, Zea mays
  Clone ID: LIB3136-027-Q2-N1-D12
ggcatcgtcgtcacctgggcgccgcaggaggaggtgctcgcgcacccggccgtcggcggcttcctcacccacaacggctggaactccaccgtcgaggccatctcggagggcgtgcccatggtctgctgcccgcggcacggggaccagttcggcaacatgaggtacgtgtgcgacgtgtggaaggtgggcacggagctcgtgggggaacagctggagagaggccaggtcaaggccgccatcgacaggctctttggcaccaaggaaggggaggagatcaaggagaggatgaaggaattcaagatcgctgcggccaaaggcatcggcatcggcgtcgacgtcgacgaaactgcgtcgccccgcacggatttaaccgatttggttgatctcataaaatccttctgagctcatgacgatcgatctgttgggtgatgcctactctgtccatcgtgctcgacttgtcttcctactactgtaccact

SEQ ID NO: 4290 - DNA, 373 bp, Zea mays
  Clone ID: LIB3136-027-Q2-N1-D2
gtctccaactcagcatatatgaatttttgccgactccaactcagcatatagaattgtttttgccgatacatagccagaattacagcatagttgatagaacaaaaaaagggagctgctcgattctccatcggcaggaccaacttacacgaaatttaacagcaaagagactaattaacatacaaatataaagataaccatcatcccacataggaagcatgttttttggatgtccgaaaataagctctaacgagcaaaccacactccgcaacctagctcgtaggcaggagttccaaaacgggcacgcaaagagaagcaactcagtacttgtagtccttgacgtggaggctctcggtgtcggcggcagcatcaccct

SEQ ID NO: 4291 - DNA, 440 bp, Zea mays
  Clone ID: LIB3136-027-Q2-N1-D3
gattgtgtaagtaggattgatatgtggaagatgtccttgcctaatacatttcaaatctaaaagtgtgccatacttggactccaaggcaacacaaatacacaatcgcgggctctaggcccatctgcctgtctaactgactgatacaaaatttgtataattacaagatcagtatttcagtagtagtttctgaagcgtacactgataagtagatattgagaatgataaatgagcgatcaagcagtggcaaaagatctccatttattgtccatgttcaatatttatggcagcactgtgccattcaggtttagtgggctggggaataatttatttagtgcctctgctctttatcaatgatagaccaatctgctggaacctttgcatagcgtggttgactggtttcctatactgtattcaattgcttgagctgcttcaaactgtag

SEQ ID NO: 4292 - DNA, 462 bp, Zea mays
  Clone ID: LIB3136-027-Q2-N1-D4
accagcaattatcatgcatctaatgtcatctatgatgttacatagttgtttcggtaactccaatcggtggatctacacagacagctttatcactacaggggctaatttctaacttgctcaagcttcatactttaaacatatgcaggcatacactgaactgtgaacttgaaacaaacacaactcagaaacaaagcagagaccgacgaattacggccaagaccattcacaactacagcctatcccagtgtaagctggtcgaggcatgactaagacgcgggttctctttacccatatcctccactaaatcttacaaaagtttgttaagctgctgatgttaattttgaggagccggccaccatgtaccacaacagatgccatcaaatgctcagcgccagaaacttcactgtacaggatgtccagcaactttggtcagatgacggtgtcagtgtcaatgaattggga

SEQ ID NO: 4293 - DNA, 442 bp, Zea mays
  Clone ID: LIB3136-027-Q2-N1-D5
ggccacaaaaataatcttgtatacactcaaaagttgtgatatgaataaaccaaacagccaaaaggacatgaccgtctctcgatcgatcctgtctttttttttttggccgtctcacacgtcacacacacatacatggacgacgtcgtacgtacatgctaccatgcacatgcaagcgtacgtgtacacacggagagattttatttagtagtacatagcagtagacaagtagtcatcgatcatcacgcgtagattgatagatatcatcatgacgacgatcgatgatccggccggcggcgacggcggaatggttggtcgatcgatcaggcggccgtcgtcgcgcgtggtctaggttttagttcaccctggagcaatcggtggaggtgctgatggtgtaggggatgctgaccccgcacttggaggggatgctggcggcgttgccggc

SEQ ID NO: 4294 - DNA, 423 bp, Zea mays
  Clone ID: LIB3136-027-Q2-N1-D6
acctgttcgcctttttagaaaacgaaaaagggcaccttggcttatttctattggttggaaaacccaaccattccaaacggcccttgaataagggagaacatacctaggtacttgttcaagatatatatttcaaggggaaggggatgtacctttgcagggctttagcacattacatactacaggtctttgggatgaactatatgatgaatatgtatagagcataactatactggttgcccacatatatatagcatggactaaaaacatatatatagcacatcgatcagacgatatctactccagttgtactttccgttttcatctgccacctggatgcatgagctgcgagaagacgctgctcggggtcagctcgtccgactccacgctggcgaggctccgtcccatcatgctcaaagtcgtcgt

SEQ ID NO: 4295 - DNA, 402 bp, Zea mays
  Clone ID: LIB3136-027-Q2-N1-D7
ggaccccccatttttttaaaattttttattttttcaacccaaatcccccttttttaaccctaaccccccttttttttttggaagattaaattcaggtccctttccccccgcaattttttaaaaaaacttgctttttccaaacccagggccggggggggtttattttaacattggttccggggcgtttggggcaaacaaaaaccccaccgttgatttttgttttttgtccaaacgggtttgccctttttgaatttccttaaaaaattcctccgggatgtcacccctgccaaactttgttggttgcccagtatttttaaaccagtttacccaggggaccttcttgttagctaggctttggggagtttcaattgaaagcattgttgggatttagggctcatcaaa

SEQ ID NO: 4296 - DNA, 433 bp, Zea mays
  Clone ID: LIB3136-027-Q2-N1-D8
ggctccaacttatttttttttttttttttttacacaatatatcaacttttggaagagttttggaaacgatagcgacaaaaaatccttttttttaactacaaaaaaaccccctgttttatgacaacaaaaaatttataaaagctggggctgaattaatcttttttccttttcaaaaaaaagctatttttatggggcctaggcgggacccaatcatactttttttttcactccagggccgaagggagggcacatttacttggccttgccatttgcgggggcaggggtcgacgggttaagtttatcccaggccttgatccaggtgaccatggggtcaccgagcttgacaaagtaggggtcaatcgtgcccagtttttcttttatttgtccaaagaggtagatgtaccacttttggacggggtcccagtccttgggg

SEQ ID NO: 4297 - DNA, 437 bp, Zea mays
  Clone ID: LIB3136-027-Q2-N1-D9
ggagggaaaaggaatgtgaattgaatgaaggaagctacgtataattttacactgtatcctgttgtcaggctattctcctgctgccttttttaatatacagctacacggaataacagtgcgtgctccaacgacgcttttttttcctgcgttttcgaacatcttttttctttttttttggagtttttttcctcaccgggatgtctcacctaagagatgttagtacaccatcactcggagcaaacccgcctgaggctgcgtgtactggaggccttcatccagcaggaactgctccacagcgatgggcaacctcgcagtgcgagagcccttggtgtggtggcctgttccaacgcaaaccatgacttgcatcctctcccctgttgccctcgccgcgcttttaaaggcggtgagctcacccttcaggatgtggattgcttcgt

SEQ ID NO: 4298 - DNA, 448 bp, Zea mays
  unsure (1)..(448): unsure at all n locations; Clone ID: LIB3136-027-Q2-N1-E1
tggcaccttcgagctcgtgtcggcgctggtgtggcaggcggtggccaagatcaggggcgacgtggacaccgtgaccgtggtcagggccgacgccgccgcgcggagcggcaagtcgctggccaacgagatgaaggtcgggtacgtggagtcggcggggtcgtcgccggcgaagacggacgtcgcggagctggcggcgctgctggccaagaacgtggtcgacgagaccgccgcggtggcggcgttccagggggacgtgctcgtgtacggcggcgccaacctgacgctcgtggacatggagcaggtggacctgtacgggctcgagatcaaggggcagcgcccggtccacgtggagtacggcatggacggcgtcggcgacgagggcgcggtgctggtgcatcccgacgccgacggtcgccggccgcctttntttttnttcctcctttttctg

SEQ ID NO: 4299 - DNA, 434 bp, Zea mays
  Clone ID: LIB3136-027-Q2-N1-E10
agtcttcataatctctcacattaatttcacattgcaaacaaggtttcaggctaggcattaaagtctaaacattatggtaaagcagcagctagatatagaaccagataagcagatccattgataggaaataaagcgaagaacacccacaacgatctgaaaaatcgagatggagcaggcagccgctcaacggtacgacttctggaacctggcgcgggcaccacgtccgccgaacttcttcggctcgcagcgccgggggtcagcgacgaggagggtgcgatcgtagcgggtaaagatgtccttgatctccttcttggcggcctcgtcgacgtacttctggtagtaggcgacgagccccttggcgacggcctggcggatggcgtagatctgcgacgtcttcccgccgccgcggacgcggatccgcatgtcgatgtcct

SEQ ID NO: 4300 - DNA, 457 bp, Zea mays
  Clone ID: LIB3136-027-Q2-N1-E11
gcagtaacatcatcttgtttggcattatagcgtcacatcatgtttaccgtgacagtacatgcttcagcgaacaacaaacacattgtttgttacaaatatatacattctgatttattcaaattgcgaagtttggcatggctcgcctggaccactgaggctgcacccagtccaggtcctccatttcagttatctgaatcatcactgtcgctcctctcaggatcagcttcctctccattcgcggcgggctcctgaaccccaggctgctttgctgcacgagctactggaggtttcttacgatcaccaccttcttcgcctcctgtcgcactggcgttctggttgacagatactccatgcatgatactgataagatgcttctcaacttggttaaccagctctgcgttcaagtctggttctctgcggaaacgtcgcctgcgtgcatccctcattggaggagtaa

SEQ ID NO: 4301 - DNA, 420 bp, Zea mays
  Clone ID: LIB3136-027-Q2-N1-E12
aacgggaacttcgggcaggtcccttttcaaaatcgcatgtaaaaaaaagaatacccggtaatgatactgaaacgatcaatttccacgactcaccactcacgagcgaatacttttggatcaaagcacccactggccaccctttactacttagagagagtccccagacagaagcgcacacatgggttcatgcctacgtactctgctcgggggaacatgcatccacgatacaccgtttacaaactgtgtaaacgattgctaaaccccataaatgactagagacgggcccccctcgatctagcttaaaataccagtagcattactttattactctccgccatgcatgcattcctcgcccggacgcgcacaggacgcctaatttaattaatcgggttgcagttaacgttggggctgatcttgtac

SEQ ID NO: 4302 - DNA, 462 bp, Zea mays
  Clone ID: LIB3136-027-Q2-N1-E2
aacaaaaattgtttgtgacaactcgtaataattgtcatgaccttgaaacaatctcatggtctctgcataattttagcattttgaactgtaattgttacaaaatcactcatttacattaaaatgaaatccgtgcttagtgcttacaactcgttgcgactgagagaaatccatagcacagcaggacgagcttcaccacctcatttctagcgaagttccaaaacagtatagcgagatcaatcatgaaaattcagtcaaggaggcctgggttcgaccaatccttgctaatatcatcaaggtggtcatcgaaatcaacaattttctcccatttctttgttgtaacatgatcagctaggacaacattggtagaaggttcttttagaatcagctgactgcttccatctgatccagcctgacgccaactttttgatgaatccctggtgtgtaactgaatcaccgcatcaa

SEQ ID NO: 4303 - DNA, 458 bp, Zea mays
  Clone ID: LIB3136-027-Q2-N1-E3
aatctatagaaaccaaacactcctttagtacatgcattgtacacatttttatagtcttgattctcagatgttcatgcacatacatctccctgacgatattttactaaacgccaacgcaatcataacttcttacatacaactgacagctctacgcgagcgagcgcacgcaaaccactagttcttcttttcaagtagaaaaagagttggagatccgcgaaaacagcagggcaaggcagagctcatagccgccccccactcatacacccttagagccagggaggtcgatccactgaagctggagctctatttccccgctctctacgttcctcagccgtacaaccatgtcttgcttcaccttcccctccgatatatatatcgagctctcctcggctaggcagttctgtctgttgggcaccagtttctttaccacggttctgtcggcaacgtcctggagtttc

SEQ ID NO: 4304 - DNA, 447 bp, Zea mays
  Clone ID: LIB3136-027-Q2-N1-E4
ggagcacgttaagcagcatgcattgtcgtcgacgcatgcgcccacgcacaaccgacggtattctcacgccgtgcaaagatctacacgtaacagcccaccaccagggaagaacagaatcgcagtccatacctcggttgtctgatactgacaattctgggtctggctgtattcaacattggttttaaattttaagcataaactacacataggatatatcttaataatccacaaaaaaagtaacgaacaagtcttctttacaaaacctcaacttaatcctcaaaaactcctattgcagacgaagcatggagcagaccagggtaacctgcctggtgcggaatatatgtttaccgatggagatgctggtgggcgtgtagcccagctcaaatgatgctcctgggcccttcggttagggcaaatggtgcatagtgacgaggtttttcgggtcgg

SEQ ID NO: 4305 - DNA, 260 bp, Zea mays
  Clone ID: LIB3136-027-Q2-N1-E5
gggggcctaaacaaaacggtttttttttcccccccccccttgaggcgaggcggaggcgggaaaaaaccacccccccccccctttgttttgttccccaattttgccccggaaaatgcccgacaattttccgggggcttgggttttttccgaattttttattggccggggggtggaggactgggggggaaacaaacaaagggccaaaacgcgacaatccacccccctttttttttttgcagaaaccaaacttggttgtttcc

SEQ ID NO: 4306 - DNA, 199 bp, Zea mays
  Clone ID: LIB3136-027-Q2-N1-E6
cacaaaaccaactcagatgattacagtacacaacaaaaaacaggcgcatttacatactttaattaactatagattaatgctaatattctgttttttctagtatagacgaacatgtaatgaacaagccctccaatgaacaggcatacataaataatgtgcaggttgctctgttccactggcagatgcattcctgcctgcc

SEQ ID NO: 4307 - DNA, 408 bp, Zea mays
  Clone ID: LIB3136-027-Q2-N1-E8
aaatggggggtttcctttttttttcgttttggcaaaaaaaaacatagtctttttttgtttgccctacaaaaaaatgtttcggactttgatgcgttttttcagggatttattaaacttttcctccttacccctttaggggtgtttttggttggggaacatttaggacggaatcgccccttgacgtcttttttcgcccttttattttggggggacaccgggggacaacacaggttatttttgtcccaacctttgccccaaaaccaaacaacttatttggggggatggtcccgtccaatccggtcttgtttttgaaaccaacccccccttaacaaataaaacacgacccaaaggcaacgggcctttaatttttttgaaattgccgaaaaataacagggaatcccaaagttt

SEQ ID NO: 4308 - DNA, 227 bp, Zea mays
  Clone ID: LIB3136-027-Q2-N1-E9
caaatcaaaataagtctcatccaaatgaaattacttataaagtgtcaaaaaacacatcccagggacacgatatattaaggttcaataaccacgagattgtcctaaagcaaaacaccatttcaggaaactgcctaaacagaaacccttcatcaggactgtttggacacaaaccgacacggtagtgcggccaaaatttctcagggtgatatagagctcatcgtttcttg

SEQ ID NO: 4309 - DNA, 360 bp, Zea mays
  Clone ID: LIB3136-027-Q2-N1-F1
ccggccccgggggcccccccggaatttccggccgggcccctggggggcccccctttttttttttggggggtttttttaaagttgggggaaatatgggcaatatttttttcttggggaaaatttttttcccttcaaatttcccccaaaatttcggccgggaaattaaaggggaaaccccggggggccctaagggggggccccccccccttttttgggggggccctcccggccctttttcaaggggaaaaacctgggggccccttttttttaaaaaatccccccccccccgggggggggggtttttttttttggcccccggggtttttttttttttccccgggggaacggccaacttttttt

SEQ ID NO: 4310 - DNA, 452 bp, Zea mays
  Clone ID: LIB3136-027-Q2-N1-F10
acataaaaacgaacgccacatatattatcaacctcaatatttcacaaattctttgacaacaaccaatataaaactaaatcaggtatttggcttaatcgaacagctgtatgaacagagtcctaactaactgcgctaacaaatgcgccacggaattctgctcgcggttcacctgacgtttctccatttctttgatggcatcagctacttaacttccttgacatgcatgaaaggtaatctcagatctatcctcttctgaagtcgtcagatcattcaccacccatgagcaacctgatccaaggaccaccagcaaatgcacccattgtgacacaaggcaaagtcttatccatgatcagtttcagcttctgcaggacttgaccgtgacagtggtgtatccttgaccgtttggaggcctctggtgcctgggtggtgcctgggccaggtttggctttaaa

SEQ ID NO: 4311 - DNA, 420 bp, Zea mays
  unsure (1)..(420): unsure at all n locations; Clone ID: LIB3136-027-Q2-N1-F11
ccacccaaaagtggggatatgaataaaccaaacagccaaagggacatgaccgtttttggatcgaccctgtttttttttttttgtccgtttaacacgtaacacacacatacatggacaacgtggaacgtacatgctaccatgcacatgcaagcgtacgtgtacacgcggagagattttatttagtagtacatagcagtaaacaagtagtcatcgatcatcacgcgtaaatggatagatatcatcatgacaacaatcgatgatccggccggcggcaacggggaaatggttggtcaatcaatcaggcggccgtcgncgcgcggggtctaggttttagttcaccctgaaccantcgggggaggtgctgatggtgtagggaatgctgaccccgcacttggagggaatgctggcggctttcccggc

SEQ ID NO: 4312 - DNA, 462 bp, Zea mays
  Clone ID: LIB3136-027-Q2-N1-F12
gaaaacaattactgaccaatatggatcacataccagaaacaagattaccatacgtgttctatatagacagagagtacataaacttagcagtagcactagcaaggccgtagctgcactatacatttgttcaatgcaacatctgtgattacaagttgtgctcttgatttcttgaagtacgactaggtcgaggtagtaccaccaggtctaggtgggtgtcatgcccagatcagcgcctccaaagagaccagccacgatggtgccaacatcttcaaagcctacaccgatgcagagtgggttcccctttgcagaaccttccgcagaggcaccgctcctcagccgcacgttgggacctaggccgcacttccccaggcacttgcagccgacgaccgcacctccggtgcccacagtcttctcgaactcctgcagaagagcaaccgcgcctgacttcttgcatttgccccc

SEQ ID NO: 4313 - DNA, 284 bp, Zea mays
  Clone ID: LIB3136-027-Q2-N1-F2
aaaaaaaaactgtttttttataaaaaaaaaggaagaaagatattatacccttgccttccaacgtaggagccgtttttttcctaccctcacaaccaaacttgttgctgaaacagggcctgcgcttggctttttacctgaaggaaaaggcagtgctcatgcgaaaccaagaggggagggggcggttctggcgcattttcttcgccagttttttcttgatccggaaggtaattagccactgttttggggcgcctgcggcggttttggggggggcggcgcgaaaaccc

SEQ ID NO: 4314 - DNA, 421 bp, Zea mays
  Clone ID: LIB3136-027-Q2-N1-F3
aagcctgggaagctgggtttattgggattcactggcttctacagggtacgaacagcgccagaatcggagcccgcaggcccaggtacatagcaaatcccaaacctcactggcagaagcacaacctctgtagcaacattcagtattataagttcatcagggcaaaaacaaaccacccacattttattacaccacagacaagctttactactttctatcacagcacctgggtatcccgagcctttagtggagttccttgaggaagtcggtgttgttaaccaaaaccactttccagccatttggatcaacaaaagaggcgatcttagtgttgatcccaggtagaggccctggctgccgcaaaatcttgccacctatttctttggtcgccagatcaaccgccttggcgctcttgtacacatcattg

SEQ ID NO: 4315 - DNA, 459 bp, Zea mays
  Clone ID: LIB3136-027-Q2-N1-F4
ggtatataatcattatcaatatttgataattattttttattacaataataattatttttattcccttcttatttccacacgcgcgttccaacagtaagatctgaagaagttgcattggtagtgactgcgatgataataagtaattaatgagataccgcatacgcaagggccattccatcgggcatgacggcggtgtggaacatgagcttgctcatgtccggcaccttcctaggggagccgatgatgaggttaatgaggaggccgctgacgccgacgaagatcagcccggcgatggcgcccacgacgaagccggcgagagagcaagcaaagacgccggcgccgacgtttgcgaccgccttggtgacagccgcgccgacgacggcctccacggcgaagccccctagccccgccaggaggttgaggctgcccttgaggatggcctccacctcgtgctccgtg

SEQ ID NO: 4316 - DNA, 450 bp, Zea mays
  Clone ID: LIB3136-027-Q2-N1-F5
aaagcagtctagcgggctgcttgacaagcattaaaatacagcacacaacagattgagttttaatgaagcactgcattgcaagatctgaagtcctatagtagcttagatgtaaatataactttgaagaaatcaattatgtggatgcttcgctatcaagacgaatcctcttggtaccaaccatgtcgctagtcggcacccggttttccttcgcttccacagaacatctcttgtatggtttgaagcctgtacggcgcgatttcagcttcaggtgcgacaattcattgggaaaggaagccctgggctcatccattgtgtcgaggtcatcatgatcaatgcttgtggcattcttgttgaggtcaactgccactgtggtcacttcatcttcctcctccttggcaacctccttcgagtctactgcttgtgggggagaaaagctttgcggaagctttt

SEQ ID NO: 4317 - DNA, 462 bp, Zea mays
  Clone ID: LIB3136-027-Q2-N1-F6
aatgtgactatatgccgaagctatatcccgctgcgagttgtgcagttgtgcactaaaacagtaaggacaagagtggagtcaatagctgacatgccagggacgaaagacaaagggtgcactggcaccagcctaaccggggcctttatacaccggatggtaccatattgcgcaaaggtttctcacttttgtcactgccacctacacaacccgcacaacttcactcttcaatgaggaaaactattgacatacatattgttttctcctcaaaaccatatatgaccagacctattcaaaatctggttcaatgctctccctgaataccaccagataccacacctcagcatgtcaaccgctccagtttgagccatcaattaatacattccttgaatatagttgtatctggatttctctgatgaccattccaagtgttcaaaatgcttccgagcagtaatccctagttga

SEQ ID NO: 4318 - DNA, 455 bp, Zea mays
  Clone ID: LIB3136-027-Q2-N1-F7
gaacataactcctggtaggattgtacataaaaattccagggaccgaaattccattttagtcaaacaagagtcacgagatgttaccattgacaaaagacaggtaaaatgtaagaattgcaattacacagctcatggcagatgcagttgtcataattccatgggcaagcctcaatgacgtcaccactcgctgtgacaggatcaagaatgacaagctaaaccattcaattcgggttgctttgcaattcacaaagtttctgtcagttcaggagaagattatatttccatcttcagaccttcaaaagatgtttgaaggtcaagttccctgtatagtgccaagaaatttggaaggggacttggaactagcatcatcaaaatttgcacgggtcttcaggctgcatagttgatatgaacatgccttccaataatacatctgagttatgtatggaaacacagcc

SEQ ID NO: 4319 - DNA, 287 bp, Zea mays
  Clone ID: LIB3136-027-Q2-N1-F8
cccattccattccatacaacttttattccgacaaaaataggtccttacttccccatatccgttgaaaatggaaggaagggagtaatactttcaattcacacaaaaggggaaaaaaagaaaacctgaatctgaaggggggttcggttcggttacccaaaatcaaatcgcatgaggagcctgacggacttgtacctgacacccttgcgatcgtgcaggggcacagcacggatgccctgtttaagctcccataccggaaacattgtttgccccccgaagtcgggcttttc

SEQ ID NO: 4320 - DNA, 318 bp, Zea mays
  Clone ID: LIB3136-027-Q2-N1-F9
agccggggaagctggttttaataaaaccccccgcccaaaaaatggagcgaacagcgcccaaaatttccccggtaacgggggttcaggcacaaatcccaaacctggctgggtgaagcacaaaattggtaaaggaaaatgctgttgaagttcatcaggggagaaacaaaccacccccgggggatttccccccccttttgcctaaattaagaggaaaaacgggggccccctggagggacccttggttcttctcaagaggttttccctttgggtcccgcccccaagggggggcaaaggcgagggggaaaccccccccccttt

SEQ ID NO: 4321 - DNA, 462 bp, Zea mays
  Clone ID: LIB3136-027-Q2-N1-G1
gacgtcaataacccgcggccatcaactccagtctgctgttttcatgtctcatgacacgaatgctataccagcattgaatttattaagcaacacaaccatatgcaggcaaggcaatttcttgagcaccacaatttcatacatcacacgatagcggttctcaaggaacaccaaagggttcgagagaatctactataggcacggcacaatacaagcatacgagttgtatggaatcgagaacttggtggtgctcttcgcttcaagcggcagcaactgcacgtgggggcaacagggttatctccacgttgccatggacaccttgcagaagcagctcgccttcgtaggtcaagatcttgctcttcttggcggccctcacggtgccaactagtgcttcaaagatatttgcacaccgatcgacgatgaacaggacgccaaacttgaccttgtaagagccatcgggctgct

SEQ ID NO: 4322 - DNA, 450 bp, Zea mays
  Clone ID: LIB3136-027-Q2-N1-G10
agccctcccggtaagacaccatacgtgctcttcggagtatcatttcagtaaaaatatacgtcctggcgcacaaaaacacaagtacagacgcagcaaagaagattacaattattctctagcgggctcacatgaccctcacagcggaatcggaatgcacatgaaaattacaaaatattgagctcagtaggagtgattaggcttggcagttcctgtgacatgtccttgggaaaaactggtgatgacaaacattgcttaaagatcctcagggccattgacatccttgttctcaagtacgtctccatctggaatctccaacttcactccaggcttggcgataattgtcaccttgcccttgagtgtaattccagagccaaaccagacatcaccagaaaccttcaagctgtcaagctcaactatgctggggatggacttgaaccgggcaaggaaatt

SEQ ID NO: 4323 - DNA, 340 bp, Zea mays
  Clone ID: LIB3136-027-Q2-N1-G11
aagggaaaagggggaccccccttttttttttttttggcccccaaaagggccccattttttttgaacctttttttttttcccccggggggggaaaattttcccccaaaaccttttggggggaaaaaaaaaaaaaaatttttgggccccaaccccccccccttttttttttgggggaccccccaaaaaaggcccctaaaggttttaaagggtttttccctttttccaccccggggttggcgggcactttttttttaaaagacaaaaaacccccccttttttgaaagaaacccggggggggggggggcccccctttaacatttaaaaaaatacttgggggggg

SEQ ID NO: 4324 - DNA, 452 bp, Zea mays
  Clone ID: LIB3136-027-Q2-N1-G2
cgcaaccaaaacgttcagttgtcttgcaattggtcagtcttcagagacattgagaccaacgaactgaaacccaatcgcgaaatacatgatcgattggggaagaacaaagaggtaaacatagtcatctctgtataagtagtcaaagcacgcagaggccaaaaggaacagcccaatgaacacctccaggaaatggaacctgtctttgaaacggtagcttcctgtaagtctggcgatcgatttcagcttctgcagattgcccagcttttgcgtcacgatccattcgttggccctgtcagcctcgagaaaccctatcaagatggctttaaaccgatgcaacgccattacgttctcgaacaagacccacaatataaccagatgtatagaccttggagtcccaacagagttgagaagagtgatagctatggggatatagatgagctcccacacaggaa

SEQ ID NO: 4325 - DNA, 465 bp, Zea mays
  Clone ID: LIB3136-027-Q2-N1-G3
agtacaaataacattagttattcaatcagaacacaaatacagcattcaacttgaaggcagtataagagaaaagaaaagaataccaccaaagaaaattgagccctaaacttagaagcaatggtttctcttgttcccaaattacaacccaaccagttctaattcaaactgtgtggagttaaaaagaaagtcacatgcattccccgccacaatattgaatatgttttcccagcctcccaccaagaccataagaggaggtttacaaaagagagcacatggacgacttgagaaatcgatggtttacaaaagcgagaacacatggactagagaaattggaatatctatcattactgcaatgcatagtgtggtagagggggaggcacgcctacaccgtgaaatcagataacacatatttacaggcatctcagataatgaaccagactagataggaattcctggaaccatacc

SEQ ID NO: 4326 - DNA, 464 bp, Zea mays
  Clone ID: LIB3136-027-Q2-N1-G4
agaatcaggacttcttttattaatctagagttctcatgaaaccacgccttattccactggcaacagtcgcagtacaagacggaacaccgcacggataccatgttaattacagtgcatacaacagggattctccagcagcctgttaattacgccgaatccttgacctcagatccatatatcagaggtgcagtccccaccaggatatctcatctcgtgggccagggcaggaccatcaggctcggtgccaaaatcgacgaagaagttggggttgacagccaggcctcctttctcggtgtcgacatcgatctgcaacatgtgggagcccttcttgacaagatcatcaccgaaaaactgctcatcccatcggctgaaaagtgagtttgtcacgtatatcctcttgccatccaagctcagctgaatcatctgtggcccacctctaagtcgatgacccttgacttgaggca

SEQ ID NO: 4327 - DNA, 464 bp, Zea mays
  Clone ID: LIB3136-027-Q2-N1-G5
gctcgtacaggcagccttcatcgtcagagaaacatagtgcattacaatggaaaacggggaagcacaccactctacatacagaacggagcccgcagggacgacgacgacgcggcgcgaagcctatgggtcggtcggtcgatgggaactagctttgtttttttttctttcccttcatcgcccgccgtcgatcgtccgtccggacagatcctgtcttgccggccttgccttcctcgtctacggtctacctatcaccaccgccctttctcttgcattggtcaccgcacttgtggtaggggttggacgcgtttgcgcaaccagggttggttttggtttctcctcttccctcgtcttcagagacgcccttgcctcgtctcttgtctgactttgctgcacttgtctgcgctgtttcactcagatggtcgaagcagtactgggcgcacatgtggaacggattggacgcgtta

SEQ ID NO: 4328 - DNA, 387 bp, Zea mays
  Clone ID: LIB3136-027-Q2-N1-G7
cccccaaaaggggcggaaatataaaaaaaaccttgcccccccccctggggggggaaaggggattaaataaccacccccaattggggggtttttcttttccccccaaccaaaaaaaaaaaaaaccccccccaaaggggggggttggaaaaaaaaaccaaggcttttaaggctttattggaaacccaatttagggggggagggcctccttttttgggggggggaaaaaccggggccctttcctgggaggtttaccccaaaccttttttttccaaaaaaagccccggggggcccccccctttggccgggggggggacccccactgttttggggggcagggcagggaacccccgtgggaaaagggcaaggacccttttgatggacggaggg

SEQ ID NO: 4329 - DNA, 477 bp, Zea mays
  Clone ID: LIB3136-027-Q2-N1-G8
gtcggcgacttgggccgcgtcagctcgatggccagcggcatcagcgtgcccaggtccgtcaggaaaaagatggtgcgcgaggcgtagagcgtcgcgtcctgcagctcccgcaccttgtgcacgtagggcaggaacacgtcgtggtagtccaggatgaacagccgcttcgccgccagcgcctgctccacggtcagcgcgcagttcatctgcttctccaggatctccttggtgatggcggactccgctggcccgtacacctccgggtccagcttgctcttgatggggaactcggtcagcagctggatgcacagcgggttgagccccgcgatcgtctgcctcgcgaactcctcgtccttgaaccacgcgaaccggtcccctcgaagcggaggacgtggtcggtggtgtcctccaccagcttgaccatgcgcgggacgacggtgcggatggcgtcgaacccggtctgcgccggcagcggga

SEQ ID NO: 4330 - DNA, 420 bp, Zea mays
  Clone ID: LIB3136-027-Q2-N1-G9
gggggagaaaaatgtttatatactcttcaaaaagaaaaatcgatccgcaaatgctcaaacaaaccagaaacacttttaacaagaaaaacgctcccaattacagcactgggacaagattattaccgcatgctgggccagcggttaatttgctgcttggatgggcaaaaaaacgagacaagtctgatacatacattttattcatcggggagatgtaacatgcaagaaaaactatggaacaagaggccggaatgaaagtttgtgtaagcgcctcaactcattctaaaacactcttcaaaatttatgtgatgacggtgggggcagagcgtccagtgtactcttgcatcttggagagcttgagcgcaacatcaaccagcggagcaagggcgtcctggaaatccttgccggtcttaaaggagtccc

SEQ ID NO: 4331 - DNA, 377 bp, Zea mays
  Clone ID: LIB3136-027-Q2-N1-H1
gggggggccaaatttttttttttttcccgaaaaaatccccccttggaaaggaccggggggaaaacccgaaatttacggtttttttcccccccttttgaaacaaaacttttttttttcaataaacgggggaaggttttttagtttggctttttttgggaacccctaaacccctaatttttttttttaaacttttaccttttccttttttggggggaatcctaaaagggggggggggggaaacccccaaaaggccctttttttttaggggggggggggggaccttttttttggaaaatttttgtttaaaaaaaaagtttggaatttttttgcccaagttttattttaaaagcaccaaagggttgggtttaaaattaaaa

SEQ ID NO: 4332 - DNA, 460 bp, Zea mays
  unsure (1)..(460): unsure at all n locations; Clone ID: LIB3136-027-Q2-N1-H11
ccaaagaactgcactgcattaacatcctccaataatctggattcaaacaatgatttaaaatacaggtaatgcactaagccattctattatcgacctactatttatcacctaaaatgtctttaagttgccgttgcctccttgagctntccatcatctccagttgcacttccgttaccattgtgaattagtttctcctctgaaggtagatgtttcatgatcttcctggacggccccgaagccttccacaagtaccacacacgcgatttgggaggcggaacagatcctgccaagggagctaccaaccctggtttcccctcatctatgatattgccaactatcccataatccttggcttccgaaggactcatganataatcaaacttggtgccttcatcaatctgctcctcagattttccagcaattctcgacattattttattgatcttaatcttttcgtaca

SEQ ID NO: 4333 - DNA, 451 bp, Zea mays
  Clone ID: LIB3136-027-Q2-N1-H12
aagcttttgttcttttaaacgggcggcccttttttttttttttttttttttttttttttttttttttttaaaaaaatggcatttaaaaaacgattgacgggagcagtacacatggttgacaacctgacacaggggttgtttaacacacacctttgccaaacaacttttaacagacttcacggacaaaaaccgtttcgccacaacctgacttatttgtttaacaccccacccacatacgtaccattaccagtagatgcataaatgccccacgctgatgtcccgtgatcagcgcaaaaccacactactagcagtagttttgcctacaagggggcagagaaataacgtaacacgctcatcaaagagtggagtgcaagagcattgagcaccgagatatcacatgccaaattgaatttctatagttaatcgagataccgcaacccaaagaattaac

SEQ ID NO: 4334 - DNA, 451 bp, Zea mays
  Clone ID: LIB3136-027-Q2-N1-H2
ggtaagaagaattccacagagaacaagagcatcgacagcgtccatatccgaaatcaaaacaaaacatttgaaccccatggctttgttcatctagacacattttctttgggctagcccctagcagttggtttccaggcgtatgtatgcaggcaccaatgcaccatcagaggacctgatcgttgctggggaagaagagcttccagtagagcagctcgttccacgtgtccggcacgccggggaggcaccagtgcgtgcagtcggcgtagctcctggggtcggcgcgctgctcggccgtcggctccacccactgcttcttgtaggtctgcgtgtgcgcgtcccggcggtactcggacagccgcgtgatgttgaccagcccgacgggcacccgcgacgtggccagcacctcctccgtcgcgcgcagcatctcctggctcgtgccgccacggtagga

SEQ ID NO: 4335 - DNA, 372 bp, Zea mays
  Clone ID: LIB3136-027-Q2-N1-H3
gggaggggggaacctttttaaaggggggttttggattgttttttcattttgaaaaaaataaacatttttaccctttggaattttttaattaaagttttttgggttttttttttttacaaattcggtttttttccttttaaaaggctttttttttttccgtcctttgggtttttccgtaaaaaaatacaaggcccttttttgaattaaaagttgtttttttttcccttggcccccatttttaaatttttaaaagggtcttaaactggggggggccccccaaaaggcttttttaggttttttttttgaaaaccctttttttttttttcccgggggggacgggaacaggggtttttttttggtccccaatttttt

SEQ ID NO: 4336 - DNA, 423 bp, Zea mays
  Clone ID: LIB3136-027-Q2-N1-H4
gcgggaacttaggaaaagaaactttttaaaaatgaatgcaaaagaaataatacacgggaaaaattataaaaagaccattttttatcacccaccactcaaaaaagaatccccagagtttaaaccccccaccggccacacattactacataaaaagagatcgcaaacaaaaaagaacacttggttgaggctaccaactatgttcaaggtacatgcatccgcgacacacaagaataaaactgggcagaagaacgctaaaccccttatggcgactaaagacaggcacacctcgatagacctaaaaataccagtagaagtactttattaataggcccatgcaggcatatatggaccggacgcgcacaagacgccttatttaattaaactcgttgaacttaacgggggggctgaaattggacggcaggg

SEQ ID NO: 4337 - DNA, 235 bp, Zea mays
  Clone ID: LIB3136-027-Q2-N1-H5
gtaagcaacgatcatatatcacgtgtctcaatccgatcaaagcataacatgtccaaaagctacagcgtggcaacgtggctcagtttattttaggtaatcttacagaccaaagctaccaaaatagcttgggaactgcgaagtccgatgcatgtatacaatgcaacatcacgtagtacagtaacacttatgtttcacagcttgctcgagtcaaaaactagcgaaccccttctctttc

SEQ ID NO: 4338 - DNA, 454 bp, Zea mays
  Clone ID: LIB3136-027-Q2-N1-H6
aatgacaatgaacacaattattccttgttgattgaacaatagtttacatcatggtacaaaccgaaaaccagcgggcgctcacatgcatccggacacctaaaggtcaccggcggcgcctccctcacttgccggggacgaagttggtggcgtaggcccaagcgttgttgttgacggggtcggcaatgtggtcagcgaggttctcgagcgggcccttcccggtgacgatggcctggacgaagaatccgaacatggagaacatggcgaggcggccgttcttgagctccttcaccttgagctcagcgaaggcctcggggtcgtcggcgaggccgagcgggtcgaagctgccgccgggatagagcgggtcgacgacctcgccgagcgggccgccggcgatgcggtagccctcgacggcgcccatgagcacgacctggcaggcccagatggcgaggatgct

SEQ ID NO: 4339 - DNA, 447 bp, Zea mays
  Clone ID: LIB3136-027-Q2-N1-H7
ctaaccaattgaactaaatggcatctgcttgtattgctagttacagtagttagtatttacactgcagcaaaaaaaaaacaacaaatgcaacagtctgagacacggccatattagcgacatctctgggttctgttgaaccatggaccagtgcctcgcaaagatgtgaatggcttgtttcaaagctgcaggagccattcatgattgcagatagattgctgttcctatcaaaaggatccacaaggtaacaaccacccatgcactcttcttccattcatttggcggtcgcaaaaaaaaaaggtctccaaaaatgtttggaaaaggttgaacttggttgctaacaacactcaacttccttttctttgccctctggtcccttgattttgccactccatgttccagcataccaatcccagttgctcccaatttgtggtattgtgaccacctcgt

SEQ ID NO: 4340 - DNA, 432 bp, Zea mays
  Clone ID: LIB3136-027-Q2-N1-H8
ccttcttctctaccaataatcagctatacaccaccatcaatttgagtctcgttttaaatacagctgcaacaagtatactgactgaaaatgagacgaatgtagaagaatgaacaaagttgaacaataggcaacgaaattatcttctcaaaactcatccgatcctgaattgttgcggtcagctcgagttctccaatcgatatgactatacgagtgctctagatattttctttgcacattaagcctccaaactgttttgcgcttctatcgtggacgcacttgctcagaaggaaatgtctctcaggtctccttctcgttctgggactctgtatgaaaaccctagctcttctcctgattgccgcctcacgatgctagccctctgcatcaagcgcacaagttgctggacaacctctgacatgggtgggcggaactctg

SEQ ID NO: 4341 - DNA, 351 bp, Zea mays
  Clone ID: LIB3136-027-Q2-N1-H9
aaaaaagaaaacccccgaaaaaaacccttcttccccattggtttttttaaccccccccgggcccttttttttgtttcggggttttttttaaccccattaagtttaaaaatttttttacccatttgggcccccctttttttaagggtccctttaccccccccttttttttgccccccccccctgtaaaaaattgttttcccccccctttgtgtttttaaaccaaaacgttttgtggccccgcctgggggggtgaagaatttttttttttttcaaaaggccaaactaaaaggaccgcccggaaggaaaatttcctgcgggggggggggggggccctaaaaaaaattccccccc

SEQ ID NO: 4342 - DNA, 733 bp, Zea mays
  Clone ID: LIB3136-003-D6-F3A
cattggcacgattgcggcatctgcagagtaggaggaaaggagaacttcttccactgccaaaagtgtggatcctgctactcgacgacccttcgcgacaggcactgctgcatcgagaactcgatgaagaacaactgccccatctgctacgaggcagtacctgttcgattcgctgagggagacgtcggtgctccgctgcggccacaccatgcacctgcagtgcttccacgagatgttgaagcacgacaagttctcgtgccccatatgcgccacgcccatcttcgacatggacaagttcttcaaggccctcgacgcagagatggaggcaagctacttgtacacgggaaagggatgggtcgtgtgcaacgactgcagggacacgacgcaggtcttctccggcgtggcgggccacaagtgctgccactgccagtcccacaacacctgccgggtggcaccccccgtccttccgtagccaccaccaacaccacatcattgttgttggaattggatgcagccagccaagatacccccccagcagctacgctattattaccagtagcgcctgcgcttttacacaccgctccgttccagtccatgatgaactgcataatttcgtgccatgcaggtatgtacgtacactgttattggagatcggaagatttatccgactcgggacgtattatttgtaccacaacaaaaacaacgtgttactatttgtaaatacccagatcccgga

SEQ ID NO: 4343 - DNA, 545 bp, Zea mays
  Clone ID: LIB3136-003-D6-R3A
catgtcgaatatgggcgtggcgcatatggggcacgagaacttgtcgtgcttcaacatctcgtggaagcactgcaggtgcatggtgtggccgcagcggagcaccgacgtctccctcagcgaatcgaacaggtactgcctcgtagcagatggggcagttgttcttcatcgagttctcgatgcagcagtgcctgtcgcgaagggtcgtcgagtagcaggatccacacttttggcagtggaagaagttctcctttcctcctactctgcagatgccgcaatcgtggcaatggaactgctccttgtcaacgtcatcgtccaagaagttgcaggctgcgcagaagtactcccccatgcagacgccgcagttgcagcacacctgcgcgatcggctgctcggtgtcacagacgaggcagataaccgattggacgtcgtgccgatccagctcgtgcccgtctttcgtggactcgttgtggcaatggcggcagtggaagacctcgccgcagcagggcgcgcggatccggcatcgcctccggtagtgcttgcacccg

SEQ ID NO: 4344 - DNA, 587 bp, Zea mays
  unsure (1)..(587): unsure at all n locations; Clone ID: LIB3136-005-Q1-K1-B4.F2
aatgcaacacagaaatatataaaaccaagaccaaatattgaaccaataactgactagtcactagattagtcaatgaagcaggtacagaaagttgtgacacaagtggttagcaaaagaaaagcaacagaacagctagcagcattcggctttttctttgctaatgcactaaactaacgacatcgcgaaattaatagatccccttcataaacacctgtttgaaacaacttaacatttaaaggcagcaaaacagtaagctaattggggacctaacactcgatttgctacctcgtgaccttggagacagtgtttactcatcgtcatcgttttcctcgtcactgctgccatcctcatcatcaacctctgacttcgagccatcctcatcctcagtcttagccttctttgagcttgtgctctccttcttatcaaagtttgccttagtcttctcatagtcctgcttcttctgtccagcttggtccacatatggttgcttctcttgatctgacatagcacgccacttttnccctgctgccttgctcacggtcgcaacgctcttngttgccaggtgcagcgcctgatactcctgcctg

SEQ ID NO: 4345 - DNA, 583 bp, Zea mays
  Clone ID: LIB3136-005-Q1-K1-B4.R2
cacgcacatccacccgccgccacgcatcgcacgaactcccggtccgaaaggcaaaccagccaccagtcccaccaccaccaccctctgtcttcgcctccgctgccgattcgaaagcacccgtcctgtcccctcgcaaaaccctagctccagccaccatgaagggcaaggctgacacctccaagaaggacgagggcaggctccgggcgggcggcgccgccggaaagcgcaagaaggccgccgcgagcggcaagcccaagcgcccgccctccgccttcttcgtcttcatgtctgaattcaggcaggagtatcaggcgctgcaccctggcaacaagagcgttgcgaccgtgagcaaggcagcaggggaaaagtggcgtgctatgtcagatcaagagaagcaaccatatgtggaccaagctggacagaagaagcaggactatgagaagactaaggcaaactttgataagaaggagagcacaagctcaaagaaggctaagactgaggatgaggatggctcgaagtcagaggttgatgatgaggatggcagcagtgacgaggaaaacgatgacgatgagtaaacactgtc

SEQ ID NO: 4346 - DNA, 431 bp, Zea mays
  Clone ID: LIB3136-008-Q1-K1-F12.F2
gtcaaatcctatgatacaattttaccccctcggacaaaagtctaataccgtatatgaatacctctttagttgtcgtcctatcaggttaccaccaaattatctggaaaaaaaattggagaacattacaccggcaatcagagttggtattctgtaagcctaacggcagctcacaagtaaccttacatcagcagtcagaaagagagagaagtttcagcctttaatccttgtaccaatttccatttgatttctcatcctcgagcgctttaagcttctcatgtaaagatgtattttctgaggtcaagccatcacacttctcctgaagttgtttcaattcttctttaagtgaactattttcctgctttagcaaatctgcacgattggctacttcctcccattcagcctgcttgcgcaatcttgagcgtcgagctgat

SEQ ID NO: 4347 - DNA, 426 bp, Zea mays
  unsure (1)..(426): unsure at all n locations; Clone ID: LIB3136-008-Q1-K1-F12.R2
anagctcgcgctcaagatgcgcaagcaggctgaatgggaggaagtagccaatcgtgcagatttgctaaagcagaaatagttcacttaaagaagaattgaaacaacttcaggagaagtgtgatggcttgacctcagaaaatcatctttacatgagaagcttaaagcgctcgaggatgagaaatcaaatggaaattggtacaaggattaaaggctgaaacttctctctctttctgactgctgatgtaaggttacttgtgagctgccgttaggcttacagaataccaactctgattgccggtgtaatgttctccatattttttttccagataatttggtggtaacctgataggacgacaactaaagaggtattcatatacggtattagacttttgtccgagggggtaaaattgtatcataggatttgac

SEQ ID NO: 4348 - DNA, 594 bp, Zea mays
  unsure (1)..(594): unsure at all n locations; Clone ID: LIB3136-016-Q1-K1-A8.F2
tttttttttttttttccagagacctagcntgattttgcccccatgatcatttggcggtggtntttccagngttccagagagagagagagagagagagagagagngagagagagagaggacagagggtggcanattggngctgctgggagggggggggggggaggacccagggcacatattctctctttcactcgctncccttcgcgtntttttnccctncggnggnctnaccaaccccgtttcatcatttcatcttccatgtgaggtgtggcnnnancnanncgnggacgacgggggggtgatgctcctctgagagggtagaagcgcgctctttttctctcggggcttctgnngtcgngcttggcggtcctgtgcccgnggaagctgctgctgctgctcttgcngtccgcggtcctggggagcccctggctgcngccgttgcagagcccggcctcccgctttattgtcggtctcactctcatcggagcctccttcctcttctcctcctcctggcgcgggggggtggtgccgtggtccaggttggggtcggggcacttgtgcgggctttgccctggccccctccccggcggagag

SEQ ID NO: 4349 - DNA, 633 bp, Zea mays
  unsure (1)..(633): unsure at all n locations; Clone ID: LIB3136-016-Q1-K1-A8.R2
ccgggtcgaccccgctttcgcggncgcgtgggtcgccgcgctgcgagnaggcgcacaccaacagggcgcgtggaccaaggaggaggacgagcgcctggtcgcgcacatcagggcgcacggcgaggggtgctggcgctcgctgcccaaggccgccggcctcctgcgctgcggcaagagctgccgcctccgctggatcaactacctccgccccgacctcaagcgcggcaacttcacggaggaggaggacgagctcatcgtcaagctgcacagcgtcctcggcaacaagtagggccgccgcgcgcctctccctctccctcctacccctcgtcattcgtttcgtttcctaaactggccgggtacgttacgtgcaggtggtccctgatcgccgngaggctgcccggcaggacggacaacgagatcaagaactactggaacacgcacatccggaggaagctgctgagcagggggatcgacccggtgacgcaccgcccggtcacggagcaccacgcgtccaacatcaccatatcgttcgagacggaggtggccgccgctgcccgtgatgataagaagggcgccgtcttccggctggaggaggaggaggagcgcaacaaggcgacgatggtcgtcggccgc

SEQ ID NO: 4350 - DNA, 680 bp, Zea mays
  Clone ID: LIB3136-018-G10-F3A
gacacagggacatgcgccttgacattgacaatatgtcctatgaggaactattagcacttgaggaaaggatcggaaatgttagcactggcctcagcgaggaagctgtgataaagttgctcaaacaaaggaaattttcatcgtggagactaaaagcatctttggacccagaaccatgctgtatttgccaggtattttctgtactccatagcttctcaaaactgtgtgcctttttttcttctgttggccatgacgtttcattcacatacatcaatcacattgaattgttgaaaaatgtgcattttgttgtctcaaattatgttcattgggcattcagttggttcacttaggccatttcgtctacaatgaaatgctgctttaactaaattggcgaacatagattagaagggcaagttaaatcatgctaagcctgtctatttataccatctaggtctccaaaggagaacctgttctggtaggtctgtggttttctattaattaaagattggaatttagaatgtctgtcttgtcccttgagatttccatgtctttgttcttgataactagtgtctcatgaaaggattacaatctgactctagcatttacttccattggaccactcaaaataccattaggtgattggcaagattaggtacaatgtgtgggattatttgcattgaaac

SEQ ID NO: 4351 - DNA, 730 bp, Zea mays
  Clone ID: LIB3136-018-G10-R3A
agctaggtgatgcagggagcatgttcacaggcggaaagcaaatgttcacgacagatactgatgtatatggtttctaacactggaaatcctggtaaatatacagctatctgctataagttttgttgctggagttgatgttatttgctataaatatacagctatctgctatgagcccgtttgggagggctcttgagcagctccggctctggctccttgccggagccctcccaaacagcgtgtcaaaaacagctccgaccagggagcaggagccaatttgcggtcagaagctggagcctgaaaaagtggctccacgcggctccacgacgcattcacatgcatatcctggcgctcgtctgacggcaaaagtgagcgttgacagtgccaaacgtttttcaaataaaacaatggctcatgtcaaggagctgctcttgcaaaggagctagagttgggagttatttctagaggagctagagccctgccaaagaggccctataagttttgttgctggagttgatgttatttgctatcatgagtctgacatatgtatccagagaggcatcttcccctccaaatctgtgtattttaaggcctcactggttacttgccttagtattggattagaggttatgcagcgtactctaaccaggaaaaaagacaatgcaatttgctgatatttggtttgcctgtacaatgttaggtgtgttaaattgctgatggtttcctacgtgtc

SEQ ID NO: 4352 - DNA, 459 bp, Zea mays
  unsure (1)..(459): unsure at all n locations; Clone ID: LIB3136-025-Q1-K1-G3.F2
ctgaccagcttttctaaaatctagctgtggggagaatctggctgtgaggaaaatctgngtatcattacaattacgtgtgaaggaagataaagttgttcacaggactcaggatctagaaagtgacgggttacttctgttggagcgactcaaccgattttgtgtttatgttggttttggatgatttttgttccaacgaattttattgaagctgactgaaaagctgagtgtttggcagtccgcagcagcttttggtggccagaagctgccagaagccgaaacaaacaggacctacatatgctgatcaaccgagtatgcattctaccggatgacaatactgatgtaggatccaatgtcgtggcgatggcattccccaaccttattaatttactttactggtactgttcatcctttgttgtcctcggcgggcatgcccatcttgaatggatgttcagtgtcgtg

SEQ ID NO: 4353 - DNA, 528 bp, Zea mays
  Clone ID: LIB3136-044-H10-F3A
cttgcggtggtgcagaaacggaggctgctaatgggagtggaggaggctgctctgctgctgatgaccctatcttcttcgcccacatccacgttgcttcatggataaggaccctccaacgccagatcagcagtgtacatacaacgtaccccctgcacagtgactgccgaacgattgcaggcctatctcagggttgtgtgatcttgtgattggggcggattattagtgccaagctaatcactccgttgatcgtcttgtcctcctctgttttcgccgcacccgtagatcttgatgccagccagccatatatcttctacgtgatttgtggtaggctccattatcagagggctgttgatcccattcgccccgcacattttttttttctcttgactttttttctctttttggttttttgtatgtactttgatgttaccccttttgtgagggatgggtgatcaaaaaggagacgccatcccttctcgttctggaataatggtccaaataataaaggatttgagttgttttgttttg

SEQ ID NO: 4354 - DNA, 429 bp, Zea mays
  Clone ID: LIB3136-044-H10-R3A
gagggtccttatccatgaagcaacgtggatgtgggcgaagaagatagggtcatcagcagcagagcagcctcctccactcccattagcagcctccgtttctgcaccacctgcaagttgctgctcccgctgctactgttgctagagctgtcttttgcttcctccgtcttcgcctcgccattattttgttgttgctgcagcttgcggtctaggccaagctcttgcctcctcttttttcggtaccggatcccacaggcgttgcaaagtgacctgggcccggtcgggccgctgcgccacatgggcgtggtggtggcgcggcattcgacgcagctcctggtggctttctccgccgccacgatcccgtcgatctgcaacggcgggtcgcaggaagcagaccgggatgacagagctcggagcaaaggagaggaagag

SEQ ID NO: 4355 - DNA, 639 bp, Zea mays
  unsure (1)..(639): unsure at all n locations; Clone ID: LIB3136-055-C12-F3A
acagtcctaaaaaaggcccttcaagttgtcttaccacaacaagtttcgcacataatggagcaaggctgtggtacacctatggatgtagctactgttgctacagactctagtgtaaataatgcttttcctgttcaacatttcagtccgaggcatacacaagccatgccagactttgctcgtgtatacaacttcctgggaagcatatttgatccagagacaaatgggcatttgcagaagttgaaggaaatggatcccattgatgctgaaacggtactgttgctgatgaaaaatctgtcaatcaacctaactagtccaaactttgaggagcataggaggttgctctcttcggatgcctcaagcatggatcaaaagtcgggctcttcccgggttcatctcccgttcatgataacgagcaagtgagagaagcagctggctggcctgaaggcaagaaggtcgtttggagtcgtcacactcaggagcaaggcgatgcgtatgtacatatatcttaataagcagctttaggatagcttggtttgctcgaccgacatgttgcaagtttatgcgcctttttctttattctctgcgcccctccagttttgcccattgtagtatggaacttataacatgtgntgtttatgc

SEQ ID NO: 4356 - DNA, 618 bp, Zea mays
  unsure (1)..(618): unsure at all n locations; Clone ID: LIB3136-055-C12-R3A
ctcctatgctcctaaagtttggactagttaggttgattgacagatttttcatcagcaacagtaccgtttcagcatcaatgggatccatttccttcaacttctgcaaatgcccatttgtctctggatcaaatatgcttcccaggaagttgtatacacgagcaaagtctggcatggcttgtgtatgcctcggactgaaatgttgaacaggaaaagcattatttacactagagtctgtagcaacagtagctacatccataggtgtaccacagccttgctccattatgtgcgaaacttgttgtggtaagacaacttgaagggccttttttgaggacttgtgtggatatggatgggcagcctttcgctttggcctaggtgggggcaaatgctcacctgttccattcttttgaaccttcaaaaagtacttctgtgcgtgactcctaatctgtattactgtcttggagccaacatatgcttcaatctttttccagtcacggtcaaagagctgcagtgcctcgaggaacttgtcgtgctcggggtcggtccagctctcgcgcgacttggtgatggtgtagggcttgcgcactctccggnggccctcctcgtcgtcgtcgatcccaa

SEQ ID NO: 4357 - DNA, 426 bp, Zea mays
  unsure (1)..(426): unsure at all n locations; Clone ID: LIB3136-058-Q1-K1-H11.F2
ggccggacaaagggggttttaccaaaataagggtcaccaaaaacccttgtcaacagcaggtttcataagggggagagacgtacgggtgggcctggcaggaactgaaccaccacggatttgtaataaaagctttcccccttgcattaacaagggccatggaacatttattcgatcaggtcatcatcgtcatcagggaggggttgggcaggggcagttggaagcttaattttatgctggtggtggatgggcatataaatttggacttccgggggttttaaagcaacggtttttacaaagtgaaggttttgatcccctgccagtttccttgcgaggtaaaggaagggcttttaaaagttggaattgtttttggcggaaattcatagnactgaaattattttttcctggggaaagaaacttgcttggttt

SEQ ID NO: 4358 - DNA, 694 bp, Zea mays
  unsure (1)..(694): unsure at all n locations; Clone ID: LIB3136-058-Q1-K1-H11.R2
ttcgtgnaagttcacccttctggnnattttagcactaactnngtggcaaaattcgctttctatttggctgggaccactgctnngggcaagaaaaaagttcggtggccctcagggnatgnngctactacattcatnnggtcagtgtgccatnncattatgtttgatgtcactttcgaggctttgacatacaagaatgttnccaacatgngcaccagggaccctgtgcaggngtgtgtgaagaacanntccccatcgttctcttgcggaaacaagggttgatnngtaaagaacnnaggcaggtcaaagcccaagcaagttacannttccacaggaagaagaacttgcagtactatngagatttctgccaagagcaattacaactttgagaagcccttcctttacctcgcaaggaagctggcaggggatcagaaccttcactttgtcgaagccgttgctctgaagccaccggaagtgcagattgatatggccatgcagcagcagcatgaagctgagcttgcagctgccgctgcgcaacccctccctgatgacgatgatgacctgatcgaatagatgttccatggcnccttgttgatgcgagggggagagcttttattacaaatccgtggtggttcagttcttgtcaggcctagccgtacgtgatttttctgttatgtaacctgctgttgacgagggt

SEQ ID NO: 4359 - DNA, 713 bp, Zea mays
  Clone ID: LIB3136-027-Q2-M1-A1
gtggtttgcatgaccgaggagctgcaccgcccccttgctggccgctctttggattgaagggagctctgcatcctgatccacccctccattttttttgcttgttgcgtccttcctgggacctgagatctgaggcgcgtggtggctcactgtagcctcgctacacagttttcttctcctctcctctcctgtgctatttgctgtttctcctaagattctttaggccgtgcttatccgtgctggagtttaacgaagcagcaggttgctgctgctggtgctgccctcatgccctggtggtggactggtatcggtacccgtacttgcgtcgctttattataccctatcttcgccggtgaggtttccggccgttcggtacaggtagtctatgtcaaacactcgttttatttcttgtcatactatattcttctgcttcctgttcgtaccggcggcggtgtgcctttgcggtggcgctcctggatctggatgcaacgcgcgcccgtcagcttctccctccccatgccacctcgtcaacggtcccccggcacctggcagattcgccatcatgctggctgagcgatcgacccctcgcgctcggcggcgtcgcctgcaggccaggtccggtttcatcgcatgtcgccgcccgctggtgcttccgtgtcatgggagggagcttcgtttatctttctgaccgacatgtaatgtgcagtgctaagact

SEQ ID NO: 4360 - DNA, 708 bp, Zea mays
  unsure (1)..(708): unsure at all n locations; Clone ID: LIB3136-027-Q2-M1-A10
caaatctaacatcgtttgacttgaccaaccaaccaattccatttgtgcttggtggatctctgaatgtaatggaagccaacattaaactgttagctaaggactcaccttatggtgataatctggactacatctacactgagcttcctgctgcgctgtctcatgtgcataaactctcgataacctcgggtctcttcgtttatgatcagctgcaagggttttccaaaacctcagccagattcatcaatctgaggcatctgaccatgtatttgcctctttatggngaacctaagtcaattagtgggattcttcgcttggcctacctactggaattggccccagctctagaagaattggaattgcatgtgagtggcttactaactctataatctgttatagattttctcaaggtgaatggcggtggcgtggatgttgggtgggcactcagacggaatatgttaccgtactcacacaataggctcaagagggtccttatttcaggagccagtgtatgggaggggctaatggagctggcatactacattcttcggagtgccaatagactcgaaagtatggtcttagatccaaagataaggattggnggtcctcagctggatggttggatgattgatattggtagggagacgatcaaaaatatttttgagggagaggagtttcagagcattattactattctgtaagaatggtaag

SEQ ID NO: 4361 - DNA, 714 bp, Zea mays
  unsure (1)..(714): unsure at all n locations; Clone ID: LIB3136-027-Q2-M1-A12
ggcgggggagggcggaggagatggcctcggaggagatgacggcgacggaggtggctgcgctgctggacttgaagccgcacccggagggcggcttctacaccgagaccttccgcgacggctccatcacgctcaccacgtcccagctcccgccccactacaaggtaaaccgtgctgttagcaccgcaatctatttcctacttcccgcagggagtgtttcccgtctccaccgcattccctgtgctgaaacctggcacttctacaagggagagcctctcacggtcttcgagcttcacgacgacggtcacattgaccttactgtcattggcccacaccttgaggcaggtcagcgcccccagtataccgtgccaccgaacgtgtggtttgggtcgttccccacactagacgtcgagtcgttcgcatctgatggcagcgttcttgtcaagtctcggaagagggaccctgagctgcattactcccttgttggctgcacctgtgcccctggcttccagtacgaggattttgaaatggccaaatttgaggacgtgagatccatcgctcccaaggctgaacctttcctcaagtttcttattccctctaccgattaactccagagcagcctcagatgattgtggatgggttctcagcgactntctatactgcatactgtacggatggtgtttctagtgtgattccatgagagttctgctttcacga

SEQ ID NO: 4362 - DNA, 745 bp, Zea mays
  unsure (1)..(745): unsure at all n locations; Clone ID: LIB3136-027-Q2-M1-A2
ttccgttccaggtctcctgtttccatcctcttccacggttccacttccacccccatctcctcgccctcggcaagcccagcaaccccaatccccaatcccgtccgcttctttccccgtccccgaccttgccgaggaacctcccgctcccaaatcctagcctctcctccctcgccgctcccctccccatggaggacgaggacgccggcctcggcgacgggggcgaggcctcccctccgcaccatgccgcggcgtcgggcgaccgggcgcgggacttggcggcgtncccgaccagctcgcgctccgtgacgcagacggtgaacgggtcccaccgcttcgtgatccagggctactcgctcgccaagggcatgggcgtggggaagcacatcgccagcgacaccttcaccgtcggcggctaccagtgggcgatctacttttacccagacgggaagaaccccgaggacaactccggctacgtctcggtcttcatcgcgctcgcgtccgacggcaccgacgtgcgcgcgctcttcgagctcacgcttctagaccagagtggcaagggcaagcacaaggtgcactcgcactttgaccgctccctagagtccggaccgtacactctcaagtaccgcggatccatgtggggctataaaaggttctttcggcgtaatgctcttgagcaatcagattttcttaaagatgattgcttgaagataaactgtactgtgggtgttgtagtatcaactatgga

SEQ ID NO: 4363 - DNA, 540 bp, Zea mays
  Clone ID: LIB3136-027-Q2-M1-A3
cactttgcaaggatgcttcttgagaatagccctcaggaggcccaagcaaagaaggctcgacaggtgctgcaagcctgccaggacaaggacgattctcaccaactgaactatgacttcagaaatccattcgttgtttgtggtgctacatatgttcctatctatcgtggccaaaaggacgtttcctgcccatactgtggatcccgatttgttccttccatcgaagggcagctttgtaccatatgtgagcttggtgcggttggggcagatgcttcaggtctcctctgctctcctacacaatcgagataagccatggtagttagagcccccctatattctttctagtgtcttaagttccaagacttaatcatatattttaccagggagtttagtgattgtaaggaataagtattatacatgtttttatcaagttttttttttcttttttcgtgttctgttaccataatttttgtttgcctagagggtgctgtcatcacctgccgtatggtttagacttctgatcaactttggaagctatgctgg

SEQ ID NO: 4364 - DNA, 694 bp, Zea mays
  unsure (1)..(694): unsure at all n locations; Clone ID: LIB3136-027-Q2-M1-A4
accaacttctcgtctctgccatggctctgctctccgacctcatcaacctcgacctctcgggccgcaccgggaagatcatcgccgagtacatctgggttggcggttccgggatggacgtcaggagcaaagccaggacgctgtccggacctgttgatgaccccagcaagcttccgaagtggaacttcgacggctccagcaccggccaagctccgggcgacgacagcgaagtcatcctttgccctcgggccatcttcagggacccgttcaggaaggggcagaacatactggtcatgtgcgactgctacgagccgaacggggagccgatcccgagcaacaagcggcacggggccgcgaagatctttagccaccctgacgtcaaggctgaggaaccatggttcgggattgagcaggagtacacccttctccagaaggacaccaagtggcctctcggttggccgctgggcggctaccctggccctcagggaccttactactgcgccgtcggagcggacaagtcctacgggcgggacatcgtggacgcgcactacaaggcctgcctctacgccggcatcgacatcagtggcatcaacggngaggtcatgccggngcagtgggagttccaagtcggtcctgcccgtcgcgtctcggccggcgaccagctctgggtggctcgctaccattcttgagaggatca

SEQ ID NO: 4365 - DNA, 740 bp, Zea mays
  unsure (1)..(740): unsure at all n locations; Clone ID: LIB3136-027-Q2-M1-A5
cggacgcgtgggcggacgcgtgggttggaactgtaccggttggtcgtgtggagactggtgtcatcaagcctggtatggttgtcacctttggtccaactggcctgactaccgaggtgaagtctgttgagatgcaccacgaggcgcttcaggaggctcttccgggtgacaatgttggcttcaacgtgaagaacgttgctgtcaaggatctcaagcgtgggtttgtggcctccaactccaaggatgaccctgccaaggaggctgccagcttcacctcccaggtcatcatcatgaaccaccctgngcagattggcaacggctatgccccagtgctggactgccacacctcccacattgctgtcaagtttgctgagctcattaccaagatcgacaggcggtctggcaaggagcttgagaaggagccaaagttcctgaagaacggtgatgctggtatggtgaagatgataccgaccaagcccatggtggtggagacgttctcagcgtatcctccccttggtaggtttgctgtccgtgacatgaggcagacggttgctgttggagttatcaagagtgtggagaagaaggacccgaccggcgccaaggtgaccaaggcggctgccaagaagaaatgatgcgatcctgcgcctgctttagcaatacctagttgtcatcatcacaagtttttgttggtgatccgtgctggtatcgtgtgaactggtgagatctggtagcatgtgcacttt

SEQ ID NO: 4366 - DNA, 674 bp, Zea mays
  unsure (1)..(674): unsure at all n locations; Clone ID: LIB3136-027-Q2-M1-A6
cgacggagcaggagaagaaggacaagatcggcgagagggtcgcagcgctccagcagctcgtgtcaccgttcggaaagaccgacacggcttctgtcctgcaggaggcgtcggggtacatcaagttcctgcaccagcagctggaggtctctactattttcggcgaccaccgcaccgcaacgcttatccttcgtttttttcccgctagctgatgatgtccatgggaatccttttgctgcaggtcctgagctccccttacatgcgcgctcctccggccgctggcgctgcgcctgaggtatgagcttccgccgtccctcgtcttcgtctccactgatgagttcttgacgcaagcctgtagaaccctaaacctcgtctccatacatatatacatacaccatctactacttggtgcaagaaagaaacctactagcagcacgagatcgttgtgtaacacatgcatgtgatccaggacccccagcgctacagcctccggagccgcgggctgtgcctggtgccggtggacctgacgctgcagctgacccagagcaacggggccgacctgtgggcgccggcgcacacggncaggcgaaggtgaggaggcgcccgtgtcggcctcgccaggaggagccggcctgtctgtccggaggaaaccgcgcaagtgctgccgcgtctgcgtg

SEQ ID NO: 4367 - DNA, 365 bp, Zea mays
  Clone ID: LIB3136-027-Q2-M1-A7
gctggtgggaccatgtcgagaaaggcaccctcggcgaggccgtggacatggagaccatccataagctgaaggagtgaggggccgccggccggccggctccgatgacctcaccacctgttgatgttgctgctgctgctgcactgcatgtttatcaaaagttatcgctcctgctcgcggaaagtgagcttgactgttgccggggtggaagtgtcgttttggactgaagatgagtgccgcggaggggtttgttgtttgtttgtttgtttgttcggtgaccgaatcgcgagttggacgcctgtttaatccgtgcttatacatcgtctgagtaaacagcaataagagggacatccgtaagctctttccgt

SEQ ID NO: 4368 - DNA, 722 bp, Zea mays
  Clone ID: LIB3136-027-Q2-M1-A8
tcttttcattgccctcactaaattttctattggagtagaatttttttctcaaccagcaaggggtctacaccattgtcattgggagccacatctcagccatctaccactacggcttcgcaaaccttatgatgcgcaggtatgttgaggccactcgtgaattcaacaagattcttctgtatatcctcaagtacaagcagtaccaccagaattcccctcagtatgatcagatactgaagaaaaatgagcagatgtatgcattgttggcaatttgcctatctttgtgcccacagaacaagctcattgatgaaaatgttagcacccagctgaaagaaaagtataatgacaagatgacaaagatgcagaggtatgatgatgaagcatacgctgcttatgatgagctattctcgtatgcttgccccaagttcattacaccgtcgcctccaattctggaccagccgctaacaaactataaccaggatgcataccgtcttcagttgaagttgtttctctatgaagtaaagcagcaacagttgctttctgggattcggagttatctgaagctatattcaacaataaccattagcaaacttgcccaatatatggaagtggatgaagcaacactaaggtcgatcctgatgacatacaagcacaaaatgcatgcagttgacagtgaaggaaagatagtatcaagtgcagactttgactttctacatcgtcgagat

SEQ ID NO: 4369 - DNA, 636 bp, Zea mays
  Clone ID: LIB3136-027-Q2-M1-A9
gcctcacctgccgccatcactcgcggcagtacacggccgctgggactgggagagtgggagtgagacgctgctgttgccgagtgcgaggagacactactactcactctcaagactcgagagcagcaggggcgaccgagctctgcgtgcgtggggagaaccggagaaggcagcagaggagaggagggagggagcgcgtggacgggctaggcgcagcagcatgggcgccgggatcagggtcctggcggcgctcttggcggcgctcgcggcagccaccgccggcgtgacggcgcagctgcggcaggactactacgcggcggtgtgcccggacctggagagcatcgtgcgcgccgcggtgtccaagaaggtgcaggcgcagcccgtcgccgtgggcgccaccatccgcctcttcttccacgactgcttcgtcgagggctgcgacgcgtcggtgatcctggtgtccacggggaacaacacggcggagaaggaccacccgagcaacctctccctggccggcgacggcttcgacaccgtcatccaggccaaggcggccgtcgacgccgtgccggcgtgcgccaaccaggtgtcgtgcgccgacatctggcgctggccacccgggacgtcattgagctggctggc

SEQ ID NO: 4370 - DNA, 722 bp, Zea mays
  Clone ID: LIB3136-027-Q2-M1-B10
gcaagctaaggagagtgtgatcaccaacagctagtgctagtcccccttccttccatccatccatggcatgcgtcagcaccttccagagctgccccattgccagaagagcaaagatcaacacgaggtccaggggctgcagcagtagcgtggcgaaggggtcaccaccaccagccttccagttccagtgcagggcgtcgactttcgcggcggacaccagcctccggctcgagctggacgagaaccccgaggcgatcatctcgggggcgtggcccgggaactgctccctcctcagctacgacgacctccgcgcctacctcgagtcgcaggagacggcggcccaggcagacggtcagcagcgcggcgtggcgctcctgagcgagaccatgtccacacccgtgctggtggccacagcagaccagaccctggaggacgtcgagtgccacttcgaggccgtgtcggggcttccggtcgtcgacagcggcctcagatgcgtcggggtgatcgtcaagaacgaccgggcaagagcctctcatgggtccaagacgaagatatcggaagtgatgacatctccagctatcacactatcgtctgacaaaaccgtgatggatgctgctgttctcatgctcaagaagaagatccacagattaccagttgtaaaccaggacgaataagtaataggtatagttacccgcgctgatgttcttcgcgtgttggaaagcatg

SEQ ID NO: 4371 - DNA, 677 bp, Zea mays
  Clone ID: LIB3136-027-Q2-M1-B11
ctttcttcgtgttcatggaggaatttcgcaaggagttcaaggagaagaaccctaagaacaagtctgtcgctgcggtgggaaaagctgctggcgacaggtggaaatccctgagcgagtcggacaaggctccctatgtagccaaggctaacaagctcaagctagagtacaacaaggccatcgcagcctacaacaagggcgagagcactgcagctaagaaggctcctgccaaggaggaagaggaggaagacgaagaggagtctgacaagtccaagtcggaggtcaatgacgaggatgacgaagagggtagcgaggaggatgaagatgatgacgagtgatggagagctcgctcgagacaatggacggtgcttcatccaacaatggagcggctacacaaggccccgtggcgatcaaaaaaaaggagcctatatccatgtactagaattattcagtttcactccacatcgtgatgttttatttttacttttgtcgtgctataacggatagcgctcctcgttggcgccactggcgggtggttctgcctctggtctggtgtgtttgtgtgtggtcacacttgccagctagcagaggcgcctgcttgtacctagattactgtttccattgtcgtcgtcatcggctaacattgtcataatgtcagtttgggtaatgttagattaagt

SEQ ID NO: 4372 - DNA, 640 bp, Zea mays
  Clone ID: LIB3136-027-Q2-M1-B2
ccaagatcgccttgctctctccaacatctcctgaccaaagcgaatccagcatcaccggggtccaggaggcagcatggctgacgaccagcagccaccggcgcaacggtactggttcccgtactggaccgcgcctgctcctcggccggtcgcccgcccgcagctgtcgaggcgggaaactcgcccggcaccgtcacctcctgcaacagcgtcgccgtcgcggcggccgtcgcatccgcaacaggcggcgacgccggcatccagaggcgctggcggtggtgtccctgatccacctgcccagccgcagcccacgcggctgtccagcaggccatcgccgtcgccttcccgcgctcagccactgtcgcccattagagagcccaacgctagggcgccggtgccgtcaccggcaccggttgccaaagagcacaagcagccttctcctcttcatcataccgagcatggtgttcctaagcaaaaagacatcaccgttccgcaagagaaaaccatccatgaaccgcttgtagcatccaagacacaaacaaagaccccagagaaagaaaaagacaaggaaaagggaaaggagaaggagaaagaaggcagccagctgcacaaggaaaaagataaggagaagaaagacaaggag

SEQ ID NO: 4373 - DNA, 685 bp, Zea mays
  Clone ID: LIB3136-027-Q2-M1-B3
ggggaagccggttaccgcacggccggcctgcctctagtcgtcgtcgtcgtcgtcgactcgtcgccgtggtgcttgcggcagctccggagtccaggcagcacgctagtcggggggcgcgggagaggagggatggatcggtcgtatctccccgtggcggcggcggcggccgtcgccctggtcctcgtgtgctgctccggcctctgccgcggcgagcggctcggggcgagggagtgcgaggacctggggttcaccggcctcgccctctgctccgactgcaacgcgctctccgagttcgtcaaggaccaagagctggtggaggattgccataaatgttgcaccgaggattcagatgattctatcagcaagctcacattttctggtgcaattattgaggtgtgcatgaggaaactggtattttatccagaagttgctggcttcctcgaagaagataaagacgacttcccatatgtggaaacccgttattcttatggttcgccaccaaagctcataatgcttgacaacaagggtgaacagaaggagaccattaggattgataactggaagcgagagcacattcggcagtttctcaaggagaaagtgaagccagtgaaattagacagctgagttcttgcgataagtgcctgagtatttccagtttgacggttcatgagaacctacgtaacct

SEQ ID NO: 4374 - DNA, 640 bp, Zea mays
  unsure (1)..(640): unsure at all n locations; Clone ID: LIB3136-027-Q2-M1-B4
acttgttgaaactctagtggcaaagaccagggcatgggaggagaaccgtggtctgtcttttatgtatgatggtgtacctcttctagctatgttggatgagtatgttatgctcaggcaggaaagggaagaagagaagaaaagaacgcgggaacaaaagcgctacgttgagcagcaattgaacactgatcatgaagggccattcggatcgcgagtgagtccaaaccggcctgccagttcgaagaaggccattggcccaaagttgaatggcagcgtctcanacggcactcctccaaacagaaggctctcaatcagtggccaacagaacggtggtggccatggcgtcaggtctggagggaaggatagcaagaaagacacggcgaagacagcatctcctgggaacagtgcagctgcaactgcaccctgggngtttgacagcaacagccaaagaagacgccgcctcccaaatttctgtcaccgatctggttccgagcacaccatgatctttaacctagcatcatatattagatataagtggacctttttctgttgttctattggtttctggtaatatattgtaatggcttcgtagagtaatatgatccccttcagctgctttggcacatcctgggggtaatcttgt

SEQ ID NO: 4375 - DNA, 688 bp, Zea mays
  unsure (1)..(688): unsure at all n locations; Clone ID: LIB3136-027-Q2-M1-B5
cccgcacgcacacgacccgcagaccgcaccctgtcggcgagctcgctcccgttcccgtccgctgctctccgctcgacgccgccgtcttccgcgcagctagtgtctacactcccggcgacgatggcggaggacttggttttggacacggcgatccgagactgggtcctgatcccgctctccgtggttatggtcctcatcggcgtgctccgctactttgtctccaagctcatgcgctccccggcgacctctccgtctcccgaccccaagctcgttaaggaagggcaggtggtcatcagggcgaggaacctgaggaccaacgcacagttcatcccggccaaggctttcaaggcacgcaaggtttattacaccaacgaggaaaatggattacttcatgttccaaaggaagacgcgcagaaggctcaggcagccatgttttctgatccaaacatggccatggacatgatgaagaagaacctatccatgatagttcctcagacacttacatttgcatgggtgaactttntcttttcaggtttcgttgcagcaaaaatcccctttccattgactcagagattcaggggaatgctgcaaaatgggattgacctgagcactgttgatgtcagctatgttagtagccggtcatggtatttcctcaatttattcggctggaggggtcttttcagtctga

SEQ ID NO: 4376 - DNA, 691 bp, Zea mays
  unsure (1)..(691): unsure at all n locations; Clone ID: LIB3136-027-Q2-M1-B6
cccatggccactgccgaggtccagaccccgaccgtcgtggcgaccgaggaagcgccggtggtggagaccccggctccgcccgccgtcgtgcccgaggaggctgcccccgccgccgaggccaaggtggaggagccagctgccgccgctgagcccgaggcggcccccgtggcggcggaggaagagacgccaaaggaggaagagacggcaaaggagccggagccggcggcggctgaagaggtgaaggaggaaacggcagcgcccgctgccgagacagaagcagaaccggcagccgctgagcccgaggctgctgctgccgaggagcccgcggcggctgagcccgaggctgctgctgccgaggagcccgagaaggccgagccggccgctgaggtggccgagaaggccagcgagtgaggccgtgcgtcgtgcgcgcactgcggcggcggacagcgggtcgggagatcgatggctcagcgcgtggcctggcagccttgtcgcgcgcgcgcctacatggcacgggcttgctgttcagtacaacgcgaacgcgactgtttctctccatctctctgtgtgtgacagtgtgtgtgtcgtagctatagcagtgcccggtgcggactgcgagtgacatgggctaaaataaagtgtgcgtcgtctggtcttgtggtggtagtggnngccggtgccccatgtgtgc

SEQ ID NO: 4377 - DNA, 603 bp, Zea mays
  Clone ID: LIB3136-027-Q2-M1-B7
cgacttgtttcattgattcttgaagagatcgagcttcttttgcaccacaaggtcgaggatgtcttgcaactgcggatcaagctgcggctgcggctcaagctgcaagtgcggcaagaagtaccctgacctggaggagacgagcaccgccgcgcaggccaccgtcgtcctcggcgtggccccggagaagaaggccgcgcccgagttcgtcgaggccgcggcggagtccggcgaggccgcccacgcctgcggctgcggtagcagctgcaagtgcgacccctgcaactgctgatcacatcgatcgacgaccatggatatgattattatctatctagcttgtggtggtggttgaacaataataagcgaggccgagctggctgccatacataggtattgtgtggtgtgtgagagagagagagaaacagagttcttcagtttgctatctctctctctgcatgtttggcgtcagtctttgtgctcatgtacgtgtgtctacatgcatgttggttgatccgattgcgtctgctgtaaccatatattaattggtccacgatgatatgatttgatactatatatatatatatactaaaaccggacttcttatta

SEQ ID NO: 4378 - DNA, 241 bp, Zea mays
  Clone ID: LIB3136-027-Q2-M1-B8
cccacgcgttcggtcggatgggtccttccttgatgacgggcagcaggaggaaggttatgtgctgacatgcgtctcctacccaaagtccgactgcgtcatccacacccacaaggaaggcgacctgtactagggctagggctttccaatttggcgagggaccaaaaatgctctcgagtggtgtgttgtcaagcaaagctccatctgcgcgccctaccccgttgtgcgaactgtttggcatcaa

SEQ ID NO: 4379 - DNA, 688 bp, Zea mays
  Clone ID: LIB3136-027-Q2-M1-B9
ctcgggtagtgatctcaagaatctttgtgttactgctgctcatcgtcctattagggagattcttgaaaaggagaagaaggagagagcttcagcagaaacagaaaataggccattgcctctgtcgcacactagcaatgatgtccgtgcattaagaataagtgatttcatacatgcgcatgaacaggtgtgtgcaagtgtttcctcagattccagtaacatgaacgagcttgtgcaatggaatgatctctatggagaaggcgggtcaaggaaaaagacaacgctaagctacttcatgtagctgatgttgcaagtatatcgggagaagtgccctggcacaaagcagaaatggttggaggcagttgggggtgtgtatcgggtgcagttggaaaagagctaggttcacctgccatccatccattgagagaattgatggctcaggtggagcggaatggagtagtatacacattggttgctgcctccactctgggccatgtatcatgcatctggacatgacggatggtctggcttgcagttgtcctaacaacagttttgagtgcaacatatcactgtctgggaaagaaaagaaaagaaaatataccatttgtgttgttcccactccacaggaagcacggcgacgacatcgcccaacaacccttttccatcgtttcttaaaaaataattcattatt

SEQ ID NO: 4380 - DNA, 721 bp, Zea mays
  Clone ID: LIB3136-027-Q2-M1-C1
gtggaaatttatttgccaactgtaagcccgtcgtgatgcatagaacatttgtggtataagatttttctgttgatgtttgcaggttatttttccagcacttgacattcgagtgaaaaatgtcgcagggacatattctcttgaacataaaggagaaaatgatctcttcgcacatcagacaaggcttctactctttcagaagaaagtcatttttaggagaatcgtgaacaaaatgaccagatgtttaggcctggttggaaggacatttttcgaatgaatcagagtgagctcgaggctgagatttgaaaaggtctctcgagattctactcttgatccaaggaggaaggcctatctgatccaaaatctcatgaccagccgttggatagttgctcagcaataatcaccacaaccaagcgtcgaaggacataatggatgtacacgatgacctggatgtgttccttcgtaccgagacccagggaaacaaatatttggctgtgagcattacaaaagaaactgcaagcttgttgctgcatgctgcaataagctattcacttgcagattctgtcacgataaagtaactcaagaggtccacttattgactcttatgaccatgtaattggtgttaatacaactacattaacatgtaaaggttggtagatctggaaggtcttgatggtctaatacctatctatgagtacggaagaaaaggcgggagaagtcggtc

SEQ ID NO: 4381 - DNA, 556 bp, Zea mays
  Clone ID: LIB3136-027-Q2-M1-C10
atttgtattcttcacctcagtcacagtgtccagcttcacactggtacttgagttcaacaaaggcagactccaaaacttgcactggaagaaggacggctgtggcgcttgctccggcaagtcgaacttcgtctgcctcggcaaacagacatgcgccatcaggacgcagagctgcaagagccaagggcccgtcgactgcagcgtcggcatccagctggctttctctggcacggacaagcacgagtcggttctgaactcgtggtacgaggtgtccaacctgaggcagtactccctctacgggctctactccaacctcaaggacaccctgagcggccagttcaacaagatcttctaggctgctttggtgctgccattgtttattctctcctgctcccatcccgatcattcttaatcctgatgttgtgcgtaacattattttggtttgccgtccgggttgcctgtatccagaccagttttaaccctgtctcagctctaccgtatgtaccattgcctgatggtgtcgttttagtgcctaacaagatttatgaattttgtgaag

SEQ ID NO: 4382 - DNA, 666 bp, Zea mays
  unsure (1)..(666): unsure at all n locations; Clone ID: LIB3136-027-Q2-M1-C11
cagaaattccgaaggacagtcagggttcagctgacaggagtggaccgccaccagttttacgagcacagcccaaatctaaaccggaactcccagaaaacgctggtacatcaggagaaggaacttctgattccattcgtcttaaagggcccaacgcccatccaaccgaagtttctgaaaaggtattggctaaatcaaagcagcgtgccagagccagaaggagattggattttctgtcaaccccagtggagctcaaattgtgcactgctgcggcaagttgtcaaaggcctccccagaaaatggatcaaccgggtccagtggccgagaacatctctccgtcagatgcatgtcaagacatttcacagaatgttccaccagagcgtgcggatgccatcacaccgctggctgctagtaaccaccattcaccagcgacaccagttgatccattctctctcgaaatgcatgaggcgaacgcatcagatcttctggacatgtcctactgtgatggcttgataatcgattctcctcgtgatccacatgacggtagcctcatgtagaagaaaaagttaccaacgcanaatgacacttttaatagcaagagacgatggactgtcttcctgaaatccagcaactccctgtataaaaatcgtgttgcatgttggatggaac

SEQ ID NO: 4383 - DNA, 689 bp, Zea mays
  unsure (1)..(689): unsure at all n locations; Clone ID: LIB3136-027-Q2-M1-C12
cgctcgtgctggaatatagtgcgattttatgttcctgctacgttgcgactgctcatagaatatatgccaattttcatcttcctgctatgtccgtgtatcatgttttttgaaaaataatatctccatatccgcatcctcctgataccgcccatatccatgcatacatatggtttgcttgctatatgcaagcgcctcgaacccggattgctataatttgatgatttcgtgtctctcacttgatctttttttaaagaataagttggtgtcgtgattgtagatctaagaagtgtgacgtaactaatggaatagtgtatcctgacaaataatgcatggtgaaacgttttttatccagattccttgaatcccctaaattgtgtttgtttattgttagaaatgaacttcatctaccaaacaggattcgaacaggcctttctttaccatgtttcgtgcaactatgcactgctaacatatcagtaccatggtttgcactgctagaatatcagtttattaccattttcgtgcaatcgtgactgaggtggatggggttattgaacaacgtatttgaatatttgatgttttagctgcatggaagtattcattccaatccttctgttgaattgcaaagaattgcttanaattgagatctgtatagttcagttttagttatgcccttttcattgggagcctga

SEQ ID NO: 4384 - DNA, 730 bp, Zea mays
  Clone ID: LIB3136-027-Q2-M1-C2
tcggcttgcacgcttctttactgctgaaattgtatctgcgggcgcccacctccatgccaacggtattatgcatagagatttgaagcctgagaacatcttactggatgctgatggtcatgctatgctgactgactttggtgtggcaaaagaatttgatgaaaacactagatcaaattcaatgtgtggtactgttgaatacatggccccagaaattgttcagggccgaggtcatgataaggctgcagactggtggagtgtgggagtccttctttttgaaatgcttacaggaaagccaccgtttgttggtggaaacagagacaagattcagcagaagatagtaaaggagaagataaagctgccaacatatttatctagtgaagttcactcaatgttgaaaggattattgcacaaagaagctggcagaaggctgggaagcggaccaggcggcagtgacgaaatcaagaaccacaagtggttcaagtctgtaaactggaagaggctggaggcccggcagatcgagccaagcttccggccgaatgttgctggcaagacctgcattgcgaactttgacgagtgctggacgaacatgcccgtgcttgattcttcggtggccaaccctgttgcggccaacagcaactttgtggggttcaattttgtgagggccgcaccgttctccagaagccgagtcccctgggctaaagaactacttccgtgatctgatattctaccc

SEQ ID NO: 4385 - DNA, 634 bp, Zea mays
  Clone ID: LIB3136-027-Q2-M1-C3
aagcacaccacttttcgctccacagcagaggacaagaggaggagcaagcgagcaccgagcagaggcagcagctgctatggaggcgcggaggacggggagagatctcctcgcgagcttcgtgctcgcggcgttggccgcgcaggcattcgtggccgtggtcgagtccagggccagccccgcggagaaggctagccaaggtatagtacatcttcttgagctctgcccactccagatgaaacaagcaccaatgccgatgtcccatgagggcggcgccgtggcgagcaagcttgcattttttttacctttgagatggcgtcgccgcatgcaggcgacgacgtgaagaagccggactgtgtgctggggatggacccgcgctcgttcccgggaatcggcagcggcagccacggcggcggcatcacgcccgtgacgccgtcgcacggaggctccaccgggacgccgtcccacggcggcggcggcggcgatggggacttgccgtcgccgtcgcacggagggacaacgctgccttccccgtcccacggcggcagcggtggggacttgccatcgccgtctcacggagggacaacgctgccttccccgtcccacggcggctccgggtccacgccgacatcgccct

SEQ ID NO: 4386 - DNA, 562 bp, Zea mays
  Clone ID: LIB3136-027-Q2-M1-C4
gtttcattaaggttgtgtcgttgaccgagaagctgcaagagaaggaggatgcgacggagggcggcgccaccgctgacaccgccgcgccggcggtggacgtcgaggcttccctggccgacgacgtcgaggagccagcagagcctgcggcgacgttcgaggtgctgcaggaggtgaagtccgaggacaggctgagcaccggcagcggcgggagcgcggtggtggacgcggacgcgctgctgtacggcaggttcgccgcggcagttgatagcagcgtggagtcgtactttcccggcggcgaggaccactaccacgactgcgggacgatgggccccgtgaatcatggcgccggaggaggcatccagtcggacgacgacggcgccggcagcgacgaggggtgcagctactacgccgacgaagccgccgccgccgccgccgcgttcttcgtcggacacgccacccaccaccacgcggacgaggacgaggacgccggccagatcagctggtggatgtggaactagacgttcgatcttcccacgccgatcgatcgaacggtcttcgaatc

SEQ ID NO: 4387 - DNA, 660 bp, Zea mays
  Clone ID: LIB3136-027-Q2-M1-C5
cgcgcaccgcgagctagctagctactgacacccggcgccggcgccgagtacaatacaaggaaagcagcatggtgttcgagcagcatgaggaggaggcggtggcgccgggcgcggtgcacgggcaccggctctccacggtggtgccgagctcggtgacgggggaggtggactacgcgctggcagacgcggacctggccttcaagctgcactacctgcgcggggtgtactactaccggtccggggacggcctcgccaccaaggtgcttaaggaccccatgttcccgtggctggacgaccacttccccgtggccggccgcgtccgccgcgccgaggcggagggggacgccgcgccgcgccggccctacatcaagtgcaacgactgcggcgtgcgcatcgtggaggccaggtgcgaccgcgacatggccgagtggatccgcgacggcggcgcgggcgcgggcgcgcccggcaggatcaggcagctctgctacgacaaggtgctcggccccgagctcttcttctcgccgctgctctacgtccaggatcatgaactcttttgctatcgagcaaagtgacaatgtcatcgcctatttgttttgttaaaaaaaatttcgctacatcgtttctctggtcacagaacacaaacttaaaatgcggtggggc

SEQ ID NO: 4388 - DNA, 634 bp, Zea mays
  Clone ID: LIB3136-027-Q2-M1-C6
catttcttctctctctgctcctccgcctccgcctgatccatccaagacagggatcgccatgtcggactcggaggagcaccacttcgaatcgaaggccgacgctggggcgtccaagacctacccgcagcaggctggcaccgtccgtaagaacggcttcatcgtcatcaagaaccgtccctgcaaggttgtggaggtttctacctccaagactggtaagcatggccacgccaaatgccactttgtcgccatagacatattcaatgggaaaaagcttgaagatattgttccttcatcacacaactgtgacattccgcatgtgaaccgtactgagtatcagctgattgatatttctgaggatggatttgtgagccttcttacttcagatggcaacactaaggatgatcttagactcccaactgatgagactcttgtggcccagattaaggaagggttcgaaagcgggaaggatcttgttgtgactgtccagtctgcgatgggggaggagcagatctgcgcgttgaaggatgttggccccaagtaacttccttggctttggagacgggaacctactgtatctcaacttaaatcggaaaagaagtgtatcaccaaaggattgctaccgagacattcacct

SEQ ID NO: 4389 - DNA, 577 bp, Zea mays
  Clone ID: LIB3136-027-Q2-M1-C7
agagaaatttttgaagggttataaggcccgtttttcttttttgttcactgcggtcgcgttcgattccttttggctgtgtccatgctcgctgcctacaatacgcagccacgcaggagtcctcgacttctgtaaattctgtaccaatgtaataccagttccagtttttgttttccacaatgttgctggcgctggctcaggcactcattaaaaaaaaaaaaaaaaaaaaaaaaaaaaaaaaaaaaaaaaaaaaaaaataaaaaaaaaaaaaaaaacggaagaatgaaggaaaatgataaaacaattgaaaaaataaaaaaaaaaaaaaagggggggggcccttttaaaggacccaagtttacgaccccggcctggcaacgtaaaactttttttttgggggccccaaattaaatttcccggcccgggttttaaaaacgtggggacgggaaaaaccggggggtacccaaattaaaacccttggaagaaaatccccttttccccagtgggggaaaaaaaaaaaaggccccccccaatgccctttccaaaaattggccacccctaatgggaaaagggacccccc

SEQ ID NO: 4390 - DNA, 723 bp, Zea mays
  unsure (1)..(723): unsure at all n locations; Clone ID: LIB3136-027-Q2-M1-D10
ctccgtcttcacgccgcgtcctcccgcacgaatccgcgctccggccaacgggccaagccctagccacccccgcccattcatggtgggcgggccgtgagatctctagggaggcttgtcggcttcgtcgggcgggaggggaggagatgggcgcccggaacagcgctgccgccacgccggtgctgctcaacgtgtacgaccttacggccgcgaacgattacctctactggctcggcttcggcgtcttccactccggaatcgaagtccatggcacggaatatgggtttggagcccacgactacccatccagtggtgtgtttgaggtggaatcaaagagttgccctggctttatctacagaagaacagtgtggctaggcacaacagacatgtctcaggaagaattccgctcgtttattgaaaaacttgcaggtgattatcatggcgacacatatcatttaattaacaagaactgcaatcacttcacagatgatgtctgccagaacttaactgggaaacccatcccttcctgggtgaataggcttgcaagagtagggtcagttttcgattgccttcttccagaaagcgtacaagtttctcctgtaggtcgtgtcccaacgagtcggcgaatatctgatgatgatttgtattcaatacattcaccaatggccgacanagatgacantgatgaggacgaggccaaacacctgctggcagctccatccaacg

SEQ ID NO: 4391 - DNA, 788 bp, Zea mays
  unsure (1)..(788): unsure at all n locations; Clone ID: LIB3136-027-Q2-M1-D11
gagagacgaccgtctgctcagccgtcgttggcgacggctcgtttcagggtcccccactactaatcacgaccctggcctctctcgattctgttgccttgccattgccatcatccaccctcatgcatgtcggtgcaacgcccatgggcatccactggtgcttataagaggaataatccggcttccgttcctctgaggacatcctcggccttccagggcagcaaccacgaaagccttctgcgcggggtgctttcctcgcagcaaatattcctgccttttgcattccggctntgcaagttccttgctttgggcatatatattgtgaggtctctatatatataggtggttcgaggtgatcggcagaaccacacaggcaaagatggcgagcgtgcacaaggccaccacccttgttctcatgttctgcctgctagcgctggggagagcggagtacctcaagtacaaggacccgaagcagcccgtcgctgttcgcatcaaggacctgctgggtcggatgactctcgctgaaaagatcggccagatgacgcagatcgagagggaaaacgccacggccgacgcgctggccaaatacttcataggtagcgtgctgagcggcggaggcagcgtgcctgctcctcaggcgtctgctcaggcttgggccgccatggtgaccgagatgcagaagggcgctctttctacgcgtctgggtataccgatcatctacggtattgatgccgtgcatgggcaccaacacgtctacaaagctactatcttncctcacaacgtcgggcttg

SEQ ID NO: 4392 - DNA, 542 bp, Zea mays
  Clone ID: LIB3136-027-Q2-M1-D12
gacacaagtcttgttttattccaactcgccgtcaagaacatgaaagtgagcacagtggtacaccaagaacacaagttttctgttttattctaaaacatggccaaaaacatggaactgatcgcacaatgatacactaaaacacaacaccgtcaggaacgtgaaagtgagcacagacagtggtacagtagtaggaagacaagtcgagcacgatggacagagtaggcatcacccaacagatcgatcgtcatgagctcagaaggattttatgagatcaaccaaatcggttaaatccgtgcggggcgacgcagtttcgtcgacgtcgacgccgatgccgatgcctttggccgcagcgatcttgaattccttcatcctctccttgatctcctccccttccttggtgccaaagagcctgtcgatggcggccttgacctggcctctctccagctgttcccccacgagctccgtgcccaccttccacacgtcgcacacgtacctcatgttgccgaactggtccccgtgccgcgggcagcaaaccatgggca

SEQ ID NO: 4393 - DNA, 680 bp, Zea mays
  unsure (1)..(680): unsure at all n locations; Clone ID: LIB3136-027-Q2-M1-D2
ggcaagcgttgttccaagtactacgaggcaggtgcccgctttgccaagtggcgcgctgttctcaagattggccctaatgagccatcacagcttgccatcgacctgaacgctcagggtctggctcgctatgccatcatctgccaggagaatggtctggtgccaattgttgagcctgagatccttgttgatggccctcatgacattgatcgctgcgcttacgtcactgagaccgtccttgctgcctgctacaaggcgctcaacgagcaccatgtcctcctggagggtaccctcctgaagcccaacatggtgactccaggctccgactccaagaaggtgacccctgaggtgattgctgagtacaccgtccgtaccctccagaggaccgtccctgctgctgtgcctgctgttgtcttcctctctggtggacagagcgaggaggaggccacccgcaacctcaatgccatgaacaagctcagcaccaagaagccgtggtccctgtctttctccttcggccgtgccctccaggcgagcaccctcaaggcctgggctggcaaggtggagaacctggagaaggctagagctgccttcctcgccaggtgcaaggccaactctgaggctaccctcggcacctacaagggtgatgctgccgccgacaccgagagcctncacgtcaaggacta

SEQ ID NO: 4394 - DNA, 687 bp, Zea mays
  unsure (1)..(687): unsure at all n locations; Clone ID: LIB3136-027-Q2-M1-D3
gtccgtgcattggatgcaggtccagtgattgcgtgtgaaaggttttctgttgatgaatgtattaaggcaccagagctactttctatgctgtttcatttaggatccaagctattgattaatgaacttccatccattcttgatggttcggctaaagataaggcacaaccacaggatgactccaaagctacactggcaccaaagttaaattctgaggagtcatggctatcgtttgacgaagaagctaaagtgctgcataacaaggtgagtatctgattctcaatgtgtccaacaaagcttttgccaaccaactctggtaggtgcgggcatttgcaggatggcctgggacgcgcgcaaagctgcaactcataaaccaaaacagtgtacccgatgtactagagattaaggttatcagcacgaaggtttcaacatcatgtgtcaaagttggagatgaaaacgagatactattctctgggagctcgttgctgattccttgcagtggttcgacctggctcgaggtgttggagcttcaactccctggaaagaaagtaacaaaggcacaagatttttggaatggtttgcgtggtcagaagctgatgaaattgccatagggggatatctgcattcgcagcacaggagtgtgcctatatgcatagncagggttattgaggtcagtcattgcgcgaacat

SEQ ID NO: 4395 - DNA, 645 bp, Zea mays
  Clone ID: LIB3136-027-Q2-M1-D4
gcctttgttaaaacttcttgactcaaaaaatggatctctgcaacataatgctgcatttgccctttatggagttgcagacaatgaggactatgtatctgacttcattaaagtaggaggtgtccaaaagttacaagatggagaatttattgtccaggcaacaaaggactgtgtggcaaaaacattgaagaggttagaggagaagataaatggacgagtgttgaaacacttgctttatttgatgcgagtaggagagaaatctgtgcaaaggcgtgttgctctagctcttgcacacctttgtgcccctgaagatcaaagttcagtttttattgataataatggtctcgacttgcttcttgatcttcttatttccatgagttcaaaacatcaacaagatggctcagcagcattatacaaattggccaacaaagctgcagcactttctcccatggatgctgcccctccatctccaacacctcaggtttatcttggtgagcaatacgtgaatagttcaacactttcagacgttactttcttggtagaaggaaagcgattttatgcacacagaattgctttgcttgcttcttctgatgcatttcgtgcaatgtttgatggcgggtacaggggaaaaggatgcaagggacattg

SEQ ID NO: 4396 - DNA, 680 bp, Zea mays
  Clone ID: LIB3136-027-Q2-M1-D5
gcagtcaccactcccaagccagtaccgagtcctacgagcagtcgcacgcaagtgtcaagagacgaaacggtcgacatggctcgcacgcaatctgccgtagcggtcgccgtggtggccgcggtgctgctgctggcagcggcggcgacgacctcggaggccgccatcacctgcgggcaggtgagctccgccatcgcgccctgcctctcctacgcccgcggcactgggtccgccccctccgcgtcctgctgtagcggcgtcaggaacctcaagagcgccgccagcaccgccgccgacaggcgcgccgcctgcaactgcctcaagaacgccgccaggggcgtcagcggcctcaacgccggcaacgccgccagcatcccctccaagtgcggcgtcagcatcccctacaccatcagcacctccaccgactgctccagggtgaactaaaacctagaccacgcgcgacgacggccgcctgatcgatcgaccaaccattccgccgtcgccgccggccggatcatcgatcgtcgtcatgatgatatctatcaatctacgcgtgatgatcgatgactacttgtctactgctatgtactactaaataaaatctctccgtgtgtacacgtacgcttgcatgtgcatggtagcatgtacgtacgacgtcgtccatgtatgttgtgtgacgtgtg

SEQ ID NO: 4397 - DNA, 508 bp, Zea mays
  unsure (1)..(508): unsure at all n locations; Clone ID: LIB3136-027-Q2-M1-D6
gcttatcgtctccaggcttcactcggacgagccgcccacggacagtacgaccacgaccaccaccgcgtcgtcgacgacgactttgagcatgatgggacggagcctcgccagcgtggagtcggacgagctgaccccgagcagcgtcttctcgcagctcatgcatccaggtggcagatgaaaacggaaagtacaactggagtagatatcgtctgatcgatgtgctatatatatgtttctagtccatgctatatatatgtgggcaactagtatagttatgctctatacatattcatcatatagttcatcctatatacttgtagtatgtattgtgctagagccctgcagagttacttccctttccctttgaattatatatcttgaacatgtaactgagctatgttctcacttattcaaggccgatttgtaatgtttgcgtctacaagcaatgagaatgaggcaaggtgtcactcttcgatttcncaaccataacaacaaaaccaacaaacag

SEQ ID NO: 4398 - DNA, 477 bp, Zea mays
  Clone ID: LIB3136-027-Q2-M1-D7
gggaactttcatcgaaattgtgaaggacacggtctattaccccaagttcaaggagttctgcaggcctagttgctactctgatgagcactatatccaaacaatgctctcaattgaaactccgcagagcctagctaacaggagtgtcacctgggtagactggtctagaattgctgcgcatccagcaaggtttggcagggttgacatcacggaggaattcttgagggaagttcgagaggggcagacctgtctgtacaatgagcagaattcaacgttgtgcttcttgtttgctccaagcgcactggagccattgttagagttagcacccactgtccttggttttggataacgcatgtttttttagagatttgctggttgaatgtgacttgaatttaatcttacaatacatatagggggcttaggcttattaagggggtatttggtttgaagaattaatatattctaatgaattggtgtatc

SEQ ID NO: 4399 - DNA, 661 bp, Zea mays
  Clone ID: LIB3136-027-Q2-M1-D8
ggcctcctgcatctccttcaaggactccgcctgccgctgcttcggctacatggtctccaagaagaagtacatctacaccatcgacgacgactgcttcgttgccaaggacccatctggcaaggatatcaatgctcttgagcagcacatcaagaacctcctcagcccatccaccccgttcttcttcaacaccctgtacgacccctaccgtgagggtgctgactttgtgcgtggataccccttcagcctcagggagggtgctcacaccgccgtctcccacggcctgtggctgaacatccctgactatgatgctcccacacagctggtcaagcccaaggagaggaatgagaggtatgttgatgctgtcatgacaatccccaagggaaccttgttccccatgtgtggcatgaaccttgccttcgacagggatctcattggccctgctatgtactttggtctcatgggtgatggccagcccatcggtcgctacgacgacatgtgggcaggatggtgtgtgaaggtcatctgcgaccacctgagcctgggagtcaagactggcctgccatacatctggcacagcaaggctagcaaccccttcgttaacttgaagaaggaatacaagggcatcttctggcaggaggacatcatccccttcttccagaac

SEQ ID NO: 4400 - DNA, 737 bp, Zea mays
  unsure (1)..(737): unsure at all n locations; Clone ID: LIB3136-027-Q2-M1-D9
gaacaagggcctgaactgtcccttgctggattatccttgaatgcaccccccttttatgggacaacttccagtcgcttctcaagagaatatcacgaattatcttctccagttaccaagggcctggaactggaactagaacatactaatatgctatatgaagataaaagcaactgggagcaaaattatattggtgatcttcatattgctaatggaaaccaggaccttcattatgattctgaatctggtgtaagcttttctgatagctttgctagtgagtatgttgccccatcagatggcctttttgctcccctggagtacttggcatctcagttccctggattttcagcagagagccttgcagagctttactacgcaaatgggtgtgatttcaaccatactattgaaatcctcacccagctagagatgcaagttgatgctacacccaatcacacactgaatctgccccacagcacaccgaacttcagcactggggatttccctgcacttccaacagctgaggaccaaaatggtttcaatcagggtaatgtggatgtacttggcatgttcaatgggcgcagttcatctgcgatgcctactggagctggtgattntgtttcagccgttcgcaaacttgcatcgcagaactctgngccagtgaagtttaaaaaaggtcctgagtatggtaatggcatttcagctctttctgtaccccagcagacagttctacactaaacatc

SEQ ID NO: 4401 - DNA, 712 bp, Zea mays
  Clone ID: LIB3136-027-Q2-M1-E1
gtccagcgcttgtgttggcggcggcgatggcgacgtcggcgagcacgtccggcgagtggctaaagggcgcgctgcaggaacttcgggagcgtaagggcagctcgctggagttcgactcggatctcatctcgggcctcgtctccttctgcgagctcgcgcctccctccgacgccaccagctatctcgagaattttattgggaaagaagctgctcaggacatcattcaagagtacttgcggaggaggggtcacattggttcctcaaatggaactgagagctttcagtcatctaaccttcagccttatgttaagccttcagctgatgcagcaactacacaaacaaagaaacaaacacgcacgcaaaaagattcagcatcttcttctagtcagagttccaagagtcaatcagaaattgcagaatcacaacttccttccaagagaggttcaaaaaagaaaggagcaaaggtcatttccctcgctgaggcagcaaaaggttctattgtcttcaagcaggggaaaccttgttcatgccaagcacggcaacatgaccttgtcagcaactgcttatcatgtggcaaaattgtgtgtgaacaagagggcgagggaccctgtagtttctgtggcgcacttgtcttgaaggaaggtagcacttatgctggtcttagtgatgttgggctacccctttccgaagcagaaactgcagctgaagcata

SEQ ID NO: 4402 - DNA, 434 bp, Zea mays
  Clone ID: LIB3136-027-Q2-M1-E10
aggacatcgacatgcggatccgcgtccgcggcggcgggaagacgtcgcagatctacgccatccgccaggccgtcgccaaggggctcgtcgcctactaccagaagtacgtcgacgaggccgccaagaaggagatcaaggacatctttacccgctacgatcgcaccctcctcgtcgctgacccccggcgctgcgagccgaagaagttcggcggacgtggtgcccgcgccaggttccagaagtcgtaccgttgagcggctgcctgctccatctcgatttttcagatcgttgtgggtgttcttcgctttatttcctatcaatggatctgcttatctggttctatatctagctgctgctttaccataatgtttagactttaatgcctagcctgaaaccttgtttgcaatgtgaaattaatgtgagagattatgaagact

SEQ ID NO: 4403 - DNA, 680 bp, Zea mays
  Clone ID: LIB3136-027-Q2-M1-E11
cggacgcgtgggcggcgacgagcctccgcggaaaccagtgccaagccagagagtgcttctttctccgccagactgctgctccgcgcgagaagagccaccacggagtctgcgtgactcgggacagtggagaaaatcagcggcacagcgtgggtctcgcgacctccagcgaacgagatccctaagtttcgatccactgtcccagtggatttgggactgcgatggaggagcagttcatcctccgcgtgccgccatccgtcgcagagcggatcgagcgcctcatgaatgaatccgccgcctcctcctccaaccccgacgaggcctccctggacctctccttctcagaggatggaagaaatggcacatttatgatcggtaatgagagctttcctgcatctctcttggatctacctgctgtggtggagtcatacaaaacatatgatgattctgtactaattaaaactgctgatgttggtcagatgattatggtaagagaagaaaatgatcctgctccagaaggagtcgagtacaagcatgggcttactcctccaatgagggatgcacgcaggcgacgtttccgcagagaaccagacttgaacgcagagctggttaaccaagttgagaagcatcttatcagtatcatgcatggagtatctgtcaaccagaacgccagtgcgacagga

SEQ ID NO: 4404 - DNA, 703 bp, Zea mays
  Clone ID: LIB3136-027-Q2-M1-E12
gcgaatcgacgcgcctatctcagcttgctgcactgcactgcactgccctgccatcatatcgtacgtgagcccggccgagagcgagggagaggcatggctgctccgaagctcgcgacgctggcgctggccgtgctcctggcggcgaccgcggtggctcccccggccgcggtgcgcgcggcgatgtcgtgctccaccgtgtacagcacgctgatgccgtgcctgccgttcgtccagatgggcggggccatgccgccccagccgtgctgcggcggcatccgcagcctgctgcagcaggccaacaacacccccgaccgccgcaccatctgcggctgcctcaagaacgtcgccaacggcgccaacgggagcggcacctacatcagccgcgccgccgcgctgcccagcaagtgcggcgtcgccctgccgtacaagatcagcaccaacgttaactgcaacacgattaattaaatgaggcgtcctgtgcgcgtccgggcgaggaatgcatgcatggcggagagtaataaagtaatgctactggtattttaagctagatcgaggtgtgcctgtctctagtcatttatggtgtttagcaatcgtctacacagttcgtaaacggtgtatcgtggatgcatgttgccgcgagcagagtacgtaggcatgaacccggaggtgcgcttctgtctgtgtactctctctatgtagtaat

SEQ ID NO: 4405 - DNA, 497 bp, Zea mays
  Clone ID: LIB3136-027-Q2-M1-E2
caagaagcttgttgaggccgtcaaggggaagttttctgatgcggtgattcagttacacaccagggattcatcaaaaagttggcgtcaggctggatcagatggaagcagtcagctgattctaaaagaaccttctaccaatgttgtcctagctgatcatgttacaacaaagaaatgggagaaaattgttgatttcgatgaccaccttgatgatattagcaaggattggtcgaacccaggcctccttgactgaattttcatgattgatctcgctatactgttttggaacttcgctagaaatgaggtggtgaagctcgtcctgctgtgctatggatttctctcagtcgcaacgagttgtaagcactaagcacggatttcattttaatgtaaatgagtgattttgtaacaattacagttcaaaatgctaaaattatgcagagaccatgagattgtttcaaggtcatgacaattattacgagttgtcacaaacaatttttgtt

SEQ ID NO: 4406 - DNA, 700 bp, Zea mays
  Clone ID: LIB3136-027-Q2-M1-E3
cctcgccgtccgtgacctccgatccagcgatccctatgtcgtcgttcgcatcggcaaacagaaattgaagacacgggtggtaaagaagagtgtcaatccggaatgggacgaagaactcaccctctctatcgaagaccctgctgttcctattagactggaagtttttgacaaggacactttcgtcgatgatacaatgggtaatgcagaggtggacatccgcccattagtcgagattgtgaagatgaaactccaggacgttgccgacagaaccgtggtaaagaaactggtgcccaacagacagaactgcctagccgaggagagctcgatatatatatcggaggggaaggtgaagcaagacatggttgtacggctgaggaacgtagagagcggggaaatagagctccagcttcagtggatcgacctccctggctctaagggtgtatgagtggggggcggctatgagctctgccttgccctgctgttttcgcggatctccaactctttttctacttgaaaagaagaactagtggtttgcgtgcgctcgctcgcgtagagctgtcagttgtatgtaagaagttatgattgcgttggcgtttagtaaaatatcgtcagggagatgtatgtgcatgaacatctgagaatcaagaactataaaatgtgtacaatgcatgtactaaaggagtgtttgtttctatagatt

SEQ ID NO: 4407 - DNA, 622 bp, Zea mays
  Clone ID: LIB3136-027-Q2-M1-E4
gccaaataaaagacgccatgggatttgccttggataatgctgatgcagctggcgagattgttgaggttcttacagaatccttgacactcaaggagacgtctattccaacaaaggttgctcggcttatgctagtgtctgacatccttcataacagtagcgctcctgtgaagaacgcatctgcattccgaacgaagtttgaagcttctttgccagatgttatggagagctttaatgacttgtatcgcagtatcactggaaggattactgctgaagctctgaaggagagggttatgaaagttctacaagtttgggcagactggttcctgttttctgatgcatttcttaatgggctgagggctacttttcttagatcaggcaactctggtgttgttccgtttcactcgttatgtggtgatgcacccgaaattgaaaagaaaggtagctctgaggacggaaatgatggatttaagcttaatgaagacggtgccttggctactggaaaggcagcagcgacaaaggagctattagggctcccgctagctgaacttgagcgccgctgtagacataatggcctctctcttgtgcgtggtaaagaaatgatggtcgccaggctgcttaactt

SEQ ID NO: 4408 - DNA, 638 bp, Zea mays
  Clone ID: LIB3136-027-Q2-M1-E5
gatctctggcggacgagcacaaccagctgatcgcagaagccatcgactcgtcgatagagagccagtggcgcctccccagctcgtcgttcccgctctcgagctacccacagctcggggcgctgggcgacctgggcggccagaacagcacggtgagctcgctgccgaagatggagaggcagcagccaccctcgtccttcctagggaacgacaccggggccggcatggccatgggctccgcctccgcgaagcaggagggccagacgctgcggcacttcttcgacgagtggcccaaggcgcgggactcctggccgggcctctccgacgagaccgccagcctcgcctcgttccccccggcgacccagctgtcgatgtccatacccatggcgtcctccgacttctccgtggccagctcccagtcgcccaacggtgagtcgcgtacgttcctgctggccacggaccgaaggtgaaaggttgttgcttgtttactgatcggagacaaccatgtctggtctctgcagatgactaatggtgcgtggatcgtcgcgttctggccctttgtctgtctcccctccagtcctccacccaccgcgcagtagtagctgcggaaacagcccatgctcctgtatatttgtcggtca

SEQ ID NO: 4409 - DNA, 199 bp, Zea mays
  Clone ID: LIB3136-027-Q2-M1-E6
ggcaggcaggaatgcatctgccagtggaacagagcaacctgcacattatttatgtatgcctgttcattggagggcttgttcattacatgttcgtctatactagaaaaaacagaatattagcattaatctatagttaattaaagtatgtaaatgcgcctgttttttgttgtgtactgtaatcatctgagttggttttgtg

SEQ ID NO: 4410 - DNA, 660 bp, Zea mays
  unsure (1)..(660): unsure at all n locations; Clone ID: LIB3136-027-Q2-M1-E8
gagcttgcgtagcatcataagaacattgcactctcttcagtgcgtgcctgttccttcctggatgaactggcaggaagagtggccaacaaaatgagattcgttagtgaaattgtgcagaagcaaatcgatcttctctaggctattttgccccgatccctggggtcaccggatcagccgtctggcttcctggagtaggcttggcgtattgggactcgagcaggaagtagatgtgagttgcgaggattctagtgacagcggcgccatagagctctgggattcactgttatgtctcggcagttgcagaaagctgaagcgcctgttgcctctggctcgtgtttcatctgttagggtgcgtttggttgcaatgacaggacgggatgggacgggacgatccctcaaattaggttgtttggttctgggtcaagggttgggacagtactatcctgtgttgtcccctgttgtccctcaaaattagagggacgagagaggacgtcaggggacgatcccgtcctagctgtcccacaaccaaacacacccttaaggtgctatggaggatatgtttaataagtccctgaaaacacgcatcaagctccgatacattnttttgtaggacaaacaaaagagtactatgtattttatcgcaaaaacgaaaagaaatgg

SEQ ID NO: 4411 - DNA, 227 bp, Zea mays
  Clone ID: LIB3136-027-Q2-M1-E9
caagaagttattagctctatatcaccctgagaaatcttggccgcactaccgtgtcggtttgtgtccaaacagtcctgatgaagggtttctgtttaggcagtttcctgaaatggtgttttgctttaggacaatctcgtggttattgaaccttaatatatcgtgtccctgggatgtgttttttgacactttataagtaatttcatttggatgagacttattctgatttg

SEQ ID NO: 4412 - DNA, 384 bp, Zea mays
  Clone ID: LIB3136-027-Q2-M1-F1
aaaaaaaaaattatttaaaaaaaaaaaaaaaaaaaaaaaaaaaaaaaaaaaaaaaaaaaaaaaaaaaaaaaaaaaaaaaaaaaaaaaaaaaaaaaaaaaaaaaaaaaaaaaaaaaggggggggccgttttaaagaacccaatttaacttccccgggcatgcaacgtaaaagtttttttatagggcccccaaaattaaattaacgggccggggtttaaaaacgtgggaacgggaaaaaccctggggtaaccaaactaaatcgccttgaagaaaatccccttttcccaagttggggaaaaaccaaaaaggcccgacccaatcgcctttccaaaaagttgcccaccctaaagggaaaagggaaccccccttgaaccggccaataaac

SEQ ID NO: 4413 - DNA, 657 bp, Zea mays
  Clone ID: LIB3136-027-Q2-M1-F10
gttgaatggaagcgataactaaatcaaggatgttctatttatatcggtctcaggtaattgtgagcagcagtagagactaagcagttctgtaattgcatttgttctaagatcattttctgtagttgcatggaagcaataactgaatcaagaatgctctatttatttcgatctcagccattttggaggacgaacgagcaccggggagagtccaggaggaggcagatactgctgggacatgtccaagccagtggagatgcagtggagatggagatcaacattggcatggagaagctgtgaaacccaccgcagcagaaccccacccagaggaagtggcctcgcgtctcgtaagagtggcagacagtgatcggcgggttctttgcgacacgggctgctcttcgaccatgagcttcttgttactattcccccgcgacatttgtttggcatttctgttaacgattttctttgtttatattacactaaagtcaaagcctgaagccacgtcggcaactggatctaccattatgacataagcagaaatctaaataacacaaaaaaatcaggattactatatatttgtgcacaaagccacgaagaattgcatgaattgtggacaaagctgaaattcaaggatgctgaaagcctgcagcagacttctga

SEQ ID NO: 4414 - DNA, 708 bp, Zea mays
  Clone ID: LIB3136-027-Q2-M1-F11
gacgaaacggtcgacatggctcgcacgcaatctgccgtagcggtcgccgtggtggccgcggtgctgctgctggcagcggcggcgacgacctcggaggccgccatcacctgcgggcaggtgagctccgccatcgcgccctgcctctcctacgcccgcggcacggggtccgccccctccgcgtcctgctgtagcggcgtcaggaacctcaagagcgccgccagcaccgccgccgacaggcgcgccgcctgcaactgcctcaagaacgccgccaggggcgtcagcggcctcaacgccggcaacgccgccagcatcccctccaagtgcggcgtcagcatcccctacaccatcagcacctccaccgactgctccagggtgaactaaaacctagaccacgcgcgacgacggccgcctgatcgatcgaccaaccattccgccgtcgccgccggccggatcatcgatcgtcgtcatgatgatatctatcaatctacgcgtgatgatcgatgactacttgtctactgctatgtactactaaataaaatctctccgcgtgtacacgtacgcttgcatgtgcatggtagcatgtacgtacgacgtcgtccatgtatgtgtgtgtgacgtgtgagacggacagagagagagagacaggatcgatcgagagacggtcatgtcctttttggctgtttggtttattcatatcacaacctttga

SEQ ID NO: 4415 - DNA, 661 bp, Zea mays
  unsure (1)..(661): unsure at all n locations; Clone ID: LIB3136-027-Q2-M1-F12
gtggcgtcggcttccgggcaggtaggaaaaggtatcagcgtcgccaatctccatggagctcacaggcgccgcgctccggcgatacgcgctgccgtcggcgtccccggtggccgcgagggtggggaggaggaggcgaccagccagggtggcctgcgtcgggggcggggggttcgcggaggaggggcacctcaggtactacgaggtggccccgcggaggaaggcggtggcgagggacctgggaaagctccgggccatggggctcgtcgcggnggacgcagccaaggagaaggtcctctcggaagccacggatcttctgctgcaggagctgagccagatgaaggatgtgggatacaagataaacaaggtggagaaagaacagaatgctgctatgaaagcactgaagaagcaggagaagcgcaccaagaagactgccatcatgatgatgaagtgtgaagaagatgagtcatctgagtcaagcgagagcgattgtgaggacgaggcaaccatgaatgccgagcagggcttggtgatctcaacagcggttcccgaggttgttgcatcaagcatctcagctgtccccgcgatggagtgtgataaggctgcagtgaaggccatgaagaanatggagaaggaacaaatgaaggccatgaagaagatggag

SEQ ID NO: 4416 - DNA, 421 bp, Zea mays
  Clone ID: LIB3136-027-Q2-M1-F2
gggttttcgcgttgccgccgccgccgccgccgcagccgcaacaatgccgtcgcacaagaccttccggatcaagaagaagctggcgaagaagatgcgccagaaccgccccatcccctactggatccgcatgcgcactgacaataccatcaggtacaacgccaagcgcaggcactggcgccgcaccaagctcggcttctgagcgtcgggattggccggctgctgcgtcggaaggctagggtctaagagctatcttccttctgttttatcaatgtgtcagtttttctgtaagctagcaagtgttgctatgacgcttttattaagattctggtgagcggtgatgttaagagaaaattggcactactgtggtgtaccccaagattccttgcagcattgctatgctaagtaaagaaccctttatctt

SEQ ID NO: 4417 - DNA, 708 bp, Zea mays
  unsure (1)..(708): unsure at all n locations; Clone ID: LIB3136-027-Q2-M1-F3
ggaacgggctttgttcatttcgcaattgctaatgatgatgtgtacaagttagctgagaatatcaaatccaagggtggtaagatcacccgcgaacctggtcctgtcaagggaggatccactgttattgccttcgcacaggatcctgatggctacatgtttgagcttatccagagggctgacacacctgagcctctttgccaggtcatgcttcgtgttggtgaccttgagcgttctatcaagttttatgagaaggccctagggatgaagctcctaaggaagaaggatgtacctgattacaagtataccattgccatgttgggctatgctgatgaggacaagacaactgttctggagctgacgtacaactatggagtcacagaatacagcaagggcaatgcatatgctcaggttgccattggcaccaatgatgtgtacaagagcgccgaggcggttgatctggcgaccaaagaactaggtggcaagattttgcggcagccagggcctctacctgngatcaacactaagatcgcctcttttgttgatccagatggctggaaagtggttctggttgacaacaccgacttcctcaaggaactccactgaaggctcgggatacccaggtgctgtgctaggatgtagtaatgcttgtctgtggtgtaataagaagtggggtggttgtttctgccctgatgaacttataatactgaa

SEQ ID NO: 4418 - DNA, 574 bp, Zea mays
  unsure (1)..(574): unsure at all n locations; Clone ID: LIB3136-027-Q2-M1-F4
cgatcaagtcggagacggagcgcattgagtacctcaagacggtgagcgactgctacacgcggacgatgaagctcctcgacgattccatggcggccaggaccacgtacgagcgttcgggcggaatgaggagcctcgtcgcccgggacatggacgactacgtcgtctacggcctcaacgcgtgcttgcagaacgtccgcaactgctgcgtgcgcctggacgccatcgacaagctgcgggcgcactacgacgccctcgccgacgccgtcgccgacccggccgccaacgtcgagggcctcgccgcggaggcgtccgagtacaaggccgccatgtggcagtactgctacaaccagcggagcgcctccgcgcgggcgcactcccgcgcctactcccaggcgctcaagctggagggcatcgacttcgccgagctggtgcggaggcaccagctccggctcgggtacggcagcaagggcgaggagttcgaggacctggacgacacccagaagctggaggtgtacaacagcatcatcgtcgagtcggggcgggcggngctaccggtggcgatgttctcgtcggg

SEQ ID NO: 4419 - DNA, 772 bp, Zea mays
  Clone ID: LIB3136-027-Q2-M1-F5
caaggtcttctccctttcttcgctccacccgtggcttttccatttgtaccagctcctagtgctgcctttcccacagttgatgttccacgaccttcagagaaagacagagattgcccagttgaaaatgcacagaatgaatgccaagaagctcgaaaacaggtacagttcgaaggtttaagagttgctgcttcttcagagtctgatgggagtggaaaaggcgaggtgtctctccatacggagttaaagctatctcctgcccagaatgctgatgccacacctaccacaggagctggcacaaatgatgcattcaggaataagaaaaagcaggatcgctcttcatgcggttctaacacaccttcaagtagtgatgtagatgcgggcaatgttcctgaggaggacaatgctaatgagaaggcgaagcaagcctcctgcagcaactcttcagctggtgacactaaccaccgcagatttagaagcaatggaagcacaagtgattcatggaaggaagtttccgaagagggtcgtctggctttcgatgcgctgttcagtagggaaaagcttccgcaaagcttttctcccccacaagcagtagactcgaaggaggttgccaaggaggaggaagatgaagtgaccacagtggcagttgacctcaacaagaatgccacaagcattgatcatgatgacctcgacacaatggatgagcccagggcttccttttcccaatgaatgtcgcacctgaagctgaaatcgcgccgacaggcttcaaacatac

SEQ ID NO: 4420 - DNA, 645 bp, Zea mays
  Clone ID: LIB3136-027-Q2-M1-F6
acgattcaagccaattatcatgaaaacaagcagtgagatagtgaacaagctccgctcagaaggccatttcatgtcaattcatcttcgatttgagttggatatgcttgcatttgcagggtgctttgacatattcaaacctcaagagcaaaaaattctgtggaagtacagggaagaacattttgcagaaaaggaacttatccccatgaaaatcaggctcaaaggaaagtgccctttaactccagaagaggtaggttttattctacgtgccatgggatttgacaatagaacacgcatttaccttgcctctggcgagctctttggagggaaacgtttcatgaagccattcaagaccatgtttccacgcttagagaaccacagcacagttggacctggaaagctggaagagaatacccaagggctagcaggatcagcagttgactacatggtttgcctcctgtctgacattttcatgcccacatatgatggcccaagcaactttgcaaacaacctcatgggccaccgtatgtactacggtttccggaccacaatcacgccgaacagaaaggctcttgccccgatactcatcgacaggatggaaggccgccacattggctttgagagaatcaggagggtgatgtccaacac

SEQ ID NO: 4421 - DNA, 713 bp, Zea mays
  Clone ID: LIB3136-027-Q2-M1-F7
ctgctgtatattgtgcagaaggtgaaagattcagagctcaagacattgcttggtgataactggattcgcaagcgtcgtggtcagattaggcaatactctacagggtatcttcgatcatcatggactagggtgttagcttgcctgagagatgatgggcttccgcacacgatgggttcatcaagcacactcaaagccgcattgaaggatagattcaaaaactttaacttggccttcgaggagttgcacaggacacagacatcatggagggttgtggatcctcagttaagagaagagctgaagatctcaatctccgagaaggttcttccagcataccgttcatttgttggaagatttcggggacaactagagggagggaggggttctgcaagatatataaagtacaaccctgatgatttggagaaccatgtctcagaattttttgaagggagaaagtcaaatgcttgatggtcaaggtgagtgctaactcccaggctgtgtttccatacataactcagatgtattattggaaggcatgttcatatcaactatgcagcctgaagacccgtgcaaattttgatgatgctagttccaagtccccttccaaatttcttggcactatacagggaacttgaccttcaaacatcttttgaaggtctgaagatggaaatataatcttctcctgaactgacagaaactttgtgaattgcaaagca

SEQ ID NO: 4422 - DNA, 408 bp, Zea mays
  Clone ID: LIB3136-027-Q2-M1-F8
cggacgcgtggggggtgattgaggaccagtgggtgccgatgtgggatgaggagttcacgttccttctgacggttccggagctggccctcctgagggtagaggtccaggagtacgacatgtcggagaagcacgacttcggggggcagacagtgttgccggtatgggagctgaagcagggcatccgtgctgtgcccctgcacgatcgcaagggtgtcaggtacaagtccgtcaggctcctcatgcgatttgattttgtgtagccgagccgagccgccattcagattcagcttctctttttttcccttcttgtgtgaattgaatgtattactcccttccttccatcttcaacgtatatgtgtatgtatgtacttatttttgtcggaataaaagttgtatggaatggaatgg

SEQ ID NO: 4423 - DNA, 745 bp, Zea mays
  Clone ID: LIB3136-027-Q2-M1-F9
gtttgttccaagttctcctctgcatttgtctacaacagtgctggttaaccttgttttgactgtgagttctaacaatcaaagctctccagggctcaagaacagtaacctggacacatgtatacttggagtgattgcggcaagtacctaatgactagatagacctgatctagtctcccaatgttttttcattaatcttttgacaacattccatcaggttcttgccactgctgttacaaccaagatcttggacagggctggacggagaatcctccttattatttcttcttttgggatgaccctaagccttcttgtggttgctgttgtattttacatcaaggacaatatttcacatgactctgacttgggtaacaccttaagtatagtgtccttggttggtgtcttggcttatgtcactgcctactcctttggtatgggtgccattccatggatcataatggctgagatccttccagttagcatcaagagtgtggcaggaagctttgcgaccctagccaactggttgacatcctttggaataacaatgacagcaaatttgcttctgtcctggagtgctgcaggtacatttgccttctacatgatggtgagtgctttcactctcgtctttgtcatcccttgggtgccggagacaaagggaagaactctcgaggagatacaatggtcccttcagtgagctccagtatttcatctatatatatgcaaaatagcgggcaaatcctttcagatc

SEQ ID NO: 4424 - DNA, 585 bp, Zea mays
  Clone ID: LIB3136-027-Q2-M1-G1
cggacagggctcttattccagggatcgagactgaacagcagtccgagacgccatgaacgtggaggaggaggtcgggaggctcaaggaggagatccataggctgggccagcagcagcccgatggctcttacaaggtcaagtttggcgtcctcttcaacgacgatcggtgtgcaaatatctttgaagcactagttggcaccttgagggccgccaagaagaggaagatcttgacctacgaaggcgagctgcttctgcaaggtgtccatgacaacgtggagataaccctgttgcccccacctgcagttgctgccgcttgaagcgaagagcaccaccaagttctcgattccatacaactcgtatgcttgtattctgccgtgcctatattagattctctcgaaccatttggtgttccttgaaaactgctatcgtgtgatgtatgaaattgtggtgctcaagaaattgccttgcttgcatatggttgtgatgcttaatgaagtcaatgctggtatagcattcgagtcatgagacatgaacacagcatactggacttgatggccgcgggttattgacgtcaaaaaagacgaac

SEQ ID NO: 4425 - DNA, 693 bp, Zea mays
  Clone ID: LIB3136-027-Q2-M1-G10
aaggagtatgtttttgttgcaaactcagacaacttgggtgctatagtcgacatcaagatcctaaaccatctgatcaataaccagaacgagtactgcatggaggttactccaaagacgctggctgacgttaagggtggcactctcatctcttacgaaggaagagttcagcttttggagattgcccaagtacccgatgagcatgtgaatgaatttaaatcaatcgagaagtttaagatattcaacactaacaacttgtgggtgaaccttaaagctatcaagagactcgtagaggctgaggcacttaagatggaaattattccaaaccccaaggaagttgatggtgtgaaagtccttcaactcgaaaccgcagctggtgcagctattcggttcttcgacaaagcgattggaattaatgttccccgctcaaggtttctcccagtgaaggctacatctgatctgttgcttgtgcagtctgatctttacaccttggttgatggctttgtcatccgcaacccatccagagcgaatccagctaacccttcaattgagcttggacctgagttcaagaaggttgccaatttccttgcccggttcaagtccatccccagcatagttgagcttgacagcttgaaggtttctggtgatgtctggtttggctctggaattacactcaaggggcagggtgacaatatc

SEQ ID NO: 4426 - DNA, 757 bp, Zea mays
  unsure (1)..(757): unsure at all n locations; Clone ID: LIB3136-027-Q2-M1-G11
ctatagggaaagctgnnnnnnnnngnnngnnagnnnnnnnnnaanaaatnnngggaggaaccacgcgtccggaaatcgggtgttgagtcggcgcacggtgtaggtcgccatatccccttcccccctccttcctgcgtcccccggctccggcgatccgccgcacctgaacccttctccacgtcgcctcgccggttgggttgaggtgagccgatcagatccgatcggggccggtccttgcgccactgctgcgtgagctcatctcggtcgcccgcctgctcggctcgatcggccggggacggcggcggccagatctgcaatggagggcaacaaggacgacgcggccaagtgcctgcgcatcggcaagggcgcgctcgacgccggcgaccgcgcgcgcgccatcaagttcctgtccaaggcaaagcgcctggacccctcgctgcccatcgacgacctcctcacctcccttctcaaccccgaaggcgactcccaggcttcttcgcccccgccgtcttcaccaccgcaaactgccgcagcaggggcatcggaggcagttgaggctgatgggctgagagagaggaagcacaagggcaagaatagggaggaggaggcgactcctgctgccagggagtacaccgcagagcaactcgaggtcgtgcgccaggtcaaaaagcacaccagggactactaccagatcctcggcctggaaaaggacttgcagtgtcgaagacgtgcgccaggcctaccggaagctctcgct

SEQ ID NO: 4427 - DNA, 662 bp, Zea mays
  unsure (1)..(662): unsure at all n locations; Clone ID: LIB3136-027-Q2-M1-G2
cctgaacccaattgcagtgcagcagccatgggagcagcagcagcaggtggccacgcgctgcgcgccgtcggcgacgtcgtctcgttccccgcgaccgtcgccgccttcgtggaggcgctgctccagggctgggccgaggccagggccgggctgctggtgccgctgctccgcgccgcggtgctgctgtgcacggccatgtcgctgatcgtgctggccgagaaggtgttcctgggcgcggtcagctccgtggcgaagctgcggcgccggcgtccggngcgggtgtgcaggtgcgaccccgacgaggaggcggctgcggcatcccaggcctatcccatggtgctcgtccagatccccatgtacaacgagagggaggtttaccagctatcaatagaggcagcctgcaggctcacatggccggtagatcgactaatagtgcaggtgctggacgactccaccgactccgtcatcaaggtgagtgacatcggactcggttcacttgcctggcaccagctgccacgggaacatgcaccacaagaaccgggtgccggcaagaacacacggccctacagctactgtagcacggagcagacagaaacaactcgcacggggcgaccctacagctactgtagtgagctcgcgagtcttgactcttgagccttgac

SEQ ID NO: 4428 - DNA, 702 bp, Zea mays
  unsure (1)..(702): unsure at all n locations; Clone ID: LIB3136-027-Q2-M1-G3
cgcttcccttattaaacctagctcctcaagctccagacgcagtcgaccgccgcagaccgggagtagtcgacgcgccgtcactgaatcctcagatcacggctagccgtaatcacgccactctgctgactcccggcgaggtactctgacgcatgcgcgagcgcttctcttcttctcttttcgctgtgcttttagtctgttcgtttgatgcccagatctactaggtttgtgtgatgagccgagccgatttatgcactggatttttagtcaagtgttgtttccgcctccgctatctttagtgtctatgtctgaatttgggttcagtgattatcgagctataaattatagttgttgcgctgttctatactagatccagttaccgatctatgatattacggggttgagcgattcatgtgctggagtactagtccaagatttgcttccgtctcctcatctacctttagtatgtactctgtatataaacttaattgcagtttgcaactgattctcggccatatattacttccgttgcgttgttcattagatccatttccgatccctgatattacgtgggtggggggtacttcgactntgttttttccggattgtttgattactggtctattcccatacatattggtttctcattgattttatataattttgatgtaagcagcagtgtaacattttccttcagccatgggc

SEQ ID NO: 4429 - DNA, 678 bp, Zea mays
  Clone ID: LIB3136-027-Q2-M1-G4
ctttgcttctccatctccccattcccttcccacccccggcccggcggcggtacgtgaccctgacgccgcagcgctagctagctcgccggaacggcaggtggcggcgcgcgacctgagagcacagcagcaccggaccggctcaggcaggcgaccggcagaaaagatggcgggagcagcagctgtggagacggcggcggcggcggcggcggcggcagcggccaacggaaaagcgtgctgccacgccgccaaggggcccgggtacgccacgccgctggaggccatggagaagggccccagggagaagctcgtctacgtcacctgcgtctacaacggcactggaattaacaagccggattaccttgcgacggtggatttggatcccagctctcctacatactcccaggtgatccacaggctcccggtcacccacatcggcgacgagctgcatcactctggctggaactcctgcagctcctgccacggcgacccatcggccaagcgccgcttcctgatcctgccttccttgctgtcaggccgtgtgtatgtcgtcgacacagcgacagatccaagggcgccatccttgcataaggtggttgagtctgaggacattgctgagaatactggggctgggtttcctcacacgtctcattgccttgcgtctggcgacataatgatttc

SEQ ID NO: 4430 - DNA, 615 bp, Zea mays
  unsure (1)..(615): unsure at all n locations; Clone ID: LIB3136-027-Q2-M1-G5
cccactcgtggcgtttcccgncgcccgctgctcgctagcctactacgacttggaacttggaccccttccccttcctcctcctcgtgtcctcttccgttgccgtgccaaccaccaccctcaattgtcaaatcaggcctcctccttccggttccggttccaccaacgaccaagcacccatctctactcgagtctctgcgaatccgttgccggtagcctctctgcggtgagagttccgctgccgcctgctggagatgatggacgacggaggaggaggggtgcagtcgcagggcgtcaacccggactgccccaacgccgccaaccccttccaccgctgcgccgcgtactgccccgtccccgccccggcccccaccaaagccgccgccgccgccgccgtgcgcagcaagccgtctccgcctcgtccgagggcaacggcggtggcagcgcagaacgggacagccaagcacggagacggcgctgcgcgtgtcgctcccgcctccgacgcggaggacgacgacgacgacggaggcgagagggaggagtcgcgggctgtcaacccgggctacccggcgtctccgcctcgtccggngccgaggccgacccacgcggcgcagaacg

SEQ ID NO: 4431 - DNA, 671 bp, Zea mays
  Clone ID: LIB3136-027-Q2-M1-G6
cccacgcgtccgcattgatacggtacgagttagaggagattcaattggtggggtcgtcacatgcattgcaagaaacgttcctcgtggtcttggctctcctgtttttgacaaacttgaagctgaactggcaaaagccatgctttctcttcctgcaagcaaggggtttgagattggcagtgggttcgctggtacggactttactggaagtgagcataatgatgagttctatatggatgaggctggaaatgtgaggacacgaactaatcgctcaggcggtgttcagggagggatatcaaatggtgaaattatttacttcaaagtggcttttaagccaacagcaactatcggaaagaagcaaaatactgtgtcaagggagcatgaggatgttgaacttttggcaagggggcgccatgacccctgtgttgtccctcgagctgttcctatggtggaatccatggctgcgctggtcctgatggaccagctcatggcgcatattgcccagtgtgagatgtttccgctgaaccttgccctacaagagcccattggctctgctagcaatgcatctgaactggcaccaaacctatcataatgtttctcgtggaacatgtcccagctttccttctatcgaaattctggtctttgcttagcagtttgcaattcggaacccccat

SEQ ID NO: 4432 - DNA, 678 bp, Zea mays
  unsure (1)..(678): unsure at all n locations; Clone ID: LIB3136-027-Q2-M1-G7
ccgcagcactcggcacgccgcaccgcctctcggagaatcgaagccgaactgggcggcgggcgtaatggatctgctgaagcgggaactggagaagaagcggaaggcggcgacggccgacttcgggggcaagagcttcgtgcggcggtcggagctggagcagaagcagctccagaagcgccgcgacgagcaccgccagctcctcgccaaggccggcacgtcggcgccctccgcgaattccgccgcagctgctaccggttccgaccccagcaacctcgacgccgcagctcagacggcggcggcgaaccctaaccctagctcctccgccgccgcctcctcctcggcgccctccgtcccgcccgccctcgcgccgaagaagaccgcgcaggaggaggcgctgctctccgaggagcgtcgcatcgacgagctcgacctcccacggcacgaggtggtgcggcgcctccgcgtgctgcgcgagcccgtcacgctgttcggngaggacgacgacgcccgcctcgcgcgcttcaagctcgtgctcaagtccggcgtcatcgacgacattgacgacatcgacatgaccgagggacagaccaacgacttcctccgcgacatgatcgagatgcgtaagcggcagaaggccggagggacacctacgccagggcaagagcaagcgtgtagtgg

SEQ ID NO: 4433 - DNA, 696 bp, Zea mays
  unsure (1)..(696): unsure at all n locations; Clone ID: LIB3136-027-Q2-M1-G8
cggacgcgttggaggaccccgagacggagatgcgcgagggccacaactacgtgccccgcgacgagcagttctcggaggtgaagcagctcacgttcggggccaccacgctgcgctccggcctgcacgcgctgctgccggcgctccgcccgctgctcatcaacaagaaggatctgcgcttcccgcacttccccgccatcgacgaactctacagcgacggcatcccgctgccggcgcagaccgggttcgacgccatccgcaccgtcgtcccgcgcatggtcaagctggtggaggacaccaccgaccacgtcctccgcttcgaggggaccggttcgcgtggttcaaggacgaggagttcgcgaggcagacgatcgcggggctcaacccgctgtgcatccagctgctgaccgagttccccatcaagagcaagctggacccggaggtgtacgggccagcggagtccgccatcaccaaggagatcctggagaagcagatgaactgcgcgctgaccgtggagcaggcgctggcggcgaagcggctgttcatcctggactaccacgacgtgttcctgccctacgtgcacaaggtgcgggagctgcaggacgcgacgctctacgcctcgcgcaccatctttttcctgacggacctgggcacgctgatgccgntggccatcgagctgacgcggcccaagtcgccgac

SEQ ID NO: 4434 - DNA, 681 bp, Zea mays
  Clone ID: LIB3136-027-Q2-M1-G9
agataagtttgtcactgttgaagatattgtccgtcagcactgggccacatatggtcgccattactacacacgctatgactatgagaatgttgatgcaggggctgctaaggagcttatggcaaacctagtaagcatgcagtcatcactttctgatgttaacaagttggtcaaggagatccggtctgatgtttctgaagtagttgcagctgacgagtttgagtacaaggatcctgttgatggctctgtgtccaagcaccagggcatccgatacctctttggagatggttcacgactggtgttccgcctctctggaaccggttctgttggtgccaccatccgtgtctacatcgagcagtacgagagggactcctctaagaccggcagggattcacaggacgcccttgctccgctggttgatgttgcgctcaagctctccaagatgcaagagtacactggacgctctgcccccaccgtcatcacataaattttgaagagtgttttagaatgagttgaggcgcttacacaaactttcattccggcctcttgttccatagtttttcttgcatgttacatctcaccgatgaataaaatgtatgtatcagacttgtctcgtttttttgcccatccaagcagcaaattagccgctggcacagcatgcggtaataatcttgtcacagtgct

SEQ ID NO: 4435 - DNA, 423 bp, Zea mays
  Clone ID: LIB3136-027-Q2-M1-H1
gtcgtgggaagatttcaagtctgtcgtcgagtttcgccttgttggagactctgaatctgaacccgagccttctgttgcttctgatgttagctctgggcaagcaattgccaagctctctcttgaagcagatattgtacaagaagaggctcgcctgcacaccattgagaatgatggactttctggcgatttcacatcatcatcatcttaggattccaggcaaggatggaaagcgtaaaggtttaaaatgaagatttaggtatttagggttctacatagtatgtcaagctgaaatgctttgccttgtttattggaatatgtatgtttcgtttcaaacgtgggagcatagaactgtatatttcggtatttcacactgttcatttccatgtctgtattcttctggctatatatatatattttgatcct

SEQ ID NO: 4436 - DNA, 660 bp, Zea mays
  unsure (1)..(660): unsure at all n locations; Clone ID: LIB3136-027-Q2-M1-H10
ctcctctgttcgtcgtcaccgccccttccttcgccgcacccgcaccagcccgcgccgtggtcagaaggaggtccttcaccgtgcgcgcctctctccgcaaggccaccggcaccgccgccgtggcaatggctgccagcgccctgcttgccggcggtgccatggcccaggaggtgctgctgggcgcaggcgacggcgggctcgtcttcgagcccagccagttcaccgtcaaggccggcgacaccatcacattcaagaacaacgccggcttcccgcacaacgtcgtcttcgacgaagacgaggtgccgagcggcgtcgacgccaccaagatctcgcaggaggagtacctcaacgcgccaggcgagacctactccgtcaccctcaccgtgccgggaacctacggcttctactgcgagccgcatcaaggagccggaatggtcggcaagatcaccgtcaactaattaagctagctatcgatcgatatccattcatgtattagctgttgcttcctgctttgtactccgccgatctgtccatctctacatgttttcgtcttcacacaacaacctctgctacgactacgtatatatgcatgctactagctgattgattntaacgcgaccaggccgaccccgaaagctagctgggaccaagtntgtaccc

SEQ ID NO: 4437 - DNA, 676 bp, Zea mays
  Clone ID: LIB3136-027-Q2-M1-H11
ggagtggttttttagatagcgctagcagcagtagaaaccgccgccactaggctaggagtggaagcctcgggcccgcggcagcagccatggcggcgttcctggcgcctccctgcacttccttctatcgctcgtccgcattccttaccccctgttcctcgaatcgccggagtacagcgctaagggcggcggccgttcgtgggtcggcggtgacgcgggcccagcggacggtctccgctaggtgggtcccatccaggttagcggtggcgaggccggcggccaggaaggcgtgcctagaggagcttgatacaaccaacatgctccttcgccagcgcatcgtcttcctgggttccccggtggatgatacaagtgctgatctcattatcagccaactcctactattggatgcagaggaccagactaaagatattaaattgtttatcaactcacctggaggctctataacagcagggatgggagtatatgatgctatgaaattttgcaaagctgatgtgtcaactgtttgctttggattggcggcttcaatgggtgcatttttacttgctgctgggacaaagggtaagaggtactgcatgccaaatgcgaggattatgatccatcagccatcaggtggcgctggcgggaaagtcacagagatgggactacagataagagagat

SEQ ID NO: 4438 - DNA, 811 bp, Zea mays
  unsure (1)..(811): unsure at all n locations; Clone ID: LIB3136-027-Q2-M1-H12
ccgccaacggttccgccgcgtcgcccgcggcgtcgaatgccacggnctactcccccgcccccacgcaggtcgcgtacgacagtaacggccgcgccatctactacaccagcatgctcccccagtacccgtcggctgtcaatggcatgtcctcggcgggcgccgttctcgggacagagcccgtgaatccggtggccgtgaagccgaccgtgtcgtgaccaccccagcttacacctcgcctcatcaccaacaccaatggatcaaaattttctttcatcctcaccagtggtcaatggactgtctagagttgtttttttgtgcctgttggtgttctgggttcatgatatgatgacgatgcaagtatgagtagttgtttggtgtgcttagctgtacatacagagcctgtggacataatgtataagtattatatatattggcctgccatgttgtagagttgagtggggctgggagttgtttaacaatcttgtgctagtagcatttgttaattctttgggttgctgtatctcgattaactatagaaattcaatttggcatgtgatatctcggtgctcaatgctcttgcactccactctttgatgagcgtgttacgttatttctctgcccccttgtaggcaaaactactgctagtagtgggttctgcgctgatcacggnacatcagcgtgggcattatgcatctactgtagtggacgatgtgggtggtgtaaacaagatcagtgtgcgagcgtctgccggagctgtaatgtgtgcatggggagcccgtggagtgcacaggctgtgcgcactctactgttg

SEQ ID NO: 4439 - DNA, 731 bp, Zea mays
  unsure (1)..(731): unsure at all n locations; Clone ID: LIB3136-027-Q2-M1-H2
gcctcctgcacttgttcatccccgacggcgccaagtcgttcgagacggtggactcgctgagcgtcttccgggcgaagaactacgacgccaccatcgagttctactgggcgccgatgctggccgagtccaactccgacgacgccgtggtgcactccgccgacgaccgcctcatccgcggcgcgcccatggacaggcactccagcttctggaagggcgccgacgtcctcgtcttcaactcctacctctggtgggtcgccggggacaagatccagatcctgaggggcgccgacaacgacccgagcaaggacatcgtggagatgaagtcggaggaggcctaccggctggtgctgcaccaggtggtccggtggctggagcgcaacgtggaccccggcaagtcgcgggtgttcttcgtcaccgcttcgccgacgcacacggacggcagggcgtggggcgacgacgacgcggagggcagcggcaactgctacaaccagacgtcgccgatcagcgccgcctcgtcctaccgtggcggcacgagccaggagatgctgcgcgcgacggaggaggtgctggccacgtcgcgggtgcccgtcgggctggtcaacatcacgcggctgtccgagtaccgncgggacgcgcacacgcagacctacaagaagcagtgggtggagccgacggtcgagcagcgcgccgaccccaggagctacgccgactgcacgcactggtgcctcccc

SEQ ID NO: 4440 - DNA, 720 bp, Zea mays
  unsure (1)..(720): unsure at all n locations; Clone ID: LIB3136-027-Q2-M1-H3
cacgatggacgttcttcacagaggaagtgcttgttttccaccgaagtccggctcctggatggcggcggcggcggaggcgagcccgggagtgacagcgatggagtcttgggatgcgagtggtccgacttagtctccccgacctcagcgaagcttttggccttcgacgccacgatggacgagcatcacagaggagtgcatttggcggctcagaacgcagagtcgtgtgggtatttgctgtcgaaacttgccggagacggtggcgtatcggacggagcatatcctactgcgtctgcccaggtatactatcaggaacttgtgatgggagacgatcagtcagagaacgccgctcctcaaatggatgctcaggaaaccatctcagccgaagaaatccaggataatatctatgaagcggatgtgtgtgttccattagagtacaaggtagtggagagccaacagcagcgtggcatacggagacgctgcctggtcttcgaggcagctggttttgggttttctaatagcgctgtgaagaaggggactattgaagatcgctcggtctcaacatgtagtaagggcaaaagccctgcgcanagccagccgcgcggactgcgaggcatcgggcttcatctgaatgcccctgcgttaacaccaaaggggaaaatggcctgtcggnatcctnctnctacggcttcttctctcctttcgtcgtcagcgtcgggaaag

SEQ ID NO: 4441 - DNA, 507 bp, Zea mays
  unsure (1)..(507): unsure at all n locations; Clone ID: LIB3136-027-Q2-M1-H4
gagaatcgacgcgtcnatgccaccgtgcgggactgaacggcactgccctgccaacaaaaggcacgcgagcccacacgacagcgagggagaggcatggatgcaccaaagctcgagacgcgggcgatggccgcgctcctggcggcgaccgcgcgggctgccacggccgcggcgcgcgcggcgaggaccgggcaccaccggggacagcacgctgaggccgcgcctgccgagctggcagatgggcggggccatgccgacccagacgcgctgcggcgggatgcgcagcctgctgcagcaggccaacaacacccccgaccgccgcaccatctgcggctgcctcaagaacgtcgccaacggcgccaacgggagcggcacctacatcagccgcgccgccgcgctgcccagaaagtgcggcggcgccctgccgcacaagatcagcaccaacgctaactgcaacacgattaaataaatgacgcggcctgtgcgcgtccgagcgaggaacgcatgcat

SEQ ID NO: 4442 - DNA, 238 bp, Zea mays
  Clone ID: LIB3136-027-Q2-M1-H5
gaaagagaagtttttgctagtttttgactcgagcaagctgtgaaacataagtgttactgtactacgtgatgttgcattgtatacatgcatcggacttcgcagttcccaagctattttggtagctttggtctgtaagattacctaaaataaactgagccacgttgccacgctgtagcttttggacatgttatgctttgatcggattgagacacgtgatatatgatcgttgcttacccaa

SEQ ID NO: 4443 - DNA, 640 bp, Zea mays
  Clone ID: LIB3136-027-Q2-M1-H6
ttcaagtctcgttatgtagcagtgcaataaaaaaagcagccgcaatggcgagcagcaccatggccctctcctccacggccttcgccggcaaggccgtgaacgtgccgtcgtcgtccgccttcggcgaggcccgcgtgacgatgcgcaagacggcggggaaggccaagccggcggcggcgtccgggagcccgtggtacggccccgaccgcgtgctgtacctgggcccactgtccggcgagccgccgagctacctgacgggcgagttcccgggcgactacggctgggacaccgcggggctgtcggcggacccggagacgttcgccaagaaccgggagctggaggtgatccactcccgctgggccatgctgggcgcgctcggctgcgtcttcccggagctgctcgcccgcaacggcgtcaagttcggcgaggccgtgtggttcaaggccggctcccagatcttcagcgagggtggactggactacctcgggaacccgagcctcatccacgcgcagagcatcctcgccatctgggcctgccaggtcgtgctcatgggcgccgtcgagggctaccgcatcgccggcggcccgctcggcgaggtcgtcgacccgctctatcccggcggcaagcttcgacccgctcg

SEQ ID NO: 4444 - DNA, 704 bp, Zea mays
  Clone ID: LIB3136-027-Q2-M1-H7
cccctcttgtcctcttctttccggcgatgggcgccggcgtcctcctcggcgacgccgccggcctgggggcccacctcgccgtacgccgccggaggacgcgcctctaccttcgcaactgggcctccaagcccctgcgcccctcggtctggctcggcgtggccgcctgtgtttcacagaatcgcgaccgccgtggccacgtgaccaggttctccgcctccgcctcgagcggcagtgacgagcccggggagctgtccgaggatgaggcgcagagggagtgggaagcggagctgaatcgccgactgaaggaggccgaggagatggaggagttggagcgcaccgccgagcagctgcaaagccaggccgccgccgaggcccccgaggagtcggaggaggagaagcgcgagcgtgtccgccgcgagctccagaaggtagcgaaggagcaagcggagaggagggagacggcgaagcaaatgtttgagttgggtcaaaaggcgtacgggaaaggaatgtatggacgatcaattgaattcttggaggctgctctcactatcatacgtccctcctctctactcggtggcgagatccaaatttggcttgcaatggcatatgaagccaataggaggcacaaggattgcattgcattgtacaaagagttggagagtagccaccccatgatcaacatcaggcgccaggcagctgagctt

SEQ ID NO: 4445 - DNA, 646 bp, Zea mays
  unsure (1)..(646): unsure at all n locations; Clone ID: LIB3136-027-Q2-M1-H8
tgcacttttttgttgaaataagcaggaagcttacatggaacatccgcgtaaggatagcactaggcactgctcgagcacttgagtacctgcatgaggtgtgcatgccgtctcttgttcatagaaatttgaagtcttcaaacattctactagatgaggagcataatccacacctatctgactgtggacttgctgccttgactccaaatactgaaagacaggtttcaactgaagtatttggatcatttggctatagcgccccagagtttgcaatgtctggcatttatactgtaaagagcgatgtatacagttttggagtggtaatgttagagctattgacagggcggaagccactagacagttccagagagaggtcagaacagtctcttgttagatgggctacccctcaacttcatgatattgatgcacttgctaggatggttgatccagcattaaacggaatgtacccagctaaatcactctctcgttttgcagacgtaattgcactctgcgttcagcctgagccagagttccgcccacccatgtcagaggttgtccagcaacttgtgcgcttgatgcagagggctagcatcgtgaggcggcaatcaggagaagagctagggttntcatacagagtcccagaacgaga

SEQ ID NO: 4446 - DNA, 722 bp, Zea mays
  Clone ID: LIB3136-027-Q2-M1-H9
cgagcagcttgttcggcaacggcagcaggtcttctgtagacgaagctgcagcaaacgcagacgacgggtcagtgcagcagcacccaggcccagcaagcatgaacagcagcggggcaaccgtgtggccgccgtacagctgcgccccagctccggcggcgtacttcccccagggcatcgcgattccgatctacccggccgcaccggcctactggggctgcatggttcccggagcttggagcctgccatggccggtgcagcacccgtcgtcgtcgtcgtcgccgtcacccaccaccaccagtgctccttcagtcgtctcgtcatccggggcagctgacgactcatcatcccacgcgctgggcaagcgcccccgggaccgggagggtgacgacgggagaaacggcggcaacgccaaggtgtgggcgcccaagagcatccggatagacgacgtggacgaggtggccaggagctcaatctggtccctcgtcgggatcaaaggcgaccagacgaagcagcaggacgcagcagacggccacgctggtgggcacagcaagcagctcgggacggtgttcgagcccaagcgcggcgaggccaccaagaaggctatgatgacaagctcgccgctccttcacgcgaaccccgttgcgctcacgcgctccgtggccttccaagaggggggtctggattcttcttcaagtaccctccatcaggcaggcagcagggaa

SEQ ID NO: 4447 - DNA, 445 bp, Zea mays
  Clone ID: LIB3136-022-Q1-K1-C6-F2A
aaccccatccacacaatagttaattatttcactttcacatgcatggacaaaaaaaacatattgttgtagcacatgcagcatttatttgtagcgcttgttctgtttctcttttgacttgagatgatccaatagattttgctcaggagtacttgaaataaaacggaggggactgtattctagagtctagacaaatggaggcgacttgggtgtcagctctgagtttaccatgtcaaggacaccattccaataattcttgtcctcctcatctgatgcttggttgctgcgctcagtttggccattattggactcaccccagcattctgatgcatcatgctcattggatacaccaagcagcatgccagtgaagccagctccaaccccagccatctctgagaaccacggttcctcacaaccaatgaagtcctcttccctctccttgctgtcg

SEQ ID NO: 4448 - DNA, 464 bp, Zea mays
  Clone ID: LIB3136-022-Q1-K1-C6-R2A
cttccggccattggaacccatttaccaaattggaccggccatggaaacaaaaactactgggacacacaccttaaaaaaaagctgggcaaaaatgggaacgatccttgtacccacaaatctatcaatggcactcgcattggcaccacaaacgacaaatcaaccaagggcggcgcaagcctcagccacatggcacaatgggagagcgcccgccttgaggctgaagcacggctggctcgagaatcgaagataccgacaggaacgccaacaccaactggttttcatgcgcagccaacgatactaccttgctcttgtggttcttcatgccttgacgtgcttcatgcatggcagggtgcaaagatagacctggagtctccaacctccacgctgacgtttacagggagtaatagtggaacgctgccaacccccaggaccaatagactagacgtatcagaaagcaactgtgc

SEQ ID NO: 4449 - DNA, 493 bp, Zea mays
  Clone ID: LIB3136-028-Q1-K1-B10-T7A
gctgtggagccaagggctgtacaaagctttttcatgctcctgagtttgttcacaagcatttgaagctcaagcatccagaccttgtattagagtcaacgtcaaaagttcgagaggatctttattttcaaaattacatgaatgatcctaacgcaccaggtggaaccccagtgatgcaacagtctgcaccagacagaggaagacggagacctagcatggacagtcgtctgaaatttgaccgtggcagtaacagagaccatgataaagctgatagagatggagtcaggtatggtagaggtgaccactctccaagccgtgatgggcctgatgatcagatgtttgatggtttccgcggacggccctcgaatgctccttttgttgctgaattcccagctccaccgatattgatgccagtacctggtgctggtcccttgggcccatttgttcctgcacctccagagatagcgatgcatatgctgagagagcaagggccacc

SEQ ID NO: 4450 - DNA, 491 bp, Zea mays
  Clone ID: LIB3136-028-Q1-K1-B11-T7A
cctctcctctactctgcttcacgcctcgccggccgatctagctagctatcgcagaccccgccggcccggccctcatcgatctctcgtcgcggcaatggccatcacaccgcgcgctccccgatgattgatccactccggtcgccattcccgccgccatcatcagctcctactatatattagcccgacgaccccgttcatcttcctcttgtagttttgtccagcgcgctccgctgacgcaatgaccaacaacaacaacggcggcaatgacacgaacgccgcggcgagcggctggctaggcttctcgctgtctcctcacatggacgagcaccagctccagcagcatcagcagcagcagcatggcctcttcttcccttccgtcactgcggcctccgccgcctcgtacggcctcggtggcggcgtggccaccagcgcatcgccgtactacacgccgcagctggcgtccatgccgctcaagtccgacggctccctct

SEQ ID NO: 4451 - DNA, 427 bp, Zea mays
  Clone ID: LIB3136-040-B6-F2A
accagtgcctgcgtgttcaccttgcgagacgctgtccgtatacgatcctcgtaccgactaggtattgcgctattaccggtaccgtatcagcctcacctctctctctatgaatacactgaccactgccaccatgggcactatgccatgacgcagtgtaaggcacaaccgcttccttctactatgacacactgcagttcatggaatgaacggaggataagataccgtggccggacaggtccaacattagcgacatgatcttctggacgccgttgggcctgattccttacattgatcccacgaagaccatgcctatgtactgatcaacaatccgttgactacacttcagtcacgtggccttttttttaggatgcaaccatggcgggtagaactgactactgcgcttctgccactgttgttcccaatttga

SEQ ID NO: 4452 - DNA, 418 bp, Zea mays
  Clone ID: LIB3136-040-B6-F1A
gtctccgcgtacgccttgcgggacgcgtaccggatcgtcttctcgaaccgcctgctcttgcgcttctcccggtaccgcatcagccgcgcctcccgctccaggcccctgctgaccactgccaccatgggcgccatgccagacgccgcgtcgggcacaaccgctgcctccgacgatgacacactgtggttcacggagtatgcggagtagaagagcttggtgccggcgaagtcgagctctggtgacccgctctgctggaagccgatggtcttaattgcgtccatggtacgcgcgaagtcgaggtcgatgtacgggtcagaatccgggaaaaataactcaagcgatgcggcttctttctgcccgtggtccatctgcgggagggaccacgatgtgggctggtgctagtggcgcccgtcgtctg

SEQ ID NO: 4453 - DNA, 444 bp, Zea mays
  Clone ID: LIB3136-040-B6-R2A
cctttgtttttttttttacatggtgaacatgaagatattatttatctacatttgaaccaaaagttacattgcaaagtagaaaaaaaaaaaaaaagctggcaagaaaccaccattgggaacaaaccagtagagtgccattttttctttgggttattattaactcacccttttataccacatgatctgaagtttaaacagaagaacttgagagtagaaggtagaaacatgctctatatgctatagagaaaattcagtaaggccaagaccaaatggcttgatcttcctccggaattccaaaattacatgaaccatgaggggggtcggagtaatcaacatgttcaagcttgggaaaaatgttatgaggcagaagggtcttgctcaagttatcttcttcatcctgagacacatcagatcgatcaggttcgaacacataagaagaatcac

SEQ ID NO: 4454 - DNA, 667 bp, Zea mays
  Clone ID: LIB3136-011-A11-F6B
ggcttattggtgactattgagctggtggggaactctttatgctccttgataggcaacctatgacggttctgagtgaggatgcggtcaggttctatgctgcagaagaggtcacagcacttgagtacctacattgccaaggtataatctacagagacttaaagccagagaacattttacttgatagagatgggcacatttcattgacagactttgatttgtcttgcttgacatcctgccgaccacaagtgtttcttacacacgatattgataagaagaaaaagaggaggaagagcaggagtaatcccatattttttgctgaaccaatgcgagcatcaaattcttttggtggtacagaggagtacatatgcaccggagattattaccggagctggctcatacgagtgctgtacataggtgggcgctaggaatgcttctatatgagatgttatatggtgatacaccgttcagagggaaaacacgacaaaggacatttgctaatattctgcacaaggatatcagattttctgcgagcatacaggtgagcctggtggcaaggcagctgatataccggttgttacaccgagaccctgcagataggctaggtgcctatgagggcgctatggagatcacacaacaccccttctttcgtggaataaactgggctcta

SEQ ID NO: 4455 - DNA, 360 bp, Zea mays
  Clone ID: LIB3136-018-Q1-K1-F8-F2B
cgctttcggtcccgttcgctgggggtgcaaaataacctggcgctcatatggttccataaccatattatatggtgtaagactatacacatcaatatcgccacgactcgcttccaacggatgctatacacaacaatatgacaactaggctctcaatatgtaatcaccactaagttcattactaatattatatttgtcaaggtatacgtcaagaactgagctagagggacaaatatttgtgatcggccatagctaaacggatacccaagaaaactgcaagaacgatggcaataataaaaacaactgagagagacttattgctcaattcctgaatctaccttgagtgacatatacatcatccac

SEQ ID NO: 4456 - DNA, 317 bp, Zea mays
  Clone ID: LIB3136-018-Q1-K1-F8-R2B
ggcccgcgcgctggggctgtattcccgccaggtggccatctggttgcagaaccgtcgcgcccggtggaagaccaagcagctggagaaggactacgacgcgctgcccgccagctggacgccgcccgcgccgagaacgacgccctcctctcccacaacaagaagctccagacagagatcatggcgctcaagggaggcggaggagggaggcaggaggcggcgtcggagctcatcaacctcaacgtcaaggagacggaggcgtcctgcagcaaccgcagcagcgacgagaacagctccgagatcaacctcgacatcttcag

SEQ ID NO: 4457 - DNA, 383 bp, Zea mays
  Clone ID: LIB3136-040-P1-K1-B6-F2B
gtctccgcgtacaccttgctgtacacggaccttatcgtctactcgaaccgcctgcgcgggcgcttctcccggtaccgcatgagccgcgcctcccgctccaggcccctgctgaccactgcaccatgggcgccatgccagacgccgcgacgggcacaaccgctgcctccgacgatgacacactgtggatcacggagtgatcggagtagaagagcttggtgccggcgaggtcgagctctggtgacccgctctgctggacgccgatggtctagatttcggccatggaacgcgcgaagccaaggccgaggaacgggtcggagacccgcaaagaaacaaccgccggcggggggggcacttatttctggcccggggtccgggcctacggg

SEQ ID NO: 4458 - DNA, 174 bp, Zea mays
  Clone ID: LIB3136-040-P1-K1-B6-R2B
ctttattcatcttacattcaactttgaaccataaactatatattccaaaattttaattaaacattatcataaaagttcaattttaacttgcaaatatcatgaacatatcaaaatatgtataaaaataatttctggaattgtgataattatttctttaagaaacctatttcctaa

SEQ ID NO: 4459 - DNA, 171 bp, Zea mays
  Clone ID: LIB3136-033-Q1-K1-G10.F1
gaatcggcaaaggtgacaggtttcaatagcttgggtgccaatgccacatgggaccatcagttttaactatgaaaatatatcttagggggaggggagggctaggtcacctctacagtgagtgccttcattcattcggtctgtggataatcaaggctttccttggctgcattt

SEQ ID NO: 4460 - DNA, 493 bp, Zea mays
  Clone ID: LIB3136-028-Q1-K1-B9-T7A
ctcatcccttactgcctccctgaggttcgatggtgctctgaacgtggatgttaacgagttccagaccaacctggtaccctacccgaggatccacttcatgctttcttcgtacgctccagtcatctctgctgagaaggcctaccacgagcagctctctgtggctgagatcaccaacagtgccttcgagccatcttccatgatggccaagtgcgacccacgccatggcaagtacatggcctgctgcctcatgtaccgtggtgatgtggtccccaaggatgtgaatgctgctgtggccaccatcaagaccaaacgcaccatccagttcgtggattggtgcccgactggcttcaagtgcggcatcaactaccagcctcctagcgttgtgcctggtggcgacctggccaaggtgcagcgtgccgtgtgcatgatctccaactccaccagtgttgtggaggtgttctcccgcatcgaccacaagttcgacctcatgtac

SEQ ID NO: 4461 - DNA, 713 bp, Zea mays
  Clone ID: LIB3136-018-G10-F4A
tacaatgtctgtcttgtcccttgagattagcatgtctttgttcttgataactagtgtctcatgaaaggattacaatctgactctagcatttacttccattggaccactcaaaataccattaggtgattggaaagattaggtacaatgtgtgggattatttgcattgaaactctcaagcaagccagtcatccaactaatgcatccttactactgcaccccactgcagcctaagacacgtaggaaaccaatcagcacataacacacctaacattgtacaggcaaaccaaatatcagcaaattgcattgtcttttttcctggatagagtacgctgcataacctctaatccaatactaaggcaagtaaccagtgaggccttaaaatacacagatttggaggggaagatgcctctctggatacatatgtcagactcatgatagcaaataacatcaactccagcaacaaaacttatagggcctctttggcagggctctagctcctctagaaataactcccaactctagctcctttgcaagagcagctccttgacatgagccattgttttatttgaaaaacgtttggcactgtcaacgctcacttttgccgtcagacgagcgccaggatatgcatgtgaatgcgtcgaggagccgcgtggagccactatttcaggctgcagcttctgaccgcaaattggctcctgctccctggtcggagc

SEQ ID NO: 4462 - DNA, 394 bp, Zea mays
  Clone ID: LIB3136-043-P1-K1-D10.27C0
ggcaaaggcggagtgacggaatttgattattggacatttgtttaccaggttgccaagttcttggagggccttcagtactgcttgagcaaaaattgtttggacctggtgttccagcacctaaatctttcaccatcgacgaagcaacagcttgcgggatagacctatgaggccatgaagaaacagacacattcatgccagagttcctatgtatggaagatgaatctgtcttgaggccatagtttggttcattcttggaagctttctgaggatatggatgggcagcttttcgctttggtcgtggaggtgggacatgttcactggttccatttttctgaaccttcaaaaagtacttttgtgcatgactcctaatctggatgacggtcttggagccaac

SEQ ID NO: 4463 - DNA, 820 bp, Zea mays
  unsure (1)..(820): unsure at all n locations; Clone ID: LIB3136-043-P1-K1-D10.27U0
tggtgaaagattaggtgctggaacaccaggtccaacaatttttgctcaagcagtactgaaggccctccaagaacttggcaacctggtgaaacaaatggtccaataaatcaaattccgtcactccgccttatgccggattttgcgggagtgtacagcttcttaggtagtgttttcgatccaagcacaagtgatcatctgcagaaactgaaggagatgaatccaattgatgttgagacggcgctgttgttgatgaggaatctctccatcaatttgaccagtcctgattttgaagatcaaaggaaattgttgtctttatatagcgcttctgatggacctgagctagggagctccaggagttcagctctagcaactagtgcacctttcatgtaaggattaagggtggatagtgtggccaggtctgtccgcatataatttcagttggacagacctcaggatggtgccctggcgtagcaccgatgagtgacgaaggaggcgccttgaccttttcgcttctcgctagcttcaggactgctgattgtgtaagggtgcggccatgaaaggtgagattggtctgcggtcatgaaaggtgagattggtctgcggcctgatgtgtatataaaatttttgccacgaaggaggcgcctgcacctattctatcccaaaagctcggccatctagggcattggatgctgcttcagttcagataatcaaggctgtcctttggaatgggacgagaggaaagatcccttccccattcggtgagttcagttctctgattggntcttgctgccctcttgatacggggacctgtgcgccatgt

SEQ ID NO: 4464 - DNA, 817 bp, Zea mays
  Clone ID: LIB3136-056-Q1-F1-A2
ggcatttcctccgcgacacgcttatggtgtggcacctccaatctataatcctgcactcaatcctttgatggcccggcctccaatttggcctgctgcaccagcgcaagcttggtattcgcaacaagcagcatatccacaacaatcagctgtttcagttcctcccatagttgctgggctcccaccacaacagccactattcccaattcagaatgtgcctactcctatgacatcagcagctgctaatgtacttcaaacatcgtttcctatggcccctccaggagtaccttcacctgttgcccctcatgtttcccagcctttgtttcctgttaacacttcagctgtcaatggagctgtaaattccccatttttagcatctgttgcacctggaaccattccagcaagctcttcagcagcagtcggtgttgcaggaattggatatggaaccaataaccaaggcactagagatccagcagttggatcttcacctgcagtatccaataataaggcgtctggtgcccaaccagctacgaatgaggtatatctggtgtgggatgatgaagcaatgtcaatggaggaaagaaggttgtcgctgccaaagtatcaggtgcatgatgaaactagccagatgaactctgttgacgcagcaattgatcgaagtatatcagaaagtcggctggcaggacgcatgggcctatgaagaagctgggctttgctcggtagattatcccccttgcattttaccggaagactctgcctgcgcttgaatctcgctgtgcagaagactgccctctacatttatttagcgaatggagttgct

SEQ ID NO: 4465 - DNA, 597 bp, Zea mays
  unsure (1)..(597): unsure at all n locations; Clone ID: LIB3136-037-P1-K1-E4.27C0
acagtacaaggactacgcatgtcattggncccattggatatgttgttacagaaacccaccgtctcctgacatccgagcaggtgtatcttggatagcagagctagcaacagtatagctaaaagttaagtcctctgcagtggcatgaccaaatgatggttcctctccagcacatgtagaagatgaattatgtagaggtggttcgggttccagaagagcaccagccaggacagtaggctgagcacgttgtccctctgttggattcacttctgaacaaaacaaaggaaacagagaagtttcgacttctgcattatcccattcgtcttcattaaatggagccccatattgctctccgattcttggaccaaggccacttttcttgaaaattttgcagagtacataagcatcctttgagaaaccggcagaaaccaaatcctcatcttccattctgtattcatacatcacccaatcagttctgtcacccttaggggccttgccttcatgaaatatcaatgttttcttcatcccaacggtgcgggagttaagcataattattctatcctttccactagtcttccagtaaccattttggtgtgcacg

SEQ ID NO: 4466 - DNA, 663 bp, Zea mays
  unsure (1)..(663): unsure at all n locations; Clone ID: LIB3136-037-P1-K1-E4.27U0
tgctagncctactgtcctggctggtgctctttggaacccgaacacctctacataattatcttctacatgtgctggagaggaaccatcatttggtcatgccactgcagaggacttaacttttagctatactgttgctagctctgctatccaagatacacctgctcggatgtcaggagacggtgtggtttctgtgaacaacatatccaatgtggccaatgacatgcgtagtccttgtgactgtgatgaatttctatcggagttgtctagatttatgaatgattctcctctgcgtaacactcctcttggagagtgctctggtcttcctccgatgtctgaagctgaggctcatgcttttgaagtcaactcttttggcctctacaatgaattatcagagcttgttgagttaggaggcgcggataacaacttaaacaccagcaatgtggaaactacagattacctcatgttgccacctgacagagaactgtcggctaatgattacatggaactaaacgatctccttgctcctgacccaagcttccccagtgaattttctgctcangacaatcaatatatgcagcatnctcttgctcagtacaatggacattatgatctgtcaggttcttccnagccaacaatgcctagcattttcgatgttttttcctc

SEQ ID NO: 4467 - DNA, 155 bp, Zea mays
  Clone ID: LIB3136-037-P1-K1-E4.27U2
tctcggctactctgctgtaggagatcatagcctgtaaatctttgattatgctattacttgtgtgtatcgcaacctgcctgattaccattgtcttgtgttttgagttttgacaatatgcaaaccataataatgtcgtaatatggaactcgtttatc

SEQ ID NO: 4468 - DNA, 558 bp, Zea mays
  Clone ID: LIB3136-003-Q1-K1-C1.F1
ctgtgaacgatatttcatgtaaccaaacacaggcaaaactgttccctcaatcagcaggttcctgcctccacctgcggcttttatttcacactttatttatgggctgaatcgacaaagagacccctagatccatcacaaatgtcactacattgagaaccaggtcgctagccctgggaacatggagcctgccactgccattgtgggtcaaacggtgtgtgatcttgcctcagttatgcgcagtgccaagttggcgatgacataagggaggatgcctccatggttgaagtacgccagctccacctcagtgtcaaagcgaacgatgcaagtgaaagatttcccattgtcggtagtaacagtcacatcctggccgggacggatctcactgaggttggtagggagatcgatgctgtaccgctcatgtccagtgaggccaagtgaatcagcatcctcaccagctttgaagcacagaggaatgattcccatccccaccaagttgcttctgtggatacgctcaaagctctttggaattacaggctttaactcccaggagcatcggac

SEQ ID NO: 4469 - DNA, 547 bp, Zea mays
  Clone ID: LIB3136-003-Q1-K1-C1.F2
ctgggaaacagatatttcatgtaaccaaacacaggcaaaactgttccctcaatcagcaggttcctgcctccacctgcggcttttatttcacactttatttatgggctgaatcgacaaagagacccctagatccatcacaaatgtcactacattgagaaccaggtcgctagccctgggaacatggagcctgccactgccattgtgggtcaaacggtgtgtgatcttgcctcagttatgcgcagctgccaagttgcggatgacataagggaggatgcctccatggttgaagtacgccagctccacctcagtgtcaaagcgaacgatgcaagtgaaagatttcccattgtcggtagtaacagtcacatcctggccgggacggatctcactgaggttggtagggagatcgatgctgtaccgctcatgtccagtgaggccaagtgaatcagcatcctcaccagctttgaagcacagaggaatgattcccatccccaccaagttgcttctgtggatacgctcaaagctcttggcaattacagctttaactccc

SEQ ID NO: 4470 - DNA, 481 bp, Zea mays
  unsure (1)..(481): unsure at all n locations; Clone ID: LIB3136-003-Q1-K1-C1.R1
gggaggacggggngngnagggcggngnagcgtgggcggacgtgggcggagaagttggacccaagaccattcatgttcctactggggagaagctttctgtttttgatgcggccatgagatacaaatctgagggccatgctactataatcctcgctggcgctgagtatggaagcggcagttctcgtgattgggctgctaagggtccgatgctcctgggagttaaagctgtaattgccaagagctttgagcgtatccacagaagcaacttggtggggatgggaatcattcctctgtgcttcaaagctggtgaggatgctgattcacttggcctcactggacatgagcggtacagcatcgatctccctaccaacctcagtgagatccgtcccggccaggatgtgactgttactaccgacaatgggaaatctttcacttgcatcgttcgcttttacactgaggtggagctggcatacttcaagcat

SEQ ID NO: 4471 - DNA, 580 bp, Zea mays
  Clone ID: LIB3136-003-Q1-K1-C1.R2
cggacgcgtgggcggacgcgtgggcggacgcgtgggcggacgcgtgggcggacgcgtgggcggagaagttggacccaagaccattcatgttcctactggggagaagctttctgtttttgatgcggccatgagatacaaatctgagggccatgctactataatcctcgctggcgctgagtatggaagcggcagttctcgtgattgggctgctaagggtccgatgctcctgggagttaaagctgtaattgccaagagctttgagcgtatccacagaagcaacttggtggggatgggaatcattcctctgtgcttcaaagctggtgaggatgctgattcacttggcctcactggacatgagcggtacagcatcgatctccctaccaacctcagtgagatccgtcccggccaggatgtgactgttactaccgacaatgggaaatctttcacttgcatcgttcgctttgacactgaggtggagctggcgtacttcaaccatggaggcatcctcccttatgtcatccgcaacttggcagctgcgcataactgaggcaagatcacacaccgtttgacccacaatggc

SEQ ID NO: 4472 - DNA, 545 bp, Zea mays
  Clone ID: LIB3136-006-Q1-K1-D7.F1
cataaactatacggacgcatgctatcgcttgatttcaacatttgcgattggattatggcaccagggcatcggggcacagctcatagtgtatcccggttaacaacatacaagcgccatctgggcaactaagctccctaggaaaaatgctagtgtacatgacattgggtgactaaagccatcagttttatcaccacaagaagccccattgacaggccttacacaaactctctggtatagaggagcaaaatgctttcagctttgcaatggacagctctgcctgcttcccaccaccaccttcagtagagttacacatgagtcaagcctgctcaacaagtcatgttgggttcctgaagaatggatggtccagagcttcttctgctgtcaggcgttccgatggctcgaaccgtaggagaccgtatagcaagtccaccagtgccacctttgaatggtcagcgttcctcgataccaagtcctttagtcgatccagtttcctcacagctctgatgctttctcttgaaacagcaccttcaggccaatttaatcgt

SEQ ID NO: 4473 - DNA, 537 bp, Zea mays
  Clone ID: LIB3136-006-Q1-K1-D7.F2
cataaactatacggacgcatgctatgcttgatttcaacatttgcgattggattatggcaccagggcatcggggcacagctcatagtgtatcccggttaacaacatacaagcgccatctggcgaactaagctccctaggaaaaatgctagtgtacatgacattgggtgactaaagccatcagttttatcaccacaagaagccccattgacaggccttacacaaactctctggtatagaggagcaaaatgctttcagctttgcaatggacagctctgcctgcttcccaccaccaccttcagtagagttacacatgagtcaagcctgctcaacaagtcatgttgggttcctgaagaatggatggtccagagcttcttctgctgtcaggcgttccgatggctcgaaccgtaggagaccgtatagcaagtccaccagtgccacctttgaatggtcagcgttcctcgataccaagtcctttagtcgatccagtttcctcacagctctgatgctttctcttgaaacagcaccttcaggccaatt

SEQ ID NO: 4474 - DNA, 454 bp, Zea mays
  unsure (1)..(454): unsure at all n locations; Clone ID: LIB3136-006-Q1-K1-D7.R1
ctctgtttcgtcctcatcgaatcggagtttcgcatggagtcatcgcggtctcggaagcggacgcgcaggcgcatgactgtgccgccgcgccgccaccagagcgagaagtggtagcggggggtggcgcgtcacaagnngagggaggatgaccgtgatggacacttcgtattcgaccttggcgagaacttgacccgccgatataaaatcttgagcaaaatgggagaaggtttgggttttctgcaatctgtcgtctcctcttctgctgggtatctccgttattattctaatgaagagggctacgagttggattttcgtaggtacatttgaggcgtgttttggaatgctgggaccgtgaaaacatgaatatgttgccataaaagttgttcggcatatccacaagtaccgtgatgctgcaatgatttgagatagatgtgctcaatcgccttgcagaaaa

SEQ ID NO: 4475 - DNA, 563 bp, Zea mays
  Clone ID: LIB3136-006-Q1-K1-D7.R2
ctctgtttcgtcctcatcgaatcggagtttcgcatggagtcatcgcggtctcggaagcggacgcgccaggcgcatgactgtgccgccgcgccgccaccagagcgagaagtggtagcgaggggtggcgcgtcgccaccatggagggaggatgaccgtgatggacacttcgtattcgaccttggcgagaacttgacccgccgatataaaatcttgagcaaaatgggagaaggtttgggttttctgcaatctgtcgtctcctcttctgctgggtatctccgttattattctaatgaagagggctacgagttggattttcgtaggtacatttgggcgtgttttggaatgctgggaccgtgaaacacatgaatatgttgccataaaagttgttcgcagtatccacaagtaccgtgatgctgcaatgattgagatagatgtgctcaatcgccttgcagaaaatgaaaagtacagatctctttgtgttcaaattcagagatggtttgactatcgtaatcatatatgcattgtttttgagaagcttgggccaagcttgtatgattttctaa

SEQ ID NO: 4476 - DNA, 526 bp, Zea mays
  Clone ID: LIB3136-007-Q1-K1-G8.F1
cttaaaacctcccatattcatggcaacagattattgccacgacttttgtgaacaaacaacagattatggcaaggccttcacggcattgtttcagccgtgcgagcgagtattacacttctccttttctgcactcgccattttgtattgagcgtaacatggatccattacggcgacacagaaggctaaaacctactacaacagtcaacgtgccatgacccaggcttccgtcctgccgtcatgagctaggcgcttccttccacctgcaagcagcagctgctggccaccgagctgctgtacgaggcaggggaggtcgcgcacctgcagcttcacgctggcgagccgatcgagtccaggacgtccacgcactcctggaggtcggcgtcgttcgcaggatcacccactcgtcctcgtcgtccttgtatttgagctggaacgctcctgtcgccagcttaaacctcttcgctacctcttccagcaggtggtacagcccattgccggcagaacttgaaccgcacggttcgccgtt

SEQ ID NO: 4477 - DNA, 478 bp, Zea mays
  Clone ID: LIB3136-007-Q1-K1-G8.R2
cggtgctgttaattcttcgcgtaccggagaaacaggctacatcgattctccaacctccctccacatggatagcgtcgaaggccaaacaacggtgagggactcaagatctgtacagcaagcagatgtcaccatggccaccaaggagcagacccttccctccacctctggcacaaccgattcttcgagcggcagcgcctcaagtcagcctgctttcaaggggaacccaggacgtgccctcaaagttagcagcagcgatgcactgacggtgaaagctacctgtaacggcgacaccgtgcggttcaagttcctgccggcaatgggctggtaccacctgctggaagaggtagcgaagaggtttaagctggcgacaggagcgttccagctcaaatacaaggacgacgaggacgagtgggtgatcctggcgaacgacgccgacctccaggagtgcgtggacgtgctgaactcgatcggctcgcgc

SEQ ID NO: 4478 - DNA, 506 bp, Zea mays
  Clone ID: LIB3136-011-Q1-K1-D6.F1
gaactggaaagtgaacacagctcatttcttattgattcgtatggttccagaaagccaagagaaatcaagaaaaataagactagcggactcccccgagctcaaatgaacagaagctttcatggcgatcagacctgtagtcggggatgcaagaatattgttgggtccaaccatacaacaatacagaccatgagagcataatcagatcttgaaggcagcaaacaggtccccctggacgtagcgtttgtcaacgaggctgaccaggtagtaggtcttctgaaccttctctagtagctccctcgatgaatcaccctcagggaacatgcaaccccacccccgagtccagatttcaaatgcttcgtccttccaaaccataaaacttgcatgatccacaaccgtaggctggataatctccttgccagggaaaacaccccacgtgacagcattcacggcgttcggggaaatattggagaatgtttctccaaccttgttcaagcaatgtaagtgag

SEQ ID NO: 4479 - DNA, 534 bp, Zea mays
  Clone ID: LIB3136-011-Q1-K1-D6.R1
caagtattcaaggccattaccttggaggccagcgactaatgttttccgtgttaaagaggatgttcgacctatattctgggccaacagaccaaagagctatcttaaaaggacattaggttgggatcagtatccccatggacggtggggtgattctcggaacccatcatatggagcacttactgaccaccagcgcttcacaaacttctgtcaagggaaactcacaaggagcccatggtcagaattggacggtcttcaaccagagacaaagattatcgatgaccagttggtgaatattaaccagaagggtttccttacaattaacagccaacctgctgtaaatggagagaaatccgactcgcctactgttggttggggtggtcctggaggctacgtttatcagaaggcctacctcgaattcttctgcggaaagggagaagttgggacgaactaatttgagaacatcaaaagcattccctttctctcagcttacatttgcttgttaaacaaggaattgaggaaacatttctgccaaat

SEQ ID NO: 4480 - DNA, 545 bp, Zea mays
  unsure (1)..(545): unsure at all n locations; Clone ID: LIB3136-012-Q1-K1-A5.F1
gcaatctaacataatccatctttttctgcggtagtanagtaatccgggtagtttctctgcgttgttcaacggcacatcgaatatacacgttctccatttacaggatgtacttgcgcgtcatgctgtacgcggattttatcatgttccagactctagatttcaacagtggaccatacttttttgcagcttaactaggtcagccatcatggtatcaagtttccctaatacgtacgtatacagcaaggcaaaaggacaagaaaccctgagacaaaatggtttctgtgccttttggcaatccaatcaatgactcaatgagaatcaaattgtcttcctctctctgggttctaatagaactacctgccacacaacacaggattcctctgtgacattctaccacgaagaataaccgaagcttcccctgcacatcaggcaccaccaaaactaacttctcaatctcctactttgtcgatttgacatcagtaagtgattctggctttgctccagggcttaattcagggctgaagcaacccttggtagtaccccct

SEQ ID NO: 4481 - DNA, 549 bp, Zea mays
  Clone ID: LIB3136-012-Q1-K1-A5.F2
gcaatctaacataatccatctttttctgcggtagcgtaagtaatccgggtagtttctctgcgttgttcaacggcacatcgaatatacacgttctccatttacaggatgtacttgcgcgtcatgctgtacgcggattttatcatgttccagactctagatttcaacagtggaaccatacttttttgcagcttaactaggtcagccatcatggtatcaagtttccctaatacgtacgtatacagcaaggcaaaaggacaagaaaccctgagacaaaatggtttctgtgccttttggccaatccaatcaatgactcaatgagaatcaaattgtcttcctctctctgggttctaatagaactacctgccacacaacacaggattcctctgtgacattctaccacgaagaataaccgaagcttcccctgcacatcaggcaccaccaaaactaacttctcaatctcctactttgtcgatttgacatcagtaagtgattctggctttgctccagggcttaattcagggctgaagcaacccttggtagtacccccta

SEQ ID NO: 4482 - DNA, 528 bp, Zea mays
  unsure (1)..(528): unsure at all n locations; Clone ID: LIB3136-012-Q1-K1-A5.R2
gcggctggcacggacgccggcgagccgcgcggcccggaggaccactgcctcctgcatatagccggcttccgcggccatgtcatccgtacacttctttcctgcctcctcccagaccccggtccccgcctgccttctcaaaacctctccaaagtcacccctcccgtgcccccgcacccttgccaccaccgctctccagagtgttggcggcaattgcaatgcgtggcaccgcccgcacctacggctgcagcggagggtccgcacccctgcagcaccgtccgacgcgccgcctgtgggccccgatggcgggagcgggggcggcggcgcggggggagggagtggaggggaggatgagaggagganggggganaanaanaagggactgnngnncgagnggangaacnngacaacagaggacgccaagacggggctggccgcggnagctatctcgctcgctgttcgaaccttcttcggcgagccgcgcttcatcccctcgctctccatgttgcccaccttctacctcggggaccc

SEQ ID NO: 4483 - DNA, 540 bp, Zea mays
  Clone ID: LIB3136-051-Q1-K1-E11.F1
ccgtgcaaaaagcctcaaactcctaactgctgcactgcagtaacatgcaaccgttaagtctgggtaagatctctgatatcaaactctttacaccgatttcacacagtaaatacaaggctccttcaaatgtagataatattctactgtacataaggcaaaagaaataccacacctaagtccaaatccaaacatgtcagatcatgcaccagcaacgctaactttgggttatcagccatttgtgccatcaattcagtagcactcaagacaaacggagcaatctacagagaaataaatccaacaaaacaggtttccacactaaaaataacccgggataggtgcatcgtcatcccacagttccttgaattcactcatgtccatctctgctgactcctccggcatcttttcttgcatagcctgagactcctgcatttttgacacgacagagagaatcctctggtactgatctcttgcttccgggtactgagccatggacttcactcttgcaagagctttctggagccgttcttcagtctgttttcg

SEQ ID NO: 4484 - DNA, 550 bp, Zea mays
  Clone ID: LIB3136-051-Q1-K1-E11.F2
ccgtgcaaaaagcctcaaactcctaactgctgcactgcagtaacatgcaaccgttaagtctgggtaagatctctgatatcaaactctttacaccgatttcacacagtaaatacaaggctccttcaaatgtagataatattctactgtacataaggcaaaagaaataccacacctaagtccaaatccaaacatgtcagatcatgcaccagcaacgctactttgggttatcagccatttgtgccatcaattcagtagcactcaagacaaacggagcaatctacagagaaataaatccaacaaaacaggtttccacactaaaaataacccgggataggtgcatcgtcatcccacagttccttgaattcactcatgtccatctctgctgactcctccggcatcttttcttgcatagcctgagactcctgcatttttgacacgacagtgaaaatcctctggtactgatctcttgcttccgggtactgagccatggacttcactcttgcaagagctttctggagccgttcttcagtctgttttcgtccttcttgca

SEQ ID NO: 4485 - DNA, 384 bp, Zea mays
  Clone ID: LIB3136-051-Q1-K1-E11.R1
ggataaaggtggcatgtctgatgagcgtgctctctcactcctttctgtcagccacccaagtcagggcagcttgatcctctgcactctgctgcaactcgcatacaaaataagttcagaggatggaaggggagaaaggaatttcttcttattaggcagcgaattgtgaagatccaggctcatgtgcgaggtcaccaagtgaggaagcattatcggaaaatgcgatggtctgttgggatcgtggagaaagttatattgcgttggaggcgtagaggggctgggttacgtgggtttcggtctcaagaaggatcagtggagagcagtagtggggggacaaggagcaggttcgatccaaaataagtcttctggagatgattacgattttct

SEQ ID NO: 4486 - DNA, 571 bp, Zea mays
  Clone ID: LIB3136-051-Q1-K1-E11.R2
ggataaaggtggcatgtctgatgagcgtgctctctcactcctttctgtcaagccacccaagtcagggcagcttgatcctctgcactctgctgcaactcgcatacaaaataagttcagaggatggaaggggagaaaggaatttcttcttattaggcagcgaattgtgaagatccaggctcatgtgcgaggtcaccaagtgaggaagcattatcggaaaatagtttggtctgttgggatcgtggagaaagttatattgcgttggaggcgtagaggggctgggttacgtgggtttcggtctcaagaaggatcagtggagagcagtagtggcggaacaagtagcagttcgatccaaaataagtcttctggagatgattacgattttctgcaagaaggacgaaaacagactgaagaacggctccagaaagctcttgcaagagtgaagtccatggctcagtacccggaagcaagagatcagtaccagaggattttcactgtcgtgtcaaaaatgcaggagtctcaagctatgcaagaaaagatgccggaagagtcaacagaacatggacatgagtga

SEQ ID NO: 4487 - DNA, 528 bp, Zea mays
  Clone ID: LIB3136-052-Q1-K1-C9.F1
aaaacttgcaacggcaattacagcacagaatatagttctaccggaccaaatactgtccctaccataaaatgcttgtttctcagggttctaaactctgcataccgaactaaagaatacaacacaggtttcatgtgtagcttgtacagcaagcaaaggctcagcagctgcaattacacagttgttccagtggtgacgtgttcaacccaactatgctccaatgcccctgtttaggtggacatggcatgaaaactgaactaggaggaccagagaaactcccgagacccagaaaacttgattgaacttgtagcttattttccatatggatggtacctgctcgaaccccgagcacctgtactcccaccaccagtaccacctgctccaccgtaactgccgtatccgccagtgccataaccaccacctggggcgccaccataggcgtgcctccgctatgcaccacctccataggcaccccctccatatgcaccaccaccgtatgccccatatgcaccatatgggcctccatacatg

SEQ ID NO: 4488 - DNA, 526 bp, Zea mays
  Clone ID: LIB3136-052-Q1-K1-C9.F2
aaaacttgcaacggcaagttacagcacaaaatatagttctaccggaccaaatactggccctaccataaaatgcttgtttctcagggttctaaactctgcataccgaactaaagaatacaacacaggtttcatgtgtagcttgtacagcaagcaaaggctcagcagctgcaattacacagttgttccaggggggacgtgttcaacccaactatgctccaatgcccctgtttagggggacatggcatgaaaactgaactaggaggaccagaaaaactcccgagacccaaaaaacttgattgaacttggagcttattttccatatggatgggacctgctcgaaccccgagcacctgtactcccaccaccagtaccacctgctccaccgtaactgccgtatccgccagggccataaccaccacctggggcgccaccataggcgctgcctccatatgcaccacctccataggcaccccctccatatgcaccaccaccgtatgccccatatgcaccatatgcgcctccatac

SEQ ID NO: 4489 - DNA, 586 bp, Zea mays
  Clone ID: LIB3136-052-Q1-K1-C9.R1
ggagtcgggatggggcgtctgggtacggcgatgctggcggagaggatgtgaggggggcgggcggcgactcatcggggtgagcgatctgggccctaggatttctgaacattaatgatgtaggtcaaaaggagatatattatttttgctttctgcaggaagatttttgtcggaggcgttgcttgaggagacaactgaagaatcattctccaagcattttgagaagtatggggcaataactgattctgtaattatgaaggacaagcatactaagatgcctcgtggatttggattcgttacattttctgatccatctgttatagacaaggttttggaggatgaacacgttatagatggcagaacggtggaagtcaagataacagttccgagggaagagatgaataccaaagatgggcctaagacaagaaagatcttcatcggtggggctacttccatctcttactgaaggttgaaataaagaaggctgaaccaaagaaaacatggatctgatcacatcgggtaatggggagatcaaaccaaggggggggggaggggtaccgcagtaactttaccgagggtgggggggggg

SEQ ID NO: 4490 - DNA, 579 bp, Zea mays
  unsure (1)..(579): unsure at all n locations; Clone ID: LIB3136-052-Q1-K1-C9.R2
ggaggtcgggatggggcgtctgggtacggcgatgctggcggagaggatgtgaggggggcgggcggcgactcatcggggtgagcgatctgggccctaggatttctgaacattaatgatgtaggtcaaaaggagatatattatttttgctttctgcaggaagatttttgtcggaggcgttgcttgggagacaactgaagaatcattctccaagcattttgagaagtatggggcaataactgattctgtaattatgaaggacaagcatactaagatgcctcgtggatttggattcgttacattttctgatccatctgttatagacaaggttttggaggatgaacacgttatagatggcagaacggtggaagtcaagataacagttccgagggaagagatgaataccaaagatggccctaagacaagaaagatcttcatcggtgggctacctccatctcttactgaaggttgaaataaagaaggctgaaccaaagaaacatggatctgatcacatcggtaatgggagatcaagccaagggggtnggaggttaccgcagtacttaccgtggtggtggtggagct

SEQ ID NO: 4491 - DNA, 543 bp, Zea mays
  Clone ID: LIB3136-054-Q1-K1-A10.F1
acgggaatacatgcagaaccagaattattcttgcgccacgttaaaacagacgggcgttgtctcaggtctcggaaagcatcactaaacatgtagtagcatatatacacacatcgccggccgcataaacacacaaattacgcgtttgcctctggacgggttgctgccaaaccatatccctaggccgactctgcgaacgaaccctcagcttgccatagtcgaaggaatgtggtagactcccatgaaaacatcacccaagatccagagagggccacggggtggtgggatatccatagctgtgaatccgctgatgcactgggcagcctgtccttcaccaaccttcagaatgtactgctctggtttcagcttgaacttattgcctccaatggtgaacgcaatgtcaggcatggacgcaagactgccacagtccacggctgattctcccattggactcggaagacgctcgcaaagcgtgattaatgtagttcaggatgagctcctgtgtcttgttctgggcaagttgggtctggatccataccacagcca

SEQ ID NO: 4492 - DNA, 560 bp, Zea mays
  Clone ID: LIB3136-054-Q1-K1-A10.F2
acggagaatacatgcagaaccagaattattcttgcgccacgttaaaacagacgggcgttgtctcaggtctcggaaagcatcactaaacatgtagtagcatatatacacacatcgccggccgcataaacacacaaattacgcgtttgcctctggacgggttgctgccaaaccatatccctaggccgactctgcgaagccaaccctcagcttgccatagtcgaagacggtgtggtagactcccatgaaaacatcacccaagatccagagagggccacgggggtggtgggatatccatagctgtgaatccgctgatgcactgggcagcctgtccttcaccaaccttcagaatgtactgctctggtttcagcttgaacttattgcctccaatggtgaacgcaatgtcaggcatggacgcaagactgccacagtccacggctgattctcccattggactcggaagacgctcgcaaagctgattaatgtagttcaggatgagctcctgtgtcttgttctgggcaagttggttctgcatccataccacagccatctcacaggcattg

SEQ ID NO: 4493 - DNA, 570 bp, Zea mays
  Clone ID: LIB3136-054-Q1-K1-A10.R2
cacacgtttgtcccagtcactcggaagggatactggcagttcaacatgggtgatgtcctggttgatggaaagtccactgggttttgtgctggtggctgtgcagccatcgcagattctggaacttccttgcttgctggccccacagccataattactgaaatcaatgaaaaaattggtgctgctggtgtagtcagccaggagtgcaagactgttgtttctcaatatggacagcagatcctagatcttttgctagctgagacacaaccagcgaagatctgttctcaggttggtctgtgcacttttgatggcactcatggtgtcagcgctggaattcggagcgtagtggatgatgaagctgggaaatcaaatggtggtctcaagagtgatccaatgtgcaatgcctgtgagatggctgtggtatggatgcagaaccaacttgcccagaacaagacacaggagctcatcctgaactacattaatcagctttgcgagcgtcttccgagtccaatgggagaatcagccgtggactgtggcagtcttgcgtccatgcctgacattgcgttcaccatt

SEQ ID NO: 4494 - DNA, 485 bp, Zea mays
  Clone ID: LIB3136-056-Q1-K1-H8.F1
attaaaatgtttaggcctcattttattggtcggtgcttacacaaaagaaacgaactaaaaccccaaaggcaacaaaaaccgcagggcggggggaaaccccggaaccccggggacaggtggggggggaacaacccccgacatccccgtagtcccccgcgattgaccaaaagccaaacaccgggcggccgatttccaccccgaaaagggggagccggggggccccgttgaaacccgggaaaaagacggggccgggggcgaaagggcccccatagctccacgggatctaccaagtggcgaacgcccaatcgcgaatcccggccccggtgccgccggcaaccacgggcgtaaagcactggaacgacccgctgaaaatggaaccctccaacgaccacgcagggaaactggaagacccggcaggtccattcgtacctgaggaagtggccacaccacgcggtgtccccccggaaacttcggccaaaactcct

SEQ ID NO: 4495 - DNA, 516 bp, Zea mays
  Clone ID: LIB3136-056-Q1-K1-H8.R1
ggggagacgagctgctagccgatcaggggagaattcttttgtaatggagctgctgcgccacgcggcgatggttgttgcccgcgcgtgctctcggtttctctgctgctcctcgccgccctgctgtggaagcacgtctctgcggcggcgattaccaggggtgatttcccggaggattcgtcttcggcgccggcgcatcggcttaccagatcgaaggcgcattggcagaggacgggaagaagtccagcatctgggacacatacacgcacagtgatattcgattgactatgatactggatatgtggctgcggaccagtatcaccattacaaggaagatgtgaagctaatgcatgacatgggcttagatgcgtacaggttctccattgcctggtcaatgttataccagatggtcatggtactgtgaatccaaaagtgttggattactacaagagtctcatagatgagctactgaaatattgattacaatttcacattatcatctatcacttcggacttccc

SEQ ID NO: 4496 - DNA, 612 bp, Zea mays
  unsure (1)..(612): unsure at all n locations; Clone ID: LIB3136-056-Q1-K1-H8.R2
ggggagacgaagctgctagccgatcaggagagaattcttttgttgtgcgaggctgctggcgcaccacggcggcagatcggcttgtgtggcccagngtcgtgtctctccggctttcgtctgtcttgcttccttcgctcgctcgctgcctgatgtgaagacatcgtgctcgtgcacgctggcgatgtaccaccatggtgactttcaccgcgaggtggttcagtctttcggcagcacggcgcatcgggcttaccagatcgatagcgcatgggcagaggacgggaagaagcccagcatctgtaacacatacacgcacagtggatattctattgaccatgatactggagatgtggctgcagaccagtatcaccattacaaggaagatgtgaagctaatgcatgacatgggcttggacgcgtacaggttctccattgcctgttcaaggcttatcccagatgggcgtggagctgtgaacccataggggttggagtactacaacagcctcatagatgaactcctcacatatggaatacagactcacgtgaccatctatcactttgaccttacccaggctctccatgatgaatacaacggcctgctcagtccgagaatatc

SEQ ID NO: 4497 - DNA, 613 bp, Zea mays
  Clone ID: LIB3136-052-Q1-K1-G6-f9
ccgcaaacgtgggatacgttgactggcccaggaaccgcgacagccagtacgccgacgacttcacagaggacattcgcgtgaagagccaccagatgctcgagagcgaggacatgcagcagctgctgagggtcttcagcatgggtggagcctccgggagtttgtcagacgacacgttcaacttccagccctacatgccctctcccttgcccaaccccgggttcgaaagcgagcgcagccattcatccggcaaagctgtcgtcggctggctcaagatcaaggcggcaatgaggtgggggatcttcgtcaggaagaaagctgccgagagacgggcgcagctcgtcgagctggaggattagcgtcgacgtggctttacaacggtcaaggctgcgttgtaaattactagtagtcatctgtgcccccacataccctcttgataccccattgaaacaggtttctgaaactgttctgaaatgtacaacgagtagttctgctatcttgtacagattacagaattctccttgcttgcttgtgttaggggtgtaacatagctctgctaaggtggacacatgactggaccagcttgagtatctttatttgttcccttacctagctc

SEQ ID NO: 4498 - DNA, 609 bp, Zea mays
  Clone ID: LIB3136-052-Q1-K1-G6-r4
cctggccagttccagaccaggcatcgtttgcagaccctgtcagcaggttaggtggtaggaacgaaaatgtgtcatcgtatggcgtctggagattggtggatgaactctggagttgagatagatgtgttgctgattggtcgacaccataccctacggaatcagttccacctgatggtgatgaccctggcatgctcgttgaggagaggtgttgttgatacgaagtcgaaccacccgcagaagcatgcgtctcagcttgaccagtggatgcagcctttttctttggtttaaggttcaatagacctttgccatcatattcaatgacatacatccagttatcatatgctttctttaccaatgcatcagcaaacagcttttggctatcatcaagactctcggatgaatagaactgttcgccagaaatcaacccacagaatgcatagatgttgttgaaaatagcaccaatacttctgctctcatcagaatagtatatgtaatatttcccacttaagacacaagtctttgcatgttccacaagggcatcccacattttgttggacataccacttccaagtatctatcacagaagagcattaatagtcataaactgaa

SEQ ID NO: 4499 - DNA, 560 bp, Zea mays
  Clone ID: LIB3136-056-Q1-K1-B10-f16
gaggacggtgtagtcggcggccggcggcgggaacgggacggggatctgcgggcggctgagcacgcggatgccgccgaacccgccggcggccttgtggaaggccagcgaggggaagtagtagtaggtgccgatctggtccttggcctgcatgatgtaggtgaagttggagcccggcgggatcgggcacgtcgtcccggccacgccgtcctcgaacgagttccgccgctgctggagcccgctccaggagaggaggaacggctcgttgagcttgttgaagacgttgatgatgaggttgtcgttggtgacggcctcgatctgcggccccgggaactggttgttgatcaggatcccctgctgcttgacgcccagcgggtagatgtcgccgtaggtcaccgtccacgtgaagaaccggtacgggtcgtcgccggccacgagcagcggcagcggcagcgccagcgccaggccgaggatggagaacaggactcgagcggcgccaccggcattgccgtctgccattgcttcagttcagagggggagcttcttcaattcgctcggccggg

SEQ ID NO: 4500 - DNA, 563 bp, Zea mays
  unsure (1)..(563): unsure at all n locations; Clone ID: LIB3136-056-Q1-K1-B10-r5
tttttaaaaaaaaaaaaaaaaaaccaaaaaaaggggggggggggtgtgtgggttttttttaaaaaaaaaaaancccccaaaaaaaaaaaaaaaaagttttgttttttttgtggggggccgccggcgggggggggggaaaaaaaaaaagaaaaggggtttttttttttttttggggggtgtttaaaaaaaaaaaaaaaaaaatatttttaaaaaaaaaaaaaaaaacgtgttttttttttttttttttttgttaaaaaaaaaccccagaaaaaaaaaaaaaaaaaaatttttggggggggggggnttttttnnnnnntttttcttcttctaaaaaaaaaaaaaaaaaaaaaaaaaaaaaaaaaaaaaaaaaaacccgccggtaaaaaaaaaaaaaaaattttttaatnnttttttcccccccccccccccccaaaaaaaaaaaaaaaaaaaaaaaaaaaaaaaaatttgtttttttttttttcccccccccctaaaaaaaaaaaaaaaaaaaaaaaaaaaaaaaaattngnnnnnnnnnttttttntttttttttttttnnttt

SEQ ID NO: 4501 - DNA, 625 bp, Zea mays
  unsure (1)..(625): unsure at all n locations; Clone ID: LIB3136-005-Q1-K1-H1.R2
ccatctccggctgacgacgctgcagcagatgcacaagatcctgacgccgcggcaggcggccaggggcctcctggcgctcggcgactacttccagcgcctccgcacgctcagctcgatgtgggcggcgcgcccgcgggaggcggcgatcagctagatgcctgcggcgtggcaggccaaaagctcgctcactggtgaggcgaccgtaccaaagaacacgacgccgacgacgacgaagactaaagagtggtagcagttcgctgtatacttgcccccccaatgcaaggtgtaaagcccagtggaggacgaagagatcgacctcgctgtacgagtacgacgaacggaagggatgcttctcggtcggcggcggcggcgatctcgctgtacaaggcgattagtagacgtacaaaatgtaaacggaaatcgattgatgggcggaagacatgtacgtatcttgttttgatacccgcggccggngccctcctagaggcgtactgtatgatggttatgcgggccgtctacactactactggtgttggctatatgtatattatataaaatgtatcacctgtactatcgttggtcagattctaagagcacgggcatgcaggtgtggacagttcaggtc

SEQ ID NO: 4502 - DNA, 444 bp, Zea mays
  Clone ID: LIB3136-008-Q1-K1-E8.F10
gctttaagttaagtgatatgtcatgaatatccctcagagagtcctcgggtgaatctgcttcagatatttcagctgcaacatcattcttttgccagcggggatgtctaggtttgagagtgactacacgtgccaaatagttctggcaatgttcaggccatgaaaatttatggatgtttttcagaccattctggcgacattgtgaccacaagtgcttatctgacacaagcttataaagtgcctcagctatttcattttgattgtgggggtcaacaagaattccattatcaagaacccgatgtatgtccacaggcccaccatttcgggtggcaaccatgggtagaccatatgcagcagcctcaatcaaggtgagtccaaatggttcaatcaatgcacaattgataaaaactccctgaaaataattgaaactcaaataaacatgagttg

SEQ ID NO: 4503 - DNA, 652 bp, Zea mays
  unsure (1)..(652): unsure at all n locations; Clone ID: LIB3136-008-Q1-K1-E8.F9
gtggtgagcttcttatcctataaaattttttgtccactttctttgtttttctcagctgcccaacgaattaatgtcttccttaaaccttctcctccccagcgatattcaatttgggagtgataatcaagatcaatcatgaatgggagctcagcagggttaagcatgtcctcagagcttgaagatggataacaaagatcactgccactgttgcatatgaaggcatcaaagtcactagcttctatccctccagatataagcaaagtatgtaactctgatattgctctagccgttgacaacacaaaaccaacagcaccacttgatctctcatttcttgaagcttcaaaaatatttttaataacctgaacaaagtctgcatcttgcacagagtctacagcaattacaatgatgtgcttcctcctacgcagtgacgaccacttagcattctcacctggcacatccttttttatgtcattaacacctgacaacttttgcgctgcatcctcaaaatgccttctcaaagcatttgaattcccttctttgctgcctgatttttcactgtccaaggaaagctntaagttaagtgatatgtcatgaatatccctcagagagtccctcggtgaatctgcttcagatatttcagctgcaacatcat

SEQ ID NO: 4504 - DNA, 659 bp, Zea mays
  unsure (1)..(659): unsure at all n locations; Clone ID: LIB3136-008-Q1-K1-E8.R10
atgctttgattaggcattttgaggatgcagcgcaaaagttgtcaggtgttaatgacataaaaaggatgtgccaggtgagaatgctaagtggtcgtcattgcgtaggaggaagcacatcattgtaattgctgtagactctgtgcaagatgcagactttgttcaggttattaaaaatatttttgaagcttcaagaaatgagagatcaagtggtgctgttggttttgtgttgtcaacggctagagcaatatcagagttacatactttgcttatatctggagggatagaagctagtgactttgatgccttcatatgcaacagtggcagtgatctttgttatccatcttcaagctctgaggacatgcttaaccctgctgagctcccattcatgattgatcttgattatcactcccaaattgaatatcgctggggaggagaaggtttaaggaagacattaattcgttgggcagctgagaaaaacaaagagagtggacaaaaaatatttattgaggatgaagaatgctcatccacctactgcatttcatttagagtgtccaatactgcagctgcacctcctgtgaaggagattaggaggacaatgagaatacaagcactgcgttgccatgttntgtacagccatgatggtnagcagttgaatgtat

SEQ ID NO: 4505 - DNA, 656 bp, Zea mays
  unsure (1)..(656): unsure at all n locations; Clone ID: LIB3136-008-Q1-K1-E8.R9
tgtccatactgtcagctgcacctcctgtgaaggagattaggaggacaatgagaatacaagcactgcgttgccatgttttgtacagccatgatggtagcaagttgaatgtaattcctgttttggcttctcgctcacaggctttaaggtatttgtatatccgatggggggtagagctgtcaaacatcaccgtgattgtcggtgagtgtggtgacacagattatgaaggactacttggaggcgtgcacaaaactatcatactcaaaggctcgttcaatactgctccaaaccaagttcatgctaacagaagctattcatcccaagatgttgtatcctttgacaaacaaggaattgcttcaattgagggatatggtccagacaatctaaagtcagctctacggcaatttggtatattgaaagactaaatctttgatctttgctggtcagcagaggaatcaaagcaggatcgaggagtgacaggacttccccactgtgcacttcgccgaaaagtaataatgggattgctatgcatggcccttgttgtacactagaaaattgngcacgcaaacttgtgtcagtttttccgctgttgcaaaattcagtgatggtgtttttgtaactataccaacctgtgtcagttntgccgttgttgcaaaact

SEQ ID NO: 4506 - DNA, 462 bp, Zea mays
  Clone ID: LIB3136-017-Q1-K1-A7.F10
tgctgtgctagcattcgtggccgaaatgagttcttacttctgaagcctgcttttatctgacggtgatcctcctcgaccatagtcaactgttttgtccaccacaacaaagtgatcgtcacagctgtaataagctgcagagtctcgtgctctcatctgcatctcttcgcgaactggggccaatcgactacaccccactgtgcttctcatgatcggagcaccaagatcatcaatttcagatcctgactccacagttgacgtgtcactgtttctacccttcaaaagatgtaacctagcaaatgaactccgcccttgctcaatctcggataaacgtctggtatgtcttgtaaactttgcttccttattatgtgcaagcttcataatatctggatcattccatggacctttgttagacctcatacatcctcccacagcagcacaagtgcatgtcccccccaaaaattc

SEQ ID NO: 4507 - DNA, 651 bp, Zea mays
  Clone ID: LIB3136-017-Q1-K1-A7.F9
cctgtgcatattttttctccgcgacaggatgtatcttgatttcagcagtactggttccttgttataaacaaaatcttcgtctaggtaggcttgatctaatcacttcctctagggactcagcgctttccagttgcttcctcacagtggcttgcagcaccttctttgttcgctccaggtcagattcgatgcattttatcctatcccatgactccaagagggatcgttctttctccacaggaatcgctggaggcttgctgccaagctcatcgaccttcccttcaagtctctgaaggcgctctatgacaggactgatgtggtctacattgaaagtctctactgccggatgatcgtcagaaatcagttctggttcggcaggaggtagtaggttgttgaccctcgtttcctgctgactacgtactatgtgaaagaaggcaaagactttgacaatgaaggccagaagtagtctgacaaagcgacggaacactccttcatctgaaacctcttcaggcacaactgtagctcgcctgttacttgagggacctgccacgtgggctgctgtgctagcatccagtggccgaacatgagttcttacttctgaagcactgcttttatctgacggtgatcctcctcgaccatagtcaactgttttgt

SEQ ID NO: 4508 - DNA, 427 bp, Zea mays
  Clone ID: LIB3136-017-Q1-K1-A7.R10
cgccgttgctttgtactactacttctggtctttattgacaaagtctttgccttctttaacatagcgcgtactcagcgggaagagggggaaaacactattctaccttgtgccaaaccagatctgttttgtgactatcatccggcaatagacactttcagtgtacaccacatcattcctgacatagcgcgccttcagacacttgaagggaaggtctaagagcttgccagcaagcctccagcgatttctgtagagaaagaacgatccctcttggagtcgtgggataagataaaatgcatcgaatctgacctggagcaaacaaagagtgcgctgcaacgcctctgggaggaaccaactggaaaagcgctgactccctagaggaagtgatataatcaagcctacctacacaaatattttgtatataacaagg

SEQ ID NO: 4509 - DNA, 661 bp, Zea mays
  unsure (1)..(661): unsure at all n locations; Clone ID: LIB3136-017-Q1-K1-G4.F9
ttgcatcgcaacgtgttaaatttagttacagacgcgatggccaatctctacccatcgccaaaatacaggttcagcttcatccgtgagtacaacatacaagttttgcacgtgcgctctccgtagacagacatccaatatcgtgcagatttcaaaagaatacaggatctatagctcgtcatggtagtcgtagtgcctatgacgcttatatctatccttgtatcggtccctgccgcggtccctatccctctcccgccttcgtctctccccttcctcccgtgccctccgtgcttcctcttcttctctagccttcctcttcttttcagctccttcaaaggcctccttttcagcctccttatttgcagcaaaagtttcatctacaacatgtcttgcatagtctgggtcatcgcaaatcaaaatgttgtcaaaaactgaaccagctttgacctgccatacttcaatccccacatactgcaaaggtttcagaacatataggtctgggtcatcctcaaactctggattgacaatccatggggtcttccattntcctttgtagttaggattcttaattntcttccgcttccatggtcccttgtattctggattaggtatcattctaggcttccatgtaccatcatcatcggcatcccatgactcaagcttt

SEQ ID NO: 4510 - DNA, 645 bp, Zea mays
  unsure (1)..(645): unsure at all n locations; Clone ID: LIB3136-017-Q1-K1-G4.R10
ctggggttgccaaaattttgctatatcagcaaaattccacaatttagtaacaaggaccggacattggttatccagtactctctaaagattgaacaagatattgaatgcggtggtgcttacatcaaacttatgtctggttatctcaaccagaagaaatttggtggcgacactccttacagcttcatgtttgggcctgatatatgtggggatcagaaaaagaagctccatctcatactttcataccaagggcaaaactaccctatcaagaaagaactaaaatgtgaaacagacaagttgacacatttttacacatttattcttagacctgatgccacttatagcatccttatcgataaccgggagagagaattcgggagcatgtacactgactgggatatccttcctcctcgtaagatcaaagatgttaatgcaaaaaagccaaaagactgggatgacagggaatatattgaagatcctgatcaagttaagccagagggatatgattcaattcctaaagagatacctgatcccaaggacaaaaagcctgagtcatgggatgacgatgatgatggtacatggaagcctagaatgatacctaatccagaatacaagggaccatggnaagcgaagaaaattaagaatcct

SEQ ID NO: 4511 - DNA, 441 bp, Zea mays
  unsure (1)..(441): unsure at all n locations; Clone ID: LIB3136-018-Q1-K1-F9.9C0
gagtgtaatacaagttgtancaaatgatacttacaacacttgattttgaactcgaagtagcccacccatatgcttccctatcctctgctttgggcaaactaggactcacacatactgttctgtttaatgtggcttggaatctgatcaatgaagggctacgaagttcactttggcttcagttcaagccccatcatattgctgctggagctgcattccttgctgcaaagttcctccactatgacatcacattccatccaaatttctggcatgaattcaagacaagtccatatattgttcaagatgttgtccagcagttgaaggagctactttaggatacaacattcaatgtatttacataatactcagagatcctcttggtttatacgctgtagtttttacaaccacagtgctatgtacaaaaggggaagatgttattcanaa

SEQ ID NO: 4512 - DNA, 471 bp, Zea mays
  Clone ID: LIB3136-018-Q1-K1-F9.9U0
attgaagttgaaccaaaatcctccttagctgctggacaacatcaagaacattgtatggacttgtcttgaattcctgccaataaattctggattggagtgctgatgtcataggtggagcgcaactttgcagcgaaggtaatgcagactgcagcagctatatgagggggcttgaactgaagccatagagaacttcgtaccccttcattgatcatattccaagccatattaaacagaacagtgtgtgagactcctacttcgcccataacagaagataggaaaacatgtgggtgagctaccttcgagatcaaaatcacagtggtgaaagtatgatgcgcgccgcttgtattacactctctctaggctgtgcaaaccagtccccacataccatggcaggaagaacatagactccctgattatgacaaacctcacatgaggccataagaacagtattcaaaaggcgtgttgtttctt

SEQ ID NO: 4513 - DNA, 530 bp, Zea mays
  unsure (1)..(530): unsure at all n locations; Clone ID: LIB3136-018-Q1-K1-F9.9U2
tgtgtgattcctagtttgcccaagncagaggatagggaagcatatgggtgggctacttcgagttcaaaatcaagtgttgtaagtatcatttgctccgcttgtattacactctctctgtactgttcaaaccagtcaccacatagcatgtaaggaagaagattgaattcctgattttgagaaacctcacatgaagccctaagaacagtattcaaaaggcatgttgtttcttctgcctttgctgccaggaacaaggctgcagtcgcaaccaaaaatctatcatggcaggcatgagatctgtggaagaagaaccgatggcagaacaccacagccgtcgcaattgttgtctgcggcaacccgagccggttgccgaggcaatgcaggtaggcgcagtaggacgcacgcagcctggcctcaagcgcggaatcgatcccgtcccttcttgatggagaccgcctctcgatctcgtcacgcgaaagcaacgccccggcagaatgtcctacatccggaggcctctctagcgccaccgggac

SEQ ID NO: 4514 - DNA, 666 bp, Zea mays
  Clone ID: LIB3136-011-A5_FLI
ggaggacataagggatttgtctcgagaggaatgtgtgacatacttgagaaggaggagcagctgcttttcaagaggagcttctatttatagaggagtgacaagaaggcagaaagacgggagatggcaagcacgcataggactggttgctggaactagagacatttacctgggaacattcaaaacagaggaagaagctgcagaggcttatgatattgctgccattgagatacgtggcaaaaacgctgtgaccaattttgaccgaagcaactatgtcgataagggtatgcactgtatagaaggcgaaggcttgaggctgcttgcatccaagccagaagaatgacttccaagttcaatgcagtgattgtcgatcgagcagatttggccagacgtatatgcagcttagttggtacatatacagataggagaaccggttgcagtttgtcaatattcctgctttacatgacttgggattacagttaaatcgacccgctagcaaaaaaaagtgtgcaaatgttagtagatttggccagacatatatgaagattggcctcgtaggatagatctttctgcaaatgttagcgaagccagtgtttatgttctgtttgctagattagcgttatcagtttgcacgttccccttttttttctgaataattgtccttgtatg

SEQ ID NO: 4515 - DNA, 673 bp, Zea mays
  Clone ID: LIB3136-002-C7_FLI
ggcctccaccagatccgatgccttctttttcgctcttgctctgctctcatgggcagggcagggcatgcccatctacttgaattgcgatgcgtacatacatcgctgtctccatctagctgcacacatatatacatacatgcatacagagtgagagagaaacagatcgatctcacttagctgctgctgctgctgctgcttgctggtggcctgggcctggctgctgtgtctgtatcgatgtgtccgtattttctccatctcgtctgcatacgctgcaattggtaaggagctagctggcctttcatgtcttccatgctgccatagccatacggccggccggcaggcaggaggataccccatcgctcgctgcacatgcatgtatgcatggggatacatgttcatcatcagcagcacagtggctctgtatcccccatcccaatctgatcctatataggaggagaaggaggagcagcagcagcagccaggcgcggccggcggccggagtagtatccgaatccgctcaacacccaccggctggtctctagctttcctatcgatcaatggctttcaaaggactcccgcgtgattcccgagggtccctcgaagtcttcaatccagacgcccctgtttcagatcgagcaaccacctccccgtttctcctccctcctgcggccgc

SEQ ID NO: 4516 - DNA, 1790 bp, Zea mays
  Clone ID: LIB3136-008-E8_FLI
caactcatgtttatttgagtttcaattattttcagggagtttttatcaattgtgcattgattgaaccatttggactcaccttgattgaggctgctgcatatggtctacccatggttgccacccgaaatggtgggcctgtggacatacatcgggttcttgataatggaattcttgttgacccccacaatcaaaatgaaatagctgaggcactttataagcttgtgtcagataagcacttgtggtcacaatgtcgccagaatggtctgaaaaacatccataaattttcatggcctgaacattgccagaactatttggcacgtgtagtcactctcaaacctagacatccccgctggcaaaagaatgatgttgcagctgaaatatctgaagcagattcacccgaggactctctgagggatattcatgacatatcacttaacttaaagctttccttggacagtgaaaaatcaggcagcaaagaagggaattcaaatgctttgagaaggcattttgaggatgcagcgcaaaagttgtcaggtgttaatgacataaaaaaggatgtgccaggtgagaatgctaagtggtcgtcattgcgtaggaggaagcacatcattgtaattgctgtagactctgtgcaagatgcagactttgttcaggttattaaaaatatttttgaagcttcaagaaatgagagatcaagtggtgctgttggttttgtgttgtcaacggctagagcaatatcagagttacatactttgcttatatctggagggatagaagctagtgactttgatgccttcatatgcaacagtggcagtgatctttgttatccatcttcaagctctgaggacatgcttaaccctgctgagctcccattcatgattgatcttgattatcactcccaaattgaatatcgctggggaggagaaggtttaaggaagacattaattcgttgggcagctgagaaaaacaaagaaagtggacaaaaaatatttattgaggatgaagaatgctcatccacctactgcatttcatttaaagtgtccaatactgcagctgcacctcctgtgaaggagattaggaggacaatgagaatacaagcactgcgttgccatgttttgtacagccatgatggtagcaagttgaatgtaattcctgttttggcttctcgctcacaggctttaaggtatttgtatatccgatggggggtagagctgtcaaacatcaccgtgattgtcggtgagtgtggtgacacagattatgaaggactacttggaggcgtgcacaaaactatcatactcaaaggctcgttcaatactgctccaaaccaagttcatgctaacagaagctattcatcccaagatgttgtatcctttgacaaacaaggaattgcttcaattgagggatatggtccagacaatctaaagtcagctctacggcaatttggtatattgaaagactaaatctttgatctttgctggtcagcagaggaatcaaagcaggatcgaggagtgacaggacttccccactgtgcacttcgccgaaaagtaataatgggattgctatgcatggcccttgttgtacactagaaaattgggcacgcaaacttgtgtcagtttttccgctgttgcaaaattcagtgatggtgtttttgtaactataccaacctgtgtcagttttgccgttgttgcaaaactcagtgatggtgttttttgtaattattatacatccgaataataagactggtgtttccagacagactatgcaagctaaggggaaatcacgattttcct

SEQ ID NO: 4517 - DNA, 928 bp, Zea mays
  Clone ID: LIB3136-006-B7_FLI
gtgccatgctagagtgtgatggaatatgaagagcatgagaagagagcatggagtgttgatttttctcgcacagactcttcaatgctagtatctgggagtgatgattgcaaggtgaaagtgtggtgcacaaatcaagaagcaagtgtgatcaatattgatatgaaagcaaatatttgctcggttaaatataatcctggatcaagcttctacgttgcagtcggatctgctgatcaccatattcattactttgatttacgtaatccaagttcgcctgtccatattttcggggggcacaagaaagcagtatcatatgtgaaattcttatctaacaatgagcttgcgtctgcatcaacagatagcacattacgcttatgggatgtcaaggataactgcccggtacggacattcagaggacacaaaaatgaaaagaactttgttggcttgtctgtgaacaatgaatatattgcttgtggaagtgagacaaatgaggtttttgtttatcacaaggctatctcgaaaccggcagcaagccatagatttgtatcttctgacccggatgatgccgatgatgatcctggttcttatttcattagtgctgtctgctggaagagtgatagccctacgatgttaactgctaacagtcaggggaccataaaagttcttgtacttgctccttgatgttatggagggcgttcaagaggttcacagtactgtccagttgtttcctttcgtgtcattatattcccccaaaattgggaacgggggcataattgatctccggttagggaatgaagttttgcagatggtcagctgacgtagggttttgaggtatcagaatgtgcatagtcatgtttatgttgtataggtgtaattgtgtaaagcagccaagttattggttacaagtgtaacacgagaaatacacatttcc

SEQ ID NO: 4518 - DNA, 747 bp, Zea mays
  Clone ID: LIB3136-001-C11_FLI
ccaaattccaatcccaccccgcccccttccaagaactctagtatcaaccaaccgtccaacaaaagcaggagtcgcatcccagatcccccgcgcatcagagacaggcagggagggaaccgagatccgtccgtccgtgtcgatggagtcaacggtggagcggataagctcgtcggtgcagtcctgggtgaaggaccacgagctcgcagccatcggaggcgtgtgggctgcggcggtgggcacttcggtggcgtacagccggaggaaggcgccgcagcggggcacgggcctgcgcctcatccacgccaggatgcacgcgcaggcgctcacgctcgccgtcctcggcggcgccgccctcttccactactacggcgacggcgggcgcaggaagagggccgacgacatcgacctcgacttctactcgcagctgccgccggccaccgacgccgacggcaacgagaaccagcggtggagctggtaggaggaggagccgaggagaaggaagaactgtagcagactagcagtgggtgcttgcagcaataataattgaggtggggcctatgacgtggcggcgggcgggagggagggattagtctgtgctaatcctaatccatccagctcagacaagacgacgggcggcccgtttactttacattatcgatccatgctgtcatggccggcaccacatccatatctactagtcatctaagagcagccgcccatagtttgctgctgctgctgcttctctcc

SEQ ID NO: 4519 - DNA, 493 bp, Zea mays
  Clone ID: LIB3136-001-D1_FLI
cagctagtagctctagcaaagcacttgccatctaccgaccgccgcattccaaacagcccgacgagctagcagagcggcaggcacctcctccaggaacatggcccgcacgcagcagttggcagtagtggcgacagccgtggtggccttggtgctgctggcggcggcgacgtcggaggcggccatcagctgcgggcaggtggcgtcggccatcgcgccctgcatctcctacgcgcgcggccagggctcagggccctccgccggctgctgcagcggcgtcaggagcctcaacaacgccgcccgcaccaccgccgaccgccgcgccgcctgcaactgcctcaagaacgccgccgccggcgtcagcggcctcaacgccggtaacgccgccagcatcccctccaagtgcggcgtcagcatcccctacaccatcagcacctccaccgactgctccagggtgaactgaaccctaaacgacgacgacggcgccggcggccgc

SEQ ID NO: 4520 - DNA, 622 bp, Zea mays
  Clone ID: LIB3136-005-A6_FLI
gcttataatacttacaacaaaagataagcccacgaatcagtagatcgaggtcccgcccagtccagcaaaagcacacacggagatgtcccagctgagctctgctggccacatggctgcgacgttcctcctcatcctcctcgcctccgcagcagcaacggtgtcagctgaccaacaagtctctgcctgccagaatgacatagacgcactgtggcgcagctgcaagcagttcgtccagaaggaggggcccaagatgcctccgtccgaggactgctgcaaaaccatcaaggccttagacgcgcacgcgtcctgcatctgcgactacgtcggctccccggacgccaggaataagctagacctggacaaggtgttcttcgttaccaaacagtgcggcgtcaccgtccccaagggctgcggatcaaagcaggactgaagagcggctgaatctgaatggagcaagttggctaacatacgcacggcagctacaaatacttataggaataaataaagttggtcaactgttggtttcatggtgttggagtacaacaactgtactgttcttatcctcatatatgatatatgaactctagttcatcacataatataaatctgtaagagagcccag

SEQ ID NO: 4521 - DNA, 409 bp, Zea mays
  Clone ID: LIB3136-005-H11_FLI
gaagctctcaactacttatttctcctgattcctctgatcaacgttatgattccattcttcgtgaagtcctttgctgttgtttggtcagcagatacagttgctttcttcgtgatgtatgcatggaagcttggatggctgcaaaggttgaaatgaagatttttggtgtgctctcttggtgatgtgtgtatgaaagcttggatatttggtttgaaaaggtggagtcggtagcttttttgctgagagaaacatttgtcctcaaaattttcacatcttttggagggagctgcatgattagtttattccaagatttagttcatatagccttttatatcttgtgtatatgcagggagtatgaaaaaacagcctttcacatttaagtgataaatatatgtacctgaagtctgaacaa

SEQ ID NO: 4522 - DNA, 974 bp, Zea mays
  Clone ID: LIB3136-003-B9_FLI
gaagttgtactagctttggaatatttgcactctatgcacatagtccatagggatctaaagcctgacaacttgttgatagcccatgatggacatattaagtggggcttcactgtatggagatgatgagcctcagatgaatgaattcgagcaaatggatcaccgagcacggagacaaaatcgttctgctgttggaactcctgattatttagcaccagaaatcattttggggacaggacatggttgcagtgcagattggtggtccgttggtgtcattctatttgagctcattgttggcatacctccgttcaatgcagaacacccccagacaatttttgacaatattctgaattacaaaataccttggccgcatgtcccggaagagatgagttttgatgcacaagatttaattgacaaattattgaccgaagatcctcatcaacgactaggagcaaatggcgcctcagaggttaaacaacatccatttttcaaagacattagctgggatacccttgctaggcagaaggctgcctttgttccctcctcagataatgcatttgatactagctacttcaccagtcgctattcctggaatccatcagatggaaacatatatgaagcatacgagtttgaggattccagtgataatggaagccttagtggaagcagtagttgtctgagcaaccgccaagatgacatgacggaggacagcgatggcctcaatgagtttgaatctagtgcaaatgtcaattattctttcagcaacttctcgttcaagcgtgcagcggttggatcaccgtctaaaagttcagaatgcttgcttgcacgcttgcacctaagacctgcttgcacaatattcgttccctatttgtaaatatcaacatttgcaattgcaatgttatcgcaatagcaattgtagtactgctgtacctgtgagccagatcttgaatgctacaaaggcagtatcctttcttttt

SEQ ID NO: 4523 - DNA, 782 bp, Zea mays
  Clone ID: LIB3136-007-D11_FLI
gccagcagcacaagaaccagagtccatagacatccatcaagccaagaagaatggcattcctcagcacgaacgcgttgatgagcgtccccatcacggcggcagccgctcctcgccaccgccgcagcttggtcgtggtaagggccgcggccgtcaaatctaacgagcacctgcaggaagagcaagcatccgtggccgacggagctcgtgggcgtcgccgagccatggtgttgttggccgccaccgctgctgtcactggatcatccgtagccatctgcaggtctgctagagctgcaggtgtcaccacgctgagcggacagtatgtcaaaatagagaacgtcaaggacccatatgtccagggtgtcggcgaatgggctgtcaaggagcacaacaggcagactggtgagagcttgcagttcgccgaggtggtcagtggcatggaacaggtggtcgccggcaccaactacaagctcaacctcgcaaccaaagatccaacgtcgtcttaccaagcagttgtgtttgatccgttgccaaactccagcaaaaatcgccagctcatgtccttcaagtctatttgatctctctctctcacgcctgcgtgggttgcagaataaatgtgtggccttgtatttgtgatgaggaaataataatggaataaatgtgtggccttgtatttgtcaaatagtcttgtactgtcgtttcaatgttttttttttcatgtgagccaagttttccatgtacgactttctctcagatatcatagatttgtatattatatatcccac

SEQ ID NO: 4524 - DNA, 447 bp, Zea mays
  Clone ID: LIB3136-003-G2_FLI
cagatagtagtgtcgcttggagcaggtccatgggacgctctgtatggaggagggaataccccggcgttcgtcttggcttcggtcttctccctggcagcaggtgtgctcgcagttctcaagctgccaaagctgtccaactcgtaccaatctgccgggttccatggatttggctgatgctcatgcccaaaacacccccgtctgccatgtaaaacatcacaccaacacttggccccattttgccattcgtttacagagaaatgattcttttttcctcgtacaactacagaataatgacagtgaaagtaggagtttaggtgagagagagaggctaggtaggttgatgtgaaggtgtaaaagctgtatcctcctttttttgtttttgtttttgtttttgacagtgtatgtaagagctgtccacaagaaaatttacaagtggtgtaacctgcc

SEQ ID NO: 4525 - DNA, 1544 bp, Zea mays
  Clone ID: LIB3136-007-H10_FLI
gctcgcgctcgtctccctcgtgctcctcctcatgccgcgctcgcccgccggcgccacggccggcgccaggaggtccggcccgcccggggccgacaagtacgccgtcatcttcgacgccgggagctccggcagccgcgtccacgtcttccgcttcgacgccaacctggatctcgtccacattggcagcgagatcgagctcttcgtccagataaaaccggggcttagccactacgccaacgatccccgggaggccgccgagtcgctcgtctctctccttgacgatgccaagcgagtggtgcccgcggaattgcgcgaccaaactcctgtcagagtcggggccaccgcagggctgagaaatttgggtgcacaaaaatcggaggcgatattgcaagcggttagggacattcttcgcgaaaagagttcctttaaaaaccaaccggattgggttacagttcttgatggaacgcaggaaggtgcatacgaatgggttaccatcaattatctgttgggaaacttgggaaagacttatgcagacacagttggagtagtggatcttggtggtggatctgtccaaatggcatatgctattgcagagaaggatgcagaaaaggctcctaaaccatccgagggggaagatgcatatgtgaagaaattgttcctcaaaggaaccacatattatctttatgttcatagttatttgcattatgggttgctggcagctagagcggaggtcttaaaagctggcaatggcaatggttacagcaactgtatgttagagggatttcaagggaaatacaagtatggcgacgattcatttgaagcatccggtccaccttccggtgctagttactcaaaatgcaaggatgatgcagtgaaagcccttaaagttgatgaagcatgcacccacatgaagtgttcttttggtggcatttggaatggtggtggtggtgctggacagaagaatctctttgtagcgtcctttttctttgatagggctgctgaggctggatttgttaacgccaatgcgcctgtcgctaaggttaaaccatcggacttcagacaagctgcggagcgcgcttgctcgttgagcgtgaagaacgccgaggccaccttccctggtgtacagaaggatagcattccatatatctgcatggacctcgtttatcagtacacattactcgtggaaggattcggcgtcgatccggaccacgagatgaccttggtaaagaaggtcccttacagcgacgcctacgtcgaagccgcatggccgcttggcagtgccatcgaggttgcatcttcgtagtaggaaggaaacacagtttagcaaggtaacatcggacggcattcttgtcatgaagttttgcgttgagagtccccactcctccacttcctcctcttgatcgcttgaattcgcacactcaatccattcatcttactatacggtacgggtagcgtctctcggctctacttggttccagcgggcattgttgtaagctctgttattaatatttgtatactactaatgcaagtaagattggagcctc

SEQ ID NO: 4526 - DNA, 992 bp, Zea mays
  Clone ID: LIB3136-003-H8_FLI
ctcctcgccatcacataaaaccagtgcaagcagaagcagcgcaatggcgagcagcaccatggccctctcctccacagccttcgccggcaaggcagtgaacgtgccgtcgtctctcttcggcgaggcccgcgtgacgatgcgcaagacggcggcgaaggcaaagccggcggcgagctccggcagcccgtggtacggccccgaccgcgtgctctacctgggcccgctgtccggcgcgcccccgagctacctgacgggcgagttcccgggcgactacggctgggacaccgcggggctgtcggcggacccggagacgttcgccaagaaccgggagctggaggtcatccactcccgctgggccatgctgggcgcgttgggctgcgtgttcccggagctgctcgcccgcaacggcgtcaagttcggcgaggccgtgtggttcaaggccgggtcgcagatcttcagcgagggtgggctggactacctcggcaacccgagcctgatccacgcgcagagcatcctcgccatctgggcctgccaggtcgtgctcatgggcgccatcgaggggtaccgcgtcgccggcggcccgctcggagaggtcgtcgacccgctctaccccggcggcagcttcgacccgctcggcctcgccgacgaccctgaggccttcgcggagctcaaggtgaaggagctcaagaacggccgcctcgccatgttctccatgttcgggttcttcgtccaggccatcgtcaccggcaagggcccgctcgagaacctcgccgaccacctcgccgaccccgtcaacaacaacgcatgggcctacgccaccaactttgtgcccggcaagtgagggggtcggaggcgccaccgcccaccggccaccgctgcggatatctaggtgttcggatgcacgtgagcgcgcactggttccagtttgtaccatgatgtaaattacttaccgtaccagggttcaatcggcaaggaagaattgttgtgttcac

SEQ ID NO: 4527 - DNA, 2524 bp, Zea mays
  Clone ID: LIB3136-014-G2_FLI
cccaattccccattcaccaatccccagtattgtagtagggggaaaaacgagagaaaagaaacagcagtagcggaggcaagacgaaatggtggccgccgtcgcgtcgccttcgtcggcggcaccctccgccggccgtccccatccgacatacaaggagatgatcatgcaggcgctgacggagctgcgggacccgagcgggtcgagccgcagcgccatcgccacctacatcgccgaccacttctccggcctccactcgcgccacgatgccctcctctccgtccatctccgcagcctcaagtcccatggccaacttcgcctcgtctctggcaactacttcgtctccaccgccgctcagcggcaggggcgaggctccaacatcccgcccaaccccaaccctgctccggggcagaagcgtggtcgggggcggcctcgcaagtacgcagattcagccccttccgcttcgatcccggcgtttcaggacgccaagcgagggcgtggacgcccacgcaaacgcaagagcgcccaggacccggtggcttcctccccctccccttcgccgctacagggagcaagtgttccgccgcctccatctggggtcaagagggggcgtggacgccctcggaaggacgcccttgtccctccgccttcctcttcttcgccactgctgggagggattgatccaccgcctccatctgggatcaagacgggccgtgcacgtcctcggaaggcccttgtccctgtgcgttcctccttttccgagctgctgggagctgttgttctaccacctccgtctggggtcaagcgtggccgcggacgcccgcgcaagagtgcctaccccgctgtggcgccgttggtgggagctgagaagggacctgctggtggacaaccacagaggaataccactcctctctcaccgacacctgctaccatgtcccacagtggtaagagtgagactgtccggctgcccaaggttgctgttgatatcagtgctttgcgtggttcctccatgaacatatctgcttctagtaacagtttggttggtgcgaagcggggaagagggcgcccacctaaggttgtggttgctgggaaagagaagatgcaacctgaatctgtgcagtccgtggatgcttcattgactaagagagggcgtgggaggcccagaaaggagaaggcattggaaagtggccgcatgaaagcctcgcagatgactgagggtcaacgtgaagctctgactgcagaccaagctggggctgtccaaaatgaagtagaagatagggatttgcaatccttgggtactcctttgacagagaagagaggccgcggtcgtcctagaaagaggccgttggaaatcgaaactgcaaaagcaggggctgctaagcgtgggaggccaagaaaggagaagacatctgaaactggggacttgaaagttgcacagatgactgagggtcggcatgaagctctgcctgcacaagctgtagaccaaactgggcctgtgcaaaatgaagttgaagctatgattttgcaatcccttgctactactcctttgatggagaagaggagtcgtgggcgacctagaaagaggccattggaaactgaaactgcagaaacccaagttgctgcatcggtggagaagcgagggcgtgggaggccaagaaagaagaatccatcggcagggtggtctgcaggaaccagggatactgcattaaaggggattaagagagggcctgggaggccaaggaaggccaggccttttgaaactgagtctgtgaaaactgcacttgaggtgtctagggacttgacagaagatgggcctcaaaaggatggggatcttgtgtcagggaagaaagcagatactcatggtgtggtttggtagtgtcaactgaggaggtagccattgctcccatggatgctgggtgcgcagacgccaagggttgatctgatggatgtgggcaccaagagtcactagtgctctgatggtgcgaacaagaacaaaaaagaaataatgatagtacctgaaaggctaaacagaacatgcagctaataagtgtgttcatggatataattaatagccatactgcaagtattgctatatgtttgcaccagtttgattactcgtatgtttttgagcagttccattggaaactgcgtttgatgggtttcacttttgggggttggatttaaatatctaacccacatcctctttctttgtcaaggactataacatttttgtaattttgttgcttgtactggaaactagccatcataaggttcattttgttttccagtttcaacatcttttagtgatatgttcacataatatctctgttttgtgctttatttggtgtgtctattgggtgtttggttggaggaatgggacgagttggtccactattgcttcattcagtcattcctcatactaataagcacagagtattcagtataaaaacaaggatttgtgtcatctgagtaaattttgtagaatggtattatgatgtaccaaaccattgaggtttctcataccaac

SEQ ID NO: 4528 - DNA, 1445 bp, Zea mays
  Clone ID: LIB3136-014-C8_FLI
ctcttcgtgcacatcgtcatggagctctgcgccggcggcgagctcttcgaccgcatcgtcgccaagggccactacagtgagcgcgcggctgcgaagctcatcaagaccattgtcggggtcgtggagggatgtcactcgctcggcgtcatgcaccgggacctcaagccggagaattttctctttgccagcaccgccgaggaagccccactcaaggccactgacttcgggctttccatgttctacaagcccggtgataaattctctgatgtcgttggaagtccatactatgttgcaccagaggtgcttcagaaatgctatggtccagaagctgatgtgtggagcgcaggagtaattctgtacattttgctttgtggtgtgcccccattttgggcagaaactgaggctggaatcttcaggcagattctgcgaggcaaacttgattttgaatctgaaccctggcctaatatttctgatagtgctaaggatctggtctgcaatatgcttacacgggatcctaaaaagagatttagtgctcatgaggttctctgtcacgcatggattgttgacgatgccgtggcacctgataagcctattgattctgctgttctctcaaggctgaagcatttttcggcaatgaacaagctcaagaagatggcattaagggttattgctgaaagcctgtctgaggaagagattggaggcctcaaggagttgttcaagatgattgatactgacagtagtgggactataacatttgatgagctgaaagatggcttgaaaagggtaggctctgaattaacagagaacgaaatccaggctctaatggaagcagctgatattgataacagcggaaccatcgactacggcgaattcattgcagctaccttgcacatgaacaagctggagagggaggaaaacttggtttcagcattctcgttttttgacaaagatggaagtggctttataaccatcgatgagctgtcacaagcatgtcgcgaatttggtctcgatgacctccacctcgaggatatgattaaagatgttgaccagaacaatgatggccaaatcgactacagcgagttcacggcgatgatgaggaagggcaatgctggtgcaacaggaaggagaaccatgaggaacagcttgcacttgaatctcggcgaactcttgaatcccagcaaaacctagcgcgttactggaaggccttgtcaggtacattcccatggcatctgaagtttttggatgcgttgtcggtctgctggcctattctgagatgttgagtggttatcctgtggtattactaagatgctggacaattttcgtagtgctggtggtatcagctagagaagagggatggctggcacaatgtggctactatggccaactgcttttgtatgtgtaactgtcgatgtagattgactatggtctaaacatcagtttagttg

SEQ ID NO: 4529 - DNA, 2042 bp, Zea mays
  Clone ID: LIB3136-020-B1_FLI
gccggctcccgtcccatcgctcgcttccccctcccgcgaatcattcgattcggcccgcctcgtctcgcccgcccgattcgatttggccgtcagggtgatcggaaccggcgctagggttagggttccggcgatccccatacctatggtgcagctgccgagctcggggaagcggcacgcggagccggccatggctccggcgcggcgcgcggcgacggtcaagctagaggtggaggagctcggggccgacgagcgctgcccgctcagcaagcgcgccaaggcagctctgccgatgcccccgacgcctccgcagccgcagcaggatatgtaccacaatgtactcgatgaacctagcccattgggtctgcggctgaaaaaaagtccatcactcttggatttgattcagatgagactttctcaagcatccaatgctggcgagtcatccatggacaacagcggttctgagccttccaagaagaaagacaataaatctggtgcttctgcagcaggcgaacgactaaaagcttcaaattttcctgcaagtatattgaagattggttcatgggagtatgtgtcacggtacgaaggtgatttggtggcaaagtgttactttgcaaagcataaacttgtgtgggaagttctggaaggtggccttaagagtaagatagagattcaatggtcagatattactgctttgaaggcaacttgccccgaaaatggccaaggaaccttggacgtggtgttggccagaccacctcttttctttaaagagacagatccacagccaagaaaacacacactgtggcaggctacctcagatttcactggtggtcaagcgagtgtgcacaggcggcattttctgcagtgcccttcaaccttgttgagcaagaattttgagaagcttattcagtgtgatcagcggctatatcaattgagtcaacaaccggaaattacattagactctgcgttgtttgaacctaggagctcaatatttgaggatccggttgaatcaaaatgtgctgggtttactaattcgaaagatgaacatgaggctctacctggcttttcaggcccggtgtcaccatgtgctggttcctccatatctgctaagaatgaaaacaatgattccattggaatgacagctgaatatctttctcagacagtaggaacaggagttggtgctgtaggtgtacaagctgttggcagaaatgtgaatggtgcagcaccagaattcagtattccccactggtggagtcaattgaaggtgcctgggcttagaccatcgatgtctgtggatgattttgtgaaccacctaggcaactgcatctcagagcagataacttcaggcaatccggcgttggccaacaacgaggtgccgaccaaagaaacactcgaggggattgctcagtaccttcttggtgacacacaaggcccaccggtttctgcttcagacgagagatcactgatggccagggtggactccctctgctgtttgattcagaaagacacagtgccggtcaccaaaccaaaacctgagccaaatgatagcgacagcatcggtgttgaagcctcggatggttccgacgaagaattcagctctgcaccaactgggaaacctacagatgccaccaatctgccagccatgtcaagaaaggattcgtttggggagttgctgacaaacctcccccgcattgcctcgctaccacagttcctcttcaagataccagagggtacagagaactgaacctggcagtcaagacctcgcgcccttgtgctgtaaagattgtatccaagcaataagaaagctggtaggttgtattctggtgcaccggttccccgccctgtaaatgtaacactcggtaggttgccccacttgtgtttcgcgactcaaatgggtagtggaaaaattgagatgttcgttggttcttttaactcaatcgtgcccccacgcaaaacttctgagcttaattttcaggcggcacctccactggtaccctgtatgttcctgattgacgtgtatataaaggttgttccgatctgtcatg

SEQ ID NO: 4530 - DNA, 810 bp, Zea mays
  Clone ID: LIB3136-020-G7_FLI
caattggttcagaaactgcaggatccatagcatacccagccgctagatgtggagtaactgcattgcgcccaacatttggaacagttgcacgaaccgatgtcatgagcatttctgagagtttggataagcttggtcctttctgtagaagcgcagtagattgtgctgttgtattagacacaattcgcggaacggatgccggtgatccatcatcgcgtgaggttgctttgggtgatccatttcatgttgacatcaccaaactcactgtaggctacctcgatgacgctgagatggaggttgtcgatgttctttcctctaaaggtgtcaagctggtccccttcaagctgaactacactgtggaatcagtccagtccatcctgaacataacgatggacactgatatgcttgcgcacttcgataactggcagcgggaaggacatgatgatgactatgaggcgcaagaccagtggccggtagagcttcgtcgtgcacggttaatcccagcggtagattatatacaggcgcagcgagcacggggcaagttgatcagagaaatcaaagatagcttcactgttgatgcgtttgttggcaacgtgactgactgggagcgtgtctgtctcgggaaccttgttgggatgcctgtggtcgtggtgccgacaggcttgaagagcatcgagaacccgcctaaaggcggtaccaagagaagaacaacagtgacgacaggcatctacgctcctcctgaccacgaccacattgctctggcgctggcaatggcgtaccagtccgtcactgatcacaacaaacagcggccgc

SEQ ID NO: 4531 - DNA, 980 bp, Zea mays
  Clone ID: LIB3136-022-H6_FLI
cttttcattgccctcactaaattttctattggagtagaatttttttctcaaccagcaaggggtctacaccattgtcattgggagccacatctcagccatctaccactacggcttcgcaaaccttatgatgcgcaggtatgttgaggccactcgtgaattcaacaagattcttctgtatatcctcaagtacaagcagtaccaccagaattcccctcagtatgatcagatactgaagaaaaatgagcagatgtatgcattgttggcaatttgcctatctttgtgcccacagaacaagctcattgatgaaaatgttagcacccagctgaaagaaaagtataatgacaagatgacaaagatgcagaggtatgatgatgaagcatacgctgcttatgatgagctattctcgtatgcttgccccaagttcattacaccgtcgcctccaattctggaccagccgctaacaaactataaccaggatgcataccgtcttcagttgaagttgtttctctatgaagtaaagcagcaacagttgctttctgggattcggagttatctgaagctatattcaacaataaccattagcaaacttgcccaatatatggaagtggatgaagcaacactaaggtcgatcctgatgacatacaagcacaaaatgcatgcagttgacagtgaaggaaagatagtatcaagtgcagactttgacttctacatcgtcgaggatgtgattcatgttgtggagtccaaacctaccaagcgtcatggtgattactttttgagacaaattttgaagtttgaggaaatgattggtgaactggagaaggtacagcttgactgaaatctgatagcgatcatggagagaaatgtcactgtttcctttttgctctcttttgtactccgttgaaaccccatcttttttttttttgtttccttattgactctgaagcccgttgaaaccggccattattaaccgtgtaccgtgt

SEQ ID NO: 4532 - DNA, 1269 bp, Zea mays
  Clone ID: LIB3136-026-A5_FLI
cggacgcgtgggcgccgtcgtgctcggctcgccaccccgcgccagctcctttcaggccctaaccgttcgccgccgcgcattcgagcactcgcggaagcgcacctagtgccatggcgaagaagcggaagcgcaccgacgcccccgcagaggcgaccggcgcagagaagcctgacgactctgcgccggcgcgcccggagcgcacgctcttcggcttcaaggacccggtccccgacgccgagcccgcctccgcgggcgccgaggccgcggtggcgccgttccggaacagggagaaggtactcatcacctgctcccgccgaatcacgtataggtatcggcacctgatgcaggacgtgctgtcgctgctcccgcatgcgaagaaggacagcaaggtcgagtcgaagcagagcaaggggaacgcgctgaacgagctccttgagctcaggagctgctccagctgccttttcttcgagtgcagaaaacagaaggatctttacctttggatggtgaagtctcctggaggaccatcagtaaaatttctagttaatgctgttcacaccatggaggagttgaagcttaccggtaaccatctgaaagggtcacgcccacttcttacattttctacaaattttgatgagcaacctcattggaagcttgtgaaggaaatgataactcagatatttgctactcctaaagatcaccgtaaagcaaaacctttccatgaccatgtgtttgtcttctccattgtggatggccatgtttggtttcgaaactaccagatttcggttccccacaatgagattgataaagttgataaaggtggtctggataaaatgacacttattgaggttggccccaggttctgtttgaatccaatcaaaatatttggtggtagttttggtggtcctacatggtatgagaacccatactacatttcccccaatcagatccgtgcactagagaagaggcagaaggcaggcaaatatgccaagaaggtgaaggccaaggtgaggcggaagatgcacgagatggagaacacgctggagcctgatgagtttgctgagctctggaaaggggagtaactggtctttgatcgaccctgttaaagtcgtgaagcaccagcaactccttccaccaagcgcggattttgtttaccagtgtggcagtgcccactgtcgaggttgtggaagttttgtatcacaaagcatacttttatttatataaaatcggattttagtgataagataacttctgcctatatggcattcttct

SEQ ID NO: 4533 - DNA, 829 bp, Zea mays
  Clone ID: LIB3136-024-G1_FLI
caccaagtcctctccggatggcaaggccttgtgaccttccgccggtgcggcaagcagcggctcttctcctggcatgcgcgcttgctctgctcgcggtgcagctgcggccgtgcagagcccagcagcagcagcagcctccgtcgccgggatactaccccagcggcatgttcaggccgctgggcttctccgaggcctaccgcacgctgtggggcgcgcagcaccagacgctgtcgccggacggcaagtccctgacgctctggatggacagcagctcgggcagcgggttcaagtctgcgcgggcgtaccggaacggctacttcggcgcgtccgtcagggtgcagccggggtacaccgccggcgtcaacaccgccttctacctgtcgaacagcgaggagtacccggggcaccacgacgagatcgacatggagctgctggggacggtgccgggggagccgtacacgctgcagaccaacgtgtacgtgcgcggcagcggcgacggcaccatcgtcggccgggagatgcggttccacctctggttcgaccccaccgccgacttccaccactacgccatcatctggaaccccgaccagatcctgtgagctagtctccgtgtcccttcccccggccccctgcgcgccattagctggctgcctgcctgcccggtcactcacatcacatgccatgagctgcgcctgcgtgcaggttcctggtggacgacgtgcccgtcaggcggtacgagaggaaggcggaggccacgttccctgaccgggagatgtgggcgtacggctccatctgggacgcctccgactgggccaccgacggcggccgc

SEQ ID NO: 4534 - DNA, 982 bp, Zea mays
  Clone ID: LIB3136-056-H7_FLI
gcggccgcgctcttctccacctcgctctcgccccgcttcctcgccctatcctccccgaagccggccgcgcccgcggcctcggccttcctccccttcacgctgccgctgcgctctgtgtcggcgccggcgccagcgaggcgggtcttcgagcccgttgccgtcgcggtgtcgtcggagtacgggaccgagggcgcggagcagcaggacggggagttctccgaggacctcaagctgttcgtcggtaacctgccgttcagcgtcgacagtgcgcagctggccgggctcttcgagcaggcgggctccgtcgagatggtcgaggttgtatacgatagaatgactgggcggagccgtggatttggattcgtgacaatgtcttcagctgaagaagccggggctgctgtcgagcaattcaacggttatacatttcaaggaagacctctgagggtgaactgcgggccaccgccacctagagatggatccgcaccaagagcaccaaggggtggtggtggtggcggcggcggcagcagctttgtcgattcagggaacaaggtatacgtggggaaccttgcatggggcgttgacaactcgactctggagaacctattcagtgagcaaggacaggtgctggatgctaaggtcatctacgacagggatagcggcaggtcaagggggtttggtttcgtcacctatggctctgccgaggaggtcaacaatgccatatcaaaccttgatggcatagacttggatggtagacagatccgagtcacggttgcagaatcaaagcccaggcgtgaattttgagattttgttaaggtggtttagaggtcaatagcgtgtgttcacaagttctagtttgtagcgtctattctttcttccgtatgagtaacaagaagatgctgataatgagagactggaagtgaaactgctgtccacaggaagatatttttcccaacccttctatactcgtcgcgccttcataaaa

SEQ ID NO: 4535 - DNA, 1073 bp, Zea mays
  Clone ID: LIB3136-056-F7_FLI
cgttgacagatcctgatccagtgtgatatttgggctgctcacagcacaattgggtccaataaagcccagccgggacgcagaggaagaagacccggagctgcgtcttccttccgtttcagcaccgcgcgcaatcggcctctcatcccctcttcctatcgcccgccgccgccgccgccgccgcccgtccgcttcagtacgacgtcgagcaaggggaggtaaaagttcgtttggcgtgcgccatgtttaagaagttctcttcagaagatatatctggacagaatcaagttaaggcttctgtacaacgaaagattcggcaaagtatcgctgatgagtaccccagccttgaacctttgctagatgacttgctcccaaaaaagtcacctatgattgttgttaaatgccaaaatcatcttaatcttgtagtggtgaataatgttcctctatttttcaatatacgtgatggtccttacatgccaaccctgcgtcttcttcatcagtatcctgatatcatgaaaaagttccaagtggatagaggtgctatcaaatttgttctatctggcgcaaacataatgtgtcctgggttgacttcacctggtggtgccttagacgacgaagtcgaggaggaaacaccagtggctataatggctgaaggaaaacaacacgccctggcaattggatatacaaagatgtcagcaaaagacataaggaccatcaacaaaggaattggtgttgacaatatgcactatctaaatgatggcctatggaagatggaacggctcgaatgagtagaattctctgaggggttcataacttgcggcagatcgtattgatggacatatgaaaccagcaggaccctatttgcacagctggtatcgttttaaagatgaagtactaagaagctttatttacctgaggcaacttgagcttactccgaccctttggtgtggagtgcatgtcagaaacaggattatgaatgctgtgttcagtgcttttcacaaattgttgtattttcaccagaacaatttgccctcaattggaagtgaggaaatccataacgatctataagttatttg

SEQ ID NO: 4536 - DNA, 347 bp, Zea mays
  Clone ID: LIB3136-044-A4_FLI
gcttccaccatcgaccatccatcacctcacctccaagctccaaggaatctaccctcgttcttctcacaaagcgctgcagcggacagcagcgcagcacgagagagccgagcgcgaggtgcaggaccgcaaaacagaggcgaagcgaaggacctaacctacgtagcaacgctccgctccgcggcgatgggccacgaggggtcgtgccgctgcgagctctgcggcgcgcccgcggccgtgcactgcgcggcggacgaggctttcctctgcgccgcctgcgacgccaaggtgcacggcgccaacttcctcgcgtcgcggcaccgccgcacgcgcctccgcctcgcggccgc

SEQ ID NO: 4537 - DNA, 1101 bp, Zea mays
  Clone ID: LIB3136-001-F5_FLI
cgaaaaatggagctccggttggagccattccaaaagaaattaaaggcccactatatcctacaattgcagttcatagtcagggtgaagagttgactgtaaactttggaaaggaaccattctgttttgacattgagggttatattcttgaagagaaaatgaagcagcaatcggtgtctgataaattgaacttggagacggacatcagtcattggattgtccgctcatatctcctacattatggataccaagatacattaaatgcttttgatatggcaaatgcaactgacccccccaccaatcgccaaaatggtcatgcagaacctcccgaaacgtatggtcttagccacagaaaacttttgcgtcagcttatcatgagtggagatattgactctacattcaaaagacttggggagtggtatccacaagtgataaaggatgagaaatcggttatttgcttactactccattctcaaagattcatagaatatatcagggctgaacaactggaagatgctgtgcactatggtcgtgctaacctggcaagcttcttgacacacgaagcttttgagtggctgctgaaggatagtgtggccctgctggcgtacgagaagcctgcagaatcatgcttgggatacctgatgggctctccccagcgtgaattcgtggcagacgcagtgaacgcggctgtcctgtcgacgaaccccaccatgaaggaccctgagagctgcctctactcgtgtctcgagaggctactaaggcagctcacagtttgtagccttgagcgacgtgcattcaacaacgaccaaggagatgcattcttactccacaaagaaatgcaaaactatgaaaggtctaggcgctcatagcctcataggcatcaggattgttgcgcttctgaagtctgcagcgcccctcagctttcgcaagggtgagcaccgaattgcatggacacagctcaggcgcttcgggaggtgttctaacctctctgtaatcagaaaactcacagtgagataaagccaacgtttcagatttcccctattttgttggttggctaatatgctgtttgacactatgaatgctaaaaagtaaagacgcttcgac

SEQ ID NO: 4538 - DNA, 1886 bp, Zea mays
  Clone ID: LIB3136-008-D7_FLI
cttctccccctcttctcttctcgtagacggcagatctccaggggtgtcgccgtctccggccacggcggccggcgctcggagcatcggtggggttcggtgcggaggtgggcggccatgtacaagaaccagctgcaggagctggcgcagcggagctgcttcaacctgccgtcttacacgtgcctgcgggaggggcccgaccatgcgccgcggttcaaggcggcggtgaacttcaacggggagcagttcgagagccccggcttcttcagcacgctccgccaggctgagcacgccgccgcggaggtcgcgctcgccgcgctcgcgcggcgcggcccgtcctactcgctcgccgcccgcatcctggatgaaacaggggtttataagaaccttctacaggaggtagctcaaagagttggggcgccgttgccattgtatacaacagagcgatctggcgttggccacctgccggttttcacatgcactgttgagctagctggtatcacatttacaggtgatcatgctaagaataagaaacaggctgaaaaaaatgcagcttcagctgcatggtcagcactaaaacaattggtacgcgaggaagtgaattcatccaatgagacagaaaacagtgatgagcaggagcagatcaggattgcccgagccctcctcaactatcgcttgaaggagaagatggcgatggccaattatcctcatgtttcaccattccctaagaaatttcccatgcagccagagaggaagccttcttttggtcaatcttctcagtccagctactcaaagattctccctctattccgccctaaatctaactcaagatccagaccagagtcaccagcatctactgatggcgcatcgcaaatgcctggccgggccatggatatccacactccaagcccaagatcaagatttccagctgcagaggcagccccctacgtgccagttgggcacttccgtatgccttgccacagcatggctccttcagtcacaattaggactgctgttcctgtgttctctgctccacctctcccaccgccgtctgcacgcccgcagcagcttcctccactcatgagccacccaccaccgattcggatggcatccccagttcgcatgaggccagcctctccaatgtttgcctcctcagctccagctcaagggccgaaacttgtgaggcctgttcaattgaaggatgtgcaagatcaaccaaggaaggaaacagctccatccgtgatccctgttcaggtaaaggacgtgcaataccaatcaaggaagagctcaatgtctcctgtgattcctgtcctggtaaaggatgcacaacgccagcctctcccagttcagacgaaggatgtgcaaacccaaacccaagccccaaaggaatcacttgcagatccaattccagcaatcaggcctgcagtcaagattgatttgcctgctcaaggcaagaaggaagcttcagctggtgctaccagcgaagcgccatcttctgccactggcaataatggtgctatggaacgcggtacatcatcagacgttctctcggcaaggcgatcaagggctgctgcggacggggatggcgacaaggtggaagcaaagcacgaggccgaggctcaagcggtggcagaggcagccatcaggcagctggagatcaattgacttcagaaaatgcgcggcaccatcttctcccagattttgtaattagctgccttgcctcctgtgcacattccgttctgcttagtccgtgtatgtcttgttcgggttagggctgtctgggcaaaagctgcattgtggtaggaacacctaggttttctgttgaggagaaaaaaaaacatggagtggtggtaggcggtttgcccagtgtttagttggagacggttatt

SEQ ID NO: 4539 - DNA, 974 bp, Zea mays
  Clone ID: LIB3136-011-A9_FLI
gggggatcgatcttgttcgcggagaggggtgacgtgcttgacagttttgactcgaatccatggtgtgcatctctaccagatagagagctgacctgaggtggagacgtggatcgtggctcctggggtggaggtacaagcgtacagctcaataggagatcaagagtaaagagtgtggggaggggaaggacgcgatatcgggggaggatggtgcttgtgcttgcgctgggggatctgcacatcccgcaccgggtgcccgacctgcccgccaaattcaagtccatgctcgtgcccggcaagatccaacacatcatctgctctggcaacctctgcatcaaggaagttcatgactacctgaaaagcctttgccctgatctccacattactggaggtgaatatgatgagtatgctcgatacccagagactaagacacttacaattggtcagtttaagcttgggctgtgccatggtcatcaggttgttccatggggcgacctggactccctggcgatgctccagcggcagctggacgtggacatcctggtgaccgggcacagccatcagttcaaggcatataagcacgagggaggcgtggtgatcaaccctggctctgccacgggcgcctacagcagcatcacttacgacgtgaacccaagctttgtgctgatggacatcgaaggactccgtgtggtggtatacgtctacgagctgattgacggcgaggtgaaggtggacaagatcgacttcaagaaagcagcgacgatgcaagcctagcactactatccttccacggcgtgattggtttcaagacacgtctaggttctgtttttttctcttcttgattcagagctccctcaacactctttctaccacttgtgctaacctgttcatgtgcaaataacttgtttaatacacattagctgatcagattacgagggcgtgatgttaaatgtcaaacatccagactccaaagttgt

SEQ ID NO: 4540 - DNA, 1275 bp, Zea mays
  Clone ID: LIB3136-011-B9_FLI
gtttgatttgccattagatttgccacctactcattcatatgctgatgcaaataactctgagcaaaatactggagatgtttttgttcacatgtcagacttgcttacaacaatatggccgtcaccctctcagtatttggggccaaaatgtgcactttgggactgtggtaggccagctggagggacagaagactctggagattactgcaacccttaccatgctggtttggctttgaatgatgatggtcttcttgggataagacctgtgatgcgtccaagaggtattgatttgaaagatgggccactgtttgctgctctcattgcaaaagttcaaggaaagaacgttggtattcctgtgtgtggaggcgctgctacgtctaaatccccatggaatgcacctgaacttttcgatctttctcttctggagggtgaatctcttagagaatggttgttctttgatactccaagaagagcatttgagagtggcaaccggaagcagaggtcattgccggattacggtggtcgtgggtggcatgaatcaaggaagctggtaatgaaagatttcgcaggtctgaagaggtcctattacatggacccacaaccatcaagcagccatgagtggcatcttttcgagtatgagatcaatgcttctgatgccctcgccttgtaccgtcttgagtacaagtcctctgaccccaaaaagggtgctgctaagtcaaaactggctagtccactgaatgaaatccggcagcgaatgggcaggctgactgcagacagccctgtggaaaacaagcggactgctaggagcaagccaaaggctaaccagaaccagaaggataccaatgcaaatacccgtccacatgttaacactcccaatcaagttaatgctccaaatgcttatcagacaacgcagcagggatactcagccgaaggaagcagcttcttttggaacccaagtgacgggacttgaagacgcaggcagcatcatgtagctgctcatgcattgcatggcacttatcaagcaaaaacctctaacatcatcgaccaagttggggctgagtagcttggcccttcacatttctaaattctaaatggttggtttctgcacgggggcctggcaggtcggtgtatttgaattttgaaatgcagaggtattacttgcataaactctgtataatatagccggtgtccaagttgccaatctgaatgtaaattagtctgctgtaccagtaaccagttgctgcttgggtatgttagatttgagtcctaagttctttg

SEQ ID NO: 4541 - DNA, 818 bp, Zea mays
  Clone ID: LIB3136-011-D9_FLI
caagtgtcaccagaatttgctgatgcaaatgaagaaaagctgtatgattttcttaatatccagctaaaaagcgatatgaaaagaattcaaaggaggaatgtgctgtcgacaatgctctccgcttggacgatcctgctcttgaggccgggtcaggtcagcttagcagagacaaccggtggcgcattcagggagtatatcgacacgtttgacggctacaccttcctgtacccgaagaattggatccaggtccgtggagctggcgcggacatattcttcagagaccccatggtcctcgacgagaacatgtcagtggagatatcgtcgccttcgtcgtccaggctgggcgttcggcgtgaatccaacgtcttatcggcgtcatccaaggtcgctgacgatggcaagctctactacgaggttgaggtgaacataaaatcctatgcgagcaacaacgagctggcggtgatgccacaggacagggtgcagagcttggagtgggaccgccgatacctgtcagtgctcggcgtcgagaacaagcggctctacgagctccggctgcagacgcccgagcaggtgttcatgcaggaagaggaggacctcagaagagtcatggactccttcagggtcatcaaggcggcgtagtttgtcgatagtagagtgcacatgttttgtttttgtttgcttgtttgtttcttttgtacccgcagaaatgttcatatcacttgtttcttctgcagagcgcacatgtttccattcatgtctccaaagggatgtttacactttaaaataagtaagccaactatcagaaggttggtcaacat

SEQ ID NO: 4542 - DNA, 611 bp, Zea mays
  Clone ID: LIB3136-011-G7_FLI
cgctactggtggaaggagaaggagatgtcggagctgagcgtgcaccagagccaccagctcgtgtgggcgcgcgcccaccacctcgtctacgactactgcgtcgacaccgaccgcttccccgtgcagccgcccgagtgcgccggccgctgagttactgagtcctgaccgaccgacctcgatcggcgcggcgcggcgctgctccatgggtggtgggtggtacgtactagtcttgacaatggatggcatggcaatggatggcgtcgggtggggtggaaatggaactgcttgtttctgtttcagcaatggtgtctgtctgtagttctgtttcagctttgtgaaggtcgcattgttggcgacccatgtgtgggtgaaccggcggtggtgtctcttgtagaaacaagtgtatgggattatgggaacgaatgaacgatgccgcgctccgtttcagggatttgctactccacactgtgttcagtgctttgatctgattcctctgtacagaggcatgatttgtgttccctcgaggcttgcagctgtgcctgtgcgtgggtgtacttgaagctactttctcccttctttttttttttactgcggatgcttttaaccgagcc

SEQ ID NO: 4543 - DNA, 692 bp, Zea mays
  Clone ID: LIB3136-012-D11_FLI
ataccagagcggcagagccttcccctccgctccccagtcccacccgcaccctagccctcagcaaaccctaaccgctcgtcgccatgaaggacacctcgttcaaggccaccggcgccaagcgcaagaaggtcggcggcgccaagcgcgggctcacccccttcttcgcgtttttggctgagtttaggccgcagtacctggagaagcaccctgagctcaagggcgtaaaggaggtaagttgcttcttctcaccctaggcatgtagctgggtttcgcttaggtggctggtatatgcctttgctcgtcggtgactttgcttataggtgagcaaggcggctggggagaagtggcgctctatgtcggatgaggagaaggcgaagtatggcggtagcaagaagcaggatggcaaagcaagcaagaaggagaacactagctccaagaaggccaaagctgatgttcgggagggagatgaagcagaaggttctaacaagtcaaaatctgaggttgaggatgatgagcaggatggtaatgaggacgaggatgagtaaatagtacgatggggaacagcagctttgcaattgagtgtttgctgctttacttatttttctatatgctgttccttttgatgttatatgctgtaaggaaaatctgtacatgatggtaccttagggtatggcatgctggagttccccttt

SEQ ID NO: 4544 - DNA, 1501 bp, Zea mays
  Clone ID: LIB3136-017-A6_FLI
cgtcccgtggtctctacctccatgccacaaccaccaccaccaccgtcactgcattctcaaacgagcagtgcctgaacccaagtgcagtgcagcagccatgggagcagcagcagcaggtggccacgcgctgcgcgccgtcggcgacgtcgtctcgttccccgcgaccgtcgccgccttcgtggaggcgctgctccaggggtgggccgaggccagggccgggctgctggtgccgctgctccgcgccgcggtgctgctgtgcacggccatgtcgctgatcgtgctggccgagaaggtgttcctgggcgcggtcagctccgtggcgaagctgcggcgccggcgtccggggcgggtgtgcaggtgcgaccccgacgaggaggcggctgcggcatcccaggcctatcccatggtgctcgtccagatccccatgtacaacgagagggaggtatgtatgcagttttttatgtgtccacttgttcagtcagagtaagccaattgctggagactgctcatcctcgttcgttcgcttaaagagcagcagcatctgaatctctctagtcttttaagaggttgcatcgagccaattaatttcgcattactaccatttcaaggtggagcaggaagctggctcttccttatgcaacttctttggatacaacggaaccgctggagtatggagaacgcaagcgatcgtcgagtccgggggctgggaggaccgaaccactgctgaggacatggacttggcgctgagagcagggctcctgggctgggagttcgtctacgttggaagcataaaggttaagagtgagctgccgagcactctcaaggcgtaccggtcccagcagcaccgctggtcatgcggacctgccctcctgttcaagaaaatgttctggcaaattctcgctgccgagagagtgtcggtctggaagaagtggtacatggtctatgacttcttcattgcccggagaatcgtaggcaccttctacacgttcttctttttcagcgtcctgattcctctgaacattctgctacccgaagcgcagattcctgtgtgggagctcatctatatccccatagctatcactcttctcaactctgttgggactccaaggtctatccatctggtcatactgtgggtcttgttcgagaacgtaatggcgttgcatcggtttaaagccatcttgatagggtttctcgaagctgacagggccaacgaatggatcgtgacgcaaaagctggggaatctgcagaagctgaaatcgatcgccagacttacaggaagctaccgtttcaaagacaggttccatttcctggaggtgttcattgggctgttccttttggcctctgcgtgctttgactacttatacagagatgactatgtttacctctttgttcttccccagtcgatcatgtatttcgcgattgggtttcagttcattggtctcaatgtctctgaagactgacctattgcaagacaactgaacgttttggttgcgatattatg

SEQ ID NO: 4545 - DNA, 1188 bp, Zea mays
  Clone ID: LIB3136-020-A7_FLI
gccgggccgcgaatctctgcgtccccttcgccaaccatggcctccttcttcgccgacgacggcaccgatgacctcccacgcaccacttcccaccccttcgactccgatgacttcggcgccgccgcggccgacgtcgccgccgccgacggatacggcgggtacgcctctttcgccgaggggggtgtcgaggaggtggacgaggagatcaccgtcgagtccgatggggtcccgatccgccacgtctccggggggtactcgccctcgccgttctcccccgagctcgagcccaacggcggcgacggcccgatcctaccgccgcccaccgagatggggcgggacgagggaatcctcctccgcgagtggcggagaaaaaatgctatggaacttgagaaaaaagaacagaaggagagggagctacgtgcccaaataattgctgaagccgaagaattcaagaaagccttttttgagaagaggatacagaactgtgcgtcaaacatggtgaacaacagagagagggagaagatttttgtagccagccaggagaaattccacgccggcgcagacaagcagtactggaaatcgatttcagatctcatcccacatgaaatagccaccatcgagaagcgggggaagaaagacaaggacaagaagccatccatcacagttgtccagggccccaagcctggcaagcccaccgacctgtcccggatgcgccatatcttggtgaagctgaagcatgctccgccgccacatatgttgcagcctccaccaccagcacctgctgctaaagagggcacaaaggatggcagcgccaaaggtggtggaaaggacggcgccaaagaaggcggcgcggcagccccagcaaacggcgccaagcagcctgctgagagccaagaaaccaccgccaatggcccctcggaggcggagaaagagcagcctgcagcctcggagtgaccggaaagggtgtctttattaagacatacacaagagccttaactgtcagtagatggaaaagcgtgttttatttcagataatttccagactcgtctttcccgcgctgctgatctttttgtagaggagatctgcatccggatgtctttacatcatagcgcagaacattcatgattgtatcaccacagcagttgtatgtttactgctttcccccttgcccaagtgttgccttcactg

SEQ ID NO: 4546 - DNA, 1573 bp, Zea mays
  Clone ID: LIB3136-020-C12_FLI
cggacgcgtgggcgagacgccattctcaccatccacacaaagccacagcccaagagcactagagcagagtcgtcgtcgtcgtcgggcatggcggggttcaaggtgacgcggatctcggagggccccgtgaagccggcgtcggcgacgcccgaggagacgctgccgctggcttgggtggaccggtacccgacgcaccgtggcctggtggagtcgatgcacatcttccggtcgggcgcgggcgaggccccggccgtgatccgggcggcgctggccaaggcgctggccttcttctacccgctggcggggcgcatcgtggagggggagcagccggggcgccccgccatccgctgcaccgccgacggcgtctacttcgcggaggccgaggcggactgcagcctggaggacgtgcgcttcctggagcggcccctgctgctgcccaaggaggacctcgtgccttaccccggcgacgaccgctggcccgtcgagccgcacaacaccatcatgatgatgcagatcaccaagttcacctgcggcggcttcgtgatgggcctgcggttcaaccacgcgtcggcggacggcatgggcgcggcgcagttcatcaacgcggtgggggacatggcgcgggggctggcggagccgagggtgctgcccgtgtggcaccgggagaagttcccggacccgagcatcaagccaggcccgctcccggagctgcccgtgctggcgctggactacgtcgtgctcgacttccccacggcctacatcgacgggctcaagcgggagtacaaggcgcacagcggcaggttctgctccggcttcgacgtgctcacggccaagctctggcagtgccgcacccgggcgctggccctggacccggccgccgaggtcaagctctgcttcttcgccagcgtccgccacctgctcaagctcgaccgggggtactacggcaactccatcttccccgtcaagatgtccgcgccggccgacaaggtgctggcctcctcgctcgtggaggtggtcgacatcatccgggaggccaaggacaggatggccgtcgagttctcccgcttcgctggggaggagacggaccaggacccgttccagatgaccttcaactacgagtccatctacgtctccgactggagcaagctcggcttctccgaggtcgactacggcttcggcccgcccatcttcgccggcccgctcgtcaacaacgacttcatcgcctccgtcgtcttcctcaaggcgccgctcccgctcgacggcaccaggatgctcgccagctgcgtcaccaaggaacactccgaggagttcgcccgtggcatgaaggaagacctgccctgaacttgttcttcctagcttattatatactgctgatgatcatcctgagccctggctgcagggagatgatgaatggtgacgtaaacatgcttctgtttcgttgatgctgttgttacttttggttgtattttttttggggttcactttatcttggtcaatacgtaccacattagatcacagcaagcaaattcgatcttaatttgtactacaccatttgatatgagaccgagacaat

SEQ ID NO: 4547 - DNA, 1864 bp, Zea mays
  Clone ID: LIB3136-020-E2_FLI
gttcttttgagatactagtggaatcgttctctgaattttatggatcatgacgtttcttggaatggatatgtcatcataataactctgcagttttcatcggttctttggttcttctctgcagtgaaaattgaatgttctaatggagtccaagggtggcaagaagaagtctagcagtagtcgttcctccctgatgtacgaagctccccttggctacagcatcgaggatatccgccctgcaggcggcatcaagaagttctccgctgcttactcgaactgcgcgaggaagccatcctgatatctctgttgtcatccccatcctagtagcgtagaaaccacctgcattttcattttgatctccctaatccctccggctagctgctttccagtgaccaaaagatatcaaagaccacttcccgtcttcctcccgtggcctgtctgtcatctggctctgaaacgatggcagtcctgcaagttgctgctgctgcccctccccctgtctctgtgattgggttcgagggatttgagaagcgccttgagatcagcttctctgaggcacctgtcttggctgaccccagcggaaggggactgcgtgcgctctcgcgtgcccagatcgactctgttcttgaccttgctcggtgcaccattgtgtccgagctctcaaacgaggacttcgactcttatgtcttatctgagtcgagcctgtttgtctacccatacaagattgtgatcaagacctgtggaactacaaagcttctgctcgctattccgaggatccttgaacttgctgaagagctcctgttgccactcgctgcagttaaatactcccgtggaacgttcatattccctgaagcacagccttccccacacaagaacttcgctgacgaggttgccttcctgaatcgcttcttcggtggcctcaagtccggtggcaatgcttatgtgattggtgactctgcgaagcccgggcagaagtggcacgtctactacgccgctgagcaccctgaggagcctgtcgttactctggagatgtgcatgactgggctggacaagaagaaagcttctgtcttcttcaagaccactgctgatggttactcgctgtgcgccaaggagatgaccaagctctctggtatctcggacatcatcccagagatggagatctgtgacttcgacttcgagccctgtggctactccatgaatgctgttcatggccctgctttgtcgaccattcatgtgaccccagaggacggcttcagctatgcaagctacgaggtcatgggcttcaacccgggctctttctcttatggtgacctggttaagagggtgctgaggtgctttggtccaactgagttctctgttgccgtgaccatcttcggtgatcgggacaatgcgaagacctgggggacgaaactggatgctgaggcctatgcttgcagcaacatggttgagcaggtgctgccgtttggtggcttgctcatctatcagagcttcactgttacggccgaaacgacccatgggtcgccgaggtcagtcctgcatgacttcgctggtgacattgtcaagaatcgctcagagagtgatgctccctgggaagctgatgctgtggatgagagcgaggaaagagatgtaaagaagatgaaatgctgatgtggtcgacgatagatcagattcagagttgctgccactggttatcttgtgaagcagccaagcctaattatttatgccacataacctgtgctattgtaatgtgtcacatgcttatatttgcaataaacagctctaggtggtcagctttgtctgccgcaatgagcagtgtatcgatattgtggttttgaattgtttggatctaaataaagtcttgttcgat

SEQ ID NO: 4548 - DNA, 558 bp, Zea mays
  Clone ID: LIB3136-022-G2_FLI
cggacgcgtgggcggctacggtggctccccgtcccacggcggcggcgcgtacggtgggtctccgtccactcccggcagcggtggcgcctacggaggcgggtctccctcgccggcccatggtggcggcgcctacgggagctccccgacgcccgcgtacggcgacgccccctcgcacggcggcatagggacctcgtcgccgacgccgctcggcgacccccacagcttcggctctctcccgggctcctgcgactactggaggtcgcacccgatggagatctggtcggcgatcggcgggcggttcccgggcacgtcgtcgtcgatggggacgatgggccacttcttcggcgcggctggcagggtgggcgggacggacgtgagcatccaggacgcgctggcgaacacgcggtcggacggcgcgggcgcgctgctgcgcgagggcgccgccgcgctgctcaactccatgacccgttcgggcttcccctacacgacggagcaggtgcgcgacgcgttcgccgcggcggcggcggaggcggcgggcgggtccgacggcgcggccgc

SEQ ID NO: 4549 - DNA, 857 bp, Zea mays
  Clone ID: LIB3136-040-B6_FLI
gacagccactactaggaattgccgagcgagcgagcttgcgccgtgcgcgatggagggtgacgagaagtcggcgggcggggcccctgcttactggggcctgggcgcgcggccctgcgacgcgtgcggcgccgaggcggcgcgcctctactgccgcgcggacgcggcgttcctgtgcgtcgggtgcgacgcgcgggcgcacggcgccgggtcgcgccacgcgcgggtctggctctgcgaggtctgcgagcacgcgccggcggcggtcacgtgccgcgcggacgctgccgcgctctgcgcctcctgcgacgccgacatccactcggcgaacccgctcgcgcgccgccacgagcgcctccacgtggcgcccttcttcggcgcgctggccgacgcgcccaagcccttcgcctcggcggcgccgcccaaagcaaccgacgacgacgggagcaacgaggacgaggcggcgtcgtggctcctccccgagcccgaccacgggcagaaagaaggcgccacgacggaggtgttcttcgcggactccgacccgtacctcgacctcgacttcgcgcgttccatggacgaaatcaagaccatcggcgtccagcagagcgggtcaccagagctcgacctcgccggcaccaagctcttctactccgatcactccgtgaaccacagtgtgtcatcgtcggaggcagcggttgtgcccgacgcggcgtctggcatggcgcccatggtggcagtggtcagcaggggcctggagcgggaggcgcggctgatgcggtaccgggagaagcgcaagagcaggcggttcgagaagacgatccggtacgcgtcccgcaaggcgtacgcggagacgcggccgc

SEQ ID NO: 4550 - DNA, 594 bp, Zea mays
  Clone ID: LIB3136-056-G1_FLI
cgttctgggccagatcaaaacggagtaaccatcacagagagatcaaacatgggcacaacctgggtcttctcgtggcctgtagccgatgggccaacacctgatgcgaacatcgtcggccaactccagggcactagtgttcaagtagccaatactcccgttgtggtgtaccactactccctgggattagtgttcgaggataaaaggttcaatgggtccacactccaaatacaagggacctcccaaataaatggcgagtggagcattgttggagggacaggacaacttactatggcaatgggtactgtcaaacgcactgaagttgtgtacaaagacaataccaggatctcagaactcaaaatacatgcctatttcgctccagtgaattaagcctactacaactagtgtttatgaggctactgcatccgattaacctccccaaggcgtgagctttatgcagtcatttagcctggagtttgtatccgtgtcacctagtactttacggtaataataagagactgtatctgtatgtttcggtaaactagagttctggtcacctcttgtactcttttgtattttaatgaaatttagaatccg

SEQ ID NO: 4551 - DNA, 1189 bp, Zea mays
  Clone ID: LIB3136-003-D6_FLI
cggacgcgtgggtcctgccccgccaccacgccgcggcagcacaactgcacaagccctcctcagatctcaatcccggcgctccctccctccctccctcctcgcctcgggacagcgagcgccgccgtccgccgtccatggagcacgacgccgaggcgcgccgcgggttcgccaggatgggcttcgggtgcaagcactaccggaggcgatgccggatccgcgcgccctgctgcggcgacgtcttccactgccgccattgccacaacgagtccacgaaagacgggcacgagctggatcggcacgacgtccaatcggttatctgcctcgtctgtgacaccgagcagccgatcgcgcaggtgtgctgcaactgcggcgtctgcatgggggagtacttctgcgcagcctgcaacttcttggacgatgacgttgacaaggagcagttccattgccacgattgcggcatctgcagagtaggaggaaaggagaacttcttccactgccaaaagtgtggatcctgctactcgacgacccttcgcgacaggcactgctgcatcgagaactcgatgaagaacaactgccccatctgctacgaggcagtacctgttcgattcgctgagggagacgtcggtgctccgctgcggccacaccatgcacctgcagtgcttccacgagatgttgaagcacgacaagttctcgtgccccatatgcgccacgcccatcttcgacatggacaagttcttcaaggccctcgacgcagagatggaggcaagctacttgtacacgggaaagggatgggtcgtgtgcaacgactgcagggacacgacgcaggtcttctccggcgtggcgggccacaagtgctgccactgccagtcccacaacacctgccgggtggcaccccccgtccttccgtagccaccaccaacaccacatcattgttgttggaattggatgcagccagccaagatacccccccagcagctacgctattattaccagtagcgcctgcgcttttacacaccgctccgttccagtccatgatgaactgcataatttcgtgccatgcaggtatgtacgtacactgttattggagatcggaagatttatccgactcgggacgtattatttgtaccacaacaaaacacgtgttactattgtaataccagatccggatatatacgaaactatttttagg

SEQ ID NO: 4552 - DNA, 845 bp, Zea mays
  Clone ID: LIB3136-044-H10_FLI
ctcttcctctcctttgctccgagctctgtcatcccggtctgcttcctgcgacccgccgttgcagatcgacgggatcgtggcggcggagaaagccaccaggagctgcgtcgaatgccgcgccaccaccacgcccatgtggcgcagcggcccgaccgggcccaggtcactttgcaacgcctgtgggatccggtaccgaaaaaagaggaggcaagagcttggcctagaccgcaagctgcagcaacaacaaaataatggcgaggcgaagacggaggaagcaaaagacagctctagcaacagtagcagcgggagcagcaacttgcaggtggtgcagaaacggaggctgctaatgggagtggaggaggctgctctgctgctgatgaccctatcttcttcgcccacatccacgttgcttcatggataaggaccctccaacgccagatcagcagtgtacatacaacgtaccccctgcacagtgactgccgaacgattgcaggcctatctcagggttgtgtgatcttgtgattggggcggattattagtgccaagctaatcactccgttgatcgtcttgtcctcctctgttttcgccgcacccgtagatcttgatgccagccagccatatatcttctacgtgatttgtggtaggctccattatcagagggctgttgatcccattcgccccgcacattttttttttctcttgtctttttttctctttttggttttttgtatgtactttgatgttaccccttttgtgagggatgggtgatcaaaaaggagacgccatcccttctcgttctggaataatggtccaaataataaaggatttgagttgttttgttttga

SEQ ID NO: 4553 - DNA, 1215 bp, Zea mays
  Clone ID: LIB3136-055-C12_FLI
cggacgcgtgggcgcagcggcagccgatggtgtcgatgagctcgacgccgcaccctctggatccgtccgtcccggccgtcgtggggggcggcaaggaggaggaggaggcggtggagtcttgtgccgccgccgcgcccttgccgccggttgggatcgacgacgacgaggagggcccccggagagtgcgcaagccctacaccatcaccaagtcgcgcgagagctggaccgaccccgagcacgacaagttcctcgaggcactgcagctctttgaccgtgactggaaaaagattgaagcatatgttggctccaagacagtaatacagattaggagtcacgcacagaagtactttttgaaggttcaaaagaatggaacaggtgagcatttgcccccacctaggccaaagcgaaaggctgcccatccatatccacacaagtcctcaaaaaaggcccttcaagttgtcttaccacaacaagtttcgcacataatggagcaaggctgtggtacacctatggatgtagctactgttgctacagactctagtgtaaataatgcttttcctgttcaacatttcagtccgaggcatacacaagccatgccagactttgctcgtgtatacaacttcctgggaagcatatttgatccagagacaaatgggcatttgcagaagttgaaggaaatggatcccattgatgctgaaacggtactgttgctgatgaaaaatctgtcaatcaacctaactagtccaaactttgaggagcataggaggttgctctcttcggatgcctcaagcatggatcaaaagtcgggctcttcccgggttcatctcccgttcatgataacgagcaagtgagagaagcagctggctggcctgaaggcaagaaggtcgtttggagtcgtcacactcaggagcaaggcgatgcgtatgtacatatatcttaataagcagctttaggatagcttggtttgctcgaccgacatgttgcaagtttatgcgcctttttctttattctctgcgcccctccagttttgcccattgtagtatggaacttataacatgtgtgttttatgccgcatcttacatttttttgttccatcacaaggatgaacgggtggggcatgtgtgtgtgttttttgccgtgtgtgtatgtatatacagcatgcggctgtatgtgtagatcaggctatatatataacatactgtgtgctgttctatt

SEQ ID NO: 4554 - DNA, 1418 bp, Zea mays
  Clone ID: LIB3136-033-A3_FLI
cggacgcgtgggcggacgagtgggctcgctcaccaagccaacaaccaaatcgaattcgccgacgactctctttattcctcccgctcgccgccgccgccaccgcctgagggcaagaagcgagcgagcgcaccgcggatctccctcccggccccgccgcgcgcaccggtgaagacgacgagcccctcgtgaatggtgggagcccgcgcgacgtccgtcgcctcgcagccgcagccggaggaggcctccttccgcggcttcggttactgcatgcagggctggtaccaccgctgcatcggtctcgacccctgaaccccgccgccacttgcttctttgatttgatttcattcggttcgttcggtgcccctcccgtcctggatctgttgcccgagagcgcgagagcgcgcgagattcgcccccttctcttctcataggaagcaggaagcaagccgatcgctcgctgagcgccgccgccgatggccgtcgcggtgccgtccacgctgccgatgaagctctggagggcggaggcccgcggcaaggccgccgccgccgccgcggggcccgacgaccccctgcgcgtcctggtgacggtgaccgtcctcgggagcgccggcccgttgcgcttcatcgtcctcgagggcgacacggtcgccgcgctcatccgcggcgcgctgcgctgctacgcccgcgagggccgcatgccgctgctcggcaccgacccggccggcttcgtcctctccaccgccaacggcggatccggcgcactcggagaagacgagaggatcagcttcaacgggtgccggaacttcctgctttggcagaaggctgcggctcagggtgccgccgccaaccacgccgggtccgatgctctgacggcaaccctgagccccggcaggaagggcagcggtggattcaaggctactgatccgagccatggcaggaaaggcggcggcggctggaaggctggcctgaacaagttcctcctcagcttcagcatcaaggtgtgatctatgcgtggacgagagaagggggtcgtttcttggtgtcgaggcaccgcacaacaataaaaatgcattgcattggtttgtctgttttttcaatcaattggtattgtaattcgtcatgcgaatccgagtcgagtcgaggcaaagtgtgattcatcgtatgtttgagtcgagtcgtgtcagttgcttagtttatttggctgttctctttccaaatcatcggatcgggttcctctgatctcttgttaattgttcttcattcaataatccatttgtgcgtgctggtctcactctcttcgtgatcacaaggccctgtttggccgattagctaattaatcggatgatcacgcggcgttgacggccccgtgcctgtttgtttggtttatggcttatacaaaccgctggattattaagtac

SEQ ID NO: 4555 - DNA, 680 bp, Zea mays
  unsure (1)..(680): unsure at all n locations; Clone ID: LIB3136-014-F2_FLI
gactcctcgcattcgccgctgcgtcaacgtgtcttccttcccgcggtctctccgccgcctcccagatccggcggccatggcaaggaacccgggctgcaccgtcttcataggcacgttcaagcttaccttgcagtttacagaagattacccaaacaagccaccaactgttcggtttgtctctaggatgtttcatccaaacatatatgctgatggaagcatctgcttggatatcctacagaaccagtggagtcctatatatgatgttgctgcaatcttgacttctattcagtccctgctgtgtgatccaaacccgaactcccctgcaaactcagaagccgcaagactgttcagcgagaacaagcgggagtacaaccgcaaagtccgcgagattgtggagcagagctggacagccgactagtgcaggaggaggatgctcatcgtgcccgaaagggcacaataaggaaccatgaaaaaccatccttgtgtttgtggttcgccagacctgtcgaaacattgaagaactctagttctagtctgtcgttgtcatggttttggtctgatccagagcaccggttgctcatggtggtggctgtcgtaatgtagcggttgttgttgacctatatcttctcaagatttaaaatgaaaaaaaaaaaaaaaaaaaaccmwcaacnwtaannaan

SEQ ID NO: 4556 - DNA, 316 bp, Zea mays
  Clone ID: LIB3136-005-Q1-K1-H1.F2
gaactgaactgttccacacctgcatgccgcgtgctctttagaatctgaccaacgatagttacaggtgattacattttatataaatatacatatagcccaacaccagtagtagttgtagacggcccgcataaccatcatacagtacgcctctaggagggccccggccgcgggtatcaaaacaagatacgtacatgtcttccgcccatcaatcgattgacgttgtacattttgtacgtgtactaatggacttgtacagcgagatcgacgacgacgacgaccgagaagcataccttacgggcgaaggactgggacaggg

SEQ ID NO: 4557 - DNA, 731 bp, Zea mays
  Clone ID: LIB3136-023-Q1-K1-C11.F2
gcagttaccatcttgctgtgtaaaataaaatcaatagttgcaaaaacagacacccattatctaccttcaatgttagaggcaaactaaaaagggtaaaacagctaaacaaaagcaagtatttcgtggagcaaaaattttgagagaacagctggcacattggaaactatctgattagcgattgtgcacgttgttgacgctgatcctccttcaacttctccctgggcgagagcttgtcgccaatcagtgtgaacttccagcgatctgcttgaagtacgaacactgaaccagcttttggtacaactcggaagcggttgtcctcggatataattccaaacgtctctgcagtatcccgaatcatgatgccgtttacacctttatatgaagcagctttgcattctgccactattagaagggccccatgaagatctgctgaaagaaggttctcagtaaatttctttttcgggctcagatccataagctctctgatatagtccttccacatctcatgcattggcttatagaggtcgtacttgtggaatgtaccatctaaatcaaatgaaccacatttcttatgttgttttagagacatgtgcctttttgatcgctttgaatgaatcaacaaagatcttgcttgggaatccactaatctagaacccctctgaacataattatccaaaaggatccctttttccagtttcaactttttggcaccctttgtaattttcccagca

SEQ ID NO: 4558 - DNA, 710 bp, Zea mays
  unsure (1)..(710): unsure at all n locations; Clone ID: LIB3136-023-Q1-K1-C11.R2
cggacgcgtgggcacagaggttgttcacaatgttatatatgacataattcagaaaggtggagatgctgggaaaattacaaagggtgccaaaaagttgaaactggaaaaagggatccttttggataattatgttcagaggggttctagattagtggattcccaagcaagatctttgttgattcattcaaagcgatcaaaaaggcacatgtctctaaaacaacataagaaatgtggttcatttgatttagatggtacattccacaagtacgacctctataagccaatgcatgagatgtggaaggactatatcagagagcttatggatctgagcccgaaaaagaaatttactgagaaccttctttcagcagatcttcatggggcccttctaatagtggcagaatgcaaagctgcttcatataaaggtgtaaacggcatcatgattcgggatactgcagagacgtttggaattatatccgaggacaaccgcttccgagttgtaccaaaagctggttcagtgttcgtacttcaagcagatcgctggaagttcacactgattggcgacaagctctcgcccagngagaagttgaaggaggatcagcgtcaacaacgtgcacaatcgctaatcagatagtttccaatgtgccagctgttctctcaaaatttttgctccacgaaatacttgcttttggttagctgttttacccttttta

SEQ ID NO: 4559 - DNA, 607 bp, Zea mays
  unsure (1)..(607): unsure at all n locations; Clone ID: LIB3136-037-P1-K1-E4.F2
gataaacgagttccatattacgacattattatggtttgcatattgtcaaaactcaaaacacaagacaatggtaatcaggcaggttgcgatacacacaagtaatagcataatcaaagatttacaggctatgatctcctcagcagagtgagccgagattggccgttagctcaaccagttgggagcatacagcagtcgatgcagattgttccaagcaccgtgcttccaagaaataccagccaaggtcggcttggttcagaagagcaacagacgatttcatgggcccaggcatgacatcaatgacgtccttgacgttcagggtggatagagttgtagcaacagcgagctgcaagttgcaacaccgaagcagtccagacaagttcaagcacaaaaagagcaggtataaacatccgtacctccatgacaactggtaaccaatcatgagaaagggaactgcatggctgggtccaagtagttggctggatcatctgttgcgaggactccattattgggaggaaaaacatcgaaaatgctaggcattgttggcttcgaaggacctgacagatcataatgtncattgtactgagcaagaggatgctgcatatattga

SEQ ID NO: 4560 - DNA, 649 bp, Zea mays
  Clone ID: LIB3136-037-P1-K1-E4.F7
gctggagaggaacactcatttggtcatgccactgcagaggacttaacttttagcttactgttgctagctctgctatccagatacacctgctcggatgtcaggagacggtgtggtttctgtgaacaacatatccaatgtggccaatgacatgcgtagtccttgtgactgtgatgaatttctatcggagttgtctagatttatgaatgattctcctctgcgtaacactcctcttggagagtgctctggtcttcctccgatgtctgaagctgaggctcatgcttttgaagtcaactcttttggcctctacaatgaattatcagagcttgttgagttaggaggcgcggataacaacttaaacaccagcaatgtggaaactacagattacctcatgttgccacctgacagagaactgtcggctaatgattacatggaactaaacgatctccttgctcctgacccaagcttccccagtgaattttctgctcaggacaatcaatatatgcagcatcctcttgctcagtacattggacattatgatctgtcaggtccttcggaaccaacaatgcctagcattttcgatgtttttcctcccaataatggagtcctcgcaacagatgatccagccaactacttggacccagccatgcag

SEQ ID NO: 4561 - DNA, 536 bp, Zea mays
  Clone ID: LIB3136-037-P1-K1-E4.R2
caagaagtatcctaacgggtctaggacaaatcgtgccacaccaaatggttactggaagactagtggaaaggatagaataattatgcttaactcccgcaccgttgggatgaagaaaacattgatatttcatgaaggcaaggcccctaagggtgacagaactgattgggtgatgtatgaatacagaatggaagatgaggatttggtttctgccggtttctcaaaggatgcttatgtactctgcaaaattttcaagaaaagtggccttggtccaagaatcggagagcaatatggggctccatttaatgaagacgaatgggataatgcagaagtcgaaacttctctgtttcctttgttttgttcagaagtgaatccaacagagggacaacgtgctcagcctactgtcctggctggtgctcttctggaacccgaaccacctctacataattcatcttctacatgtgctggagaggaaccatcattgggtcatgccactgcagaggactgaactttgagctatactgatgctagctgtgcta

SEQ ID NO: 4562 - DNA, 731 bp, Zea mays
  Clone ID: LIB3136-037-P1-K1-E4.R6
gtagttcgctggatatctgttgcaggactcattattgggaggaaaaacatcgaaaatgctaggcattgttggctccgaaggacctgacagatcataatgtccattgtactgagcaagaggatgctgcatatattgattgtcctgagcagaaaattcactggggaagcttgggtcaggagcaaggagatcgtttagttccatgtaatcattagccgacagttctctgtcaggtggcaacatgaggtaatctgtagtttccacattgctggtgtttaagttgttatccgcgcctcctaactcaacaagctctgataattcattgtagaggccaaaagagttgacttcaaaagcatgagcctcagcttcagacatcggaggaagaccagagcactctccaagaggagtgttacgcagaggagaatcattcataaatctagacaactccgatagaaattcatcacagtcacaaggactacgcatgtcattggccacattggatatgttgttcacagaaaccacaccgtctcctgacatccgagcaggtgtatcttggatagcagagctagcaacagtatagctaaagattaagtcttctgcagtggcatgaccaaatggatggttcctctccagcacatgtagaagatgaattatgtagagggtggtccggtttcagaagagcaccagccaggacagtaggctgagcacgttgtccctttgttggattcactttt

SEQ ID NO: 4563 - DNA, 527 bp, Zea mays
  unsure (1)..(527): unsure at all n locations; Clone ID: LIB3136-037-P1-K1-E4.R7
ctccaatacggagtcctcgcacagatgantccagccactacttggacccagccatgcagttccctttctatgattggttaccagttgtcatggaggtacggatgtttatacctgctctttttgtgcttgaacttgtctggactgcttcggtgttgcaacttgcagctcgctgttgctacaactctatccaccctgaacgtcaaggacgtcattgatgtcatgcctgggcccatgaaatcgtctgttgctcttctgaaccaagccgaccttggctggtatttcttggaagcacggtgcttggaacaatctgcatcgactgctgtatgctcccaactggttgagctaacggccaatctcggctcactctgctgaggagatcatagcctgtaaatctttgattatgctattacttgtgtgtatcgcaacctgcctgattaccattggcttgggttttgagttttgacatatgcaaaccataatatggtcgtaaatggaacctcgttatcaaaaaaaaaaaaaaaggccgg

SEQ ID NO: 4564 - DNA, 630 bp, Zea mays
  Clone ID: LIB3136-043-P1-K1-D10.F2
gcttcgatactgaatacaattcaaatggtagtgtatcctttacattgtgattttatttcccttttacacaatggcaacgacgcctgatgcaatatagacgattcacacaggaacaaggaatattcggaaggtgcactcgttgctctacaaaaccacgatcgcctcaagccctctcaactcctcaagtgaaacttgcccacataaacagcgagacggccacatggcgcacaggtccccgtatcaagagggcagcaagaaccaatcagagaactgaactcaacgaatggggaagggatctttcctctcgtcccatttccaaggacagccttgattatctgaactgaagcagcatccaatgccctagatggccgagcttttgggatagaataggtgcaggcgcctccttcgtggcaaaaattttatatacacatcaggccgcagaccaatctcacctttcatgaccgcagaccaatctcacctttcatggccgaacccttacacaatcagcagtcctgaagctagcgagaagcgaaaaggtcaaggcgcctcctttgtcactcatcggtgctacgccagggcaccatcctgaggtctgtccaactgaaatatatgcggacagacctggcacac

SEQ ID NO: 4565 - DNA, 329 bp, Zea mays
  Clone ID: LIB3136-043-P1-K1-D10.F7
taaatccacattccgtcacgtccgccttatgccggattttgcgggagtgtactgcttcttaggtagtgttttccatccaagcacacgtgatcatctgcagaatactgaaggagatgaatccaattgatgttgagaccgcgctgttggtgatgaggaatctctccaataattagaccagccctgattttgaagatcaaaggaaattggtgtctttatatagcgcttctgatggccccgagctagggagctccaggagttcatttctagcaactagcgcacctttcatgtgaggattaagggtggatagtgtggccaggtctgcccgcatt

SEQ ID NO: 4566 - DNA, 485 bp, Zea mays
  Clone ID: LIB3136-043-P1-K1-D10.R2
gttggctccaagaccgtcatccagattaggagtcatgcacaaaagtactttttgaaggttcagaaaaatggaaccagtgaacatgtcccacctccacgaccaaagcgaaaagctgcccatccatatcctcagaaagcttccaagaatgaaccaaactatggcctcaagacagattcatcttccatacataggaactctggcatgaatgtgtctgtttcttcatggcctgataggtctatcccgcaagctgatgcttcgtcgatggtgaaagatttaggtgctggaacaccaggtccaaacaattgttgctcaagcagtactgaaggccctgcaagaactggtcaacctgtggaaacaaatggtccaataaatgaaatggcggcactccggcttatgccggattttgcgggagtgtacagcttttgatgttgtgtgttctatccaagcacaagggatgatgtggtggtaaactgggcgtagatgaa

SEQ ID NO: 4567 - DNA, 639 bp, Zea mays
  Clone ID: LIB3136-043-P1-K1-D10.R6
ttatgaccgcacccttaccaatcagcagtcctgaagctagcgagaagcgaaaaggtcaaggcgcctccttcgtcactcatcggtgctacgccagggcaccatcctgaggtctgtccaactgaaattatatgcggacagacctggccacactatccacccttaatccttacatgaaaggtgcactagttgctagagctgaactcctggagctccctagctcaggtccatcagaagcgctatataaagacaacaatttcctttgatcttcaaaatcaggactggtcaaattgatggagagattcctcatcaacaacagcgccgtctcaacatcaattggattcatctccttcagtttctgcagatgatcacttgtgcttggatcgaaaacactacctaagaagctgtacactcccgcaaaatccggcataaggcggagtgacggaatttgatttattggaccatttgtttcaccaggttgccaagttcttgaagggccttcagtactgcttgagcaaaaattgtttggacctgggggtccagcacctaaatctttcaccatcgacgaaacaacagcttgcgggatagacctatgaggccatgaagaaacagacacattcatgccagagttcctatgtttgg

SEQ ID NO: 4568 - DNA, 536 bp, Zea mays
  unsure (1)..(536): unsure at all n locations; Clone ID: LIB3136-043-P1-K1-D10.R7
cttttcgcttctcgctagcttaggactgctgattgtgtaagggtgcggccatgaaaggtgagattggtctgcggtcatgaaaggtgagattggtctgcggcctgatgtgtatataaaatttttgccacgaaggaggcgcctgcacctattctatcccaaaagctcggccatctagggcattggatgctgcttcagttcagataatcaaggctgtccttggaaatgggacgagaggaaagatcccttccccattcgttgagttcagttctctgattggttcttgctgccctcttgatacggggacctgtgcgccatgtggccgtctcgctgtttatgtgggcaagtttcacttgaggagttgagagggcttgaggcgatcgtggttttgtagagcaacgagtgcaccttccgaatattccttgttcctgtgtgaatcgtctatattggatcaggcgtcgttgccattgtgntaaagggaaattaaatcacaatgtaaaggaatcacttaccatttgaattgtattcagtatcggagc

SEQ ID NO: 4569 - DNA, 515 bp, Zea mays
  Clone ID: LIB3136-045-Q1-K1-G11.F2
atagttggacatctagtacactactcttcattttagtcatttcgtcaattacactgcggtattagcatcgacaacacaacaagcaagagcgatcgaaaactgttacacaggcgctacaccaagtaggtaaaaacaagtttgcggctgcctgccgccataccatgccatactctggccggtatagctgcagcagattgtatacaaggggaaaaaagaagatacacatacagtacgaagaaggcaaatgaaatgccgttcgggcggtagcctaggcttgtacagctgacgcagacagaccccgcctcgggcggtagcctaggcgtgtacagctgacgcgcagacagaccccgccccgccgcacttaaaagcttccttccttgacctcgagggtacacaggcctattgtccgagcaatttggaatcacatgccacaatcttcaccttgcccacctgctccgtggcctcctcgttcttgaagcttgcgtctgtcaagatgaaagtccacacattgtcac

SEQ ID NO: 4570 - DNA, 595 bp, Zea mays
  unsure (1)..(595): unsure at all n locations; Clone ID: LIB3136-045-Q1-K1-G11.R2
ctagtccatgacggatgctctggagaaccaagtgaagagcaaggttactgtcaagggtcacctgcacacctacaggttctgtgacaatgtgtggaccttcatcttgacagacgcaagcttcaagaacgaggaggccacggagcaggtgggcaaggtgaagattgtggcatgtgattccaaattgctcggacaataggcctgtgtaccctcgaggtcaaggaaggaagcttttaagtgcggcggggcggggtctgtctgcgcgtcagctgtacacgcctaggctaccgcccgaggcggngtctgtctgcgtcagctgtacaagcctaggctaccgcccgaacggcatttcatttgccttcttcgtactgtatgtgtatcttcttttttccccttgtatacaatctgctgcagctataccggccagagtatggcatggtatggcggcaggcagccgcaaacttgtttttacctacttggtgtagcgcctgtgtaacagttttcgatcgcttttgcttgttgtgttgacgatgctaataccgcagtgntattgacaaaatgactaaaatgaagagtagtgtcctagatgtcccactat

SEQ ID NO: 4571 - DNA, 612 bp, Zea mays
  Clone ID: LIB3136-049-Q1-K1-D5.F2
actcctataatgttctgttcatctgaccctgaacgagctgtgagtgctccataaacggttcacgggaattcaaaacataaaaggcatgtcgacaaatttcttttgttgcactgcgtgcagggacgagctagcagctatgcagccccggggatcatccacaagcttgcggcacattcgctacgccttgcctctgcagctcgcccatgacactgtctaccgaagggggcttcagtccgaggggcagcggcagccacggcttcgttaaaacatcacctattgctgcatctatgctctcgcttgatggctgtatctgtagctgaaacagcgcgtcttgctggctcttgcctgcgagtgctggaggaacgagaggtctgtacatcggaggtggccatggcaaagaacccctcacgtgtggagcagggaaacgcgctgctgccattggcactgccacgcatggagtcaccgccacctggtctggcatatgggcagcaggccccctcatgtaagcatggtgccagaacgccgggtcagctggcggtggcggagcccacggcggcggcggcggggcgccgggggcgagatgcccaggccacattggcaccccgggtgact

SEQ ID NO: 4572 - DNA, 323 bp, Zea mays
  Clone ID: LIB3136-049-Q1-K1-D5.F6
ctggcaaagaacccctcacgtgttgagcaaggaaacgcgctgctgtcattggcactgccacgcatggagtcaccgccacctggtctggcatatgggcagcaggccccctcatgtaagtatggtgccagaacgccgggtcagctggcggtggcggagcccacggcgcgcgccgtgtttgcttggggggcgagatgccgaggccacattggcacccgggggtgactccaccgctggcgtcggactcggatggccccacacgtgcagcgggcctcctgaagtgctgcaccgggacgaggagtggtcccccccggcggggggaaaac

SEQ ID NO: 4573 - DNA, 643 bp, Zea mays
  unsure (1)..(643): unsure at all n locations; Clone ID: LIB3136-049-Q1-K1-D5.R2
cggtgaggccggctgtggaggagcctttgccggcgaaaaatcaccgtcgtcgacggcatcgtcgtcgcaggaggctgagagccggcgcaaggtgtccaagaagcactcccaagggaagaagaaagcaaaggtggattggacgccggagcttcaccggagattcgttcaggcggtggaggagctgggcatcgacaaggcggtgccgtccaggatcctcgagatcatggggatcgactccctcacgcggcataacatagccagccatctgcagaagtaccgttcccacaggaagcacatgcttgcgagggaggtggaggcagcgacatggacgacgcaccggcggccgatgtacgctgcccccagcggcgccgtgaagaggcccgactctaacgcgtggaccgtgccgaccatcggtttccctccgccggcggggaccactcctcgtccggtgcagcacttcgggaggccgctgcacgtctggggccatccgagtccgacgccagcggtggagtcaccccgggtgccaatgtggcctcggnattttgccccccgcgccccgccgncgncgncgtgggctccgncaccgncagctgacccggcgttctggcaccatgcttacatgagggggcctgctgcccatatg

SEQ ID NO: 4574 - DNA, 434 bp, Zea mays
  unsure (1)..(434): unsure at all n locations; Clone ID: 13LIB3136-003-Q1-K1-B9-r4A
aactcatgagccatcctntcctccgcagttatctggcagtgtcaacaacactgggccacttagctccatatcactggaatcctcaaactcgatgcttcataatgtttccatctgaggattccaggaatagcactgggaagagctagataaagcatatctgagaggaacaagcacctctgctacaagggatccactaatgctttgaaaaaggatgtgtaaccttgagcccattgtcctagcgagatgaggatctcgcaaaatcgcaataaatctggcatcaaaactatttccgggacagcggcaagatttgaattcagaaattgcaaaaatgaaggggagtcgcatgaacgagatgccacatgactaaaagaagacaccacggaccaccaatcgcctgaaccagtctgccccaaaagatatgggctaatatcaga

SEQ ID NO: 4575 - DNA, 561 bp, Zea mays
  unsure (1)..(561): unsure at all n locations; Clone ID: 15LIB3136-024-Q1-K1-G1-r4A
ggaagttgcggtggggtctccccanaggtggaaccgcatctcccggccgacgatgggtgccgtcgccgctgttcgcacgtacacgttggtctgcagcgtgtacggctccttcggcaccgtccccagcagctccatgtcgatctcgtcgtggtgccccgggtactcctcgctgttcgacaggtagaaggcggtgttgacgccggcggtgtaccccggctgcaccctgacggacgcgccgaagtagccgttccggtacgcccgcgcagacttgaacccgctgcccgagctgctgtccatccagagcgtcagggacttgccgtccggcgacagcgtctggtgctgcgcgccccacagcgtgcggtaggcctcggagaagcccagcggcctgaacatgccgctggggtagtatcccggcgacggaggctgctgctgctgctgggctctgcacggccgcagctgcaccgcgagcagagcaagcgcgcatgccaggagaagagccgctgcttgccgcaccggcggaaggtcacaaggccttgccatccggagaggacttggtgaccg

SEQ ID NO: 4576 - DNA, 389 bp, Zea mays
  Clone ID: 19LIB3136-003-Q1-K1-B9-r5A
caaactatctcttccgggacatgcggccaaggtattttgtaattcagaatattgtcaaaaattgtctgggtttttctgcattgaacggaggtatgccaacaatgagctttaatagaatgacaccaacggaccaccaatctgcactgcaaccatgtcctgtccccaaaatgatttctggtgctaaataatcaggagttccaacagcagaacgattttgtctccgtgctcggtgatccatttgctcgaattcattcatctgaggctcatcatctccatacagtgaagccccacttaatatgtccatcatgggctatcaacaagttgtcaggctttagatccctatggactatgtgcatagagtgcaaatattccaaagctagtacaacttc

SEQ ID NO: 4577 - DNA, 652 bp, Zea mays
  Clone ID: 21LIB3136-056-Q1-K1-F7-f3A
tgatgagtaccccagccttgaacctttgctagatgactttttccaaaaaagtcacctatgattgttgttaaatgccaatatcatcttaatcttgtagtggtgaataatgttcctctatttttcaatatacgtgatggtccttacatgccaaccctgcgtcttcttcatcagtatcctgatatcatgaaaaagttccaagtggatagaggtgctatcaaatttgttctatctggcgcaaacataatgtgtcctgggttgacttcacctggtggtgccttagacgacgaagtcgaggaggaaacaccagtggctataatggctgaaggaaaacaacacgccctggcaattggatatacaaagatgtcagcaaaagacataaggaccatcaacaaaggaattggtgttgacaatatgcactatctaaatgatggcctatggaagatggaacggctcgaatgagtagaattctctgaggggttcataacttgcggcagatcgtatcgatggacatatgaaaccagcaagaccctatttgcacagctggtatcagtttaaagatgaagtactaagaagctttaattacctgaggcaacttgagcttactccgaccctttggtgtggagtgcatggtcaaaacaggattatgaatgct

SEQ ID NO: 4578 - DNA, 626 bp, Zea mays
  unsure (1)..(626): unsure at all n locations; Clone ID: 25LIB3136-014-Q1-K2-C8-f3A
ctgaaccctgtcctaatatttctgatagtgctaaggatctggtctgcaatatngcttacacggtattctaaaaagagatttagtgctcatgaggttctctgtcacgcatggattgttgacgatgccgtggcacctgataagcctattgattctgctgttctctcaaggctgaagcatttttcggcaatgaacaagctcaagaagatggcattaagggttattgctgaaagcctgtctgaggaagagattggaggcctcaaggagttgttcaagatgattgatactgacagtagtgggactataacatttgatgagctgaaagatggcttgaaaagggtaggctctgaattaacagagaacgaaatccaggctctaatggaagcagctgatattgataacagcggaaccatcgactacggcgaattcattgcagctaccttgcacatgaacaagctggagagggaggaaaactnggtttcagcattctcgttttttgacaaagatggaagtggctttataaccatcgatgagctgtcacaagcatgtcgcgattttggtctcgatgacctccacctcgaggatatgattaaagatgttgaccagaacaatgattgccaaatcgacta

SEQ ID NO: 4579 - DNA, 402 bp, Zea mays
  Clone ID: 26LIB3136-054-Q1-K1-E3-R1
gccaggttccggcgccgcacgggacgtgcagaggccagcagcggcggtggcggtggccggggcggcgaaaatgatggcctcctttggctgccccggcgggacgtgatgctcaacggcctgtccagtgtcgccgccgggctcgcctggtacccgggcgtcgcgtccggcgtggatgcggtgtgcaccagggccgacaaggtgaacgagaagaccgtgcagtgcacggacccggccgggcagcttccgtgccctctggtgtcgccgacggaccccgtggacttcaagccggaaagcaaggtgacgcgcatccggcagccggtgcatctcctgagccgggagtaccaggagaagtacaaggaagccgtcgcgaagatgaaggcgctaccggaagagaaaccgctg

SEQ ID NO: 4580 - DNA, 662 bp, Zea mays
  unsure (1)..(662): unsure at all n locations; Clone ID: 27LIB3136-056-Q1-K1-F7-f4A
gctagatgaccngctcccaaaaaagtcacctatgattgttgttaaatgcccaaaatcatctttttcttgtagtggtgaataatgttcctctatttttcaatatacgtgatggtccttacatgccaaccctgcgtcttcttcatcagtatcctgatatcatgaaaaagttccaagtggatagaggtgctatcaaatttgttctatctggcgcaaacataatgtgtcctgggttgacttcacctggtggtgccttagacgacgaagtcgaggaggaaacaccagtggctataatggctgaaggaaaacaacacgccctggcaattggatatacaaagatgtcagcaaaagacataaggaccatcaacaaaggaattggtgttgacaatatgcactatctaaatgatggcctatggaagatggaacggctcgaatgagtagaattctctgaggggttcataacttgcggcagatcgtattgatggacatatgaaaccagcaggaccctatttgcacagctggtatcgttttaaagatgaagtactaagaagctttatttacctgaggcaactagagcttactccgaccctttggtgtggagtgcatgtcagatacaggattatgaatgctgtgttcagtgcttttaacaaaaagttgtattttca

SEQ ID NO: 4581 - DNA, 686 bp, Zea mays
  unsure (1)..(686): unsure at all n locations; Clone ID: 31LIB3136-014-Q1-K2-C8-r3A
gttttcctccctctccatctngttcatgtgcaaggtagctgcaatgaattcgccgtanntcgatggttcctttgttatcaatatcagctgcttccattagagcctggatttcgttctctgttaattcagagcctacccttttcaagccatctttcagctcatcaaatgttatagtcccactactgtcagtatcaatcatcttgaacaactccttgaggcctccaatctcttcctcagacaggctttcagcaataacccttaatgccatcttcttgagcttgttcattgccgaaaaatgcttcagccttgagagaacagcagaatcaataggcttatcaggtgccacggcatcgtcaacaatccatgcgtgacagagaacctcatgagcactaaatctctttttaggatcccgtgtaagcatattgcaaaccagatccttagcactatcagaaatattaggccagggttcagattcaaaatcaagtttgcctcgcagaatctgcctgaagattccagcctcagtttctgcccaaaatgggggcacaccacaaagcagaatgtacagaattactcctgcgctccacacatcagcttctggaccatagcatttctgaagcacctctggtgcaacatagtatggacttccaacgacatcagagatttatcaccgggcttgaagaacatgg

SEQ ID NO: 4582 - DNA, 110 bp, Zea mays
  Clone ID: 32LIB3136-056-Q1-K1-B10-R1
ctcggccgagcgaattgaataagctccccctctgaactgaagcaatggcagacggcaatgcctgtggcgtcgctcgagacctgtgctccatcctcggccttgcgctggcg

SEQ ID NO: 4583 - DNA, 719 bp, Zea mays
  unsure (1)..(719): unsure at all n locations; Clone ID: 33LIB3136-056-Q1-K1-F7-r3A
ctggtgaataacaacaatttgccaaaagcactgaacacagcattcatnaatcctnngtttctgacatggcactccatattaaagggtcggagtaagctcaagttgcctcaggtaaataaagcttcttagtacttcatctttaaaacgataccagctgtgcaaatagggtcctgctggtttcatatgtccatcaatacgatctgccgcaagttatgaacccctcagagaattctactcattcgagccgttccatcttccataggccatcatttagatagtgcatattgtcaacaccaattcctttgttgatggtccttatgtcttttgctgacatctttgtatatccaattgccagggcgtgttgttttccttcagccattatagccactggtgtttcctcctcgacttcgtcgtctaaggcaccaccaggtgaagtcaacccaggacacattatgtttgcgccagatagaacaaatttgatagcacctctatccacttggaactttttcatgatatcaggatactgatgaagaagacgcagggttggcatgtaaggaccatcacgtatattgaaaaatagaggaacattattcaccactacaagattaagatgattttggcatttaacaacaatcataggtgacctttttgggagcaagtcatctaacacaggttcaaggctggggtactcatcagcgatactttgccgaatctttcgg

SEQ ID NO: 4584 - DNA, 669 bp, Zea mays
  Clone ID: 37LIB3136-014-Q1-K2-C8-r4A
ataatatagctgcttccatagagcctggatttcgttctctgttaattcagagcctacccttttaagcttctttcagctcatcaaatgttatagtcccactactgtcagtatcaatcatcttgaacaactccttgaggcctccaatctcttcctcagacaggctttcagcaataacccttaatgccatcttcttgagcttgttcattgccgaaaaatgcttcagccttgagagaacagcagaatcaataggcttatcaggtgccacggcatcgtcaacaatccatgcgtgacagagaacctcatgagcactaaatctctttttaggatcccgtgtaagcatattgcagaccagatccttagcactatcagaaatattaggccagggttcagattcaaaatcaagtttgcctcgcagaatctgcctgaagattccagcctcagtttctgcccaaaatgggggcacaccacaaagcaaaatgtacagaattactcctgcgctccacacatcagcttctggaccatagcatttctgaagcacctctggtgcaacatagtatggacttccaacgacatcagagaatttatcaccgggcttgtagaacatggaaagcccgaagtcagtggccttgagtggggcttcctcggcggtgctggcaaaagagaaaattc

SEQ ID NO: 4585 - DNA, 433 bp, Zea mays
  Clone ID: 38LIB3136-056-Q1-K1-F7-R1
cgttgacagatcctgatccagtgtgatatttgggctgctcacagcacaattgggtccaataaagcccagccgggacgcagaggaagaagacccggagctgcgtcttccttccgtttcagcaccgcgcgcaatcggcctctcatcccctcttcctatcgcccgccgccgccgccgccgccgcccgtccgcttcagtacgacgtcgagcaaggggaggtaaaagttcgtttggcgtgcgccatgtttaagaagttctcttcagaagatatatctggacagaatcaagttaaggcttctgtacaacgaaagattcggcaaagtatcgctgatgagtaccccagccttgaacctttgctagatgacttgctcccaaaaaagtcacctatgattggtgttaaatgccaaaatcatcttaaacctgtaaagggggaaaa

SEQ ID NO: 4586 - DNA, 653 bp, Zea mays
  unsure (1)..(653): unsure at all n locations; Clone ID: 39LIB3136-056-Q1-K1-F7-r4A
gtcggagtagctcaaatgcctcaagtaaataaagctnnttagtacttcatctttaaaacgataccagctggtctttagggtcctgctggtttcatatgtccatcaatacgatctgccgcaagttatgaacccctcatagaattctactcattcgagccgttccatcttccataggccatcatttagatagtgcatattgtcaacaccaattcctttgttgatggtccttatgtcttttgctgacatctttgtatatccaattgccagggcgtgttgttttccttcagccattatagccactggtgtttcctcctcgacttcgtcgtctaaggcaccaccaggtgaagtcaacccaggacacattatgtttgcgccagatagaacaaatttgatagcacctctatccacttggaactttttcatgatatcaggatactgatgaagaagacgcagggttggcatgtaaggaccatcacgtatattgaaaaatagaggaacattattcaccactacaagattaagatgattttggcatttaacaacaatcataggtgacttatttgggagcaagtcatctagcaaaggttcaaggctggggtactcatcagcgatactctgccgaatctttcgttgtacagaagcctaaacttgat

SEQ ID NO: 4587 - DNA, 373 bp, Zea mays
  unsure (1)..(373): unsure at all n locations; Clone ID: 3LIB3136-024-Q1-K1-G1-f4A
aagagccgtacacgctgcaaaccaacntgtacgtgcgcggtagcggcgacngcaccatcgtcggccgggagatgcggttccacctatggttcgaccccaccgccgacttacaccactacgccatcatctggaaccccgaccagatcctgtgagctagtctccgtgtcccttcccccggccccctgcgcgccattagctggctgcctgcctgcccggtcactcacatcacatgccatgagctgcgcctgcgtgcaggttcctggtggacgacgtgcccgtcaggcggtacgagaggaaggcggaggccacgttccctgaccgggagatgtgggcgtacggctccatctgggacgcctacgactgggccaccgac

SEQ ID NO: 4588 - DNA, 252 bp, Zea mays
  Clone ID: 44LIB3136-056-Q1-K1-G1-R1
tcgttctgggccagatcaaaacggagtaaccatcacagagagatcaaacatgggcacaacctgggtcttctcgtggcctgtagccgatgggccaacacctgatgcgaacatcgtcggccaactccagggcactagtgttcaagtagccaatactcccgttgtggtgtaccactactccctgggattagtgttcgaggataagaggttcaattgggtccacactccaaatacgacggtcctcccaaataaatg

SEQ ID NO: 4589 - DNA, 569 bp, Zea mays
  Clone ID: 51LIB3136-012-Q1-K1-H8-R1
acctggccaccatccccgtcatcgtgctggtgtgcggcgccgagctgggcagcctcagccgcgacgagctgtggcgcaaggtgtggggggaggccacctacgacctcgccaccgtgctcgccttcctcgccgtcctcgccttcaccatctccgtctacatcatgtccaggcccaggcccgtgtacctcatcgacttcgcatgctacaagccggccgacgagctcaaggtgtccaaggcggagttcatcgacctggcgcgcaagtccggcaagttcgacgaggacagcctggcgttccagtcgcgtctgctggccaagtccggcatcggcgacgagtcgtacatgccgcgctgcgtgttcgagcccaacgccagctgcgccaccatgaaggagggccgcgccgaggcgtccacggcccatgttcgcggcgctggaacgactggtcgaacaattgccgcgtccgggcccaaggacgtggccgtgctggtggtcaactgcagcctcttcaacccgaagccctccctgtccggcatgatcgtcaaccactacaagatgcgcggcaacatcctg

SEQ ID NO: 4590 - DNA, 689 bp, Zea mays
  Clone ID: 53LIB3136-022-Q1-K1-H6-R1
tcttttcattgccctcactaaattttctattggagtagaatttttttctcaaccagcaaggggtctacaccattgtcattgggagccacatctcagccatctaccactacggcttcgcaaaccttatgatgcgcaggtatgttgaggccactcgtgaattcaacaagattcttctgtatatcctcaagtacaagcagtaccaccagaattcccctcagtatgatcagatactgaagaaaaatgagcagatgtatgcattgttggcaatttgcctatctttgtgcccacagaacaagctcattgatgaaaatgttagcacccagctgaaagaaaagtataatgacaagatgacaaagatgcagaggtatgatgatgggataggcgctgcttgtgctgagctattctcgtatgcttgccccaagttcgttagaccgtcgtcttcaattccgggaccaccggctaaccaacctaataccacggaatgcgaaccgtcttcagttggaagttgtttctctatgaagtagagcagcaacagttgctttctgggattcggagttatctgaagctatattcaacaataaccattaggcaacttgcccaatatatggaagtgggatgtagctacactaagggcgatcctgatgacatactagcacaagatgcatgcagttgacagtgaagggaagata

SEQ ID NO: 4591 - DNA, 366 bp, Zea mays
  unsure (1)..(366): unsure at all n locations; Clone ID: 57LIB3136-013-Q1-K1-D12-R1
cggacactgggcgngacacataatggcgtcgtatgcgaaactagagctccaaatatggaaatactgctagtactagtttaccccctatacagacacggatgtctgaagaatccattctatcagtgatagatgccttacattacaagccaaacattgggtttaaacgcattaccgccagaatgtccatcatacgcaccttttgcgaatgaagtaaggaaaccaccggtcctaagcatagcattgagctgtaaaaaacggcatcttagaggaaatcacnacnggancncaaaaaaggccagttcgaaaaagcgtgtggcggacggtgcggggaatccacggaggacaatagaagggaggccgagagtc

SEQ ID NO: 4592 - DNA, 349 bp, Zea mays
  Clone ID: 59LIB3136-023-Q1-K1-G5-R1
cagtgcgccacccgcacccaccaacgaggcaacgaaacccagtcggaagctagaccggcgacaagtgcatcgctcgccgcgatggattctgactacggcgtgccgcgcgagctgtcggaggtgcagaagaagcgcgcgctctaccagcccgaggtgcccccctgcctccaggggactactgtcagggtgcagtatcgtgacgccgcaattgcagctgaccaggcacgcgctcatgtgatcatccatgcgttccctcacacctatgggcatccgcttgcacatttcctcagtaagagggctcttgtccttgattctaaggtcatatctgaagacccggtggtcagggttg

SEQ ID NO: 4593 - DNA, 424 bp, Zea mays
  unsure (1)..(424): unsure at all n locations; Clone ID: 63LIB3136-014-Q1-K1-B8-R1
gtgaagctcgtcctaatgatgagcgaagagagaagctacatgatcgcgagaaggataagcccaagtcagagaacaagaagattctggatgcaaagcaactaattgatatgatcccaaggacaaaggaagagctttttgcctatgatataaactgggcgatatatgacaagcatgagttgcaagagagaatgaggccttggatttcaaaagataattgaatttcttggcgaggaggaatcaactttggtggactatattgtttcctgcaccaaagaccatgttcaggctgaaaagatgctagatcttctacagtcgattttcgatgttgaggccgagatgtttgtcctcaagatgtggaggatgcttatatttgagatcaagaaagtcgaatctggactatcaggaagagcanagtcatgaagcg

SEQ ID NO: 4594 - DNA, 409 bp, Zea mays
  Clone ID: 65LIB3136-024-Q1-K1-E7-R1
gcgacgggcggagttcttcgcaaatatatcccgcactggatacacgcggcgcgccaagcagatagtcagcccagacgctccctcgcctcccattcgattcttgcctcccacgccgccgccggatcccgcgatggccgaccctcggctgtaccccacggagtccgggtccgacgaccggcgcgatgccgcctatcccggctccgaacgcgggctctacagcccgtaccaggacatcaagctcccctatcggcagctctacgaccttcccacctccccggagttcctcttccaggaggaggccgtcgcgcagcacggtcctgcggcgagaacctcacctactacaccggcgtgggatacctcggaggcgccggggccggggccgcgctggggctccgcgataccgcccgaa

SEQ ID NO: 4595 - DNA, 392 bp, Zea mays
  Clone ID: 69LIB3136-014-Q1-K1-D10-R1
cggatggcctgagatgctgatggctaaagaagtggatgaacttgcaaggaagaccctgggaagagatctcatgctatcgatgctttctcccacgctctgcaagccatcccaacaatcatagctgacaatgctggtttggacagcgctgatagaatctcggggctccgagctgagcaccacgaagagaactgcactgctggaatcgatgtcatcactggcaccgttggggacatgcaaaagctgaggattcaagagtcgttcaaggtgccactggccagactcctagtcttgcaggatacctcgagctgggtatgatgcgacaggcacgtagtggggtatgccccgcgcagaagagaggataggatgtgattagacacgctgtttctcggtgt

SEQ ID NO: 4596 - DNA, 603 bp, Zea mays
  Clone ID: 71LIB3136-024-Q1-K1-G1-R1
cagtcaccaagtcctctccggatggcaaggccttgtgaccttccgccggtgcggcaagcagcggctcttctcctggcatgcgcgcttgctctgctcgcggtgcagctgcggccgtgcagagcccagcagcagcagcagcctccgtcgccgggatactacgccagcggcatgttcaggccgctgggcttctccgaggcctaccgcacgctgtggggcgcgcacaccagacgctgtcgccggacggcaagtccctgacgctctggatggacagcagctcgggcagcgggttcaagtctgcgcgggcgtaccggaacgctacttcggcgcgtccgtcaaggtgcagccggggtacaccgccggcgtcaacaccgccttctacctgtcgaacagcgaggagtacccggggcaccacgacgagatcgacatggagctgcttggggaacgttcccggggaaaccgtaaaaccttgcagacccaacgtttacgtgcgcggcagcgccgacgggcaccatcgttcggccggggagatgcgggttcgaacctctgggttcgaaccccaccggccgactttccaccaactaacgccatcaatcctggaacccc

SEQ ID NO: 4597 - DNA, 176 bp, Zea mays
  Clone ID: 75LIB3136-014-Q1-K1-G10-R1
aaaatggcagatcttcactgcagggtctgcttggcagaaagcattcgtagtcatagtattagctgttaataatttgactgagcaagtcaagcgttgatctgtgttctagtaaaatttaaaaaaaagaaaaaaaaaactaaaagaaaaaaaaaagacagaaatataaaaaataaaaa

SEQ ID NO: 4598 - DNA, 648 bp, Zea mays
  unsure (1)..(648): unsure at all n locations; Clone ID: 77LIB3136-025-Q1-K1-A11-R1
aagaaacaaagagaggaaagtttaagcccatcanaatcaaggtcagcaagggctggttcaagatcaccacgccatcataagggaagcaaatcatcgccaactcgtgaccgtcattctcgccatagcaggcattcaaggtccagatctcctggcagaaagcaccgtcacagtgataaaagggacagcagaaagtctgagattcaggacgacaaaagaagatctcatagaggtagcagacacgacaaagatgaaagttcagtaaaggacgaaggggaaagatctcatagaagcaatagaggtgacaaagatgaaaggtctgtaaaggatccagtggaagataaagggatggatactaaagttgttgcacataagaggagctcaacagtatctgaagatgaaattctgaacaacaatagtagtaaccataagaaatattgacatggaagtggtttggaaagttgatggaaatgatgtgtgctctgctgcagctgacattgataggtaacatgaaactggagtagatggctctttggggggcgctgcagaatcagctatgtgatggctgctgtatcattgaatttgctgtttacagatggattgatgatgatggagaatgctgaactggtgtttattatctccttttctgat

SEQ ID NO: 4599 - DNA, 665 bp, Zea mays
  Clone ID: 79LIB3136-003-Q1-K1-B9-R1
gaagttgtactagctttggaatatttgcactctatgcacatagtccatagggatctaaagcctgacaacttgttgatagcccatgatggacatattaagtggggcttcactgtatggagatgatgagcctcagatgaatgaattcgagcaaatggatcaccgagcacggagacaaaatcgttctgctgttggaactcctgattatttagcaccagaaatcattttggggacaggacatggttgcagtgcagattggtagtccgttggtgtcattctatttgagctcattgttggcatacctccgttcaatgcagaacacccccagacaatttttgacaatattctgaattacaaaataccttggccgcatgtcccggaagagatgagttttgatgcacaagatttaattgacaaattattgaccgaagatcctcatcaacgacttagagccaattgccgctccgaaggttaaccaacatccatttttcaaagacattagctgggataccttgctaggcagaagctggctttgttcctcctcagataatgcatttgatactagctacttcaccagtcgctattcctggaatccatcagattggaacatatatgaagcatacgagtttgaggaatccagtgataatggaagccttagtggaagcagt

SEQ ID NO: 4600 - DNA, 631 bp, Zea mays
  unsure (1)..(631): unsure at all n locations; Clone ID: 7LIB3136-003-Q1-K1-B9-r3A
aaatgtccatagnaacaaataggnaactaatattgtgcaagcaggntcttaggtgcagtttgcaagcaagcattctgaacttttagacggtgatccaaccgctgcacgcttgaacgagaagttgctgaaagaataattgacatttgcactagattcaaactcattgaggccatcgctgacctccgtcatgtcatcttggcggttgctcagacaactactgcttccactaaggcttccattatcactggaatcctcaaactcgtatgcttcatatatgtttccatctgatggattccaggaatagcgactggtgaagtagctagtatcaaatgcattatctgaggagggaacaaaggcagccttctgcctagcaagggtatcccagctaatgtctttgaaaaatggatgtggtttaacctatgaggcgccattggctcctagtcggtgatgaggatcttcgagcaataatttgtcaaataaatcttgtgcatcaaaacttatctcttccggaacaggcggccaaagtattatgaaattcagaatattggcaaaaattggctgggggtgttctgcattgaacggaggtatgccaacaatgagctcaaatagaatgacacccaacggaccacca

SEQ ID NO: 4601 - DNA, 358 bp, Zea mays
  Clone ID: 81LIB3136-014-Q1-K2-A4-R1
cgttggcggcggtgctggactactcctacccgccgctggcggagaccagcgaggcgacgttcgacgccgccttcagcgtcaacacacggggcaccttcctgtgctgccgcgaggcggccaggcggctggtgcgtgacggccgcggccgaatcgtgacgttctcttcgtcgggagttgggtctctgcgccctggctactcggcatacgcagcaagcaaggccgcggtggaggtgatgactaagatcctggcgcgcgactgcgcggcacggggatcacggccaacgtggtggcgccagggtccacggggacacccatgatgtacaccggcaagacggaggatgacatggagcgatacatc

SEQ ID NO: 4602 - DNA, 428 bp, Zea mays
  unsure (1)..(428): unsure at all n locations; Clone ID: 83LIB3136-025-Q1-K1-B4-R1
ctgcctcgaggttgcgtgttttgttctctgtgagcgtcgtgggtgttgatggcgtcaacggcgtactcgcggccatccaagccgcctgggccggcggccggagacaggagcggaccgcggctggccaaggagctcggcaggatcgagcccaagaagctgggcatcgggctggttgccggctgctgcttcgcgctgctcacctacctctcctttgcccggctgtttgccatctactcgccggttttcgacagctcgtcgtccatggtgttgaagaacatgccgccagcaacgacgacggtgccgggtacagctacaggggcgctgccggtggaggagcagaaagaggttcgtgaccctgaggcggacccgcacatgccgaacttaccggnagtcacagaaaaggatcagcaggaggaagccacggcgac

SEQ ID NO: 4603 - DNA, 551 bp, Zea mays
  Clone ID: 85LIB3136-003-Q1-K1-G2-R1
cagatagtagtgtcgcttggagcaggtccatgggacgctctgtatggaggagggaataccccggcgttcgtcttggcttcggtcttctccctggcagcaggtgtgctcgcagttctcaagctgccaaagctgtccaactcgtaccaatctgccgggttccatggatttggctgatgctcatgcccaaaacacccccgtctgccatgtaaaacatcacaccaacacttggccccattttgccattcgtttacagagaaatgattcttttttcctcgtacaactacagaataatgacagtgaaagtaggagtttaggtgagagagagaggctaggtaggttgatgtgaaggtgtaaaagctgtatcctcctttttttgattttgcttttgtttttgacagtgtatgtaagagctgtccacaagaaaatttacaagtggtggtactggcaaaaaaaaaagaaagaaaaggaggggggagggaagagggagagagaaggaggagaggaggggagaggagggagagatggagaaaaaaaaaaaaagggggggcccc

SEQ ID NO: 4604 - DNA, 662 bp, Zea mays
  unsure (1)..(662): unsure at all n locations; Clone ID: 87LIB3136-014-Q1-K2-C8-R1
ctcttcgtgcacatcgtcatggagctctgcgccggcggcgagctcttcgaccgcatcgtcgccaagggccactacagtgagcgcgcggctgcgaagctcatcaagaccattgtcggggtcgtggagggatgtcactcgctcggcgtcatgcaccgggacctcaagccggagaattttctctttgccagcaccgccgaggaagccccactcaaggccactgacttcgggctttccatgttctacaagcccggtgataaattctctgatgtcgttggaagtccatactatgttgcaccagaggtgcttcagaaatgctatggtccagaagctgatgtgtggagcgcaggagtaattctgtacattttgctttgtggtgtgcccccattttgggcagaaactgaggctggaatcttcaggcagattctgcgaggcaaacttgattttggatctggaaccctggctaatatttctgatagtgctaaggatctggtctgcaatatgcttacacgggatcctanaaagagatttagtgctcatgaggttctctgtcacgcatggattgttgacgatgccgtggcacctgataaagctattgattctggctgtctctcaaagctgaagcatttttcggcaatgaacaagctcaagaagatggcataaag

SEQ ID NO: 4605 - DNA, 667 bp, Zea mays
  Clone ID: 89LIB3136-025-Q1-K1-C11-R1
ggagagagatgctgccgtggggagagtcagggaccagttccccgtcggcatgaaggtcctcgccgtggacgacgaccccgtgtgcctcaaggtgcttgagaacctcctgcgccgctgccagtatcatgtgacaacgacgaatcaggctgttgtcgccttgagtatgctgaggcaaaacagggacctgtttgatcttgttattagtgatgttcacatgccagacatggatggctttaagcttctagagcttgtggggcttgaaatggacctccctgtcattatgttatcggtgaatggagagacaaaaactgtaatgaaggggataactcatggtgcctgtgactatctcttaaaaccggttcggctggaagagcttaggaatatctggcagcatgttgttaggaggagattcagtaactgtgattcgtgctaacaatgatggctattaggagtggcataaggccatcaaatccaggatttgatcttgctcacacccaattaacagctgggccacctgacccaaagtgggaggcccagcaaaaaagagaaggaatatcatagtgaagaggtagatgaaggagaagagattaatggccaagataacgatgatccttcagctccaaagaaaccaaaggttgtttggtcagttggactgcaccgaaaattt

SEQ ID NO: 4606 - DNA, 183 bp, Zea mays
  Clone ID: 8LIB3136-052-Q1-K1-G6-R1
cagacattgcgcgtatcaagttcgtatgtgggtgtgctattaacgtactagtagtatacgctcacgtgtatctggctcagcttatgacgattaatgctcttctgtcgatactacttgggagtggcatgtccttcactatgtggggtgcccttgcggtacatgtgcagccgtgtgtcatgagtg

SEQ ID NO: 4607 - DNA, 632 bp, Zea mays
  unsure (1)..(632): unsure at all n locations; Clone ID: 91LIB3136-003-Q1-K1-H8-R1
acgctcctcgccatcacataaaaccagtgcaagcagaagcagcgcaatggcgagcagcaccatggccctctcctccacagccttcgccggcaaggcagtgaacgtgccgtcgtctctcttcggcgaggcccgcgtgacgatgcgcaagacggcggcgaaggcaaagccggcggcgagctccggcagcccgtggtacggccccgaccgcgtgctctacctgggcccgctgtccggcgcgcccccgagctacctgacgggcgagttcccgggcgactacggctgggacaccgcggggctgtcggcggacccggagacgttcgccaagaaccgggagctggaggtcatccactcccgctgggccatgctgggcgcgttgggctgcgtgttcccggagctgctcgcccgcaacggcgtcaagttcggcgangccgtgtggttccaagccgggtcccagaatctcaaccaaggttgggctggactacctcgggcacccgagcctgatccacgcgcagacatcctcgccatctggggctgccagtcgtgctcatggcgcatcgagggtacgcgttcgcgcgccgctcgaaagtcgtcaccgtctacccgcgcacttgaccgtcgctcgcacgacctag

SEQ ID NO: 4608 - DNA, 671 bp, Zea mays
  unsure (1)..(671): unsure at all n locations; Clone ID: 93LIB3136-014-Q1-K2-E9-R1
agagatacaagcaaagacaccaactcgtacnatccttcaacaatttgaaaaatccagctaacccaaagattcactatgagactactgggcctgaaatctggaaagctacagcaggaaaaattgatggccttgtatctggtatcgggacaggaggtaccatcaccggtactgggcgatacctcagagagcaaaatcctaatgtcaagctctatggtgtggagccagtggagagtgctgttttgaatggtggaaaacctggaccacacaagattcaaggaattggagctggttttatccctggagtcttggatgttgatctccttgatgaaactctacaggtttcaagtgatgaagctatcgagactgccaaggctcttgctctgaaagaagggttgttggttggtatcctctctggtgcagctgcagctgcggcagttaagcctgcctagaagccaggaaaccgcgggaaagcatattggttgtcgtgttcccgaccttcggccagcgctacctctcatcggtgctgttccagtccatcaagaagaagcggagagcatggtggtcgagccctagagcancaaattctgggcttctggcaaactatttcctgagacgttcacatttccatcacagaaaaataaagctcgggtgccttctgtgatttcgacgta

SEQ ID NO: 4609 - DNA, 728 bp, Zea mays
  Clone ID: 93LIB3136-022-Q1-K1-H6-r4a
caaaagagagcaaaaaggaaacagtgacatttctctccatgatcgctatcagatttcagtcaagctgtacctttttcagttcaccaatcatttcctcaaacttcaaaatttgtctcaaaaagtaatcaccatgacgcttggtaggtttggactccacaacatgaatcacatcctcgacgatgtagaagtcaaagtctgcacttgatactatctttccttcactgtcaactgcatgcattttgtgcttgtatgtcatcaggatcgaccttagtgttgcttcatccacttccatatattgggcaagtttgctaatggttattgttgaatatagcttcagataactccgaatcccagaaagcaactgttgctgctttacttcatagagaaacaacttcaactgaagacggtatgcatcctggttatagtttgttagcggctggtccagaattggaggcgacggtgtaatgaacttggggcaagcatacgagaatagctcatcataagcagcgtatgcttcatcatcatacctctgcatctttgtcatcttgtcattatacttttctttcagctgggtgctaacattttcatcaatgagcttgttctgtgggcacaaagataggcaaattgccaacaatgcatacatctgctcatttttcttcagtatctgatcatactgaggggaattctggtggtactgcttgtacttgaggatatacagaagaatcttg

SEQ ID NO: 4610 - DNA, 218 bp, Zea mays
  Clone ID: 95LIB3136-025-Q1-K1-H5-R1
taatgttgcccagtgatgttgagaactgtgcagtagaagcgtaatgtacaatggtgtttaatgtgggggctcttagagtgttttagggagttatttgtagaaaaaatcttagagccgtctctccgtgaagagacgcctctggctcgtaaaccaattaacaacaagaaaaaggaggatgaggaggaaaggagagggggaggtgaaaggaaagggggggg

SEQ ID NO: 4611 - DNA, 556 bp, Zea mays
  unsure (1)..(556): unsure at all n locations; Clone ID: 9LIB3136-024-Q1-K1-G1-r3A
gaaggtacacggagactagctcacangatctggtcggggttccagatgatggcgtatttatgaagccggcagtggggtcgaaccagagggggaacctcatctcccggccgacgatggtgccgtcgcccgtgccgcgcagtacaacttggctgcacgggacggctcccacgcaccgtccccagcagctccatgtcgatctcgtcgaggtgccccgggtactcctcgctgttcgacaggtagaaggcggtgttgacgccggcggtgtaccccggctgcaccctgacggacgcgccgaagtagccgttccggtacgcccgcgcagacttgaacccgctgcccgagctggtgtccattcagagcgtcagggacttgccgttcggcgacagcgtctggtgctgcgcgccccacagcgtgcggtaggccttggagaagcccagcggcctgaacatgccgctggggtagtatcccggcgacagaggctgctgctgcttctgggctctgcacggccgcagctgcaccgcgagcagagcaagcgcgcatgccaggagaagagccg

SEQ ID NO: 4612 - DNA, 215 bp, Zea mays
  Clone ID: LIB3136-003-Q1-K1-B9-f4a
aaacttctcgttcaagcgcgcagtggttggatcatagaatctaagttggaaatgcttgcttgcacgcttgttcctaagacctgcttgcacaatattcgttccctatttgtaaatatcaacatttgcaattgcaatgttatcgcaatagcaattgtagtactgctgtacctgtgagccagatcttgaatgctacaaaggcagtatcctttcttttt

SEQ ID NO: 4613 - DNA, 342 bp, Zea mays
  Clone ID: LIB3136-003-Q1-K1-B9-f5a
attccagtgataatggaagccttagtggaagcagtagttgtctgagcaaccgccaagatgacatgacggaggtcagttatggcctcaatgagtttgaatctagtgcaaatgtcaattattctttcagcaacttctcgttcaagcgtgcagcggttggatcaccgtctaaaagttcagaatgcttgcttgcacgcttgcacctaagacctgcttgcacaatattcgttccctatttgtaaatatcaacatttgcaattgcaatgttatcgcaatagcaattgtagtactgctgtacctgtgagccagatcttgaatgctacaaaggcagtatcctttcttttt

SEQ ID NO: 4614 - DNA, 605 bp, Zea mays
  Clone ID: LIB3136-022-Q1-K1-H6-r3a
aacaaaaaaaaaaaagatggggtttcaacggagtacaaaagagagcaaaaaggaaacagtgacatttctctccatgatcgctatcagatttcagtcaagctgtaccttctccagttcaccaatcatttcctcaaacttcaaaatttgtctcaaaaagtaatcaccatgacgcttggtaggtttggactccacaacatgaatcacatcctcgacgatgtagaagtcaaagtctgcacttgatactatctttccttcactgtcaactgcatgcattttgtgcttgtatgtcatcaggatcgaccttagtgttgcttcatccacttccatatattgggcaagtttgctaatggttattgttgaatatagcttcagataactccgaatcccagaaagcaactgttgctgctttacttcatagagaaacaacttcaactgaagacggtatgcatcctggttatagtttgttagcggctggtccagaattggaggcgacggtgtaatgaacttggggcaagcatacgagaatagctcatcataagcagcggatgcttcatcatcatacctctgcatctttgtcatcttgtcattatacttttctttcagct

SEQ ID NO: 4615 - DNA, 262 bp, Zea mays
  Clone ID: LIB3136-024-Q1-K1-E7-f3a
ggggcgagaacctcacctactacaccggcgtgggatacctcggcggcgccggggccggggccgcgctggggcttcgttacgccgcccgaggcgccgagccgggggagcccttcaagatccgggccaaccgcgtcctcaactcctgcggcagctccggacgccgcgtcggtaacacgctcggggtcatcggcctcatgtacgccgggcacgagagcgccatgggcggcgtccagctaccgtgacaacggcatgaacaaggact

SEQ ID NO: 4616 - DNA, 250 bp, Zea mays
  Clone ID: LIB3136-024-Q1-K1-E7-r3a
ccgataggggaggtggaggtcccgggacgggttgtagaggcggcgctcggagccgggataggcggcatcgctcctgtcgtcggacccggactccgcgggggacagtcgaggggcggccatcgcgggaaccggcggcggcgtgggaggcaagaatcgaatgggaggggagggagggtttgggttgcttacttgcttggccgcgccgcgtggatccagtgcgggatatatttgcgaagaactcccccgtcgc

SEQ ID NO: 4617 - DNA, 745 bp, Zea mays
  unsure (1)..(745): unsure at all n locations; Clone ID: LIB3136-052-Q1-K1-G6-f3a
agagcagaaggaggggggctatnnncaacaacatctatgcatnctgggggnngatnnctgttgtttagttctattcatccgagagtcgtgatgatagccaaaagctgtttgctgatgcattggtaaagaaagcatatgataactggatgtatgtcattgaatatgatggcaaaggtctattgaaccttaaaccaaagaaaaaggctgcatccactggtcaagctgagacgcatgcttctgcgggtggttcgacttcgtatcaacaacacctctcctcaacgagcatgccagggtcatcaccatcaggtggaactgattccgtagggtatggtgtcgaccaatcagcaacacatctatctcaactccagagttcatccaccaatctccagacgccatacgatgacacattttcgttcctaccacctaacctgctgacagggtctgcaaacgatgccatgggtctggaactgggccagttgcaccaagtaatttctcagggccagccaattcagccagcaaacgtgggatacgttgactggcccaggaaccgcgacagccagtacgccgacgacttcacagaggacattcgcgtgaagagccaccagatgctcgagagcgaggacatgcagcagctgctgagggtcttcagcatgggtggagcctccgggagtttgtcaaacgacacgttcaacttccagccctacatgccctctcccttgcccaaccccgggttcgaaagcgagcg

SEQ ID NO: 4618 - DNA, 516 bp, Zea mays
  Clone ID: LIB3136-054-Q1-K1-E3-f4a
ccaccgcggccggggaacaaagaagcaggaacttgtgaacaagaacctgtgcaccgtatacacccagcaaatacgttgcttcaagggcgccgagtcgttcctgggcgagaagtactgcaccgacatcgggtcaagcacgagcagcatgggttcgctggagcggatggcgcacactgccgtgcacgtctgggtcggcaaggcgggcccgacgccttcgtcggaggcgtgcagtgccgctaccggcggcttcccgaaccacaccaaaggcgggtacagctgcaacaacgacatggggttcctggggtcggcgggacacgacccgctcttctactcgcaccactccaacgtcgaccgcatgtggcacatctggtcgaccaggctcggcggcgggcagggcatcacggaggcggactggctcgacaccagcttcgtcttctacgacgacgtcaagagcccgcggaaggtgcgcatcaggttccgcgacgtcctggacacgcgcgaccttggctacacgta

SEQ ID NO: 4619 - DNA, 327 bp, Zea mays
  Clone ID: LIB3136-054-Q1-K1-E3-f5a
ggacggacagccaaggaacgcgttaacaagaaccagggcacaccagtacacccacgaaagacgtgtttctggggcggtcgaacagcgcctgggcgataagagactgtacaagagtgggggcaccaccaagcaggacggcgtatcctaagccaaaacggcacactgacaggcacgtctgcgacgagacggccgaccccacgccttcataagaagagggccatgccgctacacggggctaacataaacacaacgaacgcgggtacaggtgcaacaacgacacgggggtcatactggcagcaggacacgaaccgcgcttgtactatgacc

SEQ ID NO: 4620 - DNA, 468 bp, Zea mays
  Clone ID: LIB3136-054-Q1-K1-E3-r4a
tacctgcatcgctttgaccgcgggcaggttgatggcgacgacaaactcattgctcgcctgggggtaagacccaacgccctggatcaccagcagctgatgcttcacacggtccttggccggcacaggcacaggcgggacctgcaccacctggcccttgctcacggcgagcggaaacgccggtgccggcaccatactaaacgacgatgaccttggcagaccgaccttgccgtggggcaccagcgacgacaccatgcagtgcagtcatggcacgacctcgacggactccgcagtggacacatatccgaggccaggcgtgtccaggaccatggcaaacctgatgcgcaccgtccggagactatcgacgtcttctacgaagacgaagctagcgccgagccagtccgcatacgtgatgccatgtccggcgacacagcctgagctaccataagtgccacatgcggactacgacaa

SEQ ID NO: 4621 - DNA, 666 bp, Zea mays
  unsure (1)..(666): unsure at all n locations; Clone ID: LIB3136-054-Q1-K1-E3-r5a
gacggcgaagctacggcgactgcttgtactggggcctcctgcaacgcttgcccggggcaggcttattttacgtccaacttattgttcgctgggggtcgtactcgatgccctcgatcaccagcagctgctccttccccgggtccttggccggcacaggcactgccggcacctccaccacctggcccttggtcagggcgagcgggaacgccggcgccgccgcctttctcgccgacgatgacctcggcgggctgtgcttgccgtggggcaccagcgacgagatcttgcagcgcagccatggcaggtacttgtcggactcggcgtactacgtgtagccgaggtcgcgcgtgtccaggacgtcgcggaacctgatgcgcaccttccgcgggctcttgacgtactcgtagaagacgaagctggtgtcgagccagaccgcctacgtgatgccctgcccgccgtcgagcctggtcgaccagatgtgcacacatgcggccgacgttcgagtggagcgagtagaagagcgggtcgtgtcccgccgaccccaggaaccctatgtcgttgttgcagcatgtacccgactttggtgtggttcggaaagccgccggtagcggcactgcacgcctccgacgaatgcgtctgacccgncttgacgacccagacgtgcacggc

SEQ ID NO: 4622 - DNA, 295 bp, Zea mays
  Clone ID: LIB3136-056-Q1-K1-B10-f3a
ggcgggttcggcggcatccgcgtgctcagccgcccgcagatccccgtcccgttcccgccgccggccgtttattacaccgtcctcatcggcgactggtacaaggccaaccacaccgacttgcggtacgtgctcgacagcggcgtggcgctcgggttccctgacgggctgctcatcaacggccggggcttgaatggctacacctttaacgttcagcccggccggacgtaccggttccggattacgaaacgtgggctggccacgtccctgaacatccggttcagggcacaccatgaag

SEQ ID NO: 4623 - DNA, 512 bp, Zea mays
  Clone ID: LIB3136-056-Q1-K1-B10-r3a
cgcccggccgcacaggagcgcgttcttggggatggggtactcgtcgcgcaacgacgtggacggcgtccagacgcggagtgattatactgctgccccaggtactgcctggcccagttctccgaccggacgttccacatgcccacgttgtccaggggcatgtagatcgccgtccacgatctggggtacacctgaacagtgtaccgcgaaacgccgtccctcaggttgtagccctgcctgcttgccgacgaccatttccctccatccatcccgacgacccagaaggcgtatccgtcgatgtgccacgactgcacctcgtcctcgccgttctcgaacacgacctcgacgtagtccctgtagctggcgcccatgaccgacgtccgcaggtaggcggcgccgccgtaggcgggggggctgtcggcgatggtgcccacggagaagacgccgccgatcttgtagtagtcggcgaccttgagcggggtgtcggggcccacgtacgacacgccgttcaccgc

SEQ ID NO: 4624 - DNA, 318 bp, Zea mays
  Clone ID: LIB3136-056-Q1-K1-G1-f3a
ggacaacttgcgagggcaatgggtactgtcaaacgcactgaagttgtgtacaaagacaataccaggatctcagatcttttaatacatgcctatttcgctccagtgaattaagcctactacaactagtgtttatgaggctactgcatccgattaacctccccaaggcgtgagctttatgcagtcatttagcctggagtttgtatccgtgtcacctagtactttacggtaataataagagactgtatctgtatgtttcggtaaactagagttctggtcacctcttgtactcttttgtattttaatgaaatttagaatccg

SEQ ID NO: 4625 - DNA, 243 bp, Zea mays
  Clone ID: LIB3136-056-Q1-K1-G1-r3a
tgggaggtcccttgtatttggagtgtggacccattgaaccttttatcctcgaacactaatcccagtgtgttttggtacaccacaacgggagtattggctacttgaacactagtgccctggagttggccgacgatgttcgcatcaggtgttggcccatcggctacaggccacgagaagacccaggttgtgcccatgtttgatctctctgtgatggttactccgttttgatctggcccagaacga

SEQ ID NO: 4626 - DNA, 474 bp, Zea mays
  Clone ID: LIB3136-008-Q1-K1-E8-F2A
aggaaaatcgggagttccccttagcttggataggctgtctggaaacaccagtcttattattcggatgtataataattacaaaaaacaccatcactgagttttgcaacaacggcaaaactgacacaggttggtatagttacaaaaacaccatcactgaattttgcaacagcggaaaaactgacacaagtttgcgtgcccaattttttagtgtacaacaagggccatgcatagcaatcccattattacttttcggcgaagtgcacagtggggaagtcctgtcactcctcgatcctgctttgattcctctgctgaccaccaaagatcaaagatttagtctttcaatataccaaattgccgtagagctgactttagattgtctggaccatatccctcaattgaagcaattccttgtttgtcaaaggatacaacatcttgggatgaatagcttctgttagcatgaacttggtttggagc

SEQ ID NO: 4627 - DNA, 385 bp, Zea mays
  unsure (1)..(385): unsure at all n locations; Clone ID: LIB3136-008-Q1-K1-E8-R2A
tcctgcacgtaccggncaatttctgnctcgacccacgcgggcgcgactcatgtttattttactttcaattattttcaaggaggttttatcaattgcgcattgattgaaccatttggacggacctttattgaagctggtgggggggtctacccatggttgccacccgaaatggtggccctgtggacatacatcgggttcttgataatggaattcttgttgacccccacaatcaaaatgaaatagctgaggcactttataagctcgtgtcagataagcacttgtgggcacaatgtcaccagaatggactgaaaaacatccataaattctcatggtctgaacattgccagaactatttggcacgtgtagtcactctcatacctagaca

SEQ ID NO: 4628 - DNA, 364 bp, Zea mays
  Clone ID: LIB3136-018-G10-R5B
aaaatgtatcccctctgtcgaagtcgttatcacagaaacatcaccagtgggcagtgaatacaagaaaccatagtagaaaaaggaacagaactgcaggcaacgacagtggctgcaccttgccggccggcgaggcgagacgagacgactgatcgggcagcttgcatgtcgctagttgggtatctccctcccggcaagccgacggcggccggattattgccgctgacgtctgacggtgatacatggccgatcaagaagacaagaacgaaaacaaattcaaatacagtagaatagagaatagatccacatttattcttcgctatatatatagctggccgtcgtcgtcgatcaggcgccactaatggtc

SEQ ID NO: 4629 - DNA, 490 bp, Zea mays
  Clone ID: LIB3136-018-G10.R6A
accactaaggaaacttgccttcctttcttgtttgcccttcctttctgcaactattatcccacaaattgttctcatatcttccagtccatctatgccttgtaacaccacgatattgagatgctctttgcccaaaagtgtcaatagatttgcgaggaactggttctctagcatgagatttcgccatgacccgtttcctactatcctcattcacttgaacagaggaaattgcacccaccccattttgcacactggggctcatagtgagggacaaagattggaaattgcacccattagcctcatttgaaggttttccatcagaagaatactgggtttgcgccaaccaggacttgtacatgccattggtggggataagagcatgtgagttatcattatatgcatggaaagaatggagcaaggaagaaggttttgtgagactttccccagtttcaatctttgaattgttggtgcaaaagcttgttgccacattaac

SEQ ID NO: 4630 - DNA, 568 bp, Zea mays
  Clone ID: LIB3136-034-Q1-K1-F8-R2
gagaatatgtgtctcttggcaaggttgaatacggctctagacaacaagcaactatgtggagaacatgatggcttatgccgatccatttcataactactgggttgccctggatgttccaacgcaccaagccttggagaagagggctcaaaattccgggataaactatgaaggctttgcaaagctttgccaaaacgaccgaccaattaacgaggctcagcactcgctatcaaaggccgcaaaagcagcgaggctccataaattacaggtgccaacgaagatcgtgctgttgcctgaaccgtgcacgccgtgatccggactggagaccgcagagcttaaactgaagagggagcagataaaggccatattcaaagacgatctggacaagctctaccactgaagaagcgacagaggacgggttaatttgcacctaccgcttccagacgctcgcggtgccaaaagctggctgcatggaactcatactgacctgcacgagtgacgtgagcgtgtgtgtgtgactgccatctggcgatacacaggactacaggagctcggttcttctgtgaagact

SEQ ID NO: 4631 - DNA, 752 bp, Zea mays
  Clone ID: LIB3136-056-Q1-K1-A2-R2
gacgtctcgccctcggcttcttcctcccctccctgaccgctgccgcgacctctcggcgaaaccctaacctaccttagaccccgccgccgccgccgccgccgcccaagggagagagagacttgcacatcaaagggcgtccgatggggaagaagaagaagcgcgtcgataaggtcttctgctactactgcgaccgcgagttcgacgacgagaagatcctcgtccagcaccagaaggccaagcacttcaagtgccacgtatgccacaagaagctctccaccgcctctggcatggccatacacgtcctccaggtccacaaggagtccgtgaccaaggttcctaatgcaaagcctgatagggagtcaacggagatagagatatttggaatgcagggaattcctgcgcatgtattggctgctcattatggagaagaggaagacccttcaacaaaggtacccaaagtagaagtgcctcaggtaaggcctgttattatgcctaattcgctaggcatggcatttcctccgcgaccagcttatggtgtggcacctccaatctataatcctgcactcaatcctttgatggcccggcctccaatttggcctgctgcaccagcgcaagcttggtattcgcaacaagcagcatatccacaacaatcagctgtttcagttcctcccatagttgctgggctcccaccacaacagccactattcccaattcagaatgtgcctactcctatgacatcagcagctgctaat

SEQ ID NO: 4632 - DNA, 251 bp, Zea mays
  Clone ID: LIB3136-008-Q1-K1-F8.F1
gatgacgaccgatgtatttgtcaaacaaaacttccatctttgaaaatgccatttacattttacagcttcgacccaaacaatacagaccgaagacgatgcacaacaaaatgccaacaaatgcctgcacaaacaaccaatacctaatatgtacagccggtaccttccggggaaggaaaatttctctccctactctatagtatagcggcagaggacatctgcggctagcgaatgcagttgggtttcttgtgcac

SEQ ID NO: 4633 - DNA, 214 bp, Zea mays
  Clone ID: LIB3136-011-Q1-K1-G4.F1
atcattaagaaatggtttcatgcatgagaacgtgtttacagatccgtttgatataattcaaatggaggagacctaggtgcctacctcatgggacaacagcgcattttacaacaaagatcagtaatagtacaaacctgaaatcaacaacaacaagaacaacaagacaacaggactccggaatagcatagcacatcgtcttcagcgcctaaaatct

SEQ ID NO: 4634 - DNA, 406 bp, Zea mays
  Clone ID: LIB3136-017-Q1-K1-E10.F1
agcatagcaacaaaagtggcttaatagatgttcagttcacaattgagcgatactacagtcaaagatgcacaacacatgacactagcttgtacacagtaaaattcttctctggtacacatcaggagaagaaacaaaactcctgcgctctcttatttaaccaagatcagggactatgaggtagtcctcgtcgtcggtgacctcgatccgggccttcttgctctggcgaaccccagcgccgccgccgccgggtatatcggccggcctgtagtacgccgcgtcgttcgccgcctggtatccgaaaagctccggcacctccgccaacgtcctgctggctttgggcgcctgctcgtggaagaggtcgatgtcggcgaaccactccagctccttgaacccgagcgtcggatcc

SEQ ID NO: 4635 - DNA, 147 bp, Zea mays
  Clone ID: LIB3136-019-Q1-K1-C9.F1
tttttttttttttttttttttttttttttttttttttttttttttgttgggtttgtacgttgtttttaggagggaggtgggtagcggtagttggttgtggtgtggagcccaaaaaaagaggcacgagaaaaaaaaaggggggggccc

SEQ ID NO: 4636 - DNA, 309 bp, Zea mays
  Clone ID: LIB3136-020-Q1-K1-F12.F1
gccttaaaaagatagccacgatctatgaatgttaagcgcagaacaacctcaagcagacatttaaacgtgcttacattcttctcttcttcttctccttgtatcgtgtgagagcgctatctcggcttcctccagctaatgagccttctggaccaggagaatgccagggcggctcgcccactgaggagaatttggtgacaccccactagtcgttggcgatctccagcgctgttctcaccagttcaaaccagactaagggatgggatatactagatctggccgttctaacaggaatacaaaggtgtgaatcag

SEQ ID NO: 4637 - DNA, 368 bp, Zea mays
  Clone ID: LIB3136-003-Q1-K1-C1.F2B
ctgtgaaacagatatttcatgtaaccaaacacaggcaaaactgttccctcaatcagcaggttcctgcctccacctgcggcttttatttcacactttatttatgggctgaatcgacaaagagacccctagatccatcacaaatgtcactacattgagaaccaggtcgctagccctgggaacatggagcctgccactgccattgtgggtcaaacggtgtgtgatcttgcctcagttatgcgcagctgccaagttgcggatgacataagggaggatgcctccatggatgaagtacgccagctccacctcaatgtcaaagcgaacgatgcaagtgaaagatttcccattgtcaggtgaaacagtcacatcct

SEQ ID NO: 4638 - DNA, 361 bp, Zea mays
  Clone ID: LIB3136-006-Q1-K1-D7.F2B
cataaactatacggacgcatgctatgcttgatttcaacatttgcgattggattatggcaccagggcatcggggcacagctcatagtgtatcccggttaacaacatacaagcgccatctggcgaactaagctccctaggaaaaatgctagtgtacatgacattgggtgactaaagccatcagttttatcaccacaagaagccccattgacaggccttacacaaactctctggtatagaggagcaaaatgctctcagctttgcaatggacagctttgactgcttcccaccaccaccttcagtagagttactcatgagtcaagcctggtcaacaagtcatgtttgatttcctgaagaatggatg

SEQ ID NO: 4639 - DNA, 321 bp, Zea mays
  Clone ID: LIB3136-007-Q1-K1-G8.F2B
cttaaaacctcccatattcatggcaacagattattgccacgacttttgtgaacaaacaacagattatggcaaggcctttacggcattgatacagccgtgcgacgagtattacacttctccttttctgcactcgccattttgtattgagcgtggacatggatccattacggggacagcagaaggctaaaacctactacaacagagaacgtgccatatacccagacttccgacctgccaatatgagctaggcgctttcttccacctacaaacaagaactgctgatgcccgaactgctaacgaggcaagggaggacgaacacct

SEQ ID NO: 4640 - DNA, 241 bp, Zea mays
  Clone ID: LIB3136-012-Q1-K1-A5.F2B
gcaatctaacataatccatctttttctgcggtagcgtaagtaatccggatagtttctctgcgttgttcaacggcacatcgaatatacacgtgtctccatttacaggatgaacttgcgcgtcatgctgtacgcggattttatcatgttccagactctacattttaacaggggaaccatacttttttgcagcttaactaggacagccatcatggtataaagaatgcctaatacatacatatac

SEQ ID NO: 4641 - DNA, 769 bp, Zea mays
  Clone ID: LIB3136-037-P1-K1-E4.F24
cttctaatgttttggagaggaaccatcatttggtcatgccactgcagaggacttaacttttagctatactgttgctagctctgctatccaagatacacctgctcggatgtcaggagacggtgtggtttctgtgaacaacatatccaatgtggccaatgacatgcgtagtccttgtgactgtgatgaatttctatcggagttgtctagatttatgaatgattctcctctgcgtaacactcctcttggagagtgctctggtcttcctccgatgtctgaagctgaggctcatgcttttgaagtcaactcttttggcctctacaatgaattatcagagcttgttgagttaggaggcgcggataacaacttaaacaccagcaatgtggaaactacagattacctcatgttgccacctgacagagaactgtcggctaatgattacatggaactaaacgatctccttgctcctgacccaagcttccccagtgaattttctgctcaggacaatcaatatatgcagcatcctcttgctcagtacaatggacattatgatctgtcaggtccttcggagccaacaatgcctagcattttcgatgtttttcctcccaataatggagtcctcgcaacagatgatccagccaactacttggacccagccatgcagttccctttctcatgattggttaccagttgtcatggaggtacggatgtttatacctgctctttttgtgcttgaaacttgtctgactgcttcggtgttgcaacttgcagc

SEQ ID NO: 4642 - DNA, 767 bp, Zea mays
  unsure (1)..(767): unsure at all n locations; Clone ID: LIB3136-043-P1-K1-D10.F24
ctggtgacaacaatgtgtccaataaataaattccgtcactccgccttatgccggattttgcgggagtgtacagcttcttaggtagtgttttcgatccaagcacaagtgatcatctgcagaaactgaaggagatgaatccaattgatgttgagacggcgctgttgttgatgaggaatctctccatcaatttgaccagtcctgattttgaagatcaaaggaaattgttgtctttatatagcgcttctgatggacctgagctagggagctccaggagttcagctctagcaactagtgcacctttcatgtaaggattaagggtggatagtgtggccaggtctgtccgcatataatttcagttggacagacctcaggatggtgccctggcgtagcaccgatgagtgacgaaggaggcgccttgaccttttcgcttctcgctagcttcaggactgctgattgtgtaagggtgcggccatgaaaggtgagattggtctgcggtcatgaaaggtgagattggtctgcggcctgatgtgtatataaaatttttgccacgaaggaggcgcctgcacctattctatcccaaaagctcggccatctagggcattggatgctgcttcagttcagataatcaaggctgtccttggaaatgggacgagaggaaagatcccttccccattcgttgagttcagttctctgattggttcttgctgccctcttgatacggngacctgtgcgccatgtggccgtctcgctgtttatgtgggcaagtt

SEQ ID NO: 4643 - DNA, 382 bp, Zea mays
  Clone ID: LIB3136-051-Q1-K1-E11.F2B
ccgggcaaaaagcctcaaactcctaactgctgcactgcagtaacatgcaaccgttaagtctgggtaagatctctgatatcaaactctttacaccgatttcacacagtaaatacaaggctccttcaaatgtagataatattctactgtacataaggcaaaagaaataccacacctaagtccaaatccaaacatgtcagatcatgcaccagcaacgctactttgggttatcagccatttgtgccatcaattcagtagcactcaagacaaacggagcaatctacagagaaataaatccaacaaaacaggtttccacactaaaaataacccgggataggtgcatggtcatcccacagagccttgaattgactcataggccatgtag

SEQ ID NO: 4644 - DNA, 318 bp, Zea mays
  Clone ID: LIB3136-052-Q1-K1-C9.F2B
aaaacttgcaacggcaagttacagcacaaaatataattctaccggaccaaatactggccctaccataaaatgcttgtttctcagggttctaaactctgcataccggactaaagaatacaacacaggtttcatgggtagcttgtacagcaagcaaaggctcaatatctgcaattacacagttgttccaaaggtgacgtgttcaacccaactatgctccaatgcccctgttttgggggacatggcatgaaaactgaactaggaggaccagggaaactcccgtgacccagaaaactgggtataacttggggcttattttcc

SEQ ID NO: 4645 - DNA, 180 bp, Zea mays
  Clone ID: LIB3136-054-Q1-K1-A10.F2B
acggagaatacatgcagaaccagaattattcttgcgccacgttaaaacagacgggcgttgtctcaggtctcggaaagcatcactaaacatgtagtagcatatatgcacacatggccggccgagtaaacacacaaattacgcgtttgcctctggacgggttgctgccaaaccatatcccta

SEQ ID NO: 4646 - DNA, 1588 bp, Zea mays
  Clone ID: LIB3136-037-E4_FLI
ccacgcgtccgcaagaagtatcctaacgggtctaggacaaatcgtgccacaccaaatggttactggaagactagtggaaaggatagaataattatgcttaactcccgcaccgttgggatgaagaaaacattgatatttcatgaaggcaaggcccctaagggtgacagaactgattgggtgatgtatgaatacagaatggaagatgaggatttggtttctgccggtttctcaaaggatgcttatgtactctgcaaaattttcaagaaaagtggccttggtccaagaatcggagagcaatatggggctccatttaatgaagacgaatgggataatgcagaagtcgaaacttctctgtttcctttgttttgttcagaagtgaatccaacagagggacaacgtgctcagcctactgtcctggctggtgctcttctggaacccgaaccacctctacataattcatcttctacatgtgctggagaggaaccatcatttggtcatgccactgcagaggacttaacttttagctatactgttgctagctctgctatccaagatacacctgctcggatgtcaggagacggtgtggtttctgtgaacaacatatccaatgtggccaatgacatgcgtagtccttgtgactgtgatgaatttctatcggagttgtctagatttatgaatgattctcctctgcgtaacactcctcttggagagtgctctggtcttcctccgatgtctgaagctgaggctcatgcttttgaagtcaactcttttggcctctacaatgaattatcagagcttgttgagttaggaggcgcggataacaacttaaacaccagcaatgtggaaactacagattacctcatgttgccacctgacagagaactgtcggctaatgattacatggaactaaacgatctccttgctcctgacccaagcttccccagtgaattttctgctcaggacaatcaatatatgcagcatcctcttgctcagtacaatggacattatgatctgtcaggtccttcggagccaacaatgcctagcattttcgatgtttttcctcccaataatggagtcctcgcaacagatgatccagccaactacttggacccagccatgcagttccctttctcatgattggttaccagttgtcatggaggtacggatgtttatacctgctctttttgtgcttgaacttgtctggactgcttcggtgttgcaacttgcagctcgctgttgctacaactctatccaccctgaacgtcaaggacgtcattgatgtcatgcctgggcccatgaaatcgtctgttgctcttctgaaccaagccgaccttggctggtatttcttggaagcacggtgcttggaacaatctgcatcgactgctgtatgctcccaactggttgagctaacggccaatctcggctcactctgctgaggagatcatagcctgtaaatctttgattatgctattacttgtgtgtatcgcaacctgcctgattaccattgtcttgtgttttgagttttgacaatatgcaaaccataataatgtcgtaatatggaactcgtttatcaaaaaaaaaaaaaaag

SEQ ID NO: 4647 - DNA, 1338 bp, Zea mays
  Clone ID: LIB3136-043-D10_FLI
ccacgcgtccggttggctccaagaccgtcatccagattaggagtcatgcacaaaagtactttttgaaggttcagaaaaatggaaccagtgaacatgtcccacctccacgaccaaagcgaaaagctgcccatccatatcctcagaaagcttccaagaatgaaccaaactatggcctcaagacagattcatcttccatacataggaactctggcatgaatgtgtctgtttcttcatggcctcataggtctatcccgcaagctgttgcttcgtcgatggtgaaagatttaggtgctggaacaccaggtccaaacaatttttgctcaagcagtactgaaggccctccaagaacttggcaacctggtgaaacaaatggtccaataaatcaaattccgtcactccgccttatgccggattttgcgggagtgtacagcttcttaggtagtgttttcgatccaagcacaagtgatcatctgcagaaactgaaggagatgaatccaattgatgttgagacggcgctgttgttgatgaggaatctctccatcaatttgaccagtcctgattttgaagatcaaaggaaattgttgtctttatatagcgcttctgatggacctgagctagggagctccaggagttcagctctagcaactagtgcacctttcatgtaaggattaagggtggatagtgtggccaggtctgtccgcatataatttcagttggacagacctcaggatggtgccctggcgtagcaccgatgagtgacgaaggaggcgccttgaccttttcgcttctcgctagcttcaggactgctgattgtgtaagggtgcggccatgaaaggtgagattggtctgcggtcatgaaaggtgagattggtctgcggcctgatgtgtatataaaatttttgccacgaaggaggcgcctgcacctattctatcccaaaagctcggccatctagggcattggatgctgcttcagttcagataatcaaggctgtccttggaaatgggacgagaggaaagatcccttccccattcgttgagttcagttctctgattggttcttgctgccctcttgatacggggacctgtgcgccatgtggccgtctcgctgtttatgtgggcaagtttcacttgaggagttgagagggcttgaggcgatcgtggttttgtagagcaacgagtgcaccttccgaatattccttgttcctgtgtgaatcgtctatattgcatcaggcgtcgttgccattgtgtaaaagggaaataaaatcacaatgtaaaggatacactaccatttgaattgtattcagtatcgaagcaaaaaaaaaaaaaaaaaaaaaaaag

SEQ ID NO: 4648 - DNA, 420 bp, Zea mays
  Clone ID: LIB3136-002-P1-K1-C6.F1
gaacaacattataattaatataatataaataagtgacattcaatatatcatgaataagcagtggcaaacaaggcgtacagaagtggaggctaaatctaaactaggataaaagggcccgcagtagtgttaagcctaactgttatatgagttagagtctccgcactggtgtgcggccacgaaagtttgaattgtatgctgagggggccgggtacaaggggggggggaaacgtgggcatggggggaagcgccggggggcgggggggtgggggcggagcggccggggggcggcgaggggggggggggggggtgggaggctggggggggggggccgggggggcagggggggggggggtggggggttgggtgggttggggggggggggggcgggggggtggggaggggggggaggggggggggggg

SEQ ID NO: 4649 - DNA, 178 bp, Zea mays
  Clone ID: LIB3136-005-Q1-K1-H1.15C0
gcgtgctgtatgatggttatgcgggccgactacaactactagcgtggtgttgggctatatgttatatttatataaagatgtaatcacctgtaactatcggtggtcagattctaaagagcacgcggtatgcaggtgtggaacagtttattttaaaaaaaaaaaaaaaaggggctggtct

SEQ ID NO: 4650 - DNA, 494 bp, Zea mays
  Clone ID: LIB3136-005-Q1-K1-H1.15U0
acagtacgcctctagagggccccggccgcgggtatcaaaacaagatacgtacatgtcttccgcccatcaatcgatttccgtttacattttgtacgtctactaatcgccttgtacagcgagatcgccgccgccgccgaccgagaagcatcccttccgttcgtcgtactcgtacagcgaggtcgatctcttcgtcctccactgggctttacaccttgcattgggggggcaagtatacagcgaactgctaccactctttagtcttcgtcgtcgtcggcgtcgtgttctttggtacggtcgcctcaccagtgagcgagcttttggcctgccacgccgcaggcatctagctgatcgccgcctcccgcgggcgcgccgcccacatcgagctgagcgtgcggaggcgctggaagtagtcgccgagcgccaggaggcccctggccgcctgccgcggcgtcaggatcttgtgcatctgctgcagcgtcgtcagccggagatgg

SEQ ID NO: 4651 - DNA, 247 bp, Zea mays
  Clone ID: LIB3136-020-Q1-K1-H8.F1
aaaaaaaaggcccccccggttaagaacaaaccggggggaaacggggttatttggaagaccaagggaggggccccaaactggaaccccccaaacccggggccctacccgccgggcccccccctgggggccacaaaaaaaattggggccagccggagggtctccccggggaaaaccccgggggggaaaaaccccgggggggcccggaaacggaacggggaacccttccggggaccccccggggaaaagg

SEQ ID NO: 4652 - DNA, 418 bp, Zea mays
  Clone ID: LIB3136-021-Q1-K1-H3.F1
gagcaagcggcattctaaaggcgccactgacctttttcttcattacagtctaatgggcccatgatttgcattacacacacaattccagttacaagaatgctagctacacatcaagggggatgaatatcagctcaatccggattctaactgccatgaagcccatgaactttttctaccgggggtacagagattgatcgtcgcatactagactgcattagtccactccatcagttacatgagtggatttcgcggggctttcttcgtctggggccccaaaacgatatatcattcatcaggggaaatctcattaacaattaggccttgtagtcaaaacccaactgacttcccttgggggccaaaactgttgcctgagaagaggtcttgagaaagatagccacttctagcattagaaactatt

SEQ ID NO: 4653 - DNA, 240 bp, Zea mays
  Clone ID: LIB3136-023-Q1-K1-C11.15C0
gattggcgacaagctctcgccagggagaagttgaaggaggatcagcgtcaacaacgtgcacaatcgctaatcagatagtttccaatgtgccagctgttctctcaaaatttttgctccacgaaatacttgcttttgtttagctgttttaccctttttagtttgcctctaacattgaaggtagataatgggtgtctgtttttgcaactattgattttattttacacagcaagatgtaactgc

SEQ ID NO: 4654 - DNA, 247 bp, Zea mays
  Clone ID: LIB3136-023-Q1-K1-C11.15U0
tctaaataaatgaacacatttcttatgttgttttagagacatgtgcctttttgatcgctttgaatgaatcaacaaagatcttgcttgggaatccactaatctagaacccctctgaacataattatccaaaaggatccctttttccagtttcaactttttggcaccctttgtaattttcccagcatctccacctttctgaattatgtcatatataacattgtgaacaacctctgtgcccacgcgtccg

SEQ ID NO: 4655 - DNA, 218 bp, Zea mays
  Clone ID: LIB3136-024-Q1-F6-E7
cgtcgcgcagcgccggtcctggggcgagaacctcacctactacaccggcgtgggatacctcggcggcgccggggccggggccgcgctggggctccgcgacgccgcccgaggcgccgagcctggggagcccgccaagatccgggccaaccgcgtcctcaactcctgcggcagctccggacgccgcgtcggtaacacgctcggggtcatcggcctcatgt

SEQ ID NO: 4656 - DNA, 591 bp, Zea mays
  unsure (1)..(591): unsure at all n locations; Clone ID: LIB3136-037-P1-K1-E4.F15
aattactcttctaatgtgctggagaggaaccatatttggtcatgccactgcagaggacttaacttttagctatactgttgctagctctgctatccaagatacacctgctcggatgtcaggagacggtgtggtttctgtgaacaacatatccaatgtggccaatgacatgcgtagtccttgtgactgtgatgaatttctatcggagttgtctagatttatgaatgattctcctctgcgtaacactcctcttggagagtgctctggtcttcctccgatgtctgaagctgaggctcatgcttttgaagtcaactcttttggcctctacaatgaattatcagagcttgttgagttaggaggcgcggataacaacttaaacaccagcaatgtggaaactacagattacctcatgttgccacctgacagagaactgtcggctaatgattacatggaactaaacgatctccttgctcctgacccaagcttncccagtgaattttctgctcaggacaatcaatatatgcagcattctcttgctcagtacaatggacattatgatctgtcaggtcctttcggagcccacaatgcctagca

SEQ ID NO: 4657 - DNA, 452 bp, Zea mays
  Clone ID: LIB3136-043-P1-K1-D10.F15
ataaattccgtcactccgccttatgccggattttgcgggagtgtacagcttcttaggtagtgttttcgatccaagcacaagtgatcatctgcagaaactgaaggagatgaatccaattgatgttgagacggcgctgttgttgatgaggaatctctccatcaatttgaccagtcctgattttgaagatcaaaggaaattgttgtctttatatagcgcttctgatggacctgagctagggagctccaggagttcagctctagcaactagtgcacctttcatgtaaggattaagggtggatagtgtggccaggtctgtccgcatataatttcagttggacagacctcaggatggtgccctggcgtagcaccgatgagtgacgaaggaggcgccttgacctttacgcttctcgctagctttaggactgctgattgtgtaaggatgcggtcatgaaa

SEQ ID NO: 4658 - DNA, 225 bp, Zea mays
  Clone ID: LIB3136-045-Q1-K1-G11.15C0
gtatacttacttttttaccccttgtatacaatctgctgcagctataccggccagagtatggcatggtatggcggcaggcagccgcaaacttgtttttacctacttggtgtagcgcctgtgtaacagttttcgatcgctcttgcttgttgtgttgtcgatgctaataccgcagtgtaattgacgaaatgactaaaatgaagagtagtgtactagatgtccaactat

SEQ ID NO: 4659 - DNA, 217 bp, Zea mays
  Clone ID: LIB3136-045-Q1-K1-G11.15U0
ttgtgatgcacgtacacaggcctattgtccgagcaatttggaatcacatgccacaatcttcaccttgcccacctgctccgtggcctcctcgttcttgaagcttgcgtctgtcaagatgaaggtccacacattgtcacagaacctgtaggtgtgcaggtgacccttgacagtaaccttgctcttcacttggttctccagagcatccgtcatggactag

SEQ ID NO: 4660 - DNA, 666 bp, Zea mays
  Clone ID: LIB3136-049-Q1-K1-D5.15C0
cttcgggaggccgctgcacgtctggggccatccgagtccgacgccagcggtggagtcaccccgggtgccaatgtggcctcggcatctcgccccccgcgccccgccgccgccgccgtgggctccgccaccgccagctgacccggcgttctggcaccatgcttacatgagggggcctgctgcccatatgccagaccaggtggcggtgactccatgcgtggcagtgccaatggcagcagcgcgtttccctgctccacacgtgaggggttctttgccatggccacctccgatgtacagacctctcgttcctccagcactcgcaggcaagagccagcaagacgcgctgtttcagctacagatacagccatcaagcgagagcatagatgcagcaataggtgatgttttaacgaagccgtggctgccgctgcccctcggactgaagcccccttcggtagacagtgtcatgggcgagctgcagaggcaaggcgtagcgaatgtgccgcaagcttgtggatgatccccggggctgcatagctgctagctcgtacctgcacgcagtgcaacaaaagaaatttgacgacatgccttttatgttattgattcccgtgaaccgattatggagcactcacagctcgttcagggtcagatgaacaggacatttttaggagt

SEQ ID NO: 4661 - DNA, 587 bp, Zea mays
  unsure (1)..(587): unsure at all n locations; Clone ID: LIB3136-049-Q1-K1-D5.15U0
gctgctgccattggcactgtcccgcatggagtcaccgccacctggtctggcatatgggcagcaggccccctcatgtaagcatggtgccagaacgccgggtcagctggcggtggcggagcccacggcggcggcggcggggcgcggggggcgagatgccgaggccacattggcacccggggtgactccaccgctggcgtcggactcggatggccccagacgtgcagcggcctcccgaagtgctgcaccggacgaggagtggtccccgccggcggagggaaaccgatggtcggcacggtccacgcgttagagtcgggcctcttcacggcgccgctgggggcagcgtacatcggccgccggtgcgtcgtccatgtcgctgcctccacctccctcgcaagcatgtgcttcctgtgggaacggtacttctgcagatggctggctatgttatgccgcgtgagggagtcgatccccatgatctcgnagatcctggacggcaccgncttgtcgatgcccagctcctccaccgnctgaacgaatcttcggtgaagctccggcgtccaatccaccttgctttcttcttcccttgggag

SEQ ID NO: 4662 - DNA, 137 bp, Zea mays
  Clone ID: LIB3136-054-Q1-F16-E3
accagatgtacatctacttatacgagcgcgccctcgggcagctcatcggcgacgacaccttcgcgctgacgttctggaactgggatacgccggccgaaatggtggagccgacactcttaaaggacatacatgaggca

SEQ ID NO: 4663 - DNA, 414 bp, Zea mays
  Clone ID: LIB3136-054-Q1-R8-E3
ctgcccgccgccgagctggtcgaccgtatgtgcccatgcggtcgacgttggagtggtgcgagtagaagagcgggtcgtgtcccgccgaccccaggaaccccatgtcgttgttgcagctgtacccgcctttggtgtggttcgggaagccgccggtagcggtactgcacgcctccgacgaaggcgtggggcccgccttgccgacccagacgtgcacggcagtgtgcgccatccgttccagcgaacccatgctgttcgtgcttgacccgatgtgggtgcaatacttttcgtccaggaacgactggggacccttgccattacatatttgctgggtgtatacggtacacaggttcttgtacacaagaaacttgagctttattggcacaggtcccatgaaagggatggactacaaataac

SEQ ID NO: 4664 - DNA, 204 bp, Zea mays
  Clone ID: LIB3136-056-Q1-K1-F11.F1
cagaagatgattcctccctctatcatcagaaaagattcaccaataacaggacatgctaaatagctgcagcggagaaagacagaaactgaataggactgactgactagaactagaactaaatcaacatccacagccgggacggccgaaagcagcaacccaaacaagggggcgcgccctacccgaaaattaagaccgggtgaggcc

SEQ ID NO: 4665 - DNA, 404 bp, Zea mays
  Clone ID: LIB3136-056-Q1-F3b-A2
aagtcggctggcaggcacgcatggggcctatgaagaagctgggctttgctgccgtggattatgccccttgcgtttcaccgaaggacgctgcctgcgcttgtgtctcgctgtgcagcagtctgccctcttcatttagttagcgaatggggtggctgcggttaagaggagtgtgtggtgtctgacttgtgtgagtgtggagcctttgttcttctatgtgtccagcgtcgacaagaaaatgaattagtagcacttaggagttattttgggccaactgtggcctcattgggaatatattgaggaacacctcaatccctgcccgatggtgacctgggcatgtgctattgccaattgaagcctaatgctgtgcattggcttgaaagcaacttaaaaatgtgacggattat

SEQ ID NO: 4666 - DNA, 594 bp, Zea mays
  unsure (1)..(594): unsure at all n locations; Clone ID: LIB3136-056-Q1-F4b-A2
tatacctattcgtagctggttgggcgccacacgccttattattggatactgcaggtgaagatccactgctgggtgctctagtgccttgnttattgggtccatatccaattcctgcaacaccgactgctgctgaagagcttgctggaatgggtccaggggcaacagatgctaaaaatggggaatttacagctccattgacagcggaagtgtgaacaggaaacaaaggctgggaaacatgaggggcaacaggtgaaggtactcctggaggggccataggaaacgatgtgtgaagtacattagcaggtgctgatgtcataggagtaggcacattctgaattgggaataggggctgttgtggggggagcccancaactatgggaggaactgaaacagctgattgttgtggatatgctgcttgttgcgaataccaagcttgcgctggtgcancangccaaatgggaggcgcggccatcaaaggattgagtgcaggattatagattggaggtgccacaccataagctgggcgcggaggaaatgccatgcctagcgaattaggcataataacaggccttacctgaggcacttctactgtgg

SEQ ID NO: 4667 - DNA, 612 bp, Zea mays
  unsure (1)..(612): unsure at all n locations; Clone ID: LIB3136-056-Q1-F5b-A2
tgataggagtgggcacattctgaagtgggaatagtggctgttgtggtggggggccgcancaactatggggaggggcgtgagacagctgattgttgtgggtgatgctgcttgtggcgaataccaagcttgcgctggggcagcaggccaaattggggggggggccatcaaaggagtgagtgcgggattatagattgggggggccacaccataaggtgggcncggaggaaatgccatgcctagcgaattangcgtaataacagggcttacctgagggcgcttctactttgggtacctttgttgaagggggttcctcttctccataatgagcagccaatacatgcgcaggaattccctgcgttccaaatatctctatctgcggtgactccctatcaggctttgcattaggaaccttgggcacggactccttgtggacctggaggacgtgtatggccatgccagaggcggtggagagcttcttgtggatacgtggcacttgaagtgcttggccttctggggctggacgaggatcttctcntcntcnaactcgcggtcgcagtantagcagaagaccttatcgacgcgcttcttcttcttccccatcggacgcccttt

SEQ ID NO: 4668 - DNA, 403 bp, Zea mays
  unsure (1)..(403): unsure at all n locations; Clone ID: LIB3136-056-Q1-F6b-A2
atgcgcaggaattccctgcattccaaaatctctatctccgttgactccctatcaggctttgcattaggagcctggggacggactccttgtggacctggaggacgtgtatggccatgccagaggcgggggagagcttcttgtggcatacgtggcacttgaagtgcttggccttctggggctggacgaggatcttctcgtcgtcaaactcgcgggcgcagtagtggcggagagaccttatcgacgcgcttcttcttcttccccatcggacgccctttgatgtgcaaggctctctctcccttgngcggcggcggcggcggcggcggggtctaaggtgggttagggtttcnccgagagggcncggcagcggtcagggaggggaggaagaagccnagggcgagacgtc

SEQ ID NO: 4669 - DNA, 1619 bp, Zea mays
  Clone ID: LIB3136-056-A2_FLI
gtcgacccacgcgtccggacgtctcgccctcggcttcttcctcccctccctgaccgctgccgcgacctctcggcgaaaccctaacctaccttagaccccgccgccgccgccgccgccgcccaagggagagagagacttgcacatcaaagggcgtccgatggggaagaagaagaagcgcgtcgataaggtcttctgctactactgcgaccgcgagttcgacgacgagaagatcctcgtccagcaccagaaggccaagcacttcaagtgccacgtatgccacaagaagctctccaccgcctctggcatggccatacacgtcctccaggtccacaaggagtccgtgaccaaggttcctaatgcaaagcctgatagggagtcaacggagatagagatatttggaatgcagggaattcctgcgcatgtattggctgctcattatggagaagaggaagacccttcaacaaaggtacccaaagtagaagtgcctcaggtaaggcctgttattatgcctaattcgctaggcatggcatttcctccgcgaccagcttatggtgtggcacctccaatctataatcctgcactcaatcctttgatggcccggcctccaatttggcctgctgcaccagcgcaagcttggtattcgcaacaagcagcatatccacaacaatcagctgtttcagttcctcccatagttgctgggctcccaccacaacagccactattcccaattcagaatgtgcctactcctatgacatcagcagctgctaatgtacttcaaacatcgtttcctatggcccctccaggagtaccttcacctgttgcccctcatgtttcccagcctttgtttcctgttaacacttcagctgtcaatggagctgtaaattccccatttttagcatctgttgcacctggaaccattccagcaagctcttcagcagcagtcggtgttgcaggaattggatatggaaccaataaccaaggcactagagatccagcagttggatcttcacctgcagtatccaataataaggcgtctggtgcccaaccagctacgaatgaggtatatctggtgtgggatgatgaagcaatgtcaatggaggaaagaaggttgtcgctgccaaagtatcaggtgcatgatgaaactagccagatgaactctgttgacgcagcaattgatcgaagaatatcagaaagtcggctggcaggacgcatggccctatgaagaagctgggctttgctcggtagattatcccccttgcatttcaccgaaggactctgcctgcgcttgtatctcgctgtgcagcagtctgccctcttcatttagttagcgaatggagttgctgcagttaagaggaatgtgttgtttctgacttgtttgagtgtcgagcctttgttcttctatgtttccagcatcgacaagaaaatgaattagtagcacttaggagttattttggtccaactgtcgcctcattgggaatatattgatgaacacctcaatccctgcccgattgtaacctggtcatgtgctattgccaattgaagcctaatgctgtgcattggcttgaaagcaacttaaaaatgttacggattataaaaaaaaaaaaaaaaagggcggccgc

SEQ ID NO: 4670 - DNA, 117 bp, Zea mays
  Clone ID: LIB3136-034-Q1-K1-F8-F2
tttttttttttttttttttttttttttttttttttgtgtgtgtgcgcgcgcgcacaggggatgcatttttttaattcaagggatatgcccaggggcactttggggggcgaatttttt

SEQ ID NO: 4671 - DNA, 584 bp, Zea mays
  Clone ID: LIB3136-056-Q1-K1-A2-F2
ataatccgtaacatttttaagttgctttcaagccaatgcacagcattaggcttcaattggcaatagcacatgaccaggttacaatcgggcagggattgaggtgttcatcaatatattcccaatgaggcgacagttggaccaaaataactcctaagtgctactaattcattttcttgtcgatgctggaaacatagaagaacaaaggctcgacactcaaacaagtcagaaacaacacattcctcttaactgcagcaactccattcgctaactaaatgaagagggcagactgctgcacagcgagatacaagcgcaggcagagtccttcggtgaaatgcaagggggataatctaccgagcaaagcccagcttcttcatagggccatgcgtcctgccagccgactttctgatattcttcgatcaattgctgcgtcaacagagttcatctggctagtttcatcatgcacctgatacttttgcagcgacaaccttctttccttcattgacattgcttcatcatcccacaccagatatacctcattcgtagctggttgggcaccagacgccttattattggatactgcaggt

SEQ ID NO: 4672 - DNA, 651 bp, Zea mays
  unsure (1)..(651): unsure at all n locations; Clone ID: LIB3136-001-P1-K1-D6.F2
atggaacagaaatttcaatttaggcatttagtctaagaaacatgtacattacaagaatctagcttcgctcggcgcaaacatcttcatcatacactgatacaattgggttgggtcttgtgcagtctatcaattggggccccaacgtatcttgtcccagaggaaaggcctcataccaccaacttgtggcaggctcttcatgatcaatcctacgcagacacaaacggcagcaatggcgaccaaggaaagcatcgccggcctattagacaagaacctatttgtccgggagtggaatgcaagctgctggacctgctggacacattgtctgcagctcaatgtttggttcatccctcgctgttttttctccacaccaaatgtgatttggtcggcaggcttcaatcggctagcatgctttccggcagtatcaattgtgctggggatggtaaccgagacatgagctctgctcacccttctgtcaattttgtcctgtaccaattggatataggatatgtgacctctctttcgagcatattcctcaggagtngaagccagtggcgtcacgagcgttcttccacgctttgattcccaactgccggagatcatcagttaaagcatccaaaacaccagtagcatcacttgattgttgctgcatat

SEQ ID NO: 4673 - DNA, 727 bp, Zea mays
  unsure (1)..(727): unsure at all n locations; Clone ID: LIB3136-001-P1-K1-D6.R2
gttctgtcagcagtgtagcaggtttcagcttcttcaagaatttgatgaagggaagaagagctgccgctcgcgtctagcacaacataatggaaggagaaggaaagttcaaccacaagctgttgtgaatgggaattccatgagtgaaaatcaatctctaagtagcaccttaatccttctgttaaaacaactttccaggctagagtgtacagacatagtcattctaaatgtgtgcttgtatgggtggcagctggtagctcctctgagccaatcaatcatcctaattctttggttaaccttttgaagaaccttgctgctattgctagcacacagtcatatcaagatattctaaagaatgcaaattcaaattcaatattgtcaaatgctggtaataatgctgcaaatggatctactgtgcatgagcaaactatacggtcaattccaatcagaggagaatcattagcagaagagcctccagtgaaaaggcgggtacatgattttgatttgaatgatgcttgctttgaagaagttgagagccgaacagataaaattgtgttcaagctgtttggaaaagagccaaaagattttcctgtagatctacgggaacagatccaacactggttatcgcattatccaactgatatggaaagctatattacgccctgggtgtgntattctaactatttacctccgnctncctattggatgtgggatgagcttgatgatgatc

SEQ ID NO: 4674 - DNA, 742 bp, Zea mays
  Clone ID: LIB3136-002-P1-K1-C6.F2
gaacaacattataattaatataatataaataagtaccattcaatatatcataaataagcattgtcaaacaacgcatacataagtgtactctaaatctaaactaaaatacaattgtttgcactaatgttaagcctaactttatatgaattaaagtctccacacttttgcggccaccaaatttgaattctattctaagttttcctgtacaacaaataggagaaaactagacatagcaaaaagctccaagcagcacgtggatggtctcaaagctgcccttgagcttctccctgttcttgatgactcctacacgcctggtgttcctcccgccaatcaccatgaccatgttgtcgacgtcaaacttgatgaagtccatgatcttgttggtctgcagatcgatcttgatggtgtcgttggccttgatgagcgggtcgaggtagcggatagcgcgaccgtcgtaggtgttcaagtaggggatgcctttttggccaaactgaacaaacctcaccttgcagagcttgaacatattggtctcgaccgaagctgagtccattgtaatctgctcgattgtcttcagtccctcatattgatccttcaacatcttcttatgataatcgttaaggtacactgtttgatcataaataggatatttaacagaagacactgcttgacatctagctgcacattcttcccgatgaacagctagatattcattaagctttggaagatcctgcctgcgaaaaca

SEQ ID NO: 4675 - DNA, 612 bp, Zea mays
  Clone ID: LIB3136-002-P1-K1-C6.R2
ggaacctatgccccacaggactgcacaaaacgtgagataagtaatgcagtgttttgcccccgctggctgaggttggccggtgtgcaattcaccaggctgacaaacgagccctaaaggccccaaatgggcgaccctctccagagagattcttatgaatcttgcattggaaaaacacggagacctattattataagggaagcatttgatccaaagtactatgtacatcaccatgcttttatgcgactatatatatcaatatcacaaataaagttctattggaccagttctttgaccatgccattgatatgaacgtttcaaggccccgcttcctaccagataacgcgatattagatttgcagctgggacactctgatctatatacctagggtgatggcttcaatacacgtaattcaaccagaacaaatgcatcaaattcctgaattgaacttggccctgacttcaagaaggttgagagcttccttggtcgcttcaacaacatacctatcattgttgagcttgacatcttgaaggtttccggagatattgagttctcatctcgaattgcactgaaggggaaagcgaccatcactgcaaaaactggtgtcaagctag

SEQ ID NO: 4676 - DNA, 383 bp, Zea mays
  Clone ID: LIB3136-002-P1-K1-G9.F2B
ctcgggccaacacattctcattgcgttgcaagcgtcaccgaagcaacagaatgaggggaaatcatgccttatacagcaacaaaggagacgtccatagtggcagaacacaaatttcacgggaaaaatattggccggatcaaaaaagaagcctcggaaaaatacagggggtgtagaccccgaaccacgcactgggtaacaattaagggtgcctataacagtccctctcatgacgggcctcagttttgcactagttgaagtcaggcttctccgggtaagtacagcccgggcgctggatgataacgtttgcgggatagcaacctgccctcacgcagtcttcaatgcccttgcctagaaccaactgggagaggaagcctccaacgaaa

SEQ ID NO: 4677 - DNA, 373 bp, Zea mays
  unsure (1)..(373): unsure at all n locations; Clone ID: LIB3136-002-P1-K1-G9.R2B
ctttgccaaagtcagagggatgggagactgagaatattgaggagattgctttgaagatctctcaacttcctttggcttcaggcgagcaaaagaggagtgctgtgattactcaaggggctgatccagtgggtgttgctgaggaggggggaagggtgagaacgttccctgtgatcctattgcccaaggagaagcttgtggacaccaacggcgcaggtgatgctttcggtggaggcttcctctcacaggtgggtctacgcgagggcattagaacactgcgtgagggcangttgctatgccccaaacgttatcatccagcgcccgggctgtgcttaccccggagaaccctgacttcaactagtgcaaaactgaggcc

SEQ ID NO: 4678 - DNA, 500 bp, Zea mays
  Clone ID: LIB3136-008-Q1-K1-A1.F2
atcattaagaaatgggttcatgcatgagaacgtgtttacagatccgtttgatataattcaaatggaggagacctaggtggctacctgatgggacaacagggcattttacaacaaagatcatttattgtacaaacctgaaatcaataacaacaagaagaagaagatatcatgactacggagtagcatatcacgtcgtatttagcgcctaaaatttttcactggcaccacaggatgctattttcccgtcactactagtaccactgagaaaatcttaaaccggttttggcgctgctactagagatcaagtaatcgatctgtgaaagcggatgaggcacactggaggtaagctgaagatggggcgcatttgggaagcaggatcctctggttaaaaaaaaaaactaggtctcggtgggcttcaggagctaggaaagattcacatgcaagctgttactcatggtacgccgtactgctacgccagcattgccatttgttatcattgc

SEQ ID NO: 4679 - DNA, 630 bp, Zea mays
  unsure (1)..(630): unsure at all n locations; Clone ID: LIB3136-008-Q1-K1-F8.F2
gatgacgaccgatgtatttgtcaaacaaaacttccatctttgaaaatgccatttacattttacagcttcgacccaaacaatacagaccgaagacgatgcacaacaaaatgccaacaaatgcctgcacaaacaaccaatacctaatatgtacagccggtaccttccggggaaggaaaatttctctccctactctatattatagtggcagaggacatctgcggttagtgaatgcagctgggcttttttttcacacgccttgacttcagattgtcgagtaaatagctccacatgcaccttgatttcaagacattgcacatttagttttgcagtttggtcagatgtaccaaggaaccgaacatgnggtggttccatctccagcctaaagtgttttccactctcaagaacatgggatctctgacagaattctttcagcctcgatgggtgaaccccgatatcctccactattttacactccatataagcctacctactgaacttggtcttgatttaggaaaaagcgagctacttctctgtacaattgctcgccctcgaatggcttggaaacataaccatccatttcagatttcaagcattgntcatgtgtcgcctggataacatctgctgtcatgg

SEQ ID NO: 4680 - DNA, 680 bp, Zea mays
  unsure (1)..(680): unsure at all n locations; Clone ID: LIB3136-008-Q1-K1-F8.R2
cactgcagtgcttacgagagtccattccagtagaaatgagaataaatcatcagaatttaaagagatcaatgcattggtggtagatcatagaccggtccgtgccaaggttactaagtatcatttgcagagactgggagttcagactgaattgacaactgacctagatcagtatatttctaaaaataattgtggatcacagattgcaaagcttgtgctcattgacaaagaaacctggctgaaagaatcccactccatgcctcttttggttactaaattgaggaacaaagatcagccagactctacaaagttatttcttttggagaaccctaaaagttctgtcaagagcaattcacatatattcagggaatataacttgaatgtaattatgaagccacttcgtgcaagcatgcttcaggtttcgctacaaagagcattgggtgggatagataaactgcattgcaggaatggagtagtcggaaattcaacactgggcagccttcttcacaagaagcgaatcatagtggttgatgataatattgtaaatctcaaggttgctgcaggcgctctaaagaaatatggcgcgaagtaacttgtgctgacagtgggaaggaaagcatcacactgctgaaacctnctcacaattttgatgcttgtttcatggacatacagatgcctgaaat

SEQ ID NO: 4681 - DNA, 500 bp, Zea mays
  Clone ID: LIB3136-011-Q1-K1-G4.F2
atcattaagaaatggtttcatgcatgagaacgtgtttacagatccgtttgatataattcaaatggaggagacctaggtgcctacctcatgggacaacagcgcattttacaacaaagatcagtaatagtacaaacctgaaatcaacaacaacaagaagaagaagacaacaggactccggagtagcatagcacgtcgtcttcagcgcctaaaatctctcactggcaccacaggatgctattttcccctcactactagtaccactgagaaaatcttaaaccgcttttggcgctgctactagagatcaactaatcgatctgtgaaagcggatgaggcacacggtaggtaagcttcagatggggcgcatctgggaagcaggatcctctggttaaaaaaaaaaactaggtctcggtgggcttcaggagctcgccaagattcacatgcaagctgttcctcatggtccgccgtcctgctccgccagcattgccctttctcatcatcgc

SEQ ID NO: 4682 - DNA, 500 bp, Zea mays
  Clone ID: LIB3136-011-Q1-K1-G4.R2
gcgatgatgagaaagggcaatgctggcggagcaggacggcggaccatgaggaacagcttgcatgtgaatcttggcgagctcctgaagcccaccgagacctagtttttttttttaaccagaggatcctgcttcccagatgcgccccatctgaagcttacctaccgtgtgcctcatccgctttcacagatcgattagttgatctctagtagcagcgccaaaagcggtttaagattttctcagtggtactagtagtgaggggaaaatagcatcctgtggtgccagtgagagattttaggcgctgaagacgacgtgctatgctactccggagtcctgttgtcttcttcttcttgttgttgttgatttcaggtttgtactattactgatctttgttgtaaaatgcgctgttgtcccatgaggtaggcacctaggtctcctccatttgaattatatcaaacggatctgtaaacacgttctcatgcatgaaaccatttcttaatgat

SEQ ID NO: 4683 - DNA, 428 bp, Zea mays
  Clone ID: LIB3136-012-Q1-K1-H1.F2B
caccgaaaagacgaccagttcattccagtttccatcattacatgtttacaacatccagatttcatctaggtagcctgccacactaaggacacaatgggaaatgtctaatgtggtaatgcattccacgaaaaatgatgggttagctatgatctctattacggtttgcaaacttacagcagattcaaccttaatgtcttgattggggcctcctaagcgaaatgaaaatttgcagtaccatcaatacaggaaatgggaagtcagtcggcaatcaccataggcatcgtacaaggcctttcccataggctgctaacagaagagcctctgtttacccccaaaaaaatggcaagtcaatctgcaatcaccatagacatcaaactgaggttttgctgaacttccccgatggcagcacaaggcctttcccataggct

SEQ ID NO: 4684 - DNA, 369 bp, Zea mays
  Clone ID: LIB3136-012-Q1-K1-H1.R2B
gcgagtggctctgctcttatccccaccgcgggaccagcaaaacccgctgcagcctttcaaattatgggggctgccgcagccgcgggcggagctgcatcagccgccgtgcccagccaagaacctatgaaggcgctcgggacaggcgtcctccgcccgtcgtccgccgcgcactgggccacaggcggcgcttccttcttttccccacccttccgcccccgccgctggcgtcgcgcgcgcgctcctgcaaccgccgcgcgtaccccgcggtcccgcgcgagtgccaaggcccgggcgaatctcctggcggaggttgaggccgcggacccctggctcccctccctctcgctgggtccgaccgacgacatcccc

SEQ ID NO: 4685 - DNA, 466 bp, Zea mays
  Clone ID: LIB3136-015-Q1-K1-A2.F2B
catgtacaacttgggccttcagggtaaaataaatttggcatacaaagttttggactactgacagtgtatgttagatgaagattctgatctctagcaggtgcaccaaggaacaatcaaacccaatccctgaatagtgtgaaactcacccactatctcctatctatacacaaactgcactcctgaatggcagtgactatcttatgtattcggactcatgctatactcttacaggaaaaccgaagttttgaaatgttctgatttgacctccacggcctgctgtaacaattactaggccccaggccgaccgattcagagcttggtctccctcgttggcatggcaggtagtagcgctgaaactttgatttggtggtgtgacaagttcttcaggccaagccggagatgtccggtcactgttatgcttcgagttgtaacttgtgatatttgtcctccggtactcaacatctgt

SEQ ID NO: 4686 - DNA, 434 bp, Zea mays
  Clone ID: LIB3136-015-Q1-K1-A2.R2B
attccaaagcgtgaaattgttgatgtgggttgatcttcatgaaatgggtactgctgcctgctatactccatatggaaagggcgcgctgatcgggtcccacaagggcagttgccatttgtatgatacatctgatgacatgctttgctctaccaaaacagagattgacctgcgaaacaagagaagaaaatctagccagaagaaaataacaggatttcagtttgtgcccagggattcttcaatgggcataatcacatctgcagattcacgaatcagagttcttgatggttttgagctagttcataggtgtaaaggagtccggaacaccagcagccaaatctcagcttgtttagctggaaacggacggtatattatctcgggaagcgaggattcccgtgtatatatctgggaggaacgatgatggttccaaaccaagt

SEQ ID NO: 4687 - DNA, 444 bp, Zea mays
  unsure (1)..(444): unsure at all n locations; Clone ID: LIB3136-016-Q1-K1-G2.F2B
gcatcctgaacattgttgcttcttgttcatatcaaattatcagacgccttctctctccgtcgccaggggtgttcccaaatcttatctgaccagcagcgttcccaaatcttatctgaccagcagcgtgacagcgaagaataaaacacatcagttccagctctgccactcgctctccatctccatgcatccatccctccgtagcaacttcaccttcactctctaatctatcatcaccactataacagcactgtgtctgtatatatattatacaattcgaggctactgcacactctctaccgctcgtctcgtcggaattctcctcctcaccctcagcccggcgttggcggcgccggcgcgcggaacgacgttgctagtgctagcatacganggaggcccgaagtgagggcgccgtggagaaattggtgcacgacgcccagcggatga

SEQ ID NO: 4688 - DNA, 429 bp, Zea mays
  unsure (1)..(429): unsure at all n locations; Clone ID: LIB3136-016-Q1-K1-G2.R2B
gcgggcgtgcgcggaatgcccgtggaaggaggggagagagggggggcgcatgcgcangcgcatctgagctgagctaagctgagcccgcgagggtcgcggtctgcggtgcggcggcggaggtctctccagcgcgatggccagcggcggctcctcctcagggtacagctcgtacaaggcgccggggctgcgcggcgcgctgctggaggcggcgcacttgtcgtgcctcgaggaccggtacccgctgngcccacatctggggtggggccatttcggcgtgatccgggcctgctccgacctggtcaccggagaggcgctngcctgcaagtacatcgacaagggcgcggctcgtgtccccccaccacgtgcgcgnggtcaggctggagatccacgttatggggcgcctggggggcccccccaacggcggggggc

SEQ ID NO: 4689 - DNA, 520 bp, Zea mays
  Clone ID: LIB3136-017-Q1-K1-E10.F2
agcatagcaacaaaagtggcttaatagatgttcagttcacaattgagcgatactacagtcaaagatgcacaacacatgacactagcttgtacacagtaaaattcttctctggtaccacatcaggagaagaaacaaaactcctgcgctctcttatttaaccaagatcagggactatgaggtagtcctcgtcgtcggtgacctcgatccgggccttcttgctctggcgaaccccagcgccgccgccgccggcggctttggccggcctgtagtacgccgcgtcgttcgccgcctggtatccgaaaagctccggcacctccgccaacgtcctgctggctttgggcgcctgctcgtggaagaaggtcgatgtcggcgaaccactccagctccttgaacccgagcgtcggctccttgtgcagcttgtcgctggaactcgtagtcggagaactgcaggaagctcgtcgacggcccagccctgcggcaggaactgcggcggcgagggcacctgctgcaccgcggcgga

SEQ ID NO: 4690 - DNA, 451 bp, Zea mays
  Clone ID: LIB3136-017-Q1-K1-E10.F2B
agcatagcaacaaaagtggcttaatagatgttcagttcacaattgagcgatactacagtcaaagatgcacaacacatgacactagcttgtacacagtaaaattcttctctggtacacatcaggagaagaaacaaaactcctgcgctctcttatttaaccaagatcagggactatgaggtagtcctcgtcgtcggtgacctcgatccgggccttcttgctctggcgaaccccagcgccgccgccgccggcggctttggccggcctgtagtacgccgcgtcgttcgccgcctggtatccgaaaagctccggcacctccgccaacgtcctgctggctttgggcgcctgctcgtggaagaggtcgatgtcggcgaaccactccagctccttgaacccgagcgtcggctccttgtgcagcttgtcgctggactcgtagtcggagaactgcaggagc

SEQ ID NO: 4691 - DNA, 686 bp, Zea mays
  unsure (1)..(686): unsure at all n locations; Clone ID: LIB3136-017-Q1-K1-E10.R2
cgaccggcggcggcggcgaggtgatggcgatggacccggacgcggtgtcggccaccggcatccgcgtcggcctcgcctcggcttccgcctgcagcgacgcctgcgacgcccacgactccgaccaccacgccccgcccaaggccaccatcgagccaccgcacgccgccgtctccgccgcggtgcagcaggtgccctcgccgccgcagttcctgccgcagggctgggccgtcgacgagctcctgcagttctccgactacgagtccagcgacaagctgcacaaggagccgacgctcgggttcaaggagctggagtggttcgccgacatcgacctcttccacgagcaggcgcccaaagccagcaggacgttggcggaggtgccggagcttttcggataccaggcggcgaacgacgcggcgtactacaggccggccaaagccgccggcggcggcggcgctggggttcgccagagcaagaaggcccggatcgaggtcaccgacgacgaggactacctcatagtccctgatcttggttaaataagagagcgcaggagttttgtttcttctcctgatgtgtaccagagaagaattttactgtgtacaagctagtgtcatgtggtggcgcatcttgactgtagtatcgctcaattgtgaactgaacatctattaagccacttttgntgctatgct

SEQ ID NO: 4692 - DNA, 471 bp, Zea mays
  unsure (1)..(471): unsure at all n locations; Clone ID: LIB3136-017-Q1-K1-E10.R2B
cgaccggcggcggcggcgaggtgatggcgatggacccggacgcggtgtcggccaccggcatccgcgtcggcctcgcctcggcttccgcctgcagcgacgcctgcgacgcccacgactccgaccaccacgccccgcccaaggccaccaatttcgnagccacgcgcacgccgccgtctccgccgcggtgcagcaggtgccctcgccgccgcagttcctgccgcagggctgggccgtcgacgagctcctgcagttctccgactacgagtccagcgacaagctgcacaaggagccgacgctcgggttcaaggagctggagtggttcgccgacatcgacctcttccacgagcaggcgcccaaagccagcaagacgttggcggaggtgccggagcttttcggataccaggcggcgaacgacgcggnggtactacagggcgcggccaaagcccgccgggcggggggggggcgcctggg

SEQ ID NO: 4693 - DNA, 476 bp, Zea mays
  Clone ID: LIB3136-019-Q1-K1-C9.F2
ggccccaaaaaagggggcccatttttttacttttgggggccctaaactttccatacaaagggaaccgaattaattaagccggggatcgatttaaggggaaaccaaaaaccctggttggggcactggtaaaaaagaggggggggtaaactggggggggacccaattacttggggggggccccggggaaaagggccgtttcccccccgggggactggaggggaagcctttggaagggcaaaaaaaaacccccgggttccaaggggggggggggggataccggcccccccattggggggggaaaagccggggggaaaacctttccggggaaaaacccggcgaggttttggggggaggggaggggcttgtttaggaaccaccaatttgtcctcgggccaaaaaaagggggaaaaaataaaccaccttcagccccaccggggggggcgagggggggaaatttggccctgccggaaaaaggg

SEQ ID NO: 4694 - DNA, 500 bp, Zea mays
  Clone ID: LIB3136-019-Q1-K1-H1.F2B
gaacttgagaaagcaaatagaaaattgcagcactcagtgactgataaatcaaagctgttgctacgaaaattcactagggaaacacgggtcaaaattagtaagactacagatgctaattatcctgcatcactaaacgtagtatgtagttttggagatcatgtgctcccttggaacgagcacaccagtgacggagatggtacaacaactctagagcacaacggacacatcaccagaatcatagcttcagttagctaaccacatcaactggcttgggttaacagcatgttaagatgccgttgctaatcaataacatagttcgggttaactgccagtattctactctctgatgttctccttgcgccactgccatcttcggctgcggctgcagtaccttcgtcaatgactataagatggccttcccgctgtataagtctctctataatggccttgatacacttcacttcttccttcacctctgcagtaggactatatgcccccct

SEQ ID NO: 4695 - DNA, 441 bp, Zea mays
  unsure (1)..(441): unsure at all n locations; Clone ID: LIB3136-019-Q1-K1-H1.R2B
cgttatgcaacatgccacacagaacaaatgggcccttcttcgtcaggaaagcaaattcacagattggcagcgggtcagaatgcaggagacatcaaaagagatacccggtgggtcacttcctcgttcccttgatgtcattctgcggggcatgaagattgttgagaaggccagagctggggacacgtgaggaagcttttttttggcctcttcctccttggaatgacttcatttgactgaatgttgtgtttctggtatttccagggttatatttactggaactgtggttgcagttcctgatgttatggcactaacttcacctggcgaacgagcagagtgtcgcagggaagctcctcagcgaanaaacggaggtgttcaagaaggtgtaaagggcttgaagtcccttggagttaggggatctgtcttatcgccttgcctttgtag

SEQ ID NO: 4696 - DNA, 169 bp, Zea mays
  Clone ID: LIB3136-020-Q1-K1-B5.F2B
aaaaaaaaaaggggaaaaggcggtaaatttaaggggagccgggggggttttaaaagaggggggtataaaaacggggggggggcaaataaagggggcggggggggggggggccaaagggaaaaaccccactaggaaaacttttgagccccaaaaaacaaggggggggggg

SEQ ID NO: 4697 - DNA, 389 bp, Zea mays
  unsure (1)..(389): unsure at all n locations; Clone ID: LIB3136-020-Q1-K1-B5.R2B
tcgtcgcgggctgacaggaaggatgaacgagcgaggattgaggccctggggggaaaggtcatccaatggaatgggtaccgggtctccggtatacttgctatgtcaagatcgattggggaccggtatctgaagccgttcgtgattccaaaacccaggaggtgagggtggttcccagggcgaaagatgaccactgtctcatcctcncaagcgatgggctgtgggatgtggtgactaacgaagaggcgtgcaaagctgcgcgcccgcaaatccaagtgtggcacaagaacaacggtgcccctggcgcatcgtggtccttgtgccacgagggtgatggatccaccaccgacccctgtggccaagcgcggaggggattatctcctgaggggcgc

SEQ ID NO: 4698 - DNA, 296 bp, Zea mays
  Clone ID: LIB3136-020-Q1-K1-C1.F2B
ccttgcaaattccatttcacagcacaccacagcacgggcataacttgggtgtatgaagcgtgagttccaaaaaaaaaaaaaaaaaaaaacccccgccttaccgggggaggcaacgcagggaaaaaaaaacaagcccaaatcaaaacacacgacctaaaagtggcgatatttaacatacgagctggcaaaggaccctacaaatcaaagcggcggtgtctgagctccatcaaaggatcagagtatcttgtgtctgcactcactttggacaatcctgcggtgaaaactttgcacctgac

SEQ ID NO: 4699 - DNA, 347 bp, Zea mays
  unsure (1)..(347): unsure at all n locations; Clone ID: LIB3136-020-Q1-K1-C1.R2B
gcgccggacccggacctgccgcccaccgcgggctacctggcgcccgccaacgcctaccgcgtgggcgccggcgacgagtccggcagcggcgaccaccaccaccacgacagcgggagcgagtgctcctcgctcgacgacccaaagtacgtgcgcgggtttcncacgccaacaacatcagcttccaaaagaggcgggcgctggtgacgtacctggagaacaaccgggcggggatcacggtgtacggcttcntgggggaccgggcgtggctgcacgctctcttcatgatcgaggtctcgctcgtcatggggcgtggtcgggaagaccgtcggcatctcctgagctcacgc

SEQ ID NO: 4700 - DNA, 231 bp, Zea mays
  Clone ID: LIB3136-020-Q1-K1-C9.F2B
ggggaaaaaaaaaaataaaaaaaacccggccccgggggggggaccccctaaagggacccaaaaaacaccgctattacccaaatttcccccccccccccccgggggggccccctccaaaaaaccagcccccggctccaaaaaaaacccccaaaggccttgaaaaaaacaaaaagggccccggcccccaaaaaaaacaccccccaactgcaccggggggggtttttttttggg

SEQ ID NO: 4701 - DNA, 357 bp, Zea mays
  Clone ID: LIB3136-020-Q1-K1-C9.R2B
ccgctattttactttctgtgggaggctaccacccttatagggagaaggggttcaagacacagaactgtgtcaaaacgtgcattgtgaagggtttctgtcaaagtggatggcgttagatgtttcacatttgaagaaatggctatagcaacatatataatttagatctatcaccccaaggtggccaagggaggtgacggcgaagtctacaagggaattctaggcgatggagcacttgtagcaatcaaacgagcacacgaggattcccttcaaggtgcaagggagttctgcacggagatagagctactatcaagattgcgtcatcgcaatttgggttcattgggtggctattgcgatgaa

SEQ ID NO: 4702 - DNA, 645 bp, Zea mays
  Clone ID: LIB3136-020-Q1-K1-F12.F2
gccttaaaaagatagccacgatctatgaatgttaagcgcagaacaacctcaagcagacatttaaacgtgcttacattcttctcttcttcttctccttgtatcgtgtgagagcgctatctctgcttcctccagctaatgagccttctggaccaggagaatgccagggtggctcgcccatgaggagaattggtgacaccccacagtcttggtgatctccagcgctgctctcaccagtcaaaccagataagggatgggatatactagatctgacctgcctaacaggaatacaaaggctggaatcagccctttcccctgggtttgacatcgcacaatcagctggtaccacatcgctacattgtagctgcacaattttgggctgctcattgaaatcaaaaggcggtgtttccttcatttcaaagtaactgtcaattccggcgtcatcaaagagttcctctattcgaatgtgagaggtaccgaatagctcttcataattctcgaatgtcaggtcagcatcatccacacataagtcttcatacatgccatcattgaacttattgtcatctctggcataaggtacccttaggtgtcgctgaaactggtccagcagggctgatctgtggctagaggcagaacatcaaacccatc

SEQ ID NO: 4703 - DNA, 647 bp, Zea mays
  Clone ID: LIB3136-020-Q1-K1-F12.R2
gctgagcccaactgtgaggatgggctaagcatgatgacaattgatgacagtgatgtgactaatcatcacggtgcttcagatgataaacgattgttggaaatagctaacacagcactcatgagtgatccaccttcacctgacaagcttaaacctctgataggctcttcttctggagatgggtttgatgttctgcctctagccacagatcagcctgctggaccagtttcagcgacacctaaggtaccttatgccagagatgacaataagttcaatgatggcatgtatgaagacttatgtgtggatgatgctgacctgacattcgagaattatgaagagctattcggtacctctcacattcgaatagaggaactctttgatgacgccggaattgacagttactttgaaatgaaggaaacaccgccttttgatttcaatgagcagcccaaaattgtgcagctacaatgtagcgatgtggtaccagctgattgtgcgatgtcaaacccaggggaaagggctgattccagcctttgtattcctgttaggcaggtcagatctagtatatcccatcccttatctggtttgactggtgagagcagcgctggagatcaccaagactgtgggggtgtcaccaatttcttctcatgggc

SEQ ID NO: 4704 - DNA, 483 bp, Zea mays
  Clone ID: LIB3136-020-Q1-K1-H8.F2
aaaaaaaagccccctcgggtaaaaaaaaaaagggggaaaaggggttttttttaaaaaaaaaaaaaagccctttttttttgaaacccccaaaacaagggcccccccccctaaaaaaccccttaggggcaaaaaaaaaaattgggcccaaaaaaaggaacctcccgggcccccccccggggggggaaacaacccggggggggcgggatacaaaacggggaccccttcgggggaaccccaaaaaaaaaaaaggtcctgggttttccaaagttgggcccaaaggcccccccctaaaaaaagggggggctttttgggggggggaaaaaaccccccccctttgccaaagggaagccccccaaaaaaaaaaacaccccttggggaaaaaagggggggggggtgggccccaaaccaaacgggcccctattattccaaaaaacggggggaaagggtgaaaactggaaattttaacaggaaaggaaccatttt

SEQ ID NO: 4705 - DNA, 486 bp, Zea mays
  Clone ID: LIB3136-020-Q1-K1-H8.R2
ctcatggaaatgtagcttatgctggaatggagtccagcatatgtaagatggattaatccaatggagatcagccttcaggtgattgtgcatctgaaaattcgtgttggtgtgtggtccctagtcccagtcaccgtgcacagggtctgatgatcaagaagtgtgtcctgtcctgtacaagtctgcagtcatcaactcatcaccccgttgtctgcatgactacgggcctgtttggtttggtgcctaacttgccatacttttctgcctaaggttagtttttcaattcgaacgactaaccttaggcaaagtgtggcagatttagccaccaaccaaacagcccctacattcatcagcggtcagcctttggaccaaactctggaagacctagctactctcttttcctgagagttaccagtaagtgtatccagttctgtatgcagtcatcatcgggtttgtttacaccactgggtttgtacccagagatgatca

SEQ ID NO: 4706 - DNA, 503 bp, Zea mays
  Clone ID: LIB3136-021-Q1-K1-H3.F2
ggagcaagctgcattttaaaggcccagccctgacttttttttcattacaggctaatgcccccatgatttgcattacacacacaattccagttacaaaaatgctagctacacatcaagcgggaagaatatcagctcaatcctgattttaactgccatgaagctcatgaactttttttaccgggggtacaaaaattgatcggcgcatactaaactggattagcccactccatcagttacatgaggggatttcgggggggttttttcggcgggtgctccataacgatatatcattcatcagggcaaatctcattaacaattaggccttggagtaaaaacccaactgacttcccttcgggtccataactggtgcctgaaaaaaggtcttgaaaaaaatagccacttttagcattaaaaactattgagataatagggtaaaagttaataaattcgataaaattccccaaatcccaaattcccagccgtaaagcattaatgctgaacta

SEQ ID NO: 4707 - DNA, 688 bp, Zea mays
  Clone ID: LIB3136-021-Q1-K1-H3.R2
tttaaggtgcaaaagggaggaagcaaagatcacagcttgggaaaatctacagaaagcaaaagcagaggcagctatccgtaagctggagatgaaacttgaaaagaaacggtcatcatcaatggacaaaattttaggcaaactccgctctgctcagaagaaagcacaagacatgcgaagtgtagtttcttctagtgaaggtcagtgtagtgtgagggcaaccaagaagacatcttcctctgtcaaaactggcaggcctttcagctgctgctttacctaccgtgcttgctagttgtgatacacagttggtgcctgtggatacagcaatggatataggtctattcggtgagtcccactggcatttgtattatgtgtaatttaacatctaaaactcacactagttcagcattaatgctttactgcttgtaattttgtatttgtgtaattttatcgaatttattaacttttaacctattatctcaatagtttctaatgctagaagtggctatctttctcaagacctcttctcaggcaacagttatggacgcgaagggaagtcagttgggttttgactacaaggcctaattgttaatgagatttgcactgatgaatgatatatcgttatggagcagcagacgaagaagccacgcgaaatcactcatgtaactgatggagtggactaatgcagtct

SEQ ID NO: 4708 - DNA, 518 bp, Zea mays
  unsure (1)..(518): unsure at all n locations; Clone ID: LIB3136-024-Q1-K1-E7-R2d
gcgacgggggagttcttcgcaaatatatcccgcactggatacacgcggcgcggccaagcaagtaagcaacccaaaccctccctcccctcccattcgattcttgcctcccacgccgccgccggatcccgcgatggccgaccctcggctgtaccccacggagtccgggtccgacgaccggcgcgatgccgcctatcccggctccgagcgccgcctctacaacccgtaccaggacctcaacctcccctatcggcagctctacgaccttcccacctccccggagttcctcttccaggaggaggccgtcgcgcagcgccggtcctggggcgagaacctcacctactacaccggcgtgggatacctcggcggcgccggggccggggccgcgctggggctccgcgacgccgcccgaggcgccgagcctggggagcccgccaagatccgggccaaccgcgtcctcaactcctgcggcagctccggacgccgcgtcggtaacacgctcggngtcatcggcctcatgt

SEQ ID NO: 4709 - DNA, 542 bp, Zea mays
  unsure (1)..(542): unsure at all n locations; Clone ID: LIB3136-052-Q1-K1-G6-R2d
gaaacatagcgcatatcaaggtactgtgtagtagaccaaataatgcactagtataatatcgcntgatcgggtatgcagtgctgaagctatcgagtgcattatgctgaaggggggtatactacttggagaagaagctggccagacaactagctgagatgcccctgacattactgctgacacatgtgcccaaaactacaaatactacatcctctaccgagacaacagcaacatggtagaaaactaccgaaatagcttgctatgcatcatagatgatgcacattggtgacctgccccatgaaatctatagggaagcagatctgcaccatctgtctgatcacgcatctgttgagaacacctatgctattctgggtgaatggcattgaggtatgatgtcgatgtatttgagaccgtagacgcaaagaaccgaggcccttgcgctgaagaatgccagcacaatgcttgggaacacgatccggatctctttctacaacatgcatagtatataagcatgctaaagggataactcatgcgggcctctgtta

SEQ ID NO: 4710 - DNA, 679 bp, Zea mays
  unsure (1)..(679): unsure at all n locations; Clone ID: LIB3136-056-Q1-K1-F11.F2
cagaagatgattcctccctctatcatcagaaaagattcaccaataacaggacatgctaaatagctgcagcgcagaaagacagaaactgaataggactgactgactagaactagaactaaatcaacatccacagccatgacggccgaaagcagcaacccaaacaagttggcacgccctaccctaaaattaacaccagattagtccataatctcattcagagcatcagccacgctctgtttcctctctcccacccaaaacgtgtcagcccagggaaagaaaaaaaaaagaaagaaaaaggaagaagacgagcccagcgatcctactcctggggagtcaagctgacgttgatgtcaggtgaagccctgtacgccatgggctgcggcgagcttgcaggccagccgaccatggtgaagcccgtcgtcgtcgcgttcaggttcatggcgttggcgtggggctggggaggtgctgcggagtgcgngcggcggcggtgcgtggaacccgttcccgggacctgcctgcgagatcggggtggccgcggtaagcaccggcggcggnggtgccacgggtgctggtaacgccggacgggggaaggctgctgcatgctcatcctcctcctctggtgctgcttcaggctgttgggcaggaagcttcgacgatcacctgtataggacttgcagca

SEQ ID NO: 4711 - DNA, 1110 bp, Zea mays
  Clone ID: LIB3137-013-H10_FLI
gccaaacacacgcgaagaaaaggagatagagtacaggttacagacaggcagagagcaaagatgtgtggtggtgcgatcctcgccgagctcatcccgaccacgccggcgcgccgcggcggcgcggcgtggcccgccggcaagtgcaagcggcggaaggcgaacgacttcgaggccgcgttccgggagttcgacgaggactccgaggaggaggaggaggacgacgagggggtggtggagagcaagcccgccttcgtcgtccgcgcctcgtccgcggcgacgcagcccagggcgcgccaggagcagcggagccggcgccgggcgcccgaccagcagtacaggggcgtccggcgccgcccgtggggcaagtgggccgccgagatccgcgaccccgtcaagggcgtccgcgtctggctcggcaccttcccttccgccgaggccgccgcgcgcgcctacgaccacgccgcgcgccacatccgcgggcccagggccaagctcaacttcccctcctcctcctccgcctccgctgccggggcccccgccagccgcaagcgcgcccgcaccgccgacgccgacgccgtcatcgacctcgaggaacaagagcagcgtccggccgcggcggccctgaagcacgaggccgccgagtgctccggatccgacgcgctcccggacttctcgtggcaaggcgtgtcggcggcgtacgacgaggcctccgcgccgcgcccggccttcgacttcgaggcgcgcccggagagcgccgcggacgaggcgtcgccccgggcctccgactccgagtcggacgcgatgttcgactcgctcctcttcggcgaccagttcgccttcttcgacgccggcgcgtacgagtcgctggacagcctgttcagcgccgacgccgtgcagagcaacgccgccgccgcggcggaccaggacatgccgctgtggagcttcgacgacggctgcctcgtcgaggacaacctctcgttttaagcttcggcgactgttgctgtgtcttgagttttgtaaattacgatctgtttttttttttttttgagtttctgcttatgtatatctgtatcgatggtgagctgaatgaaatcatccttctcaggaagt

SEQ ID NO: 4712 - DNA, 353 bp, Zea mays
  Clone ID: LIB3137-013-H10-F1A
acttcctgagaaggatgatttcattcagctcaccatcgatacagatattcattagcagatactcaaaaaaaaaaaaaattagaccggaattttcaaaacccatgacacagcaacagtcgcctaagcttaaaacgtggggttgtccctgaagaggcagctgtcgtcgaagttccacatgggtatgccctgttccgccgcggtggaggctttgctttgcatggtgttggcgctgaaaaggtcgttcatcgactcgaacgcttggttgttgaagaaggcgtactggtcgtcgtagaggtccaagttgaaaaactcgtctgaatcggagtagtagtcctggagagaaggctcgtccg

SEQ ID NO: 4713 - DNA, 241 bp, Zea mays
  Clone ID: LIB3137-013-H10-R1A
gtattttgcaggttcttttggtttttcgggtcgttcatgcttcctgccaaacacacgcgatgttaaggagatagagtacaggttacagacatgcagatagcaaagatgtgtggtggtgcgatcctcgccgagctcatcccgaacacgccggcgcgccgcggcggcgcggcgttggcccgccggcaagtgcaagcggcggaaggcgaacgacttcgaggccgcgttccgggagttcgacgat

SEQ ID NO: 4714 - DNA, 451 bp, Zea mays
  Clone ID: LIB3137-018-B10-F1A
tttttattttttttttttttatttttttttttttaatgacaatgaacacaattattccttgtcgattgaacaatagtttacatcatggtacaaactgaaaaccagcgtgcgctcacatgcatccggacacctaaaggtcaccggcggcgcctccctcacttgccggggacgaagttgtgtggcgtaggcccaagcgttgttgttgacggggtcggcaatgtggtcaacgagggtctcgagcgggcccttcccggtgacgatggcctgaacgaagaatccgaacatggagaacatggcgaggcggccgttcttgaactccttcaacttgagctcggcgaaggcctcggggtcgtcggcaaggccgagcgggtcgaatctgccaccggggtagaacgggtcgacgaactcgccaatcggaccgccggcgatacggtaaccctcgaaggcgccc

SEQ ID NO: 4715 - DNA, 97 bp, Zea mays
  Clone ID: LIB3137-018-B10-R1A
cgatctgcaagtctcgcgacgtagcagtgcaatacaaaacaagcagcagcaatggcgagcagcactatagcactctcctctacggccttcaccggcg

SEQ ID NO: 4716 - DNA, 491 bp, Zea mays
  Clone ID: LIB3137-027-D2-F1A
agtagggaaattactgggatctaactttaaaacgactgcttcatcacaaatggcatagacggtatctaaaccaccacacagtagactacagaacatagatgcctgagggccccacaaactacaacagttaacagttgatcagtactgacactatattttgaggcatctcaagcaccaatgccgacagtatccacacgaagtattcaaatctattagctgccctacccggaagattcatcttacaactctcgtcaaaggctcctcggttcttggagcattgtccgcaattcatatctatatcgtagatagatagaatcaagccttggccctcttgcttcctgtgcacgaggggcacttatactgcttgatgtgctccgctttatttggggtgatcttgacacacttgccgtggaaccatgtctcgcataagtcgcaacagatccagaagtcgtcataacctaggccacatgcgccgcacagcgcactctcat

SEQ ID NO: 4717 - DNA, 54 bp, Zea mays
  Clone ID: LIB3137-035-C7-F1A
actttttaattttttttttttttttttttttttttggacaattagcatttcacc

SEQ ID NO: 4718 - DNA, 385 bp, Zea mays
  Clone ID: LIB3137-061-C2-F1A
ggaaccaaattccggttcttaaaagacaacgggtcccagggaggggaaaatttccgcaaaaaaaacacagcggaaaggggttttaaaaacccccagctaaacccaaaaaaccctaaaacaagaaaccggggtattacggccccggaatgggacgaaagacagggggctaacaggaaaacaatggggccaggttatgtgaggcgggaaacaagaggtttctagggtgcccaaacggcatttcgggggcatttttggcccccaattgggggggtaagggttatgacccggggggggaaattggaagggggggccccgacaatatggaaggggccagtgaaccggacttgacagggggccccggacccagaaatccaagaatggggct

SEQ ID NO: 4719 - DNA, 476 bp, Zea mays
  Clone ID: LIB3137-061-C2-R1A
cggtgacgaaaccctaggacttgagatccagcgcacggctcgggtcctcctcaccgttcccggcgatggaacggcggcaggagctctgcaggaacttccagcgcggcagctgcaagtacggatcgcactgcaggtttgtgcacgcctcctctcagcagcagcagcagcagcagcagcagcaggcgaagccaacccgtttgggttcggcttagggagtaggcagcagcaacagcagcagtcttcgtttcgtgcgcagttccagcagcagcagcagcagaagcccaacccgtttggatttggagtgcaaggcggtgcggctgcacagtccagaaacgctcctggccaggcaaagccatttcaaaataaatggggtaagggaccctcagccccaacgaagcaacaggaagcggcacagccaccagcagcagcccacacctcctgtacagatcctgactcctgcaagcaacagattgccg

SEQ ID NO: 4720 - DNA, 379 bp, Zea mays
  unsure (1)..(379): unsure at all n locations; Clone ID: LIB3137-061-Q1-K1-F12
ctagaactagtacgtagatccaacactcgggacgaaattaaaagagacgacgcacatcaaccagcaggcatcgcgcggtcaccaccatggcggcgcatgagggcggcatgaggctggtgtcgcacccgatcgcggcgcacgacgggcggctgccgcggcagtacacggcggaggggcagggcgccaagaaggacatgtcgccgccgctggagtggtacggcgtgcccgagggcgcgcggtcgctggcgctgctggtgcaggacatcgacgccgaccccagcgtgccgtggacgcactgggtggtggccaacatcccgcccgccaccaggggccntccccggggggtcttccgcccccccggggccggggccggggccgg

SEQ ID NO: 4721 - DNA, 302 bp, Zea mays
  unsure (1)..(302): unsure at all n locations; Clone ID: LIB3137-061-Q1-K1-F2
ntctgttgccatcgcagaggcactctatgagatggttaagggttttgtgctgcagcatcaagttatactcttctgtcttggagaaactttcacagagctacctcctatttaccctctggttgatttgcctataaatactagggcaagcgctgcagattttggtggttcagttcctaaacctgggcttgaagtcaacttagtcgacgctgttccttgtcgaatagcatttgagaggggcaaagaacggcacttctgctttttagccatagctcatggaactttctgggtggattcttcttcta

SEQ ID NO: 4722 - DNA, 238 bp, Zea mays
  unsure (1)..(238): unsure at all n locations; Clone ID: LIB3137-061-Q1-K1-F3
cccacgcgnccganggaanngaaggcccagagaacagcccgcaacgacaagagcaaggaagcgagcaaagcgggggaggcgacaaaaaagncaggaccgagggacaaagaagaagagaaccagcacacacgaccgccagggacgggcaaccccggggagaagcggaccagcgaagaagcngagaagaggaggaagagggaagagacaacgcacaagagagngannggccaagaagagg

SEQ ID NO: 4723 - DNA, 350 bp, Zea mays
  Clone ID: LIB3137-061-Q1-K1-F6
caaagtgtcggcactgatggcgctgctggatcaggtggaccgcaagtacaggcactaccaccaccagatgcagatggtgatgtcgtccttcgacgcggtggccggcgccggcgcggcgaggccgtacacggcgctggcgctgcagaccatctcccggcacttccggtcgctgcgcgacgctgtcggcgcgcaggtgcagtcgctgcggcggagcctgggcgagaaggacgggtccgcgcagggaggcgggctgccccggctgcgctacatcgaccagcagctgcggcagcagcgcgccatgcagcagttcggcatgatgcagcagccgcagcacgcctggcgcccgcagc

SEQ ID NO: 4724 - DNA, 282 bp, Zea mays
  unsure (1)..(282): unsure at all n locations; Clone ID: LIB3137-061-Q1-K1-F7
cccgggccgacccacgcgnccgcaaagagcgagcacagacggcgcggcaggcngggggggcgacgacggggcggcgaccggggcaccgggngcggggggcgggggcgcggcgcagcgggcaggcggcggacggcgcggggccgccgccgagggggcgggcgccccggaggagggcgcggcggcggcgggcgacacgagcaacgggcagcgcacggggggccagcccgcggcggacaagacgacagaccgaccggccgcgccgncgcaggcgngcggcgacgc

SEQ ID NO: 4725 - DNA, 255 bp, Zea mays
  unsure (1)..(255): unsure at all n locations; Clone ID: LIB3137-061-Q1-K1-F8
gnggaggagcagagccanggcnncancggtggccgccgcggcgagcacannccggggcacccnccaggcggacccggcgccacagaacgggcgcancgnggcccggnncgggnncgggnggggcggcaaggcgaagccggcnccgaagaagggggcgaagacancgaccnccncggaccggccgcngnggnnccccggcgccgnggcgcccgacnaccnggacggcncgcnggncggcgacnacgggnncgaccc

SEQ ID NO: 4726 - DNA, 222 bp, Zea mays
  unsure (1)..(222): unsure at all n locations; Clone ID: LIB3137-061-Q1-K1-G1
ctcnngcaacaagccaaacaacccagnggctgcnagccgagacagggganaganggagagagaggcgcgcagatggcgacgccgncgncggcgctttgcnccagcnncgccncccngcggaccgccnccaacggccacccccgnggcancgccnccnccacgcccaggaaggcannccacgngagggcancagcncgggnggacaagnncncaaagagngac

SEQ ID NO: 4727 - DNA, 305 bp, Zea mays
  Clone ID: LIB3137-061-Q1-K1-G10
cacgccactcccgcaggaatccccacccaaattcccgtcttcccgatcgccgcccttctcggtgcccgtaaaccctacccccggagtcgcccgtgcgctgtcgtgcccgcgttgccaccgtcggtggtccgcggcgcccgtaaccaaaacctaaccgcagcctgcagatcccgattccgcatggaggcgggagaggtgaaggccgcctcgccgcagatggagcccgcgggcgcgcgcaaggagtggcgcgccgtccccggctcctcgctccgctccaatggcgccgaggatgccgcggagcacgg

SEQ ID NO: 4728 - DNA, 368 bp, Zea mays
  unsure (1)..(368): unsure at all n locations; Clone ID: LIB3137-061-Q1-K1-G11
ggcgcgctggcaaggaacacagacaaagtttttcgagtcgtacaccaagcactcggctaagtcgtatcataatgtctggcgaaacaagctctcgtaaaggcacgcgcatcagcatttggaccgatcaagatctacttcccaccacaaccggatatggctgtggtagaacttccagtcatattcatgagctagactttctaaatcctgccctaacagtaatctatgacacaggaagaagggcacacagcacaacccaccgaatattgngatgctgatggccatgatgaatatgataaacgggtgaatactgacatgatacctgtgcacgatccgattgcctccaaaaagccttcggttgtaataccaaa

SEQ ID NO: 4729 - DNA, 332 bp, Zea mays
  Clone ID: LIB3137-061-Q1-K1-G12
gcgccctcttctcttcctcggcgacctcaagacagccgccagccgcgccacgcccagcccggacacctcggaggtacgatccaccgatatcacgattgacgtctcccgcggcctctgggcacgcgtgttctgccccacggcgatcgctgacgatgctccagccccgctccccgtctttgtctacttccatggcggcgggttcatgctcttctccgcgtcgttcggcccctatgacaccttctgccgccgtctctgccggaagctccgggccgtcgtcgtgtccgtgaactaccgcctcgcccccgagcatcgtttcccggcagcatacgacg

SEQ ID NO: 4730 - DNA, 271 bp, Zea mays
  unsure (1)..(271): unsure at all n locations; Clone ID: LIB3137-061-Q1-K1-G2
ggnacaccgncaacnaccgcgaggccnacggcgnanccgccggcaacggcgngcncagggggcacaaaaccccgcgccggggcgggggcgnggagccgcacaagancgaggaaccggccnggcggnagcgcaggggcccgcgcgacaggcggacggccacgaggaggcggagcgcccccgcggcggcgacgncggcggcggagacggggaccncgaaggagacggcgacgngcgacggcgcggcgagggcngacaccgcgccgggggagaa

SEQ ID NO: 4731 - DNA, 378 bp, Zea mays
  Clone ID: LIB3137-061-Q1-K1-G3
cccccttgcaagtatagtctcggcggctctagaagacgatgggcaaggacgacgtgatcgagagcggcgctggcggcggcgagttcgctgccaaggactacacggaccctcccccggcgccgctgatcgacgcggctgagctggggtcctggtcgctgtaccgcgccgtgatcgccgagttcatcgccacgctgctgttcctgtacatcacggtggccaccgtgatcgggtacaagcaccagacggacgcgtcggcgtcgggtgccgacgcggcgtgcggcggcgtgggggtgctgggcatcgcctgggccttcggcggcatgaacttcgtcctcggctactgaaccgccggcatttgggggggccaaataaaccccg

SEQ ID NO: 4732 - DNA, 447 bp, Zea mays
  Clone ID: LIB3137-061-Q1-K1-G9
gccgccgtcgccgcctcctttccccagaacccggagctcgcccgaccgccgttcaccatgagcatcccggagaagaaccgcagtgagatctgcaagcacctcttcaaggagggcgtgctgtatgccaagaaggactacaacctggcgaagcacccgcagatcgatgtgcccaacctccaggtgatcaagctcatgcagagctttaagtccaaggagtatgttagggagaccttctcgtggcagtactactactggtatctcaccaacgatggcattgagcacctacgcaactacctgaacctcccgtatgagatcgtgcctgccacgctcaagaagtctgacaagccacctggccgaccatttggctctggccctgctggcgaccgaccaaggggcccaggtcgttttgacggcgacaggccaaggtttggtgacagggatggctac

SEQ ID NO: 4733 - DNA, 270 bp, Zea mays
  unsure (1)..(270): unsure at all n locations; Clone ID: LIB3137-061-Q1-K1-H1
gacccacgccggcggnccggccccagcccgcgccggcacgaccccaagcgcccccgcggccccgcaggaccaacgacaggnnngnatggagagagcccaaagcgnacggncacggcgccggagcccnncnngacgccgccgcccgcgccgcggcaccncgccgagcgccgcancgaccccgcgcaacacgaaggngccancgccgcgcccggcgccgccgacgcgaggcgcaagcgccgaagccggcncccggccaccaccgagcgcaag

SEQ ID NO: 4734 - DNA, 319 bp, Zea mays
  Clone ID: LIB3137-061-Q1-K1-H10
aggggtcacatttgggagctttgacattcttacagataatgatgttcgggaaggtatgaagaagttctccaactggcccacttttcctcaactgtactgcaaaggcgagctgcttggtggatgtgatattgctattgctatgcatgacagtggtgaattgaaggatgtttttgaggagcacaatattccccttaaaccacacggtagcaaaaatgaagaagcaggtcagcccgagtctgcaactgagaagggtggtgcagctgctgaaccaatcgggcttactgatgctcagaaagctcgtttggaaagccttactaat

SEQ ID NO: 4735 - DNA, 178 bp, Zea mays
  Clone ID: LIB3137-061-Q1-K1-H11
gcttttcatcagggatgcacatgcacgcaccgtgtgtacgtatagagctaggcatggcctggctcgccatgcttgttgtgtgtttctttgattgtacatgagaggacccgtttctgctgccatccaagttgtttgagatatacatatattacaagaattgaaagaaatttaaaaaaga

SEQ ID NO: 4736 - DNA, 288 bp, Zea mays
  Clone ID: LIB3137-061-Q1-K1-H12
cggtggccaacgacttccggaaggacgcgctcatcggcggcggcggattcggccgggtgtagaagggttccttcgcgtcgccggccggggcggcagacccgagcggcggcaccctcccggtgccggtggccatcaaggtgcacgacggcgacaacagcttccagggccaccgggagtggctggcggaggtgatcttcctgggccagctctcccacccgaacctggggaagctggtggggtactgctgcgagggcgagcaccccgtgctggtgtacgagtacatggccc

SEQ ID NO: 4737 - DNA, 261 bp, Zea mays
  unsure (1)..(261): unsure at all n locations; Clone ID: LIB3137-061-Q1-K1-H2
cnnngcannggagnagcagcaaagcaaagcagcncggccagccagccagngccgaggggggcagnnccggaggcacacacacacacacgcacaggngcngaagcacacggcagnngccnngccggggcganngcngcnnccnnccnnccnccncccncgaggcnncncncagcccagagagaaagacgccaaggaagagcnggngccgcnggcncngccnccgaaccaacccaacccaaggcgncagcagcagcggcggcg

SEQ ID NO: 4738 - DNA, 423 bp, Zea mays
  Clone ID: LIB3137-061-Q1-K1-H9
aaacttttgtggagaccaggtacgctttctggcaaggtcatttgctgtaccaggtaaccatgttggacaaagaagtaatggctaccgttggccatatggcccagttgcaattatcacaccattcaattttccgttggagatccccttactacaattgatgggagcactatacatgggaaataaaccagtactcaaggttgacagcaaggttagcattgtgatggaacaaatgattaggttgcttcatgattgtggattgccagcagaggatatggatttcataaattctgatggtgccgtaatgaacaagcttctgttagaggctaatccgaaaatgacccttttaactgggagttaacgggtagcaaagaaattggctgctgatttgaaaggccgagttaaattgaaggatgctggttttga

SEQ ID NO: 4739 - DNA, 284 bp, Zea mays
  Clone ID: LIB3137-062-Q1-K1-A11
ctccaggggaccatggcgaaaaactacccaccgtagcgcctagtacagcgaggccgtcgagaaggccaggcgcaagctccgcgccctcatcgtcgagaagagctgcgcacccctcatgctccgcctcgcgtggcactccgctgggacgttcgacgtgtcatccaggaccggctgtccctttggtaccatgaattgcccggttgaactggctcacggcgccaactcggtgctggacatcttggtacggctgttctagcccatcaaggatgatttccccacccttt

SEQ ID NO: 4740 - DNA, 339 bp, Zea mays
  unsure (1)..(339): unsure at all n locations; Clone ID: LIB3137-062-Q1-K1-A4
ctcgtccacccgtcgtcctcctatctcctcttctcgccagtcgccatgggcaagagtaagagcggaatcaacggcttcggaaggatcggcaggctcgtggccagggtcgccctccagagcgaggatgtcgagctcgtcgccgtcaacgaccccttcatcaccacggactacatgacctacatgttcaagtacgacaccgtccacggccactggaagcacagcgacatcacactcaaggactnnaagacccttctcttcggtgacaagccggtcaccgtctttggcatcaggaaccctgaggaaatcccgtggcgtgaggctggcgcttaatatgtcgtg

SEQ ID NO: 4741 - DNA, 293 bp, Zea mays
  unsure (1)..(293): unsure at all n locations; Clone ID: LIB3137-062-Q1-K1-A5
gctggctgttgagaggttcattgagcagagttgggcaggccaccgtcccgtctcccctacgataccataccatacccatccgtgtggccctcccccaagggccagggcgccaggccaaccaaaagactccttccttgcgcagatctccgtccgtcgctctccgaactctgattgaggaggagtgaagcttcttttcttcttcctccagtcatcccattgcaaaagtagaagcagggaaggaattggaagcatgnncnngcngcagcaggcgtacgggtaccgaaatgggcagc

SEQ ID NO: 4742 - DNA, 363 bp, Zea mays
  unsure (1)..(363): unsure at all n locations; Clone ID: LIB3137-062-Q1-K1-A6
cggacgcgtgggcgtgcggacagggtactcattatgtggagccttggcaccaaggaacccgccaacaagcgtgagcggcacggagatgcataaccagagcagaagcagcacaacgaacaatgagaaagggatggcaccagtgctgtggcttccccacaataggaagttgagtgtggtcaggatcaggaatgcaatgccggggaagaagcaagccacccgccacgacacagcgacccacccagagtganccccacacttgatcgtcttccatacgcgaacaccaacatatncagccaggattccaaggaccagatagaagaacagcatgcccgtgatcagagtaccacgggagggctgggacat

SEQ ID NO: 4743 - DNA, 333 bp, Zea mays
  unsure (1)..(333): unsure at all n locations; Clone ID: LIB3137-062-Q1-K1-A8
ctctccctctcttccgccatccccagctcattccaccacacagtcacagcctccaccgccgcggcacgcgcggccagccagccagccagccagccatgaggcagtggaaatccctggtcccggcgctgcacctgcacgccccggcggcctcctgcttcccgcacccgccgtcgccgtcgccttgcccgtcgccgccccgcggggacgacgccaccacgacgccgccgcacctgcaggcggtgcggctgnngggctgcgacgggcgcgtgcgcgcgtacgctccgcccgtgacggcgcgggagctgatgcaggcgcacccgcggcacctggtgt

SEQ ID NO: 4744 - DNA, 340 bp, Zea mays
  unsure (1)..(340): unsure at all n locations; Clone ID: LIB3137-062-Q1-K1-A9
gcagctcttgcggtcgtccctcagccgtgtcgcaccgcatcgcattctacgattcgaagctctctgctcgcaggggaccatggcgaagaactacccaaccgtgagcgccgagtacagcgaggccgtcgagaaggccaggcgcaagctccgcgccctcatcgccgagaagagctgcgcacccctcatgctccgcctcgcgtggcactccgcggggacgttcgacgtgtcgtcgaggaccggcggtcccttcggtaccatgaagtgcccggcggaactggctcacggcgccaacgcggngctggacatcgcggtgcggctgctcgagcccatcaaggaggag

SEQ ID NO: 4745 - DNA, 244 bp, Zea mays
  Clone ID: LIB3137-062-Q1-K1-B1
acggaaaggttacctgaacgacccctagtcgattaagaacaccatcgaccaggacgggtggctgcacaccggcgacatcggctacgtggacgacaacaacaagatcttcatcgtcgacaggctcaaggagatcatcaagtacaagggcttccacgtgccgccggcggagctggaggcgctcctcatcacgcacccggagatcaaggacgccgccgtcgtctcaatgaacgatgaccttgctggt

SEQ ID NO: 4746 - DNA, 319 bp, Zea mays
  Clone ID: LIB3137-062-Q1-K1-B10
caccgccgtttgtttttttatctcccacccaaagtgctgtcggcaggatgaggatctctggtgcggcggcgacctttacgcgtctggcgcatcgtgtggtggccccggcggtgcccacgcccctaggccagctcccgctcttctggctggaccgctacccgacccagcgcgcgctcatctagtccctccacgtctttcaagggccgagctgactcggtagcggaggcgcccgccagggccattgagcgcgcgcttgcttgccccctggtgagcttctaccccatcttcggtagactggcggtctttgaccagggggaac

SEQ ID NO: 4747 - DNA, 228 bp, Zea mays
  Clone ID: LIB3137-062-Q1-K1-B2
gtcacgtctcccacacctaactgtcccccgtttcacgaataccaaagcctacatggggacgcgaccgccactgcctcccactcctgctcctcgaggacgacgccctcgccgccgaccctgctagcgcggtgctgggcggcgggcgctgcccgctgctgggcgggtggaacccgatccctgacatgagcgactcggacatccaggagctaggcgggtgggcgctggggc

SEQ ID NO: 4748 - DNA, 292 bp, Zea mays
  unsure (1)..(292): unsure at all n locations; Clone ID: LIB3137-062-Q1-K1-B3
ctccagtttcaacattactcgtttgagaatttaatccctaaaactgttgaggggtaaacgtctaatctatactaccattactcacatgcctatcagccaaccaacaaccttgctgaaatcctcagcaatatccttgctctacacaaaatgacaactttgaatcgtgactagctcggccaggaaactctgctgcatctattcatgcagacttacctccactacancgngngtgatcagtccgnnnnncttacatccaacgcacctaaattggaagcacattccaaccaacaat

SEQ ID NO: 4749 - DNA, 333 bp, Zea mays
  unsure (1)..(333): unsure at all n locations; Clone ID: LIB3137-062-Q1-K1-B4
gagcgagagcggcagccccgcatcttgacgttggagctcgtggcgtcaagtgggggcgcgggcgcgctcgctgtcgtctgcaacaaggcactattccccgtgagggtccccatcaccatcgcgctcacgccgcccgtcgccagggccctaagccgctggaggctcgtcaagagctgatctgtgagtccgtttgccgcttcagattgccctctgctattttagtttcagagtcaaactttggtgcnacctttaacttcaatatgctgttggatgatgtgggcctattcataatttgtgtgaggttctgttgattaaatggtgtgccattgaaat

SEQ ID NO: 4750 - DNA, 341 bp, Zea mays
  unsure (1)..(341): unsure at all n locations; Clone ID: LIB3137-062-Q1-K1-B5
gttccaaagctccaactccgacgagaaccgtcactcctttaaatctcgaaggattttctgcggcgaaccccttcgtgacgtgacccaatgggagaggcctcgccgtcgatcgccaaggacgtcaccgagttgatcgggaacacgccgctggtgtacctcaacaaggtgaccgatgggtgcgtcggccgcgtcgccgccaagctcgagtccatggagccctgctccagcgtcaaggataggattggctacancntgatcacggacgcagaggagaaagggctgattactccaggcgtgagtgttctgattgaaccaactagcggcaacacaggcattggact

SEQ ID NO: 4751 - DNA, 380 bp, Zea mays
  unsure (1)..(380): unsure at all n locations; Clone ID: LIB3137-062-Q1-K1-B6
gggtccgacccacgcccgtccggtctccaaacgcttccacactctctacagagaaacacgtttctctcctctgtaaagtctcgaagagacttttactgggggcgaacgcgctcttcgtgacgtagagcccaatcgggagaaggacctcgctcgtccgatctgccacaggacggtctaccgagtttgatctgggaacacagcgcgctggtgtacactcaacaagtgtgtaccgatgcggtgcagtacggccgcgtctcacgtcaagactcgagtccatgtgagccctgctccagcgtcaaggataggattggcnncnncatgatcacggacgcagaggagaaagggctgattactccaggcgtgagtgttctgattgaacc

SEQ ID NO: 4752 - DNA, 304 bp, Zea mays
  unsure (1)..(304): unsure at all n locations; Clone ID: LIB3137-062-Q1-K1-B7
agcgctccagctcccctccatcctcggccattaattctttggcgagctccgatccggtcggagtactagcccacgccgcagaagccgcgcgacctgatcgcgcgggggtcgaggagaggggaagcgcggcgccgcggttgcctgccaccgtaccgccgcatgagaaggaagaggagcccgtatccctccgtcccgctgcccgtcggaccgatggactccgagttcccctgcccctactgctacgaggaccnnnacgtnagatccctctgcgcgcacctggatgaggagcacccgttcgaacccc

SEQ ID NO: 4753 - DNA, 362 bp, Zea mays
  unsure (1)..(362): unsure at all n locations; Clone ID: LIB3137-062-Q1-K1-B9
cgnntccggccangcttatcagcttctcaccgtcgtcgttactcctaacaacggcaacnncgcgggaaggttgggcggcgggaggcganngcctggagcagtggctttgctgaacccgccgccgctttctgtcnncagcgagaaccagtnntccgcgtcaccttcgactggggaggtnggagaagcagggcattcccgggcgccatcatcgtcaagaacaaccacgcctccgagttcttcctcaagaccatcaccctcaacgacgtccccggccacggcaccatcgtcttcgtcgccaactcatggatctacccgcagtccaagtaccgctacaaccgcgtcttcttctccaacgacacgta

SEQ ID NO: 4754 - DNA, 290 bp, Zea mays
  unsure (1)..(290): unsure at all n locations; Clone ID: LIB3137-062-Q1-K1-C2
ggtggttttccattcatcatcgttcttcctttgtctctgaactttttctgctgggtctgggggccgggagcagaggttgctacacgtatatattctgaagaagagatcgagatgaccagcgtgtggaagaccaaggttctgcctggcctcaacaagatctttgacaaggatggcaagaaggctgcagctgcaggcttcttgaagtccttcaacaaggaggagattgacaaggagattcnnnccccgaagacagatctggagcccaaggtcgtggaggcctacnaagcatc

SEQ ID NO: 4755 - DNA, 200 bp, Zea mays
  unsure (1)..(200): unsure at all n locations; Clone ID: LIB3137-062-Q1-K1-C4
ggccgacgaggcgtccgaaccaccaacaacaaccatatttttcattttctcgccnncacnccancggggggccgccccctccaacggccaatctgacacaataccaaaatcactaggacacgatcccttacattcactcctcaaccaaatgcttcccagccctgcgatatcttcttccccttgcagatgaccctcatcac

SEQ ID NO: 4756 - DNA, 368 bp, Zea mays
  unsure (1)..(368): unsure at all n locations; Clone ID: LIB3137-062-Q1-K1-C5
gccaccgatcgctcctgagcactttccacattccagtttcactccgcctccgctgccgggcgccgtctgcgagactccgacagtccgaccgcaagaaggatgagtgaagaggataagactgctgcttctgctgagcagccgaagagggcccctaagctcaatgaaaggatcctctcttctctgtccaggaggtccgtagctgctcatccatggcatgatcttgagatcggtcctgatgctcctgctgtnnncaangntgctgttgagatcacaaagggaagcaaagttaaatatgagcttgacaagaaaactggactgattaaagttgatcgagtcctgtactcatcagttgtataccctcacaaata

SEQ ID NO: 4757 - DNA, 317 bp, Zea mays
  unsure (1)..(317): unsure at all n locations; Clone ID: LIB3137-062-Q1-K1-C7
ggcgacccacgcgtcggaaaggttacctgaacgaccccgagtcgctttataacactcatcgaccaggacggctggctggacaccggcgacatcggctacgtggacgacgacgacgagatcttcatcgtcgacaggctcaaggagatcatcaagtacaagggcttccacgtgccgccggcggagctggaggcgctcctcatcacgcacccggagatcaaggacgccgccgtcgtctcaatgaacgatgaccttgctggtgaaatcccnnncgccttcatcgtgcggaccgaaagttctaacataccgatgatgacatc

SEQ ID NO: 4758 - DNA, 196 bp, Zea mays
  unsure (1)..(196): unsure at all n locations; Clone ID: LIB3137-062-Q1-K1-C8
cttcccccacccttttttttcgttttttggttttttttttttggtttccccacccctnncggctaaaaaataacttttataacccccctccctttaatactcccaacgggggttaaaacattttatttgataggggctaaattttaacaggggcaaaccaaacaccacctttttattttactcccccccccccaat

SEQ ID NO: 4759 - DNA, 225 bp, Zea mays
  Clone ID: LIB3137-062-Q1-K1-D2
aaagcccttctctgacattcggttctacattttgctccaggccaccatcatctgcatagacgaactattatgtatgcggaacaaccactactccacaacaacttccaggcacaggccgatgccgtcaaccttatatgcagtgccaacacccattctaaccccaagaacacaataggcgtgatgacaatggccgcgaagggcgatcactttctaaacactcccacc

SEQ ID NO: 4760 - DNA, 232 bp, Zea mays
  Clone ID: LIB3137-062-Q1-K1-D3
aacgcgtcgcatccgctccacatgtatcctctttgccaccgcaaccgtgtgaccgcccgtgcggacggagatcccgatccggcgacccgtcccagccccgatcgcagccatgtctccgtcggagccgacgcgtgaggagagcgtgtacatggccaatcttgcggagcacgcggagcggtacgaggagatggtcgagttcatggagcgcgtcgcgcgctacgccgggggcgcc

SEQ ID NO: 4761 - DNA, 374 bp, Zea mays
  unsure (1)..(374): unsure at all n locations; Clone ID: LIB3137-062-Q1-K1-D5
attgatccccgcagcactaccggtagttgcggtagacgggagtgtacatgcagttctctgcatatttcaccaggtcgctggggggaggcagacgggtcgccagaccgagctcgtaggcttttgcagccacggctgcagcgatgtgcgcagagatctttctgatgctggtgaagggtgggaagatggagcccttctcgaagttgtcctgtgtggcctgatcagctagcgctttcgaggcggcgagaancatgtcctcgtggacacggacggctccagagatcacaagaccgaagccgagtccaaggaaaatgtaagcattgttcgacttgccaagcacaaaagtctttccttcgtactccacgggggcaaatgga

SEQ ID NO: 4762 - DNA, 333 bp, Zea mays
  Clone ID: LIB3137-062-Q1-K1-D6
gcgactacatgggcgactagtacaccgacttctgcaaggaaggcgacaaccacggctatgtgcatttcaggatacagttccagaggccgaacccggtcggcaccaacaccgcgccagcaccgtcagcagcgactacagctgcgccagcggtgcctacttctgctgcgaccagcaccttcctcgacatggttcaataggggcgcgggcggcacccctttcaaaccgtacgttcgtatatgcgtccaaaccatgtacctgcgcgcatcagcgtgacctactactatactataccagtccaccaagcatgcaccatcaggccatcacactgttctc

SEQ ID NO: 4763 - DNA, 360 bp, Zea mays
  unsure (1)..(360): unsure at all n locations; Clone ID: LIB3137-062-Q1-K1-D7
tgtcggcctcacgttttccactgcttccagttgcttcctctcgagtccgcagtctctcttgcctacgaagttcagaagttgtcacaatgactcatatccttggccacacattgtttttttttctgttcctgttgttctatcgattcttgtaagggcgggttttgcagttcgttgctcttttatgtcatggtggactcgttgttttttatgttttctgttggaacggcgtgtttcggatgatggttccntttcgtccttgacctgggctgggctgcacgcggcgaccagagggaacgcgaccggcaaaaggcgcatgcgcggcggcccgccgccaatgggcgcgacgacgggctcaccccg

SEQ ID NO: 4764 - DNA, 250 bp, Zea mays
  unsure (1)..(250): unsure at all n locations; Clone ID: LIB3137-062-Q1-K1-E1
ccgggccgaccgaggcgtgcgaatcagncagtaacagctcactttttacacttttaagccccccccgctcccagagcccaacggagcaaaacgcaaagcccaccaaccacacatcaaaccacaccatcgatggcgcccaaggcggagaaaaagcacccagtaaagaaacccccggaggaggagcccgcgacctataaagctcataaggctccggcagggaataaacctaaggcggagaaacgcctcccct

SEQ ID NO: 4765 - DNA, 214 bp, Zea mays
  unsure (1)..(214): unsure at all n locations; Clone ID: LIB3137-062-Q1-K1-E11
ttctttctgctccaatctattttttctactcgaccancaaaangggaggggaggtcgatatactgtttataaggtctactcttttctttcctacttctaatcccactttcatcgcctcttcgctttccctgactccttctcctactgcaaggtgaatctgctgctcttcctggccgaccgcaagcctgactctctcctctcctggtgccccgac

SEQ ID NO: 4766 - DNA, 370 bp, Zea mays
  unsure (1)..(370): unsure at all n locations; Clone ID: LIB3137-062-Q1-K1-E12
acgcgtccgcagggaaatagaagttgcaggattaatttcaagcttgagtacacttacatctggggtagaacgtttgtataagttatgtgctgactgcaangaagcagaagattcactgaagaagaaatggaagaaaatcgaagaatttgacgcccgtcgaacagagctggagtgcatttacagtgctcttcagcgggctaatatggatgcatcatcattttgggagcaacaaccattatcagctagaggatatgcatcaagtacaattatccctgcgtgccatactgtggtagacatgtctacgaactcaagggacctcataaagcgagaattagctgcatttagccagagcttggataatagcttgtgc

SEQ ID NO: 4767 - DNA, 156 bp, Zea mays
  Clone ID: LIB3137-062-Q1-K1-E3
cggccgcgtgggcccccccccttttcccttttcgccgcccccccccgccgcgcggcgccgggggcggtcttgcggccccttcgctctcctctccccccggtccgcctccccgcgccctcctgccgcctccccccggccgcgtgctgcggctccttc

SEQ ID NO: 4768 - DNA, 286 bp, Zea mays
  unsure (1)..(286): unsure at all n locations; Clone ID: LIB3137-062-Q1-K1-E4
ggccgaccgacgcgtgcgggngggtngtcttctcctccctttccggttttttancgganncgngaggaacgggggcgggcggcttcanaagtgagcgcagccaaatggcggcatcggatgttgaataccgctgcttcatcggcggcctcgcctgggccacggacgaccactccctgcacaacgccttcaacacctacggcgaggtcctcgagtccaagattatcctccatcgggagacgcagaggtccctccgattaggntnnnaaaccttatacacggaggaggc

SEQ ID NO: 4769 - DNA, 304 bp, Zea mays
  unsure (1)..(304): unsure at all n locations; Clone ID: LIB3137-062-Q1-K1-E5
gaaatcgaaatcttttattctgggtgtgcaaagtttcagatgacagagttttattctgggtgtacaaagtttagagatttgacgcacatgtgcactacacgatgtctgtgtcttgcagttgtagtaacaggtagcttttgttacttattaggcgtcaacgtgatatgaggtggtattattggtggtgcttaagattgtgtttccgaaggggctctggtcgtagcannccaagttgtcgccgtagctgagaccaaacatgtcgcagtagcgtttgtagaagccgatccggctggcaacacgagcg

SEQ ID NO: 4770 - DNA, 305 bp, Zea mays
  unsure (1)..(305): unsure at all n locations; Clone ID: LIB3137-062-Q1-K1-E6
cagcaaatgctgcttcctctttccagatcattgttggtcttgctggaactaccaataaaactgttaaggtgccgaagaacttcactcttaagactccaggccctgggtacacatgtgggcgtgctattgttggcaggccaacaaagtttttcactgcggatgggcgcagggtaacccaagctctaatgacatggaatgtgacctgcacatattcccaatttcttgctcagaagactccgtcctgctnnnnatctctctcatcattttataatgacacaattgtgaactgcccgacatgctcatgt

SEQ ID NO: 4771 - DNA, 456 bp, Zea mays
  unsure (1)..(456): unsure at all n locations; Clone ID: LIB3137-062-Q1-K1-E7
atacagatgctgcttgctctttacagatcattttcagtcttgccggaacaaccaataaaaggcgtaaggtgccgaaaaacggcactcttaagactccagtccctgcgtacannnnngggcgtgctattgttggcaggccaacaaagtttttcactgcggatgggcacatggtaacccaagctataaagacatggaatgtgacctgcacatattgccaatttcttggtcagaagactccatcctgcnnnnnattgatctcatcattttataannacgcacttgtgaactgcccgacatgctcatgtggccgccagaacccaagtgggtcaaactgtgtgaacgaagattcacctaatctacaagccacaattgatggtcctggtaaaaagactgggcagcctgttgtacaatgcacttcttacatgtgcccaataagaatccactggcatgggaagc

SEQ ID NO: 4772 - DNA, 357 bp, Zea mays
  unsure (1)..(357): unsure at all n locations; Clone ID: LIB3137-062-Q1-K1-E8
aggccgacccacgcgtncgcggacgcgtgggcggactcttgggttgatgtcntccttttcaccattgaggaaggaatctgtgaggtgggggccacagctggtgacacccatcttggtggtgaggactttgacaacaggatggtcaaccacttcgtccaggagttcaagaggaagaacaagaaggatatcactggcaaccccagggctctccggaggctgaggaccgcttgtgagagggcgaagaggactctgtcttccactgcttnnnccacaattgagattgactcgttgtatgagggcatctacttctactccactatcacccgtgccaggtttgaagagctcaacatggacctg

SEQ ID NO: 4773 - DNA, 300 bp, Zea mays
  unsure (1)..(300): unsure at all n locations; Clone ID: LIB3137-062-Q1-K1-E9
gccgaccacgcgtccgagtggctattatcccttccatgtgnctttctcacaagatcgccggcttttccagccatgtcatgaagcggatccagaagggtcccgttcgtggcatctctttgaagctccaagaagaagagcgtgagcgtcgcatggatttcgttcccgacgaatccgccatcaaggttgatcaaatcgaagtcgataaggaaactctcgatatgctttctgttctcgggatggctgatattcccggccttgttaaggtcgatccggttgctgttgctgttcctcatatctggt

SEQ ID NO: 4774 - DNA, 247 bp, Zea mays
  Clone ID: LIB3137-062-Q1-K1-F11
ctctaaccaagacctcttcggggtaggggttcttatggttttgtggagggcctatggcagcggctgatgtgtagtaccgttgctacgtcggctggcttgcctgggccaccagcaacgagtcgcttgagaatgccttctcctcctactgcgagatcctcgactccaaggtcatcaccgaccgggagacggggaggtctcgcggcttcagctttcttaccttctcctccgaaaacttcattctctactc

SEQ ID NO: 4775 - DNA, 417 bp, Zea mays
  Clone ID: LIB3137-062-Q1-K1-F12
gaattcccaggcaggcaggtcggcgattagggcaggaagaccgaagaccgagccgtgcgggggctcgggacgggaacgggacaggaccccaaaatctcagatccttcctgcccgcccgcccgtgcccgtcgacgcgtcgttcttgccggccgcgccccacctccgccctctcctcctccaggggaatcggatacgccacaggctgcgcgatggtgctgtgggtcttcggctacggctccctcatctggaaccccggcttcgacttcgacgacaaaatcctcggcttcatcaagggctacaagcgcacctttaatctcgcttgcattgaccacagaggcacaccggagcatccggcgaggacctgcacgcttgaaaccgacgacgaggccatatgcttgggaattgcatattgtgtca

SEQ ID NO: 4776 - DNA, 256 bp, Zea mays
  unsure (1)..(256): unsure at all n locations; Clone ID: LIB3137-062-Q1-K1-F2
ggccgacgcacgcgtgcggnagaagcagccgccgntgctgttgttcctttcacaaaaagggggganacggggagacccggaagatcaatgcggatttcaaacctttccaagtgaaattcaagataaggctggctgtcaagacagactacagggccagcataaggctgattaaccaagacaaaaacaagtacaacacacccaaatacacatttgttgtgcgatttaccaacaaggacattactgtacaaattatatt

SEQ ID NO: 4777 - DNA, 434 bp, Zea mays
  unsure (1)..(434): unsure at all n locations; Clone ID: LIB3137-062-Q1-K1-F3
ccatcacatcttcctctgtatttttggaagttggcatcggacgtcggatgcaggacacactgattgcattagcgcctacacctaccgcaagtggaagcctatggatctcaagcaagcctcctctggtacaatcttctgccttctgcttctattctgcgtgggctgcaaatgtcggccttcggaaatagaggccacccagacagcagccctcaaggttgatgcctcgccacagcttgcctnnaacatccctgaaacactgcttgggatattctttgaggagatcaaccatgcatgaactggtggcatatgggcagagcttgtcagtaacagaggtttcgaagctggaggctctcatactccattaaacatcgacccgtggtccatcatntgagaagactcctccgtgtttgtggtgactgatcgtacatcatgtt

SEQ ID NO: 4778 - DNA, 374 bp, Zea mays
  unsure (1)..(374): unsure at all n locations; Clone ID: LIB3137-062-Q1-K1-F5
tctacttgctaggaggtggttacacacccgttaacctacccccgccgccttggcctcacgtgacgatgtcttgcacggtgaccatcccgaactcgccagtcttctcgccttcacgccgcccgctgtcctgcaaggccgctcccgcgtcgccggagcccgccgtcgccgtctccgcctcttccgcggcgcccgcgcccgccgccgccggttcgccgctccgccccttcgcgctccgcgcgctgctccngnaggaggtatttccgtctccatcgccccagctggcctctgccgcagcggtggcctcggtaccaagcggggccgtgctgaagcggcggcgacctgcgccgctccttgtgccggcgtccggcgcggcg

SEQ ID NO: 4779 - DNA, 354 bp, Zea mays
  unsure (1)..(354): unsure at all n locations; Clone ID: LIB3137-062-Q1-K1-F6
aagacatcctaataccgtcctacacacatgtatactgtctgtctgccgcctggtgacacggtgccaagaacactacctccacacctgttcactgctgcttcttcttgccaatatgctccttcttgtagctagatctcggatggagctggggatgaccatggaggtcgcgaagatcatctacgtatgtacagtacgcggctgctacttagttcaccaggccagcatgcgagctccagctttgttcgnnnnnnngatgctaactgtagcatcgtggcagccattcatcacctgacagatcttatattccccccatccccgctactagttggtggttagcaaatcccaccaaacatg

SEQ ID NO: 4780 - DNA, 381 bp, Zea mays
  unsure (1)..(381): unsure at all n locations; Clone ID: LIB3137-062-Q1-K1-F7
agggcgaccacgcgtccggctaatcccatcaaatctaacaagcatgttcacggcttccgtgggcgtgggcggcgcaggggcatggctactcccgcagcgccgccagggcgccgacccctggagcggcgggcggcggcgggcgcccgtggcggtgcgcgcgtcgtacgaggacggggtgggcgtgatggcgaccaaggtggggatgatgacctacttcgatccggagacaggaaagccggtgccggtgaccgaggtcggaataaaannaaggcggcaacgtggtgacgcatgtgaagactgccnncacggacggatacaacaccgtccaggtcgggtaccacggcgtgcgcgaggacaagctcacccgcccggagctgggcc

SEQ ID NO: 4781 - DNA, 448 bp, Zea mays
  unsure (1)..(448): unsure at all n locations; Clone ID: LIB3137-062-Q1-K1-F8
ggccganccacgcgtncgatcggcccctacgtcttctcctcctcgccctccgactcttacaccgactcctccgacgcggcttcctgcgcgcccccctcgctgcgcttgcgccccaacccctacgcgtggaaccgccgcttcgggctcctcttcctcgagagcccgctcggcaccggctacagcgcggcgccgtcgccctccgccatcccgacgacgcagcccgccgtggcggagcacgtcctcgccgcgctccagtccttccttnnnnngcagccggacgacgccacctttcgcgcccgcccgctcttcctcaccggcgagagctacgccggcaagaccatccccacggtcgccgcgctcattctggccgncaccaccagcaccaccaccaccaacccggctcttcccgagcacctgttcacgaggatgaggatcaacctgcgcggcg

SEQ ID NO: 4782 - DNA, 446 bp, Zea mays
  unsure (1)..(446): unsure at all n locations; Clone ID: LIB3137-062-Q1-K1-G1
ccgggccgaccgacgcgtccgagcagctagtattcttgctatgtttgcgcttttggtcagctcgagagagaagcggaccgtgtttgggcttcgagatttctattgacttttgaggtacccggggtatagtctacaatacaggttgcttcttcttgcacgctgctttcttggctctgtggctaccgaccttgctggctttccctcccgaattagcggctgagctccatccagaccttgcaaagattggacctttggggggnnnntcgctcactcctagcttgcttcgctggctggtcttngagcttctcgtgctacgagccaagggaggccatcttttcctgctcggatctgtcgtgcaaacgggaaaaattgagctgatcttgttgttgctggggatccttgcaaagctaacccgttctttttgtctggagtgcacagtgcatggg

SEQ ID NO: 4783 - DNA, 317 bp, Zea mays
  unsure (1)..(317): unsure at all n locations; Clone ID: LIB3137-062-Q1-K1-G2
gncaaagcgccgctgccgcccgtgcctcattcgctgccgatcgtgggcaacggggggattgtggaccagctgacgcaccgcgggctggcggcgctggcggagacgtacggcgggctgctgcaccttcggctggggcggctgcacgcgttcgcggtgtcgacgcccgagtacgcgcgcgaggtgctgcatgcgcaggacggcgcgttctcgaaccggccggcgaccgcggcgatcgcgtgnntgangtacgaccgcgcggacatggcgttcgcgcactacgggcccttctggcggcagatgcgcaagctgtgcgtgat

SEQ ID NO: 4784 - DNA, 178 bp, Zea mays
  Clone ID: LIB3137-062-Q1-K1-G3
gacatatacttaaccttactattttacaattttgaccatcatagctttcatggggtgctggggttgatagatagggttataataacatttaacagacacaggaacagtgaaattatacaccactggataaataagaaggtagtcatatacaacataaatgttatcaggatgtacgagg

SEQ ID NO: 4785 - DNA, 180 bp, Zea mays
  Clone ID: LIB3137-062-Q1-K1-G4
cgacccacgcgtacggacaacctcacacctcactgtttatagctttttgtctctccttccccactcggggaaatgggacctgaacatacagtccgcgcaaactgctatgccctctctgtctattcgcgtccacttcttgtggcctatgctttgtaccggcgcatccgtgctcgatgcgac

SEQ ID NO: 4786 - DNA, 437 bp, Zea mays
  unsure (1)..(437): unsure at all n locations; Clone ID: LIB3137-062-Q1-K1-G5
ggttccgtcctcgatccgatccgccgagtgcacaccacctttccccactccgatcgaatcgatggccgccgagggcgagaagaagatgataaccctcaaaagctccgatggcgaggagttcgaggtggaagaggcggtggcgatggagtcgcagaccatccgccacatgatcgaggatgactgcgccgacaacggtatccctcttcctaacgtcaactccaagatcctatccaaggtaatcgagtactgcaacaagcacgtacatgccgccgccgccgccgccgccgcctcgaaggccggttccgacgacgtgggtgccgcctccgctaacagcaccgncgcctccggtgaggacctcaagaactgggatgcggacttcgtcaaggtcgaccaggccacgcttttcgacctcatcttggctgcaaactatctgaaca

SEQ ID NO: 4787 - DNA, 237 bp, Zea mays
  Clone ID: LIB3137-062-Q1-K1-G6
aaatacatactagatccgatccgccgagtgtacaccacctttccccactccgatcaaatggggggccggcgagggcgaaaagaagatgataaccctcaaaagctccgatggcgaggagttctaggtggacgaggctgtggttatggagtcgcataccatccgccacatgatcgaggatgactgcgcctacaacggcatacctcttcctaacgtcaactccaatatcctatccaaggt

SEQ ID NO: 4788 - DNA, 335 bp, Zea mays
  unsure (1)..(335): unsure at all n locations; Clone ID: LIB3137-062-Q1-K1-G7
aaaacgcgatcaaaaaaagtgggtctgttttttaagtttttgagcagctcattttaatggggataaaggtggaccatgtacatgaagcgagatccctttataagcgttgttatagcaaaagatttgctgggtctggatcagaagagatatgctactcatggataagatttgaagaggagaatggcaccttggatgattatgatcttgctgtaaagaaggttacccctctgctaaaggagcttatgnnnnncaagtctcaagaggaggctaaagttgaggcttaccctaacctcaatgataattctaatgcagatgattcctctcagaaaagaaaa

SEQ ID NO: 4789 - DNA, 378 bp, Zea mays
  unsure (1)..(378): unsure at all n locations; Clone ID: LIB3137-062-Q1-K1-G8
gccagtaggatagcctcccagatctagctgttacggctgcctcttcctccttccccaattcgggaaagatgacatgaagatcagtttgtgtaaacgtgttgccctctctctctcttcgtgtccagttcttgttgcgtctgctttgtactgttgcagcggtggtcgatgcgacggcgggatgggcggatgaggggcctggctgctagatggtgtggctcacttctctttctgtcagntctctctctcatcctanggacttgttccgccgtatacatccatcaccgccgtcccacttncgtccatcgctgcgcgccgatgatgcgtcgccgtcgtcgtgcaggcggtgcagcctcacatcggtcgccgtggtggcagtgt

SEQ ID NO: 4790 - DNA, 329 bp, Zea mays
  Clone ID: LIB3137-062-Q1-K1-G9
gctgatcacaattccagctcagtccacttgcaagcacatctcaaaggcagcatgcaaggaagcgagtagccacaccacaacaacagggaggaggaacagaacagaggcagagagagagagagagccatggcggcggtcgccgtgagcgggggtcactggaggaggctgcggacgctggggcgcggcgcgtcgggcgccgtggtgtcgctggcgtgggacgccgcgtcgggggagctggtcgcggacaagtctgccggcgcgagcggcgcggtggcgcttaggcgggagcacgcggtgctggccgggctgcgctcgccgcacgtattgcg

SEQ ID NO: 4791 - DNA, 347 bp, Zea mays
  unsure (1)..(347): unsure at all n locations; Clone ID: LIB3137-062-Q1-K1-H1
gcctcccttctatgccggagcttttacaattttgactcgcgcagcactccggtgagcctgggggactccctccctgccgctgggatggccaaggaaacgagttaccgaccgagacgggcaagactagggcaggcgccaaggtcgggctcccggcgatggacctatccctagcgttcccgcacgccacaccttcctccattttcccgccgtacgcttatgattattacccggatgatgatttgnnnaccagtgaagaacgctctaatatgatgaacgtcaagcgtctcatggcaaaagaaatagctcccattctgttatcgtacagggaaaacgcatagtttccattt

SEQ ID NO: 4792 - DNA, 77 bp, Zea mays
  unsure (1)..(77): unsure at all n locations; Clone ID: LIB3137-062-Q1-K1-H12
cacgcgttccgcaactaagataagatttcaccttcatcaagngctagacccccttccggccatgcatccattgcatg

SEQ ID NO: 4793 - DNA, 149 bp, Zea mays
  Clone ID: LIB3137-062-Q1-K1-H3
ggcaagcgcatcgcctacaaacttttcgattttccgcgagctcccatacataaggtagatggggctatggcactgagggataggaaacatcaatggctctatttggtagcatgacgtgtagtgttcaactcacattattgcgattgctg

SEQ ID NO: 4794 - DNA, 374 bp, Zea mays
  unsure (1)..(374): unsure at all n locations; Clone ID: LIB3137-062-Q1-K1-H5
gcgaccacgcgtccggcaaggagcggatgctgtgggcgtccacgcattgcgctcttctgcggcggcaagcgcgacggggcctggggggtggggcagctgggcgagtggctctgacgtgccgcgctaccgtcaccgcgggtgagcggggcgcccggggggccgcccgttaccgtgcgccgggtgcgcctgcgcgacggtcgccacctgacctacgaggagttcggcgtgcccaaggaggtggcgcgctacaggatcatcttttannnnnngcttcgccagctcgcgcttcgacagcctccgcgccncncatgaagatagcgatgagctatgcgtgtacatggtgggcttaaaccgcgccggctacggtgagagcg

SEQ ID NO: 4795 - DNA, 397 bp, Zea mays
  unsure (1)..(397): unsure at all n locations; Clone ID: LIB3137-062-Q1-K1-H6
cgacacgcgtccgacgacgtcggatccctctgcgcgcacctggttgaggagctcccgttcgaaccccaagccggggcctgacctgtctgctatgagatggttacgaaggatatggttaaccatattactacgcaacatggatatttattcaagaatcgccgccggctgcgcagattcatcattccaggcagacaggccctctctttgctgagccgagatctacgggaagcccacttgcaggtgctcctcggaggatgcggacnnagatccatcgacaacagcagcaacagcgccacgaacatttcggctgatcctcttctgtcggcggtcggccttggcttccctacctgagacgcggagcaagcatacaagtcgactgttttcattcctgatgatg

SEQ ID NO: 4796 - DNA, 174 bp, Zea mays
  Clone ID: LIB3137-062-Q1-K1-H7
acgacgtctgatccctcttaccgcaccttcttgatgatctacccgttcgaaccccaaacccggccctgtgctgtatgctctgagatgattacaaaccatatggttaaccatcttactacacaacatggatgtttattcaagaatcgtcgccttctgcccatattcatcattcca

SEQ ID NO: 4797 - DNA, 247 bp, Zea mays
  Clone ID: LIB3137-062-Q1-K1-H8
gcagctagcagacggcttctcgtcaggcccttcctcctttaccctcggcaaacccgactcgtgcggtcggaactacgtatgtttcatctgagcgttcgggaggacaaaacacgcggcgaggaccatgatggcgattgtgcgggaggaggcagtggacacgttcattatcccaagggtgagcgcgctgtggacgtccaaaaccatggccattaccgatcaggccatggagctgcggcaggccggcgtg

SEQ ID NO: 4798 - DNA, 444 bp, Zea mays
  Clone ID: LIB3137-062-Q1-K1-H9
gaaaaacggccgacccacgcgttcgtcctgtctttctactcgtatgttttgttcccccctcatggttctcacggcaggttcgctactgccggttggattcctttcttctttcttgtttgtgcattatttattctcttggtaaagctggattgaagatggtttctccaggttgcacacaaaaaatggctcactgaagaggtaggttgacaatgattaggatcttgagaaaagaattcaacccttatattagtcagtcttctctttacaagtattttgttatcttgagctttactttaatgcatttaataactataatttttcccaagttttgctttatttttttatgaaatttgcattctcaaccctttgaagcttgttttgatttgttttggtttaaaattttatcacttttttttttgtcttttttatttttttatatttttc

SEQ ID NO: 4799 - DNA, 152 bp, Zea mays
  Clone ID: LIB3137-061-Q1-K1-F11
cggacgcgtgggcggacgcgtgggctagaaacaaaatattctaaggatgggcctggtgagcgtgaaggggaatcatggacagttaagtggttgaagtttgataatagttacttaaaggagataaagttttttttttgaaccaaattcaagac

SEQ ID NO: 4800 - DNA, 441 bp, Zea mays
  Clone ID: LIB3137-059-Q1-K1-A4
caatcttggaccctgctgaacttgatccaactgttttgagagaagctctaagtggtgacactaggcatctgagagcagccactgatattatatgttccaggacaccatcacagttgcaaataatgaaacagacttattatgctagatttggtacttatcttgagatgacattggtcaccacacatctggcgatcaccagaagcttttacttgctatgtggggattccacgctacgaaggtcctgaggttgatcctaccattgtgacacatgatgcaaaggatttgtacaaagctggtgagaaaaggctcggtacggatgagaagacctttatccgcgttttcactgaacgcagctgggcacacttggcatctgtttcgtctgcttaccatcatatgtatgaccggaaattagagaaggttatcaagagcgaaacatctgga

SEQ ID NO: 4801 - DNA, 323 bp, Zea mays
  unsure (1)..(323): unsure at all n locations; Clone ID: LIB3137-059-Q1-K1-A5
agcccgagaacgtgctcctccggctcgactgtcacgtaacgctggccgacttcnacctgtcccgtctgctccaccccagcaggtcgtccgcggagacgtcgtctcccccgcggccagcgtcatgcgcgggcaccacaaccggcggtcgcgcgtccccgcgcggagcgactcggtctcaatcaccaggtcaagtcatactccaactccaacaactacaggccccctcaccagccctggtgcgctgcgtcgactccgagcagcagatccagagcctggtccgctacatcatgtggagcgtcaactggacccttgtgggcatgaag

SEQ ID NO: 4802 - DNA, 446 bp, Zea mays
  Clone ID: LIB3137-059-Q1-K1-A6
acgccgtccaagtaggtggaaaatcgaggtcgcgcccttgtcttacacgccactaaaggccgcgccgacggggtcatcagacgctttggagtttggacgggctcgcctcggccgctctggcgcttgtgcggtgggtgaagcgcgggtgctggtgcgggaagcctcgccagaccagcgctgccgactgccgagctgggtgcgggcgcgaggagtcgacgggagacaagggtgagggtgaggctccttctcttctcgccttgccctgaattgctgtcatttttggttcatttgcgcttgcttcggtggtgatttgtcgccgacgcgtccggattctgtgtcggtgcgtttcttacggtgtctgtgatatggctgcgactttttcccttcctgttttgagttacgttttccggttgcataatctgtaaccctttatccactctattttc

SEQ ID NO: 4803 - DNA, 350 bp, Zea mays
  Clone ID: LIB3137-059-Q1-K1-A7
gttttcctctctgaccactatgatgtacaaagtgctgacaccattgaggggaaatgcaggggccacagcttccgtagctatacaaagcttgattctgtcaatgctgaggatttcttctgccgcttcgagtataaatcagctactggcagctttgtaccacatcgatagcagtgttttgcaagtgcgagatgccatacaatccagatgaccttagatccaatgcgaggaatgttctgactggtttcaccctgcttgcattgggatgacaatcaaagaagcaaagaaactcgagcattttttctgccagacctgtacagctgaaaatggtaagatggttgagaattcacatg

SEQ ID NO: 4804 - DNA, 357 bp, Zea mays
  unsure (1)..(357): unsure at all n locations; Clone ID: LIB3137-059-Q1-K1-B1
cgggncggcccaagccgtccggcccttaattttttttgttccgggttcaatatttccaccaccgcatagctcctgccttcttgctagttcctaccttcgtcccccccgccgccgtcgattcgtgctgcgctcacctcgacccagttcaatatcgccggcgagggaagcagcagcagaagctccggcagaacccccacctccggctatcgcctggggataaagtggggtcggtagggcggtgacctagggggagcaaaagggatccgatagggagagatgaagcaatcaatttattcgtccgccgtcgcccctgctaacgcccccactactaaccctaggatcatactgtcttttggc

SEQ ID NO: 4805 - DNA, 413 bp, Zea mays
  Clone ID: LIB3137-059-Q1-K1-B10
cgatcgagcacacaagcacgaagactcgttttggagaaaccacaaaccaccaagccgtgcgggcatcatggagtacggtcagcaggggcagcgcggccacggcgccacgggccatgtcgaccagtacggcaacccagtcggcggcgtcgagcacggcaccggggcatgaggcacggcacgggaaccaccggcggcatgggccagctgggtagcacggcggcgctggcatgggtggcgggcagttccagcctgcgagggaggagcacaagaccggcggcatcctgcatcgctccggcagctccagctccagctcgtcggaggacgacggcatgggcggaaggaggaagaagggaatcaaggagaagatcaaagagaagctgcccggaggccacaaagacgaccagcacgccacg

SEQ ID NO: 4806 - DNA, 388 bp, Zea mays
  Clone ID: LIB3137-059-Q1-K1-B11
ggaagtcagcgtaatgtgtggtttctcttgtttaagacatccctcagcattcacagctgtgtctcttgggcgatccaaatggaatggccaggtcggcagttcgggactagtaatcaccttggagacaccccttgacaacatggcaaggccttctttatccgtcaattgaacgggggtttcgagttctgacatttcctccgtgggctctaaatacaactgtatatactgtatctcatagcgagaagatgatatgccactgtatatattgcacacacgtagctgtgattaagtagatatcttcccaaccggtgaagtgtatagtcctaaaaaactgacagatggcttactgttttggttcactgaataaatttgaaggcttgtatgtcgt

SEQ ID NO: 4807 - DNA, 404 bp, Zea mays
  Clone ID: LIB3137-059-Q1-K1-B2
gcctaactcagcaaaggatcatgagctgccatatggtgacgcttctgaagaggaggaccagcgatgagttgccagaaggtggtgatgaatctgaagacgacatccatcgggatgtcaaaagaaagaggactgaaaagctatcaaccaagaatgctctgtactcgccactccgggcgttgaacatctggaggaagaaacagaaggcgatggcaagagacgatttcgtatcagatcttgaagaacagggggttgactcgttccaggaataagaagaagaagaacccgcggaagaactacagggataagcacaagaacaagcttgtcaagcggaaaggccaagtgcgtgatatcaagaagcagtctggtccgtatggaggtgaaacgtctggcatcaacccgaatgt

SEQ ID NO: 4808 - DNA, 369 bp, Zea mays
  Clone ID: LIB3137-059-Q1-K1-B3
ccaccttcctttctattatccacatttttgcgctatcccggcgtacggctgcgatcgatacacgcccaatccaaaccctacctaaaactccgcctcgcgcctacgggctcacactcgtaggcacggagtgccgttccgcggtgggcggaatcaccaaaatgccctgcgttcaccaccacctgctcctcctgacgctcgccgccttggcgtggcggcaggcaccgctagcgccggcggtgacccgacagcaatcgaggcgcagttcgactcctggtgcgcggagcacggtaaggactacgccacgcccgaggagcgcgccgtgcggatggacgagttcgaggacaacgccgcctacgtcgtcgcgcacaa

SEQ ID NO: 4809 - DNA, 208 bp, Zea mays
  Clone ID: LIB3137-059-Q1-K1-B4
catgtccacgctgatcgggcgctacacttgctcttgcaaataacggtggtcgtcggccgcggtctccgccctacccggcgaagaccggcgccgacgacctgccctcggaggcggcggctgggacatggacctggagcacgcccactcggccccttcgaccgaaggccgcaccggatgaagacacgcgcacccgcatggctctctcaaa

SEQ ID NO: 4810 - DNA, 446 bp, Zea mays
  Clone ID: LIB3137-059-Q1-K1-B5
cgctcccactctactcctatccactgcggcctgtacgcgtgcgagagacttgaccaagcaggagcagcagggatggcgcctctgaagctgtacgggatgccgctgtcccccaacgtggtgcgcgtggccaccgtgctcaacgagaagggcctcgacttcgagacgtccccgtcgacctcaccaccggcgcccacaagcagcccgacttcctcccctcaaccctttcggccagatcccggctctcgtcgacggagacgaagtcctcttcgagtcccgtgcgatcaaccggtacatcgccagcaagtacgcgtcggagggcacggacctgctccccgcgacggcgtcggcggcgaagctggaggtgtggctagaggtggagtcgcaccacttctacccgaacgcgtcgccgctggtgttccagctgctcgtgaggccgctcctgggcg

SEQ ID NO: 4811 - DNA, 381 bp, Zea mays
  Clone ID: LIB3137-059-Q1-K1-B6
gaaggcttccaagggtgtgatttgggcaagcctccccaagtcggtggacggggggagcaagggcgcggtgacgggggtaaagaaccagggccagtgcggcagctgctgggccttctccacggtggccgccgtcgagggcatcaaccagatcgtacgggcaacctcacggcgctgtcggagcaggagctcatcgactgcgaccggacggcaacaacggctgcaacggcggcctcatggactacgccttctcctacatcgcacacaacggcggcctccacacggaggaggcctacccgtacctcatggaggaaggcacctgccagcgcagcagcagcagcgagaagaagtggccgggatcgtcggaggacgccaacgacgatg

SEQ ID NO: 4812 - DNA, 384 bp, Zea mays
  unsure (1)..(384): unsure at all n locations; Clone ID: LIB3137-059-Q1-K1-B7
gcgtcgaaaagcccncctgcaccctacttcattctcgagtcgacttgtgcgccgccattctctcgcgccgctgtctcgcgggcccgccgccgtcctagccgccctgtccccgccctctccgtctcgcgccccacgcggcccttgtccatcttttccgtcgccggctctgcggtccgacgcctgccaccggttcctcctatagagaaaggcggcggtcccgagagagcttctttgagggaggataaggcggcgcggagcgtctctgagcggctcaggcccctccggcgctgagctttcctccggcgttgtgtgtgcctgagttgttgactcccaattgaagcgtggtcaaattaccttggctccggtatgggttggagctcttta

SEQ ID NO: 4813 - DNA, 343 bp, Zea mays
  Clone ID: LIB3137-059-Q1-K1-B9
gcgggacacccgccttgctcgcgccgccttattctctcactcctctcggacccccggtggggggtgcagagctgcgcgaccgagaaccgaatctgtgagccatgtcgaccaacaagggcagcgcggccaagggcggcggagggaagaagaaggaggtgaagaagagacgaagctcgggatggcctataagaaggacgacaacttcggggagggtactccgaggttgttgttaacagtgaaatgattgagtactatgacatttctggttgttatatattgaggccacgggcgatggaaatctgggagctactgaaagaattctttgatgcagaaattaaaaagc

SEQ ID NO: 4814 - DNA, 387 bp, Zea mays
  Clone ID: LIB3137-059-Q1-K1-C1
ggcgtccgccaaggcgtccgcccacgcttccgctctttgtgagtttgagctgaaaaggaggaggagggggaggagaagcagcagcgcagccggaggagggagagcgaagatgcgccgcgtcgcgctgttgctcgtcgccgccgtgtgcgcgctggcggcgccggctgccgcgtcgtcactgacggtcttctcccgaacggcaacttcgaggatggcccgccaagtcggcgctggtgaacggcacggtggtgtcgggcgcgaacgccatcccgcgttgggagacgtcgggcttcgtggagtacatcgagtcggggcacaagcagggggacatgctgctggtggtgccgcatggcgcgcacgcggtgcgtctgggcaacgaggcgttca

SEQ ID NO: 4815 - DNA, 424 bp, Zea mays
  Clone ID: LIB3137-059-Q1-K1-C11
cgatgttgtgtttgacgccgaccactgcaaggtgctcgggagcattgagcagcagtcccctgatattgctcagggtgtgcatggccacttcaccaagcgccccgaggagattggagctggtgaccagggacacatgttcggtatgcgaccgatgagacccctgagttgatgcccctcagccatgtcctgccaccaagctaggtgctcgtctcaccgaggtccgcaagaacggaacctgcccctggctcaggcctgatgggaagacccaggtgacagtcgagtaccgcaatgagggtggtgccatggtccccatccgtgtccacaccgtcctcatctccacccagcacgacgagacagtgaccaatgatgagatcgctgctgacctgaaggagcatgtcatcaaacctgtcatccctgagcagta

SEQ ID NO: 4816 - DNA, 408 bp, Zea mays
  Clone ID: LIB3137-059-Q1-K1-C12
gccaccatcgaccttcaagtctcgctacgtttcagtgcaataaaaaaagcagccgcaatggcgagcagcaccatggccctctcctccacggccttcgccggcaaggccgtgaacgtgccgtcgtcgtccgccttcggcgaggcccgcgtgacgatgcgcaaacggcggcgaaggccaagccagcggcggcgtccgggagcccgtggtacgccccgaccgcgtgctgtacctgggcccactgtccggcgagccaccgagctacctgacgggcgagttcccgggcgactacggctgggacaccgcggggctgtcggcggacccggagacgttcgccaagaaccgggagctggaggtgatccactcccgctgggccatgctgggcgcgctcggcttgcgtcttcccgagct

SEQ ID NO: 4817 - DNA, 375 bp, Zea mays
  unsure (1)..(375): unsure at all n locations; Clone ID: LIB3137-059-Q1-K1-C2
gggtgcgtgcaagaccgaccacacgcgcgtctctgccggcgccgcgccgcgacattctacaataacgggcgttcacacgtgctcttatacgcgaccaccgacgcttgtctagtgtacgggatgcaggaacaacagttccttacgaaaccctaacctgatacccggcatnccaagggcctgaatcagtacctggagcaacatcaggtgccccagcaacaacgggcagagcagctggaagaacgcctggaagaaggccggcgcctgctccggcctcagcgagaaagactacttcgagactgccctctccttccgtagccggatcaacccactcgttcgcctcaaagccaaaggtatcgagccggacttcgggctcta

SEQ ID NO: 4818 - DNA, 240 bp, Zea mays
  unsure (1)..(240): unsure at all n locations; Clone ID: LIB3137-059-Q1-K1-C3
aaacccgggccgaccgcacgcgtacgaaacaagtgantganaaagagagagagaggtgggaaatatgctgcgccacgccgccgcccggtctgtttccgggccgtcggttcccccaacccgcccccggcgcttgccactgcggaagttccccctgaagccctcgaagacttcaccttcctccaagccttaaaaaagttctccccaacattgaacccccaaggaacgcccttttccttatta

SEQ ID NO: 4819 - DNA, 457 bp, Zea mays
  Clone ID: LIB3137-059-Q1-K1-C4
agccttccgttggcgttggctgcccaaaaggttgtcgaggttaatgcccttgcgaaggctttggcaggccgaaaggatgaggcttactttgcagccaatgctgctgctcaggcctcaaggagatcatcacctagagtgacaaacgaggaggtccaaaaggctgcagctgcttgaagggttctgaccaccgccgtgctaccactgttgctgctagattggagctcagcagaaaaagctcaaccttcctgtccttcccacaaccacaattggttcattccctcagactgtggaactcaggagggtccgtcgtgagtacaaggcaaagaagatctccgaggaggaatacatcagtgccatcaaggaagaaatcagcaaggttgtcaagatccaagaggagcttgacattgatgtgcttgtgcatggagagccagagagaaatgacatggttgagtacttc

SEQ ID NO: 4820 - DNA, 344 bp, Zea mays
  Clone ID: LIB3137-059-Q1-K1-C7
cgcgtccgggaagagggtactatggatcctctcaagtattgtgcaagaagatatttgttggtagacttgcacatgaagcaaacacggatgacctaagacattactttggcagatttggtcgaatcgtagatgcgtatattccaaaggaccccaaaagaagtggccaccgagttttgggtttgtcaccttcgctgatgagggtgtggcagaacgggtattcgtagaagccatgaaattctgggccatgaggttgcaatagacacagctgcaccacttgagaatgattcagctggtggaggttacattgatcccatggacctttacggagcttatggttcaatgag

SEQ ID NO: 4821 - DNA, 376 bp, Zea mays
  Clone ID: LIB3137-059-Q1-K1-D10
aaaaaccgggccgaccgcacgcgtccggctgggcttggttggctcgcccgcctgctttgttcgcaattcccttcggtttcaatcccagccgccgacccgatctataatgaatcaaaccgccgccctccggcctggcggctgccgcagtcggcctgcggtgtactgttagtctgctgctgatttccgtgttatactgctggtacatgtgtcgtgtgatagatgtgtcaactatatatatatctcgtcgccggcagctctggcatgtttgagtatgtgttgcttctctgtggtgccggcgacgatggctgctagtactgttaatgtgatcgggtctccttgaacaatggcataaatatgttgcttgtttactttttcc

SEQ ID NO: 4822 - DNA, 441 bp, Zea mays
  Clone ID: LIB3137-059-Q1-K1-D11
gaagctcactcgctgctcgttgccggctgttcccgcccactccaccgctgatatttgtcagggtctcgttcctgccctcggccctcccctcgctcgctccccaactccagcaggcagatcagatacatccattcacggaccggaaggaaaggaaagggttaaccatgagcgccgtggctgtttcgtcgtcgctgaacccggacgcgccctcttcatcccggcggcgctgctgcaggtggaggacttctcgccgcagtggtgggacctcatcaccaccactgcctggttccgcgaccactggtcccgcgagcgcgcccacctggacgagatggccgagcagatcgacgcggccggcctcctccccgacgacgaggacctcttctacgacgaccagcccgagcagggccccgtcgccgccgcccttaagacagattcggtgct

SEQ ID NO: 4823 - DNA, 346 bp, Zea mays
  unsure (1)..(346): unsure at all n locations; Clone ID: LIB3137-059-Q1-K1-D2
gcgtccgctgggggatcaaatgttcttagaaacgangtaatttctcaaccaagaacgcatggttatgatggttcatcaagagtgaccaatcctgctttggctggcctgactggactacctgctggagttacggcacgggggcctagtgctctgtaagacccgacttttctgttctgagtggattagctccagtccgggcaacgggcggagctactcactagggtcttggtgctttggaagacccgtcttttggctggtctgagtggactagcttcagccagtgcactgtgacctagatctttgaaagaagaattggattttatttttaagaatttttttaattaag

SEQ ID NO: 4824 - DNA, 500 bp, Zea mays
  unsure (1)..(500): unsure at all n locations; Clone ID: LIB3137-059-Q1-K1-D3
cccgggtgcgaccgacgcgtnccgatgtcngttgcagctgcgcgatctaagctgcggttttgttgctctaagctgcaagtnnngcggcaagaagggaccctgactctggaggggagactaggctaccgccgcgcagggcctacctgtcgtccttctggcgtggcctccggagaaagaagggccgcgctccgagttctgtcgagggccgcggcggagtctcggctgaggctcgcccacgtgcttgcagcttgcggtggcaactgcaagtgcgaccctctgtcaactgctgatcacatccgatcgacgaccatggatatgattattatctatctagcttgtggtggtggttgaacaataataagcgaggccgagctggctgccatacataagtattgtgtggtgtcactggtgtgtgtgtgagagagagagaaacagagttctttagtttgctatctctctctctttctctctctgcatgcttggcgtcagtctttgtgctc

SEQ ID NO: 4825 - DNA, 265 bp, Zea mays
  Clone ID: LIB3137-059-Q1-K1-D4
aggccaccctaaaggacccactaatgcgtcgcaacctcgcaggcagggaagaaactgtagggggttgcatcggagtcgctgtaaatgtggtgggcgatggtaacggcaaggaaagcaagaaggctgattactaagggttctttttctctcttctcctttttgtgttccctttttctttcccctcagttttagttttcaggttgggaggggggccatgaatgatgaactgtccgtgggagcaaaagaattgcgatagtatttattc

SEQ ID NO: 4826 - DNA, 393 bp, Zea mays
  Clone ID: LIB3137-059-Q1-K1-D5
aaaggacgtaaaatttaattggagccgccacacacccgaagggggggcacttgaggctgattggaacgctaagtttgcagagtacgagaagaagtatgcagatgatgcagcaaccttgaaaagtatcatcacgggggagttaccactggctgggttgatgctcttcctaaatacactccagagagcccaggaatgccaccaggaacctctcccagcagtgcctgaacgcgcttgctaatgttgtgcctggtcttatcggaggcagtgctgatcttgcatcctccaacatgactctgctgaagatgtttggtgacttccagaaggatacagctgaagagcgcaatgtccgctttggagtcagagagcacggaatgggtgccatttgcaatggca

SEQ ID NO: 4827 - DNA, 387 bp, Zea mays
  unsure (1)..(387): unsure at all n locations; Clone ID: LIB3137-059-Q1-K1-D6
ggaacgggggcngcttctctgtgtaagtggcacgattgtcaagggacgtgcccaacaatgtatctcattcgttctccagggtgtccgctgctgctgtggcttgaggagcggtacgagtggtgtacagccgccacccggggttccaggccggcacccggccgctgtcgcgctcgacaacccgttccccaccacgctccccgagaacctcttcggcgacaagtgggcgttcgtgcagctcccgttctccgctgtgagagaggaggtggagtcactggagaggaggtacgcattcggtgcggggctggatttggaactgctggggttcgagcttgatgacaccacgctagtccctggtgtcgccgtgggatcatctcgcgccaagccttt

SEQ ID NO: 4828 - DNA, 398 bp, Zea mays
  Clone ID: LIB3137-059-Q1-K1-D7
cgccgccgaagccgtgcctgtccttcccgatcccgaggcaaagctgcgactccgcaaccggcgccatggcgttcgagaagatcaaggtctccaacccaatcgtcgagatggacggtgatgagatgaccagggtattctggcagtctatcaaggacaagctttcctcccatttctggacctggacatcaagtactatgatttggggatacgcaccgtgaagcaactgatgacaaggtcacagtggaggctgcagaggctactctcaagtacaacgtggctattaagtgtgcgaccattactccagatgaaactcgggttaaggagttcaatctgaaacacatgtggaagagcccaaatggcacaattaggaacattataaatggcactgtgttcagaga

SEQ ID NO: 4829 - DNA, 413 bp, Zea mays
  unsure (1)..(413): unsure at all n locations; Clone ID: LIB3137-059-Q1-K1-D8
tccggaaagccgacgtcgcccccgcccccccctgataaaattcgtgatgcggagaacagctaccggcngcctcgtcctcgtccccgtgctcgctgcggcggtacagacctccgccctgcctttcatcgtcctgcacgggattggggaccagtgcgtcaaccatggcgtgccaagttcactaaacttctcgccgattggtccggctccgacggctatgcctagagattggcagaggaacatgggactcttgggtcatgcctcttcaacaacaggctgatataatctgcaacaaggtcaaggaaatgaaacaactgagaggtggctacaacatagttggtctgtctcaggggaacttgattggtcgagcagtggttgagtactgtgatgatggaccgcccgtcaagaatttcatc

SEQ ID NO: 4830 - DNA, 394 bp, Zea mays
  Clone ID: LIB3137-059-Q1-K1-D9
ttccggaaacgaaaaccgcccgaaggaataccgagtgttggaggcgccgttcgattccagaagtttggatcgccgcgccgtgacgatcttgtgtagcctgcgcattggtctgctcgtcggacgtcggcgtcggtcgagtcgtggggtgcgcggtcgtgcgagatcgagcggggagctcgcgaatcggaggccgcggggcgcaatgccgcgtcggtaggatggcggaggcggcgccatggcgaggggcgtagcgcgggcggtgtctttcgggcgccgtgccacaacggggtggtgctcctaccggcgcgtcaccgtggccgtctgcatcggcaaccttgtcgccgtgctgctcgtgctccgctccctcaccgcccccgcttccttcgcacccacc

SEQ ID NO: 4831 - DNA, 447 bp, Zea mays
  Clone ID: LIB3137-059-Q1-K1-E11
agcctgatgacgccgccggctcgcccgccgttttctcccagtcgtccccggagatcttgcggggcagcaagctgttccaggtgtacgtggtggtgggcacgacggtgggcctgttcctgccgctggcgcacgtgctgggcgggttcgcgcgcggcgacgatgcggcggtgcggtcggcgacgccgcacctgttcctgctgtcgtgccaatcctgacggagaacgtggtggggtcgctgggcgccttctcgccgcccgtcagggcgctggtgccgctgctctacaccgtgcgccgcgtcttcgtcatcctcgactgggcctacgacgcgtgggcctccaccgcgcaggacgccgcctgggtgtggttcggcaggtgcctcgccgccgccaacctgctctacttctccgccaacctcttcgtctttctcatcccgaggttcctgccccg

SEQ ID NO: 4832 - DNA, 380 bp, Zea mays
  Clone ID: LIB3137-059-Q1-K1-E12
gcagctcgcgcagttcccacttcccacccaccaaaccaaactctcctccacaaccacagccgtcccccgccgcccctcctcttctcggcttgctcggccccaaaacggcaagagccgacgccagcaaaccctcggattcgggagggaaggaaggcacgagcacgcagctgcctacccgcagctaaccccaaacagcaacgtcgtagccgagagagcctccgccacctacccaccaactcccgcccgtcgtcgcctccgcttgggttctcgtcgagcagttggtgggcacctaccgcatccagccagagagagagagagagagtgagccactgagccagggcggcaaggtggagatgaagaagctgtaccaggcggaaggg

SEQ ID NO: 4833 - DNA, 452 bp, Zea mays
  unsure (1)..(452): unsure at all n locations; Clone ID: LIB3137-059-Q1-K1-E2
cccggagcantcgctggtgctgcgcccggtttttgtcgcggcggcctcccgcctcggctggcagcgcgggatggcgcggcggcctggcggggacggctacggctcgacgcggtctggcgcgggcggggaccgcgcgcccatggccacggagatggcgccgtgttccccgggtgcgactacgagcattggctcatcgtgatggacaagccggcggggagggcgccagcaagcagcagatgattgactgctacatccagaccctcgccaaggtccttggaagcgaggaggaggcgaagaagaagatctacaacgtctcgtgcgagcgctacttcgggtttgggtgcgagatcgatgaggagacatctaacaagctcgaggggcttcctggcgttctcttttgtgctcccgggattcgtatggttgatgctggaatacaaaggactaccggagcc

SEQ ID NO: 4834 - DNA, 440 bp, Zea mays
  Clone ID: LIB3137-059-Q1-K1-E5
ggcggctgccccactccccccagcccctagtactgctcaacaatggcgacgcggcgccacagctgtcctcctcgccgctgccggcgtgtcccttctcgcgctcgaggctgtggagggcctcgaagaggggccccgcgggcgccggctgctggtcctgctggcgacctggccgtgcggtcgtcgcactcggccttcttcggctcgctccagcgcgcgggttcgatctcgaattccgcctcgccgacgaccccaagctctcgctgcaccgctacggccagtacctctacgatggcctcgtgctgttcgccccctccaccccacgttttggtggatcagtggaccagaacgcagtccttgaatttattgatgctgggcatgacatgatcctggcggcagattcctctgcctctgatcttattcggggcattgcgacagactgt

SEQ ID NO: 4835 - DNA, 125 bp, Zea mays
  unsure (1)..(125): unsure at all n locations; Clone ID: LIB3137-059-Q1-K1-E6
tataaaaaaaattaaanaaaaaaaaaaaataaataaaattattaaaaaaatataatgaaaaaaagtataaaaaaaaaaataaataaaaaaataaaaaaaaaataaatataataaaataagnttgt

SEQ ID NO: 4836 - DNA, 381 bp, Zea mays
  unsure (1)..(381): unsure at all n locations; Clone ID: LIB3137-059-Q1-K1-E7
tcctgcaccctgccccgtttcgccgggccgcgcacaattgcacgtgcgtatggccgtatcaagggcacgagctccgggggaagagcaagacggacctgcaggcgcagctcaaggagctgaagtctgagctctccctcctccggtagccaaggtcaccggcggncacccaacaagctctccaagatcaaggggtgcgcacctcgatcgcgcgcgtgctcacagtgatctcgcagaagcagaagtcggcgttgcgggaggcgtacaagaagaagaacctgctccccctcgacctccgccctaagaagacccgtgccatccgccgccgtctgaccaagcaccagctctctctgaagaccgagagggaaaagaagcgtgagaagt

SEQ ID NO: 4837 - DNA, 119 bp, Zea mays
  unsure (1)..(119): unsure at all n locations; Clone ID: LIB3137-059-Q1-K1-E9
cttctaccaaggccttctactatatctgacagacatgganatagattgctgcgattatacaactatgcatcatcttaacaacatctaggaatacatgctcatgaagcaatctcactctg

SEQ ID NO: 4838 - DNA, 392 bp, Zea mays
  unsure (1)..(392): unsure at all n locations; Clone ID: LIB3137-059-Q1-K1-F11
agcctgatgactcctccggctcacccgccgtcntctcccagtcgtccccggacatctggcgcagcgataagctgatccaggtgtacgtcttgctggccaccacggtgggcctgttcctgccgctggcgcacgtgctgggcaggttcacgcgcggcgacatgcagtggtgccgtcggagacgccgcacctgttcctgctgtcatgccaatcctgactgagaacgtggtggggtcgctgggcgccttgtcgccgtctcgcatggcgctggagccgctgctctacaccgtgcgccatgttttcttcatcctcgactgggcctacgacgcgtggtcctacaacgcgcatgactccagctgggtgtggataggcaggtgcctttgcgtcggcaacct

SEQ ID NO: 4839 - DNA, 378 bp, Zea mays
  unsure (1)..(378): unsure at all n locations; Clone ID: LIB3137-059-Q1-K1-F12
gcaccagcaacaaaggtggcaggcacagagagagctagctttggccaggcgtccacagcaggcagcacaagatgtcgacggtggtcatgggggtggatcttgagtgcgacaagtgctacaagaagatcaggaaggtcctctgcaaggtccaagacaaggtagcatcaggaccatctcctacgacgagaagaacaacacggtgacggtgtcgggcccttcgacgccgaggaggtcgccgacaggctcaccgccgacgccggcaaggtcatcaccgacatacacgtcgtcgggggcttcggcttcggcttgggcggnggcggaggcggaggcggagggaaacaacagaagcacggcgccgtcgcccccggcaaggcgccc

SEQ ID NO: 4840 - DNA, 366 bp, Zea mays
  Clone ID: LIB3137-059-Q1-K1-F2
gaaaaaccgggccgaccgacgcgtccgcaaccagaggtggaacgacgtgttcgacgtgctcatccaggaacacgtgcagagcaggcggggcggcgagagcgaggagagcgaggcggacttcatacacgttctgctctccatacagctagagtacggcctcactacggacaatctcaaggccatcttggtgacatgttcgaggcaggtatagagacatcttacctgacgctagagtacgcatggccgagctcatcaacaacaggcacgtcatggagaagctacagacggaggtgaggacgacgatgcgctcgccggacggcaagaagctggacatgctagcggaggaagacctccgcagcatgccct

SEQ ID NO: 4841 - DNA, 388 bp, Zea mays
  Clone ID: LIB3137-059-Q1-K1-F3
cactactatccacctgcctagccctggtggctggtgcttcacgccggcagcctccagcgagaccccagcagcagcccgccgcctccaagtacgccgatccggcctccaggggactgcctccttctcgccgaccttagatttggtcgctgcaccggtcgattagtcatcgggccggtagatttggctgctctggccgccgatcgcacgtccggttgggggcggctttgatgggcgacagcggctggcgctgtgtgagcgagctgggcgagcgcggcgtctgcgcgtcgcctgtcgcggcgggcaaatgcaggggtcgcggggaactcgcttttggggctgcgggactgggagcgcgtgggggtgggcgcggcgttcgtgtggcttgggg

SEQ ID NO: 4842 - DNA, 374 bp, Zea mays
  Clone ID: LIB3137-059-Q1-K1-F5
atcccaatccaagaaatactacgcccatcgtttctcaccgccgaggcaggcagaggagcacacggcccatgagctgaggaccggtttcgccatggccgccaagaagctggtgctcaagctggacctgcacgacgacaaggacaagcagaaggtgctcaaggcggctccaccctccacggtatcgactccatctccgtggacatgaagggctcaatctgacggtggtcggcctggcggaccccgtcgacgtcgtggccaggctgcgcaaggtcgccgccgccgaaatcgtctccgtcgggccagccaaggaggacaagaaggagggtgacaagaaggagggggacaagaagaagaggacgacgagaagaagcagc

SEQ ID NO: 4843 - DNA, 409 bp, Zea mays
  unsure (1)..(409): unsure at all n locations; Clone ID: LIB3137-059-Q1-K1-F6
cggaaannccggggcggcccaaggcgtccgccgtttcccgtgcagcgccctccctatacgtttccccatttcctgtgttggcggcgatggcgcggcacttcgtgctcaacaccggcgccaagatcccctccgtggggctcggcacctggcagtctgaccccggcgtcgttggcaacgctgtctacgccgccgcaaggcgggttaccgacatatcgattgtgccagagtttacggcaacgaaaggagattggtttggcgctgaagaagctatttgaagagggtgtagtgaagcgagaagatatgtttatcacctctaagctatggaatgatcatcatgctcctgaagatgtgcctgaggcactaaatgacagcctgaatgatttgcagcttgagtacctgcatctttatc

SEQ ID NO: 4844 - DNA, 434 bp, Zea mays
  unsure (1)..(434): unsure at all n locations; Clone ID: LIB3137-059-Q1-K1-F7
tccgatccaaatcgcgtaaaaaaagcagacgtccttgctaatggcggttccagatcgtggttcgtgtgtgagcttcgaggaatcgacggtcaagcttcggcgaccaaatgacccagctcttcgagttctacaaggctgaagattttgagcatctgtttggtgaaggtgtccgcattgcaaccactgttcaggcgaagatggagccgtggaagggacttccaggagttccaagactacgacgagttctaggcgtgggtagcggcaaacccccagtcggctgcctgtgaaggccgcgtttatctacgttccgttttcgcactttggttattgtaaagactatgtggatgtctcagacatatgatgtaatcgactattatttccctttttaatactatttgagcactgtgtgttggaaaaaaaaaanaaataaattt

SEQ ID NO: 4845 - DNA, 371 bp, Zea mays
  Clone ID: LIB3137-059-Q1-K1-F8
cggacgcgtgggccaatttcatatcttcttttttttttttcggcggccgccgcggccgcgggtccccaaaaggggggttagtggtattcccaaattcaatcataaatcattcgcgtgctttcatttcaattcacacgggcgccgcgaaacagaccgagaacaagcatctcgtgtcatataactctcctataccgagtcttgcctctctgtgatctgctgcactttcatcaacaccagtctctctcctcctggattgcattgcccccacgcgagaacgcacgcacaccaaccggaatagccatgatcttctgatccaatccaagatgggcctcaaggagcagcagctagacgccactgaccaaactcgtgat

SEQ ID NO: 4846 - DNA, 453 bp, Zea mays
  Clone ID: LIB3137-059-Q1-K1-F9
ccgtccggttaccaaactaaattggcacaaaagtccttgttgaaagaggaagaaaactcttctgaaggggggagcttgagctttgaagctgttacacctgaacaggatgccccatataatgatgacaatgaagaatctcaaatgcctgttgagaagcatcaccatattctgaagaggttgatggtgagcttgagatggaggatgtagctccaccatctgtattgaggcaaccaccaagtgccaaccagagcaaagtgacaccaatcgtgcaccatctgaccaacgcccttcagatgctggccctccacttcctgtggaccggcctccatctcctccgccattgccatcatctcctccacctgtccccgttcctcagagtgcacagatgcagcctaaattacaaatggcatctgatcccatggcgccacatcctcaaagagctacatatagtgt

SEQ ID NO: 4847 - DNA, 405 bp, Zea mays
  Clone ID: LIB3137-059-Q1-K1-G1
gttttctcgattcctcagcaagagtttgtcttcgccaaattgacagataaattggagcaagaaatgcatgatccattagtttcaaggtcttgctgcctgcctttatggtgcattgaactgatgtctgcatgtcctttcttattttcatttgaggcgagatgaagtatttccagttgacggcatttggttctttgaaaaatcatcatggcacatgatggatgcaagtgttaacagtgttgcggaaagggggtcttcccactcacggaaaaagttcaaagttgatcgtgatgatatactggtttcagcagcaaaaatgatgaagtcccatgctaagagcaatgctctacttgaaatagaatataaaagaggaagtgggcacttggtttaggtcctacaatgggaatc

SEQ ID NO: 4848 - DNA, 154 bp, Zea mays
  unsure (1)..(154): unsure at all n locations; Clone ID: LIB3137-059-Q1-K1-G11
acaaaatccaccatcctcttctcactcccncacccacccggcaattcacacccacagccctcaacacctctccatcacccttcatctccccaaaatcacatcctcacacttctatactatccttccttatcttatcccaaaaaaaggtgcaatc

SEQ ID NO: 4849 - DNA, 335 bp, Zea mays
  unsure (1)..(335): unsure at all n locations; Clone ID: LIB3137-059-Q1-K1-G12
gcgtccggaccgggcttcccgttccccctcctctgtgtacatggtgctggtggccgtcgaccgcgcaggtccgttgcgggggcctctaatggcgcacaacaggcagcagtacggcggtggcttctccgactcccgcggccatcagcaccaggcgctcccggactggcccggcctcaccacgcctttgccaagccatccttccggatccgtcgncctggaagcccgcgccgcgccgtcgatcgcctgccgctgtcgttgccgccgcgctcctcctacttgccggcgtctttcttctctcgcgccgcatttcacgcagttctgcatatgtcaaccaa

SEQ ID NO: 4850 - DNA, 447 bp, Zea mays
  Clone ID: LIB3137-059-Q1-K1-G2
cgtccgcgcagagataggcgtcttcgtactcgccttctttcgcggctcaaacctttcccccttctcgcaattgtttccgccggccggggctccacccgtacgacgacaccatgagggagtgcatttcgatccacatcggccaggccggtatccaggtcggaaacgcggctgggagctgtactgccttgagcatggcattcaggctgacggtcagagcccggtgacaagaccattgggggaggtgatgatgctttcaacaccttcttcagtgagactggtgctgggaagcacgtgccccgtgctgtttttgttgaccttgaacccactgtcatcgatgaggtgagaactggcacctaccgtcagctctttcaccctgagcagctcatcagtgggaaggaggatgcattcaacaacttttgccgtgggcactacaccattggcaaggag

SEQ ID NO: 4851 - DNA, 139 bp, Zea mays
  unsure (1)..(139): unsure at all n locations; Clone ID: LIB3137-059-Q1-K1-G3
cttaccgactgatctgtctaacccaacaacctctccactagcccgctttcttctcaaatccctcgggctcctcctaaccanctcatctctcttcctcccaccccatactacccaactctacttcacccgtacacccata

SEQ ID NO: 4852 - DNA, 457 bp, Zea mays
  unsure (1)..(457): unsure at all n locations; Clone ID: LIB3137-059-Q1-K1-G4
cggaaancccggggcggaccaaggcgtccggctggtcatcgtcgcccaggggaaggtcaatatttaccgccaggtcatattgacagacgacggagaagaggtggggaagaaaggggatacactgaaggtgcgagctggattctaccgcaacttcctccttcccaagggcaaggctacacttctgaccccagagtcctcaaggaaatgcagctggagcaggagagaatagaagctgagaagagcgggtaaaagaagacgcgcaacaacttgctcgagtttttgaaaccattggcgctttcaaactccctcgcaaaggtggaaaaggaaaacagatctttgggagtgtcacggcacaggatgttgttgacataataaagtcacaacttaatagggatgtcgacaagaagctgtgacggttccagaaatncgggaaatccgagagtatgttgcagagatc

SEQ ID NO: 4853 - DNA, 434 bp, Zea mays
  Clone ID: LIB3137-059-Q1-K1-G5
gccgctcaactccacgggccttgagctaggtttttcttcgccgctacctccctacgaggcgggcgtgcagccatggcgctggtgcaggcgggcatgggccttacccgggtcgttatcctcgtcggcgccggcgttgccggctccgtcgtcctccgcaacggcgcctcgccgagatcctcggcgagctccaggagatactcgacaaggggagaaggtgaaggatggaggagggggagacggggaaaccgatctcaacgaggctcttacctcgcaggtgcgtcgccttgccatggaggtccggcaacttggtaattcacgttcaataactgttctcaatggaggttctgcacaatcaggagtatcaggcctgatagtacctgcagcaactgtaggagcactgggttacggttatatgtggtggaaggggatctcgt

SEQ ID NO: 4854 - DNA, 380 bp, Zea mays
  Clone ID: LIB3137-059-Q1-K1-G6
acgccgtccggaacggcggccacctcttcgtcgtcaagaacgccgccgcagacatgcgccccttccacactgggggccccaaccaacatcaccgcgcacggcccggcggcgacccgggcccgcctcaccttcccggtacccccatgcaccccgccttcccgccacctgtcccaacctcgccgccgccgccaaccccatggctgcagcggcggcggccaacctttcctggcgctgcagcttctaggccaggcccagcagctccagaatctcggtttcctcgccgccgccgcgctccagaagcagcagcagcaggcgccgttctttcctggagggttcccttcgaaccccaatcagtttgcgcctttcgcgggtggcccccc

SEQ ID NO: 4855 - DNA, 332 bp, Zea mays
  Clone ID: LIB3137-059-Q1-K1-G9
tttaccaccgaccagggtttccgccatgagtgctttcggggcggtgatcacgccagaaaccctcaagtacatgtccaagtaccagggacgtgagatcacgcaggtggactgcgcacgggaggcgatgaggctatccacgcggaagacaagaacctcaaggccgaggactcagcgtgggagtgaagaagaagttcggcaacggcgtgagcaccatggtcctcgtctacaacgccaccggggccagcctgagcctggtggacgacgggaaagactggatgggctccgtctacagctcgccgatcccggacacctttcacaacgggcagtggatc

SEQ ID NO: 4856 - DNA, 422 bp, Zea mays
  unsure (1)..(422): unsure at all n locations; Clone ID: LIB3137-059-Q1-K1-H1
aaaaacngggccggccgacgcgtccgagagcgtcaaacaattcttgcttcccgctagtttgctcgcaagaaataatggctccacttcggcttgcttctcgcacagcctggcatcctggccttacaagcagccgccatgataatggccggcacggcctttcttcttcaccgggaagtagtagtaagcgagccgtagccttagcttcataccacgagctgaaaagacgacgacaggcgtgagggtcatgttgtgagcgaaaagctgagcccctggcaaatccccaggagggagtggttcccccctagctttatctttggtgccgccacttcagcataccaaattgaaggcgcttggaacgaatgtggcaaggggccaagcacttgggacgacttctgccacaaatatccggagtggatagcgga

SEQ ID NO: 4857 - DNA, 334 bp, Zea mays
  Clone ID: LIB3137-059-Q1-K1-H11
gtccggaagaattcgcgttgttcgaacagccattcatcatgaacgacaaggtcacaataagtgagtggctgaagcaaactatagctacaactggagagaatatgaaggtcaggagatttgcccggtacaacctaagtgaagggctggagaaaaaaagccaggatttgctgctgaaagttgcacccaaaacaggaacgaaagccgcaacaagttcttcaaaggataacaggcttgttgaaccaccaaattccgggaaaaaaaacccggttgtggaagtttaagcttcgtggtggaaccacttccaaaacaaaaccgggcttgccttaatgaatgg

SEQ ID NO: 4858 - DNA, 342 bp, Zea mays
  unsure (1)..(342): unsure at all n locations; Clone ID: LIB3137-059-Q1-K1-H12
gacacagaggccatcacaaatgtggaaccctcattatttctgtgtcacctcacttactctgcatcgtgggcgttgtctgtcgtcgccatgggccatgcacnngcagctcggtcagcttgggcggcaagctccttggtcaccgcccgtaaccaaggacgcgttccaacctccttttacagtgcgcccttaaaggacggccacccgttcgtcctcaacttaagtagcccgtcttttcgttggccacttccgcaacttcttccaaaaccaacaacggaacgttaaccgcaacgttttcggcaaacgcaaccaacggcaaaaacccgttgttcccggcttcttttt

SEQ ID NO: 4859 - DNA, 331 bp, Zea mays
  Clone ID: LIB3137-059-Q1-K1-H2
cccagttgtggttcggcctggtcacattttttttgaaccagcaggtggagaatccgacaagtggccaacaaaggagttacagggcacgttccaatggagtgcaacaatgagcaaaaagaagggccagaagtggggaatgaatagctcaaacaagaaaaatgctatatcttctatcatgcaggaatagctggatgcagcacagaagttaacatcatgtcatggacattaaggttactgaaaatggcttttgtgctatcaataatcaaaggaacaatgaaggcagtaacattgatatgtccagtgtgcaaaatattgctaatgaatacaagtc

SEQ ID NO: 4860 - DNA, 447 bp, Zea mays
  Clone ID: LIB3137-059-Q1-K1-H3
cggcgagccgacgaacccaccctcgtggcacctacggcaccgccgcgatgtcgttgccggcggcgaccgcgccgtcctcttcgggggcgacgcagccccatccccagcccacggagcagcagggaggctcgagggagcggcgggtggagtcgctgggatggctacggagtcggcggtgatgccgaagaagcacaaggccatcgagggggtcgcgccgcttcgatcctcgacctcaaggcccagctctaccgcacccaggaggaggcccgaaaccccaccgcccccggcgccgctgcttccggcggggagttccgccgcgcaaagatacgctccgcacccaccgaccctctcggggccaagaactccggcgttgcatcccgggcccacaaggataagctggagcttaaagccgtgaaagacggttctgcaagctatgctgctctagaa

SEQ ID NO: 4861 - DNA, 421 bp, Zea mays
  Clone ID: LIB3137-059-Q1-K1-H7
ccggggcggcccaagccgtcggtttttttttttcctttaaaacttgggcggcttttataataaataagttactacatccatccgagaacttactttcaccacgttttagctctgtcgtggacggctggacccacatatcagtggctcatcgccatcgacgtgtgggtaaaaaaaaagagagggaaggggggaagggtggaggtcgcatatgcactctgtccacggcggcatgacaaaactcaggacggacgacggccgccgtcggcggctaatgctggtaggagccctgcgacgccggggacggcacggtggaggcggtccggacggtggcggaggaggcggtggtggcggaggacagccgcggcgtggccgtggccgtggggcgcgcctgcctgatcaccacggtgggcaggcccgggct

SEQ ID NO: 4862 - DNA, 59 bp, Zea mays
  unsure (1)..(59): unsure at all n locations; Clone ID: LIB3137-059-Q1-K1-H8
cggggagccgacnaacccaccctcgtggcatttatggcaccgccgcgatgtctatgccg

SEQ ID NO: 4863 - DNA, 474 bp, Zea mays
  unsure (1)..(474): unsure at all n locations; Clone ID: LIB3137-059-Q1-K1-H9
gaaaaacnggggcgaccgacgcgtccggcaacggcaagatctgggacgccagcaggtttttgaggctgggcatcaaaagcagcttccganctggagtccccgaggtcgtgaccggatcgattacgctggagagcgagttcgacaccagctacatctggggcgagaacaccgtcaacacggaggagttctcaccgactacgaggtcatcgtgcctccgcacaccgtcatcacggtgcgatcctggccacgcagggcacttgccaggtccccttcttctacacgcaggaggatattttgactaccggggagaagaaggtcaccaagtatgacgatggcatcttccgtggagtcaacagctttggtttcaagtccgaggtcaccgagaggaagatcaacggcgaatgagacgatgcaccactgtgccaaagtctgcttatctatctatatttgcattaataattcagccacgtacgc

SEQ ID NO: 4864 - DNA, 350 bp, Zea mays
  Clone ID: LIB3137-060-Q1-K1-A1
gaacaattcaacagaggaagaatcaggcagggagctctcccattcgcatcccaggccaaccgcagcggccaatccaatccgttgcaggtcgcaggatggctccgcgtgagcaccaccagccccaggaggaggaggaggaggacaccgcatgcgtcgtcaagctcatcagcgccgagggcttcgaattcgtcgtcgacaagaaggccgccatggtctccaacaccctacgcaacatgctcacatcgccaggcggtttctccgagacgcgccagggcgaggttcgcttcccggagatccccaccaatatcctcgagaagatctgccagtacttctattggtcgctccattat

SEQ ID NO: 4865 - DNA, 250 bp, Zea mays
  Clone ID: LIB3137-060-Q1-K1-A12
aatacaaaacaatcttattccacaaacatcatttatatcaacatctaatcttcccatcaaatacctatatattctatcatttttcaaaaacaatcttcacaatttaaactcaaaaccatcatcatctctttctcatcctaataactacccaaacttatttaaatactaacacatccccctcaacatatatacatctttttcctataaataaaacatctatccacctacccttaatacattattcatacta

SEQ ID NO: 4866 - DNA, 163 bp, Zea mays
  Clone ID: LIB3137-060-Q1-K1-A2
ggagaggaggagccgacgagacaccacacagggcaaccctggcgggcgcggtaccaaggtcttctccccgcgccgtggcacaccatcctgcgcctgcgtgcgtctctactgtcaattgccaccgcatgctgcgagcgaggagaggagcacgtgccgagactag

SEQ ID NO: 4867 - DNA, 209 bp, Zea mays
  Clone ID: LIB3137-060-Q1-K1-A3
caaaaaaaaataataaaaaaaattaaaaaattttattaaaaacaaaaacaccacccacaacgagcacgcaaacctaaaaaaacacaacaaatcaaaccaaataactacatactaaaaaaaaaagggccgtccgccaacactatttttaaattcgaagccctctctttaaacaacccaatcttccttccccttacattcaacaccataat

SEQ ID NO: 4868 - DNA, 247 bp, Zea mays
  Clone ID: LIB3137-060-Q1-K1-A4
agtacacaaaccggcggcaattcagcttcctgatccaagacctcatcagggacagagaggcgtctcgcgttcgttaccgaggtgaggtgaagaaagaaattgccgccggagcaagaacaagaaccttcgccccccttgccgtgcttcctgccgcttgccttggcggcggcggccttgccggcttcggcttcggcccattccggttgcacaaccaccctcatcatcctgtacccgtgcctcaactaca

SEQ ID NO: 4869 - DNA, 399 bp, Zea mays
  Clone ID: LIB3137-060-Q1-K1-A5
cggacgcgtgggttccagtcctcctcctgttctttgtttcccgtcccatcgtgtgtgagcgcgtctgctggtctgccaagaggaggaaaggaaggaggagcaagcagagatggcttgccctgcgcagtccatgctctccgccagcggctgcatcttcctgaggagcaagcctcatgcggcatcccaagtgcgagggggcatcatcggcggtggccgcagcagcaggccgttcctgctcacctgcaacgcttcctcttctccgtccccttcctcgccggcgccggcgcatgaagaccccgactgcaacgaggaggagtgcgccccggagaaggaggtcgggagcctgagcgccgaagtgctggccgaggagaggacccaggtcgtcggcactttcccttc

SEQ ID NO: 4870 - DNA, 283 bp, Zea mays
  Clone ID: LIB3137-060-Q1-K1-A6
gaccacgcgttcgcaacgcttttcttccacttctcctactgttttttttttcccgacccatcaactgatagcacagatgcttttcttccaataggatgaaccaaacaaatatcaatcatagattacttgccctactcagtccatgctctcctccagctactgcatcttccttaggagcaagcctcatgcatcatcccaagttcgatgagtcatcatcgacttataccttaacaacaagccattcctgctcacctacaactcttactcttttccttacccttcc

SEQ ID NO: 4871 - DNA, 398 bp, Zea mays
  Clone ID: LIB3137-060-Q1-K1-A7
ctatctcaaaatctctacaaagaaaattcagccgccgttggcttcttctgtagtgtgcatcgccttcacgtcacttcctccccatcacgtttttcctctacccaggtcgagctcgccctactgtgcttgcctgtgctcgtcggccatatccctggtggccgacctcgcccctgccccagacacagcttccccttcagccctgctgctgcaagcactcagcctctcctatggcacacggtgctcgtccagcccctttctactggtgtttgcgtcatctccctggtgctcgacgaaatgaccatgaggagttttgtgttgcgtgcagccccacctgcgacaccgtcgacccccgaagcgaggtccgtgcgacgtttgccaagtgttcgatggaaagtccg

SEQ ID NO: 4872 - DNA, 281 bp, Zea mays
  Clone ID: LIB3137-060-Q1-K1-A8
gttcttcttcttcttcacacaagcgttttttttctgctcttgtgctaagtagctagcggagggcttaataggactagaggaagcaaggcggctgcggctgtggtagcaacaacatacaccgctggccgtggcgccatgggcatcctggaccacatgtcgcatgtgtgcagcatcactgagacgaaggaggcgctcaagctcatgaagaagcgaccgctgcagacggtgaacatcaaggtgaagatggactgcgaacgttgcgagcgtcgcgtgaagagcgc

SEQ ID NO: 4873 - DNA, 304 bp, Zea mays
  Clone ID: LIB3137-060-Q1-K1-B1
gtcacttcgccacgaacaaaagcgcatcgatctcgctgtcgtcactcctcgtcacccagccacgaacagaggcaccacccagcatggccctgcaggcggcgctcctcccatccaccctctcatccgtccccaagaagtgcagcctcgccgtcgcggcgaaggacacggcattccttagcgtatcccagaaggtcagtgatcagctgcatctgcatgctgcactcgcagtcacaatgcgcttgaattgaacgtgtcactcactctgtcgtgagcatgccatgcgtgcagaaagtgcaagcggcgt

SEQ ID NO: 4874 - DNA, 288 bp, Zea mays
  Clone ID: LIB3137-060-Q1-K1-B12
cggacgctttgtttccacccccgccgttctttctcgtctctctcacgagccacagccgcggagtcttgctctctagccagtccagtccacgcagctcatggatggcgtctttcgccgtggcaacggccccgtcgctagcggccccggcagccaataggaggcccgtcgcctgcgtcacgtacgtggagggcatgaactcctacagctgcctcaaggggctcaacaaggtgaccatgctcttggtgcgcatgaccgccgtctactccttcaccaaggtcgtggcgtctc

SEQ ID NO: 4875 - DNA, 61 bp, Zea mays
  unsure (1)..(61): unsure at all n locations; Clone ID: LIB3137-060-Q1-K1-B2
gccgcacagtgtccatctggcnncttcgcnctacggttcttcgtcctctctnncgcattct

SEQ ID NO: 4876 - DNA, 435 bp, Zea mays
  unsure (1)..(435): unsure at all n locations; Clone ID: LIB3137-060-Q1-K1-B3
gtaccatgaaagtttgtttaatctaggaatttttatcaaggggagagacgacccctaaatggaggcttctggtgcaaaattgaatgccattcangggctcgtatgttcttcttgcttgttgtcgaatcattcttgttgaacctctttatttatagtcacattgtaatattgaaaataccgatgtgttactcagacaaagcttataaaggtgttaaatgaataacagaaccatttttctgctattctgtgcaatttccaatgagttcaacttgtagcagagatatatacttaaggctcgttttatgaattgtaacccattgttttgtgctgttcaagcgccctggcggagagaaagtttaccatgtcttcgacaatcaatttcctgtatctattaaacgattgcaagttgataaacaaccttttatggaaaatgtg

SEQ ID NO: 4877 - DNA, 392 bp, Zea mays
  Clone ID: LIB3137-060-Q1-K1-B4
caaattggcatctgtagccaaagaacaaggaaagaacaatgttgctttcctttgtttcttcatgctaggaaagctggaagagtgtcttcaattgctaatagaaagcaatcgtattccggaagcagcattgatggcaagatcttatcttcccagcaaagtccctgagattgtagcattgtggaaaaaggatctccagaaggtaaactcaaaagcagcagagtcgctggctgatcctaatgagtacccaaacttatttgaagactggcagattgctctcaacgtagaagctgctgttgcctctaaaaagagtatctatccaccggccgaggagtacatgattcatgctgaaaggtcaaatgagagtttagtggaaagctttaaaaatatgcatg

SEQ ID NO: 4878 - DNA, 407 bp, Zea mays
  unsure (1)..(407): unsure at all n locations; Clone ID: LIB3137-060-Q1-K1-B5
ttcctccgttccgctgcgcatcctcaggaatggaacttggcgccaccactgccctgggccctctgcaccgctgcataaccatttacctggtcaggcatgcccagtgcattcacaacgtcgcaggcgagaaggacttctgcgcctacatgtcacatgaactgttcgatgctcagctcacccctttgggttggaaccaagtcgatggtctgcgggagcatgtgaagaaaagtgggcttgcagagaagattgaattggttattacttcccctttactgaggactatgcaaactgcagttggggtctttggtggtgaaaagtatactgatggtgtaaatgcacctncactaatggttgaaaatgctggacacagtggacgtccagctgtttcaagttgaactgcccccatt

SEQ ID NO: 4879 - DNA, 427 bp, Zea mays
  Clone ID: LIB3137-060-Q1-K1-B8
tcgaggggaagcgcgtcttcgtgcgctccttcctcaacgtgccgctcgacgagaaccggaggatcaccgacgacacccgcatccgggccgccatccccaccatccagtacatcctcagcaagggcgccaaggtcatcctctcaagccacttgggtcgccctaagggttttacacccaagtttagcttagctccccttgtaggacggttgtctgagcttcttggcattcaggtgcaaaaagccgacgatgttattggccctgaagttgagaagctggtggcggccttgcccaacggtggggttctgctgcttgagaacgtaagattctacaaggaagaggagaagaatgacccaaagtttgcacagaaacttgccttcctagcagatctttatgttaacgatgcatttggaacagcccacatggcgca

SEQ ID NO: 4880 - DNA, 441 bp, Zea mays
  Clone ID: LIB3137-060-Q1-K1-B9
gtcggctcgtcgctccgtagaccccgtttcttcgcctccccgccactcgccggagggggcgggcatcgttatgccatgggcggcatcctctcctccgcggcgccaacgatactgactcgtcccacgcgccctcggaggcagccgaggagcggcctccgcgggggcctcgcgcgcctctcagctgcgctcggcctcgcgcacgcgggcgccggcgccggcgccgcactcgccgcgccgctctcctacgaggagatgctgcgcctctcgtccgactccggcggtgatgttggcgggttcgcgctcccggagctcggccttgacgggctcgttgacttcgtcaacgataaccctctcgtcgtcgcggcaggcgttgcggccatcgcaatgccgcttttccttgcgcaacttcttggcggaggcggcagcttcaagccctactcc

SEQ ID NO: 4881 - DNA, 362 bp, Zea mays
  Clone ID: LIB3137-060-Q1-K1-C1
ctcgtagagagaaggaaaaatatccccaaactcctagctcccgatctcgatggcgaaccctcgcgtcttcttcgacatgaccgtcggcggcgccccggcgggccggatcgtgatggagctgtacgccaacgaggtgcccaagaccgcggagaacttccgcgcgctgtgcacgggcgagaagggcgtgggcaagtccgggaagccgctccactacaagggctccaccttccaccgcgtcatccccgagttcatgtgccagggcggcgacttcacccgcggcaacggcaccggcggcgagtccatctacggcgagaagttccccgacgagaagttcgtgcgcaagcacaccgcccccggtgtgc

SEQ ID NO: 4882 - DNA, 423 bp, Zea mays
  Clone ID: LIB3137-060-Q1-K1-C2
agcttctgttgagggcatagatgaaaagttggggcagcaagagccagaaacaccggaaccaagagcatcagccaaattaatctcagacggttctcctaatcaaagcgatgaaaagcaagagaggcccagtccagtatctgttcttgagtcatccttcgaagatattggcagtccagactgcataaacaagaaagagtgtgagctgcatggtctccaaaggaccctgtattttccagataatgaaccagacgttaatgtcctttgggaggacaagaatgtcaggttggactacataaagctggtgctagaactctcagaactgtgcgcagaacaaaatctagaggtatggtacctagaagacgagttgatcagcccctgcttgtttgaagaactacagagccagggtgatcagacggatgatcg

SEQ ID NO: 4883 - DNA, 352 bp, Zea mays
  Clone ID: LIB3137-060-Q1-K1-C3
gcttttgaatgtgaggaggcttaaactaactacaacggttcccccctaaatcctaatccagcttccgctttgcagggcacgaccccctttgcaactgactgagtccaaatccaaatccagttaccccacaactcaacctcttttgatttgattctgcaggatccatccgagaacgagcggccacttctccgatgccgtcctcaatggccaaatccctcctcctccctccccagttcgtctgcgtctcaccccgacacccccaccgagccggattccccgtccttaagccccgtcgcgcctcgctgttggccgtcaccggcggagacgtcacgcccccgtcggacgccgacag

SEQ ID NO: 4884 - DNA, 355 bp, Zea mays
  Clone ID: LIB3137-060-Q1-K1-C4
gacggacggacccagtgaggcgagcacgggcgctcaccggcgatggcgacgagggcatgggtggccgcggcggtggccttgaaccctcaactgctgcctctccgctcctgctcgcccacgaagtcggtctccccagcgcagcgctcggcgtcgatggggctccggctgcgcagcggccggccgtgcgtggggaagttcgtgtgccgccgcgccaagaacgcgggatacgaggactacaagttcccggaccccatcccggagttcgccgagcaggagacgagcaagttcagggagcacatggcgtggcggctggagcagaagaaagaggactacttcggggaccatgtcgaggaga

SEQ ID NO: 4885 - DNA, 386 bp, Zea mays
  Clone ID: LIB3137-060-Q1-K1-C5
gagaaggctaaacttcttggctacaagaacttctctgaggtaagcatggctcagaaaatggcggccgttgagcgagtacaagaccttctcgagaagctgcgtgctgcttcctgggatcatgctgtcaaagatatggaacatctaaaagtctttgcgaaagattctggttctactgaagctaatgatttgactcactgggaccttaccttctggagtgaacgactgagagagtctaaatatgatatcaatgaggaagagctgcgcccttatcttgcactacccaaggttatggatggcctcttcactctggcacataagctttttgaagttactgttgaacctgcaaatgggcttggctccgcctggcacaatgatgtcaaatttta

SEQ ID NO: 4886 - DNA, 278 bp, Zea mays
  Clone ID: LIB3137-060-Q1-K1-C7
tgcgcacttggattctgctaccaccgtttgctcggaggaagcacaagcccccatacacagacgattgtccaaattaatctcagaccgttctcctaatcaaagcgatgaaaagcaagagaggccgcagcccgtatcatgttcttgagtcatccttcgaagatattggcaggccagactgcataaacaagaaagagtgtgagctgcatgcgctacatacaccacgaggccgggcagaaactgagcacaccctaggaggtgacgcacaacgcgacatgttc

SEQ ID NO: 4887 - DNA, 372 bp, Zea mays
  Clone ID: LIB3137-060-Q1-K1-C8
ctccaattacttcacagcagcgcggcttctttaagatggcttccccctcgtacaggcgggcggcggcgatcacggccccctctaccggcgagttcctcgtcgtccggcagccgcgcccgccatccccacccgaggaggaagaggattaccggcgcttcgtcgacagcgatctctacgacctcccgtccgcgcccctcgggccactcgagggggcacccccgtcggaggtggccatcggcggcgcggactctgtcgccagccgtctcgacctttcgcgccttgacgtgtccgccgcccttgatcagatttttcaccaatttggcttgccggctgggatgggtggggagtggaggctcctgaagtatgtggaag

SEQ ID NO: 4888 - DNA, 318 bp, Zea mays
  Clone ID: LIB3137-060-Q1-K1-D1
acattatatcagatgtttgtcctgttcaccacatccaataatcctgacgtatgggtccctgcttacaagagctctcgttggaacgccctgtttattgttatttatgtgctgttaggagtttatttcctaacaaatttaattcttgctgtcatttatgatagctttaaagagcagcttgcaaaacaacttgctcaaatggactctataaggaaaagtattctacagaaggcatttgatctcatcgatactaacggtcagggctaccttaacaaagaacagtgcatatcgttactggatgagctaaacaagtacaggtcg

SEQ ID NO: 4889 - DNA, 354 bp, Zea mays
  Clone ID: LIB3137-060-Q1-K1-D4
ccgctcctcgcgccgccgccgcgtctcctcctgttcaggtaaggagaggaagagggcgaaatggtgaagcacaacaacgtcatccccaacgggcacttcaagaagcactggcagaactatgtcaagacatggttcaaccagcccgcccgcaagcagaggcgccgcatcgctcgtcaaaagaaggctgtgaagatattcccccgcccgactgctggtcctctacgccccattgttcaatgccagactttaaagtacaacatgaagtcaagagctgggagagggtttacccttgaggagctgaaggctgctggcatcccaaagaagcttgctccaaccattggtatttctgttgat

SEQ ID NO: 4890 - DNA, 362 bp, Zea mays
  Clone ID: LIB3137-060-Q1-K1-D9
cataagccgcgcccgccttcgcacgctttgttccgatggcagccgcggctgtgaccctgccctcctcgggcacgcccttcgccgtcgccacaaccgcctcttcctcatccgcccgccgctgcctgctcctgccctccgcggctccccgccgagctctccgcgtcgtggcctccgccgctaccgaggcgccgcccaagcccacgcagccgccgacatcgccctccggcatcgtgctcgtcgacccatccgaagcccagaaggtgcaccggctcaaggccgtctacgaccagaaggtcgtcccgctcatcaccgaggagttcggctacaccaatgtccaccaagttcccaagctcgagaagatt

SEQ ID NO: 4891 - DNA, 256 bp, Zea mays
  unsure (1)..(256): unsure at all n locations; Clone ID: LIB3137-060-Q1-K1-E1
cttgcaaacgaggtgaggaaggtgctcaacagatcataggagaccaagatcactggtgccaatgcttccatgaaatcacatgcccctcttgtgcacctgtccgcgcttccagaaggcaccgttgtggactcgagatagcgacctctactcggaatttactttcagctcttgcatgtttgtggttgtggccatcatgtactgattttcccttttcaacagttgtcgtgaggctgtaaaaaaaaaaaaaacccccnna

SEQ ID NO: 4892 - DNA, 428 bp, Zea mays
  Clone ID: LIB3137-060-Q1-K1-E10
gtggaggctcttttcaggagatacacataacaaggaatggatgaggactcagcatataagaatactgtagagagcatcactggaattatatcgaaaactatttcaaagaagggtatgcttgaagtgtataactctctgactgaagaaggaaagaagcagtttattgaggcctatagtgcagcatattacccatgcatggacatattgtatgagtgctatgaagacgtctcttctggaagtgagattagaagtgtggtgttggctgggaggagattttatgagaaggaagggctccctgctttccctatgggaaaaattgatcaaacacgaatgtggaaggtgggtgaaagggtccgttcaaccaggccacaaggtgatcttggcccactgcatcctttactgctggagtgtatgttgcactaatgatg

SEQ ID NO: 4893 - DNA, 265 bp, Zea mays
  Clone ID: LIB3137-060-Q1-K1-E11
atgactcatcatataagaatactttttaaagcaacactggcactacatacaaaactattccaaagtatgatctgcataaatcgtataactctctcactgaataacgaaataagcatttaattgagtcctataatgcaacatattacccatgcattcacatatcgtatgacttctatatatacttctcttctttaaataacattataactctaactttccctttcatcaaattttataataaagaaaaacaccctacttcccctat

SEQ ID NO: 4894 - DNA, 386 bp, Zea mays
  unsure (1)..(386): unsure at all n locations; Clone ID: LIB3137-060-Q1-K1-E2
cctcgacgggcgtaccagatgtctccgcttctcaacgcccaccgtttccggcgccgtgctcctcgacgccgtcgcgtcgatctctcgcgttcccgccgccgctctccgcctcgtcaccggcggcatcgacgtatcgccctcttctgtcctcgcctcagcagctgatggccagttcccctacgcgtcagcgctcctccgccttcgaggaggcaagggtggattcggctccctcctcagaggggctgcctccaaagcggggcagaagaagaccagcaactttgacgcctgccgcgacatcaacggggcgcgtctnncggcacgtaacgctgagcgccngctcgaggaatggaaaggccgaagccgccgaccgccagctagaaaagctc

SEQ ID NO: 4895 - DNA, 309 bp, Zea mays
  unsure (1)..(309): unsure at all n locations; Clone ID: LIB3137-060-Q1-K1-E3
ggaagccgatcgtagacggtgttcaccagataggagggatatttttctgtcagatttggcacgtanggagagtctccaattccacttttcagcctaatgggcaggctccaatttcaagcaccgataagccactaaagcctcaagtgagagccaatggtatagacgtggctactttcgcagttcctagacgcttagagactgatgaaatccctttggtcgtcaatgatttcagggtagctgctcgaaatgcgattgaagctggatttgatggtgtcgaaatccatggagctcacggttacctgattgatc

SEQ ID NO: 4896 - DNA, 320 bp, Zea mays
  Clone ID: LIB3137-060-Q1-K1-E4
gtgagaggcatacaatgttgttcagtgcatttttttcaaaagagatacagaggatggccggaggggtccttgctgattacatctttcttgctgttgggagagttggttcaagcaccgatttgattgttcagagggtggagtttgtcctcgattcagacaaacgaagctacctcatggatcttctgcatgcacaaatggctaatggcacacatggaaagcacgctcttacattggtctttgtggagacaaagaggggggctgatgccctggaggactggctttttagaaatggatttcctgcaactagcattcatggagac

SEQ ID NO: 4897 - DNA, 450 bp, Zea mays
  unsure (1)..(450): unsure at all n locations; Clone ID: LIB3137-060-Q1-K1-E5
gatttcgctctcttcttcccgtcgagacccatccataccagcggcgccgcaggctgacgaggaggcggagtagagtggccggactacctcgacacctccactgcaaccatgggtatctcacgtgattcgatgcacaagcgccgggccaccggtggaaagcagaagacgtggcgcaagaagcgaaagtatgagcttggccgccagcctgctaacaccaaactgtctagcaataagacagtgaggagggtccgtgtccgtggaggcaacgtgaagtggagggctctccgattggatacaggtaattactcgtggggaagtgaggctcttacccgcaagacccgcatcctggatgtggtctataatgcatcaaacaatgagcttgtgaggactcagactctngtgaagagcgccattgtacaagttgatgctgctccattcaagcagtggtac

SEQ ID NO: 4898 - DNA, 375 bp, Zea mays
  Clone ID: LIB3137-060-Q1-K1-E6
ggacgttccttacggctactactacaacggttaccaggtgcagctgtggagctgcaagtccgccagcgccgtgaaccagctctggacgctcaagagggacggcaccatccggtccaacggcaaatgcctgaccagcagcggcgacgcggccggcgcccgcgtggtggtcgacgactgcccgcgcttccccacgggccgcgtcgtctgggaggtgcgcgtggacggtaccgtcgcgctcaagtggtcccgcggcctggtgctggccgtgacctcgtcgacgctcttcgcggggctcacggtgcgacaggacgaccgcggcaccggccagtcgtggacgccgaccaacgtcaccgcgcccctggacgccgtcatcgt

SEQ ID NO: 4899 - DNA, 345 bp, Zea mays
  Clone ID: LIB3137-060-Q1-K1-F1
agctcccacacacacagcagtcttaccaagttctcataggtttagggttccttagggccgggtggaggggcgatggcggcggctgatgtggagtaccgttgcttcgtcggcgggcttgcctgggccaccagcaacgagtcgctggagaatgccttcgcctcctacggcgagatcctcgactccaaggtcatcaccgaccgggagacggggaggtcccgcggcttcggcttcgttaccttctcctccgagaactccatgctcgacgctatcgagaacatgaacggcaaggagctcgacggccgtaacatcaccgttaaccaggcccagtcccgtggcggtggcggt

SEQ ID NO: 4900 - DNA, 431 bp, Zea mays
  Clone ID: LIB3137-060-Q1-K1-F10
gggtacagaggcttctatgctcgcaacaccatcaccttgactccaaagagtgtaaatgacattcacaaaaggggtggaactattcttggatcatctcgaggaggtcatgacaccgtgaagatagttgacagcatccaagatcgtgacataaatcaggtctatgtaattggtggagatggtactcaaaggggtgctggagtgatattcgaagaagttagaagacgcggtctcaaagtttctgttgctggcattccaaagactattgacaatgacatccctgtaattgacaagtcatttggtttcgacacagcagtcgaggaggctcaacgtgcaataaatgctgctcatgtggaagctgtaagtgctgagaatggtataggtcttgtcaagctaatgggtcggcacagtggttttattgcacattatgctac

SEQ ID NO: 4901 - DNA, 312 bp, Zea mays
  unsure (1)..(312): unsure at all n locations; Clone ID: LIB3137-060-Q1-K1-F12
gagagcggtcctccttgtgagtctgttctgtagaggaggaggaggaggaggagaagcagcggcgcatccggaggagggagagcgaagatgcgccgcgtcgcgctgttgctcgtcgccgccgtgtgcgcgctggcggcgccggctgccgcggtcgtcactgacggtcttctcccgaacggcaacttcgaggatggcccgcccaagtcggcgctggtgaacggcacggtggtgtcgggcgcncacgccatcccgcggtgtgagacgtncggcttcgtggagtacatcgagtctgtgcacaagcagggggacatg

SEQ ID NO: 4902 - DNA, 197 bp, Zea mays
  Clone ID: LIB3137-060-Q1-K1-F3
gtctgctcgtcggacgtcggcgtcggtcgagtcgtggggtgcgcggtcgtgcgagatcgatgcggggagctcgcgaatcggaggccgcggtgcgcaatgccgcgtcggtagggatggcggaggcggcgccatggcgaggggcgtagcgcgggcggtgtctttcgggcgccgtgccacaacggggtggtgcttctacc

SEQ ID NO: 4903 - DNA, 406 bp, Zea mays
  unsure (1)..(406): unsure at all n locations; Clone ID: LIB3137-060-Q1-K1-F4
aattccgcatccccggctgaggcagcagcgtctgcgccggcaccggcaccggcaccggctcaccagcgataccgggaagaatggggaggtacagtcccgcgtacagccccccgaggagaggacatggcggcaggggaaggagcccacctcccaggagaggatatggcggtggccgtggtgaccatggctctgtcagcctcctggtccgcaacattccattgagatgcatgcctgaggaactacgtgtccctttcgaacggttcggccctgttcgggatgtttacctgccaagagattatcacactggggagccaagaggatttgggttcgtggagttcgttgatgcttatgacgcttctgatgcacagtaccacatgaatcgncagatgtttgctgggcgtgaaat

SEQ ID NO: 4904 - DNA, 378 bp, Zea mays
  Clone ID: LIB3137-060-Q1-K1-F5
gtgaaatcccgcacctacctccttcctctctcatctaggaccctcgcaccaagaactgagcgggaagagaggtagagagataatggcgaccacgacgtcagcgaccaccgccgcagcagcagccgccaccaccgccaagccgcgggggtcgtcgtcggccctctgccagagggtggccggcggcggcaggcggcgctccggggtggtgcggtgcgacgccgtcggcgtggaggcccaggcgcatgccgtggcaaaggcggccagcgtcgccgtcctcgagcagttcaagatatccgcctaccggtacatgaaggaaaggagtaccatagctgtgataggcctcagtgtacacacagcacccgtggagatgcgtgaaaa

SEQ ID NO: 4905 - DNA, 390 bp, Zea mays
  unsure (1)..(390): unsure at all n locations; Clone ID: LIB3137-060-Q1-K1-F7
cgaccgacgcgttcgagcctccacacacacannttgttttagnacttttttttatcctcgatcgctcctccgaaccggaaggccaacccgctttggcgatcgtgcgtcttgcttggttcctgccggccggagccagcgagagctanctagctgctgctgtcgtggtagacgtcttgccgcacgcacgcctagctcggtctctctggtacaacgtatggaggacgccgacgactactatggccggcgcgaccgtgaccgtggaggatgtgaggaatgcccatcgcgccaccggccccggcaccgtgctggcgatcggcaccgccacgcccgccaactgcgtgtaccaggccgactacccggactactactttcggatcaccaagagcgagc

SEQ ID NO: 4906 - DNA, 207 bp, Zea mays
  unsure (1)..(207): unsure at all n locations; Clone ID: LIB3137-060-Q1-K1-F8
cagcaaaccggcggcggcggccaaaaagtgtcgtacagtacgtgtggagtgtaatggagcttccatgcatgcatgagtggatccatgccatgttatgaatctagtccttcctttcttgtatcttccatgtgacgcggcgtgtgcgtcccttcatgtgtgatgatgccagatgaatactacaaataagacgttgtgactgtgccnaat

SEQ ID NO: 4907 - DNA, 347 bp, Zea mays
  Clone ID: LIB3137-060-Q1-K1-F9
gcttcctgcaggatggcactcctccttggcttgctgctgctagtagtagcttcgcccgcgatcgctgatgacgactccggtatctactaccagctggctcttatgtggccaggagcatactgcgagcagaccagcgctgggtgctgcaagccgaccaccggcgtctcgccggcgcgcgacttctacataacgggcttcaccgtccttaacgcgaccaccgacgctgcagtgacgggatgcagcaacaaagttccttacgaccctaacctgattaccggcatccaaggcctgaatcagtactggagcaacatcaggtgccccagcaacaacgggcaaagcagctggga

SEQ ID NO: 4908 - DNA, 408 bp, Zea mays
  Clone ID: LIB3137-060-Q1-K1-G1
ggccgctcgcgatctataactagcaccatgttctcgccaaggtgctgcgccacctcgagcacgaggcggatgttgttgtcgagcacctcgtgcacgcaacaattggaacacatctcgccgccgccgaggacgacggcgatgatgtggcgttcgcgagctcgtgcgctgctcctactccgctcgaccattacccggccaccgccaccacctccacaaccatatcccactcgaaccctaacccgagtcccccctccccgcttcctgtcctcctccccggatcccatccccgatgccttctcttccgccgccgcggatcccttccctgaagccttctcttccccgaccaaggcttctcaagatgccgctgaggccggagaggacaacctgagctcgatgtgggaggaagct

SEQ ID NO: 4909 - DNA, 440 bp, Zea mays
  Clone ID: LIB3137-060-Q1-K1-G10
cgcgcgattacctcctcgtcccctcattccttggcgtcgtcccctacccccaagaaggtgcgggtcccgattgcgaatgggacggatccgatggaggcggtcatcaccatcgacgtactccggcgcgcgggggccgatgtcgccgtcgcttccgtcgagccgggggcgacgtccgtcgctgcctcatggggcgtcaagcttaccgtcgacgccctcctcgccgacctcgcggacgatgagttcgacctcatctctctaccgggagggatgcctggttcttccacttttggagaatgcaaagttttggagaaaatggtcaaaaaacatgtagagaagggcaagctttatgctgcaatttgcgctgcaccagcaatgactttaggaacttggggtttgctcaatggcttaaaggcaacatgttatccttccgtcattgataa

SEQ ID NO: 4910 - DNA, 378 bp, Zea mays
  Clone ID: LIB3137-060-Q1-K1-G11
tgaattctgattcttcatgccgtcgttgtttatcttgcttgcttgctctgttggttgaggggagccgtccataaatagctagcaatggcgtttcgtttcgttttcacccggctggagctcagcctcagctagcctggggaccgctgcacgaacagtagtcctccctcctcctataaaagtagggtaaccacccgtccacgccagctagctgaagtcgtcggccatggcggagcgtgagcagcatgtgggcagcgacgacgcggcggagtggaagcaggtggcggagctgagggccgtcacccaggcccaggacccttcctgcaaagatgatgacgactacacgctccggcgcttcctccgggcgcgggaccacaacat

SEQ ID NO: 4911 - DNA, 329 bp, Zea mays
  Clone ID: LIB3137-060-Q1-K1-G12
atctagaacctaagaacctgcagaggagaggaagaggagcttggggaggagatggccggcgccgagggcgagaggtgggtggggctagcaacggacttctcggaggggagccgggcggcgctgcggtgggcggcggccaacctgctgcgagccggcgaccacctgctgctgctgcacgtcatcaaggagcccgactacgagcagagcgaggccatcctctgggaatccaccggctccccgttgattcccctctcggaattctctgaccctatcattgcgaagaaatatggagcaaagccggacatagaaaccttggacatcctgaacac

SEQ ID NO: 4912 - DNA, 404 bp, Zea mays
  unsure (1)..(404): unsure at all n locations; Clone ID: LIB3137-060-Q1-K1-G2
atccaaactccataagaaggaaacttgggaggctgttaccatcattgaaacccctcctcttgtcattgttgggctcgtggcatatgtgaagactcctcgtggcctccgcacactcaactctgtttgggcccaacatcttagtgaagaagtgaggagaaggttctacaagaactggtgcaagagcaagaagaaggctttcacaaagtatgctctcaaatatgaaaatgatgctggcaagaaggaaattcagctgcagcttgagaagatgaagaaatatgcttctgttatccgtgtcattgctcatacccagattaggaagatgaagggtttgaagcagaagaaggctcacctgatggagattcangtcaatggtggtaccattgctgacaaggtggactatggct

SEQ ID NO: 4913 - DNA, 355 bp, Zea mays
  Clone ID: LIB3137-060-Q1-K1-G3
ccccactgttcagcagtcagtcagaactggccaccaaaacccctcggttccgccaacgggtccactccaactctccgatctccaggaatccgcggctgatgcgccggcgatggcggctcccatggtcgacgccgaatacctgcgccaggtcgacagggcgcgccgccacctccgcgccctcatcttcaacaagggatgcgccccgatcatgctccgcctcgcatggcatgatgctggaacttatgacctgaagacaaaaactggtggtgcaaatggttcgattagatatgaagaagagtacactcatggttcaaatgctggtttaaagattgctatcgatctccttgagcctatc

SEQ ID NO: 4914 - DNA, 419 bp, Zea mays
  Clone ID: LIB3137-060-Q1-K1-G6
ctgcctcttttttcgtcgcttcgttcttaacgccaagcccccctccggcggggtggcccccaagcgaggtggcagggcgcccttgccggccaagaagaagacggataaagtgacgaaccctctgtttgagaagaggccgaagcagttcggcatcggcggcgcgttgccgcccaagaaggacctgcaccggttcgtcaagtggcccaaggtcgtgcgtattcagcgccagcgcctcatcctcaagcagcgcctcaaggtaccaccggcgctcaaccagtttcacccgcaccctcgacaagaacctcgctacgaacctgtttaagatgcttctcaagtaccggcctgaagacaaggctgccaagaaggaaaggcttttgaagagggcccaagctgagaatgaaggaaaaactgttgagtcg

SEQ ID NO: 4915 - DNA, 361 bp, Zea mays
  Clone ID: LIB3137-060-Q1-K1-G9
cgccttctctcgcgccttcgccgccgtttcttctccccgcacctcgcttcatttcgtggcggggagattacgaagcgcaccaagaaggcaggaattgttggcaaatatggaaccaggtatggtgctagcttgcgtaagcaaatcaagaagatggaggtatctcagcattccaagaacttttgcgagttctgtgggaagtttgctgtgaagaggaaagcagttggaatttgggggtgcaaggactgtgggaaggtgaatgctggtggtgcttacaccatgaacactgtttatgctgtcaccgtcaggatcacgattcgccttctgacggagccagactgaatgaatgatatagcttctttta

SEQ ID NO: 4916 - DNA, 427 bp, Zea mays
  Clone ID: LIB3137-060-Q1-K1-H1
gatctccatctcgaccgtcgctcaccgggaagcgctacgacgaagcatggcgtccgtcaccgcccgcgccccggtcgcggccctgcgcccgtcggcgtctctcaagtcgtcgtcgtcgtcgtcgtcggccttccttggccactctagccgcctcggccgcactgctaccgcgtcgccgacgaggcgcagcctcaaggcggaggccaagggcgagtggctcccgggccttccctcccccgcctacctcgacggcagcctgccgggtgacaatggcttcgacccgttgggcctggcggaggacccggagaacctgaggtggtacgtgcaggcggagctggtgaacgggcggtgggcgatgctgggcgtggccgggatgctgatcccggaggtgctgaccaaggccgggctgatcaacgcgccgcagtgg

SEQ ID NO: 4917 - DNA, 320 bp, Zea mays
  Clone ID: LIB3137-060-Q1-K1-H10
tcgctcggaacgcacacaccgcccgtcctctttctccgatcccctcgtcgatccaaagatgcagagcttcgtcaagactctcactggaaagactatcaccctcgaggtggagtcctctgacaccattgacaacgtcaaggccaagatccaggacaaggaaggcattcccccggaccagcagcggctcatcttcgctggcaagcagctcgaggacgggcgcacacttgccgactacaacatccagaaagagagcaccctccaccttgttctccgcctcaagggaggcatgcacatcttcgtcaagacctcactggaagact

SEQ ID NO: 4918 - DNA, 388 bp, Zea mays
  Clone ID: LIB3137-060-Q1-K1-H2
aaatttgatggcattcttgggctaggctttcaagaaatctctgttgggaaatgcaacaccagtgtggttaacatggtgaaacaaggtctcatcagcgaccctgttttctctttctggtttaaccgacatgctgatgaaggagaaggtggtgaaattgtgtttggtggaatggattctagccactacaagggcgatcacacgtttgtcccagtcactcggaagggatactggcagttcaacatgggtgatgtcctggttgatggaaagtccactgggttttgtgccggtggctgtgcagccatcgcagattctggaacttccttgcttgctggccccacagccataattactgaaatcaatgaaaagaatggtgctgctggtgtagtca

SEQ ID NO: 4919 - DNA, 370 bp, Zea mays
  unsure (1)..(370): unsure at all n locations; Clone ID: LIB3137-060-Q1-K1-H3
gccggctcagccgcagcgccgctccgccggttgttcctccgcctccgtgacccgccgccgctgcccnttaacacgctcctatcccgcctcgcgccacatctgcagcaaggccccaccctagccccagcaccagccccggctcttgcactcccgacctcgacgccggcccaaacgccatccgggattctccgcgacgcgctcttctccttccacccgggcctccaggcacacccgtgcctagatccgattgggggtgcccccgcaagggacgaggccggcgcatgggcggcggaggtgtgggcggacagcgtgaagaagaagcgcaagcgtaagatgaacaagcacaagctccgcaagctccggaagcgac

SEQ ID NO: 4920 - DNA, 338 bp, Zea mays
  unsure (1)..(338): unsure at all n locations; Clone ID: LIB3137-060-Q1-K1-H4
acctgcagaggantttttttttgntnggggaggagatggccggcggcgagggcgagaggtgggtggggctagcaacggacttctcggaggggagccgggcggcgctgcggtgggcggcggccaacctgctgcgagccggcgaccacctgctgctgctgcacgtcatcaaggagcccgactacgagcagagcgaggccatcctctgggaatccaccggctccccgttgattcccctctcggaattctctgaccctatcattgcgaagaaatatggagcaaagccggacatagaaaccttggacatcctgaacactacagctacccagaaagatatcggg

SEQ ID NO: 4921 - DNA, 254 bp, Zea mays
  Clone ID: LIB3137-060-Q1-K1-H5
tcagcccacaccttccctaccacctttagttgttccgctcctgtgaatccccccggcggggggcacagaattcccccggcacacctcccaaggccaccggacgccagcagccccgtccccggccacacctacgtacgatcgcaatgctggcggcgtaccttatgccggggccttcgctcgcggacttccccggtaccgaccagaggagcccagttcctttcctccccttccctgcccgtcttcaccaccgggcc

SEQ ID NO: 4922 - DNA, 298 bp, Zea mays
  unsure (1)..(298): unsure at all n locations; Clone ID: LIB3137-061-Q1-K1-A1
caagccgtgcgtgtcctccttcggcgccgaccagttcgacgagaacgacgagcgggagaagaagagcaagagctccttcttcaactggttctacttctccatcaacatcggcgcgctggtggcgtccacggtgctggtgtacgtgcagacgcacgtgggctggggctggggcttcggcatccccgccgtggtcatggccatcgccgtcggcagcttcttcgtgggcacgccgctgtacaggcaccagaagcccggnggcagcccgctgacgcgcatcgcgcangtgctcgtcgcgtgc

SEQ ID NO: 4923 - DNA, 297 bp, Zea mays
  Clone ID: LIB3137-061-Q1-K1-A10
ctccctccgagtccagggggcaggggcaccattaccgagtagtttaattagtgctagttgtgttaccattgttagtgacttaattaccctcacgcgaagcaccctacctttgctagtcctcctacgtctcctcttcgcttaatcttggtgatttgattcttcacttcttgcgcgcattgcagagggtgctcggtctgcagctatcttaggttaaccagtcgtgtgtggtctatcggtttcgatatagtattactactgctctgttataatcagcgcggaggaggaagatgacggtga

SEQ ID NO: 4924 - DNA, 290 bp, Zea mays
  Clone ID: LIB3137-061-Q1-K1-A11
aggcccgacccacgcgaccggcaggctccaccaagcccctataggcaacttcacctgctcctctacaccgtggctgtagtcggtctccacggcaagccgagccctgcatctccatggtccagattttccctgcagaatccccccaatggtgcctggtcttcttccctaggtcgaaaacacctctgcactcaaccccctctgtcgatgggcgacgtctctccatccatggtacctagatctccatccccatgcccctgcagcttgttctcaagccgccaaccatggagcgt

SEQ ID NO: 4925 - DNA, 396 bp, Zea mays
  unsure (1)..(396): unsure at all n locations; Clone ID: LIB3137-061-Q1-K1-A12
ggaaattcaaacgacgttgcgtgaggaaatcaaaagtgcttgtgaatatcgtccatttgaaaagtgtgattacagtgcaaggattgctaatgagatatgctgcaagaagctggagtatgtaattgagaagttggataccatgcaacagagccttgaacatatcactgatgatgtttagcgagctagctacatattaggtactatactctttttgtgcaataaagtgtaatctacttagtgaataagaggatactttatgatgatagtatccactcaatcaggtgattttgtcaatactttgctgcagtggtagagttggtgaattagatattttcagtttcttggtacttgcaaaatgcacccataataatatactacatgacnttcaattgcttt

SEQ ID NO: 4926 - DNA, 315 bp, Zea mays
  unsure (1)..(315): unsure at all n locations; Clone ID: LIB3137-061-Q1-K1-A3
cggacgcgtggggccttgagtcgagtccccgtcgaccccggcccgagagataagtcgtacgttggggcccgccgactgctgcacgacatggcacatctctcatctctcccgctccgagttcgcgcgcgtgatgccgccgtttggatttgtgcggtgacacataattcactgtaaattactcaaactactagcaatagctagctagtgcagtacagtatacttatgattccatttgatgcgtacggnctacaacgtgtaagtactagtatttagcgttgccaataattagcgacagggcacgctccggcagcgaat

SEQ ID NO: 4927 - DNA, 259 bp, Zea mays
  unsure (1)..(259): unsure at all n locations; Clone ID: LIB3137-061-Q1-K1-A4
cacgaaccaaaccaccgcctcctcccccgaccggagaggagcctcaccgccggcgcccatggcgacacgctactngancgtgtcgctgcccgtgcagtcgcccggcgccaccgccagctccctgtggtcgcgcctccaggactccatctcccgccactccttcgacaccccgctctaccgcttcaacgtcccggatctccgcgtcggcaccctcgactcgctcctcgcgctcagtgacgacctcgtcaagtccaatgtc

SEQ ID NO: 4928 - DNA, 293 bp, Zea mays
  Clone ID: LIB3137-061-Q1-K1-A5
ctctctcctcttgcgattcgctcgctcgatcctagcttctcttccaagaagcgcagcgcgcatggccatggccacgcaagcctccgccgccacgcgccacctgctggccgccgcctgggcgccggcggcgaagccgcggcagctgagctcgcacctcgcgctgccgtcgtcgtcctcccgcgggccggccccgctccgcgcgtccaccgaggaggcggtggaggcgcctaaggggttcgtggccccgcagctggaccccagcacgccgtccccgatctttggcggcagcacgg

SEQ ID NO: 4929 - DNA, 392 bp, Zea mays
  unsure (1)..(392): unsure at all n locations; Clone ID: LIB3137-061-Q1-K1-A8
gaccaannagctagctnctnctagctctagctaggctcgtctgctgcaagaaggtaacaggaacagcatgcatggaggggaaggaggaggacgtccgcctgggcgccaacaagttctcggagcgccagcccatcggcacggcggcgcagggcacggacgacaaggactacaaggagcccccgccggcgccgctcttcgagcccggggagctcaagtcctggtccttctaccgcgccggcatcgccgagttcgtcgccaccttcctcttcctctacatctccatcctcaccgtcatgggcgtctccaagtccacctccaagtgcgccaccgtcggcatccagggcatcgcctggtccttcggcggcatgatcttcgccctcgtctactgcacc

SEQ ID NO: 4930 - DNA, 114 bp, Zea mays
  Clone ID: LIB3137-061-Q1-K1-A9
gtggctcgctagaaaaacacttcagccactttttcgtacccgattagatcgggggctctggcgtggccacctattgtgtctcggccacttgatggccatgcgtggctcctttct

SEQ ID NO: 4931 - DNA, 323 bp, Zea mays
  Clone ID: LIB3137-061-Q1-K1-B1
ccttcccggcgacttcggctttgatccctggggcctcggatctgacccggagagcctgcggtggaacgtgcaggcggagctggtgcactgccggtgggcgatgctcggcgcggcgggcatcttcatcccggagttcctgaccaagatcggcgtcctcaacacgcccttctggtacaccgccggcgagcagcagtacttcaccgacaccaccaccctcttcatcatcgagctcatcctcatcggctgggccgagggccgccgctgggctgacatcatcaagcccggaagcgtcaacaccgaccccatcttccccagcaacaagc

SEQ ID NO: 4932 - DNA, 307 bp, Zea mays
  Clone ID: LIB3137-061-Q1-K1-B10
gagcctactaagtggtgggagcagagcagcacttgcaattgcaaccagcaagcgcaagagaggagggggctcaagagtcttgacgcgtctagccttcgcagaagagagggttcaagcgaggaagagggggagagggcacgggttcagagctggaggagatggagagcccgcgcagccccgaggcggagatcggccaccgcgtggaggacctctgggaggtggcggagccgcagctctcgccgtcggagaagctcaactcctgcttcgaggacatccccgtcgcgttcttcccgcgcacccacccgtc

SEQ ID NO: 4933 - DNA, 278 bp, Zea mays
  Clone ID: LIB3137-061-Q1-K1-B12
ctatacaccaaggatagagctgattcaatgcacggcacacgatggggagaagaaacagcactatacaccaaggataggccatcagctatgaaaggtaacaaggctgctgaaggacatgtcaggatagtcttgggaaattgcagagagggcaattgcttgaggaggtcgccacagtgctgtagtaacagatctaggagcacttcttacattctgataggtgctttatggacagtgcggacaacagaatacacatgatgttttaagtccaacgtgtgtat

SEQ ID NO: 4934 - DNA, 441 bp, Zea mays
  Clone ID: LIB3137-061-Q1-K1-B2
gaaaaatctctctgttcaacatgatgactttcaagacaatgacaacatttatgcctgcaccgccggcagcaacttttcttgcatttcacccccaagataacaacataattgcaattggaatggatgactcaaccatccaaatctataatgtccgaattgatgaggtcaaaagcaagctcaggggtcactctaagagaatcacgggtcttgccttttcaaatgtgctaaatgtcttagtctcttccggagctgatgctcagttatgtgtttggaacacggatggatgggaaaagcaaaagaacagatttttgcagataccgtcaggtcgccaatctaatatcttggacactcgtgttcagttccaccaagatcaaatgcactttctcgttgtgcatgaaacccagattgccatctatgaaactacaaaactagaaccagtga

SEQ ID NO: 4935 - DNA, 234 bp, Zea mays
  unsure (1)..(234): unsure at all n locations; Clone ID: LIB3137-061-Q1-K1-B3
ccccacgcaggaagggngnnccnaccccncgggcgcgccgcgccgancgccgagaancgcggcgggcgcccccaacccaaacgcnggggcggccaagggccaagcncgccgcggagggggcgcaagaagaacggcgccagcgacgacgacgaggaccccanaccgcaggacgacgcggccgacccaggcangagnacgncagcgacagcagccgccgacaaagaaaagagcacg

SEQ ID NO: 4936 - DNA, 294 bp, Zea mays
  unsure (1)..(294): unsure at all n locations; Clone ID: LIB3137-061-Q1-K1-B5
aaaccctatagccgtcggcccggtcgcgctagcgacacaaatctcaaatcacccggagggacctctctcncgnaggctgaactcatggctcgcgtattctttgggaacctggatccgcgtgtcacggcgcggtagactgaagacgagttccgaacatttgctgttctgaagagtgcatggatcgctaggaaaccaccagcgctagcctccattgacttagatgaccgaacggatgcacaagatgccattcgcgactttgatgttaaaaaatcgaggagggttgagctgtcaacc

SEQ ID NO: 4937 - DNA, 363 bp, Zea mays
  unsure (1)..(363): unsure at all n locations; Clone ID: LIB3137-061-Q1-K1-B7
gagaaggcggcggcagngggcggactcggtggagccggggcggcggacgcggcgcagcagcagcagctggcagcaggggaggccgcggcggcgcgggtgcggcccgtggagacgctgcttcgcgcggcaccgctggggctctgcgtggccgccatgaccgtcatgctccgtaaccagcagagcaacgagtacggcgccgtcgcctactccgacctgggaggcttcaagtacctcgtctacgccaacggcatctgcgccgcctactcgctggtatccgcgttctacactgccgtgccgaggcctgccaccgtgtcgcgctcctggctcgtcttcctcctcgaccaggtgttcacgtacctgatc

SEQ ID NO: 4938 - DNA, 247 bp, Zea mays
  Clone ID: LIB3137-061-Q1-K1-B9
ctatgcactaaggagcacacttttacaatttatagcactcgctgagcgagcggcctaacgcgagcaatcaaaggctgtccggcgggtccgccacgtcacagacctctggttcgagccttgaccggtgcactcacgcattacgcaagtgcagtacgtaaaggagtggaatactggtactcacatcagatgcgaccattcctcatgggtctataagaccttcatctcgtcatacctcgagcacggcttt

SEQ ID NO: 4939 - DNA, 341 bp, Zea mays
  Clone ID: LIB3137-061-Q1-K1-C1
gaatcgtctcactcgtgtctgccctgctcatactgcttgccctcgccgtatcgtccacccgcaacgcacaggaggattccatggccaacaacaccgggacgttggtgggcggcatccaggacgtgccggggagcgagaacgaccttcacctccaggagctcgcccgcttcgccgtcgatgagcacaacaagaaggccaatgctcttctggggttcgagaagcttgtgaaggccaagacacaagtggttgctggcacgatgtactatctcactattgaagtgaaggatggcgaagtcaagaagctctacgaagctaaggtctgggagaagccatgggagaac

SEQ ID NO: 4940 - DNA, 316 bp, Zea mays
  Clone ID: LIB3137-061-Q1-K1-C10
gcagttgcggttgcaaatcggatctcccttcagcaaccgctagagcttcctcaccccgccctgccctcatcttctccacccgctgccgcctgccatggggaactgcgccagcgccatcgacgccttcgtgcagcgcggcaacagggcgtcgccggccgctactgctggaatgtgcgcgtcgaggaggactagtagctctgccaccacggggaagctgtcaacgcttagcagcgccagcaccttcatgccatccaccgttagtggcggcggcgacgacgacgacgatgacccagtgggccagatcctcgagtcccca

SEQ ID NO: 4941 - DNA, 386 bp, Zea mays
  Clone ID: LIB3137-061-Q1-K1-C12
aggtgctgtaagtatcccttccgtctgtctctccctcactcccttggcgacgactacgcccggtgctcttcttcggccccaggtagctttcgctgccgtcctacggcaggtgcccaagtcttcttcggtcccttcaacgacgacgagcactaccagtttgttgaagatggaaaataaagagttgttcaagatgggaaatgcacatacagatactgctgcactgcacaaggagtgggatgatgttctctgtccgatatgcatggaccatccgcataatgctgtccttctgttgtgcagctcccatgacaaaggatgccgatcctatatatgtgatacaggctataggctttcaaatggcctaaataggttcaagaaatggaagggga

SEQ ID NO: 4942 - DNA, 427 bp, Zea mays
  unsure (1)..(427): unsure at all n locations; Clone ID: LIB3137-061-Q1-K1-C2
cggtgacgaaaccctaggacttgagatccagcgcacggctcgggtcctcctcaccgttcccggcgatggaacggcggcaggagctctgcaggaacttccagcgcggcagctgcaagtacggatcgcactgcaggtttgtgcacgcctcctctcagcagcagcagcagcagcagcagcagcaggcgaagcccaacccgtttgggttcggcttagggagtaagcagcagcaacagcagcagtcttcgttttgtgcgccgttccagcagcagcagcagcaaaagcccaacccgtttggatttggagtgcaaggcggtgcggctgcacagtccaaaaacgctcctggccaggcaaagccatttcaaaataaatgggtaagggacccctcaaccccaacgaagcaacatgaagcggcacagncaccagcagc

SEQ ID NO: 4943 - DNA, 338 bp, Zea mays
  Clone ID: LIB3137-061-Q1-K1-C3
cagcgatccagacccacccgagccaacaacccatggccgccgcgacgccgcgtctcctgctcgcggtcgcgggcctcaccctcgccgtcctcgccgccgcggtctcgccgtctctggcggcggggccgccggtgctgcaggacccggcggagctcctgcgccttgccaaggagccggccttcgcggactggatggtcggggtgcggcggcggatccacgagaacccggagctgggatacgaggagttccagaccagcgagctcgtgcgccgggagctccacgccatggggatcccctacaggcaccccttcgccgtcaccggcgtggtagcaacagtc

SEQ ID NO: 4944 - DNA, 358 bp, Zea mays
  unsure (1)..(358): unsure at all n locations; Clone ID: LIB3137-061-Q1-K1-C4
gntccagagcttattcagtatagaaggaatcagatgattaaacgaggaacagtaaaggagcagctagcagttgattcagtgtccaggaagatggctggtttgtgtccactcatgccagaagaggttggacttctacttcaagcagtaggttacccaccaactacaataatattcttggccggttctgagacttttggtggacaaagaatgcttattcctctacgagctatgttcgctaacctagtagaccgcacttcattatgtagtcagagggagctgtttgatttagttgggccagaagatcctcgaaccccagatttgccacagcctccacctcccaaaagtgaaaaacaactta

SEQ ID NO: 4945 - DNA, 447 bp, Zea mays
  unsure (1)..(447): unsure at all n locations; Clone ID: LIB3137-061-Q1-K1-C6
cttggaggacgancttcagaaacacggntctgncggggtcgacctttgaggacgatcggggatgtcgcgtncgaggacacgatcattggctacattgacctgcagaagctatgtgcgaacagtatcagcgcagatgagactggagctgggctgtaggtgattttttgaaggatcaggagggggaaacccctactgcgcattttattagaaagcgaaaattaaaggttaggccctgttccttttacaatcaataaaaagaagagaaaaagangaaaaaagaagagctatttctatatttgccacaaatttagccagttcgggattgaggtgtcgaattctccctgtgctctgtgaatgattagtcgcaattctctactaaattcctgagtgcagcggagcacggagggatctctgtttgaaacaggcactcgttcggcttttcagatg

SEQ ID NO: 4946 - DNA, 144 bp, Zea mays
  Clone ID: LIB3137-061-Q1-K1-C9
agctgctgacagaataactgttgccagcctttgcctccaccgctatatacggacaacgcggggggctcttattagccaacagagttctcagactgacaatctattgacacagcctaaggaatgctgcgtacgttgaacgacgag

SEQ ID NO: 4947 - DNA, 386 bp, Zea mays
  unsure (1)..(386): unsure at all n locations; Clone ID: LIB3137-061-Q1-K1-D1
gcagagcaggcgcacgggcaccgcacacctcactgccgnccctntctctctcctctcgctccgccccggcggatccggcaccgacccaccgcccctctgctcgtccttccgccggaatcgctgctcctctctgtgctgtnatttggtgcggcgactgttagttgttcggcccatccttctgtgatcaatggctgacgggaggaatccagccacttgtggtgacaatggcactggaatggcaaggctggctttgcggngtgatgncccagagcagtgtccctagtatagcggccccctcggacacggggtgatggtggatggccaaaagacgccatgagtgacagccagcaaaagagatctgactgagacccatgacacgatcggac

SEQ ID NO: 4948 - DNA, 272 bp, Zea mays
  Clone ID: LIB3137-061-Q1-K1-D10
tccaattgtcacttgctctccctccaacatgctaattaacgccggtcatccctcttctagctcgattcattatccatggcggcggagaagcaccaccaccaccacctgttccaccacaagaaggacgaggagcagctcgccgccggcgggtacggcgagtccgccgagtacacggaggccacggtgacggaggtggtgtccacaggcgagaacgagtacgacgagtacaagaaggaggagaaggagcacaagcacaagcagcacctctgcga

SEQ ID NO: 4949 - DNA, 338 bp, Zea mays
  Clone ID: LIB3137-061-Q1-K1-D12
cggacgcgtggggcactacggaccttgcggtagctgaaactccttcgccttctccggcatgagaatgtcattgctttgaaggatataatgatgccaatacacaggagaagctttaaggatgtgtacttggtatacgaactcatggatactgatttgcaccagataatcaaatcacctcagggcctttccaatgaccactgccagtattttctttttcagttgctccgaggactcaaatatctccattcagcagaaatactccacagagacctaaaacctggaaacctgctggtgaatgcaaattgtgatctgaagatatgtgattttggtctcgcacg

SEQ ID NO: 4950 - DNA, 370 bp, Zea mays
  Clone ID: LIB3137-061-Q1-K1-D2
ctcgcctgggccacggacgaccactccctccacaacgccttcagcacctacggcgaggtgctcgagtccaagattatcctcgatcgggagacgcagaggtcccgcggcttcggcttcgtcaccttctccacggaggaggcgatgcggaacgccatcgagggcatgaacggcaaggagctggacggccgcaacatcaccgtcaacgaggcccaagcccgcggcggccggggaggccgcggcggcggctactgtggtggccggggaagcggcggctacagcggtggcgggcgccgggatggcggcggcggctaccgcggtggcggcggcggctacagtggcggccgtggctacagtggtggtggtggcggct

SEQ ID NO: 4951 - DNA, 387 bp, Zea mays
  Clone ID: LIB3137-061-Q1-K1-D4
aaaccttcaatttgttaggggactgtggatgttgtctttgcaaggaaagtggatgctttggatgctatcaagagatacaatggtgttctacttgatgggaagccaatgaatctagagctcattggaaacaatgtcgaaccacctcccatgccaccagtaatacacagtcgtcctttgcagaactataatgatatccatagcagtatgcctcaatcccaaagaggtggtcagcgaagagtaccccaaggcaacggtcggggtggacgcagtagtcaaagcagtggtggccggggacaggggaaaggccgaggccaggaccggaatcgcaccaccatttctgctgcagatcttgacgccgaacttgacaagtaccatgcagcggcagtg

SEQ ID NO: 4952 - DNA, 341 bp, Zea mays
  unsure (1)..(341): unsure at all n locations; Clone ID: LIB3137-061-Q1-K1-D8
ggccncggcagggggcnggaggcnagagcttcgncnccnngccggacgnagccggaacgggggcctgcaaggcgagccgggcgagcgccggcagccnnggcgcacaacgccncngcaggggcgccggncannagccagggacgagcccaacgccgcancgagccccgcttctggnggccgncgactcagctcgatgtcgtctacagctagccgtggatcttgcctggacctcgtcgttcctgctcgacaacgcttcagcatgccgtcgagttttgcctcgccttaccgtcaaggtcccctagcgcgcgagctcccttttcagccttcctcggtgcacgcgc

SEQ ID NO: 4953 - DNA, 206 bp, Zea mays
  Clone ID: LIB3137-061-Q1-K1-D9
gcgacgcgtggcgcactatggaccttgcgttatctgaaactccttcgactggtgcggcatgagaatgtcattgctgtgaaggatgtaatgatgccaatacacacgagaagctctaaggatgtgtactagaggtacgaactcatggatactgacttgcaccatataatcaaatcacctcaaggccttagcaatgaccactgacagta

SEQ ID NO: 4954 - DNA, 140 bp, Zea mays
  Clone ID: LIB3137-061-Q1-K1-E1
cggacgcgtgggcggacgcgtgggtccaaggtgattcagtggtagttctgccatcatgttacagtaattcttccatcacttgtttgtacaactcatacatgtcatgccaccctgagatttatgtcattcagttgtcagtc

SEQ ID NO: 4955 - DNA, 357 bp, Zea mays
  Clone ID: LIB3137-061-Q1-K1-E10
gtcgtgtacatagcatgccaaaacccctctgtttctttttcctgatggaaaagcttcagtgcccttcttatttatcaacttcatacaacattaacccatagttatcatggcagcgcgtaggcgctgactaggcatccaagcggtcggcagtggatgccatgcctcgtcgcctcgcctgaacccagataggcgatggtaagacatctcctagaagcccacctagctgttgaactaggctttaatgggtctggcttgtgcactatacgcccagtttcctcttctttcctctgctgacaccaccgttagagccgctagatcgctcacgccggctgactgccgcgtgcctgtgccgagcgc

SEQ ID NO: 4956 - DNA, 354 bp, Zea mays
  Clone ID: LIB3137-061-Q1-K1-E12
cccggagattgaggagctcctgtacagccaaaccgagaacacggagcacaagttcgttctgaacgacaggaacaagccaatcatcttctccatggctcgtctcgaccgtgtgaagaacttgactgggctggtggagctgtacggccggaacaagcggctgcaggagctggtgaacctcgtggtcgtctgcggcgaccatggcaacccttccaaggacaaggaggagcaggccgagttcaagaagatgtttgacctcatcgagcagtacaacctgaacgggcacatccgctggatctccgcccagatgaaccgcgtccgcaacggcgagctgtaccgctacatctgcgacaccaa

SEQ ID NO: 4957 - DNA, 388 bp, Zea mays
  Clone ID: LIB3137-061-Q1-K1-E2
cgagaacacgatcgagcacacaagcacgaagactcgtttaggagaaaccacaaaccaccaagccgtgcaagcatcatggagtacggtcagcaggggcagcgcggccacggcgccacgggccatgtcgaccagtacggcaacccagtcggcggcgtcgagcacggcaccggcggcatgaggcacggcacgggaaccaccggcggcatgggccagctgggtgagcacggcggcgctggcatgggtggggggcagttccagcctgcgagggaggagcacaagaccggcggcatcctgcatcgctccggcagctccagctccagctcgtcggaggacgacggcatgggcggaaggaggaagaaaggaatcaaggagaagatcaaagagaagc

SEQ ID NO: 4958 - DNA, 220 bp, Zea mays
  unsure (1)..(220): unsure at all n locations; Clone ID: LIB3137-061-Q1-K1-E3
cncgccnccnccgggcnccggcccacnccngcccncccncgcncaccgagagccagagccagnggggcagccaaagccgagccgcaaccgcaaagaacangcgcggccnccnnnccccagcacgcggcacacaccgggccgcncgggccaaccacccncgggncacccaaccaacaaancanccgccaccacaccccgcngcggcgaagngcggcggcgc

SEQ ID NO: 4959 - DNA, 213 bp, Zea mays
  unsure (1)..(213): unsure at all n locations; Clone ID: LIB3137-061-Q1-K1-E4
ncggaaagaagcccggccgggncggaaggggagcagnncncgccnncncggggagggcgccagaggggngggcagaggcggggcagcgcnggggncagacgcagcgnncnccaaggcncacnaaanggagncncacaanggcgaggcngangacnngccnccaccacccccnnnggcngcnggcggggaaccacnnaaagccgangaaacaaa

SEQ ID NO: 4960 - DNA, 356 bp, Zea mays
  unsure (1)..(356): unsure at all n locations; Clone ID: LIB3137-061-Q1-K1-E5
anccaaactccataagaaggaaaccgggaggcngnnaccancanngaaaccccgccgcggggcanngnngggctcgnggcatacgngaagactccncgnggcctccgcacactcaactctgtttgggcccaacatcttagcgaagaagtgaggagaaggttctacaagaactggtgcaagagcaagaagaaggctttcacaaagtatgctctcaaatatgaaaatgatgctggcaagaaggaaattcagctgcagcttgagaagatgaagaaatatgcttctgtatccgagtcattgctcatacccagattaggaagatgaagggtttgaagcagaagaaggctcacctgatggag

SEQ ID NO: 4961 - DNA, 357 bp, Zea mays
  unsure (1)..(357): unsure at all n locations; Clone ID: LIB3137-061-Q1-K1-E6
ctgttgaaagtggngatngnaaactagntttgctgataccatcattgaaaccggtgcngggtttattaaatatgttgggggagatgtgaagactcctcgtggcctccgcacactcaactctgtttgggcccaacatcttagcgaagaagcgaggagaaggctctacaagaactggtgcgagagcaagaagaaggctctcacaaagtatgctctcaaatatgaaaatgatgctggcaagaaaggaaattcatctgcagcttgagaagatgaataaatatgctgacgatatccgtgacatngctcatacccaaattaggaagatgaatggtttgtagcanaanaaggctcacctgatgg

SEQ ID NO: 4962 - DNA, 284 bp, Zea mays
  unsure (1)..(284): unsure at all n locations; Clone ID: LIB3137-061-Q1-K1-E7
ccacaacccccgagcncagcnaagcnccactccagcnccaancgcagncgcgaccagagggcgagagcnagcnagagggccgcgaaaaagccgancaanaggaccgcccnggggagccaccaggaggcgnaccacccgggcgcccncaaggcggcgnncgcngagnacaacaccacccncagcnncgacnacgccggccagggcnccggcagggccancagcaagcngaccggcggcggcccgacgaccccggcgggccggaacgcggcggcgagggcgcacgc

SEQ ID NO: 4963 - DNA, 333 bp, Zea mays
  Clone ID: LIB3137-061-Q1-K1-F1
cgaaacgtacggacttcgggcatcggccccaacgccagcggcaccgcacccgcaccaccaagctcgtcggcgacatgaatccgcccgcagcagccgcgtccaccggcgcaggaggccacgccgcggcgcctgcggcagccccggagtacgcgcactacccgaggctctcgccagaggaggtggccccgcccccgcccccgccttatcacgccgccaccgccgcgccgtccgcctacggaggcaacccctacatctactcccccgccggcggcgccgccacctccccgaagaatacgatggactccgtgaaggacgtgctcggcaagatgggaa

SEQ ID NO: 4964 - DNA, 296 bp, Zea mays
  Clone ID: LIB3137-061-Q1-K1-F10
ccttgagtggggtgagcccactgttccgtccggcaaacaggaactggcggagattctgttcgactctgctctatagatggcgccatgtgcgtagcggtagctcctggaataagcaagcactgagcctgcgccctcccaacgcgcgcggtcgtcctcaccagtcaccaccaagggaatgtttctggttgcgcgcgatgaaccatgtacaatacaccggggaactgaaataaattgaaatagctagtcagaatttttagaataaaactgggccagcccgatacactacgccaacaccc

SEQ ID NO: 4965 - DNA, 305 bp, Zea mays
  unsure (1)..(305): unsure at all n locations; Clone ID: LIB3137-059-Q1-K1-A3
agctccgaaaccctactccgccnggggatgtcgtcatccggcgccccggccccggcggcggcaatggccgttgacgacgcggaggacgaccagctcgcctccatgtccacggaggatatcatccgggctcccgccttcttgacaacgagatccgtgtcctcaaggacgagttgcagcgacgaacctggagttggagtcgttcaaggagaagattaaggaaaaccaagagaaaattaagctcaacaagcagctgccctacctcgttggcaacatcgttgagatctttgaaatgaaccctgaggatg

SEQ ID NO: 4966 - DNA, 347 bp, Zea mays
  Clone ID: LIB3137-056-Q1-K1-A11
cgacccacgcgtacggcagctcttgcggtcgtccctcagccgttgtcgtatcgcatcgcattctacgattcgaagcgtgggtgctcgcaggggaccatggcgaaaaactacccaaccgtgagcgccgagtacagcgaggccgtcgagaaggccaggcgcaagctccgcgccctcatcgccgagaagagctgcgcacccctcatgctccgcctcgcgtggcactccgcggggacgttcgacgtgtcgtccaggaccggcggtcccttcggtaccatgaagtgcccggcggaactggctcacggcgccaacgcggtgctggacatcgcggtgcgggctgttcgagccca

SEQ ID NO: 4967 - DNA, 346 bp, Zea mays
  Clone ID: LIB3137-056-Q1-K1-B10
agtgcgcgcacccaccgccgccgcggtccagatctcccacccaaagtgctgccagcagcatgaggagcgcgggtgcggcggcgaccgtgacgcgtctggcgcagcgggtggtggccccggcggcgcccacgccccgaggccagctcccgctctcctggctggaccgctacccgacccagcgcgcgctcatcgagtccctccacgtcttcaagggccgagctgacgcgggagcggaggcgcccgccagggccattgagcgcgcgctggctgccgcgctggtgagctactaccccatcgccgggagactggcggtctcggacgagggggagctggtggtggactgtac

SEQ ID NO: 4968 - DNA, 278 bp, Zea mays
  unsure (1)..(278): unsure at all n locations; Clone ID: LIB3137-056-Q1-K1-B11
agcttatcactttacgtgacttccttttaacggcaaccgcccnaagttgggcgcggaggcgagcctggagcattggatgatgccccctttcccaattaccctcaagtacatacacccgacctacatgatccgcgctgacagttcaaacgcttgcgacaacgtctactgcactctgctagcccacacagcgctccatggcgccattgcagagtacaccggtttcacacgtcctccggagaatggcatacactcctacatcccattctataatatcaccg

SEQ ID NO: 4969 - DNA, 268 bp, Zea mays
  Clone ID: LIB3137-056-Q1-K1-B9
gccagacccacgcggacgttataactttcaccgttccatttaccttttacacagcaacccaacgaaggaggggccgggggccatccacaagcagtcgctgcttaacccaccgccaattatgtacagctacaaccagttccgcgtcactttccactctgaggtgaaaaaccacttcatccccgacgccatcatcgtcaagaacaaccacgccttctagttcttccttaagaccatcaccctcaacaacgtcccctgccacgacaccatc

SEQ ID NO: 4970 - DNA, 181 bp, Zea mays
  Clone ID: LIB3137-056-Q1-K1-C10
aacacccacccaaactgctatcagcagggaaggaatatcacagtttcagaggccaccccaactcctattacccatcaagtgcatgcccccgacctacccactccccgctgccagctcccactctcctgactacacctataccacacccatctcccacacatcgattccattcacctcttca

SEQ ID NO: 4971 - DNA, 387 bp, Zea mays
  Clone ID: LIB3137-056-Q1-K1-D10
gagccacgcgtgcgaggtgcctgctacattacacctttgcttttatccatctttccggttcagccgcgtgaggtaagttaacaagcaaggaagagccatggctagcgagcacgcggcggggggcgaggctaagcatgaccagaagcagagcctgatggacaaggcgaaggggttcgttgtggagaagatcgcgcacatccccaagcccgaggcgacgctggacggcgtgacgttcaagggcctgagccgggagtgcatcacgctgcacagcagcgtgaacgtgttcaacccctacgaccaccgcctccccatctgcgaggtgacctacacgctcctgtgcgccggcaaggaagtggcgttcggcaccatgccggaccccggctggat

SEQ ID NO: 4972 - DNA, 324 bp, Zea mays
  Clone ID: LIB3137-056-Q1-K1-D11
cgccacatactccttaaatcattgctttgtcaaatccacctgcttacgatcttgcagtgatcaggacgctattagttgaggataatttcgcgcacaagagcacgacaagccgagatttttgggggcgtcggcgtcgacctgtaggcgatggcggcgtactaccacggtggcgccggcacggacatccaggccagcaccgacggcctgcagacgctgtacctcatgaacccgagctacgccggcggctacgctgacgacggcggcgcgtccacgccgggggcggccaacatgatgctcctcaactcggccgtgaccaccatgacg

SEQ ID NO: 4973 - DNA, 417 bp, Zea mays
  Clone ID: LIB3137-056-Q1-K1-F10
acccacgcgtccgagccagaaaaggacatttaagtcacttttgcgttatgttggttgcaactttgagttgagaagcgctccgtccatagaagaagtgctggagtcatctgctgagcatgtcattgctacattgcgaggtgtgcacccagagtcaactaaatactttcttggagctgctgagaaattaacagaagaattgggacctcatgctcttgcttctgcactggcacatctgagtggattttctcagccaccttcgtcacgttctctcatcagtcatgagcagggatgggtgacgttgcaactaactagagaacagggatttggcagaggcttcttttctcctagaatctgtactggttttctatctgatgtttgttcaactgctgcagatgaagttggcaaaatatacctaac

SEQ ID NO: 4974 - DNA, 218 bp, Zea mays
  Clone ID: LIB3137-056-Q1-K1-F9
tagagactagcggcgattcggggagtgggtgtccagtgacagcaggcctcctttaagcaagaggctttctgccgaggaaaggcagaacgagagcaacaaaaggaaggagctgaatcttttgaaatatgaagcactcaaggatgaattgctgctcttgaccgcatgaactggagcagcatgtagtttataattgtctcctggatctctctctggagact

SEQ ID NO: 4975 - DNA, 381 bp, Zea mays
  unsure (1)..(381): unsure at all n locations; Clone ID: LIB3137-056-Q1-K1-G10
agaaaaanggccgacgcacgcgtccgaaaactcttctgacttattcattcattttggctctctgctcgccacgccgccgcctggcgctgccgctgctgctgccgcttctcctcgccgtcttggttgccgcttcccgcggcgacgacccttccggcgacgagtacttcaaccgctccatatgcaagctgcaaccatacagatgcggcgaagtgaatatcacctacccgttctacctttccgacgacacggcggacgtcctggggaactcctcctcctactgcgggtaccctgggctggccatcgactgcgtggacgacgagtaccccaccatccagctcggcggcggcagcagcacaggctactcctacaacgtgacggaca

SEQ ID NO: 4976 - DNA, 399 bp, Zea mays
  Clone ID: LIB3137-057-Q1-K1-A1
ctccctctctgcctgaccaggtcggacgctctcttgtttactacaacattcagaaggagagcacccgccacttggtgctgcgtctcaggggtggcatgcacatcttcgtgaagacacttactggcaagacgatcacccttgaggtggagtcctcggacaccatcgacaatgtcaaggccaagatccaggacaaggagggcattccaccggaccagcagcggctcatctttgctggcaagcagctggaggatggccgtacccttgcagattacaacatccagaaggagagcaccctccacttggtgctgcgtctcaggggtggcatgcacatcttcgtgaagactcttactggcaagacgatcacccttgaggtggagtcctcagacaccattgacaacg

SEQ ID NO: 4977 - DNA, 239 bp, Zea mays
  Clone ID: LIB3137-057-Q1-K1-A10
gggccgacccacgcgtgcgaaagggtaaatgaccatcaacccctacttctatgttattaaacacaccaacacggggacggtttgtataaaagactacatggacgacacaccacacttaatcaacattcatactggtaacgtgacggaccaattcactcacttcgatacacttatcaccaccaggaccagcattacaatcatcccctgccacacaaggatgaaggtcagcatgaacccca

SEQ ID NO: 4978 - DNA, 379 bp, Zea mays
  Clone ID: LIB3137-057-Q1-K1-A11
accgtgtgcccatcgcaataaaataaaatctataatagagagaggaggtagcaggaccgagtgcttaatctcttccttttcctcttcctatctccagcgcatcccaagaggcggaaagggaggatcgaggagcggcgaattattgtttgtttccccaagatgtcttctccaagcaagcgccgggagatggacctcatgaagctgatgatgagcgactacaaggtggagatggtgaacgatgggatgcaggagttctttgttgaatttcgtgggcctaacgaaagcatttatcaaggacgtgtatggaaggttagagtaaaattgccagacgcatatccttacaaatccccatcgattggtttcatcaataaaatatatc

SEQ ID NO: 4979 - DNA, 243 bp, Zea mays
  unsure (1)..(243): unsure at all n locations; Clone ID: LIB3137-057-Q1-K1-A12
cgcgtccgnaactgtaaatattactctaaacctacattttcgattatccacacaccctcagcgacttggcttctctaaaggagtatatggccaacacacaacatttcatcaacatacaactgtataacgtaccgaaccagctgatccaattcgagctgatcctgaccaccgccacattcgtgataaccatcttcaacttcgtctcaacgcttttctgcatcaacttcaaggtccctctgttct

SEQ ID NO: 4980 - DNA, 448 bp, Zea mays
  Clone ID: LIB3137-057-Q1-K1-A2
tcgcggacgcgtgggcggacgcgtgggcggactcgtggtctgacgcgtgggcggacgcgtgggctgagacagagtacggtcgcgagagtgaaggcaaggaaaaacacccaaacggcccaaccccaggaagccccgtcggaccctacagaccctaaccctagcgctcccgacgcgccgcggagcgatggcgatggacgcggagcggcggcaggcggagctgatcgcgcagttctccgctcaggcggcggcgctttcgtccgcgccccagctcgccgcgctggtgcttgaggccacctcccacccggccctcttcgccttctccgagctcctcaccctcccggccctctccaaggttcgcgcactgcccttggcgtgcgccctgctacgttactccgggacccgctgccggactaggttttgggtttcattatctgtttgtcttcgcgtc

SEQ ID NO: 4981 - DNA, 406 bp, Zea mays
  unsure (1)..(406): unsure at all n locations; Clone ID: LIB3137-057-Q1-K1-A4
aatattggtccgacccacgcgtgcgaccgaatatcttcttttgacttttcactgtgattttttgtgtagctcgcttcaagtcagatcgatgtccggtctttctaggtgtagtgctacnaaaccaacaccaccgtgcaggcacactctctgttttctgctcgatcgacggacaatcctgcgcggctgcgcccgtaagtatataccggtcgtccatcaggttcgtcagttcttcattcattcacgtcgacgtgcaactggtaattgtacaacatcttgggcagctgccgtatggacatagatgagtgccgacttaacattgacgacgactggtgttcatgtttggtacagacctaactatccgccccatcgggtataagattaatatgattgcatctttgtttttttt

SEQ ID NO: 4982 - DNA, 393 bp, Zea mays
  Clone ID: LIB3137-057-Q1-K1-A5
caagcagctcgaggacgggcgctctcttgtctactacaacattcataaggagagcacccgccacttggtgctgcgtctcaggggtggcatgcacatcttcgtgaagacacttactggcaagacgatcacccttgaggtggagtcctcggacaccatcgacaatgtcaaggccaacatccaggacaaggagggcattccaccggaccagcagcggctcatctttgctggcaagcagctggaggatggccgtacccttgcagattacaacatccagaaggagagcaccctccacttggtgctgcgtctcaggggtggcatgcacatcttcgtgaagactcttactggcaagacgatcacccttgaggtggagtcctcagacaccattgacaacgt

SEQ ID NO: 4983 - DNA, 366 bp, Zea mays
  Clone ID: LIB3137-057-Q1-K1-A8
aaaaacggccgacgacgcgtgcggactggcccacgtcacccctttttcttcttaacatccatactaaaacctcagaatccggcgcttctctcccatcccatgccctcctctcaaccctattccctccccattccttactcatgacgctatcttcccacgccaccacaactactgacgcggcggcacgacggcacctttccccaatacactcgctcctcttcccgtcgattacccacgtcgtctgtctacccccgtcctccgacttccccgctctcactacaactccaccatgccgtggcatcgttcctcttccccgacactcatacctccacccgaccgtatactcactgcatgcatcgaacacct

SEQ ID NO: 4984 - DNA, 418 bp, Zea mays
  Clone ID: LIB3137-057-Q1-K1-B1
ggtggacatcgccggcgaggccgagacggcgcggatcatcgagggcgcgctgttcctggtgtgcgccggcaccgacgacgtggccaacacctacttcaccacgccgttccgcagcgccgagtacgacatcccgggctacgtggacctgctggtgggccacgccgaggagttcctccgcgagctggtcgtcagctccaggggcgccaggaggatcggcttcgtggggatgccgccggtgggctgcgtgccgtcgcagcgcacgctcgggggcggcctcgccaccagggcctgcgagcccaagcgaaacgaggcggcgctgctgtacaacgccagggcccaggagatgatcgccgccttcaacaacaacaacaacgccgacgccgacgccgacgtgctggtcgtcttcctcgacatctac

SEQ ID NO: 4985 - DNA, 214 bp, Zea mays
  Clone ID: LIB3137-057-Q1-K1-B10
cacaaacaactcgggaacgtatattcataacttcctgccctcccctacaacctttccaaccacatcaatagaacacctcatcttcaactcttcaaatacaaacatatccattcacaattcaacacacattgtaaacaaatcatattacactatcttaaaacaccaacttcattaatacatatcatatctatctacaaaccctcaaaatcatttt

SEQ ID NO: 4986 - DNA, 444 bp, Zea mays
  Clone ID: LIB3137-057-Q1-K1-B11
aaaaccgggccgaccgcacgcgtccgaccggcctccacaaccttttgaaaacgctctgttaaccatacagaaagaactcggacaaggtaccatttatccattcgctgccctccccctaaatcctctcgcaaccacatcaatagcacaagttcatctttcaactctcgcagatggcaaaccagtatttgtcaaacttcaacatcatggtgtgaacgaaatcatattacacgatctgaagaatgcaaaatcattgattgaatggatagcgagctcagaacctcaatatcattttcatcctatcatagatgaatgccccaaggaggctccaaaggaacttgatttcaaccatcaagcagagaatactatggctgtctccaggaatcttactcgcaaaagtgactgtgggagaggcactgcttccagaactgttgatgtactcattcc

SEQ ID NO: 4987 - DNA, 360 bp, Zea mays
  unsure (1)..(360): unsure at all n locations; Clone ID: LIB3137-057-Q1-K1-B12
gggccgaggangcgnncgaccggcctccacnaccctttgaaatcgctcttgtaaccatacacaaacaactcggccaacgtatcttttatatattccctgccctccccctaaatcctatcgcaaccacatcaatagcacaagttcatctaccaactctcgcacatcgcacacaagcattattcaaaattcatcatgatggtgtaaacgacatcatattacacgatctgaacaatgcaaaatacataattgaatcgatagcatctgcacaccctcaaaatcattttaatcctaagattgatgaatgccccaaagagactccaaaggaacttgatttcaaccatcaattcatataatactaag

SEQ ID NO: 4988 - DNA, 416 bp, Zea mays
  Clone ID: LIB3137-057-Q1-K1-B2
cacgatcgagcacacaagcacgaagactcgtttaggagaaaccacaaaccaccaagccgtgcaagcgtcatggagtacggtcagcaggggcagcgcggccacggcgccacgggccatgtcgaccagtacggcaacccagtcggcggcgtctagcacggcaccggcggcatgaggcacggcacgggaaccaccggcggcatgggccagctgggtgagcacggcggcgctggcatgggtggcgggcagttccagcctgcgagggaggagcacaagaccggcggcatcctgcatcgctccggcagctccagctccagctcgtcggaggacgacggcatgggcggaaggaggaagaagggaatcaaggagaagatcaaagagaagctgcccggaggccacaaggacgaccagcacgccac

SEQ ID NO: 4989 - DNA, 282 bp, Zea mays
  Clone ID: LIB3137-057-Q1-K1-B3
acgcgtgcgcacgatcattcacacaatcaccattactcttctatttttaaccacacaccaccaatctcggctagggtgaattttaacagggagcaaacacatactctacactgccccaccgtacatgttaatcagaactgcaaccctaccgtaccttctagcacgccacccccaggattagccaccctaccggattttctccttcaaagtttctatttttgttatcactccggcgcaagcatgcgagggagtcacgaccaacccacgagacactagcacaaa

SEQ ID NO: 4990 - DNA, 449 bp, Zea mays
  unsure (1)..(449): unsure at all n locations; Clone ID: LIB3137-057-Q1-K1-B5
acgcgtcccacctaaccgccgccgcttctcgtttcccttatatgtgcccgcaccgatgaactggccgaggtctatgtagagaatcggctgcgcttgcctcagcacggggtctgctgcgtctggtggtggtgaaggggagaaattcgtgagatctgttccggatcacgcgtgcgagctcgggaatcaagtgtttttctctttgctcttccgatttgacactgacgcacgaaaggagnctaagggcggcaaaaagtctaccagtactcgttccatgatgtatgaagctccccttggctacagcattgaggacgttcgacctgccggacgcactaagaagttccagtctgctgcttactccaactgcgcgaagaattcatcctgatctcccttttgggcttctcattctagtaattcatgatttcttttctgacactttcattcttaccaat

SEQ ID NO: 4991 - DNA, 323 bp, Zea mays
  unsure (1)..(323): unsure at all n locations; Clone ID: LIB3137-057-Q1-K1-B6
gacggaggcgtacgactgaaaaaaccacncaatacctttttctatcataaacaaacaacctactcatgggtgaagtatatttataaaaaaaaccttccatttctaacaccatgccacattacatgtacacccatccacaccaccacattgaggcccatcataacgcacccgatcaattagacacgaaacataaaccacccctgaacagtcccatcttcatgaacaaacacgaccacgaccagtataagaacaaacacacacttcaactgacgaccacaatagccaatgtcatccttttctatcccgataatcacaatcacaat

SEQ ID NO: 4992 - DNA, 427 bp, Zea mays
  Clone ID: LIB3137-057-Q1-K1-B8
gagcaagggaagacgactcacatttcgcctctcgaacacagttagatcgagggagtaagggagagtgagagccatgacggagctgttcgacacggccgtgaccagcctcctccacctgccggaggtgctggaccgcctcgccgccgcagacggcgaccggcggtcggccggccaccacgcggcgcacggtcacggccacggacgcgtccacgggctcggcggcggcggcggagcgccggtggacatcgtggagagcccccgcgagtacgccttcgtgctcgacgtacccggcctctccaagtccgacatccaggtgacgctggaggaggaccgggtgctggtgatgaagggcggcagcgggaagcggaagcgcgatgaggaagaggacatgaacggcgaatggtgccgatacatccggttggagcgc

SEQ ID NO: 4993 - DNA, 192 bp, Zea mays
  unsure (1)..(192): unsure at all n locations; Clone ID: LIB3137-057-Q1-K1-B9
accgtcttccacnaccattagaaaacgctctgttaaccatacanaaacaactcggccaacgtatcatttatctattcgctgacatcctcctaaaacctttcgcaaccacatcaatagaacaaattcatcttccaactctcgcaaattacaaacctgtatcatgtacacttcatcatcacagtgtaaacaaaa

SEQ ID NO: 4994 - DNA, 186 bp, Zea mays
  unsure (1)..(186): unsure at all n locations; Clone ID: LIB3137-057-Q1-K1-C10
aaaaacgggccgaccgacgcgtccgcatagacnatcnanctctttcatatatggctttatcctcttacttcattaaaaggatcacagcaaatattctcacatatcaatccactctccatcacgtctgtggggcgactcacattaagtattcttttctagctttttcaactcttgatatagaccacc

SEQ ID NO: 4995 - DNA, 316 bp, Zea mays
  unsure (1)..(316): unsure at all n locations; Clone ID: LIB3137-057-Q1-K1-C11
aactgatactccagctggaacgggctcaattccgccgggacgcccatgcnaagggccaggcggaaggccggcacatggctgctcatcatgcccctccggtcgaggacgagcgagatcaacgagatgcccgaccgggtgcacaccgtgggactacgacaacgcttcatacacaccatcacctcgttcatcaaggcggacaccggcatgccgctggagaaattatgcaagacgtcgcactgcaggacacggaagagctcagtgcactcctgaaagagaccatagatcccactgaatgtctaggcgtaccggtcgcacc

SEQ ID NO: 4996 - DNA, 212 bp, Zea mays
  Clone ID: LIB3137-057-Q1-K1-C12
gtcacatatcagtccactatcaggcacgtctgtggggcgactcaaattaagtatttgttcgagcttgttcaactctggagatagaccaccatgcatacagaggatcttttcgtctatcaatgcttacaccggcaagcagttaaaacaatcattgaatgtttttcacaactttacacttaatctgcctttgcactcctcataaaaaccataga

SEQ ID NO: 4997 - DNA, 399 bp, Zea mays
  Clone ID: LIB3137-057-Q1-K1-C2
gtcagtcacagctcacagtaaacaccgcgatgccgcccccgctcccaaacccgaccgaggggagcgcaaagccccccaaccgcggatcaatccgcagcatcgatggcgcccaaggcggagaaaaagccggcggcgaagaagcccgcggaggaggagcccgcgaccgagaaggcggagaaggctccggcagggaagaagccgaaggcggagaaacgcctccccgcgggcaagtccggcgccggcgagggcaagaagggcaagaagaaagccaagaagagcgtggagacctacaagatctacatcttcaaggtgctcaagcaggtgcaccccgacatcggcatctcgtccaaagccatgtccatcatgaattccttcatcaacgacatcttcgagaagctc

SEQ ID NO: 4998 - DNA, 424 bp, Zea mays
  unsure (1)..(424): unsure at all n locations; Clone ID: LIB3137-057-Q1-K1-C3
ctgactcctgggcggggcaatacgttttttgtacatttgaagagctggatgctttcggcgtctggaccaatcaaggtctcagacttggaaaaaggccccttgttaaaagtgctctatataaggatcacacagattccttaggaccttcaccttccgcaaggagaaggacaggcatttctaagaagagttcatcagctttgcgcataattcaaaaccctacacatggacacatgcaacagagattgcatcctggtttgtcatctattttaaaccgttctactgctcattatggngctgncactggtttacgaacaactgcagatgggatgtaccttcttatctcaagatctgattctcgcttaagactatgggacatctattcatgctgcaataccctggtcaattttgaagcttttccattgca

SEQ ID NO: 4999 - DNA, 436 bp, Zea mays
  unsure (1)..(436): unsure at all n locations; Clone ID: LIB3137-057-Q1-K1-C8
ggccgacgcacgcgtccgctcgaggaagagtactactacgagcagctttcggagaagaagcgccgcctcacgccagagcgggtgcttctgctggagaggagcttcnaggaggagaacaagctggagccggagcgcaagacggagctggcgcgcaagctgggcctgcagcctcgccaggtggccgtctggttccagaaccgtcgcgcccggtggaagaccaagcagctcgagcgcgacttcgaccgcctcaaggcctccttcgacgctctccgagcggaccacgacgccctccttcaggacaacaaccgcctccgctcacaggttgtgtcgttgaccgagaagctgcaagagaaggaggatgcgacggatggcggcgccaccgttgacaccgtcgcgccggcggtggacgtcgaggcttccctggccgacgacgtct

SEQ ID NO: 5000 - DNA, 417 bp, Zea mays
  Clone ID: LIB3137-057-Q1-K1-D1
cacgtctccagtccgacactccgactcactccccctcccccgccccaacccgtcgcaatggccgccgtctccgcagccccgaggccctcgatgcctccccgactcgccctccgtgcccacctcttctcctccgcctctccgctcccaatgcgcgcgctccccttactccgcagccgcttccgctccttgaccacggcctacgctgtcaagcaggacacggccctctggacccctgcacccgtctccgccatcagtgctgccaccgacgacggctccgtctccctcatcgccgtcgacctatctgacgccacggacctcgtggactcgtacacgaacccgggccaatacctcctgatccgcgtacccggcgaggagctcaagccggcgtacatggtcatctcctcgccgcctaaagcg

SEQ ID NO: 5001 - DNA, 368 bp, Zea mays
  unsure (1)..(368): unsure at all n locations; Clone ID: LIB3137-057-Q1-K1-D11
aaaaggggccgaccgacgcgaccgnncgggcccaaccagactccnggccagacctatcggccgacccgccggcacaagggcccggcggccaaagaggctngcccggactcctccacaccccaagaagaatatcactactccaatcacagcacgtggagaacaaagacaactgacaaagacaacaaatactacactgaccacggcgaatccagacgccattgaaaaaacgccaagcacaaacgcagctccaacagacttcaacactgacgccaattaataaaaacgacccatatggacaagaggcataccccaaacaccataagcaatcagcagttcccgacacacatcaaactagctgcaagaacaaa

SEQ ID NO: 5002 - DNA, 151 bp, Zea mays
  unsure (1)..(151): unsure at all n locations; Clone ID: LIB3137-057-Q1-K1-D2
cgcgtgcggtactagcatntnagtaatatactgttacttctagtttttctagactacctctacacgaggccgtggtaagtcttcttcgggtctatacgttccccttgtctccgtaaccgtcgccctccacttatactgctgatatgcgctt

SEQ ID NO: 5003 - DNA, 393 bp, Zea mays
  Clone ID: LIB3137-057-Q1-K1-D3
ctccgagtccagggggcaggggcaccatttccgagttgtttaattagtgctagttgtatggccggggttagtgacataattaccctcacgcgaagaacccctaccttggctagtcctcctacgtatacgtctcttctcttcgcttaatcttggtcggtgatttgattctgcacttcttgggcgcattgcagagggtgctcggtctgcagctatcttaggttaaccagtcgtgtgtggtctatcggtttcgatatagtactactgctctgttataatcagcggggaggaggaagatgacggtgacgccacggatcacggtgagcgactggcggctgacggtgcgcggtcgtactgtgctcaccggcgtgccggacaacgtgtctgcggcgcacg

SEQ ID NO: 5004 - DNA, 434 bp, Zea mays
  Clone ID: LIB3137-057-Q1-K1-D4
catcgaccttcaagtctcgctacgtagcatttcaataaaaaaagcagccgcaatggcgagcagcaccatggccctctcctccacggccttcgccggcaaggccgtgaacgtgccgtcgtcgtccgccttcggcgaggcccgcgtgacgatgcgcaagacggcggcgaaggccaagccagcggcggcgtccgggagcccgtggtacggccccgaccgcgtgctgtacctgggcccactgtccggcgagccaccgagctacctgacgggcgagttcccgggcgactactgctgggacaccgcggggctgtcggcggacccggagacgttcgccaagaaccgggagctggaggtgatccactcccgctgggccatgctgggcgcgctcggctgcgtcttccccgagctgctcgcccgcaacggcgtcaagttcggcg

SEQ ID NO: 5005 - DNA, 388 bp, Zea mays
  Clone ID: LIB3137-057-Q1-K1-D5
gtgcgcactggcacgtaccgcctgctcttttaccctgagcagctcatcagtggcaaggagaatgcctctaacaatttcgcccgtggccactacacaattggcaaggagattgttgatctgtgccttgaccgtattcgcatgcttgctgacaactgcaccggcctccagggcttcctggtcttcaatgccgttggtggtggcaccggctctggccttggttctctcctccttgagcgcctgtctgtggagtacggcaagaaatacaagctgggcttcactgtgtacccatcttcccaggtgtcaacctctgttgtggagccttacaacagcgtgctctacactcactcactcctggagcacactgatgtctctatcctgctagacaacg

SEQ ID NO: 5006 - DNA, 222 bp, Zea mays
  unsure (1)..(222): unsure at all n locations; Clone ID: LIB3137-057-Q1-K1-D6
gccgacgacgcgtgcgttctcacttcacncactgccatctctttcttacagaacaactcatcactggggaggagtatgccttttacaataccgcccctttccactacacacttttacatgacattgtttatcttttccttaaccgtcctcctaaccattctcacaactgcaccgaactccaaaccttccttttctttaatgcccccggtgtacatacccgac

SEQ ID NO: 5007 - DNA, 275 bp, Zea mays
  Clone ID: LIB3137-057-Q1-K1-D7
tctaggttccttttcatttatggcttgttctcagaatgtctccagcaagttactgatatatttatacaaaacattgccccctcactatacactgcactgttcgcatagtgcactttaaatatatctatgtggatgagtaatctgctgacatatacttatgtcgatgacacaagaatatattatgtccaacacagctgttttgtctacttccgattatatgtatcttcaacatgctgatctatctcatcaacattccttgacttcatttatttcat

SEQ ID NO: 5008 - DNA, 457 bp, Zea mays
  unsure (1)..(457): unsure at all n locations; Clone ID: LIB3137-057-Q1-K1-D9
cccggnctgaaaaccgggccgaccacgcgtccggtcgggaccaacgagatttcgtgcgaggtctatcgggcgtgcttccgaagcaacggtccggcggcaccggccgatcgcccgaaccaactggccctcccggcagccggcgcgggcgccgaggacagatcggcaggtgtcaagggtgtgggcaaggaggactccgacaaggcgtgctccgacgcggccatgctgctggcaaagctggcgctggcccggcggagcgccgacaatgttagcgtggtcgacgaggatctccgacggggcatatgaatatgattctcggagcgaagcagagcagggcaaaatcatatgctccatgcttgaaactagctcttctgaaatccacgctaatttctcccccattttgaccatccttctattttgatgtaatattagtagtagatcctgatcagaagaatataat

SEQ ID NO: 5009 - DNA, 385 bp, Zea mays
  Clone ID: LIB3137-057-Q1-K1-E1
gaaaaactcagccgccggccgctgcccctctcggctgcacgacgtccgtgagggcgtgcgccctggccccgtcccttgtcgcctgcccgccggtgcccgcacaggctgccagtgccatactgccatccctccgtccggccgtctgcccaggctgcctgcccggcgccctggcctcccggtcgctggctctctgcccaggcgccaggccgcaggtcccaccgccccagaccacccgcgaaccagtccgctgcaggctgcaggccaccgtccctccagttcgccggtcagattattaaccattcagataccccagctccgcctagacgcgaatcctccgccactatggtggcagcggtgtccctgccgagccaagcacaggccgtgc

SEQ ID NO: 5010 - DNA, 73 bp, Zea mays
  Clone ID: LIB3137-057-Q1-K1-E10
aaagggggccgacccacgcgtgcgatcacccacacatacagtttcatttctcttttttaaacccaccccctca

SEQ ID NO: 5011 - DNA, 305 bp, Zea mays
  unsure (1)..(305): unsure at all n locations; Clone ID: LIB3137-057-Q1-K1-E2
acatgggctatantaatactttatcttttcctcccccaggatcgcctgacgcgtgggcagattcttcctcgacaacacccatttccacctctatctcgtcaactacccctttataaccactgactacatcacctacatattcaagttctacaccgtcctcgtccactttaagctcacttacttcacactcaattactccaagacccttctcttcaatacaaccctttaccgtctttttcatcaatgaaccctaatgaaatcccctgtcgtcaaacttaccctcaacatttcatataatccacctt

SEQ ID NO: 5012 - DNA, 445 bp, Zea mays
  Clone ID: LIB3137-057-Q1-K1-E3
ttcaaagaaatcaaatattctgtcaacaagtagttcaaattcattgccagatgctcaggggctagtttctggggctagagctactgattctgcaagaattgctaaattcacaacggaactatctaggccagctgttatattagacaaattgcgtgaactatcttggagtggtgtgcctccatatatgcgacctaatgtatggcggcttcttttgggatatgcaccgcctaataaagatagacgagaaggtgttctaacaaggaaaaggctggagtacgtggaatgtgtttctcaatactatgatattccagatagtgaacgctcagatgaagaaattaccatgcttcgccagattgcagttgattgcccaagaaccgtacctgatgttacatttttttaaaatcatcagattaaaaatctctttgacgcattttgtatacatggg

SEQ ID NO: 5013 - DNA, 378 bp, Zea mays
  Clone ID: LIB3137-057-Q1-K1-E5
caaaagagttgatgcttttaacttcacatttttagttacgattcacagccggcgcgttggaggtcctatgccacatgaagacacttctggtgttgaccttggcgttccttttctttgggaaagaggggctcaacttccatgtcgcccttggcatgcttattgctgtgatcggcatgatctgtttcgggaacgcttcgtcgaaatctggatgcaaagagcgccaggtctaccccacaccgagctagaagactcacaatcatggtgcgctgtcatcgcagtcctagctctatcagaatgtctatacgagacacacaaaggcatccgatgcttgttgagcaccggtcgacctgtctttattttttaatacttaatttttga

SEQ ID NO: 5014 - DNA, 426 bp, Zea mays
  Clone ID: LIB3137-057-Q1-K1-F10
aaatgtttgttggacaactaacgcagctgtttggtctaaaaccatcttatttctcacaggagatggacgttccaactaaatttctagttagtgaaaagggcttcacagaatgggagttagatttattatatcggcaccatgcacgttccaatctgctgtcatgcctcaccacattggagtctctatccagtctggtccactctctccctaggatgattgtcatggatgaaattggaagacaggttgagctttctcttgaagctgcacatttagcacagggaaatgcaactctaggaataagtgactcttcagcagtatctgcaacaagagccagggcactggctgaggatgcattttttcatccatccattatgtcaatcagttatgcttcagtagagcactatttcgccatttacatgccatttt

SEQ ID NO: 5015 - DNA, 324 bp, Zea mays
  Clone ID: LIB3137-057-Q1-K1-F11
aattggtccatcacaacctaactatatcctttgatacaaccccatgaaacttaggggcctgtgggtatataggagcagctagccaaaccaagaccaccacaaatggtcgtcgatccacaaggatgctaaaacagactccaaagcgttcgagtatatacactcgcccaacccgaacccaaacgtgactactggcgccctagtggataggctcattccagaacgacaccttctaagactccccagacaacacctggcagacggagtccagcacctacaacagtgtcaccctggtctgcctactattcagcctcaacaccactttct

SEQ ID NO: 5016 - DNA, 450 bp, Zea mays
  Clone ID: LIB3137-057-Q1-K1-F2
tggggagaccgacgcgtgcgatatatgcttgcggaggttgggaagattttttattctttaaagtactgccaagcatctcgtaaggtgctcaagtcctctggtcgtgcacctgaactagaagcatggaagcaactgtttattaccctggaggaccggatacgtacccatcaacagggcggttatgcaacaaatcttgcccctggaaagattgttggaaagcttttcacatcacttgataaatctttgtcccgaatgatgggtacacaatctgcaccgttgcctcaactgccgcagggtgctgcaaatgagagaggtgtttattcttctcctgatacaaaagtagtaaatagtcagtcagtgatgttcatggcaccattagtgtcatctgcttcagaccagtctatgaattaaattggaggaaataacgtctatggcaaggaaatttcacat

SEQ ID NO: 5017 - DNA, 315 bp, Zea mays
  unsure (1)..(315): unsure at all n locations; Clone ID: LIB3137-057-Q1-K1-F3
aattattgggtcgtgcgacgcgtgcgccgttctcctctcctcttcccccaaatctgtttgcgttttggcaaccctagcccccgcgggccgcgggccgtatggaaggagggagccccgccgtcgtccatggaggtgaagctgtggaacgacaagcgcgagcgggagctcctggagagctacgcggacctgtacgcgatcatcaaggtcacggagaagctggaacgggcctacgttcgcgacctcgtctcatccgccgactacgaggcggagtgcctcaagctcaacanccagttaaactccctttcctcctcgctc

SEQ ID NO: 5018 - DNA, 347 bp, Zea mays
  Clone ID: LIB3137-057-Q1-K1-F4
cggacgcgtgggctggtgatattggtcagttccatcctgatgggtgccttgagattattgacaggaaaaaagatatagtaaagcttcagcatggagaatatgtgtctcttggcaaggttgaatcggctctagcaacaagcaactatgtggagaacatcatggtttatgccgatccatttcataactactgtgttgccctggttgttccagcgcaccaggccttggagaagtgggctcagaattccgggataaactatgaaggctttgcagagctttgccaaaacgaccgagcaattaatgaggttcagcaatcgctatcaaaggccgcaaaagcagcgaggctcgag

SEQ ID NO: 5019 - DNA, 336 bp, Zea mays
  unsure (1)..(336): unsure at all n locations; Clone ID: LIB3137-057-Q1-K1-F5
ttgaaaacccgggccgacggacgcgtccgcagctaggaccgncgcctaccttttaaggttctactgcccctcctcaccccaggccccagcaggagcggaaggggccgcggccacgtcataccccacatcggcgagcggaggcggcaccgccggatgcaaaggcaagatgttcgggcgcgcgccgaataagagcgacaacaccaagtactacgagatcctcagggtgcccaagtcggcgtccaaagacgagctcaataaggcctaccgcaaggctgctataaagaattttttattttttttttttttaccccgagaagaacaaggagcncgcacaag

SEQ ID NO: 5020 - DNA, 356 bp, Zea mays
  Clone ID: LIB3137-057-Q1-K1-F8
aaatatttgttggacaactaaggcagctgtttggtctaaaaccatcttatttctcacaagatatggacgttccaactaaatttctagttagtgaaaagggcttcacagaatgggagttagatttattatatcggcaccatgcacgttccaatctgctgtcatgcctcaccacattggagtctctatccagtctggtccactctctccctaggatgattgtcatggatgaaattggaagacaggttgagctttctcttgaagctgcaaatttagcacagggaaatgcaactctaggaataagtgactcttcagcagtatctgcaacaagagccagggcactggctgaggatgcattt

SEQ ID NO: 5021 - DNA, 419 bp, Zea mays
  Clone ID: LIB3137-057-Q1-K1-F9
ctttgctgcatcacaggctaactatatccgtggagacaacccgatgaaacttagggaccgggtggtatatgggagcagctacccaaagcaagtgcaccacagaggggcgtcgatccacgaggatgcgaaaacaggctgcaaagggttcgagtatctacactcgcccagcccgaacccaaacgtggctactggcgccctggtggatgggccattccagaacgacaccttcgtggactcccgtgacaacgccgtgcagacggagtccagcacctacaacagtggcaccctggtcggccttctcttcggcctcatcaccacttgctccgtggtacagtcgttcacctaaagggctcctgctatgttctggcctggagcgatgcatgtacgagtactattgcaatttttttgcttggcgtggc

SEQ ID NO: 5022 - DNA, 443 bp, Zea mays
  Clone ID: LIB3137-057-Q1-K1-G1
gagcaagggaagacgacgcagatctcgccacgcgaacacagttagatcgagggagtaagtgagagtgagagccatgacggagctgttcgacacggccgtgaccagcctcctccacctgccggaggtgctggaccgcctcgccgccgcagacggcgaccggcggtcggccggccaccacgcggcgcacggccacggccacggacgcgtccacgggctcggcggcggcggcggagcgccggtggacatcgtggagagcccccgcgagtacgccttcgtgctcgacgtacccggcctctccaagtccgacatccaggtgacgctggaggaggaccgggtgctggtgatgaagggcggcagcgggaagcggaagcgcgatgaggaggaggacatgaacggcgaagggtgccgatacatccggttggagcgcggcgcggcgccgcggt

SEQ ID NO: 5023 - DNA, 214 bp, Zea mays
  Clone ID: LIB3137-057-Q1-K1-G10
attctttcttcatagctatcctaattcatttttcaatcttcccaaccataactggcgctggctcaaatacaaaacatatcctatacccaaaatataccaaatctacccttaactcaattcagcttttttctcatcacccactacctccacctactccagagcatcaccatccactgacaacaggccttaacaacatcctattttaataacctca

SEQ ID NO: 5024 - DNA, 158 bp, Zea mays
  unsure (1)..(158): unsure at all n locations; Clone ID: LIB3137-057-Q1-K1-G11
cttagttattcatccctttcttcattcatatattattctccccaaccattacttggacttgctcaatttcaaaacatatccgtctcccttatatanaccaaatcctctctcaacttaatagaccttttttccccttatcaactaccttcttctaaaac

SEQ ID NO: 5025 - DNA, 275 bp, Zea mays
  Clone ID: LIB3137-057-Q1-K1-G2
ggtagctcaatagatctactgctctcgggggagttaatgcaaagctgagttgctgcacgtgggctttcttcagagatggcttcagctggtgtagccccatctgggtacaaaaacagcagcagcactagcattggtgccgagaagttgcaagatcagatgaacgagctaaagattagagatgataaggaagttgaagcaaccataattaatgggaaagggactgaaactgggcccataatggtaaccactactgggggcaagattggtcaaccaaa

SEQ ID NO: 5026 - DNA, 281 bp, Zea mays
  unsure (1)..(281): unsure at all n locations; Clone ID: LIB3137-057-Q1-K1-G3
attttnggtcgacggacgcgtncggtcactctatacactaccacggtcaaaggattcaaactccacatgcaccctacatacacgggacagggacgccataccccaacaagtgacgactacacctacggatccaaaccccgttatctaatttctttacacaccccaaaaaaaggagcaaacaacctcaatctacacaccaacaaaggctgtgcaactggaacacgcaccagaaagacgaaagaggctgcaaccgcgaacaagaacaacacgaacacccataa

SEQ ID NO: 5027 - DNA, 390 bp, Zea mays
  Clone ID: LIB3137-057-Q1-K1-G5
acgttgctgcccatccacaacttcccttctgattttccttgaactgcacatacaacgaggctaggaatgttcaaagacaaacaaggctcacaacccacataacacgcatagattccctgtttttattttatccagcctgctagccgcattcatactcgaggcggccacttcctcagaagctaaaccttctagattggagaacaaaacgaaatccctggagaaacttgataatctccgtgagaacgctttagtccccaatgataaaagcagatccaccgattacgagaaagtgatgccccattcggagaactttctaatcccacacgctaccgacgatgttttcttattttttttaaacctacccataaacccttccattgcgtaaaattt

SEQ ID NO: 5028 - DNA, 433 bp, Zea mays
  Clone ID: LIB3137-057-Q1-K1-G9
gcgattcattccgcgcgacgcaaaaccctattccatccaccgatccttgtcatggcggccgccaccagccaggcgagcctcctcctgcagaagcagctcagagatctcgccaagcacccggtggatgggttctcggctgggctggtcgacgatagtaacgtattcgagtggcaggtcaccatcatcggcccgcccgataccctatatgatggagggtacttcaatgcaataatgagcttcccagaaaattacccaaacagcccgccatcagtcagatttacctctgaaatgtggcatccaaatgtttattcagatgggctggtgtgtatctctattcttcatccacctggtgaagatccaagtggttatgagctcgcaagtgagcgttggacacctgtgcatacagttgaaagcatagttctgagcattatat

SEQ ID NO: 5029 - DNA, 440 bp, Zea mays
  Clone ID: LIB3137-057-Q1-K1-H1
ctattggggacaacctgagggaacttttaatttctgggacaggccaacttgggaggttgaagagcaaatcgaatacaggaactaccaaacatgccagtacaacactactccgcaggaagcttttacagtggctcaagatatcatgaagacgatgctagaaaaggggtacgtgctcagcaaggatgctttggctaaggctagagcctttgatgagtcctatggattaacagctgcagctgcagccagggctgcagagctgagcaagagaattggtttaactgacagggtcaatgctggtgttggtgcaatgcgatcagtcgatgagacatatggcgtaagagagacaaccaagacggttgctactgccactggaagaacggcagcaaaggtggtaaatggcatcgtcaccagcagctacttctctgcaggagccatgatct

SEQ ID NO: 5030 - DNA, 333 bp, Zea mays
  unsure (1)..(333): unsure at all n locations; Clone ID: LIB3137-057-Q1-K1-H10
ccgagaccanctcccacaacacttttattttttacacccccgacaacctacagggacctgtcacaatataacggaccaggggcacccacaaacacataataaaccataatggtacttttatgattaccaaaacaaccttaacgaaacagccctcacccttcataatcaacaaaactccagtaatcaaaccaatcttacctgactccccttgataacacacacaaaaacattacgatgaactcacctaaacaatataggacaaatacgataaacacaaatactacaacattaacaaaaaacatgctgaagaccacaacaacatcaaccaaccct

SEQ ID NO: 5031 - DNA, 272 bp, Zea mays
  unsure (1)..(272): unsure at all n locations; Clone ID: LIB3137-057-Q1-K1-H12
cgcgggtggctgccctgctcatactgcttttcctcgccgnatcgnccacccgcaacgcaggggaggattccatggccgacgacacccggacgttggcgggcggcatcaaggacgtgccggggaacgagaacgaccttcaccttcaggagctcgcccgcttcgccgtcgatgagcacaacaagaaggccaatgctcttctggggttcgagaagcttgtgaaggccaagacacaagtggttgctggcacgatgtactatctcactattgaagtg

SEQ ID NO: 5032 - DNA, 419 bp, Zea mays
  Clone ID: LIB3137-057-Q1-K1-H2
gaagaagggcttctacctcaaggccttgaagcttgtgaacgtggagaggtcgtttgctgagaagcactacgccgatctcgcctccaagcccttcttccagggcctcgtggactacatcatctctggccctgtggtggccatggtctgggagggcaagagcgtcgtcacaactggccgcaagatcattggcgccaccaaccccctggcttctgagcccggcaccatccgtggcgactttgctgtcgacattggcaggaatgtcattcatggaagtgacagcattgagagtgctaataaggagattgccctgtggttccccgagggccctgctgattggcagagcagccagcacccctggatctacgagaagtaaacatggaaaagttcacatcaaaccttgagagccagaggaagcatgt

SEQ ID NO: 5033 - DNA, 304 bp, Zea mays
  unsure (1)..(304): unsure at all n locations; Clone ID: LIB3137-057-Q1-K1-H3
aacaaatgcctcctacctcaaagccttaaatcttgatcacgtcaaaaggtcattagctggtaagcagtactcccaactcgcctacaagcccacattccaccacctcctggactacaacatctctacccctcncatttttattttctcttatgcccctatccttctcacaccncgccggaagaacaaaggccccaccaaccccctatcttatgagcccaacaccataccagaccactctgcaggctacattctcaagaaaatcatccatgaaaaacacaccatcgagagcgctaataaagagacc

SEQ ID NO: 5034 - DNA, 289 bp, Zea mays
  unsure (1)..(289): unsure at all n locations; Clone ID: LIB3137-057-Q1-K1-H5
attcggacaaacaccgacgcacatgcctatttcgtttctcagccaaccccgcagaagagtgcccgaccctacttcatagaggccgcggcatattccntcaacgccactcacgcaggaggttgttcaatcagctgctattttttcccttcttttctttatttattaaatcgactaacaaagaaatgattatcatatatataacccgtagaggaagccgaacaataataagctaggcctgaactcatgccatacataataatcatgagaattgtcagacagacatagaaac

SEQ ID NO: 5035 - DNA, 302 bp, Zea mays
  Clone ID: LIB3137-057-Q1-K1-H6
tggttttacccacgcgtgcggaagtaaggcttctacctcaaggccttgattcttgtttacctggaaaggcccttcgcttgaaagcagctcgcctatctcgcctccaagcccttcttccatggcctcttggactacatcatctctggccctgtggtggccattgtctgggagggcaagagcgtcgtcacaactggccgcaagatcattggcgccaccaacccccttgcttctgagcccggcaccatccgtggcgactttgctgtccacattgtcaggaatgtcattcattgtagtgacaccat

SEQ ID NO: 5036 - DNA, 404 bp, Zea mays
  Clone ID: LIB3137-057-Q1-K1-H8
gatcaggccgtcttcgctcgctgaccaccaccgcctcgctcgtcgagcatatagccatgccatggcaagcacaggctcagagggatagataggtccagtgcaagcgcgcaggcatcgtcatccagggagggtggtggcccgtggtccacatcgatgcgatgccggttcacgttgcgctcctcgccgtgccggcggtggccgctgggttcctgcaggcgttccagttcgcgttcctgctgtggcccttcaacctggcgctgccgctggcgcgccacctgccgcaggcgtgcatcgcgttccgcggggtcgcgtccttgtacggagccgagctgcggcggtacgcgggcgccgccgtccgggccgccgtgcccgtgctgcagccgccgagccaccaccggtacgcc

SEQ ID NO: 5037 - DNA, 304 bp, Zea mays
  Clone ID: LIB3137-057-Q1-K1-H9
ccgagctctgctctctcaaaacatgttcttttttacgctcccgacaatctcgttgggcagcggacgatatatcctgccagcgtgccccatactaacaaaaaaatacggaattacattttgatgatcctgtggagaaccttactgaaagtgctattacccttgataatgaggaagaatccactacttaaactaatctacctgatcagtctaaataagaaactcaaaagctttacgatgaactcacttatacaatattttacaacttgcttaaccacagacatttgatcattaacaataaacatgt

SEQ ID NO: 5038 - DNA, 300 bp, Zea mays
  Clone ID: LIB3137-058-Q1-K1-A1
gcgtacgcacatgcctgtcgctttctcaaccacaacttattctctttcattggcacccataacctcgagcagggttgtccttgacacccacaaacaaatcacccctgttctaacttcccattggcccccccgcccatttacattcaaattgatttgaccccgcacaagcataaacaacaccgcccgcgctcttttttttcgcaatgctatttagcaaactgcaccgtgcacttcactttaattcacaccaaccccacacaatgcgatgaaatatctaatggcgaattttttttttttttc

SEQ ID NO: 5039 - DNA, 284 bp, Zea mays
  Clone ID: LIB3137-058-Q1-K1-A10
cccaggccgacccacgcgtccaatccagatgacaagtgcaccattaccgcacttctctaactagtgctagtcgggggaccatggggagttacttaagcaccctcacccgatacaccctacctttgctagtcctcctacgtcttctcttctcttaatcgttgtgatttgattcttcacttctttcgcacattgcagagggtgctcggtctgcaactatcttaagttaaccagtcgtgtgtgctctatcgagttcgatatattcatactactgcgctgttataatc

SEQ ID NO: 5040 - DNA, 285 bp, Zea mays
  Clone ID: LIB3137-058-Q1-K1-A11
gcggcgactgtcttggctcctcctagcccccagtgtcgactgcccctgctcctctccatcgatggctgtgctcggcctccacctcaagccgtgccctggatctccatggtcgagtttttccctgcagaatccccccaatggtgcctggtctttttcccttggtcgaaaacacctctgcacttaaccccctctgttgatggtcgacgtctctccatccatggtacctagatctccatccccatgcccctgcagcttgttctcaagccgccaaccatggtgcgtcgt

SEQ ID NO: 5041 - DNA, 174 bp, Zea mays
  Clone ID: LIB3137-058-Q1-K1-A12
ataactccttttcaacctctttttagcacttttacctaccagccaaattcggggttcttaggtgaccatttctagtgccatcatcactcacacgccaacctccctacttataataatcacactaagtactatatcaccttaatcttgaccattccatccttcacttcatgcacc

SEQ ID NO: 5042 - DNA, 98 bp, Zea mays
  Clone ID: LIB3137-058-Q1-K1-A2
cggcagggtgggtacagtagcaagctattgccctagtctgatgtaagaacaaatttatatgatccatcccatattgtctttaattagattcttttttg

SEQ ID NO: 5043 - DNA, 293 bp, Zea mays
  Clone ID: LIB3137-058-Q1-K1-A3
cacatgcctgccgctgccgcagccgcagccgatgcacgggcatgggcgccggtagcgtctagcagcgtgggcgtggccacccacaggcagcgcacgccggtgctagctgccgatgggccgccgtgcccatgtccatgcagctggattggacccggcacaggcagaagcaacagcgcccgcgctctttcttgtcgcaatgctagttagcaaactgcacggtgcactccacttcagtacacaccaacgcgacagactgcgatgaaatatctaaggccgagtttttttttttttgc

SEQ ID NO: 5044 - DNA, 308 bp, Zea mays
  Clone ID: LIB3137-058-Q1-K1-A4
caggcctcagtcgtcaagaggctccaggacatcggcatgatcagcgccgtgcccgggatgaaggcgctcgacatgaacgccgccgaggacgagatcgtgcgcctcacgcgcgaggtcgtgcccggcatgatcgtcaccgggatggaggtcgccgagatcgacggcgccccgaggatgggcccgacgttcggcgccatgatgatctccggccagaatgcggcgcacctggcgctgaaggcactgggcaggcccaacgccgtggacgggaccatccccgaggtgtcgccggcgctgcgcgagggagtcgt

SEQ ID NO: 5045 - DNA, 309 bp, Zea mays
  Clone ID: LIB3137-058-Q1-K1-A5
gagctgccaataccagcagggcataggctgatcctgccacacaagcacacccccgtcgatgggctgtgcgtaagcgaaccaccctgtgtggctctgcattacgtacacgtcatactctcgctctgcatcacgctcatactgtgatcgcaataggactgcttacacaaacctggtggtatgtccttctggcccatagctaatcggcttaaccatgcgatagtgatcacacattggcactacgtgctaccactgctcgagggtactctatggctcatcatctgctctgaacatgcgcgagcaacttcaggg

SEQ ID NO: 5046 - DNA, 273 bp, Zea mays
  Clone ID: LIB3137-058-Q1-K1-A6
cagtccatctcgtctcgtcccagcaaagcaaaggcagccatgccccacagtctcttgctgcgcgtcgtcctcctcgccgccgcgcaagccagcgcggccacgccgcggcagctgttcctcgtgagccggccgcccatcacgctcaccaaccaccacggccagctgctgacgggcaactactccgtcaacctgctctggtacgggcgtttcacgccggcgcagcgcgccgtggtggccgacttaatcctctccctctcgggaacggggccgggg

SEQ ID NO: 5047 - DNA, 322 bp, Zea mays
  Clone ID: LIB3137-058-Q1-K1-A7
gaactggaaatgttgttggaggcctactttgttgttatcgattacaccctcagcaagttgacttcgctaaaggagtatattgatgacacagaagatttcatcaacatacaactggataacgtccggaaccagctgatccaattcgagctgctcctgaccaccgccacgttcgtggtggccatcttcggggtggtctcgggggttttcggcatgaacttcgaggtccctctgttctcggttccgcacgcgttcgagtggaccctcgccataactggggtctgcggcgccgtcgcgttctgctgcttcatctggtacttcaaga

SEQ ID NO: 5048 - DNA, 220 bp, Zea mays
  unsure (1)..(220): unsure at all n locations; Clone ID: LIB3137-058-Q1-K1-A8
tcaaaatctatcgtacccaaaaaaaaaatcgtgctcggcacacgcaggcggcgctgcgtctggggctctcagcgacggaggggcagacgccagacgggcagtcccaggttcggcgtcgtcgtcagcggntccccctnctgccagtcgcctcgcgccctcgcctgcggtcctccgcacacctgccggcgactctgcctcgctacgacgctacatcaacatg

SEQ ID NO: 5049 - DNA, 384 bp, Zea mays
  Clone ID: LIB3137-058-Q1-K1-A9
cggacgcgtgggcggacgcgtggggcggcggcgaggtcgtaccccacatcggcgagcggcggcggcaccgccggaggcaaaggcaagatgttcgggcgcgcgccgaagaagagcgacaacaccaagtactacgagatcctcggggtgcccaagtcggcgtcccaggacgatctcaagaaggcctaccgcaaggctgctatcaagaaccaccccgacaagggcggtgaccccgagaagttcaaggagctcgcacaagcctatgaggttttgagtgatccagagaaacgtgagatttatgatcagtatggtgaagatgcccttaaggaaggaatgggcggtggaagatcccatgttgatccatttgacatcttctcatcatttttt

SEQ ID NO: 5050 - DNA, 434 bp, Zea mays
  Clone ID: LIB3137-058-Q1-K1-B1
cgcctcgtcagatcgaccgggaagaagggagcagaagccaaccggctcgtccgcccgttgcctgtcgtcgctatggccgccgtggaggtgtgcgtgaaggctgccgcggggaaccccgacacgctcggcgattgcccgttctcgcagagggtgctgctcacgctggaggagaagaaggtcccgtacgaggtgaagctcgtcgacctcggcaacaagcccgaatggtttctgaacatcagcccagagggtaaggtgcctgtgttcaacggtggagatggcaaatgcattgctgattctgatgtaatcacccaagtcattgaggagaagttcccgactccttctctggtcacccctccagaatatgcatcaatgggatcaaaagttttcccagcctttgtcaagttcttgaagagcaaggatgctagtgatgggtc

SEQ ID NO: 5051 - DNA, 242 bp, Zea mays
  Clone ID: LIB3137-058-Q1-K1-B11
gcattgggttggcagcacgtccctgcacacggtgacacgggccacggcacggggagcgagcgccgagcgagagcaagcaaccgttgtccgccgggccggccacggcggtgtcccttgcttcgcgccttcgccggtgcactaacccttaacgcaggtacggaccgtgccgggtggaattactgtgcccctgggaatttggaccggcctttgtggtcgcaagacttgactcgtgtacacggcac

SEQ ID NO: 5052 - DNA, 167 bp, Zea mays
  Clone ID: LIB3137-058-Q1-K1-B12
catgctgctaaaccgctgattgataaaaaattatggcctggaagggcgatggggcgcatgcgggaaattatatcggcaccacgtactcttacgagtaagtgtggaaacacgaccacgttgagagcattgccaacgaccagggttaccgcactacgccctcaaacgtc

SEQ ID NO: 5053 - DNA, 256 bp, Zea mays
  Clone ID: LIB3137-058-Q1-K1-B2
acgcggacgaagagattctcgccttccgcgtcagcccatggctattctggcgccgccgcgggtccagacggttccgcgctggcgaccgcctcgtcgacctggcgtgggatctctctcgcgcgcgcttcccggtctccgggtcccccgagccctcatcgggcttcttcgtcgccgtcgtcgtctgcggcgagatggtcctcgcggccggggacctgaccgatttggcctaccggaggacccgggcccggcgcccatc

SEQ ID NO: 5054 - DNA, 426 bp, Zea mays
  Clone ID: LIB3137-058-Q1-K1-B3
cggacgcgtgggcgggtcagctgaaggccgtgctaattactttgggaacctacagaagggtgtactaccaggacatcttggtcgcttgccaaagggccagcaagctaccaccttacttgatttaatgattataagagcattccacagcaagatcctccgacggtttagtcttggtacagcaataggctttagaatcacgaaaggaacattgactgacacacctgccatccttgtgtatgttgctcgaaaggttcacatgaagtggctcagcgctactcaatgtcttccaactgcccttgagggaccatggggtgtgtggtgagatgttgatgactgtgaattttgttattatggcgcaccatgcccaacaccaaaggaacaactttatgatgagcttgatgatggattgcgtggtagcgaccctat

SEQ ID NO: 5055 - DNA, 388 bp, Zea mays
  Clone ID: LIB3137-058-Q1-K1-B4
ctccttcctcttcccgcccgctaaaacccacgccaccgccgcgcgccgccggcagcgcaagggacgcacgatggccatgcaggtggtgcgcaacctcgacctggagcggtacgcggggcggtggtacgagatcgcgtgcttcccgtcccggttccagcccaagacgggcaccaacacgcgcgccacctacacgctgaacccggacggcactgtgaaggtggtgaacgagacgtgggccgacgggcgccgcggtcacatcgagggcacggtctggcgcgccgaccctgtcagcgacgaagcccaacctaaagtttggtttttcgtggcggcctttcttccccttattcccgtcaccggcgactactgggtggttcacattgacgccgac

SEQ ID NO: 5056 - DNA, 256 bp, Zea mays
  Clone ID: LIB3137-058-Q1-K1-B6
gccgtcgccatccgcgcggcgatctccaccgctttgtctccggccaaggcggcagctggagcagaggcggtgcgatcgatccgcgcgcggcagatcgtggacagccgcgggaaccccaccgtcgaggtcgacctcgtcgccggggacggacgcctccaccgctccgcggtgcccagcggggcgtccacggtgatctacgaggcgctggagctccgcgacggtgacaaggccgtatacggcgggaaggggcgtactc

SEQ ID NO: 5057 - DNA, 429 bp, Zea mays
  Clone ID: LIB3137-058-Q1-K1-B7
cgcttcctccacgaccttttgaagaggttcgtgaaacgatagagaaagaacttggagaacctatgagtgatctatttgctgattttgtcctacatcctctcgcaaccgcatcaatagcacaagttcatcgtgcaactctggcagatggcagagaagtagttgtcaaaattcagcatgatggtgtgaaggagatcatattagaggatctgaagaatgcaaaatcattgattgaatggatagcgtgggcagagcctcagtatgattttaatccgatgattgatgaatggtgcaaggaggctccaaaggaacttgatttcaaccatgaagcagagaatactagggctgtctccaggaatcttagtcgcaaaagtgactgtgggagtggcagtgtttccagtactgttgatgtactcattccagaagttattc

SEQ ID NO: 5058 - DNA, 438 bp, Zea mays
  Clone ID: LIB3137-058-Q1-K1-B8
agcgactgtgtcgagcaggagagagcgcgatggggaagatgcggcagctgatctgcctcgtggccgccgtcgccgccgcggccatcctcctgacagcgtcggccaagaagtccggcgacgtcaccgagcttcagatcggcgtcaagtacaagcctgagtcatgtacgctgcaagcacacaaaggagacaaaattaaggttcactatcgtgggacactgactgatggatcagttttcgattctagctatgacagaggtgacccgtttgaattcacccttggaaatggccaagtgataaaaggttgggaccaaggattgctcggtatgtgcgtgggtgaaaagaggaagctaaagatacctgcaaagatgggttatggtgagcgaggctccccaccaaagattccaggtggagcaactctgatcttccacacggagctta

SEQ ID NO: 5059 - DNA, 317 bp, Zea mays
  Clone ID: LIB3137-058-Q1-K1-B9
cagagcgctagggaggagagagggggaagagagagggctagggtttcgtgctccctcacgcaacgaatccgagccggatcggggggtgcgcggagtcaccggcggcccggcgttgcctgggctgtgatacagttgcaatggcatctgtaactgatgagacagctaagattgagggtttgacatctgctgcagcctttgtggagggtggcattcaggacgcatgtgatgatgcatgcagcatttgccttgaggctttctgtgagagtgacccttctgcattgactggctgcaaacatgagttccatctccaatgcatt

SEQ ID NO: 5060 - DNA, 325 bp, Zea mays
  Clone ID: LIB3137-058-Q1-K1-C1
cggacgcgtgggagcttgtggaactgtcaacagggtcacaatcttgactgacaagtttggacagccaaaaggttttgcttatgttgaatttctggaacaggaaggtgttcaggaagctcttaacttgaatgaatctgaattgcatggtcgccagattaaggtcgcgccaaagaggactaatgttcctgggatgaagcagcgtccaccacgtggatataatccataccatggctacccttatagatcatacggggcaccgtatttccccccatatggttatgggagggctcctagattccgccgccctatgcgctacagaccttac

SEQ ID NO: 5061 - DNA, 314 bp, Zea mays
  Clone ID: LIB3137-058-Q1-K1-C11
ctttgttaacaaagaattccctcatagccgccgccgccgccgccgccgccgctcatctcgccgagaggtgacgggaccgaggaactcgccgagttctaagatagagaatcgcttttcacagcctggggtctgctgcgtagggtggtgttgaaggggagaagtttaagatctgttccacagatcacgcgtgcgcgctcgcgaatcgggggttccacacatagcttcgtcgttttgaatttgatgtactaatggagtctaagggtggcaagaagtctagcagtagtcgttccatgatgtatgaagctccccttggc

SEQ ID NO: 5062 - DNA, 216 bp, Zea mays
  Clone ID: LIB3137-058-Q1-K1-C12
agctgctcttaatcaacttttttccagcctttgcctccaccacatcacacggggtactctgggtgctcttcttgtaccacaggtctctcctaataacactatacccaacaactccatacatcccttcgaccactacgacgactaccagcactactggatatgctaaataaatagtcgacaaatagagcaatagcgcatacgcatactcatgcactg

SEQ ID NO: 5063 - DNA, 289 bp, Zea mays
  Clone ID: LIB3137-058-Q1-K1-C2
gttgatagattggtgattggtgtaaaagattgagatcagggattttccttagtctgaccttagtgcttaacagttcacgagtactcaagagcagccaggcacctatgaattctccattggtcccatcctcatgtgcccgtttgtttcagagatttcagtcctgaaagttatgaatgaacatgttgtattttgtgagcatcagctcacgtgattgccattggacaaaaacgtgataaaagtgttaatacttcctatttcaatatgttttgtacattcggtgtcattactc

SEQ ID NO: 5064 - DNA, 320 bp, Zea mays
  Clone ID: LIB3137-058-Q1-K1-C3
gctgctgctaccgcagcccctccgtgggccttcttatgccatgacatactcagatcaggatgaaatgtgttctcatacctttgtgattagagatattgtgtcctttattaatctgatctgtttttagctccattagcttgtccgcaaactttagttagagaaggtgttatgtcttttgtcaagattataacatttctgaacaattgtgctacacaggacgtggtaccatcctcatcatgtagcctaggatgagttatcactgttaaatatttcaagtggttaaatcatgcatctgcagaatatattattgttgcactctc

SEQ ID NO: 5065 - DNA, 291 bp, Zea mays
  Clone ID: LIB3137-058-Q1-K1-C4
cggacgcgtgggcggcgcgtcgtccggcctctgcctcgccacggcgaatgccctggcggagacaggcaagtggcacgtcatcatggcctgccgcgacttcctcaaggcgtctcgcgcggccaaggcggccggcatggacaaggacagcttcaccgtcgtgcacctggacctcgcctccctggacagcgtccgccagttcgtcaggaacgtgcgccagctggagatgcccatcgacgtggtggtctgcaacgccgccgtgtaccagcccaccgccaaggagccgtcctacac

SEQ ID NO: 5066 - DNA, 403 bp, Zea mays
  unsure (1)..(403): unsure at all n locations; Clone ID: LIB3137-058-Q1-K1-C5
ctcacaaccttctgcccgtgaccgtcgtcctcgccgtcgcactgctcatggccccagccgcgggttacccgtggctatcgtgtggcaccagcagcagcttcgcggccaacggcacataccaggaccacttcaacttcgccgccgccaccctgcccaagaacgcctcgacatcccctgacctttttgccagcatagtcgtcggcaccgtgccggagcagctctcagccatggccctttgccgcggcgacgtcaacagcacgacatgcttcaggtgnctgaccgaggccttggagaacctgccagcgctgctcacgacaggctgcaccattactacgatcctgatgtccactactcgagtgcaaccctcccgacacacgacacggccgcgatcgaacgaccccat

SEQ ID NO: 5067 - DNA, 318 bp, Zea mays
  Clone ID: LIB3137-058-Q1-K1-C6
ggcaaaatttggtgccttggttgactcactcaagcctcgcatatttgtgctcctgagacgctgcctgtttgatggagatgacgaggtgcgcgatagagcgaccctttacctcaaattgttaggtggggaagctacagtgggtgagacagagaaggatgtgaatgagtttctcttcggctcacttgatggtccattagtaaacttggagacgagtctgcggaattatgaaccttcggatggaccttttgatatttcatttggttcgaaagaaacaaaattccaaccccttgcggagaaaaagtctacaggcgagaaatt

SEQ ID NO: 5068 - DNA, 290 bp, Zea mays
  Clone ID: LIB3137-058-Q1-K1-C7
cataaatgatcgaggtgtttcatatatggcccatcctgttgcttcattagaaggatcagaccaaagaaggtcacagagcaatccagtatcaggcacgtctgtggggcgactcagattaagtatttgttcgagcttgttcaactctggagatagaccaccatgcatacagaggatcttttcgtctatcaatgctgacaccggcaagcagttaaaacagtcagtgaatgttttccacagctttacactgaatcttgcgttgcactcgtcataaaaaccatagatgcgaatta

SEQ ID NO: 5069 - DNA, 340 bp, Zea mays
  unsure (1)..(340): unsure at all n locations; Clone ID: LIB3137-058-Q1-K1-C8
cggacgcgtgggctcttccacgagaggcatctctaccggatagtactgccgacatggggctgtccggcggcctagtcgtgccgtggctcgcggcgacggtggcggcggcacttctagtcattaccgccaggcccgtcggagcctatgcctacaagaactacaccgtacagccatgacaagggctggtacgaccgtctcagccagcccggcgtcgactaccactcgtgggcttgcggcaagaactccagacttggggatctgctcatcttcaacacggacacgaaccactctgctgtgcacacgcgngacgtgacactgcactagagctgacactacaact

SEQ ID NO: 5070 - DNA, 338 bp, Zea mays
  Clone ID: LIB3137-058-Q1-K1-C9
cgctccggctcgtccgccacttcccggccatggccgccaccgccgcagacgagttcgtgaagggccgcgtgttccccaacggcgtcgccgtcatcacgctcgaccgacccaaggccctcaacgccatgaacctcgaaatggatgttagatacaaggcacttcttgatgaatgggaaacaaatccaagtgtcaagtgtattcttgtggaaagcagctcttctcgtgccttctcagcagggatggatattaagggggttgccgtggaaatacaaaaagacaaaaaaacaccacttgtgcaaaaggtattcacagtagagtactctttaatttgtaagata

SEQ ID NO: 5071 - DNA, 358 bp, Zea mays
  Clone ID: LIB3137-058-Q1-K1-D1
cggacgcgtgggctcttccacgagaggcaacctaccgtatagtactgccgacatggtgcggtccggcggcctagtcgtgccgtggctcgcggcggcggtggcggtggccgcgctggccatcaccgccgccccggtcggcgccgatgcctacaagaactacaccgtcggcgatgacaagggctggtacgacggcctcagccagcccggggtcgactaccaggcgtgggctgacggcaagaacttcagcctcggggatttcctcatcttcaacacggacaagaaccactcggtggtgcagacgcggaacgtgacactgtacgagagctgcgactacaacgactcggggcccgacgacacc

SEQ ID NO: 5072 - DNA, 324 bp, Zea mays
  unsure (1)..(324): unsure at all n locations; Clone ID: LIB3137-058-Q1-K1-D11
gcgttatacggctccaatttatctgacttgtccctgagcctttgccgccggctggagctggacggtcctcgggcagagcaggcagtcggactgccagagtcacctccatggcctctgctgctacttcaaccctccccaagggttagttgaggccaacatgcaacagatactttcaggtgaccggttaagttcatgcccacaccaaaacatgcgtagcctgcaagtgtccgacccatatccacgggttgatcgcttacactggaagaaggacgacattactcncggtgtctgcacttggatcacgtcagggctcatctgtcactg

SEQ ID NO: 5073 - DNA, 178 bp, Zea mays
  unsure (1)..(178): unsure at all n locations; Clone ID: LIB3137-058-Q1-K1-D12
nntacgcattgctcactttgtttcttgcattttctgaacctccttcgcctggggaatcatggtaattttattgaggtgaaggagctaatgcacccaatacacaccaaaagctatgacgatgtgtactaaccctacgaacactacgttgctgattatcaccacacaatcaaatcacctt

SEQ ID NO: 5074 - DNA, 284 bp, Zea mays
  Clone ID: LIB3137-058-Q1-K1-D2
aagtcttcacactcctcgccatcacataaaaccagtgcaagcagaagcagcgcaatggcgagcagcaccatggccctctcctccacagccttcgccggcaaggcagtgaacgtgccgtcgtctctcttcggcgaggcccgcgtgacgatgcgcaagacggcggcgaaggcaaagccggcggcgagctccggcagcccgtggtacggccccgaccgcgtgctctacctgggcccgctgtccggcgcgcccccgagctacctgacgggcgagttcccgggcgacta

SEQ ID NO: 5075 - DNA, 319 bp, Zea mays
  Clone ID: LIB3137-058-Q1-K1-D3
cacagttcccatataggcagccatcggctacacagtctcgcctcccgtagcagagtgtgtcgctgcggatgcaggaagagagacgaccgcggccatggcgacctccttccaggggacgaccaccaagtgcaccggctgcgacaagacagtgtaccttgtggacaagctcaccgccgacaaccgcatctaccacaaggcctgcttccgctgccaccactgcaagggcaccctcaagctcgccaactacaactcctttgagggagtgctctactgcaggcctcacttcgaccagctgttcaagaggacagggagcttggac

SEQ ID NO: 5076 - DNA, 84 bp, Zea mays
  Clone ID: LIB3137-058-Q1-K1-D4
ggcctggtgctgcaaagacaaagcgctaacaggggagcacaaggacacaatggaacgtgtgctcttgttgtgtgcgctagctgg

SEQ ID NO: 5077 - DNA, 437 bp, Zea mays
  unsure (1)..(437): unsure at all n locations; Clone ID: LIB3137-058-Q1-K1-D5
gcaagttcctatttttataaaagagttcaaatggactgcaatgttgcaataaactctattacttgctgtcttatgtactgctctctattctttagttactttgaatatttggatatcgttgacaaggtagaatgctgcaacagtcgttccatctgagctgcagctgccaagaatattattgatccattgaccttttgtttttaatgctggtggctaaatttttattcagttttaaatattaacaaacaacttccttaactctgttaattattctgctacaggttgtattggaaaatcaagtatattagtcgactggagtatctctggggggatataaaaaagagagaggttgaaattccagattttgttattgaacatgataaggttcttgagcaccggccactgactgattatggcatagaaccagatccnctaca

SEQ ID NO: 5078 - DNA, 307 bp, Zea mays
  Clone ID: LIB3137-058-Q1-K1-D6
gcaagctcctatttttataaaagagttcattttgactgcaacgtcgcaataaacagcaggactagctgccttatgtacagatctttattctttaatgactttgactatccggatattgtcttcaaggaggaatgcttgaccattcgcaccatctgagctaaagctaacacgaatattatctatccattgacctttacttgcaatgccggtgctaaactgggaccactttcaaatctcaacaaagctacctgacagctgtgttaactatccactaccactgtgacaccgaaaagctagcatcttaccc

SEQ ID NO: 5079 - DNA, 373 bp, Zea mays
  Clone ID: LIB3137-058-Q1-K1-D7
gtcgtgaccaacgagatggcgtgcgaggtcgtccgggcgtgcttccgtagcaacggtccggcggcgccggccgctcgcccgaacggcgtggccctcccggcagccggcgcgggcgccgaggacggatcggcggttgtcaagggtgtgggcaaggaggactccgacaaggcgtgctccgacgcggccatgctgctggcaaagctggcgctggcccggcggagcgccgacaatgttagcgtggtcgtcgtggatctccgcgcgggcatatgaatatgattcttggagcgatgcaaagcaggggaaaacattttcctcaatgcttgaaactagctcttttgaaatcaaccctaatttttcccccattttgaccatc

SEQ ID NO: 5080 - DNA, 95 bp, Zea mays
  Clone ID: LIB3137-058-Q1-K1-D8
acgatctcctcctactatggtctctagacaacctatccagagtggagcacccaggcgagccagagcgcatggacacactgccagcgtcaaccttc

SEQ ID NO: 5081 - DNA, 253 bp, Zea mays
  Clone ID: LIB3137-058-Q1-K1-D9
gataaagtttgcgtccttagctgtggtatttctaccggtcttggtgcatcaattaatgttgcaaaacctccgaagggttcgacagtggctgttttcggtttaggagccgttggtcttgccgctgcagaaggtgcaaggattgctggagcgtcaaggatcattggtgtcgacctgaaccccagcagattcgaagaagctaggaagttcggttgcactgaatttgtgaacccaaaagaccacaacaagccagtgc

SEQ ID NO: 5082 - DNA, 211 bp, Zea mays
  Clone ID: LIB3137-058-Q1-K1-E1
cggacgcgtgggcggacgcgtggggtgctcgtcatctacctggcgctgcgcccctccaagccgtggttctacctgcaggacgtgcagctgcgctccatcgacctcagcgacccggcgctctccctcgacctccaggtgacgatcgcgtcgcggaacccgaacgagcgggtgggcgtgtactacaagacgctggacgcgttcaccacgtacc

SEQ ID NO: 5083 - DNA, 359 bp, Zea mays
  Clone ID: LIB3137-058-Q1-K1-E10
cgtgcggtcgtctacatagcatgccaaaacccctctgtttcttttttttcatggaaaagcttcagtcggcttcttaggtatcaacttggtacaacattaacccatacttatcatggcagcgcgtatgcgctcactaggcatccaagcagtcggcactggatgccatgcctcgtcgactcacctgaacccagttaggcgatggtaatgacatctcctagaagcccacctagctgttgaactaagctttaatgggtctgccttgtgcactatacgcccagtttactcttctttcctctgctgccaccaccgttagagccgttagatcgctcacgccggctgcctgccgcgtgcctgtgcca

SEQ ID NO: 5084 - DNA, 375 bp, Zea mays
  unsure (1)..(375): unsure at all n locations; Clone ID: LIB3137-058-Q1-K1-E11
ctccgccttaaaccctaaacaatgacctctcgcgccgccgcggaggccgccctcctccttgcgctccgcctgcactctgccccgctccgactgcgcttcttctgtacctccgcctcccggctccgatgggcgtgttccgcggcggcgctgcttgccgtcgtttcgctcgtcaccgccatctgcgctatgcccgacgccggcgccggcaccaacgttgaagccgatgccggcgccttgcggttggagattgaagcgctcacgctaaacgtcgcgcggctggaatctcttctagaggcanattcgaaggcattagacattaatgctagtatcttggaggaggacaacaaactcaatgaagcaatggaacgtgaaatc

SEQ ID NO: 5085 - DNA, 298 bp, Zea mays
  Clone ID: LIB3137-058-Q1-K1-E12
acggacgggctcatagcctgtcctttccagacttttgaacacaacgtaccaaaagagcgactgtggacaacacaatcatgcactccatgccccgcctcgcccgtgtgaaccacttgactgacctgagcgagctactcgtccggaacaagcgactgtagcagctggtgaacctgaacgccgtctgccgctaccatggcatcccttccaaggacaaagaggagcagacctagttcacaatgatgttagacctgatagagcagtacaacctgaacaggcacatctgctggatctccaccca

SEQ ID NO: 5086 - DNA, 304 bp, Zea mays
  Clone ID: LIB3137-058-Q1-K1-E2
gagagatctcgacgaggccatctcgtcgctgttcctgttccccactggcaacgctaccgaagaggagctgagacggggcgtcgccgcctgcgacatgatggtggcgagcgcggcgacgttcccgtacgtcgagcggcggatgagcgtcggcatgtgggacagcaacggcgtggccaacgaccctagcctgcgggggctccaggcgcgctggacgtggctctccgccgccgtccagcagtccttccagggcgccttcgccggaccggtccctgttcagcggagcaacggcaagtggatgcgggtg

SEQ ID NO: 5087 - DNA, 339 bp, Zea mays
  Clone ID: LIB3137-058-Q1-K1-E3
ccgaccaccgtcgtcgtcccgccgctgccgccagtcgaggtcggccgcgagccggccacgtcatgcaccgccgcgtcctccgacggggcggcctcgagcagagtccaccggtgctccatctgccacaaggagttcccgaccggccaggcgctcggcgggcacaagaggaagcactacgacgggggcgtcggcagcgccgccgcgtccaccgacgtcccggcggcgcccgccgagacgtccgccgaggtcgggagctccgccgcgcgtgcgttcgacctcaacctcccggccgtgccggaattcgtgttccggtgcggcaagcccggcaagatgtgggag

SEQ ID NO: 5088 - DNA, 452 bp, Zea mays
  Clone ID: LIB3137-058-Q1-K1-E4
cgcccaccagtagctgccccccttgctgtcgccgcctctccgcgcgaccgatctaccgccgccgctaccatgtcgctgatcgccggcgaggacttccaacatattctgcgtctgctgaacaccaacgtggatgggaagcagaagatcatgttcgccatgacctccataaagggtgttgggcgccgcttctccaacatcgtctgcaagaaggccgacatcgacatgaacaagaaggccggtgagctgacgcctgaagagttggagcgcctgatgacggtcgtggccaaccctaagcagttcaaggtgccggactggttcctcaacaggaagaaggattacaaggacgggaggttctcacaagtcgtcttcaacgccctcgacatgaagctcaaggacgacctcgagaggctcaagaagatcaagaaccaccgtggtctgcgtcactactgggg

SEQ ID NO: 5089 - DNA, 410 bp, Zea mays
  unsure (1)..(410): unsure at all n locations; Clone ID: LIB3137-058-Q1-K1-E5
atgcgggcgccgtgcggcaggggctcggcgctggcgcgcatcgccatgtggtgcgcgatgttggcgcccgcgctatcgccgccgacgcacaagcgggagaagtcaccgtggtcggtgagccagggttcctcaccggatccagtggcgtgggatgcgacccagaggagcgcccgccaggagtcgtcgtacgcggcggggagcgggtgctccggcgcgaggcggtactcgacggagacgacgatggcgcgggcacgcgcggcgagggaggtcaggtaggcgtggaagacgaagttgaaggcggtgtggaggcagaagccgccgccgtggaagtacacgaggattggaagcttcttactgcttccgccgttgtcttcggtatccttggcggncggcgggaggtagaggcggac

SEQ ID NO: 5090 - DNA, 225 bp, Zea mays
  Clone ID: LIB3137-058-Q1-K1-E6
atcacactcgtagagagaaggaaaaatatccccaaaccctagctcccgatctcgatggcgaaccctcgcgtcttcttcgacatgaccgtcggcggcgccccggcgggccggatcgtgatggagctgtacgccaacgaggtgcccaagaccgcggagaacttccgcgcgctgtgcacgggcgagaagggcgtgggcaagtccgggaagccgctccactacaagggc

SEQ ID NO: 5091 - DNA, 256 bp, Zea mays
  Clone ID: LIB3137-058-Q1-K1-E7
ctcaccttcgcttccgtcgccatcgctcgttcgaattcgtccttgcttggcccagccaaggaaggcacttggttcatcggtccgaaaaactcgatccagccgttgaccgcgcgccgacatggggcagggcaaggaggtgaagacgcgaccggaccccgaggtggagatccaggagaagggcgagatcttcttctttaccgacccaaggtgggcaaggacgaggcgcacggccccgacgacgtgcagcgcatgtaca

SEQ ID NO: 5092 - DNA, 285 bp, Zea mays
  Clone ID: LIB3137-058-Q1-K1-E8
gcgagcgacagaggcagtggaggggcgcggtgaggaggccggcggcgcgcgcgcgcttgcggcgccggcggcctggcgatgggggaggtggccgcgctgcgccagctcgtcggccaggtccaggagctctgggacctctacggcgccaacggcaaccccgtccccaggtggtatttacctgacttcgaacatggttcaatcaaggatgattattgtgggggaagctcaggatacaactcggaattactgaagatcatggaaactaaccaatctcccccttgcaag

SEQ ID NO: 5093 - DNA, 297 bp, Zea mays
  Clone ID: LIB3137-058-Q1-K1-E9
cgaaagctcgaggactgtactcgctcgcaaaccctagccgccggaccggccggtgaccgtgcggcgctgaggcgcgcgctatataaacagagccatccattcctcccttaccgttcagtcccacctcgaccgcctcctctcccctcccccggctctgtctgttgacttaccccgtcgagctttctagtcagctgctcccgttgccatggggaaggagaaggttcacatcaacattgtggtcattggccatgtcgactccggcaagtccacaaccaccggccacctcatctacaagct

SEQ ID NO: 5094 - DNA, 293 bp, Zea mays
  Clone ID: LIB3137-058-Q1-K1-F1
caagtagtgatccgtgacctcccctcctccggcctcctgtcgccggcgtccgtcgctcgttgtcgagcccccgggagcaaaggcttccgccgcctgcgttccggatggagaatcccttcagcgtgaaggtgctgcaggtattcacaggtttcggcgtaggatgcggcgtcggcatcggcgtcggacgacccatctacctaggtatgatacctgggcttcagcaagttatgagtgctacaaggggagcaacagatgctttttctggtgtcacaaggcatgtcaattccgcgcta

SEQ ID NO: 5095 - DNA, 319 bp, Zea mays
  Clone ID: LIB3137-058-Q1-K1-F10
gaaccacgcgtgcgccctgagattgatgagctcattgacacccttttcaaacacttctctgcacagagtatctctgctggacgtactggggcatagcatgatcactcttctccatggctcgtcttgaccgaataaacaactactactgccttcggccctgctaacccgccggaacaagctactacaggagctgaagaacctgttggtcgtttgccgcgaccatcgctaccctttcaacgacaaagctgagctagcctagttcaactagacgtatgtcctcgtcgagcagtacaacctgaacgggcacatccgcttgatc

SEQ ID NO: 5096 - DNA, 205 bp, Zea mays
  Clone ID: LIB3137-058-Q1-K1-F11
cggacgcgtgggcggacgcgtgggctagaaacaaaatattctaaggatgggcctggtgagcctggagggcaatcatggacagttgagtggttgaagtttgataatagttacttcaaggagatgaagttattttttttgaacgaaattcaggacatgaagttttagagccagttctttggaaagagcagaaggaacaggatctttt

SEQ ID NO: 5097 - DNA, 213 bp, Zea mays
  Clone ID: LIB3137-058-Q1-K1-F12
ctagaactagcacgtacatcctacacacttttagaaactgaaacagacgaggcacattagcgagcacgtatagcacggtcaccaccatggatgtccaggaagacgctattagtcaagcatatcactctataccatcgcaggaagcctgactacttcacaactacagagcggtgcggcatgaatgcaataaagacatctctacaccgctacaga

SEQ ID NO: 5098 - DNA, 335 bp, Zea mays
  unsure (1)..(335): unsure at all n locations; Clone ID: LIB3137-058-Q1-K1-F2
tgcctccctagtccactaccctcgctttctttctcgctcatccctttcttcccgaagctgtctgtcctgctcctgcgcgcgttggaggaaggaagcctaggaaagccaccgctcaccttctcgctcgctcccccaccgaacgcctcttggtgggagaagaattggccgaaaagcttccggttggctggccgggatctcttcgtctttaattaccggacccctggggggattgcctgctgcctcattagaccagaccagacagggagagggttgagttgagggggaggagaggagagagacacanacaacgggtggtcgctgggaagaggaagaag

SEQ ID NO: 5099 - DNA, 93 bp, Zea mays
  Clone ID: LIB3137-058-Q1-K1-F3
ctttatatatacatgaacaataagggctgggttggttgcattccataccactactcatgtggacgagaaagccctggagggcgacatggtggc

SEQ ID NO: 5100 - DNA, 349 bp, Zea mays
  Clone ID: LIB3137-058-Q1-K1-F4
cgcctgcactgcacctatctccttggcttcttcccgttacccgtctcggcagatgcctggcttcgtgcaccttcaacttcagggtgcctgtccacttactcagtactgcggcggcgaaatctgaaggtccgactaatgtgatgtcaatcacatgctgcttgcctgtcgtcgagtgcgtgtactgcctggcgtgtgcgcggtgggtgtggcagcgctgcctccactccggaggctacgacagtgagacctggggtgttgcatcggctgaagagcttgagcctgtgccgcgcttgtgctggatcattctctcgatctatgaggatgaccttgagaacccccaatgggcgcc

SEQ ID NO: 5101 - DNA, 85 bp, Zea mays
  unsure (1)..(85): unsure at all n locations; Clone ID: LIB3137-058-Q1-K1-F5
ccgtccggacctagnnttctacgatcgcgaggcgnngccgctctatgagcganntccaannncttacgtacccgcgtgcgatgcg

SEQ ID NO: 5102 - DNA, 314 bp, Zea mays
  Clone ID: LIB3137-058-Q1-K1-F6
gatccggagcagccgcagtcccaccgaccccgccgccggtcgccctccatctcctcgccgctgcctctcgatctttgtacagtttctcttttcaataatcaagatgagccgtggtggtagtgccggtggtggtcaaagttctctgggttatctctttggaagcggtgagccccccaaaccagcagtggcaccagctgcaagtgctccacctgttgagaaaccatctgctgcaaagactgatgcggccaagcaggttgctgctggggttaccagccaaaccaataactaccacagggctgatggtcagaaacact

SEQ ID NO: 5103 - DNA, 229 bp, Zea mays
  Clone ID: LIB3137-058-Q1-K1-F7
ctttgctgcatcacaggctaactatatcctgggagacaacccgatgaagcttagctaccgtgtgggatatgggagcagctacccaaagcaagtgcaccacagaggggcgtcgatccccgcggatgcgaaaacaggctgcaaagggttcgagtatctacactcgcccagcccgaacccaaacgtggctacgggcgccctggtgggtgggccattccagaacgacaccttc

SEQ ID NO: 5104 - DNA, 191 bp, Zea mays
  Clone ID: LIB3137-058-Q1-K1-F8
aggacgactctcccagctggcctcgtgacgggcgctttccccatctccacatcgccgccgcgcgcagctaccgcatcggcgacggcgatgagacacgggacgaggctggtctgcgcactagcgctgacgctgctatgcatggccacccactttcagggtgcatcctgccgcggcggcagccgtggcggtcg

SEQ ID NO: 5105 - DNA, 182 bp, Zea mays
  Clone ID: LIB3137-058-Q1-K1-F9
ggagaaccgtgagcagagagacatggcgcgccaccaccagctgcgggcgctgctcctgtggccactcggcgtcctcctcctgctccttgccccgcccttcgccggcgcgtgggggaaggagggccacatcatggtctggaagaacgcccagaagtacccgtccgagaaagccgccgccgccg

SEQ ID NO: 5106 - DNA, 251 bp, Zea mays
  unsure (1)..(251): unsure at all n locations; Clone ID: LIB3137-058-Q1-K1-G1
gcctgccagcgtctcccccgctccctctcctcgagagatctcgcgctccggcgatcgggcgcggcgggcggagggtcgcgaagtgccctgcccacccccgatgctctttccgaagcgcatcaactacgtggccccgatgctcgcctccgccgccatcctgctcctcctcctctcgggctacttcgagctcccctccatctccaccccggcgccgctcctcgcgggncgcagcgcgcttcccaccgcgctcg

SEQ ID NO: 5107 - DNA, 200 bp, Zea mays
  Clone ID: LIB3137-058-Q1-K1-G11
gtgcccagtcatctgattaagcagatccagttcagacgactaacaccgtacgcgatggtcgtgctcacacgtactgcgatccagcagtctctgtattgagccgtcacgctgcatgtctggaccctcatgaaacttatcaggcacccttgcttagtggagatccacctgctggttatctggatactgcataggtgtatgac

SEQ ID NO: 5108 - DNA, 197 bp, Zea mays
  Clone ID: LIB3137-058-Q1-K1-G12
cggaaaaccaggctcgacccacgcattcggcgacgaattctctaactaaattgacctcattacagatcgcagcccttctcggtgcccgtaggacataccctaggtactatccaggcacttacgagccagccttgccaccgtctgtggtcccccgcgtccttaaccaaaacctaacctgactatgcaaatccccattt

SEQ ID NO: 5109 - DNA, 437 bp, Zea mays
  Clone ID: LIB3137-058-Q1-K1-G2
cggacgcgtgggcggacgcgtgggcggacgcgtgggttggcaagcatcatgatggtgtcgttgaagacgttgcttggcacttgaggcatgagtacttatttgggtcagttggtgacgattatcatcttttgatttgggacctgcggtctcccgcccctactaaacctgttcagtcagtggtggcgcaccagggtgaggtgaactgcctggcttttaacccgttcaatgaatgggttgttgcaactggttctactgacaagactgtcaaattatttgatcttaggaagattgatacttctctgcacacctttgactgtcacaaagaggaagtttttcaagttggatggagtccaaagaatgaaactgtacttgcattctgttgtctgggcagaaggctcatggtctgggatctaagcaggatcgaccaagaacaaaca

SEQ ID NO: 5110 - DNA, 254 bp, Zea mays
  Clone ID: LIB3137-058-Q1-K1-G3
tcgcatcgcgacagcgatatcgggaaaagggaacttcgaagccccgggaggcgtatgggcaccggcgaagagcacgttgcggcgccggcgccggcggtctatgaaacgccggaaaaaaaacaaggcaacacaaccgagcttcccgcacccttaagcttgacgaaaaagcttgccccaactcgaggtggacgaagtggacgatttgaggttattttttgttccccaactggtgaggaaattaaaaagcagagaca

SEQ ID NO: 5111 - DNA, 243 bp, Zea mays
  unsure (1)..(243): unsure at all n locations; Clone ID: LIB3137-058-Q1-K1-G4
gggaactaggcatacaggaaaaggaaggagcctgatgtagagaagcaaaaggaaccaattgtagagcaagtaacactgtgacatgctctagaattggtcagcttgggatatggtgtgaagaccggactgccttatgtgatgagaagtgatgcanaagcaagtaaagctcttgagagctttgaagagtgggaaggggtaaaagtcattgatgatgttctcccattctttcagtcgctcaagcta

SEQ ID NO: 5112 - DNA, 344 bp, Zea mays
  Clone ID: LIB3137-058-Q1-K1-G6
ggggcatctgtccattctagctgcttaaaaggcaaaattcagtgaaggtcgccctccctgccttgagttccacctacagaccactgcagggtgtggagctacttgtgttctagttggtgtagcctctccccagtcatcaagcttggtctgcctagagctggcatgccaccctcgccgtgaccaggtaacttcaagggtttccttagccgagctgtacatgttttgtgctctgcataagatagtgaggctcatatgatggtgagtaaatctccttaagacagcttttgtggatgttatatgaaatttggagtaaaagctgcctaaagttgggcttgtaagttagc

SEQ ID NO: 5113 - DNA, 219 bp, Zea mays
  Clone ID: LIB3137-058-Q1-K1-G7
cgactcgatccgcagcaagctaagcgcaaccgaccagctacgcaaccatggctttcgcttgctcgaatgccaagcagagcctctacccggatgtggaccagtcccaccctgatctcaatacccctttctttttcgcacccaccacacttacctgcgccggcgccggcgccgtcacgggcaacttcctctaccccaccgtggaccccaacgagctcgcac

SEQ ID NO: 5114 - DNA, 316 bp, Zea mays
  Clone ID: LIB3137-058-Q1-K1-G8
ctgcatccctcatcgctcggctcaatcgctgatcagttctgcggccggcgacgtgtgctagctcacgacgacgacatgggctcggcggtgaagatcgggacgtggggcggcgacggcgggagcccctgcgacatcacggtggcgccgcggcggctggagagcatcaccatccgctggggcaaggtcctcgactggatcgccttctcctaccgggaccagagcgggaagctgcacaccgccggcccctggggcggcaacggcaaaggagagggcacggagacgatcacactggaggcctcggagtatgtaacgggag

SEQ ID NO: 5115 - DNA, 262 bp, Zea mays
  Clone ID: LIB3137-058-Q1-K1-G9
cggacgcgtgggcggacgcgtgggctagaaacaaaatattctaaggatgggcctggtgagcctgtaggggaatcatggacagttgagtggttgaagtttgataatagttacttcaaggagatgaagttattttttttgaacgaaattcacgaccctgaattttttgagccaactcccctggaaagaagcgaagggaccaggatcttttactttggcttacaaatgctgcattttttgaggaccaatctttaagggtttcccc

SEQ ID NO: 5116 - DNA, 450 bp, Zea mays
  Clone ID: LIB3137-058-Q1-K1-H1
cccgtcctgccgtccctctatctaaagtcgccgacgacgacccagtgaaaagtccacagccttttccaagaggaagggatgggctgctgcagcagccggagctccgattcgccggccagccgcgtgacgcggtggcgctccacagggatcgtggcgctccgagacgccagattgaaggaagtgccaaatgaagttctacaagtgggcaattccttgagaactctggatttgaccaataacaagctagttgagattccccaggaaattggtacacttgcgaacatgcaaaggcttgttttggctggttatttggatggaaatatcccaacctaccttgggtacctgggggatcctaaaatccttacacctgacccaaatagggtatctatcttgcctggagaaatggggtcactggcaaaccctcaacaaccttctggtccttaaaaattt

SEQ ID NO: 5117 - DNA, 356 bp, Zea mays
  Clone ID: LIB3137-058-Q1-K1-H11
ctccgcatggctgctggactgggagcgcgctcctccgccaccttctaggccggaaggttccagcctctttctgcccctctccggcccgtgcgctccagaaaattcgtagtgccaatagcgatgcttcactgcgtcaagtaggcttgcatggacggaagatgagcttatggagataaaaaagtcacaagagccaagttcactaaaatcaaataaaagaccacctctgaggcgtgtgaaaggtctccccacaacttgctgtgccacggaacattccatgaccatcttatgtcgcttcaaaagggttgccagaactatgcatgggccaattacacgatgctcaaggaattgctggaatg

SEQ ID NO: 5118 - DNA, 178 bp, Zea mays
  Clone ID: LIB3137-058-Q1-K1-H12
ctggggatgattgcttgactttgaacgcgctcctcctccacattctatgcgggatggtttgaacctcttcatttgcctctccgtcccttgcgatcaacaaaatacttagcgccctagcgatgcttaagtgtatcaaggaacacaacatgtataaaagattatctgatgaacataaaaa

SEQ ID NO: 5119 - DNA, 185 bp, Zea mays
  Clone ID: LIB3137-058-Q1-K1-H2
gccgccctgccgtccctatatctaaagtcgtctactacgacccagtgaaaagtccacagggtttggttagaggaaggaaagggctgcttcaccagccacaactacaattcgccggccagccgcgtgacactttggcgctccacagggatcgcggggctccgagacgccacattgaaggaagggcc

SEQ ID NO: 5120 - DNA, 263 bp, Zea mays
  Clone ID: LIB3137-058-Q1-K1-H3
gccacgacctctgggtgcacctcttcaccaccagcgaggctgtggtcagcgccttcgcctgcatgacgccgatgctcatcggctccgtcgtgctggactccacgcagggggtactctgcggcgtcgccaggggctgcaggtggcagcacctggcggcgtggaccaacctggtggccttctatgtcatcggcttgccgctcgccatccttttcggattcacgctcgccttccaaaccaaggggctgtggatggggcagatatgc

SEQ ID NO: 5121 - DNA, 289 bp, Zea mays
  Clone ID: LIB3137-058-Q1-K1-H4
ggaacctcaagagcgccgccagcaccgccgtcgacaggcgcgccgcctgcaactgcctcaagaacgccgccaggggcgtcagcggcctcaacgccggcaacgccgccagcatcccctccaagtgcggcgtcagcatcccctacaccatcagcaccttcaccgactgctccagggtgaactaaaacctaaaccacgcgcgacgacgggcggctgatccgatcgaacaaccattccggcgtcggcggcggccggatcatcgatcggcggcatgatgatatctatcaatcta

SEQ ID NO: 5122 - DNA, 253 bp, Zea mays
  Clone ID: LIB3137-058-Q1-K1-H5
ggcgtcgcggcaacggcaaggccgcctgtggtgacactcgttctttgcaagaggcacctatggtaagaccaccatgtcttgtgccgttcctgtttctctcgctgctgcgatggatgcaattgttcagggagtacgttatgcctttggtttgcatgcacctgctctgcttatcaccttatgtttactgacgcgtgtatctgtgaaatctttttgcatggatcttattaaaactctctaacgtcttattaacaat

SEQ ID NO: 5123 - DNA, 351 bp, Zea mays
  Clone ID: LIB3137-058-Q1-K1-H6
ccaaaccttctggcttctgcactgctctccaccacccctcaacgaagcctctggtgcctcggccaccgcagcagcctggccctgacccggcccccgggcgtggtgtcaggtctcaggtgtggtggcgctttctcctctccggcacggtggccgcgtcatcccagctctcccgcgcggcggcggccgtttcctctcctgcgctcctcctgccgcacacagccagaaaattgcagctgaagtttgtttgaggataggcgacagctttgcgagtccttcgtgttgaaggagaaattgtagctgaagtgaaaaaacagcagggaacgatggcactatcacgaagtatgagagcat

SEQ ID NO: 5124 - DNA, 409 bp, Zea mays
  Clone ID: LIB3137-058-Q1-K1-H7
cggacgcgtgggcgccggcctctgctcctcttgcgccgccgcaggatctcgtatcgccggagaccatgtaccgcgccgtcgggagccacctccgctccctcaagcatcatggtgcttctaggcttgccagtacaagtgttgcgaagcagtcctcacgtggtctgttcagctggcttcttggtggaaaatcaagcgaactccctccccttgatgctacactcccaggcattagcagttcctcacctctaccagattgtgtagagccatctaagacaaaaggtaatactctttcaatggccgccagaatcgcctcgagacctcatcagcccagcagcattcgggggtctgtacattgactggggttccatttacgaaacacctgcttcatctggaggatcacatctgttgg

SEQ ID NO: 5125 - DNA, 277 bp, Zea mays
  Clone ID: LIB3137-058-Q1-K1-H8
acgtcagaaggagctctcacctcacatccatctctgtcgcgcccgtcatcctcctcctcctcccctcctcaactgctatcggattggcgctgcagtggagatcgacccgggctgggaatttctttcgttggtaaggaaccctaatttggtcggatgggattttcatcttcgacgaagcccgcgagattgatcgaccttagctgacgcgagggattggaaagcgaaagctcgggcgtagttaattttcttaggagaatgggggttcaagctaaaaccc

SEQ ID NO: 5126 - DNA, 370 bp, Zea mays
  Clone ID: LIB3137-059-Q1-K1-A1
caagccgtccggccggggccaccacctttgaccgccgcctcctttcccctccgctactgctcctcctcaccggggtcccccgcaggagcggcggcggcggcggcgaggtcgtaccccacatcggcgagcggcggcggcaccgccggaggcaaaggcaagatgttcgggcgcgcgccgagaagagcgacaacaccaagtactacgagatcctcggggtgcccaagtcgcgtcccaggacgatctcaagaaggcctaccgcaaggctgctatcaagaaccaccccgacaagggcggtgaccccgagaagttcaaggagctcgcacaagcctatgaagttttgagtgatccagaagaacgtgagatttatgat

SEQ ID NO: 5127 - DNA, 459 bp, Zea mays
  unsure (1)..(459): unsure at all n locations; Clone ID: LIB3137-059-Q1-K1-A10
aaacccggcccgacccacgcgtccgaacgcaaggccaaggagcacagcaccccgtatgntctcagcaggagagggagagacagagcgttgtgctaatgaaagaagaggcggtgttatatganggcgacatggagaggccggcaccggtgaggaagtctcacatgtcgacggcggacctgctgatctggcgtagggggcgccgcaggagtcgcccgccggggccacgccgccatccaccgccggccgcatcagccgtcggaggcgctcaggaaggtggtgttcggcgggcacgtgacggaggaggaggccgatagcctcaacaagaggaaaccatgctctgctcccaagtggaaggagatgacaggaagcggcatatttgctgctgggggcgaggctgaataagatgaatctgccaattcctctgcaacttccattcggaccgctccaaagaattattat

SEQ ID NO: 5128 - DNA, 439 bp, Zea mays
  Clone ID: LIB3137-059-Q1-K1-A12
ctctgtctcatcacaaacttcccctgtcacgagagtacgagaccaggccttccgtaggatggatcggctagggtttcggagatgttcggccgcgcgccgaagaagagcgacaacacccggtactacgagatcctgggggtctccaaggacgcgtcacaggatacctcaagaaggcctaccgcaaggccgccatcaagaaccaccccgacagggcggcgaccccgagaagtttaaggagctagctcaggcttatgaggtcctcagcgaccctgaaaagagagagatctatgaccagtatggcgaggatgccctcaaggagggaatgggaggcggtggtgggatgcatgatccctttgacatattccagtcattctttggtggtggaagcccttttggaggtggcagcagtaggggcagaaggcaacgacggggagatgat

SEQ ID NO: 5129 - DNA, 364 bp, Zea mays
  Clone ID: LIB3137-059-Q1-K1-A2
ccaagccgtccggccagggtggtccgtggaccggcgcctctgtttttggccctggttcacgccgacgtcgacgggggcaaggtcctcttcgtcccgtgggtggagaccgacttcaggaccggcgaggacccgtggtggaaggcatgaggatgatccgaaaccagcggtgctcagtgctacacatgagacctacgtatgcctccgttccttgtgatgaggaaatatgttgcgttcggtctccgtgggcgttgttcctacaaattcacttgctttctgtctctctctctatatacacactgtataaaacaagaacagctgtttatcatctcttcttatataacctcggacgcgtgggcaaacccta

SEQ ID NO: 5130 - DNA, 279 bp, Zea mays
  Clone ID: LIB3137-056-Q1-K1-A10
gccaattcctaataaaaacaactttcatctatcgaagcagccaacgcaaccgggagcagtggctttctgaaacctatcgtgctcacccttccagaacatcatcttcagcccaagcccctcaaacctgcggccgctgtcagaggcttccatgatctggatcagcaaaacaacaactgcggcttatagactaccctaatgccactacactacccacggttcaaaaaagcggactaccaggccattccggagtgtcgcgtatactgactgctccttgagtac

SEQ ID NO: 5131 - DNA, 391 bp, Zea mays
  Clone ID: LIB3137-045-Q1-K1-H4
ttcctgcccgtctcattaggggcattttactatgctcgccctgtgagaacttcaggagcgaatccgtgacttatctcggcaaggaacagacacaggacaggatcgtggagttccttcatgatgcttgctcccaatcattctcctttgaacagaagtgtgtcgagctgatggactcttatgcgactctcctgtttgccaagatcacggagatcagaccggaagcgttctgcaaacggtatggcctgtgcagggacacggctcttctctccggtgtgggaagtgacagcacgtgtgtgttctgccaccatctgctcgatgaaatcatgtccaaactgaaaaatccaaatgcggagtttgagataattcacattcttgtcaaggagtgcaataa

SEQ ID NO: 5132 - DNA, 425 bp, Zea mays
  Clone ID: LIB3137-045-Q1-K1-H7
cagtcatccacactaacgaacgaactcttgctccgatcacgagctagctgaggtcgacgatggcggctgtgctgaacagcaggaagacgccgcacgtggtggccgtgctggtggtggtggcgctgctggcttcgtccgcgtcggcggcgatcacctgcgggcaggtggggtcgtcgctggcgccgtgcatcccgtacgcgacggggagggccagcgcgctccccgcgtcgtgctgcagcggcgtcaagagcctcaacagcgcggcgcggaccatcgcggaccgccaggcggcgtgccgctgcctcaagagcctcgccaacagcgtcaagagcgtcaacatgggcaccgtcgccaccatccccggcaagtgcggcgtctccgtcggattccccatcagcatgtccaccgactgcaacaagatcagc

SEQ ID NO: 5133 - DNA, 295 bp, Zea mays
  unsure (1)..(295): unsure at all n locations; Clone ID: LIB3137-045-Q1-K1-H9
gggacgcgnggaatcgagttggattggttttttagangttctttttgacatatganatggggacatcatgtgtgttacttgtgaagatgaacgtaagaagaaagcggatccatttcgtttaatcgcatcctcaatgatctcaaggacctgcataatgatcctcccacctcttgcatcgcatgccctgttgcctaaaatatgttctactgtcatgcgactattattgggccatcaaatagcccatacgctgtttgcgtatttttcgtcactattcacttttcaccggactacccat

SEQ ID NO: 5134 - DNA, 339 bp, Zea mays
  unsure (1)..(339): unsure at all n locations; Clone ID: LIB3137-047-Q1-K1-A3
accgaggtgactccaagcatctcctggtccttcttttgcatgatcttcgccctcntctactggagcgtcttcatcttcggcgggcacatcaacccgtctgtgaccttctggctgttccttgccaagaaattgtccctcaccaaggccgtgttttaacatattattccattgcctggcccccttttgcgccccggccgtcgtcaaggggttccagcaggggctgtacatggtcaacggcggcggcgccaacgtcgtggcgcccggctacaccaagggcgacggcctaggcgccgagatcgtcggcaccttcatcctcgtctacaccgtcttctccgccac

SEQ ID NO: 5135 - DNA, 287 bp, Zea mays
  Clone ID: LIB3137-047-Q1-K1-A5
cgtccggcaaaggtgactggcggatcatctcgcggttctttgtgatctcaaggacgccgactcaaggatctagtcatgcacagaagtgctttatccgtctgaactcaatgaacagagaaaggcggcgatcaagtatacatgacatcaccagtgtgaacaatggagatccatcaactgcacagggtccaatcacaggccaaacaaatggtcaggctgcaaatcctggaaaaccatctaagcaatccccgcagccagcgaatacacctccaggcgtcaatgcttatggc

SEQ ID NO: 5136 - DNA, 197 bp, Zea mays
  Clone ID: LIB3137-047-Q1-K1-A6
gggagactaatcttgctggttgctggcacctttccgaccccgtttgaaaccttaaaaacgggtgacgtacgtatgtaattgaatttgaggttgcaaatgtagtttcaactacttttgaagggttcgtgagtggcgtggtcacatgcacgtttcagccggttgactgtatgagatgaatgcagtgtagctgtagttgc

SEQ ID NO: 5137 - DNA, 277 bp, Zea mays
  Clone ID: LIB3137-047-Q1-K1-A7
cagatgcacagatcaatctgtgggagttgcctaccaacttcaacaccttgcgtctattattgaggttcttgacccgaagctacatgaccacctagatgatgtgggctctggaatacgaccctgacattttcttcgcagcgtgtgaagaacaaggtgcagtatataaaaacaaagtttctaaatccaaactgaaaggactgcgccattttggcaagtgggataataaggataaggacaaggataaggaagatgctaaaaatggggctgaggatggtga

SEQ ID NO: 5138 - DNA, 156 bp, Zea mays
  Clone ID: LIB3137-047-Q1-K1-A8
cattagcacagcgtctcgagtgattaatatattcgaagattttattgcccggttcaatttggggtttcccccaagggaccttccgccccattaattttttccagttgggaaaaggcgtgatgtttgctttaaccaaattgcactatttgaagggaa

SEQ ID NO: 5139 - DNA, 145 bp, Zea mays
  unsure (1)..(145): unsure at all n locations; Clone ID: LIB3137-047-Q1-K1-B1
tctaggtgaccacctanatgatttggtctctagaacacgaccctgacactttctccgcagcatgctaagtacaaggtaaacctgatagtaccctagttctaacacccaaacttaccgaacttaccctccgaaacctatgcatcct

SEQ ID NO: 5140 - DNA, 234 bp, Zea mays
  Clone ID: LIB3137-047-Q1-K1-B4
gctggcgcatactggtagtagccggcgcgctttcaccgtatcctcagatcagcggcgagcgggaaccacaccactctactgacgcccgacaagcattgtaacattttccttcagccatgggtaaggagaagactcacatcaacattgtggtcattggccatgtcgactctggcaagtcgaccaccactgtccacctgatctacaagctttgaggtattgacacacgagtgattt

SEQ ID NO: 5141 - DNA, 437 bp, Zea mays
  Clone ID: LIB3137-047-Q1-K1-B5
gccaagcggctcgtccggccgttgcctgtcgtcgctatggccgccgtggaggtgtgcgtgagggctgccgcggggaaccccgacacgctcggcgattgcccgttctcgcagagggtgctgctcacgctggaggagaagaaggtcccgtacgaggtgaaactcgtcgacctcggcaacaagcccgaatgggttctgaaccataacccaaaaggtaaggggcccgtgttcaacggtgggagatggcaaatgcattgctgattctgatgtaatcacccaagtcattgaggagaagttcccgactccttctctggtcacccctccagaatatgcatcagtgggatcaaaggttttcccagcctttgtcaagttcttgaagagcaaggatgctagtgatgggtcagagaaggcgcttctggatgagctgcaggcactggatg

SEQ ID NO: 5142 - DNA, 201 bp, Zea mays
  Clone ID: LIB3137-047-Q1-K1-B6
ccggctgataccggtcacccacctcgccagcccttcctcctcgtcccgctttttaacactgaatcttatccgcggatatgaaacacggccatcaatagcaattgcaacacatcgtcacactttgaagtctgttacaacacgattacactacagtggtacatgcacttttactcattggacgctaatttactacaatagctc

SEQ ID NO: 5143 - DNA, 381 bp, Zea mays
  Clone ID: LIB3137-047-Q1-K1-B7
ggcaagagcaggagcaaaaaggtttcgttggctatggcgacctcgtggacgcttcctgaccagccgaagctccccaaggggaagccggtggctgttgtcgtgctggacggatggggcgaggccaaccccgaccagtacaactgcatccatgtcgctcaaactcctgtcatggactcgttaaagaatggtgctcctgagaaatggagactagtgaaggctcatggaacagctgtgggtctccaatctgatgatgacatggccaccagtgaagttggtcacattgcacttggtgctggtcggattttcgcccaaggtgctaagcttgttgatcaagctcttgcctcaggaaagatttatgatggaaatgggttcaactacatc

SEQ ID NO: 5144 - DNA, 342 bp, Zea mays
  Clone ID: LIB3137-047-Q1-K1-B8
gctgcgcgatactggtattatccggcgcgccttcaccgtatcctcagatcagcggcgagcaggtaccacaccactctactgacgcccgacgagcattgtaacattttccttcagccatgggtaaggagaagactcacatcaacattgtggtcattggacatgtcgactatggcaagtcgaccaccactggccacctgatctacaagcttggaggtattgacaagcgagtgattgagaggttcgagaaagaggctgccgagatgaacaagcggtcattcaagtatgcgtgggtgcttgacaagctcaaagctgatcgtgagagaagtattacaattgatattg

SEQ ID NO: 5145 - DNA, 403 bp, Zea mays
  unsure (1)..(403): unsure at all n locations; Clone ID: LIB3137-047-Q1-K1-C1
aaaacccgnccgaccgcacgcgtccgttccgcttcctcatctcctcactctccgtttttttgcctcccctttgcttcactccgatccgctgtcttttccattacgggagccaatccatctctccgatgcaacctccttacatttttctccaccatattggccaccgttctgcttttgttattccagcgattctcgccgacggcagctgcggtgaaggtgaggaacatatcgacgttgcgctgggagccgaagtagtgggccacgggcaaggacgaggcgaacattctctcctaggcgtaagctctcgctagcggctaatgagatggtttgctgacggcggacgaaggacgcgagttctcctcgctctacagcatgctgcagtgagcaattgggaactctcatc

SEQ ID NO: 5146 - DNA, 180 bp, Zea mays
  Clone ID: LIB3137-047-Q1-K1-C2
caattagctagcttcttctagctctagctatgctcgtctgctgcaagaaggtaacagtaacggcaggcatggaggggaaggaggaggacgtccgcctggcccccaacaagttctcgaagcgccagccatatcgaacggcggcgcagggcacggacaacaaggactacaaggagcccccgc

SEQ ID NO: 5147 - DNA, 127 bp, Zea mays
  unsure (1)..(127): unsure at all n locations; Clone ID: LIB3137-047-Q1-K1-C4
atgaaagaccactntagcctttctccagtattaagtccgcaactggtgctttcagatctttgaggctcttgcatacatgcaccagaagggctactttgatcgtgacctcacaccttacaatctgctg

SEQ ID NO: 5148 - DNA, 378 bp, Zea mays
  Clone ID: LIB3137-047-Q1-K1-C5
gcgaaattggacagatggtaattgcttgatatagtcatgtgtgttggaaaatttgttgcggtgcggagtgtcttgattgcattgcggggatcatatgtctgccaccggcgccatgtagtcgtggtcgtatgacgagtccatctcgtggacgacgagcttcgtggccgtgacccgcgcggcggtggcgtcgttgaagaggaagacgccggcgttggcgtagatggcctcggtggggtagacgcgcgatgtggcggtggacctcccgccctgtgcgaagctctccacgatggagtggtcgactagcacccggagcgagagcgtggcctcgtcctccagcacggggacggctcttccgacgacgcgcttgacgatgtccgt

SEQ ID NO: 5149 - DNA, 421 bp, Zea mays
  unsure (1)..(421): unsure at all n locations; Clone ID: LIB3137-047-Q1-K1-C7
gttcgtgttcaggttctggttcgtgggcgagtagggaagagatggcggcgtcggacgttgaggaccgttgcttcgttggcggcctcgcctgggccaccgacgaccactccctcaacaacgccttcagcacctacggcgaggtcctcgagtcgaagatcatcctggatcgggagacgcagaggtcccgcggcttcggcttcgtcaccttctccacggaggacgcgatgcgcagcgccatcgagggcatgaacggcaaggagctcgacggccgcaacatcaccgttaacgaggcccagtcccgcggcggccgtggaggcggcggtggcggatacggtggcgggcgccgtgatggaggcggctactgcggtggcggtggaggctacngcggtggtcgtggaagctaccgcggccgtgggggata

SEQ ID NO: 5150 - DNA, 218 bp, Zea mays
  Clone ID: LIB3137-047-Q1-K1-D1
cgaccgacgcgtccgataagtttcaagatcatattaacgagctaaatattatacatgataaggaagttgaatcaacgataatttatgggaaagggactgaaactggacacataattgtcaccactactggtggcaagaatggtcaaccaaaacagacagtgagctacatggctgagcgcattgtaggtcaaagttcttttgggattgtcttccaggct

SEQ ID NO: 5151 - DNA, 232 bp, Zea mays
  Clone ID: LIB3137-047-Q1-K1-D2
gtcacttctccactaacaaaagcgcatcgatctcgctgtcgtcactcctcgtcacccatccggtaacagtatcaccacccagcatggccctgcaagcggcgctcctcccatccaccctctcatccgtccccaagaagtgcatcatcgccgtcgcggcgaatgacactgcattccttagcgtatcccagaagaaggtgcaggcggcgtcgctgtcggtgagaacgctggtggc

SEQ ID NO: 5152 - DNA, 248 bp, Zea mays
  Clone ID: LIB3137-047-Q1-K1-D3
cgaccgacgcgtccggtcgtgggcagccgggcatgtaggaaaagtgcttcagcgtcgccaatctccatggagctcaggagcgcctcgctccggcgatgcgcgctgccatcggcgtccccggtggccgcgagggtggggaggaaggaagcgaccagccatggtgggcctgcgtcggggcggggggttcgcggaggaagggcaccttaagtactacgaagccgcccctccgaagaaagccgttgaagccg

SEQ ID NO: 5153 - DNA, 173 bp, Zea mays
  Clone ID: LIB3137-047-Q1-K1-D4
atttgaattttgccactttgtgaaagaaagctatataatccacaaggcttctggcttggtgtggcttgtttggtgatacctgtacaagcaaatttggtgacctgctgcttaaaagccgtttctgcaaagaggtcatcttgactgatcgcagcgatgaagtttctgaagcaagg

SEQ ID NO: 5154 - DNA, 327 bp, Zea mays
  Clone ID: LIB3137-047-Q1-K1-D5
gcagcggctaacactaaccttggcagaacgatgctgaagcagttcgtcgtgaacccagtatggcaaactctccgaggatcctggccctcgtcctgctgctagcgctcctgtgcgctgccgccggcccggccgccgggcaaaactgcggttgccagcctaacttctgctgcagcaagttcggctactgcggcacgaccgacgactactgcggcgacgggtgccagtcgggcccgtgccgctcgggcggcggcggcggcggcggcggaggcggaggcagtggcggtgcgaacgtggctaacgtggtcagcgacgcgttcttcaacggca

SEQ ID NO: 5155 - DNA, 206 bp, Zea mays
  unsure (1)..(206): unsure at all n locations; Clone ID: LIB3137-047-Q1-K1-E1
gacccacgcttcctcttactctttttcntactctttctcatactctttttcccacacatccaccgnttaaatctagtcttccattcccacactccttcctattaaccacaaacctaactcttatcttctctttccgccctccatactaaatactcataccttccttccatcgtctccgcatccatccaccatgtcccttttcaact

SEQ ID NO: 5156 - DNA, 108 bp, Zea mays
  unsure (1)..(108): unsure at all n locations; Clone ID: LIB3137-047-Q1-K1-E2
atctcaattancataccatttttctccattttgtgccgatccatacttaccatctacatgttcctgggtctgtcactcaccagtgcacgacacacaccttgttcctta

SEQ ID NO: 5157 - DNA, 421 bp, Zea mays
  Clone ID: LIB3137-047-Q1-K1-E4
ccagtgtaccgcatcgggacgactgacgcgctttcgacgacacgccaggtccggcatccatggtcgccgcggcggccgacctggaggcgcgtcagctccgcatcctcggccgtatttctgacctcgagctcgccgcgcagcagcaccgcctcggggcgctctccatctccaccgcgccctcagagaaaggcgaggccgacgcggtggctaccgaggttcatctcgcagccctcctggccgcgcgcggcgtgcgggacttcgccttccgtcgcgttcccgccgactactatgaccgctccctcgaggagcggcgcggcctgctccgagccgactcagtcgcccagctctgcaagagtatcgtcatggtgaacacccaagctgctgtagatgttggtgattgcagtaatccaaagaattcaaa

SEQ ID NO: 5158 - DNA, 72 bp, Zea mays
  unsure (1)..(72): unsure at all n locations; Clone ID: LIB3137-047-Q1-K1-E6
acccacgcgtccggtaactggnaanttccattttttcangctttctttatgacccaaaaccataccatttct

SEQ ID NO: 5159 - DNA, 263 bp, Zea mays
  Clone ID: LIB3137-047-Q1-K1-E7
cggcagcggcctttaaaccttctcatctgtgccctcatgccccccttccttggcaacaatccgagcagattgacaacggctctccggggcaacttaaagcctgcgccggcgacgccgcggagaagctgctgctcgccgtctcaaccgagggtcctatatgtggtgtgccagacttcaagatgaggggaaagaacagtgatgagctcgaacctgtcgatgctggcgatgaagatgatgatggtggtgacgatggggacgaggat

SEQ ID NO: 5160 - DNA, 324 bp, Zea mays
  unsure (1)..(324): unsure at all n locations; Clone ID: LIB3137-047-Q1-K1-F1
aaaacccgnccgaccgacgcgtccggaaaggttttccctggactttctatggtacctagaccacacgttcacagttttgtctctaagtggtaattatgtaaaggatgatgtatggcatgctcttatagttctaatgagtaatgcatctgaacttcaaggatattcaatcacgtcattatataaggcattgcaagcatctggtgaacaggaaagtttagttagggtggccatttggtgcattggtgaatatggagaaatgctggtcaacaatcttagtatgttagacatggacgaaccgatcacggtaactgaatctgatgctgt

SEQ ID NO: 5161 - DNA, 265 bp, Zea mays
  Clone ID: LIB3137-047-Q1-K1-F4
gcgacgagtactcctccttctacaagtctctttccaacgactgggaggaccacctcgccgtgaagcacttctcggtggaggggcagctggagttcaaggccatcctgttcgtgcctcgccgcgcgcccttcgacctgttcgacacgcgcaagaagctcatcaacatcaagctctacgtccgccgcgtcttcatcatggacaactgcgaggagctcatcccggagtggctgggcttcgtgaagggcgtggtggactcggacgacct

SEQ ID NO: 5162 - DNA, 292 bp, Zea mays
  Clone ID: LIB3137-047-Q1-K1-F5
gtgggggacgaccggacgaggaagtagtggcttgtgcgtgccgtctcggaggatggggtgagaatggataaaggcgcggtcacgcggcgacggcatctggtggaaaggggatcggatcgccttgccttcatcaccggccagactcgcagcctctcctgcgacccgattccagattcaccacttcgttcacagtttgaaggtggcactcgtgatgatgggttcagcgagagaaatcagttgcagaagtcagaacctagcgacctggtacctggatttcaagatccttgtactc

SEQ ID NO: 5163 - DNA, 193 bp, Zea mays
  Clone ID: LIB3137-047-Q1-K1-F6
cgaccacgcgtcggtcacgtctcactaacaatactcatccatttctctgtctactcctcgtcacccatccagaaacatattcaccacccatggtggcccttcattctgctctcctcccatccaccctctcatccgtccccaagaagtgcatcatctccgtcgcggcgaatgacacggcattccttatcgtatc

SEQ ID NO: 5164 - DNA, 211 bp, Zea mays
  Clone ID: LIB3137-047-Q1-K1-F7
caagaaaaaagaagctacacagattcaacctccattcaaaccatggcttgccaccttagatccgcgagcgtgccttccagccctcgctctaacaaagccaacatcgatgaacagctgcagagcctgaaggcaaccatctcctcaccttcagtggccattcaaaccatggttgatggtctcaacaagatcgtgagcatctacagctgcattg

SEQ ID NO: 5165 - DNA, 154 bp, Zea mays
  Clone ID: LIB3137-047-Q1-K1-F8
gccggcgtcgaagtggtggtcccaagtttgcgccgttctccgacacgtgccgcacgtggtgtctgcggtctggagatgccttacgggggcggcacaccaccctgaggcggtggggctctcctctcaaagactcactcggacggtgcgttttagt

SEQ ID NO: 5166 - DNA, 151 bp, Zea mays
  Clone ID: LIB3137-047-Q1-K1-G1
tcccacgcattctaccccactccttatgctctttataccaacgccaaaactaccttcctgaggtacattatatattgcgcaactccatcccctcatctttactgcccaccctcatctacatcttcaacttaccctccttctccccccagta

SEQ ID NO: 5167 - DNA, 53 bp, Zea mays
  Clone ID: LIB3137-047-Q1-K1-G2
ggcggcggctgtttccattgccatcttcgttcataaacccggcttcacaattc

SEQ ID NO: 5168 - DNA, 324 bp, Zea mays
  Clone ID: LIB3137-047-Q1-K1-G4
cgaacgccctttccgtgacctcccgatctcattctatggtcgcgcggagcctctgatccacgacctgtatgtagctgcggccagcctatctgctactcctggtcgcttccgctctcctctcgtccacgtcgccggcccgcgcgctgcggttcgacctatagtccatccacaccaagtgcatctccgacgagatcaaggttaacgccatggccgtcgtcaagtaccacatcgtcagcccggaccccaacttcaaggatgcccagttcacggaatcgaaccgcatctccctaatggtgacgtccccgtacgggaacagcatgcact

SEQ ID NO: 5169 - DNA, 248 bp, Zea mays
  Clone ID: LIB3137-047-Q1-K1-G5
gccggctattttaccgcacccgttctcccctctctaccgcagatcagatcacactcgtagagagaaggaaaaatatccccaaaccctagctcccgatctcattggcaacccttgcgtcttttttgaacttgaccgccggcggccccccggcggcccgattcgtgatggagctgtacgccaacgaggtgcccaagaccgcggagaacttccgcgcgctgtgcacggccaaaatggccttggccaattcc

SEQ ID NO: 5170 - DNA, 324 bp, Zea mays
  Clone ID: LIB3137-047-Q1-K1-G7
accgccattccaagcacatattcccggcccgtgcagctcaccaactaccttgcacttcaattcgtcttatcgcggcacgcacagatatatatagattagtacctagctagatgctcatttagctgcagaggcgccatgattggggtgcgcattgtcagttataagtctctgatcatggtgctactgctggtgctcctcgtctgcgttgtctcgccggcgacggccgcggccggccgggcggaggaggcgcacctggtgcccgcgttgtacgtgttcggcgacttcaccgtggtacgtggcaacaaccagtacctgccggggaac

SEQ ID NO: 5171 - DNA, 98 bp, Zea mays
  unsure (1)..(98): unsure at all n locations; Clone ID: LIB3137-047-Q1-K1-G8
aatcccacagccaacacctcctaacattaaacatccttatccctatcatattatcanaacaccccacacatctcaaccatctcccacataaactacat

SEQ ID NO: 5172 - DNA, 173 bp, Zea mays
  Clone ID: LIB3137-047-Q1-K1-H1
catgattggggtgcgcattgtcagttataagtctctgatcatggtgctactgctggtgctcctcgtctgcgttgtctcgccagcgacggccgcgtccgtccgggcggatgatgcgcacctggtgcccgcgttgtacgtgttcggcgactccaccgtggacgtgggcaacaacc

SEQ ID NO: 5173 - DNA, 202 bp, Zea mays
  unsure (1)..(202): unsure at all n locations; Clone ID: LIB3137-047-Q1-K1-H2
gctcatcactctactactgctggtacacatactagccagcctgccaggcagcttgccatggcgcccaccgtgatgatggcctcgtcggcaaccgccgtcgccccgttccagggtctcaagtccgtcgncagcctccccgtcgcccgccgcagcaccaggagcctcggcaacgtcagcaacggcggaaggatccggtgcatgc

SEQ ID NO: 5174 - DNA, 338 bp, Zea mays
  Clone ID: LIB3137-047-Q1-K1-H3
cgcgggctcaagtgctctgttgtcggtgtcctaaagactattgataacgacatcgcggtgagtgacaagtcgtttggattcgacactgctgtggaggaggcccaaagggccatcaatgctgctcatgtcgaggctgaaagtgcggagaacggcatcggtgtcgtgaagctaatggcccgaacaaccgctttattgggaatgaacccaattttacctagccggaatgtgaactgttgtttaatcccggagtcacccttctacctcgaagggaagggaggactcctcgagttcgtcgagaggcggctcaaggacaacggccacatggtcatcgtggtggc

SEQ ID NO: 5175 - DNA, 195 bp, Zea mays
  Clone ID: LIB3137-047-Q1-K1-H4
ctcggcattctccgctgcttctcaacaccttctcgaacccgtgaaaaattccctctcctttgcatccttttgaagagggcttgggcacataccaaccataggcgccccccatccataccgtcgaagccgcgtctgatttggtgcggattttggcgaaataccccgctcctagctccgctgtttcaaagataacaa

SEQ ID NO: 5176 - DNA, 414 bp, Zea mays
  Clone ID: LIB3137-047-Q1-K1-H5
cgatcgatcacacaagcacgaagactcgtttatgagaaaccacaaaccaccaagccgtgcgggcatcatggagtacggtcagcaggggcagcgcggccacggcgccacgggccatgtcgaccagtacggcaacccagtcggcggcgtcgagcacggcaccggcggcatgaggcacggcacgggaaccaccggcggcatgggccagctgggtgagcacggcggcgctggcatgggtggcgggcagttccagcctgcgagggaggagcacaagaccggcggcatcctgcatcgctccggcagctccagctccagctcgtcggaggacgacggcatgggcggaaggaggaagaagggaatcaaggagaagatcaaagagaagctgcccggaggccacaaggacgaccagcacgccac

SEQ ID NO: 5177 - DNA, 283 bp, Zea mays
  Clone ID: LIB3137-047-Q1-K1-H6
cacatgcacaatcacaagctcactctagcaatttcttctgaggttgtccgccctaacgacacgcagcttctaatggcccaagccggacttatggcggctcagcctctcctacctcacgcccctgtcactgaggtgcgccgtggagcttgtcatccccacggcgatctaccgccatggcggtgctgactcaaccgctgagctggtcacggcgctgtctctcccctccactaatctgccgttcctccgccgcctgctgctgctcctcgccgcgtcgggcgtgttc

SEQ ID NO: 5178 - DNA, 146 bp, Zea mays
  unsure (1)..(146): unsure at all n locations; Clone ID: LIB3137-047-Q1-K1-H8
ctcaccctcttctacctactcccctttcacttaattcccccatttaccttcccttccccaccactatctaccaccatttcttttctacctcanccactaacctactcactcccctatctctcccttccactaatctacctttcctc

SEQ ID NO: 5179 - DNA, 316 bp, Zea mays
  Clone ID: LIB3137-049-Q1-K1-A11
gaccggttctgttcgccgcaccgcaggtttcggcggcaagcaggtgtacggtcggcctgacggggagtaccgcgtcgccgactactccccgtggctgcagaggcccgtgcgggacgccaggtactggcgccccgcactcgcctgcgtcgtcgggtccgggccgtgccccaagatccacaactggactcccatggactaccttcagcacgacctcacgccgatacagtccggctgctgcaagccggcgacggcgtgccagtacagcgggggcgtggccgtctgggcgcatgacgaggactgctaccgctgggaacaa

SEQ ID NO: 5180 - DNA, 349 bp, Zea mays
  unsure (1)..(349): unsure at all n locations; Clone ID: LIB3137-049-Q1-K1-A2
tggaagcccaaacatgtcagcttcagcttcctcccattcaatccagcgatcagtggttatcaatggtcccagccatacccagcacggtggcagtatantgaatgccagtgcnttattcttcaggcaataccaagtcaagcaatggagattcttcccttctgccattgacactagagtgcctcgtggtcctcggtccaccttgtactatcgtactgggcattccttccaaaggaaacaaggttacacgcacagccagagcactattgtaaggggtagctactcccccacaaccatgaatccacatgctgctgaatttgtgcctggaaaaacttcgcaacaatctgatgtg

SEQ ID NO: 5181 - DNA, 96 bp, Zea mays
  Clone ID: LIB3137-049-Q1-K1-A3
gcctgggagccaccggagggtcaccgcccctaaggggtcgtggcattaccctattcgcttgcggcgggctcgctggcttacagtaccggggggcca

SEQ ID NO: 5182 - DNA, 369 bp, Zea mays
  Clone ID: LIB3137-049-Q1-K1-A5
gcgaatcacagacgcgcctatctcagcttgctgcactgccctgccatcatatcgtacgtgagcccggccgagagcgagggagaggcatggctgctccgaagctcgcgacgctggcgctggctgtgctcctggcggcgaccgtggtggctcccccggccgcggtgcgcgcggcgatgtcgtgctccaccgtgtacagcacgctgatgccgtgcctgccgttcgtccagatgggcggggccatgccgccccagccgtgctgcggcggcatccgcagcctgctgcagcaggccaacaacacccccgaccgccgcaccatctgcggctgcctcaagaacgtcgccaacggcgccaacgggagcggcacctaca

SEQ ID NO: 5183 - DNA, 425 bp, Zea mays
  Clone ID: LIB3137-049-Q1-K1-A6
gttagcacaatagcactgtcacagaatactcgttgtgtacagatcagacattgagacggcgggttgtgatctgtctatctcagtctccactacctgacgccgccggtggttgccgttttcatgaacagagcttgtgtcgttggttcttccaccttcgtgtcattgcgcctcgtgttataaattagtgttccctaaatacagccatgatattaggattcatccttttaatataagctccgtaccaaaatagtattcggtttagttttccatttttatatctatatttatctaggtgatgatgaatatagactcatatatagaacacatgtaccaaatattgtatgaatccactaaaaccaaaaaacttttttttaatagaacaagtagatctcgtgccggctcgttcaaaaaactaaaaccaaaac

SEQ ID NO: 5184 - DNA, 336 bp, Zea mays
  Clone ID: LIB3137-049-Q1-K1-A7
tttttcttgctgctgctagtagtagcttgggccgggatcgctgatgacgactccggtatctactaccagctggctcttatgtggccaggagcatactgcgagcagaccagcgctgggtgctgcaagccgaccaccggcgtctcgccggcgcgcgacttctacataacgggcttcaccgtccttaacgcgaccaccgacgctgcagtgacgggatgcagcaacaaagttccttacgaccctaacctgattaccggcatccaaggcctgaatcagtactggagcaacatcaggtgccccagcaacaacgggcagagcagctggaagaacgcctggaag

SEQ ID NO: 5185 - DNA, 450 bp, Zea mays
  Clone ID: LIB3137-049-Q1-K1-A8
ggcaggtcggcgaggagggcaggaataccgaagaccgagccgtgcgggggctcggggcgggggcgggacaggaccccaaaatctcacatccttcctgcccgcccgcccgtgcccgtcgacgcgtcgttcttgccggccgcgccccacctccgccctctcctcctccagggggatcggatacgccacaggctgcgcgatggtgctgtgggtcttcggctacggctccctcatctggaaccccggcttcgacttcgacgacaaaatcctcggcttcatcaagggctacaagcgcacctttaatctcgcttgcattgaccacagaggcacaccggagcatccggcgaggacctgcacgcttgaaaccgacgacgaggccatatgctggggaattgcatattgtgtcaagggtggtccagataaagagctaaaagcaatacagtacttggagag

SEQ ID NO: 5186 - DNA, 412 bp, Zea mays
  Clone ID: LIB3137-049-Q1-K1-B1
gaaaccctcgcctccctcttcctttccggccgccgcctgccgccggaaggagaaaaaatgggtgccggtggggaggaagcgccgcggataatcgtgcctatggcggtggagggtaccccgaatcagctggcgtttgtagaggagtcgaagctgcagaagcgcaaggagaacgtggactgggccgtgaggaaccgggagcgcagggcggccaagcgccagcgcatccgcgacgagcacaaggtcgccgtcaggcggcccgaggagttcgtcaccgcgttccgcaacaaggagcgcgacttcctgcggatgaggacccgcatcaaggtccgcagccagccgcccgtcgaggcgctcggctccaggctcgtcttcgcgattcgcatccctggctccgtggacttgcacccgcaca

SEQ ID NO: 5187 - DNA, 283 bp, Zea mays
  Clone ID: LIB3137-049-Q1-K1-B10
gaagttaatccagcctatcaaggacaaatacccaggtaccacttatgcagatttgttccagttagcaagtgctacggcgattgaggaagctggtggtccaaaaattccaatgaaatatggacgtgttgatgtcacagcagctgaacagtgtccgcccgaggggaggcttcccgatgctggcccacgtgatcctgctgaacaccttagggaggtattttatagaatgggccttgatgacaaggaaattgttgcactatctggagcacacacacttggaagagca

SEQ ID NO: 5188 - DNA, 333 bp, Zea mays
  Clone ID: LIB3137-049-Q1-K1-B12
gggcgcaaagaatccccaagcaaacaaccagtgtaaaggaaaaggaaaggaaaggaaaggagaggtgggttctgggacaccatggctccgatgaagctgtacggggcggtgatgtcgtggaacgtgacgaggtgcgcaacggcgctggaggaggctggctccgactacgagatcgtgcccatcaacttcgccaccgccgagcacaagagccccgagcacctcgtccgcaacccgtttggtcaggttccagctctgcaggatggtgacttgtacctcttcgaatcacgagcaatctgcaagtacgctgctcgcaaaaacaagccagagctgttg

SEQ ID NO: 5189 - DNA, 413 bp, Zea mays
  Clone ID: LIB3137-049-Q1-K1-B2
gccaaggacaccgccgtctccggcaaggacaagtccggcggcgtcatccagcaggccactgggcaggtgaagagcgcggcggcgggcgccaaggacgcggtgatgagcacgctggggatgggcggggacgacaagcagggcgacgccaacaccaacaccaacaaggactcctctaccatcaccagggatcactagacgcgtgtatgcacacgcaggcacgcagcacttggtccgatcctgtcgtccgtgaccctgtttgcttgttcgcgagtccagtatagggttgtgcatgtgtttcagtgtcatggtttccttttctacgaaatttggtgttgtaagtttgattcgcatgtacgttgctgtgttttttctgcgtcatcaagtgtctgtaaacgagtcgggcgggtttgagt

SEQ ID NO: 5190 - DNA, 86 bp, Zea mays
  unsure (1)..(86): unsure at all n locations; Clone ID: LIB3137-049-Q1-K1-B4
aaaaaaggncggggaaaaaaaaaaaaaaaaaaataaaaaaaaaaaaataatataaaaaacaaaaaaaaaaaaaaaagtagtcattt

SEQ ID NO: 5191 - DNA, 349 bp, Zea mays
  Clone ID: LIB3137-049-Q1-K1-B6
caaagagattctttcaattcagcgagacttattagagtcatgcagaaatacctcctgagctgacagtgatgaaggcccatctgcagctagtaaagcgtctggaagcaaactgtcagcttcagctcctccattcaatccaggatcagtgttatcaatgtcccagccatacagcacggtggcagtatatgatgccagtgctattcttcaggcaataccaagtcaagcaatggagattctcccttctgccattgacactagagtgcctcttggtcctcggtccaccttgtactatcgtactgggcattccttccaaaggaaacaaggttacacgcacagccagagcactatt

SEQ ID NO: 5192 - DNA, 348 bp, Zea mays
  Clone ID: LIB3137-049-Q1-K1-B8
atgacgagagcactggccatggtggccatgttggccactgctgccttgttcttcatggccggtcgcgcacagcagtgcggtatgcaggccggcggcgcgctctgccccgactgcctctgctgcagccagtggggctattgcggctccactcccgactactgtaccggcggctgccagagccagtgcatcggcagcggctgcggcggcggcggcggtggtacccctgctactcccccgagcggcccggtgtctgaaatcatctccgagtccctgttcaacgagatgctgctgcaccgcaacgacgtggcgtgcccggccaccggcttctacacctacgacgcgttcatc

SEQ ID NO: 5193 - DNA, 400 bp, Zea mays
  Clone ID: LIB3137-049-Q1-K1-B9
cggggcgaccgacgcgtccgttccacctctcctccggctagggtgtttacgtttgccgcggcgaagcttctgccctgccctgtgtctatctctggtcggcgtcggcccataagatggctggcggcttcagggtacttcatctggtcaggccctttctggctttcttgccagaggtgcagagcgcggataggaagataccattcagagaaaaagttatctacactgttatttctctcttcatttatctggtgtgcagccagctcccactctatggcattcattctactactggagctcatcctttctactggatgcgtgttatccttgcatcaaaccgtggcactgtgatggagttgggtattactccaattgtgacctcttgtattgtaatgcaacttct

SEQ ID NO: 5194 - DNA, 351 bp, Zea mays
  Clone ID: LIB3137-049-Q1-K1-C11
tttggaagatgatgtggcctctcgaatatgatcctggcatttgctccacttatgaaaaggataatactggggctgtggtccacaaaattgaaggaaaggtaaaatcaatacgtcagtttggtaagtacgagagggagaatatgaagagggcaaacgatggtgatggacctgtccctatttcggtcttcctggttgctagtgtcctaaaagagaacagtacaaagcttctgcaagaggctcgagggattgatgacattattaggatattgaataatgttaatggaaatctggacgccaaaagagcttgcgttgttgcactaaaactttataagaagtatcacaaaaaggaaa

SEQ ID NO: 5195 - DNA, 461 bp, Zea mays
  Clone ID: LIB3137-049-Q1-K1-C2
gaccgaggcgtccgccaggagcaaattcctcctctctcgagggctgttgtttgctcgcgtgaagaaggccggggcgctagctctccgatcgcggtagggcgttcgcagcgccgattcgagccgacgattggccgtccgcgaaggttaaacaaaatcaaatccccctgttcatgtgttatggcagggcatcatcataataacacacatgcctccaggatggatcatgtgaacaggttccagagtgaagcacagccttttggcccaaagttatttatgcattctagaactgatgcagcaaatggagctctaccatcaggttatgtgggcgcaccaataagaccaaatggcattccattctcaagtcacaccgggcaatctcatattcagcacagtgatgctcctggaaccatgcttgcatcctattctggctatcctcttgctggaagctccagtagcaccta

SEQ ID NO: 5196 - DNA, 436 bp, Zea mays
  Clone ID: LIB3137-049-Q1-K1-C3
cggacgcgtgggcgctcccacgcgggcgtccaacgacgagggggacgcgctctacgcgctgcggcaggggctgtcggaccccaacggcgtgctgcagagctgggatcccacgctcgtcaccccctgcacctggttccacatctcctgcgaccaggtcggccgcgtcgtccgcctggacttgggcaactccaacgtctccggctccatcggccctgagctcggccgccttgtcaacctcaagtacctggagctgtacaggaacaaccttgacggcgagatccccaaggaattgggcaacctcaagaacctgatcagcttggatctgtatgccaacaagctcacgggaggaatccccaagtcactctccaagctcgactcactcagattcatgcgcttgaacaacaacaagcttacaagatcaattccaagggagttt

SEQ ID NO: 5197 - DNA, 371 bp, Zea mays
  Clone ID: LIB3137-049-Q1-K1-C6
tttccccctcccccgcattccacctcgcggagatccagtccagccctagggtttcgccagcggcgagccaaactccacgagcgggggaagaggggaaagcagggacgacgagggggcagccatggggcagcagtcgctgatctacgcgttcgtggcccgtggcacggtcatactggccgagtacacggagttcaccggcaacttcaccaccatcgcctcccagtgcctcatgaagctccccgcaagcaacaacaagttcacctacaactgcgacggtcacactttcaattacctcgtggaagacggattcacatactgtgttgttgctgttgaatcggtggggcaacaaattcctattgctttcatggata

SEQ ID NO: 5198 - DNA, 455 bp, Zea mays
  unsure (1)..(455): unsure at all n locations; Clone ID: LIB3137-049-Q1-K1-C7
gcgtccgcggacgcgtgggcggcgcctctgcactagcatgcacagcagcggcgaggcggggcggggggggcttctactctacctggcccggccggccgccgtgcaggcgcaccgatccaatcctcggagctggcggagtctccggccgcccggcgcccgatgctgcccgccacccgaggcagcaagccaccgcagaggtccgccgccagatcctgctccgactccttagtccttatcagaagtcatggacctgtcgtcggacccgaagcgcaagccgcgctgcctcagcaaggtggtcatgctcgcgctcctcatgagctaagttgagtttatactttaggcagttcatgagctaagttgagttttagccttacaatcagtttgcgtcaaacattntgtataacagtaagctagagagtagctgctatagcaagcagctacaactacaaacaaga

SEQ ID NO: 5199 - DNA, 363 bp, Zea mays
  unsure (1)..(363): unsure at all n locations; Clone ID: LIB3137-049-Q1-K1-C9
ggccgaccgacgcgtcctgtcaacattgcttattatgctgangcttactttctccttatttgaacccatcgaacggctggtctcatcagactcattccgtgaatctcactccctcacccaacgctccatattccacactcgccttgctccccatgcatcaaccgcttgtgctcctccttctcttcttcatcagctctgccaaatatgccgtctcctcccgcgcctacgcctgtgcgtctacctacattctctatctgaacccctcgctcaagccgttcccctacaccactcacctgcactggcaccacgcgcaccttgactccctctcccttgaccccgtgcgccaccttctctactcttaca

SEQ ID NO: 5200 - DNA, 443 bp, Zea mays
  Clone ID: LIB3137-049-Q1-K1-D1
ggctattgtaaggtgggagagctgaaacctgagaagtcgatccctgattcaattctcagacgagcaaaagggcttgcaatcatcactgaggtaaaggttggagtgatgcttacatacaaaatcggtactggattggttgttgctcggagaggtgatggttcttggtcccctccttcagccatctctacttgtggtcttggatatggagttcaggctggaggtgagttggctgactacatcattgttcttaggaacaaagatgccatcaaaacttttagtggaaatgcacatatgtcaattggggctggtgttagtgcttctgctggtcattttggacgagtggcagaggctgatttccgtgctggtgatggtggttatgctgcctgttacacatacagttgtagcaaaggtgcctttgtgggctgtgcgctcaatggaagtgt

SEQ ID NO: 5201 - DNA, 309 bp, Zea mays
  unsure (1)..(309): unsure at all n locations; Clone ID: LIB3137-049-Q1-K1-D10
ttttggagttaatcctagatcaatatgagaaggggctacagttacagtccttcaccaccaaggggctacaggagaagggcccgcagtccaagtcctcatgatcattatggtggtcgtggtagggatctcccaaccagtcttctggtcaggaatctccgtcgggactgcaggccagaagacctccgtcgcccatttggacagtttggtcgagttaaagatatatatcttccaagagattattacacntgggatcccccaagggtttggtttgtccagtattatgatcctgctgatgctgcttatgcaaat

SEQ ID NO: 5202 - DNA, 340 bp, Zea mays
  Clone ID: LIB3137-049-Q1-K1-D12
cgtccgtgtaaccttacctttactccacgatctgcattagttggcagccaaaatggagtccaaatggggacgccctttcttaaatcccacagagggactgcttcccctctgacttcaccttcggtgccgccacttcagcgtaccaaattgaaggtgcttggaatgaagatggaaagggggaaagcaactgtcatcacttctgccacaatcattcggaaaggatactggacgggagcaattcatacattggagcgaattcgtaccatatgtacaaaacggacgtcatatttctcaatgaaattggcattgactcatataggttctctatctcttggcccaa

SEQ ID NO: 5203 - DNA, 389 bp, Zea mays
  Clone ID: LIB3137-049-Q1-K1-D2
ggcgtcgggggcgctctaatcggcggccccacggtgacgttggcctaaccggccgaaagatcatcagtggggcgtacggcggctggggagcccacggcggtggcgccttctccggcaaggaccccaccaaggtggaccgcagcggcgcctacgtggccaggcaggccgccaagagcatcgtggccagcggcctcgcccgccgctgcctcgtgcaggtgtcgtacgccatcggcgtgccggagcccctgtccgtgttcgtcaactcgtacggcaccggcacgatccccgacaaggagatcctcaagatcgtgaaggagaacttcgacttcaggcccgggatgatcagcatcaacctcgacctgaagaagggcggcaacaggttcatcaag

SEQ ID NO: 5204 - DNA, 444 bp, Zea mays
  Clone ID: LIB3137-049-Q1-K1-D3
tcgcttcgaggaggcgccgcccaagtcgcagctcatcggtacgagggtgatggggcgcaacgcggacggcactgggagatctcggggtacgtggagtacatcgggtcgggccagaagcagggcgacatgctgctgccggtgccggagggcgcctacgccgtgcggctcgggaacgaggcatccatccagcagcgactcgccgtgacgccgggcgcgcgctactccatcaccttcagcgcggcgcgcacctgcgcccaggccgagcagctcaacgtgacggtcgcccccgagtcggacgtactcccgatccagacggtctacaccagcagcggctgggactcctactcctgggccttcctggccgcgggcagcgtcgtcaccctgatcgtccacaaccccggcgtcgccgaggacgcagcctgcggccccctcatcgatctgttt

SEQ ID NO: 5205 - DNA, 360 bp, Zea mays
  Clone ID: LIB3137-049-Q1-K1-D5
gggcaagcacaaccaacgggaagaatattcttaattctgcgtaccaacaaactcattcaaagggatctgcattccctatattcttgttcttcttattgaatacaattgttcagcttgtttattttgcttaaatgactgactccgttgattatgataaaaccctataatattttcaacatgacaagtttaacgtctccttcttttttatatttctcattttctaggacttgcccaacaattatcttaatcacattattctttattacaatgaatacaatctctttacaaatattctttacacttaattaaatactcttttaacaatacctttaaatttttcaaaatttttaaacttttttt

SEQ ID NO: 5206 - DNA, 422 bp, Zea mays
  Clone ID: LIB3137-049-Q1-K1-D6
cgcatcggtgcgctgttgtggtaccagtgggagagtgacaccgtccgctggtccgacgccagcgagtacggccgccggatggggatgctcgtccgtgatctccgcgccgatcttggcattccgcaccttctcgtcattcaggtcgggttagcatcgggcctaggacagtatactcaagtcgtgagagacgctcagaaagggatcaaacttcgcaacgtcagattcgttgatgcgatggggttgccattgcaagacggccatctgcatctaagcacccaagctcaagtccagcttgggcgtatgttggctcagtcctatctaaattatggtacatcccaactctagctagtacttgtgagatagaaattcctgccctgtttgacgattcattgagaaccccatcttataatattgtgtatgga

SEQ ID NO: 5207 - DNA, 305 bp, Zea mays
  unsure (1)..(305): unsure at all n locations; Clone ID: LIB3137-049-Q1-K1-D7
ggcggattanggccggcagcatggacttctttttgtaggagagtgggagagacgatcatgctatattttttgtggacgagacgatcatactgtcattgtaacgtgtggtgtacgagacgatcatactgtcatggtatcgtggtggcgtattcatgtattaccagacaacctctaggccatagcaaattccatctatcctacaaccttatcagatccacgctgacttattacattacatgcttgtctttacgatcactagtacactacacccttctcgcggaattcaacatttttatattcaactt

SEQ ID NO: 5208 - DNA, 289 bp, Zea mays
  unsure (1)..(289): unsure at all n locations; Clone ID: LIB3137-049-Q1-K1-D9
accgggccgaccgcacgcgttcggcagaaccaacttgcccagaacaagactacagtatctcatcctgaactacattaatcggcttgtcgagcttcttccgagtccgatgttanaatcagctgttgactgtggcagtcttgcgtccatgcctgacattgctttcaccattggaggcaagaagttcaagcttaaaccatatcattacattcttaaggttttttaatgacatgctgttcaattcattatcggattcacagttattgatatcccaccaccccttggccctctc

SEQ ID NO: 5209 - DNA, 307 bp, Zea mays
  Clone ID: LIB3137-049-Q1-K1-E1
ccattgtggatttaaacttaagtggatttgagtttcaaatgctacctgacttttttggcaacatttgtttactttagtttttgagtctgtcaaaatgctcaaaacttgagctactcccccaatcatttggtcagcttgcatatttgaaaggtctggacctttcattttgttttgatcttaaacttccagagttctttaagtacctttcttctcttcagtttctaaatctatcacactgccataatgtagaatatctgccatcttttgaaaacttagtaatttggagtatcttaatttattacaatgt

SEQ ID NO: 5210 - DNA, 359 bp, Zea mays
  unsure (1)..(359): unsure at all n locations; Clone ID: LIB3137-049-Q1-K1-E10
gcgtccggccagtgggggctcnaaggccgagggaggtttggtaagcggcgggtgccgggccgcccgcgccggtccgaggccctcaccagtcaccaccccctcccctcttccgtctgtcccccgcttgccgccaccgccgctgcccgctcgcgatccttcccctttttaacgctcccgcggccccgcgtcgtgctcccttttgtcgccgctgccttcgtgcccgtactcgcgggttctcctcgctcctcaatctccgcgcctgggcgcggcgttcgccgccggatctgggcgcgggacggtgccccggacggtcgatggcgcgggtggcgctccggttgggcgcccgcgcgctcgcgggt

SEQ ID NO: 5211 - DNA, 431 bp, Zea mays
  Clone ID: LIB3137-049-Q1-K1-E12
ggcttctcctccccctccggttcgggttcgttttcgtgaggttctccggggttcgggggcgggggtgagcggatcgagatggcggcgtcggatgttgagtaccgctgcttcgtcggcggcctcgcctgggccacggacgaccactccctccacaacgccttcagcacctacggcgaggtcctcgagtccaagattatcctcgatcgggagacgcagaggtcccgcggcttcggcttcgtcaccttctccacggaggaggcgatgcggaacgccatcgagggcatgaacggcaaggagctggacggccgcaacatcaccgtcaacgaggcccagtcccgcggcggccgtggaggcggcggcggcggctacggtggtggccgtggaggcggcggctacggcggtggcgggcgccgtgatggcggcggcggcta

SEQ ID NO: 5212 - DNA, 376 bp, Zea mays
  unsure (1)..(376): unsure at all n locations; Clone ID: LIB3137-049-Q1-K1-E3
atggctagaggaacacctgcaaanatatcttttaatgtaccaatatttgaacctcatccgccacagtactatatacatgccatctcagactcatggctacatgctgaaacactcttcactgtttcttttcataattagacattgccacagacacaaataacacacacagaactcttggacttgaagcctcttccactgagtgctcttggcaacaaaacgtatgaggatctgtacagatttttccattttaacccgatacaaactcaggcttttcatgttctttatcacactgataacaatgtactcttgggagctccaactgggagtggcaaaacaatttcggtagaacttgcaatgcttcatcttttcagtacac

SEQ ID NO: 5213 - DNA, 417 bp, Zea mays
  Clone ID: LIB3137-049-Q1-K1-F1
tccccctccggttcggtttcgggttcgagaggttctccggggttcggtttcgtgggtgagcgcatcgagatggcggcgtcggatgttgagtaccgttgcttcgtcggcggcctcgcctgggccacggacgaccactccctccacaacgccttcagcacctacggcgaggtcctcgagtccaagatcatcctcgatcgggagacgcagaggtcccgcggcttcggcttcgtcaccttctccacggaggaggcgatgcggaacgccatcgagggcatgaacggcaaggagctggacggccgcaacatcaccgtcaacgaggcccagtcccgcggcggccgtggaggcggcggcggtgggtacggtggtggccgtggaggcggcggctaccgcggtggcgggcgccgtgatggcggcggc

SEQ ID NO: 5214 - DNA, 460 bp, Zea mays
  unsure (1)..(460): unsure at all n locations; Clone ID: LIB3137-049-Q1-K1-F10
ccggggcgaccgcacgcgttcgctccatttccttctgtctgcttgccttctattcctagcccgnaccggcgtccaccttggcggactccttcctcaccaaacacccacggcgcattggcgcttccacctcttatcgtacgaaggcgagcggctttcacggtgtctctctgtcgcatgcaatggcaccgctgtttgaggggcgcccaacagctgcctgcccacggcatgctcaggggcgctggggtcccttgccgctgtccctgaagtctagcctgggttgttgatcttgccgcagatgcggtactccattacttctccgcccgcgccatcatttcggccacacctcagtctgttggtcggtcgcacatcccttgccccgtcgagcttaatatgcaatccgttgcttgtgaaagtttcgatttattcacgttattacacaattcagtcgtcatgactgtca

SEQ ID NO: 5215 - DNA, 393 bp, Zea mays
  Clone ID: LIB3137-049-Q1-K1-F11
ccacacttcagtcttgtccggttgttccatctcagctaaagtaaaaccaccacccatggaggtgatcctgatcatcactcttttcccgacacaaagagagcaccaagaatcccctccgattcatcgacgacgaaggcgatggcgccgctaccgcaggccgtccacctcctcctcgccttcgccctcgcgcttggctgcctggtgggcggcgccaccgcgacggtggtgacgacgtgcagggcggcggcggacagcgacgcgcgcgtggactacgcgttctgcgtcgtcgagctgggcatgcaccgcgagagccccgacgccgacacctggggcctcgccaaagtggccgcgctgacgggcgtcaacaacgccgacaacgccgtgtacgacatc

SEQ ID NO: 5216 - DNA, 429 bp, Zea mays
  unsure (1)..(429): unsure at all n locations; Clone ID: LIB3137-049-Q1-K1-F2
cgtcagtccctcacacactcactatacactgctctgctgcagcaagaaggaagaagctagcgcgctgcctagctctcgttgtcagcaatggccaccaccgccgcgtccagcctcctcaagtcgtccttcgcgggctcccggttcctttcggccacgcgcaccaccaccccgtcgtccgtggccgtggccaccccgcgcgccggcggcggccccatccggccgtccatttcctcttcccccacccggccttacaacctgacgtccttccggttaagccccatcaaggagtccatcgtgtcccgagagatagacccggcgctacatgacggacatgatcacccacgcccacacccacgtggagatcgtgggcgccggttccgnggccctgttctgcgcgtacgatctgtccaaggaccccaccgagagcgt

SEQ ID NO: 5217 - DNA, 442 bp, Zea mays
  unsure (1)..(442): unsure at all n locations; Clone ID: LIB3137-049-Q1-K1-F3
gtttattgatgctagcaccatccctagtttttatacttttgacaagaaccctgacaaccagccattccttatgaaattctggcgaagctcagcccccaaggctatgctgtttttgaacttctccaccggaccttttgattctttcaagtctgcctactctgctgccgcggtggaattcaaggacaaggaaatcaagttccttattggtgacatcgaagccagccagggtgccttacagtactttggcctgaaagaggaccagacaccccttatcctcatccaggatggtgactccaagaagttcttgaaggttcacgttgaggctgaccacatcgncgcttggttgaaggagtactttgactgcaaattgactccgttcatgaagtttgagcctattcctgaggtcaacaatgagccttttaaggtggttgttgtttacaac

SEQ ID NO: 5218 - DNA, 416 bp, Zea mays
  Clone ID: LIB3137-049-Q1-K1-F4
cggggccgaccgaggcgtccgcccacgcgtccggttgattactatcatcaattttgtttggcaaaaaggggtgccacttctaggcggaagaccaatttctccccaacatcaatgaaagatgtaccatccaagtctcgatccagcagtgatcagcacacatatcttcaggttgatgctcttggaagagtatctttttcttccatacggaggcctcggtctcttcttgaagtcgaccatccttcatctgctgatggctctcatgatcagaagtccactgtgaggcccctggagaaagaaccaatgcttgcagcaagagtcactgttgaagacgccctttgccttgttcttgaggttgatgacactgaccgtctgttgcagtctagccagtcacaggacaacattttcgaactgaaacg

SEQ ID NO: 5219 - DNA, 433 bp, Zea mays
  Clone ID: LIB3137-049-Q1-K1-F5
tttccgtccgctgcattcctgctttttggttttcttggctctaagaccacagttgccgccgccggggccctaagccagggtgctgaggctttcgttggcctcttcgccggcagcgagcacccaccagcagttctgtagaaaatggctgatggtgaggacatccagcctcttgtctgcgacaatggcaccggaatggtcaaggctggttttgccggcgatgatgcaccaagggctgtattccctagcatcgttgggcgtcctcgtcacaccggtgtcatggtagggatggggcagaaggatgcatatgttggtgatgaggcacagtccaagagaggtattctcacgctcaagtacccgattgagcacggtattgtaagcaactgggatgacatggagaaaaatctgcatcacactttctacaatgaagctcgtg

SEQ ID NO: 5220 - DNA, 362 bp, Zea mays
  Clone ID: LIB3137-049-Q1-K1-F6
gagcagtggctgcctccaccatggcgatctcctccacggcgatggccggcacccccataggtgggctccttcggcgagggccgcatcaccatgcgcaagaccgtggggcaagcccaaggtggcggcgtccggcagcccctggtacggccccgaccgcgtcaagtacctcggccccttctccggcgagcccccgagctacctcaccggcgagttccccggcgactacggctgggacaccgccgggctgtccgccgaccccgagaccttcgccaagaaccgcgagctggaggtgatccactcccgctgggccatgctcggcgcgctcggctgcgtcttccccgagctgctctcccgcaacggcg

SEQ ID NO: 5221 - DNA, 449 bp, Zea mays
  Clone ID: LIB3137-049-Q1-K1-F8
cgtcagtccctcacacactcactatacactgctctgctgcagcaagaaggaagaagctagcggctgcctagctctcgttgtcagcaatggccaccaccgccgcgtccagcctcctcaagtcgtccttcgcgggctcccggctcccttcggccacgcgcaccaccaccccgtcgtccgtggccgtggccaccccgcgcgccggcggcggccccatccgcgcgtccatctcctcctcccccaccccgccctacgacctgacgtccttccggttcagccccatcaaggagtccatcgtgtcccgcgagatgacccggcgctacatgacggacatgatcacccacgccgacaccgacgtggtgatcgtgggcgccgggtccgcgggcctgtcctgcgcgtacgagctgtccaaggaccccaccgtgagcgtcgccatcgtggagcagtccgtg

SEQ ID NO: 5222 - DNA, 332 bp, Zea mays
  Clone ID: LIB3137-049-Q1-K1-F9
tgtcaagtctgtataaacggacaaggtatagtttggttctggcctgactacaaagctactggagcggtggtgaatctgtgattaccgcggatagacttatgaaaagaaatgccaaaccaactggtgtgactcttctcagagattgttccatgttcctcgttcatggcttaatccgacggggaaccttttgttgatatttgaggagtggggcggtgatcctactggaatttcgatggtgaaaagaacatccgggagtatttgcgcttatgtctcctaatggtaaccattgatggcaaactggcgaacaaaaggctatgagaaagccaaaatcc

SEQ ID NO: 5223 - DNA, 434 bp, Zea mays
  Clone ID: LIB3137-049-Q1-K1-G1
ggcgccgggaagccgcgccacgtcccttatttctatcaccggcacgccagcgtcctggaccgtgtcgtaggccaccgcgtcggcgaccacgagcctggcctcggagtcctccacctgcttcttgatctcggcggcgacggcgcgcgggttcacgccggagaagaccgctccggcggacatgatcccgaggctcaccacggggtacaccgccaggttcgggagcgcgaccaccacgacgtggcccctgcggacgccgatggaccgcagcgccctggcgaaccgcgccacgtcccggaccagctcgccgtaggtgtaggaccggccacccggcgcggcctccacgagcgccgtcttgtccgcgtaggcctcggcgtccgccagcacgaactccggcacggtgacgtcgtctggtacggccacgggcgggaaccggc

SEQ ID NO: 5224 - DNA, 435 bp, Zea mays
  Clone ID: LIB3137-049-Q1-K1-G10
cgccttcgctcgcgccgccgccgccgtcgctacgccccgcacctcgcttcatttcgtgtcgccaagatgacgaagcgcaccaagaaggcaggaattgttggcaaatatggaaccaggtatggtgctagcttgcgtaagcaaatcaagaagatggaggtatctcagcattccaagtacttttgcgagttctgtgggaagtttgctgtgaagaggaaagcagttggaatttgggggtgcaaggactgtgggaaggtgaaggctggtggtgcttacaccatgaacactgctagtgcggtcaccgtcaggagcacgatccgccgcctgagggagcagactgaagcatgatatagctctttatattattggggtttcctgtagttgctcttgtcaagcatgttgtggtcttgtgggggccttctctagtggaaatgtgga

SEQ ID NO: 5225 - DNA, 397 bp, Zea mays
  Clone ID: LIB3137-049-Q1-K1-G11
aaactaatgggcgtgtcacctgtattttcaatgcacagacctgctaaactctttcgtgcatggagagctctcggagcacctgcaaatgtgattatgttggcagtccaaggtatctttcggggattcaaggatacaaagactccggtgttttatataggtttgggcaatctttctgctgtagcccttcttcctctacttatatatggctttaagcttggcataactggtgctgcaatttctacagttgtgtcccagtacattattacagttcttcttatttggtctctaagtaaaagagctgttttgcttcctccgcgaatagatcaattagagtttggtggatatctaaaatctggtggaatgctgttgggaaagactctttcaattctgctaacta

SEQ ID NO: 5226 - DNA, 393 bp, Zea mays
  Clone ID: LIB3137-049-Q1-K1-G12
aacgaacacaagctctcgatctcaccgacaccgaggaagaagagatcaatggcgtccgagcggggagtcgtgatcgcgtgccacagcaaggctgagtttgacgcccacatgaccaaggcccaggaagccggcaagctggtggtcatcgacttcactgccgcctggtgcggtccatgccgcgccatcgccccactgttcgtcgaacacgccaagaagttcactcaggtcgtcttcctgaaggtggacgtggacgaagtgaaggaagtcaccgcggcctacgaggtcgaggcgatgccgaccttccacttcgtcaagaacggcaagacggtcgcgaccatcgtgggtgccaagaaggacgagctcctggccctgatcgagaagcatgccgcgcct

SEQ ID NO: 5227 - DNA, 471 bp, Zea mays
  unsure (1)..(471): unsure at all n locations; Clone ID: LIB3137-049-Q1-K1-G2
ccgggccgaccgcacgcgtccgtgctctcntccctagaaataaagcagcttctccgcggggcggcgaactactacccatggccgaagaccctagccccgatccggtcgaggagcactacttcttggcatggcgggcacccctagccaggcaagcctcctgctccagaagcagctcaaggatcttgcgaagaaccccgtggatgggttctccgcagggcttgtagacgatagcaacgtcttcgagtggcaggtcaccatcatcggcccgcccgacaccctatatgatggaggctacttcaatgcaataatgaccttcccccagaactatcccaacagcccgtcatcagtaagatttacttctgggatgtggcatccgaatgtttatccggatgggcgtgtttgcatttctattcttcatccacctggtgaacatcccagtggttatgagcttgcaagcgaacggtggacacc

SEQ ID NO: 5228 - DNA, 374 bp, Zea mays
  unsure (1)..(374): unsure at all n locations; Clone ID: LIB3137-049-Q1-K1-G3
cgttacactaacaatttggactccngcttttnattttccaaaaacancacatgctatgtggtcgcttatatcatcaatgaaatgctatcaccacttctttggtctggagtatcatcttcatttattcaacattcttcttgttccttatttcaatattgtaccaatgtaaaacaagatctttaatatatttcaatctacactttttttgtcatcaccttatacttccactgatgtttattatgctcctattttccctgtccttggacatgactatttccacaactttaactggcaatatactaacttttcctgatttgttccatcttaccctttaagaattacttaccctttttcaatcatcaagcacttctctt

SEQ ID NO: 5229 - DNA, 413 bp, Zea mays
  Clone ID: LIB3137-049-Q1-K1-G4
tgctaatcagctctgtgagcgtctccctagccccaatggcgagtcaactgttgattgccatgagagctcaaagatgccaaatcttgcattcaccatagcaaacaagactttcaccttaacaccagagcagtacatagtgaagctggagcaagcaggacaaactatctgcatcagtgggtttatggcatttgacgtaccgcctcctcgtggtcctctctggatacttggtgatgtttttatgggtgcctaccacactgtttttgacttcggcgagaacaggattggatttgccaaatctgcatgaagactggagttctgcgctttagtagcatgtccagtttgttatcccggtattgtacatatatatgttgccaactggtgtaatctgcagtgtttaatagtatatattcatg

SEQ ID NO: 5230 - DNA, 330 bp, Zea mays
  unsure (1)..(330): unsure at all n locations; Clone ID: LIB3137-049-Q1-K1-G5
gaccacgcgtccggtgaaggagctcaagaacggccgcctcgccttgttttccatgttcgggttcttcgtccaggcgatggtcaccggcaagggcccgctcgagaacctcnccgaccacctcgccgaccccgtcaacaacaacgcatgggcctacgccaccaactttgtgcccggcaagtgagggggtcggaggcgccaccgcccaccggccaccgctgcggatatctaggtgttcggatgcacgtgagcgcgcactggttccagtttgtaccatgatgtaaattacttaccgtaccagggttcaatcggcaaggaagaattgttgtgttt

SEQ ID NO: 5231 - DNA, 395 bp, Zea mays
  Clone ID: LIB3137-049-Q1-K1-G7
atactgcctgacaataatggctggctgttcttgtaatctcaaaaggatatgtcacactgatcttggattggtctcccaatgctgtctgactaaacatgttttcaaggcgaacaagcagcagtatcttgcaaatgttgccctgaaaataaatgttaaggttgtgggaaggaatactgtacttgttgatgctttgtcaaggagaatcccccttgtcagtgacgtatctactattatctttggtgctgatgtgacccatccccatcctgtggaagattctagtccttccattgcagcttttgttgcttttcaagactggcctgaggttactaaatatgcaggattagtgagtgctcaaacccatcgtcaagaattgatacaggatcttttcaacgtac

SEQ ID NO: 5232 - DNA, 434 bp, Zea mays
  unsure (1)..(434): unsure at all n locations; Clone ID: LIB3137-049-Q1-K1-G8
cggggccgaccaacgcgtcggcccacgcgtccgattaatcacccactctactacttgaagttactaccagcagcttgcttcagcgggggaagagagcgagaggatggcgtcaccgaagccctcgtcggcggccctgctcctcctggcggcggcggccgtgctggcgctggcgcgcgcggacctgacgcacgacaactgcgtgaagaacaagaaggtgacggtgcagaacctgtgcagccacgacgtgacgctgacgctggagccgctggccaacagcccgccgctgttcgcgggcacctacacgctgcacccgcgcagccacgccgagttccccgtgtgctggtggacggggcgcctgcgcgcgcccgacgccgnccaggtggagttccacgtcggcgtcgacggcggctccttctacctggcccccaacgcgc

SEQ ID NO: 5233 - DNA, 425 bp, Zea mays
  unsure (1)..(425): unsure at all n locations; Clone ID: LIB3137-049-Q1-K1-G9
gngctctcggcgggctgcagcgagcagcaagccgccgagcacagggtgccgccgagcagccgagccgccgccgagcacagggcgccgccaagcagccgagccaccgttcgagccgccctgccaccgccgagcgtcgagtcttctctgacaatggggaactttcatgatagggagcaaatgtaccttttccaacaacaagaccaacttgttcccacgtgagactgtggaattgctccagcttggcgaaattcaataccaatgcaacaggaaggaaaaacaacatattaaagagtcccaggaatcccagaaactgagccatgctcacttgtccttgaccttctttctcatcgggcaacttttttcgaatcaaggtgatatacacagcatataaaccggcagaaacaatggataggaaatctccgaga

SEQ ID NO: 5234 - DNA, 377 bp, Zea mays
  Clone ID: LIB3137-049-Q1-K1-H1
gcccgattggcgatttaagtggtgggggagggaaggccgatggtcagtgaaagagaggtagggggccggacggtggtggcatcgccaattcaactccgcatctgcatcggcactcggcagcgcgccagctccatagtgtaggaggaggagatggcgctcacaagaatcggtcttgctggccttgcggtcatggggcagaaccttgccctcaacattgcagagaaagggttccccatctctgtgtacaacaggacaacctccaaggtggacgagaccgtgcagcgtgccaaggcagaaggaaaccttcccgtctacggcttccatgaccccgcgtcctttgtgaactccattcaaaagccacgggtggtgatcatgct

SEQ ID NO: 5235 - DNA, 370 bp, Zea mays
  Clone ID: LIB3137-049-Q1-K1-H10
acgcgtccgcttgtagcatggatcatgggagtccttatgtatcttgatttcaacttgcttgagacgggggggttgtttcttgcaatattagtaacggccttcacgctccaggatggatcatcacattatctgaagggactgctgcttgtgttttgctacattgtcatctccttatgctttttcgttttgagacagcatggaaatggaagcaacgatgatcagctgggtgtagcaagcaagccatggaggatttagggcgcctgagctggcagtagtttctcaacaagtagcgtggactttggtttgcacgattttgcatggaacactggaggggagacccgtgaaagttgactaaagtatgtagactgcg

SEQ ID NO: 5236 - DNA, 321 bp, Zea mays
  Clone ID: LIB3137-049-Q1-K1-H11
cgcctcttcctcctcttcctcctcctatctacattagcgcctgctccccttcgtctgtggtcaggtcttgcagcagcggcaagtgcaactgcggctccagctgctcctgcggcagctcatgcaactgcatgtcccctgacgtggagaccgccgccgccagcagcatcaagaccatggtcctcgctgcgccgaccaccaaggccagcgccggcggcttcgaggcggccaccgagggcggcggctgcgactgcaacacctgcaactgcggcaccagctgcggctgctcctgctgcagctgcaactgacccggcccgcccggcc

SEQ ID NO: 5237 - DNA, 242 bp, Zea mays
  Clone ID: LIB3137-049-Q1-K1-H12
cgggtcgacgacgcgtgcgcaacatcttccccaacctcgtacgatccggctgcgagatccaacgacctccgcacgggagtgccattagagatgcctctagggaagagatccacacgactatcctagaaatccgaagcggcctcctcgctcggcaaattctccgccgacgacagggagaaggtgctcactgccgttggagtacacacgacgatatctattgcacaacctacttcccagataca

SEQ ID NO: 5238 - DNA, 307 bp, Zea mays
  unsure (1)..(307): unsure at all n locations; Clone ID: LIB3137-049-Q1-K1-H2
ccggggccgaccgcacgcgtccggaccatctcattcatctgatcgtcagcacctttttttatgataatgagcanngcctgtcctccggcggtcgcgtgccttgccatactgcagcggggcagcacacgctcggcgcccgccatgtgcgcagcgccgcagcatgctgagcggtgaatggcggcggcgcggccaccagctgctgcactgccggcccgccggctgttcgagtgtcgggaggaggccgggcggtggcgcggtggtggtgagggccgggcctgggccacttgtctgagatcgagccggacct

SEQ ID NO: 5239 - DNA, 409 bp, Zea mays
  Clone ID: LIB3137-049-Q1-K1-H3
ctgcagatcccgaccatcaacgtcgtcggatcgctcgtgaaatcgggcatccgagttctcgtgtacagcggcgaccaggactcggtgatccctctgacgggcagccggacgctggtgcagaacctggcgcgcgacatgggcctcaagaccaccaccccgtaccgggtgtggttcgaagggcagcaggtcggaggatggacgcaggtgtacggaggcggcgcgctgtccttcgccaccatcaggggcgcctcccacgaggcgcccttctcgcagcccgggcgctcgctcgttctcttcagggcgttcctgcagggccagcctctgcctgaaaccttctcgtgatcagggtgcccgatgcagctccttctgcaggtggggtggggggttttgcactgtagtaatctgtaag

SEQ ID NO: 5240 - DNA, 331 bp, Zea mays
  unsure (1)..(331): unsure at all n locations; Clone ID: LIB3137-049-Q1-K1-H4
agggccgacccagagcgtccgtagccggcggatctccgcgggcggcagtcattagtggaggcgtggtcgcacgggcgaggtggcaaggggagaggctcanagagatggggcggccttacgcggtgaaggggcggaagaagaagcgcaagctcgaggaggcggcggcggcctcggacgctgccccgcccgtcgaagaagcggaggagctgccaccgccagaggtgagaagcggcgaggaaaagagcagcgaggaggatgaggcagcagcgggggaggaggagcacgcggcggcggacgggcttccaatcctacccaagacggttgatgggaa

SEQ ID NO: 5241 - DNA, 414 bp, Zea mays
  unsure (1)..(414): unsure at all n locations; Clone ID: LIB3137-049-Q1-K1-H7
gccaccaaaccggccgatggaccgatggtaagctatgtcgaaggtgacatgttcagtttcattccacctgctcaaactgtcgtgctaaagcttgtgctgcaccacctgaccgatgaggagtgcgtcaagctcctggctcaatgccggaaggcgattccttcacggaaggatggcgggaaagttataatcggtgatattatgattgaccactctgggcctatgctggaaactcacctcctgatggacatcggcatgatgaccatgacaaaaggacggcagagagatgaaaaagaatggagcgagctcttcaccaaagcagggttcagcgaatacaagatcctgaaagaatttggagctcgtgttgccttcgaagtctatccgtgagatngcaccttgactatacatatatattta

SEQ ID NO: 5242 - DNA, 267 bp, Zea mays
  unsure (1)..(267): unsure at all n locations; Clone ID: LIB3137-049-Q1-K1-H9
ggcgaccacgcgtncagggagtgctatataacacctgaaaagcttttcagttcaaaggtgaaagaaacttgctctggtgcgggcactctcagacagctgaccctagatcccatttgctgggacaggcacacgcaaagcatgctacacaagtacatatgcactgctctacgcgctgcagacatgcatctcattgacggtgataacccgaacttatgcatacttgagggccactgagagtgaattatgcttataacgaaagtgtaccta

SEQ ID NO: 5243 - DNA, 61 bp, Zea mays
  unsure (1)..(61): unsure at all n locations; Clone ID: LIB3137-050-Q1-K1-A1
atgcaancttnagtattctatantgtcacctaaatanctttnctaaggattnttataaata

SEQ ID NO: 5244 - DNA, 305 bp, Zea mays
  unsure (1)..(305): unsure at all n locations; Clone ID: LIB3137-050-Q1-K1-A2
gcccgagcagaacggcaagacgcacttcgactccggcgacgagcgcgccaaggagttctcggggctgctcaagtccaacgaccccgtgggcttcaacctcgtcgacgtcctcgcctggggctcgctcggccacatcgtcgcctactacatcctcgccacctcaagcaacggatacgaccccaacttcttctgagcggccggctgcgggcatgttcttgagcctgcctgtattctactccgngtgtgtnnagccatatatctgatgctcaaggattggttaatttgaacaagtggtgcaactgcgc

SEQ ID NO: 5245 - DNA, 388 bp, Zea mays
  unsure (1)..(388): unsure at all n locations; Clone ID: LIB3137-050-Q1-K1-A3
ctattctccagtccacccattccattccactaccgacgcccagaattcacgcgaacgcacacgcacccacacgacacatccagatgatgcttagggtttccccgtccccggccgccgcggtgccaacccagctctccggtgcgcccgcgacccctgctcccgtcgtcagggtggcggcgccgcgcggagtcgcctcgccgtccgctggcgccgcgtgcagggccgcgggcaaggggaaggaggtgctcagcgggntcgtgttccagcccttcgaggagatcaagggggagctcgccctcgtgccccagtccccagacaagtctgttgtgcgccacaagttcgtcgatgactgcgaggccgccctcaacgagcagatcaacgtggagta

SEQ ID NO: 5246 - DNA, 374 bp, Zea mays
  unsure (1)..(374): unsure at all n locations; Clone ID: LIB3137-050-Q1-K1-A4
acaagcacaagcgcactctagcaatggcttctgtggttgtccgccctagcgacgccgagctaggaaaggcacaagccgacatatggcggctcancctctcctacctcacgcccctgtcactgaggtgcgccgtggagcttggcatccccacggcgatctaccgccatggcggggctgcctcagccgctgagctggtcacggcgctgtctctcccctccactaagctgccgttcctcccccgcctgcnacggctcctcgccgcgtcgggcgtgttcaccgtcgacaagcagagcacggaggaggagcgnttcctcatgagtcccgtgtcctacttgctggttgacggcatccctcacgaggaccacatgaaccac

SEQ ID NO: 5247 - DNA, 308 bp, Zea mays
  unsure (1)..(308): unsure at all n locations; Clone ID: LIB3137-050-Q1-K1-A6
cgtccgattgctggagctggtcaccttcatcttgagatttgtttgaaggatctgcaggaggacttcatggggggggctgaaattattgtttccccacccgtcgtctccttccgtgaaacggttcttgagaagtcctgccgtactgtcatgagcaagtctcccaacaagcacaaccgtctgtacatggaagcgcgccccttggaggagggtctcgctgaggccatcgatgacggccgtattggcccacnngaggaggcgaaggggcgctcccacatcctctctcaggagtttgggtgggacaaggacct

SEQ ID NO: 5248 - DNA, 385 bp, Zea mays
  unsure (1)..(385): unsure at all n locations; Clone ID: LIB3137-050-Q1-K1-A8
cggaactgactagaactagtacgtagatccaacactcgggacgaaattaaaagagacgacgcacatcaaccagcaggcatcgcgcggtcaccaccatggcggcgcaggagggcggcatgaggctggtgtcgcacccgatcgcggcgcacgacgggcggctgccgcggcagtacacggcggaggggcagggcgccaagaaggacatgtcgccgccgctggagtggtacggcgtgcccgagggcgcgcggtcgctggcgctgctggtgcaggacatcgacgccgaccccagcgtgccgtggacgcactgggtggnggccaacatcctcgccgccaccagggggccttcccgaggggttctccggcgccgcgggggcgggggcggggg

SEQ ID NO: 5249 - DNA, 206 bp, Zea mays
  Clone ID: LIB3137-050-Q1-K1-B1
ctactacgtatatccatttctttctactaaattaagagagacgacgcggggtggccagcatgcatcgtgcggtcaccaccatttcagctcacgagggcgtcatgaggctggagtcgcactccatcgcggcccacgaccgtcggttgccgggtcagtacactgcggcagggcacggcgccaagaaggacatgtcgccgtcgctggag

SEQ ID NO: 5250 - DNA, 374 bp, Zea mays
  unsure (1)..(374): unsure at all n locations; Clone ID: LIB3137-050-Q1-K1-B10
gaaaaacggcccgacggacgcgtccggtttagaacctctaaaatttcccccactcgctagtcgcagcagcacctgnagcagccatggggggccatttaaccgggagcaaggggaacaatcatccagccggtcgcaaggcaagcggccccaggaagaagtcggtgacgcggtccgtcaaggctgggctgcagttccccgtctgccgcatcgggcgctacctcaagaagggccgttacgcgcagcgcgtgggcactggcgcccccgtctacctcgccgtcgtcctggagtacctcgtcgtcgaaagtcttggaattggcaaggaacgcggcgaaagacaacaagaaaactcgcattatcccgcgccacgtgctcct

SEQ ID NO: 5251 - DNA, 473 bp, Zea mays
  Clone ID: LIB3137-050-Q1-K1-B11
cgatggacgggcggaaggacggggtggcgcgggaggtcatccggatggaacgggaggccgtgatccccatcctcaagcccaagctcgtcatgcgcctcgcgtatctcatagagcatgaagctgatcggaacgagttcctgaagctgtgcaagaaggtggagtacaccatccgggcctggtacctcctccagttcgaagacctcatgcaactgtactcactgtttgatcctgtttctggtaaggagaggttacagcaacagaacctgacgccggaggaaatcgagaccctcgagttcaatttcatgacatatcttttccaggtgatggaaaagagcaacttcaagttgctatcagatgaagagtttgatattgcgcaatctggaaaatatttgttgaatcttccgatcaaagttgatgaatctaagctagacaagaagttgttgacaaaatattttaaagagcacccacatgac

SEQ ID NO: 5252 - DNA, 267 bp, Zea mays
  Clone ID: LIB3137-050-Q1-K1-B12
gaaaacccggccgaccgcacgcgtccgatatggactctccctcattctgtgtggcgctttaaaggcaaccggacggaacgcctccccagtgcggcctatcaccaagggccacagctccatgcacctcgcccatctcatataccaactacacccatgccaatactcctctgagctcatggccccagccgagctacatcatctcttctgcagcacacgtcttgctccctaacatgtcacgcacccgtactcacagctcaccctgccctc

SEQ ID NO: 5253 - DNA, 376 bp, Zea mays
  unsure (1)..(376): unsure at all n locations; Clone ID: LIB3137-050-Q1-K1-B3
tgtcgatccaattgtcacttgctctccctccaacaagctaattaaggccggtcatccctcttctagctcgtttcattatccatggcggaggagaagcaccaccaccaccacctgttccaccacaagaaggacgaggagcaggaggagcagctcgccggcggcgggtacggcgagtccgccgagtacacggaggccacggtgacggaggtcgtgtccacgggcgagaacgagtacgacgagtacaagaaggaggataagcagcacaagcacaagcagcacctcggcgaggccggcgccatcgccgccggcgccttcncactctacgagaagcacgaggcaaagaatgacccggagcacgcgcaccggcacaagatcg

SEQ ID NO: 5254 - DNA, 309 bp, Zea mays
  unsure (1)..(309): unsure at all n locations; Clone ID: LIB3137-050-Q1-K1-B4
cgtccgggtgtgattggagctgcagtnggngttgatgttttcaataggatgaagtacaaggacaacatgggtgcctcaactccacaggtcgcgacatctgacatctggattcagacagctagagagatgccaccattgcaggttccttcatattacaacataccaggtcaagcaacacctggtgcttttgtgccaaatccagcaaatgcatctttcaatgctacatctcaatcccctcatgctcnttttcttanncttgtaccatcctcagcaacctccctctattgtaagtccgcaccccatggtgca

SEQ ID NO: 5255 - DNA, 378 bp, Zea mays
  unsure (1)..(378): unsure at all n locations; Clone ID: LIB3137-050-Q1-K1-B5
ctctcatgcgagacggtgcggaagggcttcttttctgctggcgcggccttcaccttgtggaggggcatcctgggcgaggtgtactacctcagctactccaaatcccgagatgccgctggtggtgctggctccagcattggcatgggcccttacaactaaaggagcttgatcgaggcaggcaggcagcccccgtgttatcaactctgctttggtggaggaatgcaatgttctttttaatattacattaggnacggtgtaattggctgttggatccgcggttattgtgttctctctaggttctaggattaaaaatatttttttgaagagnatactgtttggattattgggctggatcctcgtaatgtggatacacgatat

SEQ ID NO: 5256 - DNA, 311 bp, Zea mays
  unsure (1)..(311): unsure at all n locations; Clone ID: LIB3137-050-Q1-K1-B6
ggcgccgcaggctgacgaggaggcggagtagagtgttttggactacctcgacacctccactgcaaccggggggtatctcacgtgattcgatgcacaagcgccgggccaccggtggaaagcagaagacgtggcgcaagaagcgaaagtatgagcttggccgccagcctgctaacaccaaactgtctagcaataagacagtgaggagggtccgtgtccgtggaggcaacgtgaagtggagggctcnccnattggnnacaggtaactactcgtggggaagtgaggctcttacccgcaagacccgcatcctggat

SEQ ID NO: 5257 - DNA, 383 bp, Zea mays
  Clone ID: LIB3137-050-Q1-K1-B7
cgagaacacgatcgagcacacaagcacgaagtctcgtttaggagaaaccacaaaccaccaagccgtgcaagcatcatggagtacggtcagcaggggcagcgcggccacggcgccacgggccatgtcgaccagtacggcaacccagtcggcggcgtcgagcacggcaccggcggcatgaggcacggcacgggaaccaccggcggcatgggccagctgggtgagcacggcggcgctggcatgggtggcgggcagttccagcctgcgagggaggagcacaagaccggcggcatcctgcatcgctccggcagctccagctccagctcgtcggaggacgacggcatgggcggaaggaggaagaatggaatcaaggagaagatcaaaga

SEQ ID NO: 5258 - DNA, 309 bp, Zea mays
  unsure (1)..(309): unsure at all n locations; Clone ID: LIB3137-050-Q1-K1-B8
gtgggttggcttctcctccccctccggttcgggttctggttcgtgaggttctccggggttcgggttcgtgggtgagcggatcgagatggcggcgtcggatgttgagtaccgctgcttcgtcggcggcctcgcctgggccacggacgaccactccctccacaacgccttcagcacctacggcgaggtcctcgagtccaagattatcctcgatcgggagacgcagaggtccctcggcttcgtcncnacaccccctccacggaggaggcgatgcggaacgccatcgagggcatgaacggcaaggagctggac

SEQ ID NO: 5259 - DNA, 392 bp, Zea mays
  unsure (1)..(392): unsure at all n locations; Clone ID: LIB3137-050-Q1-K1-C1
cactccgcttcatcttccgctggatccctagtctactccggcctaacgccttgggacctccgctgctgttctctcgccggtcatttttggttcaggggctgatcgcttgatcggatcggtgtcgcagccctatacatcatacatgacgacgcccggctcctgtcctgcgacaaccgccgccacccaccctcccatgtgcgccgctagcgccgcaggtggatcgcaaaaaatggtgcgtccgcgactagtgctcttcggggactccatcaccgagcagtccttccgccccggtggctggggtgccgcactggctnatacctactcgtggcaggctgatgtaggttggcagaggctatggtggatacaacacaagatgggctcttttcttaata

SEQ ID NO: 5260 - DNA, 227 bp, Zea mays
  Clone ID: LIB3137-050-Q1-K1-C2
agctagcattacctctccttcacctcattattttcaccatctcgaacactcccacctgcgaggggggcctttatcaagtacacccagcagctgaacatgcgccccaaccgctccattccctactgcatccctatgcgcactgacaacaccatcatgtacaacgccaaccgcaggcactggcgccgcaccaacctcatcttctgcgcctccccattggtccactactg

SEQ ID NO: 5261 - DNA, 178 bp, Zea mays
  unsure (1)..(178): unsure at all n locations; Clone ID: LIB3137-050-Q1-K1-C3
atcgctctgtcctgcgaggggggccgttcgctcctcctcccagcatctggtcgcggcggcggcggtcgcggtcctggcagcggcgctgctgctgctggcggcggtggccgggacggcgtcngcggcggngagctgcggcgaggtgacttcgtgggtggcgccgggcctcgggtacgcg

SEQ ID NO: 5262 - DNA, 391 bp, Zea mays
  Clone ID: LIB3137-050-Q1-K1-C4
cagcgttgccatcgtgtgggggatgcctgaaggggctgtctacctgtggactctgcccatgttccattgcaatggttggtgctacacttgggcgctggcagcgttctgcggaacaagcatatgtcttcgccaggtgagcacaaaagctatatacgaaggcatcacgaagcaaggagtgacgcacttctgtgccgcacctgtcgtccttaacaacctgatcaacgctccggcaagcgagaccttcctgccgctgccccacgtcgtcaatgtcaacgtggccggagccgcccccacgccgtccctgctgggcgcgctgtccatccgtgggtttcgcgttacgcacacgtacggcctgtcagagacgtacggtccctcgacggtgtgcgcgtgg

SEQ ID NO: 5263 - DNA, 382 bp, Zea mays
  Clone ID: LIB3137-050-Q1-K1-C5
agctagcgttccctcttcttcacctcactaacaccagcagctcgatcgctctgtcctgcaataatggccgctcgctcctcctcccagcagctggtcgcggcggcggcggcggcggtcctggcagcggcgctgctgctgctggcggcgggggccgggacggcgtcggcggcggtgagctgcggcgaggtgacgtcgtcggtggcgccgtgcctcgggtacgcgatgggcagcgcggcgtcgccctccgcggcgtgctgcagcggggtgcgctcgctcaacagccgcgcgtcgtcgacggcggaccggcaggccacctgcaactgcctcaagagcatgacgggccggctcggcggcggcgtcagcatggccaacgccgccaaca

SEQ ID NO: 5264 - DNA, 382 bp, Zea mays
  unsure (1)..(382): unsure at all n locations; Clone ID: LIB3137-050-Q1-K1-C8
aaattttgcgaagaacgcccttgtgaaaccagttactgtcaatgtgggaagagctggagcagcaaatgtagacgtcattcaagaagtcgagtatgtaaaggaagatgctagaattatatacctccttgaatgcctccaaaagactccacctcctgttctcattttttgtgaaaacaaggctgatgtcgactacatccatgagtaccttcttctaaagggagtggaggctgttgctatccatggangaaaagatcaagaggagagacagaacgcaattgactccttcaagactggtaggaaggatgttctggnngcttctgatgttgcatcgaaggttcttgattttcctgacattcagcacgtcattaactatgacatgccc

SEQ ID NO: 5265 - DNA, 376 bp, Zea mays
  unsure (1)..(376): unsure at all n locations; Clone ID: LIB3137-050-Q1-K1-D2
agagcctccaaaacctcgcaacaaccttttgttacccacacccatccgccctgccccggcgcgcgctccctaccaaccccgacgagcgccaacnaccggcacggtgtccaagctggcagcgccccggcctgcggcgccaccgctccggccggcgttcgtccgcgccgccgcaatcgccttcgacccctccccgcgccgggtccgcgtctacggcgccgggcgggccaggatcccctncnttgtttgnatagcttctgccaaggaaggaaatggtgcaccgaccaagaaaacctcgcttcacgatcnnaaggtggtgtaaggcacttttcccgttgtaaagagaanacctctgccgaccttgtcaccagactttgct

SEQ ID NO: 5266 - DNA, 377 bp, Zea mays
  unsure (1)..(377): unsure at all n locations; Clone ID: LIB3137-050-Q1-K1-D3
agagcctccaaaacctcgcaacaaccccgtgacacccacacccatccgccctgcccctcctcgcgctccccaccaaccccgacgagcggcgatgaccggcacggtgtccaagctggcggcgccccggcctgcggcgccaccgctccggccggcgtccctccgcgccgccgcaatcgccttcgccccctccccgcgccgggtccgcgtctccgtcgccgggcgggccaggatcccctccgtcattgcgatggcttctgccaaggaaggaaatggtgcaccgaccaagaaaacctcgcttcacgatctctacnagctccagggcctctccccgtggtatgacaacctctgccgacctgtcaccgacttgctgcccctta

SEQ ID NO: 5267 - DNA, 424 bp, Zea mays
  unsure (1)..(424): unsure at all n locations; Clone ID: LIB3137-050-Q1-K1-D4
cgtgacgccacccgcccatcggctacacaccataaccggaacgttcctgccaccccgggggagcggctcacttgctgccgtcgccgctcggacgatggactggtacgcgtggctctgcagggtggggctgcacccggacgtggccttggagtacgcgctgctcttcgcgcgcaaccagctcggcgccgccgacgtgcgccacctggaccacgagttcctcctcagcatgggcgtcgccgncgccaaccaccgcctcgagatcctcaagctcgccagaaaggagtcgttgtcgtcccaccgcaaggccnccgccatcgtcgtctgtctgccgtggcgcgccaccaggctgctcgccgcggcggtgcaccggtccgcgcgctcggcgctcgggcgccttcgcgcctgtcgggacctgaaccgggag

SEQ ID NO: 5268 - DNA, 378 bp, Zea mays
  unsure (1)..(378): unsure at all n locations; Clone ID: LIB3137-050-Q1-K1-D6
gtcccagcagcagcaagccaaaaccctagcatgcaaaccaccggagcagcggcgcttgcgcgggcggagtcatggcggacgacgattacaacgaaatcgacatgggctatgaggatgagcctccagaacctgagattgaggaaggggccgaagaagagcttgagaacaacgaagatgcccctgatgatgtcataggtggagagggtgaagataaggaacaggaaaagaccaagcgtgagcgcnaaacaacaaaatatatgacgaagtatgaacgtgcgcgcattcttggtacacgagccttgcagataagcnngaangctggagtcatggttgagcttggagggagaaactgaccctcttgagattgcgatgaaggag

SEQ ID NO: 5269 - DNA, 303 bp, Zea mays
  unsure (1)..(303): unsure at all n locations; Clone ID: LIB3137-050-Q1-K1-D7
agcctccaaaacctcgcaacaaccctttgtttcccacacccatccgccctgcccctggtggggctccccaccaaccccgacgagcggctatgaccggcacggtgtccaagctggcggcgccccggcctgcggcgccaccgctccggccggcgtccctccgcgccgccgcaatcgccttcgccccctccccgcgccgggttcgcgtcttcgtcgccgggcgggccaggatcccctgggtanntttttgncttttgccaaggaaggaaatggtgcaccgaccaagaaaacctcgcttcacgatct

SEQ ID NO: 5270 - DNA, 236 bp, Zea mays
  Clone ID: LIB3137-050-Q1-K1-D8
ggagaagcaccaccgcgactggaccctttggttctgctgcggatccctcgccaactgcgggcggacgcttgccgccgtcagcgagcttcatcatgctcggcatctacctggcgctgtgcccctccaagccgcccttctacctgcaggactgtgcagctgcgctccatagacctaagggacgcaggactctccatggacctacacgagaccatcgattcacaccttcttaacgagcg

SEQ ID NO: 5271 - DNA, 405 bp, Zea mays
  unsure (1)..(405): unsure at all n locations; Clone ID: LIB3137-050-Q1-K1-E10
aaccaaaccaaacccttttcgtgccgccgtctccgactcctgctccgtccgagcctaccacgcggagggcaagggcttgatccagccgcgtgcgagcctgaccgcccagttagacgatgagccgcagcctcggtatcccggtgaagctgctgcatgaggcggcgggccacgtcgtcacggtcgagctcaagaccggcgaggtctaccgcggctccatggtcgagtgcgaggacaactggaactgccagctcgaaaacatcaccttcacggcaaaggacggcaaggtgtcgcagctggagcacgtcttcatcagggggagcagggtcaggttcatgattatacccgacatgctcaagaacgccccaatgttcaagcgcctngaggccaggattaggggtaaaaggc

SEQ ID NO: 5272 - DNA, 249 bp, Zea mays
  Clone ID: LIB3137-050-Q1-K1-E11
acccttttctttccccgaatcaaccccgcaccaccgacctaccaccgagatttttaaaatgattcagcgccttcccaaccttaccaccaaaatactattatcctcagtctcttatccctatgaaccttctccattattcatttttccactttttctcattctatctcaataccaactacttctacctcatattccaatctctatttcaattacaactttaaactaccatctataaaacattaccatcac

SEQ ID NO: 5273 - DNA, 456 bp, Zea mays
  Clone ID: LIB3137-050-Q1-K1-E12
aggggagagagagaggtttaaggccaagatgtggcttcctctccccccattctccaatccgtggcctagtcgagccagccgcgaggaaggaggcgtctcgcctagcgcccgcccgtcggccgaccttctgctgcaccttcgaactctggaaagatcatagatttttgggcaatagcaagtggacatggaaccatcctctcagcctcagcctgcgatgggtgtcgccgccggtgggtcacaagtgtatcctgcgtctgcctacccgcctgcagcaacagtagctcctcctgctgttgcatctgctggtttacagtcagtgcaaccattcccagccaaccctgcccatatgagtgctcagcaccagattgtctaccaacaagctcaacagttccaccaacaagcttcagcagcagcaacagcagcagcttcagcagttctgggtcgaacgcatgactg

SEQ ID NO: 5274 - DNA, 464 bp, Zea mays
  Clone ID: LIB3137-050-Q1-K1-E2
gtgcagtgcagtgcagcagtgtgctacctcctcagtcctctcactccatcacaaacgctagtcttcctctaaagctcggagcgagtctcagaagcgatggcgtccaagaggctgctgctggcggcgctgtgcgtggtggcggcggcgctgctcgccgtgcggtcggaggcccacggcctggaggacttcgcaagcagcgacgcgacgccggagatgcagaccttcttcaagcccgaggccgcggcgctcccggaggccctggacgcgtcctccatgcccgccgccaccatggccgcgaagccggaggccacgtctatcccgaccaccaccaccggcaccacggcggcggcggcgggcacctccgccgcggcaggcactactgctgcgtcgccgccgcgcaagttcgtgttcgtggccgccggcgtggcctgcggcgtggctgccgtggccgtggtcggcatcgc

SEQ ID NO: 5275 - DNA, 296 bp, Zea mays
  unsure (1)..(296): unsure at all n locations; Clone ID: LIB3137-050-Q1-K1-E3
cggacgcgtgggcggacgcgtgggttcttcctttcgccgtgcttctgcttcctccgccgccggggccggcatggctgcgcgctgcccctacttcgccgtcgaggagtcctcccgcggcatccgctcgggggagtccccggccgcggcgctccgccggatcctcgcgacgcctggtgcgcaccaggcgccctgctgctacgacgcgctcggcgcgcgcctcgtcgagcgcgcggagtttccnatcgganncatgggcggtttctgtgtatctgccgcgcgacttggcttgcctgatg

SEQ ID NO: 5276 - DNA, 372 bp, Zea mays
  unsure (1)..(372): unsure at all n locations; Clone ID: LIB3137-050-Q1-K1-E4
gaaagaaggaaaggttgaagcttggggtgtgttgccttatgatttggaagatactgacagtgcttgcaaaagcctcgtgcgcaagggctttgtccgtatgtctgatattaagttcccccttacgtaccgtccagattcttttaatcttgttgcggtgtcagatgctttagattatctgaccccaaggtatctgaacaaaacacttccacatttatcaagggtttccacagatggccttgctattttngctggcaacccacgtcagcagaaagctaacgtctcagaactaccaaaatttggaagaccggcatanatgtcgagttcttcatggttgacacggtactttgttcaaaccggcttgacagagaacta

SEQ ID NO: 5277 - DNA, 385 bp, Zea mays
  unsure (1)..(385): unsure at all n locations; Clone ID: LIB3137-050-Q1-K1-E5
gaaggcccccgccgctcaaactaccggtgccctatcttcttcgcctccctttcctcctcagcaccccaaaccccgaccttcagggttccgccgccatgccgcagggagaccacatcgagcttcaccagaagcgccatggcaagcgcctggaccacgatgaacgcaagcgcaagcgcgaggcgcgcgaggtgcacaggcgctcgaaggacgcccgcaatttgattggtgctaagggcaagaggttcnccaagaaacgctatgctgagaaggcacagatgaagaagaccctgaaaatgcacgatgaatcaaataagcnacttaatgttgatgatgatgtccaagagggtgctcttcctccgtatctactcgatcgtgatcagacaca

SEQ ID NO: 5278 - DNA, 384 bp, Zea mays
  unsure (1)..(384): unsure at all n locations; Clone ID: LIB3137-050-Q1-K1-E6
cgacgacctcacagcgcacagcgcagttgtgtgttgttgtttgcttcttcgctcgacatgggcgcgggaggcgtagcgctggtcgccgccgccctcgccgtggtgttggtgacgaggctgtggacggcgctggcccacctggtgtggcggccgtacgccgtcgcgagggcgttcgcgcggcagggcatccgcgggccgccgtacagggtcttggtgggcaacggcaaggaggtccaggctattcttgcggcnacgagcggcgacacgctggacctcgcctcccacgactacatcgcgcgcgtgatgccgcannaccgcgcgtggttgtcgctctacgtgaaggggtgtcctgacgtggtccggctcgactccggcgctgttcgt

SEQ ID NO: 5279 - DNA, 381 bp, Zea mays
  unsure (1)..(381): unsure at all n locations; Clone ID: LIB3137-050-Q1-K1-E7
cggacgcgtgggggcgagcagtcgagtgttccctagagtccccgttcctccgccgccgcctgcgaccgcttcacgtgccctgatccatcgcaggtcccctttctgaccccaaatggagccgaagaagtcctctgctcagcaccagccccacgccatggaacccaagaagtcctctccacgcggcgccggggccgtcgccgccaccgccactgaagccgagtccccgttgagcagcttgttctacccnccggcgcccgcggcaaatgggaaagatcaggagttgtacagcattatttacaaagggcagagcgggagcgctcatgctgtggcgacagatggtaaactcggaatgggctccttccaaaagtcataccgcgtacg

SEQ ID NO: 5280 - DNA, 303 bp, Zea mays
  unsure (1)..(303): unsure at all n locations; Clone ID: LIB3137-050-Q1-K1-E8
cgcgcctatctcagcttgctgcactgccctgccatcatatcgtacgtgagcccggccgagagcgagggagaggcatggctgctccgaagctcgcgacgctggcgctggctgtgctcctggcggcgaccgtggtggctcccccggccgcggtgcgcgcggcgatgtcgtgctccaccgtgtacagcacgctgatgccgtgcctgccgttcgtccagatgggcggggccatgccgccccagccgngctgcggcggcatccgcagcctgctgcagcaggccaacaacacccccgaccgccgcacca

SEQ ID NO: 5281 - DNA, 382 bp, Zea mays
  unsure (1)..(382): unsure at all n locations; Clone ID: LIB3137-050-Q1-K1-F1
ccgtcctatccatccggcacgcccagcatccatccactcctcccctgctccggctccggctccggctccgccatgggcctttcaacagtttactccccggccggaccgcgcctcgtgccggcccctctcggccgctgccgctctgcccagccccgccgcccgcgccgagccccgctcgccaccgtccggtgctccgtcgacgccaccaagcaggcgcaggatggcgtggcgacggcggtcgcgacggaggcgccagcgtcgcggaaggagtgcttcggngtcttctgcaccacctacgacctcaaggcggatgacaagaccaagtcgtggaagaagctagtgaatgttgctgtgtcaggcgcggcccggatgatatcaaatc

SEQ ID NO: 5282 - DNA, 167 bp, Zea mays
  unsure (1)..(167): unsure at all n locations; Clone ID: LIB3137-050-Q1-K1-F12
accgcacgcgtccgcggtgaatgaatctccctttaaccttggtgcttaaactcgaaatctgtgaccatgcagctaaggcactttctaaatagaaacagagatgcacaaaaacatgacngaaacgcatgagccaaaaaaacacagaaaaaaagcgccagccccacgaa

SEQ ID NO: 5283 - DNA, 190 bp, Zea mays
  Clone ID: LIB3137-050-Q1-K1-F2
cataacacaccttgctgcactgcccagacattatattctacaggaacacgaccgagagggagggagaggcatgcatgctcctaatcacgcaactctccatcatgaccgagctcctacccgcaaccgacgtggctgccccagccgccatgcacacggagatgtcgtactacaacatgaacagcaccgctca

SEQ ID NO: 5284 - DNA, 322 bp, Zea mays
  unsure (1)..(322): unsure at all n locations; Clone ID: LIB3137-050-Q1-K1-F3
cgggncggccggcgcgtccgccgncctatccatccggcacgcccagcttccattcactcctcccctgctccggctccggcgtgggctccttcatcnacctttcaacactttactccccnnccccaccnctcctcntgccggcccctctcggtcgctgccgctctgcccagccccgccgcccgcgccgagccccgctcgccaccgtccggtgctccgtcgacgccaccaagcangcgcaggatggcgtggcgacggtggtcnttgcggnagcgccagcgtcgcggaaggagtgcttcggtggcttctgcaccacctacgacct

SEQ ID NO: 5285 - DNA, 287 bp, Zea mays
  unsure (1)..(287): unsure at all n locations; Clone ID: LIB3137-050-Q1-K1-F5
ctgcactgcccngttttcttatcgnncgtgagcccggccgntagcgggggggaggcatggctgctccgaagctctctactctggccctggctgtgctcctggcggcgaccgtggtggctcccccggccgcggtgcgcgcggcgatgtcntgctccaccgtgtacagcacgctgatgccgtgcctgccgttcgttcagatgggcggggccatgccgccccagcatgtgaaattagncatcctcagcctgctgcagcaggccaacaacacccccgaccgccgtaccatc

SEQ ID NO: 5286 - DNA, 311 bp, Zea mays
  unsure (1)..(311): unsure at all n locations; Clone ID: LIB3137-050-Q1-K1-F8
ctgacgcgtgggcgagcacaaaaaaaaaatcctaatttccgcaacggcaatgtctccgctgccgggcgtcgtgctcctcgccgtcgccgccgccgccgacatagcggtcacggcgtcagccacgtcgctcagcggcgcggcgaacgacctactccccaagtacggcctcccgaaggggctcatgccggactccgtcgcctcctacagcttcgacgaggccacgggcgccttcaagatccacctcgccttgaccnnctacgtgcactacggctcccacctcgtctactacgagaggaccataaccggcaagc

SEQ ID NO: 5287 - DNA, 296 bp, Zea mays
  Clone ID: LIB3137-050-Q1-K1-F9
ttgaaaaaccggctcgaccgcacgcgtccgcggacgcgtggggctcatgtgaggagaactatgatcagtgagcgaatccgaaagctgcaagggggcgtttcgaacatggacaagcaaaccaacacatctgacatgctagatttggctgtcgactacatcaaggaactccagaagcaggttaaggtaagcaatccagtaagttctctgcagatgagcacttgtcaggccctgtttggaacctaggtctaatagttagccggctaacaaattgttagctgggctgagccaactaatga

SEQ ID NO: 5288 - DNA, 376 bp, Zea mays
  unsure (1)..(376): unsure at all n locations; Clone ID: LIB3137-050-Q1-K1-G1
ggcggcacaggcaactatgccagtgcactgtttctcacagcagctaaatctaatgcattggacagagttgaatctgagattaaagctattgtagaggcttccaagaagagcccgttgttttctcaattcataaaggacttgtcagttccaaaagcgaccagggtgaaggctatagccgaaatatttgctgacgctgggttttcagatgttacaaagaatttcttggctgtcctggcngacaatggcaggctgaaatatattgaacgcattgcggagagatttgttgatttgactatggaacataagggggagataaatgttgtagtcaggacagttatttaactcaccaaagaggaggagaaagaactcaaggaaa

SEQ ID NO: 5289 - DNA, 459 bp, Zea mays
  Clone ID: LIB3137-050-Q1-K1-G10
cgacgacgcgtccgaccagtccctcctcctttcctctcccgtccttccatccggcacgcccagcatccatccactgctcccttgctccggctccgggtccggctccgccatgggcctttcaacagtttactccccggccggaccgcgcctcgtgccggcccctctcggccgctgccgctctgcccagcctcgccgcccgcgccgagccccgctcgccaccgtccggtgctccgtcgacgccaccaagcaggcgcaggatggcgtggcgacggcggtcgcgacggaggcgccggcgtcacggaaggagtgcttcggggtcttctgcaccacctacgacctcaaagcggaggacaagaccaagtcgtggaagaagctagtgaatgttgctgtgtcaggcgcggccgtgatgaaatcaaatcacctgctgttcaaactcgcttttggtgacgttttcggaca

SEQ ID NO: 5290 - DNA, 380 bp, Zea mays
  unsure (1)..(380): unsure at all n locations; Clone ID: LIB3137-050-Q1-K1-G12
gccgggggcgcgtccggaagggcgccgncntctttacagccgngtgctggcaaggcccagcaggccacgcagtcggcccggacggttacgcccggggtcggcgcgcaacgggacacgggtgccgccgccacggccacccccggcgccggcgagcaggacaagggggtgaccgtcacggggtacatcgccgagaagctccggccgggcgacgaggaccgcgcgctgagcgaggcgatctccggcgcagtgcagcggcgcaaggacgacgctgggggcacggtagcgcagcgcgtgccggcgcccggccaggccgtcgcgtcgctcaccggcgggaaccgggtctccgagaccgtacagccaaccacaaccacaggggaaga

SEQ ID NO: 5291 - DNA, 377 bp, Zea mays
  Clone ID: LIB3137-050-Q1-K1-G2
gcgcacgcacacacgcacgtttccagttcgactcgagccagagccccgccccgggcagggggcgttcgctgtcgcgctcctcctcctcctcctgcacataccctccccccgaattcgagccggaggaccgaagagtagatctgcgccgggcgaccagaggatggccgtcaactgggagctgcagggctgctgccaccgcgaccagaggatcttcatcgccgccgttggagtctccaccagtcgcaggcgcctcctctggaggacgttcctgctcacgccgttcaagctcatcaccgtcttcctccacgaggccaggcatgcgcttgcttgcaagcttacttgcggcgatgtagaaagcatgcaggtccatgcgaatg

SEQ ID NO: 5292 - DNA, 227 bp, Zea mays
  unsure (1)..(227): unsure at all n locations; Clone ID: LIB3137-050-Q1-K1-G6
tagtactaggcaccacacctnagtactcagcgagcggaggattggggtgccctgttcttatacttcttgctcaacaatgatgattaatctctgactctcatgcccagtattatcctgtggactttgcacaggcngcattgattagaacgtaggcacacgatgttacaacttatgagaatggagtcgactcccaacatagtcggccattacacattcacagtcaaatt

SEQ ID NO: 5293 - DNA, 373 bp, Zea mays
  unsure (1)..(373): unsure at all n locations; Clone ID: LIB3137-050-Q1-K1-G7
aaagttgaagcctttggaagttacatacaagttcaatgatttcgtttcccctttgctgacaaggggtggttttgatgcaaagccaatggttatgctcttaggtcaatattctactggtaaaacaacttttatcaagcatctgctaagaacaagttatccaggtgcccatatcggaccagagccaacaacagacagatttgtagttgtcatgtcaggatctgatgaaaggactattcctgggtatactattgctgttcaagctgacatgccttttagcggtcttacaacatttggaactgcatttttatccannnttgtttgttattaatttcgacatttactgttagagcatatcacatttgttgacacacct

SEQ ID NO: 5294 - DNA, 337 bp, Zea mays
  unsure (1)..(337): unsure at all n locations; Clone ID: LIB3137-050-Q1-K1-G8
cgatactnnngacgagagtgccattgtgtaccganncaaggtagagatatcttatgttcacgtgtcgatgaagctccgccgcctcagnngaatcccatagccaatcataatgtctcttaaggaaacgttgcatgccagaaattacgcatgatgcgcatcgatcacaagctggttgactaagttgaagaattattccggtggttgtcgggnncnagttgtgcatgtcaacattttcaagtgattaccgcatgtccacaaaatttttgactggaagtactccatgttaacgcaggggtttgtggagntgtgaaagcatggatgtttaccaaaatattta

SEQ ID NO: 5295 - DNA, 180 bp, Zea mays
  unsure (1)..(180): unsure at all n locations; Clone ID: LIB3137-050-Q1-K1-G9
gctagcccactcctctttttcacctgatcgtacactctcgcagctcgatcattcttagctccgctatctttaactggagcttgggcctctaaccctancccctaactagtaactagccactcgatcgtgaattcatcatccttctgatcgacacccatggccactgtctatgaccatacc

SEQ ID NO: 5296 - DNA, 375 bp, Zea mays
  unsure (1)..(375): unsure at all n locations; Clone ID: LIB3137-050-Q1-K1-H1
cggagccatgctcagaagtttttctccatggtcgtgcgtgaacctggggccagtaattcaatggagatcccaccccctaggccaaagagaaaaccactgcacccataccctcgcaagtgtgccgactccaccgtgacaaatgctccaatgggcgaaccgaagaatgctcctgtttcatcaccatctggttctgaccaagagaatggttcgcctgtctcggtgttatctgcaatgcagtcnngtgcttncggttcatcaatatcaaacccatcaactgggggcacgtctcctgcgtcatcagatgatggnnataatttttatgaattagtgaatttggagtgaaaatttgctcactcagcaaatagaagaccgatc

SEQ ID NO: 5297 - DNA, 473 bp, Zea mays
  unsure (1)..(473): unsure at all n locations; Clone ID: LIB3137-050-Q1-K1-H10
cacggagcagattggtttgaaatgcaaactttttttcagcccttcaaacttcatgaagtttgagaaggatgattctgggaggattgctatcctaccattttatctttatgtcatgcgaacagtttctcttactcaagcaagaattgatatgagtgagcttgatgaggattctgatggtttccttcagcctcatgaaatggaagcatatattagaggactcatccccaatttggcgcaattgcgcgatatgcccactgcatttgttcagatgtactgccgcatagctgcacgcaagttctttttcttctgtgatccacacagacggnggaaagcatgcataaagaaagtgttgctgagcaattgtcttcaggagctaatggaactacatcaggagagtgaggaagaggtaaccgataccgagcaggcagaaaactggttttccttaacttcagctcagcgcatatgtgacatgt

SEQ ID NO: 5298 - DNA, 380 bp, Zea mays
  Clone ID: LIB3137-050-Q1-K1-H11
gaaaaaccggctcgacgcacgcgtccggacgggggcgccaggctttagtgccctcgactgcctcccagctccgactgaacctgcccaccggcaggcttaaccagggctgacgggagctccacctaggccgcccacctgcactggcagaccaaggtcatctccgcggacgccgagcagccgagctcctcccacggagtcacggtcccacccccagctaaggcaccgagcttcgccccgtcccgcatgggcacacccctgcacaggccgagccgccttgctcctgttcctcgccacggatctagtgacgactaggctgagcgacgattccagcgtctcgatgtgtgacccgagttcaactcctctttcgtcaatctcgagat

SEQ ID NO: 5299 - DNA, 380 bp, Zea mays
  Clone ID: LIB3137-050-Q1-K1-H12
gatggcttctcctccctttacggttcggcgttgttttcgtgaggttctccggggttcggttgcgaagggttagcggatcgagatggcggcctcagatgttgagtaccgctgcttcgtcggcggcctcgcctgggccacggacgaccactccctccacaacgccttcagcacctacggcgaggtcctcgagtccaagattatcctcgatcgggagacgcagaggtcccgcggcttcggcttcgtcaccttctccacggaggaggcgatgcagaacgccatcgagggcatgaacggcaaggagctggacggccgcaacatcaccgtcaacgaggcccagtcccgcggcagccgtggaggccgctgctgcggctacggtggtg

SEQ ID NO: 5300 - DNA, 379 bp, Zea mays
  unsure (1)..(379): unsure at all n locations; Clone ID: LIB3137-050-Q1-K1-H3
gcgggctgggcctggacgtctcctcgtcgtcgccgggggcctcgtcgtcaggccagcagcagcgccatgaggccatgcgtgtgtcactcccggacgcttcgctgcagcaatggccgccgcggctggagctggagccggcgccaatgctgtcggccgggctcggccttgcgctgccgtacgactccaccggggctcaggtgagcctgccggagctcatgatgggccagtcgtctctgttcaacgggaanccggccacgctggacttcctggggctcgggatgagcccgtcgggcgcgtcggcaggtanaggcctccccgcgttcggccagcccattggcggcgccgtcggcggcatgggcgggaccggggctggcgccgt

SEQ ID NO: 5301 - DNA, 380 bp, Zea mays
  unsure (1)..(380): unsure at all n locations; Clone ID: LIB3137-050-Q1-K1-H7
cacacacccgagcatataacagtgacagacactacactatggtgagcgccagaatcgttgtcgggctggccaccctcctatgcgctgccgccgcagtcgcgtcgtcctgggaggacgacaaccaccaccaccacgggggccacaagtccgggcgatgcgtgcggcggtgcgaggaccggccctggcaccagcgtccccggtgcctggagcagtgcagggaggaggagcgggagaagcggcaatatctgatcnngcacgaggccgacgaccgcagcggcaagggttcgtcggaggatgagcgcgagcgagagcnncttgntgtataagcataaggaccgatgggcgttcgtgttcgaccggcgcagcttccgtcgcgtggt

SEQ ID NO: 5302 - DNA, 474 bp, Zea mays
  Clone ID: LIB3137-050-Q1-K1-H9
cggacgcgtgggaaggacaacttatgaagccttgtaaagggatattgctttttggtccacctggcaccggtaagaccatgcttgccaaagctgttgcaacagaggctggtgctaattttatcaacatatcaatgtcaagcattgcttcaaagtggtttggagagggagaaaaatatgtgaaagctgttttttcacttgcaagcaaaatttctcctagtgttattttcgtggatgaggttgatggcatgctgggtagacgtgagaatccaggggaacatgaggccatgcgcaagatgaaaaatgagtttatggtgaactgggatggtcttaggacaaaagacaaagaacgtgttctggtacttgctgccactaataggccatttgatcttgacgaggctgttgtcaagaggctccccaggaagttgatggttaacttgccagatgcacccaacagaaagaagattcttagcgtga

SEQ ID NO: 5303 - DNA, 427 bp, Zea mays
  unsure (1)..(427): unsure at all n locations; Clone ID: LIB3137-045-Q1-K1-H3
gggccgaccgacgcgtccgcggacgcgtgtcttgtgattgttatggtggttactgataactngacnacctggattgaaagcagaatgtcataatatcnagcctctacccccacaggccatgtgcatcagagacggagaaagcgagcagattcccagacggaacggaaacggagcgcgttggcaaaagcagagctgagcctgaaagggccatgggtcagtcattgcttgcttgggtcatcttcatctagctgcggcgctacctgcctgcctacctgctgctgtatacgtaactattagaattactcatttcggttagtaataatatcttgtctggtatgttaaaaaacctgaacagcatgccagtaaccaaaatgacagacatccgattggtgtntaaaaaaaaaaaatataataaaaaaaagggcgg

SEQ ID NO: 5304 - DNA, 307 bp, Zea mays
  Clone ID: LIB3137-043-Q1-K1-A3
gatggcccaattcaccctggaggcttctccaggtcgcctgggatgagccggacctgttacggaacgtgaagagggtgagcccatggctggttgagctggtgtcgaacatgccggtcatccatcacctcacagccacgcccttctcgccgcccaggaagaagctgtgcgtcccactgtacccggagcttccgctggagggccagttcccggcgccgatgttccacggaagccccctcctcggccgtggcggcgccggtggcccgatgtgctacttcccggacggcactcctgcaggcatacagggagc

SEQ ID NO: 5305 - DNA, 316 bp, Zea mays
  unsure (1)..(316): unsure at all n locations; Clone ID: LIB3137-043-Q1-K1-A4
ggcggccgtggcgtctgagccctgagtcagttacacgccctcgtgcgcgcgctcctcccgcgacgcatcggcggaaagcgcgcacggccacggncaccggaacctcaaaagcgagggtgtggtgatgccataactaggaccgcacgcacatgctggcatgcatccatgtccaggatatgcaacgacgcaaggatcatcccacatccacatccacatccatggccggcgttgcctttttggtgcgtgtatattaacccgcgggccgtcgttcttgcggctatccgcacactgaatcacgaatctctcgagccgcagt

SEQ ID NO: 5306 - DNA, 288 bp, Zea mays
  Clone ID: LIB3137-043-Q1-K1-A5
gagcagaggccgagctgggcgactgcgcgcgaccactgacaagcacgggcatgggagtgacgccgagggagctcgatatgggcgggctcggactaaagcacgcgcggcaaggatagtcgacggcaagctaaaaccaccggaaggcgacgacgcttgagaccgtccaaggaggatcgatggcggccgatcagaaggacacgaccgacgagctggagcaaggagaaggggcggccggcgaacaggaacgagatccgggctgggagagcgacggccggaaaaagcagggca

SEQ ID NO: 5307 - DNA, 228 bp, Zea mays
  Clone ID: LIB3137-043-Q1-K1-A8
gcttcttccctcgcgcccgcgtcgtgggcactgccgctgcagatgggcggggctggggcgggagcggcggggccttcctgccgcgcgacgctagccgtcgtcacggagccccgctgggccgcgtcgctgcgccgggcaagggttctcgtggcgctggcgccccggtgcgtggcgctcgacgggcccggcgccagcggcgaggaggaggcgcccaacatcgaggacgag

SEQ ID NO: 5308 - DNA, 376 bp, Zea mays
  unsure (1)..(376): unsure at all n locations; Clone ID: LIB3137-043-Q1-K1-A9
cagttttctcggaaggcagcatcttcctcgtcgccgccgacgtcacccgccgcggctccgccggatgccggtcagggtggtcgataccnccacgccttcctcgcagccctccccagggcaagaagcaaatactggacacccatctcctcctagatgttcactcttaagtgctggaagatcttttgctggaactcagaatgtttcaagtctgcagaaggatgaagcatggaaagtgaatgtccgcatccatggttgccatcttgaacagggttatctatgtggaacgatggaagcgcttaatgttccattagcagatacacctgtagtgacattctgggagggggagatagtggatgctaaaaaatacacctttttc

SEQ ID NO: 5309 - DNA, 329 bp, Zea mays
  Clone ID: LIB3137-043-Q1-K1-B1
gatctgcaccctcatcttctcggtggtcgtgctgttcaccacgatcaggatgctgcgcaacgagcctcgaggtcctgatggaaagcacgccccgtgagatcgacgccaccaggctggagagggggctctgcgagatggaaggcgtggttgccgtccacgagctgcatatctgggccatcacagtggggaaggtgctactggcttgccatgtgacggtcgccagggaagccgacgcagacgagatccttgacaaggtgattgggtacatcaagacggagtacaacatcagccatgtgaccattcaagtcgagcgtgaataagaggggagc

SEQ ID NO: 5310 - DNA, 180 bp, Zea mays
  unsure (1)..(180): unsure at all n locations; Clone ID: LIB3137-043-Q1-K1-B10
gggncgggcgacgcggccgtgtacgcttctatcaaaagctaccctttattttatccaaccctctctatctctccggcgggcgttcttattagcagtgcaggatctactctgacgatttagcctaactcatccttcaatgcgctcaaactctctgcggtcggtggcgaatcccgaactgct

SEQ ID NO: 5311 - DNA, 297 bp, Zea mays
  Clone ID: LIB3137-043-Q1-K1-B11
tggttacattccaaaagaccattactctttttttcctcacacatttacctttataaaccgcccgcgtttcttacaatactctctcaaccccattatcacatgaatctccaatttttctttcttctacaaatatctctttttcttccttcttactcaccaaaaatcccataataaattctcatcacaactacactaatattttactcttgtcatcaatgtcgcccttcattcttactattatccttctccttctctctctcctctctattcttacccttcttcttcaaaaacatactc

SEQ ID NO: 5312 - DNA, 189 bp, Zea mays
  unsure (1)..(189): unsure at all n locations; Clone ID: LIB3137-043-Q1-K1-B12
tctcgcgtccctccccgtcccacatcccattcctcggcagccggtcagtcccatccatctgcaggacctcattccgtcacccgccttcccctttcnctctcgtcggcgcgcgatggatggtctcatcaaggggttgttccacgtggccatcgacgctctggaggacgcctttagggatagggaccactg

SEQ ID NO: 5313 - DNA, 300 bp, Zea mays
  Clone ID: LIB3137-043-Q1-K1-B2
tccacgatccggcctcccccacctctcgccggccgaggacgatccgccggcatcagagcgcgcgcggccggagccgaaaagcggggggcgtcatgaagcccccggccggcgccagcggcaagggcggcgcggtggacccctctctgccgcggttcaggtgccaggagtgccgccgcgccctcgtcgtcgtcggggtcgagtcctacgccgacagactgcccgcacacgccgcgcccggtaatcatgcatcttctgttcagggcagtgttatgggtgcaagcaagatggacaactcttatg

SEQ ID NO: 5314 - DNA, 360 bp, Zea mays
  Clone ID: LIB3137-043-Q1-K1-B3
aaaaccagtgcaagcagaagcagcgcaatggcgagcagcaccatggccctctcctccacaggcttcgccggcaaggcagtgaacgtgccgtcgtctctcttcggcgaggcccgcgtgacgatgcgcaagacggcggcgaaggcaaagccggcggcgagctccggcagcccgtggtacggccccgaccgcgtgctctacctgggcccgctgtccggcgcgcccccgagctacctgacgggcgagttcccgggcgactacggctgggacaccgcggggctgtcggcggacccggagacgttcgccaagaaccgggagctggaggtcatccaactccgctgggccatgctgggcgccgtgggc

SEQ ID NO: 5315 - DNA, 285 bp, Zea mays
  Clone ID: LIB3137-043-Q1-K1-B4
gcgacgccgcctccgcaagccgtccgccttgtccctcgaaggcttggtcctcctccttgtcgcccgaccttccccgcgacagacccgtttccccgctaggctagagttatcgttcctctgcagcgatggcgatcaagcggaccaaggcggagaagaagatcgcgtacgacaagaagctgtgcagcctgctcgatgagtacaccaaggtgctcatcgccctcgccgacaacgtcggctccaaacagcttccagacatccccccgggcccttaagggccaacttcgt

SEQ ID NO: 5316 - DNA, 324 bp, Zea mays
  Clone ID: LIB3137-043-Q1-K1-B5
ggatgtttacattccaaaggactattactctggggagcctcgaggatttgcctttgtagagggtggggatccttacgatgcctctgaagcccagtatcacatgaatcgccaagttttctttggtcgggaaatagctgttgttcttgctgctgagtcacgaaaaaggccagaagaaatgcgcagcagaactagagtaagaggttactctggtcatgaaggtcgccggtcttcttactatggtcggtctcgttctcgctctcctcgctatcggggccgtcctcggtcgagatcatactctcctgctcaaagcggggggatgactac

SEQ ID NO: 5317 - DNA, 281 bp, Zea mays
  unsure (1)..(281): unsure at all n locations; Clone ID: LIB3137-043-Q1-K1-B6
gaatnnnccgggtccgaccccgacgccgtctcgcgtcagaccaaatggcgacccacgatcaaagcaagaagtaagaagnnttcgtcagcgaccggcgtcgttctgcgccggagctcaatgagatgtnctgacgcgggagcctcgcggaggaacggcttatctccggcgtggaggtgccgcgtcacactcgatgcgcactggagatcatcatctcgcgccacgcgcacgcagaacgtgctcggcgagaagggccgcaggatcagggagctcacgtctgtcgt

SEQ ID NO: 5318 - DNA, 303 bp, Zea mays
  Clone ID: LIB3137-043-Q1-K1-B7
cgtccgtccacgatccttcctcccccacctctcgcctttctttgacgatccgccggcatcaaaacgccggcggcttatcctaaaagcggggggcctcatgaatcccccggccggcgccagcggcaagggcggcgcggtggacccctctctgccgccgttcacgtgccaggagtgccgccgcgccctcgtcgtcgtcggtgtcgagtcctacgccgacagactgcccgcacacgccgcgcccggtaatcatgcatcttttgttcaaggcagtgttatgggtgcaagcaagatggacaactctta

SEQ ID NO: 5319 - DNA, 353 bp, Zea mays
  unsure (1)..(353): unsure at all n locations; Clone ID: LIB3137-043-Q1-K1-B8
ccacgatccttcctcccccacctctcgcctttcgttgaccatccgccggcatcagaacgcccgcccgttaatcgaaaagcggggggcgtcatgaancccccggccggcgccagcggcaagggcggcgcggtggacccctctctgccgcggttcacgtgccaggagtgccgccgcgccctcgtcgtcgtcggggtcgagtcctacgccgacagactgcccgcacacgccgcgcccggtaatcatgcatcttctgttcacggcagtgttatgggtgcaagctatatggacaactcttatgttgtgctatctagacagaacaaatcttagggtcctagaattccttcacgcccacc

SEQ ID NO: 5320 - DNA, 272 bp, Zea mays
  Clone ID: LIB3137-043-Q1-K1-B9
gtgggccaaggtgatcccaggctcggatgaatgtgtctatgcttgggttgcggcagagtatgctcttggaagacttggaggggatcctaacaaaaccgttggaataattgaacttgggggcgcttcagctcagcttacctttgtttctgatgaagtacttccacccaaactgtcatataattatacttttggtgaaacaacatacactctctataccaacagctatttaaactttggtcaaaatgcagcttaagactcattcccatgaatgc

SEQ ID NO: 5321 - DNA, 373 bp, Zea mays
  Clone ID: LIB3137-043-Q1-K1-C1
atcccctgtcccgctagcggctagtccgaccaggcgatcccccccccaaaccctcccccaagaccgcagagcggagaagagcgcaagatgttcggcttcgggcaccacggccaccacggccagaacccgccggcgcaccccccggcgcacggcggcgtgcaccagcccaccttcaagatcttctgcaaggccgacgaggggtactgcctcaccgtccgcgacggcaacgtggtgctggcccccgccaacccgcgcgacgagcaccagcactggtacaaggacatgcgcttcagcacccaagtcaaggacgaggagggcaaccctgcgttcgccctggtcaacaaggccactgggctcgccatcaagcactccc

SEQ ID NO: 5322 - DNA, 393 bp, Zea mays
  Clone ID: LIB3137-043-Q1-K1-C10
tctatagcaaccggtccagcactttcacgctcagctccagcaatggctgcctccaccgtggcgatctcctccacggcgatggccggcacccccatcaaggtgggctccttcggcgagggccgcatcaccatgcgcaagaccgtgggcaagcccaaggtggcggcgtccggcagcccctggtacggccccgaccgcgtcaagtacctcggccccttctccggcgagcccccgagctacctcaccggcgagttccccggcgactacggctgggacaacggccggcttgcccgccaccccgaaaactttggccaaaaccgggagctggaagggatccacttccgcttggccatgcttcgcgcgcttgggtgcgtctttcccgagctggtcttccgc

SEQ ID NO: 5323 - DNA, 236 bp, Zea mays
  Clone ID: LIB3137-043-Q1-K1-C11
cgctccctccgcatgagcatctcaacaccgccttgaggaccccccgacttgtcgtctgcagccatggtgaaatattctacggagccaaccaaccccaccaagtcaaccaaggccatgggccgtgacctacgtgttcacttcaagaacacccgtgagacagcttttgcccttaggaagttgtcactcaccaaggccaaaaggtaccttgaggatgtgattgcccacaagcaggccat

SEQ ID NO: 5324 - DNA, 266 bp, Zea mays
  Clone ID: LIB3137-043-Q1-K1-C4
acggcaacaagaagttcgagacgctgtcgtacctgccgccgctgtcgacggacgacctgctgaaggaggtggactacctgctgcgcaacggctggataccctgcctcgagttcagcaaggtcggcttcgtgtaccgcgagaactccacctccccgtgctactacgacggccgctactggaccatgtggaagctgcccatgttcggctgcaacgacgccacccaggtgtacaaggagctgcaggaggccatcaaaatctacccggac

SEQ ID NO: 5325 - DNA, 387 bp, Zea mays
  unsure (1)..(387): unsure at all n locations; Clone ID: LIB3137-043-Q1-K1-C5
gaaaaccctagccgtcgtcaccgaagcggtcttccaggtaagcaagagcgtccaccccgccgccgccatgaagcgcaatccccgcgtntnnanttntngnnttttttntnttttttttgttttcctttttattttttttttnttttttttttttttnattttnttttttttttttttttttttttttgtttttattgttttngttgttgttttttgttttgttttttttnttttttttttttttttgtggtttttgttttttttgttattttttttttgttttttttattttttattttttttgtttttttttgtttttgtttttgttagtttttttattttttttttttttaattattttttttttaattgagtattgtttttttt

SEQ ID NO: 5326 - DNA, 282 bp, Zea mays
  Clone ID: LIB3137-043-Q1-K1-C7
gcgtcgcgttgggagcagtattctgcttctgtgcctgcgtcccgacaagcggaaagaggaggcgttagatggaggtagaaagggggacgggagcaaagcgagcagccacagaacagggagggaggtagagaggactagaggagtcggagcctcggaggagggagagggcgaagagtatggggaaccaaatcttggaggggaaacgtagagttctttcgtagaagaaacaggtgccacttgaagaaggtagaagtagctcaatacatctactgctgtcggggg

SEQ ID NO: 5327 - DNA, 225 bp, Zea mays
  unsure (1)..(225): unsure at all n locations; Clone ID: LIB3137-043-Q1-K1-C8
gccgacccacacgtccgatccactctttccccttctccttccttttcttcccccgagactattcatatanacgcggaggctttctatacctcgtttgctctcnccttcttgtatccaaggttcctactccatccgcccttagtctactctcaaccttccacataaagatccccctcccttcaccttaaataaaccgcatcattctcacctacagcatcttttact

SEQ ID NO: 5328 - DNA, 389 bp, Zea mays
  Clone ID: LIB3137-043-Q1-K1-D1
ggggaagctggtcatcgacgtaaagtattttttcttctacgtgcactcggagacccgcggcgggggcggagagacttcctgcccagcgaccggcgacttcgtgctgtcccaccagcagacgctgccaggcttcactccgccgggctcctacacgatctacatgaagattgtcggggacgacaacgaggagctgagctgcatctcgttcgggttcagcatcggctttgtcgcgtccagctgaacgcttctgagcctgggcacgaaaagcaacccgcccatggatgtacgtaattacgtgaaacacactcttgatcctatgactttcaagtgtctaaggtcatgtaaactttttgtgggtgtctgtggtcaactgaaacctttttattccg

SEQ ID NO: 5329 - DNA, 278 bp, Zea mays
  Clone ID: LIB3137-043-Q1-K1-D2
gatcgggtcaggtcagtgctccgtgttgcgtcttcttaagaacacgaaaaaaaagaggggagaggttctttcgggtcctctttttctttgattgtcgaaaggccgctcctttaggagatttgcgcgcttctcgtcgagattagccgccggtgctcggatcaatctgtttgcggtggaggaattttgaggccaagaagagagttggaatcggatcgggagctcttgtggtcagagggtgcgaaaaaagcgagtgatttttgggaggatttcttgttggg

SEQ ID NO: 5330 - DNA, 395 bp, Zea mays
  unsure (1)..(395): unsure at all n locations; Clone ID: LIB3137-043-Q1-K1-D3
ctcggcgccgaggcatgctgttgccgtgagtgagcaagggatctttccggcgatcttggaggcggcgagcctggtgccgcatgctggctgtccggccggccggaggctagctagctctcgcctctcgaccgagaagtgaagtgaagtgaagcgaggcaagtgctgtccagtagtagtggtggtcgcgaacactatttatagcgccccggcccccgcccccgcgtgcggcgctctcttctctctcacaggaccacggctcgcgcgcgcgggcaccgactncaaaataaatagatctcatctcatcttcttcttgctgataaggtggttgggtgcttacttaacttgcttggcagatggacctggtggcggacccggacaggccggacttcgacaac

SEQ ID NO: 5331 - DNA, 335 bp, Zea mays
  unsure (1)..(335): unsure at all n locations; Clone ID: LIB3137-043-Q1-K1-D4
gcgtgcgctgggaattcactcntcnanccttacactgttggtcataacattctcctagcccacgctcacgctctttatctttacaacaagcattacaagctctacgacaccctcatagggcttgcgtttgacgtaatgggtcgtgtgccatacagaacatcgtttctggataaacaggcccaataaaggttctgtgacattaaccttggaatggtcttatagccaatggtttgtggtgactacccctttttcatgaaatcattggctttggaacgaactcccttctttaatgaccaacaaaaagaaaaacctccccgtttctattacaatttggg

SEQ ID NO: 5332 - DNA, 245 bp, Zea mays
  Clone ID: LIB3137-043-Q1-K1-D5
cgccaatgtcgccagacgccgccgccgcgctccgccgcggctcgtggccgggcgtagggtcgcccgtcaacgaggtcctcgcctcgatgcgccagctgcggctcggcggcggctcgccgaggtcggcgccttccggcgggtcgttcttgggcggaggctacccgttcgggtccccaaagtcaccggccgggctgtacagcctcccgtccacgccaaccaggccgtcccccgtgacggtgaccacc

SEQ ID NO: 5333 - DNA, 387 bp, Zea mays
  Clone ID: LIB3137-043-Q1-K1-D6
ggctcgattgaacaaattggagcagcactatacttctccacgcctccacctccagcctcccgctggtctggcctctctcgaggtgagcgcgcctgtaagtgatcctttctcgcagattatttttgtagttttcgatggaggcggattagctttgaactggtggatcgtgtttggcatcgtattgtgattggttctgttctgtgaatttcgctagttttttttttctcccacagattactctgaatatgcgtgcccttaattgtgttacgatttggcttcgtcgcggtagtctgttgtgatgcgcccattatttcgcgattaattgtatgtgattctgcgttccattgattgaaaataagcagtgaaccctttcgtttcttatttcac

SEQ ID NO: 5334 - DNA, 242 bp, Zea mays
  Clone ID: LIB3137-043-Q1-K1-D7
atccatccatgtatctgcgctttgcctgcccacagctacccgacgctttatcatcccttctattattaattaattgggaggagtgggagtgatagctgcagcacccagcgcccatcactgagcccatccggaaccctagcctcctcgtcgttgaatccaccacaccatgagcgggagcgcctccaggaagctcttccaagccgccaggtccatcgtcctctccgcttctcaacgctccttct

SEQ ID NO: 5335 - DNA, 301 bp, Zea mays
  unsure (1)..(301): unsure at all n locations; Clone ID: LIB3137-043-Q1-K1-D8
cgcgttcgcgacaattaataaagcgcgcgcgcgctcttttagaggctcggagagctgantgagaccgcacatgctatggcgtccatgaccgtcctctctcatggcgttctgcccatcatgcgctccgccaacagggccaggacggccgtcgtcttcagggcgtccgccgaggcgcatgctcatgcgggccgccgcgcctttctttttctggttgccactggcatcctcggctgctccttttttttattcttttcacaccaagactgtcaagaccatcaagatcggatcctcaactcctccc

SEQ ID NO: 5336 - DNA, 327 bp, Zea mays
  Clone ID: LIB3137-043-Q1-K1-D9
cggacgcgtggggcaaatatggcacatgtggcagcacagagaagacggttaaaagatgaaggtcctagacgacgcttgaacgtgtgtcgggattgcttggatctctttctattcttccacaaaaggaacagcccaaaggaactatacgtagacaaagcagcatgatggatgtcaaattaaggagttctgagagtatgagcaacttaacaaagctcagaagaaatgcatctacttcctctgatatgagtagcatggcttcgcaaggaccttcaactagtacagctccttttaagccgtcaaacaatttgacttttgatgaaaaatttt

SEQ ID NO: 5337 - DNA, 328 bp, Zea mays
  Clone ID: LIB3137-043-Q1-K1-E1
aaagctttcgaaagcttttaacgttcttgcgctcattccagttgtgaagcaagtgttgacggaaggtacagtaagtgaaacacagttccttgcttcattagtatttgcggtgaagtcatgtatgtgaaccatacaggcgactaaaaagtccacagtgaattttggcactgtattagccagctaaagacatgtttacgaaacactcaaattccaatccaacctgagcagatcccaggccgcagacgacctttgggcttggaacatcttcccatgcctgagccaacaaagctctccttttgctttcaggcctgagatttcatgttcaagg

SEQ ID NO: 5338 - DNA, 393 bp, Zea mays
  unsure (1)..(393): unsure at all n locations; Clone ID: LIB3137-043-Q1-K1-E10
ggcggacttcatacacgttctgctctccatacagcaagagtacggcctcactacggagaatgtcaaggccatcttggtggacatgttcnaggcaggtatagagacatcttacctgacgctagagtacggcatggccgagctcatcaacaacaggcacgtcatggagaagctacagacggaggtgaggacgacgatgcgctcgccggacggcaagaagctggacatgctagcggaggaagacctcggcagcatgccctacctcaaggcgaccatcaaagagacgctgcgcctgcacccggcggcgccgttccttcttccgcactacttcaccggcgacttcgaaatcgacggctacttcgtcccaaccgggacccgcgttctcgtcaacgcctg

SEQ ID NO: 5339 - DNA, 333 bp, Zea mays
  Clone ID: LIB3137-043-Q1-K1-E11
cttgctttctagtgccacaacttggttagtttaaaaatctccaatatttggagctcggcagcatcaacataagtgggacaataccccctgaactggggaacctgactaacctggtcagtttgcatctgtatatgaacaacttctctggcaatatccctgacagcctggtgaatctattaaacctccttttcctacgtctaaccaacaatactttgtttggtccaattcccgtattccttaaccaattttttcaatttttaaataactggatttttttaaaaaaaaccttttaaaaaaaattctcatatacatggttctttttaaatttttacc

SEQ ID NO: 5340 - DNA, 384 bp, Zea mays
  Clone ID: LIB3137-043-Q1-K1-E2
gaagaagagctcctagagatacaaggaacacagttgctaagcaccacagtgggcgtgaaagagtatgtgcaaagcgaatttgatagtgttcaagcagagatcataagcacaaataaggacctgttcccaggtagcataacatttgatgatttcctatgggcatttggaatgctcagatcaagggtgtttccagagctccgcggagataagcttgctctcataccatttgctgatttggttaatcacagtcctaatatcacctcagaagggtcaagttgggagatcaaaggaaagggtctttttggtagggaactcatgttcttcttgcgaacaccaatgaatggtaaatctggacagcagatatatattcagtaccatctggac

SEQ ID NO: 5341 - DNA, 369 bp, Zea mays
  Clone ID: LIB3137-043-Q1-K1-E3
ccacttgctactactacacacaaacacagctagccggcgctgccaggttggctttggcgagcaacgacgacgacgacggcgctcaggactcaggtgctttcggttcaggcggaggagggcatggagcgcggcgactgccagttcacggtggtgccgccgcggcagtacgacgaggcccagttcatgcaccagctgatggtggccggcgaccagcaagaccccgcgggcgcggggcggggagctgccgcccgcggcggggaaaggaaaccgccggtcacggaagaacaagtgccggcgcttgaaaacacctttcacgcgcggggcgccaagctggaaccccgggagaaagccgaacttgcgccggagctt

SEQ ID NO: 5342 - DNA, 485 bp, Zea mays
  Clone ID: LIB3137-043-Q1-K1-E4
ggccgcggtctctctctccactcctcggccgctcggctcgtctcccacaagtgcccgtactcctcgaccaggcgcatgcggctatcttcgtgcctgtcggcgggcagagtaacctatggccggctcgcggctggctgtacaaccacatagcacctgggaccggcgtcggtgcccccaagaatggcgcgctcggatcccgtccaatctctccgcctttctcttcggcgcagctagtgggaaggaaagcccgcgaagccgctcctacgccgacattcgacacaaccaaagacctgtggcatcgggcccgggatggcattcgcccgcgctgtgctctcgcgcctgcaggaggacacccctggcgcggcgacccaaatcgggatcgggctcgtgccgtgcgccgttggcgggacggccatccgggagtggtccctcgggaaacatctgtacgagcagatggtatcccgggcgcgcgtcgcgaccttgta

SEQ ID NO: 5343 - DNA, 401 bp, Zea mays
  Clone ID: LIB3137-043-Q1-K1-E5
agaacaccaagttccagaccaagcccgacggcgacggcgacggagagcaggcggcgggcgggctgaagcgactggtggccgagaccaaggacgcgcacggcgtgaagcaggtgtacgtgtggcacgccatggccgggtactggggcggcgtgacgccgacggcggggacggcgatggagcgctacgagccggcgctggcgtaccccgtgcagtccccgggcgtgacgggcaaccagccggacatcgtcatggactcgctatccgtcctggggctgggcctggtgcacccgcgccgggtgcgagacttctacggcgagcttcacgcgtacctcgccttctgcggcgtcgacggcgtcaaggtggacgtgcagaacatcatcgagacgcttggcgccggccac

SEQ ID NO: 5344 - DNA, 392 bp, Zea mays
  Clone ID: LIB3137-043-Q1-K1-E7
attatggacagggattgtttgagggcctaaaggcgtataagaaaactgatggatccgggcgtggtatttcgcccagaggaaaatgctgagaggatgcggacaggtgctgagaggatgtgcatgcctgcaccctctgtcgagcagtttattgatgcagtaaaacaaaccgttcttgcaaataagagatggattcctcctactggtaaaggttctctgtatattaggcccttacttatgggaagtggggctgttcttggtcttgcacctgctcctgagtatccattcatatatttggcttttctggtggaaacctaccttaaggaaggttaacaaccattaaattgaatagtggaaaacaagttcattcggcttactcttgtgggaactggggg

SEQ ID NO: 5345 - DNA, 230 bp, Zea mays
  unsure (1)..(230): unsure at all n locations; Clone ID: LIB3137-043-Q1-K1-E8
gtgcgttgcgtcgtgagtgtttgtgtttcagagctgagagtctgagactgagagagggaggggtgatgatggctctgcaggcgcangggacgcgggtgccgctggtcctggcgctcttcctcctcctggccggttgcggcagcgaggcgcagccgctggtgccggcgctgtttacgttcggtgactcgtcggtggacgtcgggaacaacgactacctccacaccatcatc

SEQ ID NO: 5346 - DNA, 427 bp, Zea mays
  Clone ID: LIB3137-043-Q1-K1-F1
ctctattcgttccccgcctcaccccgagccatccgtctcgctagggtttctccgccgccggcgcgatgcctcgccgcagctcaggaaggtctgccccacgcccagctccccgtgctgctccagtgaggaacccgccacagccagcacgccaggctcctcctccagctcctgttcgagatggtggtggctccatgtttggaggaattgggtccaccattgctcaaggtatggcgtttggcacgggtagtgccatggcacacagggctgttgatgctgtattaggtccccggaccattcagcatgagactgttgcctcaaaagctgctgctgctgcccctgcccctccagtgatgaatgctgatgcttgcagcatccattctaaggctttccaagattgtctcaacaactatggcagcgagatcagcaa

SEQ ID NO: 5347 - DNA, 359 bp, Zea mays
  unsure (1)..(359): unsure at all n locations; Clone ID: LIB3137-043-Q1-K1-F3
cttccccctcctctgggtctgggtgcgccctcccctgctccacttctccggcgctgagctgtgctgccgcagcccgcagggcccgcgcgacatgacgtccacggcgtactcgcggtcgtccaagctgccgggcggcgagcggcggctgcccccgcgcctcatgcgggggctggcgtccaagatcgagcccaagaagctgggcgtcggcctcatcgccggctgctgcctcgcgctcctcacctacgtctccctcgccaagctcttcgcaatctactcccctgtcttcgccagctcggccaacacgtccgcgctgatgcagcagaacgcgccgncgacctcgtccaagccgtccgtgcccg

SEQ ID NO: 5348 - DNA, 444 bp, Zea mays
  Clone ID: LIB3137-043-Q1-K1-F4
ggtatccttctcagcaccagcaaccccagaatcatcaacagttattgctgaaatatattacgcaggatcttggattctctgggagaaaacctattgctgcgtctcttatatactactgtcttcttcattggagatcttttgaagaagcaaagacaactgtctttgacagtattatacaaattgtaaactcagcaactgaggctcaacatgatacgagaagcttggcctactggctgtccaacttatccacattgtcagttctcctgcaacgttcatttaaagccaccagggcaactgcctcaactccacatagacgaagaatttcctgtgaaaggatttttcaagccaatcaaacttcaagcagtggacttgcttgtctcagtgctcaatcagtggatggaggtaccgtgtttcaccaaattgaagcaaggtatccggcttcgc

SEQ ID NO: 5349 - DNA, 427 bp, Zea mays
  Clone ID: LIB3137-043-Q1-K1-F5
ccgaggatttccttgctgctgcaaagttgttcttagcctcgggaaagaaggttaaagttccgacgtgtcttgtccctgccacgcaaaaggtgtggttggacgtatatagcctccctgtaccaggatctggtggcaaaacttgctcccagatatttgaggaggctggttgtgacacaccagcaagtcctaattgtggtgcttgtttgggtagccctcgtgatacatatgcacggatgaatgaacctactgtctgcgtgtccaccacgaacaggaaccttttccggcaagatggggcacaagggaaggcaaatctacctggcggccgcccttttttttttttttttttttacataaaacactcttttaatggggttgcttgcatgactttaaaggccaaaacaaaaaaaggtttacaaattaatatgaa

SEQ ID NO: 5350 - DNA, 434 bp, Zea mays
  Clone ID: LIB3137-043-Q1-K1-F6
gccctcccctcctgcagcgcccgtcgcctccctttccccttccctccctccctctccccgcgggcggccagaggcaatttcgccctcgattcgaccccgattcgtccgcccgcgaccgggattccctccgccaagcgcggatctgaacgctgcgctccgtgtcgccgctcgaatccgccatgaagggggccaaatccaagggcgccgccaaagccgatgccaagctggcggtgaaaaacaagggggcggagaaacccgccaagggcaagaaaaggaaagccggcaaggaccccaacaagcctaaaaaggctcccaacgctttcttcgtgttcatggaggaatttcgcaaggagttcaaggggaagaaccctaaaaacaagtctgtccctgccgtggggaaagctgctggcgacaggtggaaattcctgagcgag

SEQ ID NO: 5351 - DNA, 375 bp, Zea mays
  unsure (1)..(375): unsure at all n locations; Clone ID: LIB3137-043-Q1-K1-F7
cggaggcccggcgtcaagcctcttgagtacttccgcgccgcatacggggatgagtacgaggggtgccgattccaggaaccaggactcgaagcagaatttgctacgtttgacttgaagagtttcttcacattggcattgactcttcgggcaacaggttcttcagctatggaccttcgaaaaatgcaaacttacagtaagcaaatggtgctaccttcttggctatctgaggaagatgtcagttaccttgcaagtgtgtactcaaaaactggatttgctggtggagtaaattactatcgctgcttggacctgaactgngaactgatggcgccatggacaggagcaaaggtgcaagttccaccaaagtcatcgttggga

SEQ ID NO: 5352 - DNA, 393 bp, Zea mays
  Clone ID: LIB3137-043-Q1-K1-G1
caggcaggcaggtcggcgaggagggcaggattaccgaagaccgagccgtgcgggggctcgggacgggaacgggacaggaccccaaaatctcacatccttcctgcccgcccgcccgtgcccgtcgacgcgtcgttcttgccggccgcgccccacctccgccctctcctcctccaggggaatcggatacgccacaggctgcgcgatggtgctgtgggtcttcggctacggctccctcatctggaaccccggcttcgacttcgacgacaaaatcctcggcttcatcaagggctacaagcgcacctttaatctcgcttgcattgaccacagaggcacaccggagcatccggcgaggacctgcacgcttgaaaccgacgacgaagccatatgctgggg

SEQ ID NO: 5353 - DNA, 187 bp, Zea mays
  Clone ID: LIB3137-043-Q1-K1-G10
acttcagctctttctcgcttatcctttcctaccaccgcgctctcaattactcgcgggcgctcaacttccccggcgacggctgcatctcctgcatgtgccacaacaccgacatgctctacagcgcgcgccagaccgccgtcgtgcgcgcctccgacgacttctacccgcgcgacccggcgttgcacac

SEQ ID NO: 5354 - DNA, 383 bp, Zea mays
  unsure (1)..(383): unsure at all n locations; Clone ID: LIB3137-043-Q1-K1-G11
accaacccanctcgctcgtcccagcttatcatgtcgagcacctagtagcgacctgcggcagctcagtgtagagtgtcggtaggtgtctgtctctcttggtggctggttgcaacggtcatggcgacgtcgtctcgtcgggtgcccttgctgctgctgtgcctgggcgtgctggtgtcctgctccttcgcggcgggcagcttggaccaagaactggacatcacgtggggcgacgggcggggcaagggccctgaccacgggccgcttctgaccctttcccttgaacggaccttccgcttccggtttcaatcccgggaccaatacctgtttcgcaagaaccacatgcaacttccggtggtgccgggcaacttcggcgggaccggtac

SEQ ID NO: 5355 - DNA, 311 bp, Zea mays
  Clone ID: LIB3137-043-Q1-K1-G2
gcttctcctctcgcgtctcgtaccacgtcaggagggagggagggagacgggagaaccagggagcggaggcgtgcgtgctgcggcctgcggcctgcaggaccagagatcggggactgagctagggtctgggactgggaggcggagatgtcgacgccggcgaggaagcgcctgatgcgggacttcaagcggttgcagcaggacccgcccgccggcatcagcggcgcgccgcacgacaacaacatcatgctctggaacgccgtcatattcgggccggatgacacgccgtgggacggaggcacgttcaagctgac

SEQ ID NO: 5356 - DNA, 291 bp, Zea mays
  Clone ID: LIB3137-043-Q1-K1-G3
cttgtgaccctccctcagccgcgtcgcgtcgcatcctacgatccaaagctctctctggtcgcaggtcgcagccatggcgaagaactacccgaccgtgagcgccgagtacagcgaggctgtggacaaggccaggcgcaagctccgagccctcatcgccgagaagagctgcgccccgctcatgctccgcctcgcgtggcactccgcggggacgttcgacgtgtcgtcgaggaccggcggtccattcggcacgatgaagcatcagtcggaattggctcacggcgctaacgcggg

SEQ ID NO: 5357 - DNA, 382 bp, Zea mays
  Clone ID: LIB3137-043-Q1-K1-G4
atggaacagtgtgttatttgtcgtgtggagtttgacgagggcgagtcattagttgcactcggtgcaaacatccataccattctgagtgcataaaccagtggctgcagctaaacaaggtatgcccgatgtgcagtgctgaagttcccacttctgtgaacaagcaggcatgacttactcaaacggaagaagatagcggtggcttggtatttatctgccattgatggaatgaaagaagcgccaactgttaaattgttcaaggaagcaagggaattggctgggttctgattccctgttttcttcaattcgacaggcttaatcccccccggcctgtacgcatgctaatttgtatggccataccgctggttatttatgcattccatcc

SEQ ID NO: 5358 - DNA, 424 bp, Zea mays
  Clone ID: LIB3137-043-Q1-K1-G5
ggcgccgggcacggcggccgggtcgcgctcacccgcgcctaccaccgcgcgctcgaggacgccgtggcgcgcaacttccccgacaacggctgcatctcctgcatgtgccacaacaccgacatgctctacagcgcgcgccagaccgccgtcgtgcgcgcctccgacgacttctacccgcgcgacccggcgtcgcacaccgtccacgtctcctccgtcgcctacaacaccctcttcctcggggaggtcatgcaacccgactgggacatgttccataacctgcacccggcgggggactaccacggggcggggagggcaatcggcggctggcccatctacgtcagcgacaagccaggcaaccacaacttcgagctgctcaagaagctggtgcttcccgacgggttcgtgcttcgcgcgcaacttccgg

SEQ ID NO: 5359 - DNA, 374 bp, Zea mays
  unsure (1)..(374): unsure at all n locations; Clone ID: LIB3137-043-Q1-K1-G7
gcagctgccaccggggttccggttccacccgacggacgaggagctggtgatgcactagctgggccgccgctgcgccggcctgcccatcgccgtccccatcatcgccgagatcgacctctacaagttcgacccatggcagctcccaaggatggcgctgtacggcgagaaggagtggtacttcttctccccgcgggaccgcaagtacccgaacgggtccaggcccaaccgcgccgccggggctgggtactggaaggccaccggcgctgacaagcccgtgggcacgcncaagccgctggccatcaagaaggcgctcgtcttctacgccggcaggcgcccaaggcgagagaccactgatcatgccagaccgctcgcga

SEQ ID NO: 5360 - DNA, 296 bp, Zea mays
  Clone ID: LIB3137-043-Q1-K1-H11
gtttttgaatattcatggcaaaaatttatggtttacaaaattccttcatttcatctacgaggaaatcgggcaggctctactacctttacctggcgatgctaaaagccaaccagcactagcaacagcgactcaatttgctgccacacaaacatctgcactagcagaggacgctaccgcagaagccaccacggaatgagatcctgcaacgtcaactcctctttcaccttatacaaattacccagattgtggtgcccgacgaggtgggggcgtcgtttgagaggcccgatgaggcgtcg

SEQ ID NO: 5361 - DNA, 424 bp, Zea mays
  Clone ID: LIB3137-043-Q1-K1-H2
cttcaagccagccgtctccttatccctgcgacgccgctcacctgtgctcatcttccagccgggctctctgcccagcagcatagcacaccatcctctccactcggatccccaagccctcgcctccagctttgccacggcatccgtcccctgcttggacctccacccggccgcgtcctcgccggtggccagcccgctgcatcgccattcctagcgtcggccttggcaccgcttccccaagcgccccagtcgagctcgcccatcctctgctctagccctttctccacgccgtagctgatctcgcccctctcctcagccatggacacgacgacctgcaagccttcttggggggccaagccatctttctgctcgcgccccttcttttttcaactttgcggggattaactcggccaacccccaagggggt

SEQ ID NO: 5362 - DNA, 422 bp, Zea mays
  Clone ID: LIB3137-043-Q1-K1-H4
ctccactcccgcggaaaaaaaacccatatccttccggcataaacccaaaaagctgcaagcagggtggccaaaagcaggcctgacggcgatcctcggctctctagccaggcagcaggagatggagcacgacgtgcaccaccagcaggccatggagctgccgccggggttccgattccaccccaccgacgaggagctcatcacgcactacctcgccaggaaagccgccgacgaccgcttcgccccgcgcgccgtcggcgaagccgacctcaacaagtgcgagccatgggacctgccatcccgggcgaccatgggcgaaaaggagtggtacttcttctgcgtcaagtaccgcaagtacccgacgggactgaggacgaaccgggccaccgaattcggatactggaaagcgacgggcaaggacaggg

SEQ ID NO: 5363 - DNA, 115 bp, Zea mays
  Clone ID: LIB3137-043-Q1-K1-H6
ttgcgcactcttgcggggatacctagccaacagtgcgtcgccagctgggggggatacataagaatcaaatggcacctttaactgcgtaatcaaacaaacacctgcaactgaaaca

SEQ ID NO: 5364 - DNA, 324 bp, Zea mays
  unsure (1)..(324): unsure at all n locations; Clone ID: LIB3137-043-Q1-K1-H8
cgtcctttttaggccatccttctccttatccctgcgattcctttcacctgtgctcatcttccanccccgctcgctttccaacagcatagcacaccatcctctccactcgcatccccaagccctcgcctccagctttgccacggcatccgtcccctgcttggacctccacccggccgcgtcctcgccggtggccagcccgctgcatcgccattcctagcgtctgccttggcaccgcttccccaagcgccccactcgagctcgcccatcctctgctctagccctttctccacgcccgaactgatctcgccccctctcctcaaccat

SEQ ID NO: 5365 - DNA, 413 bp, Zea mays
  Clone ID: LIB3137-044-Q1-K1-A1
cgcgcacagaaacacaagcgagtaccagagcagctaggagtggtcagtaatggcgcagctgagagcagccgccgacgagcagcaggaggcggcgatgcacggcgtcgcctccggcgacgggaacgagagcaacaagaaggcgcgcgcggggctctgtggcctgctccgcgagcgcaaggtggtggacctggcgcgggccaagcggcggctggtggaggttccctacaccgcgacgctggcgcacacggccaacgcgctcctggcagcgcgcgtctctgccgtggccgtggctgcgccaccgggccactggatcggcgccggcggctccatgatcctcgagtccgacccggccaccggcgccgtccgcaagcactacatcggcatggtgaacatgctcgacatcctttgccaca

SEQ ID NO: 5366 - DNA, 373 bp, Zea mays
  Clone ID: LIB3137-044-Q1-K1-A10
gaaggcggcggcggaggcaccggcaccggcaccgcctaggaaaggaaaccgaggaaactggagccggggtggtacggatccgtctggcgcggttcgggtgccgtaatcggcccttctaccgggtgatggccgccgatagccgcttttctcgagacggcaagcacctcgaggtcctcggctactataacccgctcccagggaaggatggaggcaagaggatgggcctgaaattcgaccgggtgaagtattggctgtcagttggggcacagccatcacatcctgtgcagagtattttctttcgtgccggacttctgccaccacctccattgctagctatggcacggaagggtgggccacgtgataggcgccccat

SEQ ID NO: 5367 - DNA, 335 bp, Zea mays
  unsure (1)..(335): unsure at all n locations; Clone ID: LIB3137-044-Q1-K1-A12
gaccacgcgtccggctctctcctcttgcgattcgctcgctcgatcctagcttctcttccaagaagcgcagcgcgcatgggcatggacacgcaagcctccgccgccacgcgccacctgctggccgccgcctgggcgccggcggcgaagccgcggcagctgagctcgcagctcgcgctgccgtcgtcgtcctcccgcgggccggccccgctccgcgcgtncaccggaggaggcggtggaggcgcctaatgggttcgtggccccgcagctggaccccagcacgccgtccccgatcttcggcggcagcacgggcgggctgctccgcaaggcgcaggtgg

SEQ ID NO: 5368 - DNA, 290 bp, Zea mays
  Clone ID: LIB3137-044-Q1-K1-A2
gcctccgcaaccaccacatgctggtggcggccaaccaaactatcagccccaaatgcaaaggccacagacgggctacaaccctggcggtgctcctcactaccagcaaggtgctgctcctggctaccaaggtggacctccggggtatcaaggtggtaaccaagggaacccaggtcctgcctaccaaggtggtaacactggttatcaaggtggcaacccaccacctccctaccaaggaagcaacccaccacctccctaccagggaagcaacccaccacctccttaccagggag

SEQ ID NO: 5369 - DNA, 317 bp, Zea mays
  unsure (1)..(317): unsure at all n locations; Clone ID: LIB3137-044-Q1-K1-A3
ctcgggcataaacacaaactattaccacatcttctattactgtccagtaatgacgcagctgacagcggccgcctacaagcagcacgatgctcctatgcacgacgtcggctctggcgacgggtacgagagcaacaataaggcgcgcgcggggctctgtggcctgctccncgagcgcaagtacgttgacctggcgcgtgcctatcagcgtctgatggaagctccttactccgcgacgctggcgcacacggccaactcgcttctggcagaccgcgtctctgccttgggcgtggctgcccatcgggccactgcatcggtgc

SEQ ID NO: 5370 - DNA, 368 bp, Zea mays
  Clone ID: LIB3137-044-Q1-K1-A4
actggttctagaccgagagcagcatcaccattgactacagttccgagttcccgctcaacggccagccgcgccacccaactggacatcgagccgcaattccagctggaccgtcgcgccatcatgtcgataaacaaggcagacgtcggctacaactgcatcaccagctgcggcagcccacggccgaggagcgctggggcccttatgcctgctcgttctcgcctaccgtcgactccgacctgagcagaccggcgtatacttttacttggccaagggcctgtaccgatccctcgccacgcacttctgccaagacgagtcccgctcctccagcgccaccgacatcagtcaagcgcgtcgtacggtagcgccgt

SEQ ID NO: 5371 - DNA, 425 bp, Zea mays
  Clone ID: LIB3137-044-Q1-K1-A5
acccaatcagcttcttttgacttttcactgtgatttcgcgtgtagctcggttcgggtctgatcgagagccggccggtctaggtgtagtgctgcaaaaccaacaccaccgtgcaggcacactctctgcgggcggcaagatcgacggacaatcctgcgcggctgcgcccgtaggtatataccggtcgtcgatcaggttcgtcagttcttcattcattcaggtcgacgtgcaactggtaattgtacaagatcttgggcagctgccgtatggagatcgatgagtgccgagttagcatggaggacgactggtggtcatggttggtacagagctagctagccgtccgatcgggtatcggattaatctgattgccagttttgctttttgtttgggcgcgtcaagtatcttacatcttaagaagaagcctact

SEQ ID NO: 5372 - DNA, 336 bp, Zea mays
  unsure (1)..(336): unsure at all n locations; Clone ID: LIB3137-044-Q1-K1-A6
gagggacgacccacgcgctgcgnaaccaccacatcctactcgcggctaacccaactatcaacccctaatccaaaccgccacgagacgacctacaaccctgacccagatcctcactacaagcaacatacttctcctcgctaccacagttaaactccgggatataatgatagtgacaaccataacccagctcctccataccaacgtgaccacactccttatcatggcggaagcccaccacctccttaccaacgaagaaacccaccacctgtctaccaggcaagaaacagaccaccttcttagcaacgaactacgccaccagctccaccacctctttat

SEQ ID NO: 5373 - DNA, 355 bp, Zea mays
  Clone ID: LIB3137-044-Q1-K1-A9
aacaaataagctgaaagtactgtcaaggtcattcgactgttatgctcgctctcatctatgggtgcggtggatgtatacctctacgacatcgagggacttctcataaaatcctatgaacctgctgtgaatgtttcaagagatatgactgcaggagaacattttggcattggagcaaacatcacagatctacactgtatccaaagatagatgatgatagattgtctttctggctctgatggcaaggagggcattgctaaagcagacagtttactctgctcaacttacctcaatggtgatactcatggagatgacaaaaggaaaccagcatttacagaagctgacatggctggtgcac

SEQ ID NO: 5374 - DNA, 311 bp, Zea mays
  Clone ID: LIB3137-044-Q1-K1-B1
atcttatgcacaaatccaagcctaaagctatacattctcacaacacgtctggagataactgtattgctatagaaccgaacgctacatcacacttacccaaactctgtcttgccaacacggaccatatcccaaacctactgtcgcccaatgaacatcaaagcaccgtgatcgctatctatactctctcacaatacattactacatctactgtggatgggcactttagtctcgcgctgtaaagtacaagcttctatgctgaacaagacagccatatatttcacacttagagcatctatgaatcatgtagagct

SEQ ID NO: 5375 - DNA, 276 bp, Zea mays
  Clone ID: LIB3137-044-Q1-K1-B2
cttctatggaagaagcgaggcaaaaagctagaaatgctcgtaacaagtctggagggaactgtattgctatggatgcgaatgctacagcgcagttgcgcaaactggggcttgccagcacggacgatagcccaaagtttctgtggcccaaggaacatgaaagcgtggtgaaggctatctatactggctcagaatacattactacagctactggtgatggggactttggtcttgtgctggaaagtacaagtttctatgctgaacaaggaggccagatat

SEQ ID NO: 5376 - DNA, 252 bp, Zea mays
  unsure (1)..(252): unsure at all n locations; Clone ID: LIB3137-044-Q1-K1-B3
ctttcatttattaacccacacaaaaagctattcttgctctcaacaagcacctagagaactgtattggtattaattcacatgctccacctcaatttcccaaactcattctttcacccacggatcatatccaaactcttctttgacccaagctacattataacgctgtnctcactatctatacttcctgataatacattactacacctacctgtacatttgactattttcttccctgtaaatgtccacatctat

SEQ ID NO: 5377 - DNA, 415 bp, Zea mays
  Clone ID: LIB3137-044-Q1-K1-B4
gtgctcatccaccacggcaagcccgtctgcgagtcccagatcatcgtgcagtacgtcgacgaggctttccccgccgccgcacctaatttccttccatccgacccctacgaccgcgccattgctcgcttctgggcctcctacgtcgacgacaagttctacagcgcgtggatacccgtgttcaggggcaggacggcggaggagatggcggaggcggcgaggcaggccgtcgcggcgctggagacgctggagcaggcgttcagggagtgctccaaggggaaggccttcttcggaggggacagcgtggggctcgtcgacgtcgtgctcggcggccttgttgggtggctgtacgccaccgaggccatctgcggggtgaaggccctcgacgccggcaggacgccgcttcttgcggcgtggg

SEQ ID NO: 5378 - DNA, 277 bp, Zea mays
  unsure (1)..(277): unsure at all n locations; Clone ID: LIB3137-044-Q1-K1-B5
cgggccgacccacgcatccttttacacctaattccccacacttcttcctttctcccaaataaacccaccatttgcattcgttcttatcaaataccactctctcttcataaatatatatactcccacacatatatagcttataaaactataaccttctcatccacacacaacacatatctccanncatacacacaacacaccacccatctttcttaaattctaaccttctctatctctcaagaacattattcctacaatacaactaccatatacatcc

SEQ ID NO: 5379 - DNA, 414 bp, Zea mays
  Clone ID: LIB3137-044-Q1-K1-B6
tctcgctcctgctatccctcctggccgttgccgcttacggccgtctcatatccaacgggggcgggttcgatcagctcctttcagtgatcctcctctcacggtcctttccggccgcggaggctggcaacaaggccctggagaagtgcgaacattcctacgggttgcttccctgcacataccagcgtgctaataaaccactacactcgcgctgacatacggatacctcatgtacaatgcggacacctacctgtcatccgtgagcgagctgctccttgagatcatcttgccccgcctagtaggcagtctgctccttcacattctacacgcccttcccgacgcgctcctagtgctcacatatggcctgttcgggagtaaagacgaagcacacagtcatgtactgatctgaatgggact

SEQ ID NO: 5380 - DNA, 410 bp, Zea mays
  unsure (1)..(410): unsure at all n locations; Clone ID: LIB3137-044-Q1-K1-B7
gcggaaaaaaagagtgtcacaaacaactactccctccggtttcctattagttgtcgtgttggagaaggttcgagtcaaacttataaaattttgactacaaataactatttcgttatttagttttggaacataatatttatatatgcaccaatttgtcataaagagnacttttataaaagtataaatgtattaagagttaatttgtattttaacaaaaaaacattggtcaaagttatattttggagaccatgtcgttgttctaaacgataactaatatgaaaccggagggagtatattttagcggaatgattaataatctaatggtatacatgacgtatgggcgtcttaagcaagccatgttcggaaatgcagaatcggcgcatagcctgcatcggcggacctggacatgt

SEQ ID NO: 5381 - DNA, 329 bp, Zea mays
  unsure (1)..(329): unsure at all n locations; Clone ID: LIB3137-044-Q1-K1-B8
ggaattccaggcacgccccactccatatcctatgcacgacttatataaagacttcattcttacccagcgcctcatacagtgtagtgtctggatcaatggtaaaacccttacattcacaaaaatcactataagtgcctatcacccgcgaaatgcattgtttacaccaattctcaaccgtcgtacttcttgcncctatcacgattttgtaccatttacactatatgctctctcatatgcttcctctccactgacacatactcactactaatattttccctcttctcgcatgatactgtaacaatcatgaagccctgttatataaatcctca

SEQ ID NO: 5382 - DNA, 322 bp, Zea mays
  Clone ID: LIB3137-044-Q1-K1-B9
gtcttctccttcccctccggttcgaattcatgttcgttaggttctccggcgttcgctttcgtgggtgagcgtatcgagatggcggcgtccgatgttgagtaccgctgcttcgtcggcggcctcgcctggaccacggactaccactccctgcacaacgccttcagcacctacagcgaggtcctcgagtacaagatcatcctcgatcgggagacgcagacgtcccgcggcttctgcttcgtcaccttctccacggacgatgcgatgccgaacgccatcgagggcattaacagcaaggagctggacggccgcaacatcaccgtca

SEQ ID NO: 5383 - DNA, 427 bp, Zea mays
  Clone ID: LIB3137-044-Q1-K1-C1
atgcgcctcgcgtacgcgcccataccgtaccgttcccgaaacactagggcgcggcacgcaccctgggggtgagcgcggggtcgggcgcatgcggcatggcgccgcatgccgcggtgtcgacccctgcggtggcggcgctcgggttcctcctccctacctgctgggacatcgaggtcacgtgcgccgccgcgatgatcctcgtcgcgctctacgctgcgtacgagctcctcaacccgcgccccttccaggctgcagcggcggtcgacgccgacgagctcctcgtgcgggggctagacagcaccaacaaggggggtgcgagcggccgttctgcgtatgtactgaagctagaattgttggctgctatgaattttgatggcggggaacttaaatgggacatctgacccgtatgcattgatcacttgtggtg

SEQ ID NO: 5384 - DNA, 148 bp, Zea mays
  unsure (1)..(148): unsure at all n locations; Clone ID: LIB3137-044-Q1-K1-C10
acccacgcgtccgggacgatgggcagctcacactctgnccttaagcctgccacgtccaacacacacncggggccagggaccttttacaacactattgtctcccacacatttcccaagctgaatcgcgcttgctacaacatcgatacta

SEQ ID NO: 5385 - DNA, 456 bp, Zea mays
  Clone ID: LIB3137-044-Q1-K1-C2
tgcagatcccttgttccacgagtataaagtattcatcaatcccagcaccacagatgtggggtgtacgaccaccgctgaagccctggcaatgggaaagatagttatatgtgccaatcacccgtcaaatgagttcttcaagcagttccccaactgccgtgtctatgacaatgaagacgagtttgtacaactaacactgaatgctctatcagagcagcctgctccactgacagatacgcagaggtacgagttgtcatgggacgctgcgactgaaagattcatcgaggcctctgatataaatcctcatgtgccggagtccagggcccatcaaaactctagggctttgttgcctgcttttctaagaactcgtaaactgaaacagaacttagaggatgcgtcagtttacctgcaccaagccctgtcaggtctggaagtcactcgctgtgcgtttggtgctgt

SEQ ID NO: 5386 - DNA, 321 bp, Zea mays
  Clone ID: LIB3137-044-Q1-K1-C3
tcacgatcccaacacgaacgagcacacaatctcgaatactcgtttaggaaaaaccacagtgcgtcgggccacgcatgcatcatggactacggtcaacataggcatatcggccactgttccacggtccatgttgaccagtacggtaacccactcggcggcgtatagcactgaacacgagttattacacacaacactgaatccaccatcagaatgggccacttgagtgagcactgcggagctgtcataggtgtcatgcaactccagccttcgaggaatgatcacaagatcggctgcatactgcatcgttccggcagctacagc

SEQ ID NO: 5387 - DNA, 450 bp, Zea mays
  Clone ID: LIB3137-044-Q1-K1-C4
ccacatcgagaacacgatcgagcacacaagcacgaagactcgtttaggagaaaccacaagcgcaccaagccgtgcaagcatcatggagtacggtcagcaggggcagcgcggccacggcgccacgggccatgtcgaccagtacggcaacccagtcggcggcgtcgagcacggcaccggcggcatgaggcacggcacgggaaccaccggcggcatgggccagctgggtgagcacggcggcgctggcatgggtggcgggcagttccagcctgcgagggaggagcacaagaccggcggcatcctgcatcgctccggcagctccagctccagctcgtcggaggacgacggcatgggcggaaggaggaagaagggaatcaaggagaagatcaaagagaagctgccctgaggccacaaggacgaccagcacgccacggcgacgaccggcggcgccta

SEQ ID NO: 5388 - DNA, 216 bp, Zea mays
  unsure (1)..(216): unsure at all n locations; Clone ID: LIB3137-044-Q1-K1-C6
gaccacgcgtccgcacaattctaacaccatctagcacacaatcttcatttctcctttaagaaaaaacacaaaggacccgaccactcangcatcatttattaccntcaacatattcatatcttccacttacccaccatccatgttttccaatactttaactccactcttctgtttatttcgctgcaccctctttattatacacaacacttgatccac

SEQ ID NO: 5389 - DNA, 57 bp, Zea mays
  Clone ID: LIB3137-044-Q1-K1-C7
cagggccgacccacgcatgcatactagatctaaatcgctagcgtttctttctttatc

SEQ ID NO: 5390 - DNA, 161 bp, Zea mays
  Clone ID: LIB3137-044-Q1-K1-C8
aattcgaggcacgacccactcactatccttgcgccattctacatgaaacattcttatctactcctacatccgacacaaaagatctggtataaaaaaacctaaactcaccttactggccttccatatacacccaccccactggaaaaaccctgtctttaccc

SEQ ID NO: 5391 - DNA, 411 bp, Zea mays
  Clone ID: LIB3137-044-Q1-K1-C9
ctggagaacaatgagaacaagcctgtcacatacagtcttgacactcaagagatacgcctggaacagggccttcatatgctcaagatattcaaggatcatgtcagcaaaacttccatcctcgacgactttgccttctatgagagccgccagaagttgatgcaggataagaggtccaaacagcagcagctccaaaagcaggtctgggacactaggacccccgtttctgtcaccggtgaacgaccacaggaacctgctaatgggaagcccaatccgtccgtaccagatggtgtcacggcagaggtgaaggcggtgaaggctcccgcagagaacggcatcactgctcctgttgtttcctatgcagcaaaggtggcccagacagcaccagagaaacccgtcctctccaacggagtc

SEQ ID NO: 5392 - DNA, 453 bp, Zea mays
  Clone ID: LIB3137-044-Q1-K1-D1
ggaggagggctttagcgatggtcctgttcatggctggcgccgcgctgctcgccggggctggcggcgccggcgcgcagcagggcgtgtggagcatcatcacccggcccatgttccagagcatgctgagccaccgcggcgacagcgggtgccagggcgccttctacacctacgacgccttcatcgaggccgccagcaagttccccggcttcggcaccaccggcgacgagcagacgcgcaggcgggagctcgccgccttcttcggccagacgtcccacgaaaccaccggtggatgggcgactgctccggatggaccgtttgcctggggatactgccgggtgaaggaacagaaacagacggacccaccctactatggacgaggacccatacagctaactcataagtacaactacaggctcgcccggcaagcgctgaacctgaacctggtggcgaccc

SEQ ID NO: 5393 - DNA, 350 bp, Zea mays
  Clone ID: LIB3137-044-Q1-K1-D2
cggacgcgtgggcggacgcgtggggaaaattgtcaaacttcttaaattgcgaggagaaaggaaggcggagaaaaagcagaaggcaccatctagtagttcagtaaatgccgagaacgatgatgatgtcctgggtttagtaagagaaattaacttgagcaaccaagaagatttggaggaattgcaaaagggcaagcctaagaagcgcctgacagatacaaaaaatagtaacaagaagccacttgatttttcttcacctaaacgcaaaagatcaatttctaagagtagaccacattcagcataaggtagtaaaaacagtgatgaccgtctaatacatactcctaacacagaga

SEQ ID NO: 5394 - DNA, 339 bp, Zea mays
  Clone ID: LIB3137-044-Q1-K1-D3
ggcacaagccatggcgtccatgaccggcctctcgcagggcgttctgcccagcaggcgcggggccaacagggccaggacggccgccgtcgtcagggcgtccgccgaggcgcaggcgcaggcgggccgccgcgccgtgctcgggctggtgggcactggcatcgtcggcggcgccttgtctcaggcggtgcacgccgagaccgtcaagaccatcaagatcggagccccgccgccgccctccggtggactccccgggactctgaactctgaccaggcgagggacttcgacctccccttgaaggagcggttctacctgcagccgctgccgccagcggaggcggt

SEQ ID NO: 5395 - DNA, 276 bp, Zea mays
  Clone ID: LIB3137-044-Q1-K1-D4
gtcactaaatatatcataccagcaccttcttttttatatcataatcgctttcaactacgcgtcgatggtgtttctatacggatgtctcttcccataccttacaccaaaccacaactcatgttatattccccgcatatctcggctttttttacatagacctcactgaatcattttaagcactattatatgaaacacttactatcccaaacccaaacatagagctccttattacggcctccggtggaatcttttgtgctactgactctatactatatt

SEQ ID NO: 5396 - DNA, 360 bp, Zea mays
  unsure (1)..(360): unsure at all n locations; Clone ID: LIB3137-044-Q1-K1-D5
ggcctctgcctgtccctctcgtgtcttgcctttgtgcggtgctcgatcctgcccgtcgcgtgtccgtccaccgctgagaagatccaccattaaatgcctgatccacccacctcctcctcctggcttccctatatcactcacccatccacctctcttcgaccncacctcacagactcctcacacttagtactgttagccaggaacaagccccagcagcagcagcagcaatggccgtggagaacggcagcgcctactaggctgcggcggtgaccgtgaccgtgacctgcgcccgcaccgtggctccggccaataaccgctgcacgctcgccacctttgacctncaatacattaccttctact

SEQ ID NO: 5397 - DNA, 319 bp, Zea mays
  unsure (1)..(319): unsure at all n locations; Clone ID: LIB3137-044-Q1-K1-D7
gggacgacccacgcgtgctaaagcaagccatgtagaggagggctttacctatggtcctgttcatggntggcgcgaggcggctcgtctgcaccggcgcctccttcactcatcatttcttgtgtatcatcataacccggcccatgttctagagcatgctgatacactcattcgacaagctgtnccacccctccttgtacacctactacgccttcatcgaggccaccagcatgttccccgtcttttgcaccaccggcgacaagcagactcgcattcggaagctcatacccttatatctccaaacgtcccactaaaccaccgg

SEQ ID NO: 5398 - DNA, 249 bp, Zea mays
  Clone ID: LIB3137-044-Q1-K1-D9
aaaaaagcaatacatcattgtctgcaactacacagatttttctgcatacgcgcattgtgtggaagggggagcaggaagaccgaccacaacggccatctcaacctagatacacggtacaactatcgcttgcaccgtctgtcgctggactgtttaccttctgcacatacttaccgttgacaaccgagtctaccacatgggctgcttccgctgtcacctctgttaggacaccctcaagcttgccaactacaa

SEQ ID NO: 5399 - DNA, 411 bp, Zea mays
  Clone ID: LIB3137-044-Q1-K1-E1
cgttcccctcctgcacgcaacctcatctcgttctccagatccaggatggccgtcctccttgagaccttgcctccccgagtgctctcggtgagctactttgtttcgatttatcaggaaatccgtttgcttcatgttgtgcaggctcatatctgattgctggattcggcaaacccgcgttggatcctgtatcggttagtccttgcctgcaaggttcttgttgttttgttttggtggtcgagcatcgcatgttctgcttctggatccagatctggagaaatcgcgaagtcgtcgtcgttcggttcggagcggatctgaggcgacgatagaatgaagcgggcgggatctctcggtctgcagtcctgctccacctcgaatggatgaatgtctctggcgctgataaattattgggat

SEQ ID NO: 5400 - DNA, 418 bp, Zea mays
  Clone ID: LIB3137-044-Q1-K1-E2
ggcagattggggtgcggaggagggcgtccgtatttgatgccttcgcgtctttcgccggcggggtcttcgtggatgaggcgattggagcggaatatggggagggcttcgaaacatttcgaatggatggaccactcaaggttgatgtggattatctgaatgaaaaattgcaagagtgcttccttcaaaggataaggcatgctatgaagccggatgaggcgtttggtctaattttttcgtgggacaatgttattgctgatacagactcgctaaagttgaatgcttggagacaacttgctttggaggaaggtaaggatatcccaagtggtgctcatgtccggaagagcattattcatggtgctgctgaccatgttcttagaaaaggtttgtactgggcaaaaagaggaagataaaatgggaa

SEQ ID NO: 5401 - DNA, 407 bp, Zea mays
  Clone ID: LIB3137-044-Q1-K1-E3
cgagcggcccccttttttttttttttttaacagtagcatatgaatacgatacaacaatactgcgaatctctcagcagtttcagtacagagtcgaaaaggggggaaaaagaaagaaagatatcggacgaccaaactagtaaaagataacagatcagcacataataatgctggctgctgccaagccaaattatacccaatcactaagccggcatggcatgggttgcagttgcagcggcgattgccaaagcccttcatcatccttctctccgttcatcttctatggagcagcagccagtcactgatcaaacacacacatccagcaacagcaattcttgcagggtacagcagagccagaggaaggtagtcctcatgtccacagtgacactcccaacccttaagccgatgcc

SEQ ID NO: 5402 - DNA, 436 bp, Zea mays
  Clone ID: LIB3137-044-Q1-K1-E4
gccgctcatgctcccgcacaaggccagctctaacgtcaagataggaggttacaacatccggggagggcgccaacgtgatggtgaacgtgtgggcggtggcgcgtgatcccaaggtctggagcaacccgctggagtacagaccggagcgcttcctggaggagaacatcgacatcaagggcagcgacttcagggtgctgccgttcggtgctggccggcgtgtgtgcccgggcgcgcagctcggcatcaacctcgtggcctccatgatcggacaccttctgcatcacttcgagtggtccctgccggagggcactagaccagaggacgtcaacatgatggagtcccccgggctcgttacgttcatgggcacaccgctgcaagctgtcgtcaagccccgcctggagaagaggagctgtacatatggttccagttgagatgt

SEQ ID NO: 5403 - DNA, 269 bp, Zea mays
  unsure (1)..(269): unsure at all n locations; Clone ID: LIB3137-044-Q1-K1-E5
ctcagccacactcatggatctctttctactttatctacgaccgaaactactacgaggcgtgtgccttcacctatcggtctcactacgttcacaagctcctatctatgaacaaaatcccttacctgatgatccccctgaacatatctcattacatcattatcgncaagctcattctgaacctgaatcttctccttaacctgtcctcctttgtcaccactttgatttagccctcaagcaacaaactcattatttactccttcaacactaac

SEQ ID NO: 5404 - DNA, 437 bp, Zea mays
  Clone ID: LIB3137-044-Q1-K1-E6
agcacgcatgtgcagactcctaggtctaggttaacgagatggctactgccacgggcttagggtttaatcaagctgactcttctacgtcccagtcaagatttatacacgctgatattgtcagaatcattttatattacacataatatatatacacgcaccttagtgaatttccaaagagatttgtagagctatctgcatatcttgatattatgcctgtacagaacggtcaacgaagagcagtgcctgtaccgtcaactccagaacttgctaggagcatcgtacattctgttttgaacgaccatgacactcgctatcgtcaaagatatgttgatgttatggcaaatgatcaagcgaggcacacttttgagaatcaacctatacttgttgtatatatccaaacatatcttgttgaccgagaatttttcgctgtagctact

SEQ ID NO: 5405 - DNA, 301 bp, Zea mays
  Clone ID: LIB3137-044-Q1-K1-E9
cacacaccagtacctaccccccttgttgtcttcatctatccgggccaccgatctaccagggcgggtgccaagtcgctgaacgcccgcctggacttcaaacatattctgcgtctgctgatcaccaacaagcatgggaagaagaagatcatgtttgacatgacactaataatgggcgttgtctaccagatattcaacactttcagcaacaacgccgacatcgacatgaacaagacggctctcgagctgacgcatgaacagttgcagcacctcatgacggtcgtggccaaccctatgcagttca

SEQ ID NO: 5406 - DNA, 401 bp, Zea mays
  Clone ID: LIB3137-044-Q1-K1-F1
cggacgcgtgggcggacgcgtgggcggacgcgtgggcggacgcgtgggtccagggtaaagaggattgagaggaaggtgcgatcactcactccaacatctgacgagcttgcatctcttgatctcagagagggcaggaacgtggtaacattaacgttctcaactgcaattgttgggaaacagcaggttgattgccacatatatttatggagatggaatacacgcattgtaatatctgatgtggatggaactatcaccaagtctgatgttcttgggcagttcatgccactagttggagttgattggtcccaaaacggagttgctcatttattttctgcaataaaggaaaatggatatcagcttctatttctcagtgcacgcgctatttcacaagcccacatcac

SEQ ID NO: 5407 - DNA, 425 bp, Zea mays
  Clone ID: LIB3137-044-Q1-K1-F2
cttctgcttgctctggggggaaggagagagagagagcgagagagagatctagtagagaggctagctaggtggtcctcgaacgaagatgttggcggtgttcagcgggcaggtggtggaggtgccggcggagctggtggcggcgggcagccggacgccgtcgcccaagacgaaggcgtcgcagctggtggggcgcttcctggccgcctccgagccggccgtgtccgtgcagctcggcgaccacggccacctcgcctactcccacaccaaccaggcgctcctccgccccaggtcgttcgcggccaaggacgaggtgttctgcctgttcgagggggtgctggacaacctgggtcgtctgagccagcagcacgggctgtcaagcaagggcgccaacgaggtgctcctcgtcatcgaggcctacaagacgc

SEQ ID NO: 5408 - DNA, 398 bp, Zea mays
  Clone ID: LIB3137-044-Q1-K1-F3
tgcagctcaatgtcaatggatgcccccatggctggagcagcaaatgaaccattaaatgtaagcaatcataacattgaggaacaaaactcatgtcacgaccttggatcaaggatgtcggcaagtgttagcaatgctaaactaatggacaggcatgatatttccaaggagctacagtgcactgctgattccaggctggatactgttcccaaggatcagttctctcctgccattaatccgccggaagttttagacaaacctggcagtcagcttgaaggtgtatccaactatgatgtaaaccaagctccagagactgaaccgggtgggaaacagatgagagaaagaaaaaaaagcaggaaagaaaaaagcggaaacgtgacgaaaactagataaaaaaatat

SEQ ID NO: 5409 - DNA, 439 bp, Zea mays
  Clone ID: LIB3137-044-Q1-K1-F4
cacaagccgacatatggcggctcagcctcttctacctcacgcccctgtcactgaggtgcgccgtggagcttggcatccctacggcgatctaccgccatggcggggctgcctcagccgctgagctggtcacggcgctgtctctcccctccactaagctgccgttcctccgccgcctgctgcggctcctcgccgcgtcgggcgtgttcaccgtcgacaagcagagctcggaggaggagcggtaccgcatcagccccgcgtcctacctcctggtggacggcatccctcacgaggaccacatgaaccacaccgctctggtgctcacctgcacctcgacgcgctacatcgaggcggggatagggctggcggagtggttcaagagggacgtggtcacgtcaccgttcgaggagctgcacggtgcgactctgttccacgagagcat

SEQ ID NO: 5410 - DNA, 208 bp, Zea mays
  Clone ID: LIB3137-044-Q1-K1-F5
acaatccaacatatgtcgattcatctcatttctacatcaccccattgacaatgaggtgcgggctgtaactacacatacgtacaaaactcaactcacgaccctggattaccgaagtcggctagcgtttccaatgctcagctcatggacacacttgatattcacaagtagctacactgctatggttattccactcttgatactggttcac

SEQ ID NO: 5411 - DNA, 441 bp, Zea mays
  unsure (1)..(441): unsure at all n locations; Clone ID: LIB3137-044-Q1-K1-F6
tcgaaaaaaataacaaaaaacaaagcttctactgcgagcatggattcgcttgtgaagggcaggattggctatggtgcttacggcagcancaagccccagatgagctaccaccgccagagcaccgagtccgtgaccaccgtcgtcacggaaattaaccgcatgaccatcaacgacaagccctactacggcggcggcggcggcgtgcataaacaggcctgcaaggtggaggcgttcgatgagcacgacaaagcgtacaacggcaccctggccgtgaagaagcaccacgagtactaggaggaggaggagtacggtcatgtattcgacgcggagtacggtgcacactacggcgactccggcaatgaagaagcatgtctacaactacacnaaagaggcgtgcggagagagcgacgccgtctacggcgctcaccacggtggcgccgg

SEQ ID NO: 5412 - DNA, 310 bp, Zea mays
  Clone ID: LIB3137-044-Q1-K1-F8
ggccgacccacgcgtgcagcgacgccacactcgcacatcttcttttcgttctccaccccccacccctcgcgtcgccggggtggccttcaaggccctttaccaacccccaaacgcggccccctttccatctttgaccccacttgacgccagccgttctctcgccacctcatttcccttcacctcgcactccgcccgcatcgcttgctttcaagcatatactcctgaccatgctcaagcttatttttccctacggcatgctaactcatatcctcacccagctcaatgtgcttcttgccggctcagtcccgaa

SEQ ID NO: 5413 - DNA, 153 bp, Zea mays
  Clone ID: LIB3137-044-Q1-K1-F9
cacctactcagcccaaacctcaacttctctttcctttttataccatcctcccacactcgtgttggtgtcctttttaacacaggcttccaccgcctcctttcaaaactaacaatcccttcatcgttaagtacctcaacgtattcacattcttat

SEQ ID NO: 5414 - DNA, 409 bp, Zea mays
  Clone ID: LIB3137-044-Q1-K1-G1
cggacgcgtggggtcgccgcgatcgaacacacacatcaccagctttgggagccgctgagagaaaccggacgcgcggtggtttgctttcgccggaagcgccgtcggattaagaagcataaagggaggaggacagatggcgggggatcggctgagctgggcggggctgctcaaatggagcctctcctacgtcgacggggcgggaccctctcgcgccgtcagagaggaggagcggcggtggctggcggacgcggtggagcagcacatgatgatggacgtggtgagccggatgagggagattgcgctgctcatgagcaccccgcccgccgtcctggaggcgcagggcatcacccacgacgacatcgaagatttgctgagtgagctgcacgtgcatgttgagtctatcgacatg

SEQ ID NO: 5415 - DNA, 395 bp, Zea mays
  Clone ID: LIB3137-044-Q1-K1-G10
gccaactacagatatatcacatatattccgctcactttatatgaggccacccaacgagctgtcgctggcgttcacgggtctcacgcttttgccttttattggattcttgatagggctcgttcgtcttggactgaacttgaagaactttccgtccttgccagtaccggtcgcatttgcctcacttttccatgctgggataggagcagtcctgatgctctacgttctcttctggatcaagttggaccttttcacaactctcaagtacctaagctttctcggcatcttccttgtgtttgtgggccatagggctctatcctacctttccttggtgtcgacaaaacataagacagcatgagtggacagagtttttttcgaccattcattttttgaggggg

SEQ ID NO: 5416 - DNA, 168 bp, Zea mays
  Clone ID: LIB3137-044-Q1-K1-G11
ataactacacatacatcaaaagaagaacttgattttataagcacatgataccaatggtgatgatgtcatactgtcacatgctctacaattcttacaatactccatatgaagaaaataccatactttcttatcttatcatacgttatgcataaacaaataaacctcttc

SEQ ID NO: 5417 - DNA, 181 bp, Zea mays
  unsure (1)..(181): unsure at all n locations; Clone ID: LIB3137-044-Q1-K1-G12
ggagacccacgcggcgacaactacacatacatcaaaaggatgaatctcgaaatccttacgcacacggaaccaacggtagaggaagtattactgtcacatgctctanaacccaacaacactccatataatatgcataccagactaacttatcttatgacaccttatccctatactactaaac

SEQ ID NO: 5418 - DNA, 426 bp, Zea mays
  unsure (1)..(426): unsure at all n locations; Clone ID: LIB3137-044-Q1-K1-G2
ggaggagcagcagcagcaggcggcgccgaggagcggcatcccactcagtgcttgcaaccgtggctaggggattgaagaagcacttgaagaggctcaatgcgcccaagcattggatgctcgacaagcttggcggagcttttgctcccaagccatcttctggacctcacaagtccagggagtgccttcctctgatcctcatcatcaggaacaggctcaagtatgctctgaactaccgtgaggtcatttctatcctgatgcaacgccatgtacttgttgatggcaaggtcaggactgacaagacctaccctgctgggttcatggatgtcatttccatccctaagacaatggagaactacaggctgctttatgacaccaagggccgcttncgtcttcacccaatcagggatgaggatgccaagttcaagc

SEQ ID NO: 5419 - DNA, 416 bp, Zea mays
  Clone ID: LIB3137-044-Q1-K1-G3
tgttcttgcaatccagcgcattgcttcctgcctccaggaagaatgcaagaaaaacaataggggtgatctgatatcactagcttgttcgaaggagatatgctttcaccctccttggtcttcgaatgttaatgggtttgcatgtgatacgaacatgacctcctttagtcaacgaaatgtgtctacttgtttaagtggtaaagggtcgtttgcttatggaatctatttgggggctcttcctgttatatcgagcaattcgcttgctgtcaaaattctctatcctatattttggggcctcatgacactcagtacttttggtaacgatcttgccccaacaagcaatggtattgaggtgatattcatcataatcaatgtcctcagtggcctgatgctcttcacattgctgatcggaaacatac

SEQ ID NO: 5420 - DNA, 417 bp, Zea mays
  Clone ID: LIB3137-044-Q1-K1-G4
cggacgcgtgggtgcgcggggtgctttcctcgcagcaaatattcctgccttttgcattcgggctttgcaagttccttgctttgggcatatatattgtgaggtctctatatatataggtggttcgaggtgatcggcagaaccacacaggcaaagatggcgagcgtgcacaaggccaccacccttgttctcatgttctgcctgctagcgctggggagagcggagtacctcaagtacaaggacccgaagcagcccgtcgctgttcgcatcaaggacctgctgggtcggatgactctcgccgaaaagatcggccagatgacgcacatcgagagggaaaacgccacggccgacgcgctggccaaatacttcataagtagcgtgctcagcggcggaggcagcgtgcctgctcctcaggcgtct

SEQ ID NO: 5421 - DNA, 258 bp, Zea mays
  Clone ID: LIB3137-044-Q1-K1-G5
cccatgcttcctattgtcactcgctttcctttcaacaagctaattaagcccggtgataccgcttctatctcggttgattatccataacacatgataaccaccaccaccaccacctcttgtaccacaagaaggacgaggaacagctctcccccggtgtatacctctagtacaccctgtacactgatgccaccgtgactgacgttgtttccaccaactataacgagcaccacgagttcatgaacgacgagaaggagcaca

SEQ ID NO: 5422 - DNA, 226 bp, Zea mays
  Clone ID: LIB3137-044-Q1-K1-G9
gataactacgcatacatgaaaaggaaggatcttgatttatagaagcacaaggtaccaattgtagaggatgtaacactgtgacatgctctagaattcttacaatacgcatatgatatgaagaccagactgacttatgtgatgagaagttatgcataaacaaataaagctcttcaaagcttgaaagactaggaaggactaaaagacattaatgatgttctcccattct

SEQ ID NO: 5423 - DNA, 438 bp, Zea mays
  Clone ID: LIB3137-044-Q1-K1-H3
ctagaacctactagaaggcgaaccaacccgcacattcacttctcttcccatccgtacgaagtcgcagatcagagagaccgaggcgcccgcggttctgctttccttccttgccccgttcacgagagaattttctggagtcttcgactcgagcagggttccgatggcgctgcaatggatgatcctggcgtgcgtggtggcggtggaagctgcggtggctgcgctggtcacgctcccggtgccccgcgctgtgcggggccagatcgtcgcgctcacgtccttgttcctgcagcccctgtccagtgtgatacccttcgccgccttccacatcctcgatctctactggaagaaggagcacagactgatgtgcacctcggagatttgcaccgccgaagagcgcattcgcttcgagaaatctatgtttaaagctcagagaaatgt

SEQ ID NO: 5424 - DNA, 397 bp, Zea mays
  Clone ID: LIB3137-044-Q1-K1-H4
gcgccatgaacccgagaggctatcgtagcaacagaacttctctcttcgatggcattgaggggggtggaatccgagcaacatcctattcttctcatgagatagatgagcaagaaaatgatggagctattgatggactgcaggatcgtgtcagcattctcaagcggttgtcaggcgatatccatgaagaggtggagactcataacagaatgctggaccgaatggggaacgatatggatacttcaaggggttttctgtctgggaccgtggacaaattcaagatggtatttgagaccaaatcaagccggaggatgggaaccctcgtcgcatcattcgtcgccctttttctgctggtttactacttgaccaggtagaagacatgacatgctggaaatggtca

SEQ ID NO: 5425 - DNA, 381 bp, Zea mays
  Clone ID: LIB3137-044-Q1-K1-H7
gcgtccggcctgcagaaccaccacatgctggtggccgtcaacctttctatcagccccaaatgcaaaagggccgggcgggctacaaccctggcggtgctcctcactaccagcaaggtgctgctcctggctaccaaagtggacctccggcgtatcaaggagctaaccaacggaacccacgtcctgcctaccaaggtggtaacactgtttatcaaggtggcaacccaccacctccctaccaaggaagcaacccaccacctccctaccatggaagcaacccaccaccttcttaccaatgaggcaacccaccagggccaccacctccctacccaagaggcagcccaccaaggccaccacctacctaccgaagatgcaaccccaacg

SEQ ID NO: 5426 - DNA, 259 bp, Zea mays
  Clone ID: LIB3137-044-Q1-K1-H9
gcaacctcataagcgcccacagcaacgacgcctacaggcacgccgactgaaacttcctcgggaacacagccatactcatcagctacctcaaccccgactacaacacaagcatactctacaagagtgcctgagtatacattacacaataattagctgcaccgactgatcaagggtgaactaataccaagaccacgcgcgacaacagccgtctgagctatagactaaccattcaaacgacgaggtctgcctgatgatacat

SEQ ID NO: 5427 - DNA, 313 bp, Zea mays
  Clone ID: LIB3137-045-Q1-K1-A10
aattaaaaaaaacgacggacatcaagcagctttcatcgtgcattcaccaccacttccccacactactgccgccttagtctcgtgtcgcaccccatcgcgccattactacccaagctcccacctttttcacgttgaatattcacggcgccaatatacacatgcctccaccccttgactaatactgcttgccctatgtcgcgcgttctctttctcttctgttgcatgacatctacgcctaccccatcgtgccttttactcactgtgtggtggtcaacatccctcccgtcaccattgtccttccctatgatttctc

SEQ ID NO: 5428 - DNA, 424 bp, Zea mays
  Clone ID: LIB3137-045-Q1-K1-A11
agcaatcagtcgtcgtcagccacggacacactacacgagcagaggaagctggggtcttgcgggttcctgcagtcgtctgcagccgctgccgacgagcggcgcgcccgcccgctacgtgacatcgggtcccctcggggccatggggatctacgagcggcagcgccacctggtgcccaccggcgtgtggggggaaccgttccggctcgacgccgacgccgtggccatgcccctgcccctggccgcgttcccctcggtcaccgtggccacgccggcgccgctcgacgtcgtcgagccggaagcagaggagatcaagctcggcaaacgactgttgcaggcgcagcatgacgacgtgccgcggatgcaagaagcgccgccgtcgtcggatagcttcagccacgacgatgacgacgctaggccgagagac

SEQ ID NO: 5429 - DNA, 455 bp, Zea mays
  unsure (1)..(455): unsure at all n locations; Clone ID: LIB3137-045-Q1-K1-A2
gaagacccaggcggacgcatacgttcgttacagangaatctttccagctgacacgattccacccctagttgagtctgggaaagaaggagatgaacgccattatcaactttggcggatagaaaatggagtcgcagaaggttcgactgagatcccaaaaggcgaagcaatcccgctggagtacaatcttgctggcttgaacgccatttcgttcgagaagggctgctacatcgggcaggagcttatcgctcggacgcaccatcgcggtgtcatccggaagcgcctaatgccaatgaagttcgtcgacgggaatgggcaagaactcgagcaggccgtcgctccaggctcggaggtcgtggacgaggcttcaggcaagaaggtcggggcagtgagcaccgctctgggctcccgcgggatgggcctgctacggctcgaagaagcactgaaaccgggctcgg

SEQ ID NO: 5430 - DNA, 428 bp, Zea mays
  unsure (1)..(428): unsure at all n locations; Clone ID: LIB3137-045-Q1-K1-A3
gcgaaccctagtcccctgctccattctcagccgtcgccaatnccttcccgtgctccgcaaccgctgagtgagaagaagagatggccggcaagggcgatggcccggctatcggcatcgatctcggcacgacgtactcttgcgtcggcgtgtggcagcacgaccgcgtcgagatcattgccaacgaccagggtaaccgcaccacgccctcgtacgtcgccttcaccgactccgagcgcctcatcggagatgcggccaagaaccaggtcgccatgaaccccatcaacaccgtctttgatgccaagcgtctcatcggcaggaggttcagtgatgcgtctgtccagagtgatatcaagttgtggcccttcaaggtcatttctgggcctggtgagaagccaatgattggtgtccagcacaagggtgaggagaag

SEQ ID NO: 5431 - DNA, 420 bp, Zea mays
  Clone ID: LIB3137-045-Q1-K1-A5
gcggttctccctccctctctgcctgaccagctaggatcagcgtaagcagcaatggtgatggcgtgcgcgagcgggctgaggagctgcagcgccgtgggcgtgcccagcctgctggcgccgtcgtcccggtccggccgcctggcgccgttctgcgccaacgccaccacctctggccgcgtcaccatgtccgcggagtggatgcccggccagccacgccctgcccacctcgacggctcctctcccggggacttcggcttcgatccgctgggcctcgcgaccgtgccggagaacttcgagcggttcaaggagtcagaggtgtaccactgccgctgggccatgcttgccgtccccgggatcctggtgccggaagctctgggcctgggcaactgggtgaaggcgcatgagtgggcggtcgtcccc

SEQ ID NO: 5432 - DNA, 316 bp, Zea mays
  Clone ID: LIB3137-045-Q1-K1-A6
ttcaggcttcttcggctttctatgatcaggaggagttgctggattattttatcagggaacagaatggtgtgattcgttgattggattacagcttgcatctctcttgcatcaaatggttgagcaaggcaaaccacgaagcatcccgacgaatgcgaagaaatcgccgttcgtggaagtagaggttgactagattggccacgctagtgcggtggtgtttgcaaaggaatcaccgctggcgcctaatatcgaccaatgatgcaccgttagccatagtcatggcgacgacgaaacacaagaatcggatgggtgcgtgcaa

SEQ ID NO: 5433 - DNA, 345 bp, Zea mays
  unsure (1)..(345): unsure at all n locations; Clone ID: LIB3137-045-Q1-K1-A7
actcgggtctcgacgccttctcgtctcgtctccctgcgcgacccgttgcttcgttccatccggctctcgcggcggcggaaggagggggattgggcaccggctgctgcggacgcgcaggcggacggtgggagcggtcggacttcccatcatctgcgagtcatgcctcggnacaacccctacgtccggatgttaagagctgaatatgacaaagaatgcaaaatttgtgcacgtccttttactgtattcggtggcgtcctggcgagatgcaggtacaagaagactgagatctgcagactgttgcaagctaaaaatgttgccggtctgctgctgatcttgaatatggct

SEQ ID NO: 5434 - DNA, 331 bp, Zea mays
  unsure (1)..(331): unsure at all n locations; Clone ID: LIB3137-045-Q1-K1-A8
ggggccgacgacgcgtccgaatggctcttttccagtgtacttttgagattttctgccangnnctgctcgagctcnacgaggacaatttcaatgcaatgtgcagctccttctgctacctacaatagtggccgtacctgggtgccgccatgtgcggcgccaatctcgccgtgccgcctgccgtgccgacaccaagcgccagcgacggcaacgactcctcctcttgcagcgtcagcggcgcgttgagaaacaccatgcctgactcatacctaaacgcctaatgccaatcaaaccacatgaccataatacccataacaagcaccagccatctgtc

SEQ ID NO: 5435 - DNA, 373 bp, Zea mays
  unsure (1)..(373): unsure at all n locations; Clone ID: LIB3137-045-Q1-K1-B10
tccggtcatcctgntgttttttttaggtttttagcnccnancnaattanaagagtctttgcaagcttttaaacgactttttgccctttcctctcccttatacagtcctttagaatcttctcatttccaccacctccctccctctcttcatctacaaatactcattcttttttatttacaatctttcacatacttttccttttactcttacaactccatttactcctttttcatcttctttcttttacaactccactcaactccttcaacttttttctcatctttctccatccctttatcaacctatccaccaatttcattttctccaaccttttttacctttcttattccatctcctccaccttctactactt

SEQ ID NO: 5436 - DNA, 425 bp, Zea mays
  Clone ID: LIB3137-045-Q1-K1-B12
cggctcgcctccctcccctccctgtgcgcctcttttcatgcgcgaggagggaccgtggggaccaccaccaccagcaccaccacctccatccgtgcgcctctcgctctcgctggtggtgctcctcctcctcctcctgctcccggggcgggcggcctccttttccacctcctgctggtgccagggccgggagggcgtcgcggaggtggcgcgcatggggctcgccggggacgggtcggcggacaccgcccacctcagtaataatgaaaatgggcggttcatttatggagttgcgagttctcctggtaaaagagcatcgatggaggacttctatgaggcaagaatagacgacgttgatggagagaaaattggaatgttcggtgtatatgatggtcatggaggagtccgagcagctgagtatgttaagc

SEQ ID NO: 5437 - DNA, 151 bp, Zea mays
  Clone ID: LIB3137-045-Q1-K1-B2
tcggatgcatgtttcaaggcatccatccatggatgctttatgtttatgcgtattaattagccgtgtgtcagggaaccgggcagaagggggtgctgttttatttacgtcttctggtgatcaaataaaggggaaatacatgttggatgtgtgc

SEQ ID NO: 5438 - DNA, 432 bp, Zea mays
  Clone ID: LIB3137-045-Q1-K1-B3
agaggctcaatgcgcccaagcattggatgctcgacaagcttggcggagcttttgctcccaagccatcttctggacctcacaagtccagggagtgccttcctctgatcctcatcatcaggaacaggctcaagtatgctctgaactaccgtgaggtcatttctatcctgatgcaacgccatgtacttgttgatggcaaggtcaggactgacaagacctaccctgctgggttcatggatgtcatttccatccccaagacaatggagaactacaggctgctttatgacaccaagggccgcttccgtcttcacccaatcagggatgaggatgccaagttcaagctctgcaaggtgaggtctgttcagtttggccagaagggcatcccctacctgaacacctacgacggccgcaccatccgctaccccgacccgctca

SEQ ID NO: 5439 - DNA, 440 bp, Zea mays
  Clone ID: LIB3137-045-Q1-K1-B4
cgtccgaaaatttcccccaaaacttctcctcttgtttttgcagcttgagcgagcgcgctgcaatggcggactcggcggcgcctacgagagtgatgatggcctttaacgagtcgtcgctcaaggggtacccgcacccctccatcagctgtcgcaccgccttcgactggacgctctccaagctcgtccgctccaaccctgggggcttccacttcctcttcgtccacgttcatgtccccgacgaggacggatttgatgacatggatagcatctatgcttcgccggaggactttcaccatatgaagcagatagacatgataagagggcttcatttgctcgagtactttgtaaaccaatgccatcagttttggataaaatgcgaggcatggatcatacatggacatccaaaggaggttatctgcatcgaattgaatagagtccac

SEQ ID NO: 5440 - DNA, 419 bp, Zea mays
  unsure (1)..(419): unsure at all n locations; Clone ID: LIB3137-045-Q1-K1-B5
tcgtgtaacggatcgatatctggagattcacttctccactaagggtggggtgattgatgcattcttagtatatcatccttgnacaagggaatcacggggttttggttttgttaccatggctgctgttaaagatgcacatcgctgcatcaaatatctggaccgttctgtgttgcaaggtcgggtcataactgttgagaaggtaaaatcataagattgggagcatctaactttcttatttaacttggctactgaatgatatttatatcattccttagtactctacactgaacattttagtgttctgtccattgaagattttgttgacagcaacaaggtagatgttggtagctgctctgcaacaaactgatacaacctaacaccaaaccatgccaacctcagccaaagggttgtatgcccta

SEQ ID NO: 5441 - DNA, 434 bp, Zea mays
  Clone ID: LIB3137-045-Q1-K1-B6
cgcgcacagaaacacaagcgagtaccagagcagctaggagtggtcagtaatggcgcagctgagagcaggcgccgacgagcagcaggaggcggcgatgcacggcgtcgcctccggcgacgggaacgagagcaacaagaaggcgcgcgcggggctctgtggcctgctccgcgagcgcaaggtggtggacctggcgcgggccaagcggcggctggtggaggttccctacaccgcgacgctggcgcacacggccaacgcgctcctggcagcgcgcgtctctgccgtggccgtggctgcgccaccgggccacttgatcggcgccggcggctccatgatcctcgagtccgacccggccaccggcgccgtccgcaagcactacatcggcatggtgaacatgctcgacatccttgcccacatcgccgaggccagcgacgacg

SEQ ID NO: 5442 - DNA, 398 bp, Zea mays
  Clone ID: LIB3137-045-Q1-K1-B7
gggttggcttctcctccccctccggttcgttttcgggttcgtgaggttctccggggttcggtttcgtgggtgagcggatcgagatggcggcgtcggatgttgagtaccgctgcttcgtcggcggcctcgcctgggccacggacgaccactccctccacaacgccttcagcacctacggcgaggtcctcgagtccaagatcatcctcgatcgggagacgcagaggtcccgcggcttcggcttcgtcaccttctccacggaggaggcgatgcggaacgccatcgagggcatgaacggcaaggagctggacggccgcaacatcaccgtcaacgaggcccagtcccgcggcggccgtggaggcggcggcggtgggtacggtggtggccgtggaggcggcggc

SEQ ID NO: 5443 - DNA, 435 bp, Zea mays
  Clone ID: LIB3137-045-Q1-K1-C1
cggacgcgtgtgcttggaccggcctttcaagcagggcgagaccctgcggatggaaacggaggtggacatggacgccgagctgcgggtggccagtgactaccagcagcaggtcgccggggacgacgccgagcagaagaacgagaggaaggccatgaaggagctgggcctcgccagggcccgggagttgggctggcccaacacgtacgtcttcaccaaggcgctaggggagatgatgctggcgcgggagctgggcggcgtcgtccccgccgtgatcgtgcggcccagcatcatcacaagcatccataaggagccgctgccggggtggatggaagggaccaggaccatcgacgccatcctcattggctacgccaagcagagcctctcctgcttcctagccgacctccagctcaccatggacgtgatccccggggacat

SEQ ID NO: 5444 - DNA, 411 bp, Zea mays
  Clone ID: LIB3137-045-Q1-K1-C11
gccgcccttttttttttttttttttttttttttttttttttttttttttttttggtttttgttttttacctaaaaacaaaagcaaaatttcctcggttgttctgtcaaaaaaagtttaaatgaacaactacccatttttctaccctctgcttcggaagttaaactaaaaaatgagccggcccggcccccccccctgctccattttcccttcccaaaacaaaacacaacccatttcttcggcctttcaacccccgtttcttcaaccaccccctttatttcccaccccgccccttcttaaaaagcaaaaaaaccccccaatttaggtccccccaacatcggcagcgggctacggattcaaggcccacaaccacctttacagccttatggccactgatctcatgctttgccttc

SEQ ID NO: 5445 - DNA, 434 bp, Zea mays
  Clone ID: LIB3137-045-Q1-K1-C3
aagaaatcagcaaggttgtcaagatccaagaggagcttgacattgatgtgcttgtgcatggagagccagagagaaatgacatggttgagtacttcggtgagcaattatctggttttgcgttcactgccaacggatgggtgcaatcctatggatcacgctgtgtgaagccacccattatctatggtgatgtcagccggccgaaccccatgactgttttctggtccaagatggcacagagcatgacccctcgtcccatgaagggaatgttgactggtccggtcacaatcctgaactggtcattcgtcaggaacgaccagcctaggtttgagacatgctaccaaatagctcttgcaatcaaaaaggaggttgaggatcttgaggctgctggtattcaggtgatccagatcgatgaggcagctctaagggagggtctg

SEQ ID NO: 5446 - DNA, 358 bp, Zea mays
  Clone ID: LIB3137-045-Q1-K1-C4
ttcttctccccagtccctaaatccatttgcttgagctggtatgtgccaccccctgtgctggtgaccacgcctgcagttctcccacctcgccatggctcgtacgtcctaatgagttgctagctcgtatgaagcttgttccgtaatcatctcatgtcagtgaagctcacaccatttactgcttgaactctaccactgtctgttgctaggaactaggtgtaaaattcgctcaaaaataggatgtcggatttttgcatcccagatttagtgcagaaggctgaaactaagttctagtgtgttgagctccactttggtgctacataaaatttgttctggatgttatcaacctatgggtactata

SEQ ID NO: 5447 - DNA, 443 bp, Zea mays
  unsure (1)..(443): unsure at all n locations; Clone ID: LIB3137-045-Q1-K1-C6
gtcgaccacgcgtcgcggacgcctgttatcttgcccccgcattggttctcgtctccgcctcctcgtcctccacccgcgccggggcggggctccccaggaatgggcagcggtcgtcgtcctccttcctcggcggcaagacgctgctgagacaggccgaggcggcccggccgtcgttcgccgtgcgcgccgcggcggaccccaacaggccgatctggttccccggcagcacccctccgccgtggctcgacggcagccttcccggcgacttcggctttgatccctgnggcctcggatctgacccggagagcctgcggtggaacgtgcaggcggagctggtgcactgccggtgggcgatgctcggcgcggcgggcatcttcatcccggagttcctgaccaagatcggcgtcctcaacacgcccttctggtacaccgccggcgagcag

SEQ ID NO: 5448 - DNA, 420 bp, Zea mays
  Clone ID: LIB3137-045-Q1-K1-D1
cgtccccaaggtgcaacaacttgtccaagaccttttttcaccggcaaggacctgtccaggaacggcaatcgtgatgaggccggtgcctatggtgctgctgtccaggccgctatcctcagtggtgagggcaacgagaaggtgcaggacctgcttctgctggacgtcactcctctctctctgggtctggagactgccggaggagtgatgaccgtccttatcccgaggaacaccaccatccccaccaagaaggagcaggtgttctccacctactcggacaaccagcctggtgtgttgatccaggtgtacgagggtgagaggacccggacccgcgacaacaacctgcttgggaagttcgagctctccggcatcccaccggctcctcgtggtgtcccccagatcacggtctgcttcgacatcgac

SEQ ID NO: 5449 - DNA, 300 bp, Zea mays
  Clone ID: LIB3137-045-Q1-K1-D2
tcaaaaacagaaatcaggaatatttcatagcctatcttacttccttccacacctctatcctcattagttaactcaacaataatgttcactaccttcttctactctacatcactcctctctctctatttcttgatacttccttatgaatgattaccttacttatccctaataacaccaccatccccaccaataaccatcatgtattctccacctactcacacaaccagccttatgtcttcatccatctttactatgttaacactaccctcaccctctacaacaacctcctttaaaatttct

SEQ ID NO: 5450 - DNA, 434 bp, Zea mays
  Clone ID: LIB3137-045-Q1-K1-D3
cgatgcctctcaagcccaaacggaaggctccggcctcaccggcgaggcacgacccttcgcgtgagccctgcgccttcccatgcctccccctgctcggcacaatgcctggtagtccgcgacgccctcctcgcgttccacgggttccccgaagagttcgcggccttccgcgtcctccgcctcggtggcctctcgcctaaccgtgaccctcggccttcgtcccccacagtgcttgacggcctcgtcaccacgctcctctcccagaacactaccgacgccatctcccgccgcgccttcgcctcgctcaaggccgctttcccctcctgggaccaggtggtggatgaggagggaaagaggttggaggacgccatccggtgcggcggcctggcggcgacgaaggcggccaggatacggtccatgctgagggacgtgaggga

SEQ ID NO: 5451 - DNA, 279 bp, Zea mays
  Clone ID: LIB3137-045-Q1-K1-D5
ttaaatccttctatattattcccacctcaatttttatttcttaacttacctcttattcatctattgtcaattctctctaattatttgacgttaaccttaaacatatcaattatatatcttcaatccttctaattcctttttattcctacattctttatttcttttccttatttttctttacaacatttttctttcacatttaccatttttcctttcacattataattcatttccattttaccataatccatcctttccttattctcattacacacttta

SEQ ID NO: 5452 - DNA, 297 bp, Zea mays
  unsure (1)..(297): unsure at all n locations; Clone ID: LIB3137-045-Q1-K1-D6
accgacctcgtgctgccccaaccgttcataggaaatgtcgacaagtgatggcgaccaccgcatcgcctcacccaccatccttcgtcccacttccccccatcgcctctcccgacctcacgccgaccccaaccaactataggaaatggcggcgagcgatgccaaacttgatcacgtgtcccggtcgcgatgacaatcagacgacctgngttattgctcttgtagcgagcgagtgcatcaatgggtaactggaggaagtccttgatagcgagtgggttattgctcttgtagcgagcgagt

SEQ ID NO: 5453 - DNA, 425 bp, Zea mays
  Clone ID: LIB3137-045-Q1-K1-D7
gctcgatcgatctcactctcagctggtcgctcactcttgcagctccacccttagtcactcagtcttagggtcttagctctaggctctagctagccgcgccactccttcgtgtagccatcagccttctcatcgccaccaatggccactgccgaggtccagaccccgaccgtcgtggcggccgaggaagcgcccgtggtggagaccccgccgccggccgtcgtgcccgaggagtctgcccccgccgaggccgaggctgaggctgaggctgaggctgctgctcctgctgctcccgaggagcttccggcggccgagcagcatgcagccgccgagccggaggccgctgctcctgctggtgccgaggagcccgccgcggccgaactggccgccgaggcggaggctgctgctcctgctggtcccgaggagac

SEQ ID NO: 5454 - DNA, 431 bp, Zea mays
  Clone ID: LIB3137-045-Q1-K1-E1
gtcttgtctgtcccttccttccctcccgtttcgcaggcctggcatcaccctgctgtacccgtgtgtaagggccttcatcaccctaataatagcagggaccagttttaccagtgcagcagtgaccgaccacggtccacggcgtacgtgagctgagagcatcgtgctgggacatgcgtgccgttggtggtgctgcaggtacgcgtcggtgtgcgcgatggagagcccgtccaaggcggacgacgagcagtggctgtcctactggatcatacactccttcgtcaccctcctggagatgctcgccgagccgctcctccactgggtacccgtgtggtacccggccaaagtgctgttcgcggcgtggctggcgctgccgcagttcaagggcgcctccttcgtctacgagaagctcgtcagggaacagctccggaact

SEQ ID NO: 5455 - DNA, 377 bp, Zea mays
  Clone ID: LIB3137-045-Q1-K1-E11
caacctcatcttctacgcttctagagaactttcacctgctcatcacctatttcattcccaactacactctctccaatcacctcttccactttgaaaaccatacaattgaatcttctttgccttttatagtttcatactacatctctaaatcactctattatttcatcacttatttatatccttcttaccattacctaaattcatatataatcctcttttattataatgatcatcctcaccttatattctttttccttattaaaaacacttttcattttaaaatctatatcactcatctttcatattcaccttcaaatattttaatatatggaatatttacattcataaattttcatattcatctttttcaactattc

SEQ ID NO: 5456 - DNA, 424 bp, Zea mays
  unsure (1)..(424): unsure at all n locations; Clone ID: LIB3137-045-Q1-K1-E4
caaggtgtccggaaacttccccacttgcctcttgcccaccctattcgctcctgttccagggggaccgagggccctgctcggtcggcccaattcaatgcccaaacgacacgctcgccaaacaccctcttncacttggaaaaaccagacaacttgaatgggctatgcgtctgagagttgcatactacatcgctgaagcactggagtattgcagcactgagggaaggcctttgtaccatgacctaaatgcatatagggtcctctttgatgagaatggtgatcctcgcctttcatgctttggcctgatgaaaaacagtagggatgggaaaagctatagcacaaatcttgcatatacacctccagaatatttaagaaatggaagagtaacatcagaaagtgtcatattcagctttggcactatactgct

SEQ ID NO: 5457 - DNA, 406 bp, Zea mays
  unsure (1)..(406): unsure at all n locations; Clone ID: LIB3137-045-Q1-K1-E7
ttgtttatgaagtacttttttcaacttaacagattccccanaatgagggtanagtgctccatacaaaagatattcacacttaancataagtgactggaatgaatgatcagccttcacgatcatttggaagggtatctggtggtgttaatcctaaaccaaatacctcatccaattcccgagctaatgctaaaggctcatctgttagggatgcgattgcctctacagaaactgagttccgtgacgttagtttgcatcggaatcgtctaccacggaagtcagaagatgtatggaaaaaggttacagctggttctgattcaaattgctctggtcgtcagggaaaatttttgatcatgcaatcattcattacccatcatgaactaatcttgcaagctagattgacaagacc

SEQ ID NO: 5458 - DNA, 450 bp, Zea mays
  Clone ID: LIB3137-045-Q1-K1-F1
acgaccgacgcgtgcggcactcgttctttccaaacggagaagaggattaggttctttccaaggaaaaggaaaaaagggtcaggagagagagagagagagagagagagagagagagagagcccttgctcgttcgttcaccaccacagctccgatcgatccgcaaggcaggcaagatgtacaacgcgccgtcggcccaggagatgtcctacttggagcacgtgcagaggcgccacgaggagaagggctgcctctacgcctgcatcttcactgcgctgtgctgcttctgctgctacgagacctgcgagtgctgcctcgactgcctctgctgctgctgcaactagccggggctagctccggaggacggtcgagacgcagcagatggaggtcgccttcgtctcttctacctacctaccaatctacctagtgatgatgattcagttcccgtttagg

SEQ ID NO: 5459 - DNA, 449 bp, Zea mays
  unsure (1)..(449): unsure at all n locations; Clone ID: LIB3137-045-Q1-K1-F10
gaataacggggccgaccgacgcgtcctgtggactattgctttagcgactttgctgtttttggtcgnggcangcgccgggctgctctggttctgtttctccagctctcagcatttcttgtggagcatcatcacccggcccatgttccatatcatgctgagccaccgcggcgacagcgggtgccagggcgccttctacacctacgactccttcatcgaggccgccagcaagttccccgtcttctgcaccaccgtctacgagcagacgcgcatgctgtagctcgccgccttcttcggccagacgtcccactaaaccaccgttggatgggcgactgctccgggtggaccgtttgcctggggatactgccgggtgaaggaacagaacccgactgacccaccctactatggacgatgacccatacagcttactcatgagtacaactacatgctcg

SEQ ID NO: 5460 - DNA, 195 bp, Zea mays
  Clone ID: LIB3137-045-Q1-K1-F2
caccctaaatcggaaaaccagctgctccacgccacacccatgctcgtcatcgccatcgtccccttcgtcatctaccctcacggcgaggccgcctacaaccgcctctaccgcccctccggcgacaaccaccactacatcgccggcagcatccgtgactcggtcaagaagctggagccaactttaccaagcactggt

SEQ ID NO: 5461 - DNA, 407 bp, Zea mays
  Clone ID: LIB3137-045-Q1-K1-F3
ctcctccacttcgcgttctcgcttcatctcttcccgctcaggatccggcgggggaggttaggcaagatgtacaccgctaggaataacatccagaaggataagggccttgagccctccgagttcgaggactccgtcgcccatgctttcttcgacctggagaacggtaaccaggagctcaagagcgacctcaatgacctttacatcaacggtgcaatccagctggatgttgccgggagcaggaaggctgttgtgatccacgtcccataccgcttgcgcaaggccttcatgaacatccatgtcaggatcgtcagggagctggagaagaaattcagcggcaaggatgtggtaattgttgccacaaggaggatcgtgaggccggccaagaagggttcagctgttcagcgccc

SEQ ID NO: 5462 - DNA, 271 bp, Zea mays
  Clone ID: LIB3137-045-Q1-K1-F5
ttcttcctatctatctatcccattcttccattccctaatttcttacctatcctctcactttcctcttctctctaacatatctttttatcttcctttctaaccattccatcacccttcctttcctttcatcacctttctctccttccacccttttactccaatcctcatttctattcttctcccattaaaactcttcacaaatcttatcttgccatctcctttttctaactttattaactattatatctttatttaaaacctacaattatat

SEQ ID NO: 5463 - DNA, 425 bp, Zea mays
  Clone ID: LIB3137-045-Q1-K1-F7
ggacagttgagagagagagagagggatcgatagcgcggcggatgcgatggcgagcggagggaagggactcaacgcgactggggagttcttccggcggagggacgagtggaggaggcaccctatggcggggaaccagctgcgccacgccacacccgggctcggcatcgccatcgtcgccttcgggatctacctcgtcggcgaggccgcctacaaccgcctctaccgcccctccggcgacaaccaccactagatcgccggcaggatccgtgactcggtcaagaagctggagccaactttaccaagcactggtgctgttgatgtttttacagttttgagctcataaggtcagccatgaccatattgtaatctgtgaccaggtagacttgcccactggtccgtccaactattgtcttgggaccctgtgt

SEQ ID NO: 5464 - DNA, 434 bp, Zea mays
  unsure (1)..(434): unsure at all n locations; Clone ID: LIB3137-045-Q1-K1-F8
aaggtttcagcaattcagctccctcgcctccttcgcggcaccggcactacgagtgcttcgggaccagccggccagcacactctacgagtcgccatcttccactccaccgaggcagctccaagccatggccatggagaaggccgcctccttcctctcctccctcttaggcggcggcggcggggagccggcggcgactgtgaaatctatcttcatataccctatcaagtcctgcaggggtcttgccgtgtcacaggcgcccatcacctccactgggttccggtgggatcggcagtgggtggtggtgaacgccaaagggcgagcatacacccagagggtggagcccaagcttgctctggtccangtggagttgccgccggaggccttcgctgagaactggcagcccacgcccgacgaccacctggttatcagagcac

SEQ ID NO: 5465 - DNA, 429 bp, Zea mays
  Clone ID: LIB3137-045-Q1-K1-F9
gctcgctcggcactgtcactagctagttgctctactagagggcgggtatagagctgcctgcgatccgccgctgagaagggaggatcggaagcgacgatgaggtcgtttgctcctgtctttctgtcggcggtcgtggcctggctggagctggcgggcaccgcgcagggcggcaacttctaccaggacacagagatgacctggggcgatggccgcggcaaggtagtggacggcgggcgcgggctggacctgacgctggaccgcacgtccggctccgggttccagtccaagagcgagtacctgttcggcaagatcgacatgcagatcaagctggtgccaggcaactccgctggcacggtcaccaccttctacctgtcgtcccagggcgacgcgcacgacgagatcgacttcgagttcctgggcaacgtgagc

SEQ ID NO: 5466 - DNA, 390 bp, Zea mays
  unsure (1)..(390): unsure at all n locations; Clone ID: LIB3137-045-Q1-K1-G11
atataatatgtaaatttttataattctatcncttntacancttctgggctcattgaggattttctaaggttactgatcatctantcccatgtccacctccgtctttctcccttctccttcttctaccatacacccttccgtcttattctcccttacttcttacctctcattctctctactgtctgtcttctcttccttaatcctctccttctacatccactccgcttttgtgctctccatcttataccattacaaatcattttccttccatcttcatctctcatactcttcttccgtcctcctttacctatcctttactctccttcttctcacgccctaccctaccatcttcttctacactttcttcattcactctcacttctttccttt

SEQ ID NO: 5467 - DNA, 445 bp, Zea mays
  Clone ID: LIB3137-045-Q1-K1-G3
gggccgaccgacgcgtccggcagcagtatcgtggcgaatgggtcaccacctccagtcttccacttccagtggggggcgtggactttctcggcggacaccagcctccgtctcgagctggacgagaaccccgaggcgatcatctcgggggcgtggcccgggaactgctccctcctcagctacgacgacctccgcgcctacctcgagtcgcaggagacggcggcccaggcagacggtcagcagcgcggcgtggcgctcctgagcgagaccatgtccacacccgtgctggtggccacagcagaccataccctgtaggacgtctagtgccacttcgaggccgtgtctgtgcttccggtcgtcgacagcggcctcagatgcgtctgggtgatcgtcaagaacgaccgggcaagagcctctcatgggtccaagacgaagatatcggaagtga

SEQ ID NO: 5468 - DNA, 244 bp, Zea mays
  Clone ID: LIB3137-045-Q1-K1-G6
tatcaattgcctcaaagatccttcattcttccaaaatgcaattttcaccttttgaacatattttacttcacttcataaaatcaccctttttaaatttaaaattgagaactttatactctttttctagtcaatatctatcatttacatttaaactacacattaagtctcaacagccttttatttaaatcataaattatatctctaaaatattcattcttactttcttctgaaaattttttgatct

SEQ ID NO: 5469 - DNA, 433 bp, Zea mays
  Clone ID: LIB3137-045-Q1-K1-G7
tctggaccagagtcgtctgccaaacttgacatcgttgttctagaaagtgatttcaacaatgaagatgaggagggctggaccgggaaaaagtttgacagtcacgttgtgaaggagcgtgagggaaagcggcctattttaactggtgatctacaagtcacactaaaagaaggtgtggggacaattggggagcttacattcacagataactctagctggataaggagtaggaaattcagacttggcttgaagattgcctcaggattttgtgagggtgttcgcattcgtgaggcaaaaacagaagcctttatggttaaggaccatagaggagaattgtacaagaagcactatccacctacactgaaagatgaggtctggaggttggaaaaaatagggaaggatgggtcattccataagaggctgaacaaatctggaa

SEQ ID NO: 5470 - DNA, 415 bp, Zea mays
  Clone ID: LIB3137-045-Q1-K1-H10
agctgatctaggagcacctgtctggcgcgttggtgcacgtctgtcacgagcgttgcgagcgcaagtctcgcgagttcatggtggatctgggcctccccgacgggctcctcccgctgcccagcctggacgaggtgggctacaaccggtcgacggggttcgtgtggctgcggcaggccgccggcctgacccacaccttcggctccatcggcaagcaggtgtggtacgacagggaggtgacggcgttcgtggagcccgggcggatgcacggcctcgccggggtgaagagcaaggagctcctcatctgggtcaccatctccgagatcgtcctcagcccctccggcaccaaaatcgtgttccgcacccccgcggggctcggccgcgccttccctgtcaccgtctttcagctcgagcccgc

SEQ ID NO: 5471 - DNA, 273 bp, Zea mays
  Clone ID: LIB3137-045-Q1-K1-H12
ccacgaactccccttctggatttccagccatgtttttgtggatctagctcaccaatgattacggctacgtcttgctgttgctggtggcctatgtcttcctcaacctttgtatgggcttccaggtcggcaaggcccgcataaagtacaaggtgttctaccccaccatgtactccatctagtctgaaaacaaggacgccaagctcttcaactgcgtgcatatggggcaccaaaactctctatagtggatgcccgtcttcttcgtcatactgatgc

SEQ ID NO: 5472 - DNA, 293 bp, Zea mays
  Clone ID: LIB3137-043-Q1-K1-A12
ctccattggactgcttgctccctgttgaccattgggtattctgaaccatcgagccagggctgccaagctgactcgcctccacagtcttcgcgaacgccttggtgccaccttctcctcccatcccaatgaactgatagcactcttttccaggtatgttcaccagggcaagggaatgcttcagcgccatcagctgcttgcggagtttgatgccctgtttgatagtgacaaggagaagtatgcaccctttgaagacattcttcgtgctgctcaagaagcaattgtgctccccccat

SEQ ID NO: 5473 - DNA, 444 bp, Zea mays
  Clone ID: LIB3137-039-Q1-K1-H11
ctggcttacagcttcagacaatgaaaggttgttcatattgtgctttcccttttttggtctatcaggtgtcatgtctttttgtgcatggtatggtatagcagtcagaagtaattagtatgccatttttttattaactccttgacatcttttctcagatgtctaagcagattatcaggagacctgagcatcattgcattaactaggaaatagttcaagtagaacatacactccagaacacatagaaacacaaacacccatgaaagcacacacatgggataccaaatcgtgccacaaaaacacaaacatgcacgaagcacacacatggattacaaatcgtgccacaaaaatgccgctgtgtatgggtgttagtggtttaagggttttctcgacctgtgtgagaaggtttcttcttaatataatgcctgggggctgtcttaccccctg

SEQ ID NO: 5474 - DNA, 445 bp, Zea mays
  Clone ID: LIB3137-039-Q1-K1-H12
gacgagcaccgccgcgcaggccaccgtcgtcctcggcgtggccccggagaagaaggccgcgcccgagggcgtcgaggccgcggcggagtccggcgaggccgcccacgcctgcggctgcggtagcagctgcaagtgcgacccctgcaactgctgatcacatcgatcgacgaccatggatatgattattatctatctagcttgtggtggtggttgaacaataataagcgaggccgagctggctgccatacataggtattgtgtggtgtgtgagagagagagagaaacagacttcttcagcttgctatctctctctctgcatgtttggcgtcagactttgtgctcatgtacgtgtgtctacatgcatgttggttgatccgattgcgtctgctgtaaccatatattaattggtccacgatgatatgatttgatactatatatatatata

SEQ ID NO: 5475 - DNA, 279 bp, Zea mays
  Clone ID: LIB3137-039-Q1-K1-H2
cgtctgcactgcttcgcgtctccctgcccccgccttcgtccccgccccggcaaaaaagcagaacacggccatggaaggctacgaccgcgagttctaccagttcagcgaccagctgcgcctgcagacggccgccttctcgggcctctccctcggcgactccatctggtcccccgccggccggcgcaacaacagcaacgacgtcctcttcgccgactacgcgtcgcccgccgacgccgtcgtcaagagcaacgccgtcgtcgggctcaagctcaacgacgg

SEQ ID NO: 5476 - DNA, 369 bp, Zea mays
  Clone ID: LIB3137-039-Q1-K1-H3
gcacgggagaacgccgcacaaggggcattatggtgccttgagcgctctggttatgtcaagtcatcttcagatgttcctgacctgtgcggccatcatcccttctgctagccagatctacccttgtaggagtattaatgttggtagacgggtgcagcttgttgctgtggcacagtggttattcatgcactgatgccatgatactcttgagaagttgagtcccttatgaatattgagccggctgtgttggctcgtgtacctagtctctagctcgcttggttacatgccaaacgcctgcacttgtacttgtgtaatactgaactgcggccatcagtgcaataaaactgaaactcctagcgagctttttctttg

SEQ ID NO: 5477 - DNA, 371 bp, Zea mays
  Clone ID: LIB3137-039-Q1-K1-H4
gtgaggtcatttctatcctgatgcaacgccatgtacttgttgatggcaaggtcaggactgacaagacctaccctgctgggctcatggatgtcatttccatccctaagacaaacgagaactacaggctgcttccgtctttacccaatcaaggatgaggatgccaagttcatgctatgcaaggtgaggcctattcactttggccagaaaggcataccctacctgaacacctacgacgaccgcaccattcgctaccccgacccgctcatcattgacaacgacaccatcacgatcgatctggagaccaacaagatcatgaacgtcatcaagtttgatgtcggcaacgtgatcatggtgaccggtgggaggaacac

SEQ ID NO: 5478 - DNA, 341 bp, Zea mays
  Clone ID: LIB3137-039-Q1-K1-H5
gccgagtgttcctttctagccttcacttctcagcacggcagtcttcgatccccccgactgcagccgccagccgcgccatggagcaagccgccatgccgcatgttccccgcgtcaagctcggcacccaggggcttgaggtgtcgaagctggggttcgggtgcatggggctcacgggcacctacaacgcgccgctcggcgatgaggccgtggccgccgtcgtcgcgcacgcctttcgtcgggggatcaccttcttcgacaccttcgatgcctacgggccccgcaccaacgagacccttctggggaaagcgctcaaacaactgccgagggagcaagtgcaagta

SEQ ID NO: 5479 - DNA, 392 bp, Zea mays
  unsure (1)..(392): unsure at all n locations; Clone ID: LIB3137-039-Q1-K1-H6
cgcgggtccaacacctgcctgcctgcctgattcttacaccaaccaaccacgcgcggcaagccgaattcgtcttccaccgatccgacccgcccgtttcccattgcttagcttgctatggcgcagcagcagccggtgcggcggattctgaaggtggcaccgccggggaagggggacggggaatccttccccacggcgcaggcggcggtcgacgcggtgccgctgggcaaccgggcgcgcgtcgtaatacgcctcgcgccgggggtctacagggagcctgtctacgtcgccaagaccaagaacttcatcaccgtcgcgggggccctcgccgaggccaccgtcgtgtcatgggacaacaccgncacgcgcatcatgcactcgcagtcatccagggt

SEQ ID NO: 5480 - DNA, 222 bp, Zea mays
  Clone ID: LIB3137-039-Q1-K1-H7
cacatacacaagcacaagcgcactctagcaatggcttctgaggttgtccgccctagcgacgccgagctactaaaggcacaagccgacatatggcggctcagcctctcctacctcacgcccctgtcactgaggtgcgccgtggagcttggcatccctacggcgatctaccgccatggcggggctgcctcagccgctgagctggtcacggcgctgtctctcccc

SEQ ID NO: 5481 - DNA, 233 bp, Zea mays
  unsure (1)..(233): unsure at all n locations; Clone ID: LIB3137-039-Q1-K1-H8
ggaccttcggcgcccgttcaggatccacatcttcccgagcgagttcttggttgggctcttcctcttctgaccacctccaaggctcttggtgtagcttgccactctcaccaatcaagttttcatgtctgatctcgacattcagatcccaactgccttcgatcccttcgctgaagccaatgctggggactctggtgcagcatcanggtcaaaggactacgttcacgtgcgcattc

SEQ ID NO: 5482 - DNA, 277 bp, Zea mays
  Clone ID: LIB3137-039-Q1-K1-H9
catcgagatgacgccaccctcctccggccgtctctcggccctcatccgccggtgcgcagcgagcggggcgctctccccaggcgcgcagctccacgcgcaggccctggtcggcgggcgccttccggacaccaccctggacacagacctcgtccttctctacagccgctgcggggcgctccaccgcgcccgcgaggtgttcgacggaatgccctctccgtccatgcacgcgtacaacgtcctcctcgcggcctcccctcccgaggcggccgtgaagctc

SEQ ID NO: 5483 - DNA, 240 bp, Zea mays
  Clone ID: LIB3137-040-Q1-K1-A1
catgaaccaaactacccatttcttcctacatctcagagcagccttaccacacgcgcataggatgacactctactgactactctctctactccatcaatatgaccgcgatcaaggtcgctgcctatccactgtccttcatcacttcatctctactctatcctttcaaacatcatttaatccgtcacactgatcacactcctgcctacggacgtctactttgctcttagcactgcgttacca

SEQ ID NO: 5484 - DNA, 396 bp, Zea mays
  Clone ID: LIB3137-040-Q1-K1-A11
tctagatcgcgagcgaccgccctttttttttttttttttttttttttttttttttttttggtttgtttttaacaagccaacgccaacactagatggcgatatattattttacagcttcttccaaatatagaagatccacgagagccttaagaaagcatccaacgtcatgtgctcagatccatggccatccatgaataccgcaagcacacccaccctttttatttatgacatcatcacgccaagccacgcaaggcacccacacacatacatatatgtatgtaaatatatatatatatatctcacggatagacttcgaaggcaacacgagctccaaattccttcaggatcttgtattcgctgaaccctgctttggtgaagagctcgctccattctttt

SEQ ID NO: 5485 - DNA, 359 bp, Zea mays
  Clone ID: LIB3137-040-Q1-K1-A2
cctgcttgctccaagatttacccctccctcggtgcctgatacctctatcctccgcatccggctctagaagacaaggcagtcgtcaagaaagggagtttgaccaagagcctgtggtgtccgtcggctgccatccatggcaggggaggccaagaagctcttcttcgcatccgaggttactctccacgcctccaggaaggactgctgggtcgtcatcggcggcaaggtgtatgatgtgaccaagttcttggaggaccaccctgggggagaggatgtgcttctccatgcatcagcctctggggatgccacggaagcattcgaagaggtgggacacagcacttcagccgtcagcatgatggaca

SEQ ID NO: 5486 - DNA, 151 bp, Zea mays
  Clone ID: LIB3137-040-Q1-K1-A3
acgttatacactatactacccttcccttttatatctttttaacatacgatcatctgggccctggaccaaatacacctatattttctttcttgcacaattacaatcacccataatctgacacatacacacatatttcaccaaaaaccgattc

SEQ ID NO: 5487 - DNA, 404 bp, Zea mays
  Clone ID: LIB3137-040-Q1-K1-A4
cggacgcgtggggaacagtcgtcgatctggaaagcaatgttgaagactccagcatcaatggttctgatcatatactgcttcatctgtgtgtggtttgtgggtggtctgtctgttttccatttctatctcatgagcaccaaccagacaacctatgagaacttcagatatcgctatgatcggcgggccaacccgtacaacatagggatcttgaacaacttcatggagatattctgcaccgcagtccctccttccaagaacaacttccgagccagggtcccagtagagcaaggtttacagcaatcgcgtgcgccagcaaggggtttcatgagtctaaacatggataaacctgttggggacttcgaattgagtaggaagccagtatcatgggatgaacctcggtcagc

SEQ ID NO: 5488 - DNA, 394 bp, Zea mays
  Clone ID: LIB3137-040-Q1-K1-A5
gacaacctgatcgggacgctgacggtgcgcgagacgatcggctactcggcgctgctgcggctgccggacaagatgccgcgggaggacaagcgcgcgctggtggagggcaccatcgtcgagatggggctgcaggactgcgccgacaccgtcatcggcaactggcacctccgcggggtcagcggcggcgagaagcgccgcgtcagcatcgcgctcgagctactcatgcgcccgcgcctcctcttcctcgacgagcccaccagcggcctcgacagctcgtctgcgttcttcgtgacgcagacgctgcggggcctggccagggacggcaggacggtgattgcttccatccaccagcccagcaacgaggtgttcgagctcttcgacatgctcttcctgc

SEQ ID NO: 5489 - DNA, 305 bp, Zea mays
  Clone ID: LIB3137-040-Q1-K1-A6
ctggactaatttctaaactggcggttgtaaatatgatatgattttctaggttgatgcatggtataaccattcccatctccttggattttattcccctttttactgtgtacgggaaaactgcaagccattttgaaccaaagacgattcagaaataagactttctgggagatttatccacttaaactcgacttcacaaaagcacttgttatcgtaaaggtttaaaagcttgaacatgtcctacccaatacaatcattttataaaattattagcataatttaattgattttctggtaccttcactttt

SEQ ID NO: 5490 - DNA, 457 bp, Zea mays
  Clone ID: LIB3137-040-Q1-K1-A7
gcgtgcggtcctccaagaatctatgcaaaagtgctcctcatctaagtatatctatccagttcaagtggttgtggttcatcttatcatctgtgtatctggatatctcgtgtatctgtgtgtaatgcgcgcactctgcaagaaggaagaatttgtgcaaaacgggtggtagttcagaactttctttgcacaggagaagctcagttccgccttgcagatccaaattggccgatggcgcaacctgaaattccagcatttgaggattgggaaaccacaggaaacaccccttacacacaaaagttcgaggatgtacggaagggcaagaaaacaggaattcctgcacagacaaatgatccaaggaggaacccggaacatcctcgcaagtcgcctttgcatgcaacggcctacaaaaccgatcctcaagaccaaggtccaaggaacccaccacatcgaccgagac

SEQ ID NO: 5491 - DNA, 436 bp, Zea mays
  Clone ID: LIB3137-040-Q1-K1-A8
gagattttcatttagtaggtcaacaaaacataaactagaaacttttgttaatttgccaagggatgacttggatttgacaaattacattgccaataagaagacttcagagcgccagatctatgagctgtatgctgtgagcaatcattatggcaacatggcaagtggacattatactgcacacattaagcttgtggatgagaatcggtggtacaacttcgatgatagccatgttgcttccattgatgaagatgaggtgaagactgctgcagcttatgtgctattctatagaagggtcagagaacaagacatagcaaggggaactagtaatggatctcagttatatgcaaaaagaagtcacggatatagccatacgtaggctgatgattactgtggttcggtgcaagggggattctggaaatgacacccgcacgccttt

SEQ ID NO: 5492 - DNA, 397 bp, Zea mays
  Clone ID: LIB3137-040-Q1-K1-A9
cccgatgcgaccatgcgtaccgatcgaatcaggctagagctcactgttgcgttttcttaagaacactataaaaacaacgggggagcttctttcgggtcaacaccttatttgattcacgcaaggcctttactttaagaaatttgcccgcttatcgtcctaattacacgtcaatgctcaaaccaagctcactgcgacgagctaatctaccagacaacaaaagcattgcaatatgctcgccatctacaggaccctgacagtgcgaaaaactctaatacatgcaccaagaacaacattgttcataaacaatggagagatcacaaccattagcacaacgtagactataacaagatcttacgtcacacatgacgtcaaaccggatctatatccgacgatccac

SEQ ID NO: 5493 - DNA, 442 bp, Zea mays
  Clone ID: LIB3137-040-Q1-K1-B1
cggacgcgtggggaaatggagaacggcggctgcaaaggcgacgttcccaacgatgcgagcgaacattgccctggaacgcagtcggaggaggcggggaaggcggatgcctgcgctgggtgccccaaccagcagatttgcgccaccgcccccaagggccccgatcccgatgtggttgctattgttgagaggttggctactgtgaaacacaaattattagttttgtctggaaagggaggtgttggaaagagcacattctcagcccaactctcctttgccttagctgaaatggaccatcaggttggccttcttgacatagatatatgtggccctagcatcccaaaaatgttaggcctcgagggacaagatattcatcagagcaaccttggttggtcacctgtgtatgtcgagtccaaccttggcgtgatgtcgattgggttcatgc

SEQ ID NO: 5494 - DNA, 434 bp, Zea mays
  Clone ID: LIB3137-040-Q1-K1-B11
cggtactccaccgctaaaaccttcggaaagaatccccaaatctcgcacacctcgaagccttcgaggcccgaaaccctagctcctcggcctccccgccgcttccacccatggctccaggactgcagcgcttcactgacattgccgacgacggcacgccccagctcgacgccgcgtccggcgaggagctggtccgtgtggaccgcaccgtggctgtcgcccttggcccccgctcgccggagtccccggggactctgttcgtcaccaccaggagggtgatttggctcagcgaagcggagaagggcaagggctacgcggtggacttcctcgccatctcgcttcacgctgtgtcgcgcgacctcgaggcgtacccctcgccctgtatctacactcagattgaggcagcccgtggtacagaagaggaggctggggaatca

SEQ ID NO: 5495 - DNA, 350 bp, Zea mays
  unsure (1)..(350): unsure at all n locations; Clone ID: LIB3137-040-Q1-K1-B2
gtattttgtgtaatatcgagtaacctaatgtatacttgcttactactatcaaaaaaacagagcaggtacaaagtacatacaagccaacgccaacactagatggcgatatattattttacagcttcttccaaatatagaagatccacgagagccttaagaaagcatccaacgtcatgtgctcagatccatggccatccatgaataccgcaagcacacccaccctctttatttatgacatcatcccacgcgtncggccctctccttcgcgagctcctcccgccgccgatcgccgtcagcgtcgtcgtcgtcgccggcgaagtacctgtctggccaggggcactgcacggagt

SEQ ID NO: 5496 - DNA, 415 bp, Zea mays
  Clone ID: LIB3137-040-Q1-K1-B5
tcttggttcgttcttgattcttggacgaggtgggatttggagagccaagggcggcgcggcggcggcgggtttctcggtcggactagattgtttccatcgagatggtgggcggcggagggcattcgtcgatggaccaccctggcgccaaggacctcgagcgcggcgagctgcgccgtggcgcgcctgagtttgcggacggcgacgatggagacggggaagaaagccagtacttctcggacgcggaggaccggtcgtggccgtcgcactcgcgccacgactccaccgcctacgaggactacgtctcgctatgcggtgccgcccgcgcgagctccgtcgacgccgacgccgatgccgacggcgaggccgtcagacaacactgcaggaagtcgtcgtgcgtgtcagagggctcgcttga

SEQ ID NO: 5497 - DNA, 431 bp, Zea mays
  Clone ID: LIB3137-040-Q1-K1-B6
cggacgcgtgggcggacgcgtgggcgaccaccacccccaccaacgccgcctccgaggagggcgacgacgctgcggctggcggcgcggacaagaagccggcgcaagagacggtgacgaagacggtgcatacggaggaggtgcggtcctcggcagggcagcccgacgaggagggcgtgctcaagcccgtgaaggtggtgcacgagatccccgccaaggacagttccggcgtcaagcaggactaggactagctaagctgcctagctagatcgatcatctagctaggatcgatgctgctgctgctaagctgagtggatttgatgctgctgcggtcagaaatcttatcgtgatttccacccaccaaccagatcctagctagtaattgcagataaacacatgttgcgttggatcctaatgtgaattaatgatctgtg

SEQ ID NO: 5498 - DNA, 445 bp, Zea mays
  unsure (1)..(445): unsure at all n locations; Clone ID: LIB3137-040-Q1-K1-B7
gttcttcccccggcacgcctagcgccagtcaccaacttttcactccctccctccgtcgccggggcgcgcaagaagatccgggagtacgactccaagcgcctnctcagggagcacctcaagcgcctcgcgggcatcgacctcaccatcctctccgcccagatcacgcaatcaacggacttcgcagagcttgtgagccagcagccatggctgtcaaccatgaagctagtggtgaagcccgatatgctgttcgggaagcgtgggaagagcggcctcgtggctctcaacttggatttcgatcaagtcaaggagtttgtcaaggagcggctgggggttgaggttgagatgggtggctgcaaggctccaatcacgaccttcatcgtcgagccatttgtgccacatgatcaagagtactacctttcgattgtctcagagaggttgggcagca

SEQ ID NO: 5499 - DNA, 322 bp, Zea mays
  Clone ID: LIB3137-040-Q1-K1-B8
gcgctcgccttggagcacacgccgtcgctagcgcctgcggcctgcctcgcttaacctgttgcggtaacgtccgcccggcttgggtcttcatcaatcaccaagatatctggcatctacctggcactgcatctgatcaggccttttctggctttcttgccagaggtgcccagctctgatcttaagatacccttcagagaaaaaacattatccactgttatttgcttcttaattctcgtggtctgcaatcctctactactctataatatatattcatcaactgaatctgatcctatctacactatgccacttatcctcatattaa

SEQ ID NO: 5500 - DNA, 441 bp, Zea mays
  Clone ID: LIB3137-040-Q1-K1-C1
cccaagagtccaatatatagagttcagaatcaattcacaagtgcagcatgaagaagacatggccacatatgtctatcacttgcggcccatcaacttacaaaaacttcgacaacatgagtaagtacatgaccctttttactacaaaacataacagggctcagtgccttttactgtattgtttgtccttgagagaataatgaagttgacccaagtccaaaatttcttcaatcacacgcaacaccggctgcttaatctcttcttttccctcctctttatctccagcgcatcgtaaagggaggagcggagcggcgaattcttgtggtttcccaagatgtcttctccaagcaagcgccgggagatggacctcatgaagctgatgatgagcgactacaaggtggatatggtgaacgatgggatgcacgagttctttgttgaatttcg

SEQ ID NO: 5501 - DNA, 311 bp, Zea mays
  Clone ID: LIB3137-040-Q1-K1-C2
ctaggaccctttaactgaccacatgcctcgtcatgggtaagcttagcctcggctggaccagataccagaaaggccggcccgcaatgggagtggagagatggcgagagtatcgtgtatccacctggcaagaggctggatggtggggtactgagctctcggttggcggggacccgttctggtcttgagaaacccgtgggcgagttaacatatgcaagggttaagtgctacatatgtcgtgtggttggagatcctcaactgagtattaatcgattcggatcgccgaacttctcggatatgaagactggatcact

SEQ ID NO: 5502 - DNA, 338 bp, Zea mays
  Clone ID: LIB3137-040-Q1-K1-C4
acaagtttagatataaaaatatagcatcgcccgcgctctggagagtctggatcctcctgaacctcgaagcagcaagcgatgaaaggagggacgcaagcaattagcctgatggtgcaccttgctgtgccatggctctgccttgcttcttgggcagctctgctaccagcgctactagcatctgcaaatgtgggtgcagcagctccgacactgagagcggagtacatgaatttgaacttcagcaccgcttcggcgacccccgacaagtacaagagcttcatcgcttctgttcgtgctggcttggtgagcaaagcggggggcaacagcagcgggatccccgt

SEQ ID NO: 5503 - DNA, 296 bp, Zea mays
  Clone ID: LIB3137-040-Q1-K1-C5
cttttgacggccatgaaaccccctcagctgccggccggggagcgctcctgggctcacgaggtcaagcaggccctccgtgagaaactccggcgctcctacggcgccgcctccgccacaccggcggccggtgaaccgagccgtggccccaactgccgtggctcggccgccgaggaccccataaggagagtcatgttcttggctccctggggccacacataaaacacaaacccaaacctgggcttgcaagaccatggccggatcttaaaagaactgttcaaccatacttaaaaggaact

SEQ ID NO: 5504 - DNA, 298 bp, Zea mays
  Clone ID: LIB3137-040-Q1-K1-C6
ctttctaacagaacacacgctacatctacctttacctcaacccaagctacaacgaggacagtcaagctcgccctcacatctcagagcaacaacttcaacagcttcccccttccactcttgccagatgcctcatgccattgccttgagctctccggacaccagcacctgaccctgtctgcatacaccccccagctatttaacatatccaaagcctaagttctatatataacggatccaggcctattcttatactcctatcactgcactaggataaccgaacttgtagggtatgaagact

SEQ ID NO: 5505 - DNA, 442 bp, Zea mays
  unsure (1)..(442): unsure at all n locations; Clone ID: LIB3137-040-Q1-K1-C8
cccgggcgcgacgcgcacgcgtaccgcacacacacacacacagncaagtggtnttccatanccaagtgctgtgtactatccacgcagctagactcagtttggcagcaggctagccatcatctcggatggagaagcaccaccacttcttcaaccaccacaagaaggacgaggagcatcccgccggcgagtacgggtactccgagaccgaggtggtcactgccaccggcgaggccgagttcgaaaggtacaagaaggaggagaaggagcacaagcacaagcagcacctcggcgaggccagcaccatcatcgcctgcgccttcgcactctacgagaagcacgaggcgaagaatgaccccgagcacgcgcacaggcacaagatcacagaggacgtctctgccgcagtggccgtctacgccggcggctacgtattccacgagcacca

SEQ ID NO: 5506 - DNA, 405 bp, Zea mays
  Clone ID: LIB3137-040-Q1-K1-D1
ggatctcaagcgtgggttcgtggcctccaactccaaggatgaccctgccaaggaggctgggagcttcacctcccaggtcatcatcatgaaccaccctgggcagattggcaacggctatgccccagagctggactgccacaccttccacatcgccgtcaagtttgctgagctcattaccaagatcgacaggcgatctggcaaggagctcgagaaggagcccaagttcctgaagaacggtgatgctggtatggtgaagatgattcccaccaagcctatggtggtggagacattctccgcgtatcctcccctgggtaggtttgccgtccgcgacatgaggcagacggttgctgttggagtcatcaagagtgtggagaagaaggacccaaccggcgccaaggtgaccaa

SEQ ID NO: 5507 - DNA, 440 bp, Zea mays
  Clone ID: LIB3137-040-Q1-K1-D10
ggtagctaactccaaggcaagcatccttggtccattgttggcctcgctcatcaatcagctgtgtgtcagcaggaggcgttgcggccatggcggcttcgaagcccatcttgtatagcgcgtggatcagctcctgctccttccgagtccggatcgccctcaacctcaaaggtgtggattatgagtacagggctgtgacaaggaacgatctagattacgaaaagatcaatccaatcaagtatgttccagcattggttgatggggattttgttgtttctgactccctggcaatcatattgtatcttgaagataaatatcctcaacaccctcttttgcctcaagatctcaaaaagaaagctataaatctgcagattgcaaatatagtttgttcaagcattcaacctcttcaatgttatgctgtaattggtctgcttgatggcacc

SEQ ID NO: 5508 - DNA, 326 bp, Zea mays
  Clone ID: LIB3137-040-Q1-K1-D11
attcaactccagcacatatcatttttttaaaaccttcctaatcattctccactgtactttcttaatacacaccgcccttccccatttctcattctaacctaatactagctttattatcatttacatctttttaattttccccaactacttaacttttgcatgttaatagatatctgtaactatatctttacattacattatatatcaaaataaataaacactttttcttttcttttcaaaaaaaaaaaaaaaaaattccgccccccacttatttaccttctcaacctctcaattaattcattccgctaccttcactctttccacct

SEQ ID NO: 5509 - DNA, 249 bp, Zea mays
  Clone ID: LIB3137-040-Q1-K1-D2
gtgagcctgctgccgtcttcttccgccgccttcgccgtcgtcttcgtccgtacatcagaaggcgtgtaggaagaaaaagcgatcgatggcgtccaactacgtggacacgacgggcgaggagggacggttccacggccctcacagccacagcaccagcacgaccccgacgggcggcgcggcggcggcggcggcatcgccgcgcaacttccggcgcagcttcttctccgcgttcttcgcgggccacagcca

SEQ ID NO: 5510 - DNA, 442 bp, Zea mays
  Clone ID: LIB3137-040-Q1-K1-D3
aatgcttttgcacacacacaccaaaagacatacaggaattcttattcagcttatggtaccgggcaattcatgccttgttcattaatgcaacaggttcttcacgtaaatcatgctctaccccaattgatgtcaacaggttgggggcattgtcaaccagttcatcagcgagccagcgtaaagaatttaaatttcctcctagaaaggcagaagttagagaaatgtcaatgaagtcagagtttgagcgacgcatcaatgtgcaggcgatgaaactaagttctcatgaaataactaccattgctggacgtccggcgacctctactaattctcaggatgtgaaatctgctgttgctgcagttccttctagtaatgccagcgacagcatatgtaaacctgcagctggtccagtatcagcaccaccaccaccaccacgttcaggttattc

SEQ ID NO: 5511 - DNA, 444 bp, Zea mays
  Clone ID: LIB3137-040-Q1-K1-D4
cggacgcgtgggttcacgaggacgcgcgtgttggcggggatgtggtacccgtcgatctggcagtcggcggtggagtagtgcggcagcagcaggggccccggtgggtgcagccgcagcgcttccttcatggacgcctttaggtacggcaggctgctcaggtcgtcctccctgatcatgtccagcttcttctccgctccgtacgcccgtacctccgcttgcagcttcttcatgacgcgcctgtggttcatgagctcggccatggcggactccagcaccagatatgaggtctcgatggctgcctcgaacacgttcatgaggagggacttgacgttatccatggtgaagccgtactcctcgtatctggagaggaagatgtcgatgaagtcgtccgactccttctccttatcgccggacagcttcctcatctccacgtgctcgtggatc

SEQ ID NO: 5512 - DNA, 445 bp, Zea mays
  Clone ID: LIB3137-040-Q1-K1-D5
ggggcatctgtccattctagctgcttaaaaggcaaaattcagtgaaggtcgccctccctgcgcttgagttccacctacagaccactgcagggtgtggagctacttgtgttctagttggtgtagcctctccccagtcatcaagcttggtctgcctagagctggcatgccaccctcgccgtgaccaggtaacttcaagggtttccttagccgagctgtacatgttttgtgctctgcataagatagtgaggctcatatgatggtgagtaaatctccttaagacagttttgttggatgttatatgaaatttggagtaaaagctgcctaaagttgggctgttaagttagctgtgattgagtttgttcagttcctgaagtctgtattgcagcacatggtgctcagtttagagccctttaggcatcaaaccatgtggttttggactgaagtt

SEQ ID NO: 5513 - DNA, 175 bp, Zea mays
  Clone ID: LIB3137-040-Q1-K1-D6
gacccacgcgtcccaatctcaaactttaaacccactctacatttccaatgataaccctccctctgaggctagaatcttctcataacatgccatcatcatctaccaccctggacacatacacaactcctactcccaagacccattctgtcacacactcccacatcacacctcaact

SEQ ID NO: 5514 - DNA, 412 bp, Zea mays
  Clone ID: LIB3137-040-Q1-K1-D8
cggacgcgtgggcgccactcccactaacgcgggcggcggagcggaagcgaaccaggtatgtagtggagttgcctccttcaagctactctaatgtcctttctattcaagtctagcaatggcggcaccactgaaaaaatcccatccccagaagaacagcgagaaaaaataaatgaattacgcaaggagcttggtgaacactcatcagaagccattaaagacttcctttcagatgcctcgttagtgcgatttcttcgagcaaggaactggaacgtgcagaaagctagtaaaatgatgaaagcagctgtgaagtggcggcttgcattcaaacctgaaaacatctgttgggatgatattgcacaggaagcacagactggaaagatatatagggcggattataaagacaaacatggca

SEQ ID NO: 5515 - DNA, 313 bp, Zea mays
  Clone ID: LIB3137-040-Q1-K1-D9
actctgattctcctccatcccatactatttttcttaaattggcaaataccttacccaagtagtttattaaataccatctacctccttcacaaaacttccttctctaatatctattacaaaaccccctatctacagatactcaacttatacaaacaatctattcacattacatagaaaatacatccttaaaattacacacctcctaaaacacttctcttcatccatcccccactcaaacacatatattacaagaattcaatgtctaatcccttcttacccccatcacaaacaacttgctttattatcatatttt

SEQ ID NO: 5516 - DNA, 442 bp, Zea mays
  Clone ID: LIB3137-040-Q1-K1-E10
ctcagatgtcacctgaagatgcagatgttcatgtagttctgggagtcttatacaacctatgaagagagtatgataaagctataacttcatttaagacagcagtacagctcaaaccacaggactactcactctggaacaagcttggtgcaacccaagcaaacagcatccagagtgctgatgcaatattggcgtatcagcaggcactagacttgaaacccaactacgtgcgtgcatgggcgaacatgggaatcagctatgccaaccagggtctgtatgaggattccattcgatactatgtaagggcagttacaatgaacccaaaagctgacaacgcttggcagtacttgaggatttctcttggcaacgcttcaagagctgacatgattgccgcatgcgacgcccgcaacctcgacgctcttcagaaagagtttcctctctgagt

SEQ ID NO: 5517 - DNA, 303 bp, Zea mays
  Clone ID: LIB3137-040-Q1-K1-E11
gtcacctacaactacgccatgtcttcttccatgttcatgtcgctgccgcctacatcatggggcgcgagttttcctaagacccctctccatctacaaccaccaccaacttgattcactcccaacacaatctcagccactgtctttgaatcaactagccgtgtcaccatcagagatacaactcggtatagctttgagtgcaacatatacttttagctccctcatgagcccatacatactctctcttgccacctatttttctgaacctgcctctacctgaggcttcacattcacacacactcacca

SEQ ID NO: 5518 - DNA, 431 bp, Zea mays
  unsure (1)..(431): unsure at all n locations; Clone ID: LIB3137-040-Q1-K1-E12
aaagaaggtccattggtgaactttctgactcctataaatccaattgaaaagctggaaggagctgcaaaagctggaagggagatcagattttataactcagagatgcatagggcagcatttgttctcccgacctttgcaaggagagagctagaagcatattgcgtttccactgaaacagagcaagcggaggaaacaccggcggcaccactgaagttgactcttgcatacaggagtgaaattttcgctacatcctagctagaccaggactcgcgatgtaccacaagatatcaagaaaccattccttccttcctggtgccgtacctncagtatcgccattggttcatagtcttactatcacatgctatgagacgcataatgaggcatcatgtcagtaattcagtatccaaacaatgagatgagattgcatgcta

SEQ ID NO: 5519 - DNA, 450 bp, Zea mays
  Clone ID: LIB3137-040-Q1-K1-E2
aaaccctcccccaaaaccccagagcggagaagagcgcaagatgttcggcttcgggcaccggggccggcacggccagaacccgccggcgcaccccccggcgcacggcggcgtgcaccagcccaccttcaagatcttctgcaaggccgacgaggggtactgcctcaccgtccgcgacggcaacgtggtgctggcccccgccaacccgcgcgacgagcaccagcactggtacaaggacatgcgcttcagcacccaggtcaaggacgaggagggcaaccctgcgttcgccctggtcaacaaggccactgggctcgccatcaagcactccctcggccagtcccacccggtgaagctggtgccgttcaacccggagtaccaggacgagtcggtgctgtggacggagagcggcgacgtgggcaagggcttccgctgcatccgcatggtgaacaacat

SEQ ID NO: 5520 - DNA, 346 bp, Zea mays
  Clone ID: LIB3137-040-Q1-K1-E3
cggacgcgtgggcgcagtcgccatggaccttttcgccacatgggggctaaccccgctcgcgggcgcggacccggagatctacgacctcctggagcgcgagaagcggcgccagcgtcgcggcatcgagctcatcgcctccgagaacttcacctccttcgccgtcatggaagcgctcggctccgcgctcactaacaagtactccgagggcatgcccggcgcccgctactacggcggcaacgacgtcatcgacgagatcgagaacctctgccggtcacgcgcgctcgctgccttccgccttgacgccgcgtcctggggcgtcaacgtgcagccctactcgggctccccc

SEQ ID NO: 5521 - DNA, 438 bp, Zea mays
  Clone ID: LIB3137-040-Q1-K1-E6
gcgtcctcctagacctcgacgacaccctgtacccgggcgacacgggcatcggcgcggccgggaggcgcaacatcgacgagttcctccaggccaagctcggcgtctcggccgacgaggccgccgccacgcgcgccgagctcttccgcgcgcacggcagctccctcgccgggctcatcgcgctcggctacgacgtgcacccggacgagtaccacagctacgtgcacggcaggctaccgtacgacaggatcgcgcgcgacccgcagctggcgcggctgctgcagagcatcccgcagcgcaaagtgctgttcaccaactcggaccgcgcgcacatggagcgggcgctggagcggctgggcgtggacgaggccgccttcgacgccgtcgtgtgcttcgagaccatgaacccgcacctgttcggcgacgacgcgccgcgcgccg

SEQ ID NO: 5522 - DNA, 443 bp, Zea mays
  Clone ID: LIB3137-040-Q1-K1-E7
catcatcctctggtgaaaggcgtatcagggtccacacagcagctgcacctgtggtcacagagtcttagtgaaatgtaccgtcaagcagatacgggtgccattgtgtcattgttgggtagaattgcggttgaaaattcactgtctgataagctggacagtgtccggcagcagttacagttaaagcttgtcagaagtttgaaggaataccgcaatttatatgttgtacaacaccggataggcgggagactgatttttcctgaatccctaaagtttttgccattatacatcctggctatctgcaaaactcttgctcttcgtggaggttatgccgatgtttctcttgatgaacgatgtgctgctggtttagcatgatgatattgcctgtaaaaaggctgctcaattttatctatccttctttgtacagagtcgatgaagtattaaca

SEQ ID NO: 5523 - DNA, 437 bp, Zea mays
  unsure (1)..(437): unsure at all n locations; Clone ID: LIB3137-040-Q1-K1-E9
ccaattagctagcttcttctagctctagctaggctcgtctgctgcaagaaggtaacagtaacagcaggcatggaggggaaggaggaggacgtccgcctgggcgccaacaagttctcggagcgccagcccatcggcacggcggcgcagggcacggacgacaaggactacaaggagcccccgccggcgccgctcttcgagcccggggagctcaagtcctggtccttctaccgcgccggcatcgccgagttcgtcgccaccttcctcttcctctacatctccatcctcaccgtcatgggcgtctccaagtccacctccaagtgcgccaccgtcggcatccagggcatcgcctggtccttcggcggcatgatcttcgccctcgtctactgcaccgccggcatctccggcgggcacatcnaacccgcggtgaccttcgggct

SEQ ID NO: 5524 - DNA, 303 bp, Zea mays
  Clone ID: LIB3137-040-Q1-K1-F10
ccctttcaatttttttaatctccgcttacactgttccaccaaaccaagccgagaaattgcgccgaaatttcagatcaaatgctcctcctcctcctcctaccactatccctattcgaggattctgcccagcagcgcggcgatccgcctcgatccggaatggagcgcgtcttcttcatggaggagatccccaacccctactgggccccgccgcaccctcaaccagaggacggcagcgctgttgctgcaccaagtggagtaggaagagcggtagacacggcgtgcgcgatgaaccggtgcccatct

SEQ ID NO: 5525 - DNA, 430 bp, Zea mays
  unsure (1)..(430): unsure at all n locations; Clone ID: LIB3137-040-Q1-K1-F11
aattctnctctatcacaactcactattatcacaacttctctctttctacacaaatgactttttctcaaagtgagcagcgccataacanacatcatcatcaactttaatgaatctaccatcttgcatccgtctgaggaggtggcgcgccacatgttctttaactccaacttgtacctgatcgtccccaatttccacacgcccatcgtctatttctatatgtccaatggcgcccccaactttttcaacggcaatgttattaaggaggcactgaccaacgcgctgatgcccttctacccaatggctgacctgctcctgctacatgacgacgctcgcctctacattgactgctacggtcacggcgtgcttttcattaatgccaacactggcgccgtcatcgacgatttctaggattttgctcccaccctttatc

SEQ ID NO: 5526 - DNA, 397 bp, Zea mays
  Clone ID: LIB3137-040-Q1-K1-F2
gatcccctttcccccaactccccccccaagcagccgcgaagagagatcccgcgctcaaccggcgctgctcggccgcggcccccttcggtcctccttccctcctttcctccggtggccgccggggacggggagcgaagaagcctccatcactcctttcctccgttggtcgccggggacggggagagaataagcctccctccctccttccctccggtggttgccggggacggggagcgaatcctccattcctccttcctccctccggtggtcgccagggacgagggaccgggatcgaagatgttctatggggccatggtttgggatccgtggctgatcgtgtcgcagatcgtgtgcctgcagtgcctctactacctgtcgcttggcgtcgccatggcgc

SEQ ID NO: 5527 - DNA, 328 bp, Zea mays
  Clone ID: LIB3137-040-Q1-K1-F3
gagctagcaactagctcacttgatatacatatacacaggccggcatattgcatcggcatggaaactgaatttaccatggcccacctgatctcttctgcaatcgcaggcgcgggcaacttggtcgctgatggaatcagtggtgtcactggcgtagcgtcgcaggttgtagaaggcgtagaggacactttaggcagtatcgtagaagcaatcgaccaaggagtcaaggatgaggaccaactggacttgcccaagtacgtgtgtttcaagggagataacggtctgtaccttattgctcggaaggttgaaggccatccctacctgcaatttg

SEQ ID NO: 5528 - DNA, 418 bp, Zea mays
  Clone ID: LIB3137-040-Q1-K1-F4
aggcgaccgccgagctgggccctccgccgtcgctctacttcaacgccggcatgttcgtgcgcgagggcagcgtggccaccgccaaggcgctcctcgacaccctccgcgtgactccgcccacccccttcgcagagcaggacttcctgaacatgttcttcagggatcagtacaggccgatccccaacgtgtacaacctcgtgctggccatgctctggaggcaccccgagaacgtgcagctggagaaggtgaaggtcgtgcactactgcgcggcggggtccaagccgtggaggttcacgggcaaggaggcgaacatggacagggaggacatcaacgccctggtgaagaagtggtgggacatctacaacgacgagacgctggacttgaagggcctgccctcgctctcgcccgacgacgacga

SEQ ID NO: 5529 - DNA, 442 bp, Zea mays
  Clone ID: LIB3137-040-Q1-K1-F6
cggacgcgtgggcggacgcgtgggggaagagcaccaaggaccttcggcgcccgggcaggagccacatcttcccgagcgagttcttggttggcctcttcctcttcggaccacctccaaggctcttggtgtagcttgccactctcaccaatcaagttttcatgtctgatctcgacattcagatcccaactgccttcgatcccttcgctgaggccaatgctggggactctggtgcagcagcagggtcaaaggactacgttcacgtgcgcatccagcagcgtaatggtcgcaagagcctgaccaccgtccagggattgaagaaggagttcagctacagcaagatcctcaaagatctcaagaaagagttctgctgcaatggtacagtggtccaggacccagaacttggacaggtcattcagcttcagggtgatcagaggaagaacgt

SEQ ID NO: 5530 - DNA, 434 bp, Zea mays
  unsure (1)..(434): unsure at all n locations; Clone ID: LIB3137-040-Q1-K1-F8
cggcttttaactaattcctcctcctcctctctctctccccgatccagctagccggacctgccaccctccctcttgaatccgctcaagttcccgatctcccacctcgtcctccagctcgatcgcgttcgcggcaccccactccgcgctccagaaataagtagccggcggtttcctcgccccaggttttgcggtcgctggggagtgggaattcgttcggctccggactggccaatgctcctgcggtttcttggagaggccgctgagattgggatccaagctgcgttaggcgagcagcagcagtagccgcatcgagattcgacgtccttgtccgagggattctacgcttcttgggcggcgatttcggttgcagcgggaaaaaaaaaagaattctttcaccggacttggcccaactncgctgtatgttagggtagccc

SEQ ID NO: 5531 - DNA, 400 bp, Zea mays
  Clone ID: LIB3137-040-Q1-K1-F9
aataaggtttacttttttcgccagaaggatagcacgagaagtcagtccaagcactgacgggatcccgccatcccaaggcagcaagtacattgtgttcggatccagcccaccgccgtccgctaacatgaacggctgtgctgcccacggcgatatcatgcaagttgactctcacggatttggacgcctttcattagttgcagcatctgctgcccagtctgctgccagtgctgtccaagttggcacaaaagaaatccaatcaaagatgaaggatgggggctatgaccagaaggtgaatgaaactgtcagtgttgttgccaataaaactgcagagattgctagcatgacttgagggatcatgagaggagttatggcgctagcctcacaaaaggtagaggaatat

SEQ ID NO: 5532 - DNA, 356 bp, Zea mays
  unsure (1)..(356): unsure at all n locations; Clone ID: LIB3137-040-Q1-K1-G1
cggacgcgtgggcgcatcctcgctccggaggcggagcgccggagcccggagccccgcccggctccggtaaacggccagggccagaccacccccacctcagtccctctcctgtgggcggcgtcctcccgcgcccatggggatctcgcgcctccagcccgtcctcctcctcctcatgctccgggctctcgcgtcgcttcccacgcaggccgccgcgagaggcggccacgatccgtcagatgatggagcccacgggccattttcacgtaaacttcttgaagataagcctcacatcacagaagaaatggtccgnggatatatgagcaacactgagcttgatactgctgtacatgcctttg

SEQ ID NO: 5533 - DNA, 255 bp, Zea mays
  Clone ID: LIB3137-040-Q1-K1-G10
ccgacacatgttacaagcctcatctcacccttgcatgaccaattagttttgcttcactccgcgggtccatccatatccatccatcagaattctcactctccacagtaacaaggcgcacgaccagcagcaccagcagccggcaacaaaagacacagcaacgatggcgttcgtgccggagtgcgtgcaatgcgtgactcagagcaacccgttccagtacaaggtggtcaagccgacactagagttcgtcgctttcgt

SEQ ID NO: 5534 - DNA, 413 bp, Zea mays
  unsure (1)..(413): unsure at all n locations; Clone ID: LIB3137-040-Q1-K1-G2
ggatacgcgggggaaaaaaaaggaggctcactgtacaccgagctcacgcagggcgtaggagatcaggtaggcgaaatcggagcanaggccagggacgcgccagcgcgagcgataaggcacactgacatggccgccacggcgtactccaccgcgctccccggcggggcgcgcctccccgctgccggagccgccgcaccgccctctgccctcctcctgccgcggcgtaataaactgtctccgctccctctccggctccaagatgcgccgaggctgtcgttgctccgggtgaaggcctcctccgacgactcctcggccgcgagcggggacgagctcatcgccgacttgaaagccaagtgggacgccgtcgagaacaagagcactgtcctcacctacgccggcggcgctgtcgtcgc

SEQ ID NO: 5535 - DNA, 461 bp, Zea mays
  unsure (1)..(461): unsure at all n locations; Clone ID: LIB3137-040-Q1-K1-G4
gtcgacgacgcgtccgtgacattaacacaaactctagattcccaatccaaggagttaaaatccttgaccgantcaatcaagggtaccagggaacccataaacattaccagagacgataggttttctcagcaccgcccactggaagaccatgtccctcctgttacgaggaatggggcaattaacagttcatggagatcttctcagcaaactaacatgtatggtgtgtcacatggtgactttggttccgcaaggtctgcttcattcgtgccagcacctgctgaacctacagctggatcattttcaaaatcttgtgccgagacgtccaccgcttcacaacgagcggataggtcctctggcggtaagccatgggagatgcaccagtattcgcagcagaggcctggttatggatccaactcccagttgaatgatgatggatcatactctgatgcccaggacaacta

SEQ ID NO: 5536 - DNA, 441 bp, Zea mays
  unsure (1)..(441): unsure at all n locations; Clone ID: LIB3137-040-Q1-K1-G5
gcgccaaaatgacatatgcacaggtcttcgtgtatggttttagtgaaaaggttgggcgtctagccttccttcataaagatggtggtttcgaattgagcaagccttacagtaatcagacagcatccatcatcgacgatgatgtccgggaatgggttggcaaggcctacaagaaaacagttgaattgataacagagcacaaggagcaagttgcacaaatcgcaaaattgcttctcgagaaagaaagnccaacaccaggactatctaactattgtactattaaaacgtccattcaaggtactggaaccaaccatctactacctctttaagaaaggttttttatgatggcggngacaacagccaagcaccatcagataacgcctagctgcctgatgatttattttccccaatggtgactttttccccacttattttttttttttt

SEQ ID NO: 5537 - DNA, 290 bp, Zea mays
  Clone ID: LIB3137-040-Q1-K1-G9
tctatcacaactcactattatcacaacttctctctttctacacaaagaagcttcttatcaaaattagcacctcctaacacatatcatcatcaaccttaagtaatctaccattcttcctccttcctatcacatttctcttctctttttttttaactccaacttcaaccatttataccccaatttccacactcccatctactatttctatacatacaatttctcccacaactcatactacaacaacttaattattaatgactttaccaatgttcttctacccttctacccaa

SEQ ID NO: 5538 - DNA, 472 bp, Zea mays
  unsure (1)..(472): unsure at all n locations; Clone ID: LIB3137-040-Q1-K1-H1
cgtgcgtgtttcgagtgtttccctgtnnttcggtagtttcctagtnnctctgtgtgagcgaccgacctgagnngcggcctggcggcgtgcggacgcgccctatcgctcagggtgacccacggttctttctgtatttctggtgtatcttctgctcggctgtctgtagcaccctcggctccattggtcggataattttgatgacgattagagccttaatttactggttctagataccttcctatacttgatgtctactgataacccttccaattcgcgcaagaggcctttctcttcttaagaaagtggttggatcggtttgtaggaccgggaaggtttgattcagcagcccaaacagcaggttatccccaacgttgataactccagacagataaggagacgtacagacctggtgattcagtcactgtgactatcgaaatctgtagcccagctatgttgaaggattatgttgggc

SEQ ID NO: 5539 - DNA, 349 bp, Zea mays
  Clone ID: LIB3137-040-Q1-K1-H10
acgcgtccgatcaaaaccaatccgggtcttaaggacaggatacttattgcaaaaacaatggcgtgtctactgcggggctcctcggcgctcctcgtcgctgctactgtctgcgctgacggcgcctccacgttctactactcccaccccaacctcgcatccgctcgcgtcgccttacaaactaattatactgatattgaacttagcttatctcctcatataccacctaaaactgtctaacacattttcaaactcattcggctagtatgctacattacaaatcacttcttacggattgacaaagatttcatctcacaagacgctgatgctatgtaatgtcaaaccaccccta

SEQ ID NO: 5540 - DNA, 215 bp, Zea mays
  unsure (1)..(215): unsure at all n locations; Clone ID: LIB3137-040-Q1-K1-H12
catcctttctccttcaacaccaacaagcnactaacagtgggtttttatagaaagcgaggcaaaaaaaaaaataaaacatctaaaatatactccatcatcttccttttattaaccctaccattaaatccatatatactaattatatatccttcacttctcttatacccctcttttacatcactaaccactcaaactatttttccacttaaacatac

SEQ ID NO: 5541 - DNA, 187 bp, Zea mays
  unsure (1)..(187): unsure at all n locations; Clone ID: LIB3137-040-Q1-K1-H2
aganngagaccannntangggaaaacaccactaaaatcccacccttttttttttttttttttagccccctcccattatccccatttaaatgagccaaacccttttacccaaaaaatactcctatacgaaaacacaaaaactaacaattcctcaccttcttttccccccaaaaattaacccataattt

SEQ ID NO: 5542 - DNA, 439 bp, Zea mays
  Clone ID: LIB3137-040-Q1-K1-H3
cgccgtctccgtcgtcgtcggggatggggggagcgcaattccccggcgacaactacttcagggaagtggacgcggcccgcgacggataggtggaccgccgtgacgtgggcaagatgaagcacgggtgcgagcattaccggcggaggtgcaagatcgtggcaccgagctgttattatgtttttctctgtcgccactgccacaacgaggctactgctttcggagatcggcatacaatatgtcgtcaggatgttgaaaaagtagtttgcctactctgtgaaacaaaacagccagtgtcacaagtgtgcataagctgtggagtcaatatgggagagtacttttgtgatatatgcaaattttatgatgatgatacagacaaagggcaggaccattgcatcgattgtggcatatgcaaggttggtggcaaggaaaactttttcac

SEQ ID NO: 5543 - DNA, 435 bp, Zea mays
  unsure (1)..(435): unsure at all n locations; Clone ID: LIB3137-040-Q1-K1-H4
attatatttcagtctggactaatgttgagatctccatatgtatctacgtctaagcatttgggatttgtatttaccatgttggtcaattgggatatttgtttcttgtatgttagcatgtttgaaccatagcaattggtggacgtgtgtagagaagattgcaaaactgcagtatgatggattccactattcatcaaccgagatcatggcgcgcttcaatcgtggctacgctgatggggaattgatccgttatggctcgtggctgtggagatgtggaactcattggttatagtgtgcttcaatcatgggtcatggcgatgctgatggaactgatttgttaccaaggtttaagttttcgctaccgttggacggcctgactggtactttgcccttgtgactgtttgagaacgtactgcccangtttacttaatacttgct

SEQ ID NO: 5544 - DNA, 327 bp, Zea mays
  unsure (1)..(327): unsure at all n locations; Clone ID: LIB3137-040-Q1-K1-H5
ggccgacggacgcgtgcgatttgattaattataagcaagtacttgaacttaaaaaacgagggccanaccacgggcgaggatcgattttatatttgcgaactcctcatttgtcttcttatttcaacttttcaatatgccccttcctataatcttgtcctcccctacaaagtttgtcgactcttgcctaatcaaatctatatatcaaataaaaactacaccttatttttatatgtctttattactcatcatgcaatcgattgcttaatcaattttactttcactattttatctcaaaaaaaacaatataatttttttttcactctatta

SEQ ID NO: 5545 - DNA, 413 bp, Zea mays
  unsure (1)..(413): unsure at all n locations; Clone ID: LIB3137-041-Q1-K1-A1
gttctaccgctccaacgcggcgcgcgaggccttcgtggagatgtgcgccgacgactacgtgcagaagatgaccttcgacagctacctctacaagcgcgtcgtgccgggcaacccgctcgacgacatcaagctcgccgtcaacaccatcggcagcctcgtcagggccaccgcactgcgccgggagatggagaaggtcaccttgtgagccgccgcccgcgacgtcattgccgtcgaaatggtgtcgcagctgatcggccggtgtattagtagagatttgcggctgatcgggttaatttaggccaacatgcgtgggcagtgggcgcggagaggaagagaaacaagttgtgcaagtgcagcaagtagatcaaaagtgctgnctgtttgtatcgatggatcctgcaacatatagcatc

SEQ ID NO: 5546 - DNA, 210 bp, Zea mays
  Clone ID: LIB3137-041-Q1-K1-A10
aaaaaccgccgacccacgcgtcgttgtgtttactaatctcttcaacacttctggtcttcaatcccacctcggagggattttcattataacccttctctataacaaatattactgaaactacctacataaataaccttatgacttacactgacctcccatttactttataaaacaaaatacatttcaacttgtatatttctgcatctatca

SEQ ID NO: 5547 - DNA, 417 bp, Zea mays
  unsure (1)..(417): unsure at all n locations; Clone ID: LIB3137-041-Q1-K1-A11
gcagcctgaaagaaagcggcggtagcaaagcaagcaggtcactggctcactgctctgtcctggcgtctccagagtccagaccaccgcatcgccatggcgccgccgcagacgatcccccggcgcggcctctttattggcggggcctggagggatccgtgcctcgggcgccgcctgcccgtcgtcaacccggccaccgaggccaccatcggcgacatcccggcgggcacggcggaggacgtggagatcgcggtcgccgcggcgcgggacgcgttctcccgcgacggcgggaggcactggtcgcgcgcccctggggccgtgcgcgccaactttctccgggcgatcgccgccaagattaaagacaggaaatctgagctggctttgctggagacacnnttgatctggaaagccttggatgaa

SEQ ID NO: 5548 - DNA, 397 bp, Zea mays
  Clone ID: LIB3137-041-Q1-K1-A12
ggaggaggaggtcggctacgagtcggggttcggcccggggctagggctgggcggcggcggggtcgggatgtcggccgcggaagccgctctggctctggaggagcgcgagatgccgccctgcccacccggccttcgccagtacgagaccatggtcgtgctccgccccgacatgtgcgaggaggagcgcctcgccttcatccagcgctacgaggagctgctcgtcgccggcggcgccatgtacgtggaggtcttcaaccggggtgtcatcccgctggcatacagcatcaggaagaggaacagccggaccgggctgccgtgcacctactacgacggcatctacctgctcatcacctacttcaccaagccggagtccatggacgccctgcaacttaagcta

SEQ ID NO: 5549 - DNA, 136 bp, Zea mays
  Clone ID: LIB3137-041-Q1-K1-A2
gacgagaagatttgcagctagtatatcagaacggtggatttgggcccgagtgatatcgccggaggaagcgtgctccgtgtgggccctccctccggaccccgcccgcgaccgtttctgccgcatggaggaccgccgc

SEQ ID NO: 5550 - DNA, 361 bp, Zea mays
  Clone ID: LIB3137-041-Q1-K1-A4
tccagattgcatcttgtgtgattgtggtacttcttctgtcctcaccagtgttcacctctccgctcgcatttttgcccattcccacggtctattatgccatccctctgtcagtggttaccactcccactgacttcctacctcaccattgccaaaacttctcaaggattgaccatccctcatgaccctctttccaccttcttttaagaacacctatacgacgtggtatttgaagaaatctactccaacccctgcttctcaagtggattaaaccatctaacttcgtattgaatagaatgatctaaaaccacttcactgcaacaaaatctatccccctttcattcaaccccttccttgtgtattt

SEQ ID NO: 5551 - DNA, 372 bp, Zea mays
  Clone ID: LIB3137-041-Q1-K1-A5
ggaagcccaagtgctctcttgggtgcgctcgtcgccggtggcagtgagccagtgatgcatgggcgtgtccggcttccttattaggatcagcccgtcgatcgatcatggcgtcgtcgagctcggctgctactaccagtggtgacagtcagggtctcaaggctcgagatgcctgcatcgtcggcgtcgcccgcacgcccatcggcgcacttctcgggtcgctgtcgtccctccccgccaccaagctcggctccatcgccatccagggtgctctcaagagggcgaaggtcgacccggcgctcgtgcaggaggttttcatgggcaacgtcctcagcgccaacctcggccaggctccggcaaggcaagcagcccttg

SEQ ID NO: 5552 - DNA, 307 bp, Zea mays
  Clone ID: LIB3137-041-Q1-K1-A6
cccacgcgtccgcaaggagatgatgaggtccctgtgtacgagtcgggcgccgaggtgcttgcgaaggtgcaagagaaatgggcggcggcggcggcatctcggcctcctccctacccggccatgtactcgagcgtgttcggcggcatcatcctggacccggccatgatggttctccccatcgacgaccacatggtccaccggggccacggcgtgttcgacacagccatgatcctggacggcgccctgtacgagctggacgcgcacctggaccgctttctccggtcggccgctgcggcgcgcgttgaca

SEQ ID NO: 5553 - DNA, 132 bp, Zea mays
  Clone ID: LIB3137-041-Q1-K1-A8
ctcgataacacggctgtggtttctcctgtatactacgtgacgttcaccattcttacgatggttgcaaacatgatcatgtacaaggactgggcctcgcagactgcaacgcatatcgcaacacagctatgtggg

SEQ ID NO: 5554 - DNA, 91 bp, Zea mays
  Clone ID: LIB3137-041-Q1-K1-A9
tcctgacattaattagagtcagacaccagataagttctttcagcgttagcaactaactgaggaggacatgtctgcctggtcaagaacttgt

SEQ ID NO: 5555 - DNA, 354 bp, Zea mays
  Clone ID: LIB3137-041-Q1-K1-B1
accgtatcgtctcgcctgttcagtttccttctcctcttcccgcagcccggtttgccgaccaggttggaccgttccagagtagccaagcgaatcccgagtctggttcgcgcgatggcggaggagcagtccaacccccagccccagcaagcggaggagagggaggttatggtggagcagcagcagcagccgaggagggccacgaagctgaggtacctggacttcgtccaagtggcggcggcccaagcccgggtgtgcctcgcggggctctacagccttgccaaggaccaagccgggccggttcgtcccaacgttgacgccgtcgagtctgccgtcaagggcgtcgttagccccgtc

SEQ ID NO: 5556 - DNA, 92 bp, Zea mays
  Clone ID: LIB3137-041-Q1-K1-B10
ttctacctcccccattatctcagcccttttctctcccacatcgcccatccttcctgtccgctgtgcctactatcctccaattaccattctcc

SEQ ID NO: 5557 - DNA, 339 bp, Zea mays
  Clone ID: LIB3137-041-Q1-K1-B12
ccagcaaggaccaatacagagcacagcgcatctcgtcggcctctcgacgccggttggggcaggcaccgtctttattgcccacgcggtccgtgcggaagaagcaagaagacacgccaatggaggtcgccgcagcatcggcagcgggctacggattcaaggccgacgacgacgttgacagcctcaaggcgacggagctcatgcttggcctgccgggcacggaggatgaagaagccgatgagtcccaaaacaaggcgccgtcgccgtcgtcgtcgacgcccaaaggcaagaagcgcgacgtcttctccagcagcgggcccgaggatgcgcccaagaagcgcg

SEQ ID NO: 5558 - DNA, 377 bp, Zea mays
  Clone ID: LIB3137-041-Q1-K1-B2
caagcccaatccgaaatcttgagcgctcgcgccggcgaccacagcaaagaggaggccgcaggacgagagcgccccagggttcctactctcgtcgcagcggcagcactggtagcggcagcagtgaggggaagatgtcgtcggtgttcagcggcgatgagaccgcccccttcttcggcttccttggcgccgccgccgcgctcgtcttctcatgcatgggggcggcgtacgggacggccaagagtggcgtcggcgtggcgtccatgggtgtcatgcgcccagagctcgtcatgaagtccatcgtgcccgtggtcatggctggtgtgctgggtatctacggtctcatcatcgccggcatcatcagcactgggatcaacccc

SEQ ID NO: 5559 - DNA, 377 bp, Zea mays
  Clone ID: LIB3137-041-Q1-K1-B4
cgcaagaccacctcaccagcctcctcgtccccgatctcctcccacccgcatccaagggtttgcttcgcgaccgtgcggaacgagccagagaacaggtatggcggcggcgcggcacctcagatccggcctccccctcctccgcgcccacctcgcatcctccgaatccgcggccgtcgctcaagtttcgaggggcttcgcgtcgcatgccgccaagcccaccgggaaggagatcaaggttccaaaagctctgtttggcggcacaagcaactatgccagtgcacctgtcctcacagcagctaaatctaatgcattggacaaaagtgaatctgagattaaagctattggagaagcttccaagaagaacccggtggtttctc

SEQ ID NO: 5560 - DNA, 205 bp, Zea mays
  Clone ID: LIB3137-041-Q1-K1-B5
gggcgatggtcgtcaaagaaaaaacaagattaaagggtgcgtagaaggaggaagtggtaagaaagcgaatgaaaatgaaaatgtcacaagtaagaaaatgattcgtgggaggtttaagtgtccaaactgtggtgaatttggccacaggaaagcaagctataaatgtcctttcaatggaacaaagaaaagaaaaaggagaccaagg

SEQ ID NO: 5561 - DNA, 327 bp, Zea mays
  Clone ID: LIB3137-041-Q1-K1-B6
cggacgcgtgggctatcacaagcatagtgcaggggcttggcatccaaggcctgagagccatggcgtgcaaggccgtcctcttcttggctctcaacctcctgttcttcacggtggccaacgcctgcggcagctgcccgaccccaacgcccccggtcgagccaccgccgccgcctcctgctaccccacccccttcgtccagcggcaagtgcccgctgaacgcgctcaagttcggcgtgtgcgccgatgtgctcggcctcgtcaaaagcgaagctggcaaggtgcctgccgagccatgctgtaccctcatcaaaagccttgcggacttcg

SEQ ID NO: 5562 - DNA, 378 bp, Zea mays
  Clone ID: LIB3137-041-Q1-K1-B9
cctcagctcccatatccgctcccctacctctccagcatctcccgtctccgtcgtctcgtcgctgctcctcacctcgccgccagccatgggcaagatcaagatcggaatcaacggtttcggaaggatcggcaggctcgtggccagggtcgccctgcagagcgaggatgtcgagctcgtcgccgtcaacgaccccttcatcaccacggattacatgacctacatgttcaagtacgacaccgtgcacggccaatggaagcacagcgacatcaccctcaaggactccaagacgcttctcttcggcgagaagcccgtcaccgtctttggcatcaggaaccccgaggagatcccgtggggtgaggctggtgctgagtatgtcgt

SEQ ID NO: 5563 - DNA, 424 bp, Zea mays
  Clone ID: LIB3137-041-Q1-K1-C1
gtaggcactatatgcactaggaagtagctaaagcagtcataaccatgggttcgctgccgccggtggacgggcagagacgccccccacacgttgtgatgatcccgtacccggcgcatggccacatcacgccgatgctgcagtttgccaagctcctccatactcgcggcttccacgtcaccttcgtcaacaacgagttcaatcatcgacgccacctgcgtgcgcgagggcccaacgcgctcgacggcacggatgggtttcgcttcgccgccatcgacgacggtctcccgctctttgaagcggacgccacccaggacattcccgcgctctgccactccaccttgaccacctgcctgccccggtttaaggatctcatcgccaggattaacgccgaggctgaagccgagggacaacccaccgtgacatg

SEQ ID NO: 5564 - DNA, 132 bp, Zea mays
  Clone ID: LIB3137-041-Q1-K1-C10
gacttgattatccttcaatgaccaattcattttccttcgcatggagaatccttctgggggcgcaactgtttctgtcaagggacaactataacgactacctcaatgatgaatggaccttccttgaaacgtaaa

SEQ ID NO: 5565 - DNA, 264 bp, Zea mays
  Clone ID: LIB3137-041-Q1-K1-C12
ccgctcccctacctctccagcatctcccgtctccgtcgtctcgtctccgctcctcacgtctgcggccatgggcaagatcaagatcggaatcaacggtttcggaaggatcggcaggctcgtggccagggtcgccctgcagagcgaggatgtcgagctcgtcgccgtcaacgaccccttcatcaccacggattacatgacctacatgttcaagtacgacaccgtgcacggtcaatggaagcacagcgacatcgccctcaaggactc

SEQ ID NO: 5566 - DNA, 356 bp, Zea mays
  Clone ID: LIB3137-041-Q1-K1-C2
ctccctacttcccagccaccccatggctcgcttaacccccacgaagtccaaatcctccaggaggcggaagccctcctcctcctccgccatgggcgccggagcggagccggatgcgatgtccacgcggcggccgaagcgtggcaagtcggtgggcggcgtcagcaagaagtccaagtcgggcgggttcgagtcgatggggctctgcgaggaggtgtaccgcggggtgcgccacaaagggtaccgcgtgcccacgccgatccagcgcaagaccatgccgctcatcctcgcgggcgtcgacgtcgctgccatggcccgcacgggctccgggaagaccgccgcattcctggtgcccatgc

SEQ ID NO: 5567 - DNA, 160 bp, Zea mays
  Clone ID: LIB3137-041-Q1-K1-C4
atcgacaaaggggaaaggttcgcttcttgtggcatcttgctttccttcgagtgccatggccgatccggcggaggagaacgttgtctcgccgccaccgacccctgcggccccagccgtgggcgcctcagacccgcccctgcagcctgctgctgacagcgcc

SEQ ID NO: 5568 - DNA, 362 bp, Zea mays
  Clone ID: LIB3137-041-Q1-K1-C5
ctccgctgggccaccagctttgaccgccgcctcccttcccctccgctactgctcctcctcggccgagtcccccgcaggagcggcggcggcggcggcgaggtcgtaccccacatcggcgagcggcggcggcaccgccggaggcaaaggcaagatgttcgggcgcgcgccgaagaagagcgacaacaccaagtactacgaaatcctcgggggggccaaatcggcggtccaagaccatcttaagaaaggctaccggaagggtggttataagaaccaccccgaccagggccgggaccccgagaaggtcaaggagcttgcacaagcctatgaaggtttgagggatccaaaaaaaccggagaattatg

SEQ ID NO: 5569 - DNA, 301 bp, Zea mays
  unsure (1)..(301): unsure at all n locations; Clone ID: LIB3137-041-Q1-K1-C6
gttcctaccttcttcccccccgccgccgtctattcttgctgcgctcacctcgacccanttggatagcgccggcgagggaagcagcagcataatctccggcgagaacccccacctccggctatcgcctggggataaagtggggtcggtaggggcggtgacctatggggagcataagggatccgatagggagagatgaagcaatcaatttattcgttcgccgtcgtccctgctaacgcccccactactaaccctaggaccatactgtcttttggcgtttcttttccggctctttttcgtttgc

SEQ ID NO: 5570 - DNA, 432 bp, Zea mays
  Clone ID: LIB3137-041-Q1-K1-C7
gccccgatcccaccaccaccgtgccccgctgttgacgtctgaccggcggcgatggcgacgggggcggctgctgcatcgcgcaggaaggcgcctagccctccgaagcaccgtcacgacggtacctcgccgctgcctctcggcatggactggagccctcccccgaagagatgggagggaaggaacaccatatggccacacaaccctcaaacaggttggagttactgtgtgatgatgccttcttggatcacccaaacacctgaaactggtgtcacagccgatagctttttgaaatctgtcgttttttacaggatacatgttggtatacaatctccagaaggctttagctctatccatggaatcctcaaaaggtttagtgactttctgaagctatcttctgatcttaagagcgccgtttccagaaaagatgttcca

SEQ ID NO: 5571 - DNA, 333 bp, Zea mays
  Clone ID: LIB3137-041-Q1-K1-C8
cggacgcgtgggcggacgcgtgggctcctacagtggtggcgtgtggtagatagagggggtggagctcgtgtcgggtaggggaagagaaccgcagcaccgctagtggctactactgattaccaggattagggagaagagaacggtagggttaagggccactctcttctacttcttttaaagctcgtggctgtgggagcgtcttagccttgtcctttgcttttctgtagaaaacgtgggtccttgcgtcttatcagcgcctcccatagaatttgtgttccttcatcaaccgtccgtgggcttcatagcccacactgctggtacgctaattactga

SEQ ID NO: 5572 - DNA, 273 bp, Zea mays
  Clone ID: LIB3137-041-Q1-K1-C9
gacttcctcagcaatcaatcagctttccagcgatcggcagctcctcgatcgtttcgaggctccaatccgcccggccgcctccgcctgttgccactagctaggtgatcgatcgaatggactgcggtggcgcgctgcagctcccgcctgggttccgcttccaccccaccgatgacgagctggtgatgtactatctcctccgcaagtgcggcggcctgccgctcgccgcgccggtcatcgccgaggtggatctctacaagttcgacccatggcagc

SEQ ID NO: 5573 - DNA, 431 bp, Zea mays
  Clone ID: LIB3137-041-Q1-K1-D1
cggctatgttccactccaggtggaggctgcagccccggtttcgcaagccgcgccgtggtttgcttgcccacaggcggccaaaccgcaccctccttcccgtcgtttcccatctcttcctcctttagagctaccactatataaatcagggctcattttctcgctcctcacaggctcatctcgctttggatcgattggtttcgtaactggtgaaggactgagggtctcggagtggatcgatttgggattctgttcgaagatttgcggaggggggcaatggcgaccgcggggaaggtgatcaagtgcaaagctgcggtggcatgggaggccggcaagccactgtccatcgaggaggtggaagtagcgcctccgcaagccatggaggtgcgcgtcaagatcctctttacctcgctctgccacaccgacgtctactt

SEQ ID NO: 5574 - DNA, 306 bp, Zea mays
  Clone ID: LIB3137-041-Q1-K1-D11
cagctgccgagggaggaaccctagcggaacactgtgcaggtgacggcggcgcgctaccggtgacggcggcgcgctaccggtgacgggggatacggtggcatcgtccccctcggcccctcttccatccccggcgcggcggcgccagcagccggcctgcagggcttatattttacggtgagcacattcttttgctgatggagaccactgaacctctacaggatatcatttgtgagtttcgtgctggtaagatgtctcatgagggaacacgagtggttccagacacgcgcaagggtcttgtccgcgttg

SEQ ID NO: 5575 - DNA, 335 bp, Zea mays
  unsure (1)..(335): unsure at all n locations; Clone ID: LIB3137-041-Q1-K1-D12
gtggtgattgggatcctggacacggggatcctgcccagccacccgtccttcggcgacgacgggctcctgccgccgcccaaggggtggaaggggacctgcgagttcaagagcatcgccgggggcggatgcaacaacaagatcatcggggcgcgcgcgttcgggagcgcggcggtgaactcgacggcgccgcccgtcgacgacgcgggccacggcacgcacacggccagcacggccgccggcaacttcgtggagaacgccaacatcatgggcaacgcggacggcacggcgtccgggatggcgccgtacgcgcacctntncatctacaaggtgtgcac

SEQ ID NO: 5576 - DNA, 404 bp, Zea mays
  Clone ID: LIB3137-041-Q1-K1-D2
ccagggtgcagcaactgctccaggacttcttcaacggcaaggagctgtgcaagaacatcaacgccggatgaggctgtcgcctatggtgctgctgtccaggctgccatcctgagcggtgagggcaatgagaaggtgcaggacctgcttctgctggacgtcacccctctgtccctgggtctggagactgctggaggagttatgacagtgctgatcccgaagaacaccaccatccccaccaagaaggagcaggtattctccaactacttggacaaccaacccggtgtcctgatccaagtctaccaaggtgagaagacccggacacgccacaacaacctgctgggcaagttcgagctcttcggcattccccctgcaccccgtggtgtgccacaaatcaacgtgtgctt

SEQ ID NO: 5577 - DNA, 385 bp, Zea mays
  Clone ID: LIB3137-041-Q1-K1-D4
ttccgggtgccaagtgtgctgactgactgactgaagatgcatcagctacacaaggagctagatagagggtcatttgcttcttggaatggtgggagagctaccagctgcataagtttaaggtggactgtgctgtcctgtatgtaatgcgtgagagacatgttgtttatctgccgtgctgggttggacgccttttgccttttgtggagttttccatgtgccatgcgattctgtctaatggtacgatatgtttctgttcccctatgctgggtttccgtgtgctatactgctatgtaattctgcccaaatgtttgtacatgttatcagtgtgattggagagcctaaaaggtacacacgggactgtatgatacttggtcccgatcaggaa

SEQ ID NO: 5578 - DNA, 327 bp, Zea mays
  Clone ID: LIB3137-041-Q1-K1-D7
tcggtaggacggatagcgccggcgaggaggcatggagccagacaaggccggggaggcagcgaaggagccgacggaaacggaggctggagactccgtggatccccgcgaactagtgtccagcgacgacgagatcgactactccgtcgagcctgatttctacgaccccgacctagatgacgtcgatgagcggtgggtgagcagacagaggaaaggccgcacatctgacgccgtgcttagcttgcccgccttgttcactaccctgtgcttggattgccagaagcatgagaagtacgtaaaccagtaccgtgcgatgttcgttcgcaactg

SEQ ID NO: 5579 - DNA, 414 bp, Zea mays
  Clone ID: LIB3137-041-Q1-K1-D8
ctactccattacttattttattttactcaactgttcaagaacatcaaggccgatgattttttcatctatggcgctcctatccatgcttccatccttatcgtttatttcaattacaacgtacattaccttcttcttctctacttcacccctctttccctttatcatctatactgcttgatgatttatgacatttcttatccctattaacaccaccatccccaccaataatgatcacgttttcttcacctactcttacaaccagccctatttcctgatccatttttaccaagtttgatatgacccttactctctacaacaacctgctttacaaattctatctctccatcatccccccttcaccccatttttttccacacatcaccgttttctttgacatctactccaacttcattc

SEQ ID NO: 5580 - DNA, 288 bp, Zea mays
  Clone ID: LIB3137-041-Q1-K1-D9
cggcgtccgacgcgtcctctaccgttgccttaaacgattagttataacatacgccatgattggacggggcagcgggctctatcaacgaatgggggcctctgatcacatggtggagacccgattcatctacctagagatggatcaggcgcagttcgaggagtggcgcccatatgtggagaagcgcctcgacaacatgtcccttgaacttgtcaggtcgttcaggctcctggagcgcggcaccttgactgtctaagctttcaaaccctgtctgattcttgcttttgggtc

SEQ ID NO: 5581 - DNA, 367 bp, Zea mays
  Clone ID: LIB3137-041-Q1-K1-E1
aacgcgtcctcgaccagttgtcccaaacgaagagtcgataacagacgccatgattggacgctgcggcgagctcgagcaacgaatcgaagcgtctgagcacaaggtggagacccgattcatctccctagagatggatcaggcgcagttcgaggagtggcgcccagatgtggagaagcgcctcgacaacatgtcccttgaactcgccagggcgtccaggctcctggagcgcggcaccttcaccgtcgaagcttccaaacccggtctgattctgtcttcggggtcgacgttcgggcgctcacctgccggattccacaacgccgactggccggatggccactgcgtcgaacacaatcaccgggagcgggag

SEQ ID NO: 5582 - DNA, 248 bp, Zea mays
  Clone ID: LIB3137-041-Q1-K1-E10
gccaatgaattccctcccctatccgccgccttctccgctcgtctccctgagaggtggcgtagccgatgtactggccgagtactacgtatagaatctgtttttcttgtctcatcccggtgtctgctgcgtctggtggtggtgaaggggagaaattcttgagatctgttccggatcaggcgtgcgagctcgttaatcatgtgtttcacacatagcttcgtcgatttgaatttgatgtactaatggagtct

SEQ ID NO: 5583 - DNA, 411 bp, Zea mays
  Clone ID: LIB3137-041-Q1-K1-E11
cgcaatcatacttcctaccctccccacctcttccacggttccaccccgtccctctcctctggagaagcacccgcaccatacatcttccggcgcccgacgcggacggcgagccgctgctgctgctgccgccggaggaggaagggcaccagggccagcgggtgcaggaggaggaggagcagcagcaggccgccggccgcttggggctgtgccacatgccgctctggggggccgccgcgtccgcggcgccggcagccgagggcgacgccgcccgcgcgccgtctggatccggcggcggcgtcaaggtgatccggtcgctgctccccacccggcgccgccttcgcctagatccgcccgccaagctctacttcccatatgagcccggcaagcaagtccggagcgcggtcaggatca

SEQ ID NO: 5584 - DNA, 408 bp, Zea mays
  Clone ID: LIB3137-041-Q1-K1-E2
cggacgcgtgggcggactcgtggggccgcgccttccaaaccctagccgccgtcgccgccggggcgggcatggtcgccgtcaaccgccccctcgtctccgtgaaggccctagagggagacatggtaaccgacgcccccggcatcgccttaccgcccgtcttcggggcgccgatccgccccgacgtggtcaggttcacccacaagctgctgtcctgcaacaagcgccagccctacgcagtctcccgccgcgccggccaccagacgtcggccgagtcctggggtaccggccgcgccgtgtctcgtatcccccgcgttcccggcggcggcacccaccgcgccggccagggagcgttcggcaacatgtgccgcggctggcgcatgttcgcgcccaccaagatctggcgcaagt

SEQ ID NO: 5585 - DNA, 366 bp, Zea mays
  Clone ID: LIB3137-041-Q1-K1-E4
gcaggccattcttctcgcctcactccctcacagaacccagtaaaatattgccagacccgtcgagagggccccacgccgcctgctcgtcctcgccgtcgtcgccctcgcggccaccgccgccgcggccaactccggcttcgcggactccaacccgatccgccccgtcaccgaccgtgcggcctccgcgctcgagtccacggtcttcgccgcgctcggccgcacccgcgacgcgctccgtttcgcacgcttcgccgtcaggtacggcaaaagctacgagagcgcggcggaggtccacaagcggttcaggatcttctccgagagcctccagctcgtccgctccaccaatcggaaaggcctctcctaccg

SEQ ID NO: 5586 - DNA, 401 bp, Zea mays
  Clone ID: LIB3137-041-Q1-K1-E5
cggacgcgtggtctagccggcgccggcgccaccgctgccgccgtccccgcacaacccggttgccggtccgtacccgtcgctggatcgggcggtgagctactgctactgatccggccctggctccgggtacggccaggagctgtacccgcccaagccggcgggcgggtggtccgacgacggatcgtacgcttacaacggcggcgacgcgccggagccgtacgggtccaggggcaccgcaccgaggccgggctcgggatccgcgctgtttgatgactacgggaggtccattggctcatctgccgataggggtggccgtggtggtagcgcggccagtcccaatgtggtgagggccgtgcccaaggcagagacatcagatgacgtcaggggtggggtgcagaagt

SEQ ID NO: 5587 - DNA, 333 bp, Zea mays
  unsure (1)..(333): unsure at all n locations; Clone ID: LIB3137-041-Q1-K1-E6
cggacgcgtggggcgattgtgaatatgaataagccgaagctgggagctggtagggatctgggatggtctgtatgctatctggcatgcctaatgtgatggcactggttagtacctgtttgtatggccttgtatagaatatatttcgaccgagtgtaggttgtggactttaaagtcatatagctatacttgacctgatgtcaagtcgcggttgtgtgtaatgacgacaattatcatgtgtaagaatacgtctattgctcgtaatgttgtaataactacgactgtagcttgtgtttagggcnnttaaaaaaaaataaatattatatataatttaaa

SEQ ID NO: 5588 - DNA, 300 bp, Zea mays
  Clone ID: LIB3137-041-Q1-K1-E7
cggacgcgtgggtccacatggaggagctgcttggtgcagttgccaatgcgcgccaggtgtgggagcgctggatgtcttggcgacccgacacagccggctggaattcttacatcaagtttgagctgcggtacggggaggtcgagcgtgccagggctatctatgagcggtttgtagctgagcacccaaggccagataccttcatccgctatgctaagtttgagatgaagcgcggcgaggttgagcgggcacgtccggtgtatgagcgtgcaacagacctgcttgctgatgatgaggatgctg

SEQ ID NO: 5589 - DNA, 198 bp, Zea mays
  Clone ID: LIB3137-041-Q1-K1-E8
gcatcatcacaagcaaactgaagtcactcacagctctccagcttccatccagaaaggagaaggaaacatgctagtggacaaccaaccatgatcagcgccaagaagattgctcatctcgccaagaagtggcagaggatggctgcacatgggaagaagcgcctcgccttgggggcggcagcaaagcaagccgacgagtgc

SEQ ID NO: 5590 - DNA, 344 bp, Zea mays
  Clone ID: LIB3137-041-Q1-K1-E9
cgtccgacgaaacatatctacctactactcaagtattcatccttattgagtacagtgttcatccatgggctggtaaggatttgtatcagctaaggtctcaaatgaaactactaaaccggcaagccaagaatacggctagagcaatgccgggatgactgatctgctgatgctgaccgacaagtctcagctgcaggcgctagcgattctgctgcggaacaacgaggagctcatgatgagccatgcgatcaagtctgagactgagcgcgttgagtacctcaagactgtgagcgactgctacacgcggacgattaaactcctcgacgattccatggcggccaggacca

SEQ ID NO: 5591 - DNA, 195 bp, Zea mays
  Clone ID: LIB3137-041-Q1-K1-F1
acgaaacatagctacctactactcaagtatccatccttattgagtacagtgttgatccatggactgggaaggagttgtagcagcaaaggtggcagatgagactactaaaccggcaagccaagaagacggcgagagcaaggccgggatgactgatctgctgatgctgaccgacaaagtcgcagctgcaggcgctag

SEQ ID NO: 5592 - DNA, 344 bp, Zea mays
  Clone ID: LIB3137-041-Q1-K1-F10
cacagacgtgtagaccattttcttaaattcttcctttccttttctttttctacaaatttattattctctagccaagcaggttttatcataacatttctccatcttccatcacatcctttttatttactttattaatcctttctttatactaataatatccaatattatatttacataatacccccctctaaaaaaaaaaataaataaattcctccctttttatattatccaaccttacctactcatacattcaacaacaatatctctcctataattttaacctaaaattcaattcactttcctaaccctttaaaaaccttctttacttaaaaaaacccctttcc

SEQ ID NO: 5593 - DNA, 371 bp, Zea mays
  Clone ID: LIB3137-041-Q1-K1-F11
gttgatagattggtgattggtgtaaaagattgagatcagggattttccttagtctgacctgagtgcttaacagttcacgagtactcaagagcagccaggcacctatgaattctccattggtcccatcctcatgtgcccgtttgtttcagagatttcagtcctgaaagttatgaatgaacatgttgtattttgtgagcatcagctcacgtgattgccattggacaaaaacgtgataaaagtgttaatacttcctatttcaatatgttttgtccattcggtgtcattactctaataggaaagacatagctgagacatggagaagttgaacacaagtattacagcaatacagcactggacaacaaaattaatct

SEQ ID NO: 5594 - DNA, 410 bp, Zea mays
  Clone ID: LIB3137-041-Q1-K1-F12
aaaaaccgggcggacccacgcgtccgccctgtctgcctgaccagctaggatcagcgttagcagcaatggtgatggcgtcgtcgagcgggctgatgagctgcagcgccgtgggcgtgcccagcctgctggcgccgtcgtcccggtccggccgcctggcgccgttctgcgccaacgccaccacctctggccgcgtcaccatgtccgcggagtggatgcccggccagccacgccctgcccacctcgacggctcctctcccggtgacttcggcttccatccgctgggcctcgcgaccgtgccggagaacttcgagcggttcaaggagtcagaggtgtaccactgccgctgggccatgcttgccgtccccgggatcctggtgcctgaagctctgggcctgtgcaactgggtgaag

SEQ ID NO: 5595 - DNA, 433 bp, Zea mays
  Clone ID: LIB3137-041-Q1-K1-F2
cgaaggacggaaggagaagagggcacggccgtctcctcgcccccatggcccacgagaagaagctgtgcaacccgatgcgggagatcaaggtgcagaagctcgtcctcaatatctccgtcggggagagcggcgaccgtctcacccgcgccgcaaaggtgctcgagcagctcagcggccagacccccgtcttctccaaggcgaggtacacggtgcggtcgttcggcatccggcgtaacgagaagatcgcctgctacgtcacggtgaggggcgagaaggccatgcagctgcttgagagcggcctcaaggtcaaggagtacgagctgctcatgaagaacttcagcgacaccgggtgctttggtttcggtatccaggagcacatcgaccttggtatcaagtacgatccgtcaacaggcatctacggaatggacttcta

SEQ ID NO: 5596 - DNA, 316 bp, Zea mays
  Clone ID: LIB3137-041-Q1-K1-F4
cgcggagcggaagccccagtggccagtgcccaccaccttcacgcctcctcgcgtcgtcgcagccgcagatctggccaacggcccccgaccgatcgacccccctccccctcggcgcggcgaggcgcagcaattcaagtgcatcaccgttgttacttccataacgtgctaacagtcaaatttgtcaagctactgttgatgctccagatatagtagaaaaccatgggagaagttagtgatgataattccaacatgtcctttctaaaaagaatcgctacaagtgacgtgccgcttgtgaaagagtatggtgtgaacggag

SEQ ID NO: 5597 - DNA, 252 bp, Zea mays
  Clone ID: LIB3137-041-Q1-K1-F5
gtctgatttgcttcttctctctctccggttcaccttcaatcactcaagcttatcctcttagctggaggctctatcaacccatccaaatccctcctgtagacattagactcctcatcttcaccatggccattgctgggtccagaccaccactgcctgacaaccccttagcacctacggcgaagacctcgactccaacattatcctccatcgagacacgcacaggccccgccgattctgattcttaaccttatg

SEQ ID NO: 5598 - DNA, 371 bp, Zea mays
  Clone ID: LIB3137-041-Q1-K1-F6
gttggatctaacgcgacggcaaagacggtgtatcgaagggtcgacaatggttacgacgatcgggggtccatagcagcggcgggcgcaacttcgacccggttttcttcccatatatctgtcaaatccttctccggttaccctccatcggcagcaatttccgccatagataccggcgatcgagggcctcggacaacccaatcgacggagcagcgcggcggcaggagagggcaaacccttttcttctcagtactctacttgtctgcgcctggatcccctccgcaggaagataagacatgggtcaagcactcggcttgattcaagtggatcaatcgacagtagccatcaaggaaacttttgggaagtttgacgag

SEQ ID NO: 5599 - DNA, 221 bp, Zea mays
  Clone ID: LIB3137-041-Q1-K1-F7
cgacgggttcgtacttgtgccatcatccatatcgtcgagcacggttattaacaggcggcccgagtcaccgtctcactgacatgctgaactattaaaatgcttaatgtttgcacgctcaacatctaaaacgtctatatcaacacgacgtgtgttctacctcacgtcatcagttaaaccatgctagtatatatgtctccaatcacgatccactcgtatctcat

SEQ ID NO: 5600 - DNA, 376 bp, Zea mays
  Clone ID: LIB3137-041-Q1-K1-F9
gccaaatgacggttgtttgaactacattgaggaaaatgatgaggtcttgattgctggattgggtcgtaaggggcacgctgtgggagatattcctggtgtccggttcaaggtcgtcaaggtttccggtgtgtctctgcttgcccttttcaaggagaagaaagagaagccaaggtcttagattgctcttgctaccaaaatcagcaagcgtggagttgaaacgggagggcgttagatgattaagaagaatggttgcttgctatgtttacagtgcattcgtgcaattgttaacctaagattttgttggtgaaaacgatttcttttcagacttgcttctgttgagtgctatcattccatatcaatgtcatctgtttgtacc

SEQ ID NO: 5601 - DNA, 264 bp, Zea mays
  Clone ID: LIB3137-041-Q1-K1-G11
tccgcacctcgccacatcgtgccccttgctcccactctcccctccctcggccctcctcccggcccgcgcacgccgccgcccgacgcccccggtctcgcgttgcccgaagccccagatccgtcgcatggcccccgtcctcccagttgcccagggttgcggcaagcacatcgtgctcgtccacggcgggtgcctaggcggctggtcctggttcaaggtggccacggcgctccgcgcagcggtgtaccgcacggacaatgccgacct

SEQ ID NO: 5602 - DNA, 172 bp, Zea mays
  unsure (1)..(172): unsure at all n locations; Clone ID: LIB3137-041-Q1-K1-G12
aattttgggtngaccacgcgttcggctcgccatcaatgcctccgtccacatctccattgtttcttcttgccccggccgttgggcgcggtgggcacaagccctctttgctcccagttcctcctcctcctcctcctcnccctcttctataacaccctctccgtcgtcgccgggg

SEQ ID NO: 5603 - DNA, 442 bp, Zea mays
  Clone ID: LIB3137-041-Q1-K1-G2
ggcgtgtgcgcacgcacctccccaggccccagtgccaccttccctcctcggctcgactcgcccggcgctccgccgcagctggctcatcccaatcccctcgtacagtcgtgctccgcgcccgcttcaccgcctgaacaaagatggaggccttcctagccggcctcttcagggcgcctccacgggccgtccccgcccctcggggcacgcctctccccagccttcctctcttctacggcaggcgccgcagggggccgtcctcctccgtcgtctgcatggcggagccctatctgattgccaagctggactctgcggagaaggcctggaaagaaatgtcggttaggttggcagatcctgacattgtctcggatccaagcgaataccaaaaaatcgcgcagtctgtttctgaactggatcaggtcgtgaccacatacaggcaattcaa

SEQ ID NO: 5604 - DNA, 179 bp, Zea mays
  Clone ID: LIB3137-041-Q1-K1-G3
cccactcttcctctccccctccgactcctcttccaggcccgccaccaacggcgaggcgccctgcggcgcccgcgaggtcgacgtctgctaagatgacacgctcgccggcgtcctccgcagcttcgtctacggcgtctggtacccggacgagcctcttctcctgcggctccgggcggcgt

SEQ ID NO: 5605 - DNA, 393 bp, Zea mays
  Clone ID: LIB3137-041-Q1-K1-G4
cttccctccctccctctccccgcgggccgccagagtcaatttcgccctcgattcgaccccgattggtccgcccgcgaccgggattccctccgccaagcgcggatctgaacgctgcgctccgtgtcgccgctcgaatccgccatgaagggggccaaatccaagggcgccgccaaggccgatgccaagctggcggtgaagagcaagggggcggagaagcccgccaagggcaggaaagggaaggccggcaaggaccccaacaagcctaagagggctcccagcgctttcttcgtgttcatggaggaatttcgcaaggagttcaaggagaaaaaccctaagaacaagtcctgcgctgcggtggggaaaagctgtggcgacaggtggaaatccctgagc

SEQ ID NO: 5606 - DNA, 347 bp, Zea mays
  Clone ID: LIB3137-041-Q1-K1-G8
cctccttccctcctcggatctactcgccgagcgctcctcctcatctggctcatcccaatcccctctttcattctttctccgctcccgcttcaccgtcttaacaaatattgaggccttcctagcctacctctttatgtctccttcacaggccttccccgcccctccttgcactcctctccccaacctttctttcttttacatcattctccacaagtggccttccttcttcgtcgtcttcatggcttaaccctatcttattgccaagctggactctttctagaaagcctggaaagaaatgtccttaatgttttcatatcctgacattgtctctgatccaaacgaatacc

SEQ ID NO: 5607 - DNA, 167 bp, Zea mays
  unsure (1)..(167): unsure at all n locations; Clone ID: LIB3137-041-Q1-K1-G9
acatgnntgctctcatttttgacgggtcttaaagcttggatggccgggcattcttcaccactgcatcagaaaccatacacatttgctttatgtactgtttggatggcgaatggttcgtcgagcggcacaacctcagtggagaatcctgtttctaatagcagatctga

SEQ ID NO: 5608 - DNA, 422 bp, Zea mays
  Clone ID: LIB3137-041-Q1-K1-H1
agtgaatggaatgaagctgtacatggttgcaccatttttgacgggtcttaaggcttggattgccacgacatcctccaccactgcatcagaaaccagagacatctgctagaggtactgtgtggagggcgaagggttcgtcgagcggcacaaccccagtggagaatcctgttgctaaagcaggatctgacgtgcagcacgctgtcgaccgccctggttgcagcttcagaaacttcaggtttgacaccgcaagcatcctgcaggccatggaggcttccttcctacgcacctaggatcctgacgaagcatccacacctgcacccttgatgtgtatagaccgcggaccagcgctatctgtgttgtcaatctgtctttgtttcatctttctcgccttgtatctgtactcttcacagcaatcctgtcag

SEQ ID NO: 5609 - DNA, 151 bp, Zea mays
  Clone ID: LIB3137-041-Q1-K1-H11
cttgaaaggggagagagagagagagaagagagagagaagagagagagagagagaggagtgggagacccgcgagaggctgccgtgtatggaccgtatactcagcgactgcgaaggagggataaggggatggccgggatcggaccgatcaggc

SEQ ID NO: 5610 - DNA, 322 bp, Zea mays
  unsure (1)..(322): unsure at all n locations; Clone ID: LIB3137-041-Q1-K1-H12
gttgtgcgcgcgcaatgtcactcgtgtccgcctcctcgtcctccaccaccgccgtcgcggcgctccccangaatgggcagcagcgggcgtcntcttcgttgttctcctcctcctcctcttcctccttcctcgtcggcaagacgctgctgaggcatgccgaagcatcccggccgtcgttcgccgtgcgcgccgcggcggattccgacaggcccatctggttccccggcagcacccctccaccgtggctcgacggcagccttcccggcgacttcggctttgatccctggggcctcggatctgacccggagagcctgccgtggaa

SEQ ID NO: 5611 - DNA, 326 bp, Zea mays
  Clone ID: LIB3137-041-Q1-K1-H2
cggacgcgtgggtgcgattcctctcccctcgcctcctcgtctccccctaggggatcgtcggagaggaatcgcaaagagggccgtctcatccgagttaaggaagccatggagcacaaggaggctgggtgccaggcccccgagggacccatcctctgcatcaataactgtggcttcttcggcagcgcggcgaccatgaacatgtgctccaagtgccacaaggagatgataacgaagcatgatcaggccaagctggctgcctcctctatcgacagcatcgtgaacggcagcgacgccgtcatggagccggttgttgctgcagcaacacg

SEQ ID NO: 5612 - DNA, 244 bp, Zea mays
  Clone ID: LIB3137-041-Q1-K1-H3
ttcattcgcttatcatcacatacctgcagaggagcgcaaggaggatcccgtacccgagctggccccgtaccgcgtcaaagacctgctccgggtcgacacgtccgacctggaggagttcgccgaactgctggcccgcaccgtcaccgcggcgcggcgcgcctcggtgctcatcttcaacaccttcccgctgatcgagacagacacgctggccgagatccacaaggccttgtcggtgccggtgttc

SEQ ID NO: 5613 - DNA, 321 bp, Zea mays
  Clone ID: LIB3137-041-Q1-K1-H4
ggtcgaccccgcgtcggcgcgccatcaaggcgtcggtcgacatcgccatggcggcttctgcccgcggcggtggggcgcggtggccacaggccgtcttggctccaagttcgtcgtcgtcgtcgtcgtcgccgtctgctagaacgccgtcgccgtcgtcgccggggaagaagaagaagaacacgcgcggcgtgtgcaagaagaaggtcgtgaggcggtcgtgtctccaccacacgaggacgcggagacggagggatggcagcattgctggtaccacgtcctcgtcgcttgcaaggacgacggcagcggcggcgacgacgctcg

SEQ ID NO: 5614 - DNA, 325 bp, Zea mays
  Clone ID: LIB3137-041-Q1-K1-H5
gtctgtctgtccatccatccatcccggcatcccgctgccagtcctcgcgccggccaccccgaagtggtcggaaattgcaacccggtccacgggtcggatcccccaaaccgaaccctcccgagctcgcccggcgatggggatctcgagcatgccggagccgcgggacagcctgctggggtacctggtgtacaacgcggtggtgtcgatcgcggcgctggcggtgctggtgcgtgcggcgctggtgttcctggacctgcaggccgcgcatctgcccggtggcgcgggcgcgggcgcggacgacgaccgtctcgcggcgtcgggcccc

SEQ ID NO: 5615 - DNA, 447 bp, Zea mays
  Clone ID: LIB3137-041-Q1-K1-H7
gagcaccacaagaaggccgaggagcaccacaagaaggaggagggggagcaccacaagagggacggcggtgagcataaggaaggcatcgtggagaagatcaaggacaagatcaccggcgagcacggcgacaagtccggcgaccacaaggaaaagaaggacaagaaaaagaagaaggagaagaagaagcacggcgagggccacgaccacgaccacgacggcggccacagtagcagcagcagcgacagcgactgagatctggtgtcgcagcacaggtgcaacacaagtatgcttgctggatggaggattcataccagctgatgctgatgtagtgtttcactggtgtcatgcatgcatgtatcgtgctattataatcaaaaagaaaaaagaaataaccagtcaggatggtttgtttgccatgtgatcttgtacactcctacttaaattatg

SEQ ID NO: 5616 - DNA, 347 bp, Zea mays
  Clone ID: LIB3137-041-Q1-K1-H8
cgacccacgcgttccgttcctgctttttctcattttctcttaccttttcttcttctctacccctatcctatcctcgggcagggatctcatagagtgccataccatcccatttaagaaacccatgaaccacaataatgctgcgtaccagtcccccgaagcacccatcctctgcatcaataactgtggcttattctgcacagcttcgaccatgaacatatgctccaagtgccacaaagagatgataactaatcaggatcaggccaagctggctgcctcctctatcgacagcatcctaaacggcatctacgccttcatgtatccgttttttgctagcaacaacaccttat

SEQ ID NO: 5617 - DNA, 428 bp, Zea mays
  unsure (1)..(428): unsure at all n locations; Clone ID: LIB3137-042-Q1-K1-B11
gccagtggttcgtggtgactaccccttcttcatgagatcattggctagggaacgactacgcttcttcaaggacgagcagaaggagaagctcgccggttcctataacatgttggggttaaactactacacctcacggttctccaaaaacatcgacatctcaccaaactactcacctgtgctcaacactgacgacgcctacgccagtcaagaagttaacgggcctgacgggaagcccattggtcctcctatgggaaatccatggatctacatgtaccctgagggcttgaaggatctccttatgatcatgaagaacaaatacggaaacccacctatctacatcaccgagaacggaatcggngatgttgataccaaagagacacctctacccatggaagctgccttaaatgactacaaaaggctagattaca

SEQ ID NO: 5618 - DNA, 466 bp, Zea mays
  Clone ID: LIB3137-042-Q1-K1-C9
ggaaaaaccggaccgacgcgacgcgtacgcgcgaccttatctctaaccggaatcaatttttagccgataacgatggcttgcgacgcgctcgcaaaggccgtcgagcccaggaagaagggcaacgtcaagtatgcctccatatgtgccatcctggcctccatggcctctgtcatccttggctatgacattggggtgatgagtggagcggccatgtacatcaagaaggacctgaatatcacggacgtgcagctggagatcctgatcggcatcctcagtctctactcgctgttcggatccttcgctggcgcgcggacgtccgacaggatcgggcgccgcttgaccgtcgtgttcgccgctgtcatcttcttcgtgggctcgttgctcatgggtttcgccgtcaactacggcatgctcatggcgggccgcttcatggccggagtccgtgtgggctacagtggcatgatcg

SEQ ID NO: 5619 - DNA, 190 bp, Zea mays
  Clone ID: LIB3137-042-Q1-K1-D9
ctacctactcatcttcgctgatttctgccttaattccatcccttccctgcctagaacttgcttcgcttcaccccatcacaacttttgatgcctcatcatcttcgacctaaccgccggcgaccagataaactaagccatgcccttcactcctaaagacgtttatcgtaaaaagcacttgctcacctgctcc

SEQ ID NO: 5620 - DNA, 287 bp, Zea mays
  unsure (1)..(287): unsure at all n locations; Clone ID: LIB3137-042-Q1-K1-E10
aaaaaccaaccgacgcacgcgaacgatctganactcccactctccccctaccgttttccctacccatcacacacaaacagcctctgctcaccttccacatcctccgggtcatgtcctgctgctccccatgtcgcccccactcgacctctactacatatgcctctcgccggcggccgcttccgtctctgcccaccacgacctgaattgtacccagctccgccttggtctgccggggaccgcttcgccttaccgccgcgttgtgactgccaccgcaaccaccctggacc

SEQ ID NO: 5621 - DNA, 325 bp, Zea mays
  Clone ID: LIB3137-042-Q1-K1-E9
ggaaaaaccgacccgacgcacgcgtacggtcggatactgtctgtttcctctctccttttactcactggatctacaaatccaggctatcgcccatcttcagaattcccatccccccaccaaggactctcccctatcccaaggactcatgcctttcgccctctgacgtgacaactcattccatcccgctattaaagcctgttccaaggttgtcaattccgatgtaacgcggcatgaatttctaaaccaacatcgtcccttagttcctaaacgagtctctggtagacaggacttcgtctcatacactgtcagcctaaccggtcacaaa

SEQ ID NO: 5622 - DNA, 450 bp, Zea mays
  unsure (1)..(450): unsure at all n locations; Clone ID: LIB3137-042-Q1-K1-F10
ggaaaaacagaccgacggacgcgtacgtgttgaaatntaaaaactggatattatgatttagcttgcctcacatcgaaatgtacatcggcggcttttgaaattcaaggcgtacgccacaaaggttgatgttcattttgtgcggaaagctgttcgagcgattgggagatgtgcaattaaattggagagagctgctgaaaggtgcatcagcgttttactcgagctgattaagataaaagttaattatgttgttcatgaagctataattgttatcaaagacatcttcagacgctaccctaacacgtatgattctatcatagctacactttgtgaaagtatggacactttacatgaaccataagctaaggcatccatgattaagataattggagaatatgctgaaagaatttacaatgcacatgaacttcttgagagcttcttgtaaacatttcc

SEQ ID NO: 5623 - DNA, 290 bp, Zea mays
  Clone ID: LIB3137-042-Q1-K1-F9
tggaaaaaccgaaccgacccacgcgtacggtctgctaccaacaccacaacctaacaccttaccgcgtatagggttttctgcttcaattgccgtcgttgaggcagacggggagcgcatgatcaacgtggccatcgactactcggatagcgccaaaaacgcgctggactgggccatctacaacctgctccaccacgggaacaccttcggcgtcgtccacgtcttgaacaacggcccgaagaaaaccaacaccaccctttgggccaagtccgaaacccgcttattccactttt

SEQ ID NO: 5624 - DNA, 182 bp, Zea mays
  Clone ID: LIB3137-042-Q1-K1-G11
cacatacatacacacacctagctttatatcatgcccctattctctcgggtcttgccacatttctatgcgtctctgcggcaccgaagggataaaaatctcggcgtgaactcctggccagtcttttgctgctttcatatccgcgcgcgtgtcgctgcgaagtaacaaaatggtgggtggtggcc

SEQ ID NO: 5625 - DNA, 310 bp, Zea mays
  unsure (1)..(310): unsure at all n locations; Clone ID: LIB3137-042-Q1-K1-H10
tggaaaaaccaaccgacgcgcacgcgaacgaaacgactaccctaattttaggacaagcngttgtatcaagataaccacatcctataacatgttggggttaaactactacacgtcacccatatccaaaaacattgacatctcaccaaactactcacctgtgctcaacactgacgacgcctacaccagtcaagaagttaacggtcctgactgaaagcccattcttcctcctatgggaaatccatacatctacatgtaccctgagggcttgaaggatctccttatgatcatgaagaacaaatacggaaaccca

SEQ ID NO: 5626 - DNA, 261 bp, Zea mays
  Clone ID: LIB3137-042-Q1-K1-H12
ccgtggtcaatccaccatatatcacggtttgacctactaaaacgacagtatccgtgttgagttcttccggggcggggatcacgccacaaaccatgaattacatttccaaataccatggacgagagatcactcaaattgactgagcactggatgcgatgaggctgatacaagcataatacatgaacctgcaagccgagaattcacaatggtaactcaagacgaagctcggtaacatacatagcactatggtggtctgttaca

SEQ ID NO: 5627 - DNA, 435 bp, Zea mays
  Clone ID: LIB3137-043-Q1-K1-A10
ccacgaggcaaataaacccagacgtagttcagctagccgcttctacctccctctcccggccgcgcctgcgcgctgccgcgagagctcgttcctgatggggaactgcgccggcgtggaggggaacgccgagatcaacccttccttcagtgcccccaattcctcagggaccgccggttctaagagcgtcagcaagaacgcggccgacaccggcaccttcggcaccaagacgtccggctcgtcgtcgtcggtgccgccaacccctcgtacggaggcggagatcctggagtcgtcgaatgtccgcaagttcagcttcggcgagctcaaaagctccacgaagaacttcaagccggacagcctgctcggggaggggggcttcgggtccgtgttcaaggggtggatggatgagcgcacgctcgcgcccgtgaggccgggcgc

SEQ ID NO: 5628 - DNA, 439 bp, Zea mays
  Clone ID: LIB3137-039-Q1-K1-H10
gggataaacaaattgtgcgagtacttgggaaggcaccattaatagcagctgctgcctacttgagattgggaggaagacctcccgtccttgctttaaatactctatcttattcagagaacttcttgtacatgctggactctttgggtgacagaacatataaaccaaatcctcgacttgctcgagctctagatattctttttattctgcatgctgaacatgaaatgaactgctccactgctgctgttaggcaccttgcttcaagtggtgtggatgtatttactgctctttctggtcgcgttggagctctatatggtcctctgcatggcggcgcaaacgaggcagtacttaaaatgttaaatgagattggaagcatggaaaatattgcagatttcattgtaggagtgaagaacaggaagaggaagatgtcccgttttgggca

SEQ ID NO: 5629 - DNA, 409 bp, Zea mays
  Clone ID: LIB3137-036-Q1-K1-H4
acgcaacaagtacgcagtcagcgcagcctttagccgtcgccatggcgagcaagcacgtcgtcctcgccgcatgcctcctcctcctcctgcccaccgcctcggtcgccaccgacgtcgactactgcagtaagaaggactacccggtgaaggtgagcggggtgcagatcctgcccgatccggtcgaacccggcaagcccgccactttcaagatctccgcttctactgataaaaccatcgagaaggggaagctggtcatcgacgtaaagtatttcttcttctacgtgcactcggagacccgcgacatctgcggagagacttcctgcccagcgaccggcgacttcgtgctgtcccaccagcagacgctgccaggcttcactccgccgggctcctacacgatctacatgaagat

SEQ ID NO: 5630 - DNA, 366 bp, Zea mays
  Clone ID: LIB3137-036-Q1-K1-H7
caaatgctaaaaataaatttatagagcctcatttttgagggcggggtcatattatgcccttgcttgaaattgtccggacggagaagacatcaccacaagctatccttgatctcatcactgttgggaagataataaagaaggtccctgttgtggtcggcaactgcacaggatttgcagtcaaccgtacattttttccttacacacaggcttctcatcttctagttagtcttggtattgatgttttcagaattgatcgagtaataagcagctttggcatgccaatgggaccttttcaactccaagatgtggctgggtatggagtggctttggcaagtaaagatatctacgctgatgccttttgagaaa

SEQ ID NO: 5631 - DNA, 383 bp, Zea mays
  Clone ID: LIB3137-036-Q1-K1-H8
ccttccggccttacccactctttttttttctctctccagtctccaccggcagcgctaatcgtaatggcgatgggctccaccgccggcgacgtgcccgcggtggtggacgaggaggcgtgcatgtacgcgatgcagctggcgtcgtcgtccatcctgcccatgacgctgaagaacgccatcgagctgggcctgctggaggtgctgcagaaggaggccggcggcggcaaggcggcgctggcgcccgaggaggtggtggcgcggatgcccgcggcgcccggcgaccccgccgccgcggcggccatggtggaccgcatgctccgcctgctcgccttctacgacgtcgtccggtgccagatggaggaccgggacggccggtacgagcg

SEQ ID NO: 5632 - DNA, 380 bp, Zea mays
  Clone ID: LIB3137-036-Q1-K1-H9
aaggtaggggcgttttaagggttttgttaagtcaattcctggaatttccgagggtgggaagtggaaggaagttgaactagagttagtggaaccctttgtgctgtagagactgcattagttatagactgttgactgtgttgaggagcgagtttgattctttcatatgtaatgaactgattacttaagtggatgttgggtaggaacaatgtggaggatatgagcgtcgttgagatgtttcttcaagaggtaggattggatgaaggccaaaaggatgaaatagtggcaattattaaggggatgggtgagctattcacttattcagttatccatgtttatgcatcttcatttctgttcgaagacatacctcattgggggcacac

SEQ ID NO: 5633 - DNA, 323 bp, Zea mays
  Clone ID: LIB3137-038-Q1-K1-A1
cgtccgcgcaaaaatctgggatctatctagaagcaccatgcaacaaaccctaggttgcctgatcggctgatcgcttcatggcgatcatcggcgacttcaaggacgacgaggcaccggagcagcagctggcggccggccacggcgtcgaggaggccctcgtggcggcgttggagaggagcggcggcgcgctccccttcctacaggcggctatcgatgtcgcccaccgcaagttcggcctgttccgcgacccttccgcggggagcaaggtcaccgcgatggcggcggccgtcagggcgcagatcgaaacctatgagagggtgacc

SEQ ID NO: 5634 - DNA, 211 bp, Zea mays
  unsure (1)..(211): unsure at all n locations; Clone ID: LIB3137-038-Q1-K1-A10
gcggcaacatcctgagctacaacctggggggtatgtgctgcagcgcgggcgtcatcgccatggacctggcccgcgacatgctccaggccagcggcgcgggcctggccgtggtggtcagcacggaggccgnctccttcacgtggtaccccgggaagcggcgctccatgctcatcccgaacgccttcttccgggccggcttgcgcggcggtgc

SEQ ID NO: 5635 - DNA, 383 bp, Zea mays
  unsure (1)..(383): unsure at all n locations; Clone ID: LIB3137-038-Q1-K1-A11
ctcagctgctctctacaagaaataacacagttgactcaaataatttaggttctgttcatctacaaggaaacagtgagctaaagaagcctcgtttagcaaaagtgccgggaagtatgatgctatctaatgctgaaagatccgcangtgggattcttggttccggtgctcatcgagaagtgattcaaaattcagacccttcacataaggatgctaaaataaaagaccaaactggcttcaaacaaggtgcttctaacaacaatcggacaatccggtggcaaagatgtaatgaatatggccattctacacatttttgcgaaattgaaaaacttcgtttggcttcaagaaaacctttgaatgaacgaaacttgaaagatgcatttggc

SEQ ID NO: 5636 - DNA, 320 bp, Zea mays
  Clone ID: LIB3137-038-Q1-K1-A2
ccccagctttccggcgacgagaggtaggcataaatcttttgccaaatcaacaccagcaacagcgaagcgactacagagagtaggagatgcttactctccacaccattcagtcatgcccctcgctgcgcagatcctctctgttccggcgtgctctgctaggcaggaagagatctttcatttgtgccagcagttccgaggatgccgaatccggcactcccccgccgcttggtggcgacaaacaccagcatgaagttgttgcacagatcgccatgcttcatacgcagaatgtgcgcatcacagatttcttggacgagcgctct

SEQ ID NO: 5637 - DNA, 372 bp, Zea mays
  Clone ID: LIB3137-038-Q1-K1-A3
cagctttccggcgacgagaggtaggcataaatcttttgccaaatcaacaccagcaacagcggagcgactacagagagtaggagatgcttactctccacaccattcagtcatgcccctcgctgcgcagatcctctctgttccggcgtgctctgctaggcaggaagagatctttcatttgtgccagcagttccgaggatgccgaatccggcactcccccgccgcttggtggcgacaaacaccagcaggaggttcttgcacagatcgccatgcttcagacgcagaaggtgcgcatcacagatttcttggacgagcgctctgcttacctgaccaagttcgccaaggacgccgactcggagttcgacctgattgggc

SEQ ID NO: 5638 - DNA, 266 bp, Zea mays
  Clone ID: LIB3137-038-Q1-K1-A4
attcaagctccactcctccacacctagactttctaatcctccattgggcaacctgtcacgagagtacgccgtcgcctgtggtttggtttgtggagtgagagagaaagagagagagagacatagactcggactcggagagaaggagatgatgtggagggagcgcaagaaggcggctgctcttcatgagaagctgaatatcctgcgctgcatcactcactcccacgctctgactaacacgtggataatcatggacgcgtcggcgtaca

SEQ ID NO: 5639 - DNA, 135 bp, Zea mays
  Clone ID: LIB3137-038-Q1-K1-A5
aaaaaagcgccgacccacgcgtctcaaaacacatatacaacaaatacacagtcatgctatatcaaactccgcaaccaacctgcccgccgttcttgatctactctagccctcctccccgcaccacctccaaccttc

SEQ ID NO: 5640 - DNA, 363 bp, Zea mays
  Clone ID: LIB3137-038-Q1-K1-A6
gacccaaactgttgcaggagtgtgtttgcgctgttctggagcgcttctgaccatttgacctacatgggagttgagatagcggccgacgactggagcacctgcaggatcgtccttgggcgaggcgtcgagcagctcaaagggagtcttcccaacaacattgttacgtccggacgctccgtcgacgttgtcatcgcagatgatgatacacttcagattgattgacgcagttcaaggtagtcgttggtagtcatgcatatagctagaaaataagcttgtggctgttggtgcatgcttcaaaacaaatcaaaaggctttcttcctttttttgcttccgggctctttcaaccatatgtactatgccac

SEQ ID NO: 5641 - DNA, 276 bp, Zea mays
  Clone ID: LIB3137-038-Q1-K1-A7
cgcaaaaatctgggatctatctagaagcaccactcaacaaaccctaggttgcctgatcggctgatcgctccatggcgatcatctccgacttcaaggacgacgaggcaccggagcagcagctggcggccggccacggcgtcgaggaggccctcgtggcggcgttggagaggagcggcggcgcgctccccttcctacaggcggctatcgatgtcgcccaccgcaagtccggcctgttccgcgacccttcggcggtgagcaaggtcaccgcgatggcgg

SEQ ID NO: 5642 - DNA, 426 bp, Zea mays
  Clone ID: LIB3137-038-Q1-K1-A8
aaccctccaaggcggtaggccggagcagagcgcgctccaagctgaatcccccccatctcctatcgccgtcgaaagtcgcagccgatgacatacgcgacgctaggagtagcgtcgattgaagaaaagtttattcaacaccggttgggatggtttgggcatgtccaacggagatcctgaggcaccggtgcatagagacatcataagacaggacactaatgtgaagagagaggtagaagttgaccaaacttgacatgagatgagacaatcaaaagggacttgaaagaatggaatatctcaatggaattgtatttggatagaaatgcttggaaaaaaactatccacgaacccgaaccatgatttaaggcttttttcttttaatggttttaaaatcttttcttcctccctttttctttttttcttcctttg

SEQ ID NO: 5643 - DNA, 415 bp, Zea mays
  unsure (1)..(415): unsure at all n locations; Clone ID: LIB3137-038-Q1-K1-A9
caagctgaatcccccccatctcctcgtngggtcttaagtcacaaccgatgacctacccgacgctaggagtagcgtctgattgaagaaaagtttattcaacaccggttgggatggtttgggcatgtccaacggagatcctgatgcaccggtgcatagagacatcataagacaggacactaatgtgaagagagaggtagaagttgaccaaacttgacatgagatgagacaatcaaaagggacttgaaagaatggaatatttcaatggaattatatttggatagaagtgctcggaaaaaagctatccacgagcccgaaccatgatttaggccctttttcttttaatgctctcaaatgcttttatacctccctttatctctttttctactattggggaccattttgtttggtttcaact

SEQ ID NO: 5644 - DNA, 237 bp, Zea mays
  Clone ID: LIB3137-038-Q1-K1-B1
cattaacacacggcacacgcacggaacttattttcatatagagagaggacagctattgggggcgagcatctattcaactaactaactaacttcataccattctcacatctcttagccaaccctacagctctagaaagcaaatcaaaggataacactacgcattgtctatgcttaccagatcagttcaacagactaacacatgcgtaaccacctatacgccggctctgaccttgcaac

SEQ ID NO: 5645 - DNA, 398 bp, Zea mays
  Clone ID: LIB3137-038-Q1-K1-B10
gtacaaccaagtgcagtttctacaagatcatttgctcttccaccaagtgaccctgtcacagtgaacatagaagagaagctcaatgttgttgttaaaagagatggtggtattagtaactttgatgttcaaggaacacttgctcttcaggttcttaatgatactgatgggttcatccatttgcagattgaaagccaaaatatgcctgggcttaacttcaaaacacacccaaatatcaataaggatttggttaacaatcaacaaattttgggagccaaagatccaaaccagccctttccgagtggtcaaaatgaaacttcttttgtgaaatggaaaattcaagggatggattaatcggctttacctttggcaatcaattggttgccgcgaatattttgaaa

SEQ ID NO: 5646 - DNA, 400 bp, Zea mays
  Clone ID: LIB3137-038-Q1-K1-B11
agatctccaatggccgccgcacccgtcgctccgccgctagcctccacggacgacgagatcgtctacgagtccatgccctgcattcgcgtctacaagaaacgcgtggagcgctacttcggtaccgagttcgtcgccgcctccacggacgccgccaccggcgtcgcctccagggacgtcgtcatctcccccaacgtctccgcgcgcctctacctcccccgcctcgacgacgagagcgccaagctccccatcttcgtctactaccacgggggcgggttcttgctcgggtcccgtttcaaccccaccttccactcctacttcaacaggttcgcgggccttggcaaccgtctcgtcggctccggcgagtaccggctggcccccgagcaacccggtcccggcggct

SEQ ID NO: 5647 - DNA, 232 bp, Zea mays
  unsure (1)..(232): unsure at all n locations; Clone ID: LIB3137-038-Q1-K1-B2
aaggaangggccgaccgacccatgcgtgcggatacgcgacattaccgtgttcaccatttaggaggcgaaaccatggacaaacagtattgggtgaatctttgcgtggacaagaagacttgcccacaagacatagattgatgacaaagctagactacttgacttcacccacaaactagaagctccctgccttggaaccccctagtctgaaatgataaccaacgaccctgcgctt

SEQ ID NO: 5648 - DNA, 365 bp, Zea mays
  unsure (1)..(365): unsure at all n locations; Clone ID: LIB3137-038-Q1-K1-B3
ggccggaanaacccgggtccgacccacgccgtccggttactccgtcattacccgtgttcaccagatttggaggtcgaaactcagtacgaacatgtattgcgctggaatcttttgcgtggaccaagagtgacttgctccactagggcaatagcatttatgaccaatgctgagactacattcgacttcaccacagaagccttgagggctgtcctgcgtgtggaaccggtcgcagttctgggaaggatgaccaacggacccttgccacttcgtcggtcacgggatcttcaacatatcacgaaggaggccattaccctgaacacgggaggagttcatttgacgcatgttggctgatgaagctcaagatc

SEQ ID NO: 5649 - DNA, 412 bp, Zea mays
  Clone ID: LIB3137-038-Q1-K1-B4
gcggggctgactgaagaaaaattgcaagagcagattgagcagagaaacgttgcatggaagaataaacagtttgagatatctgatggaattaggaaaaaccttgctaccaagggcatcgccctgatggatgaaccttctggtacagtgtggagaccatgcgaaccagagggatatgaagagtcatgattatacgccgcacccactcaacaaatgatgtattcttcactcatgggcaaggggatctgaagctgacccttttcaactgcatctactgcatggattatacatgggcgtcgtcgcaacgagcaacccgacccggcggtcttgaacaccgaagctactgacttggacataaggcaaaatcctggtccaaatgcctacaccttaacaatcaacggcaaaaaaccattca

SEQ ID NO: 5650 - DNA, 223 bp, Zea mays
  unsure (1)..(223): unsure at all n locations; Clone ID: LIB3137-038-Q1-K1-B5
gcgcacgaacccatcgtttgaccgaccaactgcccaacaaacgatggccggcgtgtcagcaagcatcccgtgcgtggtgctcaacacgggccacgcgatgcccgtgctgggcttcgggaccggctcctccagcacgccggaggatctgccggcgaccatcctccacgccgtccgccttggctaccgccacatcgacacggcctncatgtacggcacggaaggg

SEQ ID NO: 5651 - DNA, 320 bp, Zea mays
  unsure (1)..(320): unsure at all n locations; Clone ID: LIB3137-038-Q1-K1-B6
aagtcgcattccagatctcccctgcctccgctgtataaatagaccctcaagctccctgcaacatccatcaaggcccaagctcagcgaccaccaagcagagcaagccagtgaggtctctcagagcgtagccagccagctacaatggcggngaacgcgctagccaactatgtccaggtctacgtcatgctcccgctggatgtcatcactgtcgacaacacgttcgagaaggaagacgagacgagggcgcaactgaagaagctgacggaagcgggcgccgacggggtcatgatcgacgtctggtgggggctggtggaaaggaa

SEQ ID NO: 5652 - DNA, 410 bp, Zea mays
  Clone ID: LIB3137-038-Q1-K1-B7
ggcacatttgcaaacagctgtttgccttacactgggctgtatttgcttgggaactctctctgtgggtggaactgccttgccccatggttctctcatcccactcgtactgctattcgacaacgctacaatcttgagggtagctttgaggctttcaccaggcaatgtgggtgctgcggcgatctggtcgaggacgaagagaggcgtgagcacctaaaagccgcctgtgaccttgcgacccactaccttttgcaacccttcgcccttttgcaagaaggtcgcgagcttcgccccaaggtttcccaaccttgattcaacaatgggcacttcgtctttggcatgatgccggccattgaacaaaccatggggcgtggcatgtgagctattccaccaccttccctgccctaatttta

SEQ ID NO: 5653 - DNA, 447 bp, Zea mays
  Clone ID: LIB3137-038-Q1-K1-B8
cgcctgcgcgcccctgcgccccccgcggcgacgggcggccggcgcctcctcagcgacgggaaggggcgtgtgctcagcgaggaggagcgcgccaaggagagcatctacatccagaagatggagagggagcggcaggagaagctgaagaagaggctcgagcaggagaaggccgactccgacaaggccaagcccgccgacgccgacaagaaagccgagggatctacctagctaggattggcatggcgctggtggaaggcaatcacgtttcgcatggatccgaatccgatggtcaactttgtgaatgaataaattctggaaaacgtcaacagcactggatatgctggtgcttcaaaaaaaaaaaaaaaaaaaaaaaaaaaaaaaaaaaaaaaaaaaaaaaaaaaaaaaaaaaaaaaaaaaaaaaaaaaaagggcggccggtttaaaggat

SEQ ID NO: 5654 - DNA, 382 bp, Zea mays
  Clone ID: LIB3137-038-Q1-K1-C1
gaaggatacgaaaggaaccatggatttcttcgtcggcggcggcggcggtggagcgcaggtgaagggtatggcgacgcacgggggccgctacatgctgtacaacgtgtacggaaacctcttcgaggtctcctccaagtacgccccacccatccgccccatcggtcgcggcgcctacggcattgtctgcgcggctgtcaactcgcagtcattggaggatgtagcgatcaataacgggggaaattcgttttaaatccatttgccctccaaacgggcccgtaaaacttttagcggtttaagggagtaaaaggtgttgaaaaccatcttgccttaaaagatgtaatttggcccccaactagaaagaactttaatgacgtgtacaatt

SEQ ID NO: 5655 - DNA, 340 bp, Zea mays
  Clone ID: LIB3137-038-Q1-K1-C10
gacgaagaactgagtcactttattcccattatttaatcttgttcccggtacagctagcaagacacaagttttacagatatggaggatgatcaggaagcaatccttggaacaaggagaagcttctccttccggcgaagcgtcagcccaaaagactcctccatggacacccctgctccagaacccggaacctcccaatcgaaatggtacatgaaattggccagcatgatctccatggtcgcgaaaccgaaagtcatcccggggcaaatccttcggccggaaccgaacgggatgaacctgaaggccttgcccttcatgtggacctccacggcgcccggtttct

SEQ ID NO: 5656 - DNA, 453 bp, Zea mays
  Clone ID: LIB3137-038-Q1-K1-C2
ggcgaactccctgtctgcctgaccagctaggaacagctgattcagcaatggtgatggaatacacggccgcgcttatgaactcaagcgccggcaacatccccagactgatgacgcacgcgtccaggtccgaccgcctggcgccgatctgcgccaacaccaccacctctggccgcgtcaccatatccgcggagtggatgcccggccagccacgccctgcccacctggacggctactctcccggggacttcggcttctatacgctgtgcctcgcgaccgtgccggagaacttcgaacggttcaaggaatcagaggtgtaccactgccgctgggccatgctagccgtccccggcatcctggttccggaagctcatggcctgggctactggttgaaggcgcaggagtgggcggccgttctcagcgggcaggccacgtaccttggcgcccccgtgccgt

SEQ ID NO: 5657 - DNA, 270 bp, Zea mays
  unsure (1)..(270): unsure at all n locations; Clone ID: LIB3137-038-Q1-K1-C4
acgaccgacgcgtgcgaaaattttggtttttttttttgacaaaaaacngtgntactttattcccattatttaatcttctgcccggtacagctagcaagacacaagttttacagatatggaggatgatcaggaagcaatccttgtaacaaggagaagcttctccttccggcgaagcgtcagcccaaaggactccttcatggacacccctgctccaaagcccggaaccttccaatcgaaatggtacatgagaatggccagcatgatctccat

SEQ ID NO: 5658 - DNA, 209 bp, Zea mays
  Clone ID: LIB3137-038-Q1-K1-C5
gcgaatcacagacgcgtctatctcagcttgcttcactgcactaccctgccctgccatggtggcggacgtgagcccggccgagcgagagcgagggagaggcatggctgctccgaagctcgcgacgctggcgctggccgtgctcctggcggcgaccgtggtggcttccccggccgcggtgcgcgcggcgatgtcgtgctccaaccggtaca

SEQ ID NO: 5659 - DNA, 351 bp, Zea mays
  unsure (1)..(351): unsure at all n locations; Clone ID: LIB3137-038-Q1-K1-C7
ccctccttttttgcctgaccagctaggatcagcggaagcagcaatggtgatggcgtcgtcgagcgggctgaggagctgcagcgccgtgggcgtgcccagcctgctggcgccgtcgtcccggtccggccgcctggcgccgttctgcgccaacgccaccacctctggccgcgtcaccatgtccgcggagtggatgcccggccagccacgcccttgccacctngacggcttctctcccggggacttcggcttcgatccgctgggccttgcgaccgtgccggaaaacttcgagccggtcaaggagtcaaaagtgtaccactggcgctgggccatgctttgccgccccgggatcct

SEQ ID NO: 5660 - DNA, 304 bp, Zea mays
  Clone ID: LIB3137-038-Q1-K1-C8
gctcccactcgcaccgcccgtccgcccagaactatctcgctcgtccgcgttcagctcagctactgcaatttcgcaacaagttgcaagcaataaccgaccaaggacgacgaacgggtcgatggccacgctctcctcctgcagccgcctgagtagcggcaccggcgccgcggccatacaccggcagccggcccgtgctggaagccgcctcgtcgtcacctgcaaggggggcttcttcgggaccggtcgggccgcaaccgcttgcaaagggggggggcccgcttgcgtaaaacttcaaaacaaaggg

SEQ ID NO: 5661 - DNA, 348 bp, Zea mays
  Clone ID: LIB3137-038-Q1-K1-C9
tgaagaagccagtcaatagcgagttctactactagtagctagcctgctgatctgttctgttgttgagttcgcaaagccttctgtttcggcgaccatggaggatgagaggaacacccagcagcaccagggcggtgaggcccagcaggacgccgccgatcaggtggacgtgaaggatagggggctcctggacagccttctcggcaggaagaagcacgacgacgaccaggagaagaagaagcagacggatgagctggcgaccggcatggagaaggtcacggtgtccgagcccgagaagcacgggcacaaggaggaggagcacgaggtcgtcggcgagaaaaaagaaggcct

SEQ ID NO: 5662 - DNA, 326 bp, Zea mays
  Clone ID: LIB3137-038-Q1-K1-D1
gaaaagccgggacgaccgcacgcgtccggacaaacccaatcagaccgaatgggcacctcatcaccggactccggcgaccttatcgactgttggccggcgaggccgggatctccggtagccgtggtgaccatcaaccggccttcggcgctcaacgcgctgacgaagcccatgatgatctccatggcggctgcgttccggcggctgggtgccgacgacgccgtggcagcggtggtgctcgcgggccgcggacgcgcgttctgctccggggtggacctgacggcggcggctgaagtgttcaagggcgatgtgaacgacgttgccacgga

SEQ ID NO: 5663 - DNA, 385 bp, Zea mays
  Clone ID: LIB3137-038-Q1-K1-D10
gagaaactcactttcccaaggaagtcaccgtatccgcattcgataaacctgccgtgtcccgttcaccccgcgttcgcttcatccgggcgtgggctaccgccgcagccgccgccctacgtccggtgaccaggctttcattgagctttgccgacgacgaccacgcaccagatggctgggtatatgtcaagagggccccaaaatggttctgtgtatgtctgcaatctacctcctggaactgacgagaatatgttggctgaatattttggcaccataaggttgctaaagaaggacaaaaggaatgggcgcccaaaaatttggatctatagggacaaagtttccaatgaaccaaagggtgatgctacagtcacttatgaagatccacatg

SEQ ID NO: 5664 - DNA, 425 bp, Zea mays
  Clone ID: LIB3137-038-Q1-K1-D12
ggcctgaatcccgggcgaccacgcgtccgcggacgcgtggggtctaatgctacaaaagttttctttgaagataagtttttccctggaaaatcgaggaaaattggatatgcccctttcttgtttgcttatcttgtcatctgcctcatcctgttcctaaactcaattgtatttgcacctaatttttctaggatcactgctactgctggtctttggtcttgggctgctgtatcacttttctttgcatcacaagtaatgttctacagagttagcagaaaaaatcctggctacatcaaggcaaattccaagcgaactgacccaaaggagccacttatggaaattgatcttaccaattcctctacttggacaggcaattggtctcaactatgccctacttgcaagataattcgacctatgcgctccaaaca

SEQ ID NO: 5665 - DNA, 459 bp, Zea mays
  unsure (1)..(459): unsure at all n locations; Clone ID: LIB3137-038-Q1-K1-D2
cgcggacggatttcttctcccaaccaccttgcaaacaagcgttgttagctctcgnggcgcaaccacaacttgtctgctttcgccgcccctacgccacctcctcnaatctagcctcgtcgattgcttccccagtttaatagatctacaaccttcacaacatattcacgaatacatctcaccctcagttcctgaccattctttatagccttctgaccaaaccattgcagatatgttataaagaagttgtgaatggttaaaggacaactacttttttaagaaggctgaaaaattttattcttcttttaggaaaacccattttcaaattatttatctttcaaacaccccaaataacttttaattaaaaaaagattgaactttccatatattaacttttattcgggaaaaaaaaaaaaatttttcttttaaaaatgtgttccaaactctttttttttttttatt

SEQ ID NO: 5666 - DNA, 412 bp, Zea mays
  Clone ID: LIB3137-038-Q1-K1-D3
gacgacgcgtccggattgctttcccgaccaccttgcgtgcttgctcctgagctctcgaggcgcaaccacaacttgccgactttcgacgcccctacgccacttgctcaaatctagcctcgtcgattgcttccccagtttaattgatctacaagcttcagaacatgttcaagaatacattcaagcctgggtccctgtccattcttaatagcctcggacccaacccattgcaaatttggataaaggaagttgtgaatggccccattaaacacccccaaaataaaattttccaacttattgtccttaaaatgtttgaaccaattttccagtcaatttacttaacatccccacttattcctctgcttcactttggaataaaccttccattcttgccttttatgtgaaaaaattttaa

SEQ ID NO: 5667 - DNA, 374 bp, Zea mays
  Clone ID: LIB3137-038-Q1-K1-D4
cgccactcccacgaacgcgggcggcggatcggaagcgaaccagttatctagtggagtggcgcgtccttcaagctactctaatgtcctttctattcaagtctagcaatggcggcaccactgaaaaaatcccatccccagaagaacagcgagaaaaaataaatgaattacgcaaggagcttggtgaacactcatcagaagccattaaagacttcctttcaaatgcctcgttagtgcgatttcttcgagcaaggaactggaatgtgcaaaaagctagtaaaatgatgaaagcagcttggaaagggcggcttgcattcaaacctgaaaacatctggtgggatgatattgcaaaagaagcagagactggaaagatatat

SEQ ID NO: 5668 - DNA, 354 bp, Zea mays
  Clone ID: LIB3137-038-Q1-K1-D5
gttcgatcctcacaatgcagtgaaatcatttttctctcctctgcttccttctataaatgtggtagaataactccgtcaagaagcaacgagcatagaacaattcaacagaggaagaatcaggcagggagctctcccattcgcatcccatgccaacctcaaccccaatccaatccgttgcaggtcgcaggatggctccgcgtgagcaccaccagccccaggaggaggaggaggaggacaccgcatgcgtcgtcaagctcatcagcgccgagggcttcgaattcgtcgtcgacaagaaggccgccatggtctccaacaccctacgcaacatgctcacattgccaggcggtttcttcg

SEQ ID NO: 5669 - DNA, 374 bp, Zea mays
  Clone ID: LIB3137-038-Q1-K1-D6
gtcaaacaaacttatttttcatggtcacaaggagagtcaactgaacgggatggtcctcaaggagtatctgtatcccagacacttgatcatggttccatttccttcggaagttttgaattagagtcactatcatgggagaagtggtccgtatttactaatgacaggcgcaatgaagaatttggaaaattcaatggtttagtcgctcagaaaaaggcttattttgaagagtattacaagaagatcaaggaactaaaggcttcacagcagcaaaaccagcaaactgaacttattctggaatacaacggtgatggtagtgactccagccaaacagcaaaagaagagcagggtgctgatcttgaaacccccactggatc

SEQ ID NO: 5670 - DNA, 405 bp, Zea mays
  Clone ID: LIB3137-038-Q1-K1-D7
cactattccggtcaacccatccctttccttctcctccgcttccgcgtccgcccgccgctatgccgccagccagtagcctcaccgccgaccaagctaacttctttgaaggccatgggtacctcgtgatggactcggtctcgagcgccgaagaagtgccggagatgccggaccggatggccgaccttgtcgctgggttcgatggcgccaactccgcggtgttctccaccaaggatcatcggcaggtaaaggacgactacttctttaagagtgctgagaatatctcattcttctttgaggaaaaagcatatggagatgatggatgcttgaaacaaccgaaagaactttcaattaataaaggtgggcatgcattacatgaacttgatccggtgtgtaaaaaggtttctt

SEQ ID NO: 5671 - DNA, 213 bp, Zea mays
  Clone ID: LIB3137-038-Q1-K1-D8
gttttcttctcccgtccaccttgcgtgctcgcgcgcgagctctcgtggcgcagccacaactaggcgaccgccgccgcccctacgccacgtgctcgagtctagcctcgtcgattgcttccccagtttaattgatctacaagcttcagaacatgttcaagaatacatttcaatctgggttcctgtccattctttataaccttgggaccaaaccat

SEQ ID NO: 5672 - DNA, 367 bp, Zea mays
  Clone ID: LIB3137-038-Q1-K1-D9
aaaaaagggccgacgacgcgtccggttacccgtcattaccgagttcaccagaaagtagttgaaaccaggacgaacagtatcgcctgagggtttgcgtggacaagaggacttgcccacacggcaaagcttgatgacaatgctagactacttgactgcactcaaaagcttgaggctgcctgcataggagctcgcaagtctgggaagatgaccaaagaccttgcccttctacgtcacggatctttaaatatgacgaggagccattacctggacacgggagaggtcactgaccctggtgcttattaacttaaatccagggtggcaggcgaattgaacctttggaaaccttgcccaaattggggggctttcc

SEQ ID NO: 5673 - DNA, 427 bp, Zea mays
  unsure (1)..(427): unsure at all n locations; Clone ID: LIB3137-038-Q1-K1-E1
gcgtccggggcggcaagcaaccacagtcggacctcgnggtgntctcctcctcccgtctataaattcccctgttttttttactccatatatgggggccatcacatccaagaagagggaagagcaccaaggaccttcagcgcccgttcaggatccacatctacccgagcgagttcttgcttgaccattttctgttcggaccacctacaaggctcttggagtaacttgccactctcaacaaacaaattttcatgtcttatcttcacattcaaaacccaacttccttccaacccttctcttaagccaaatcttgggacccttggtcaacaacctggtcaaaagactaccttcaccttcgcattcatcaaccgaattgttgcaagaaccttaccacaccccactgattgaaaaaagaatttaacttctgcca

SEQ ID NO: 5674 - DNA, 373 bp, Zea mays
  Clone ID: LIB3137-038-Q1-K1-E10
cttccaccaatggcgagagaaccgagtcctgaaatagatgatgaactttacaatgaagttgatgggaaagcatacagcggcccagttgcatcagctacaaatagtgtgactcctaaaggaaatgctgagaagaggcccctgactcgtgataagtcagatgatgaagatgaggccccagatcctaatgctgttcccacggacttcactagccgagaggctaaggtctgggaggctaaagctaatgctacagaaaggaactggaagaagaggaaggaggaagaaatgatttgtaaaatatgtggagacccaagccattttactcaaggttgcccctccacacttggggcaaataagagaaatgcagacttttttg

SEQ ID NO: 5675 - DNA, 448 bp, Zea mays
  Clone ID: LIB3137-038-Q1-K1-E11
cgtccacccgcaacgcacaggaggattccatggccaacaacaccgggacgttggtgggcggcatgcaggacgtgccggggagcgagaacgaccttcacctccaggagctcgcccgcttcgccgtcgatgagcacaacaagaaggccaatgctcttctggggttcgagaagcttgtgaaggccaagacacaagtggttgctggcacgatgtactatctcactattgaagtgaaggatggcgaagtcaagaagctctacgaagctaaagtctgggagaagccatgggagaacctcaaggggctgcaggaattcaagcctgttgaagagggtgctagcgcctaaggatgtcttcttctccatgtgcgagcctgaagctcaaagcaaagttgcagaataaggagccatgcttccttgtgtaatttcataagactaccaccctattaaggctt

SEQ ID NO: 5676 - DNA, 393 bp, Zea mays
  Clone ID: LIB3137-038-Q1-K1-E2
cggccggagacgaagtgaccaacatacctctaaaatttttctagccccgcgccgccgccgccgccgtcgtggtttaggaaggaagcaggggcgccataccgaagtcgaagcgcaaccgcccagtgaccttatcgaagaccaagaagaagccaggtttagagcgcaagggcaaagtagtcgccgagataaaagatgctgtcgacaaatacagcagcgcctatgtttttacctacgataacatgaggaatcaaaagctcaaggacctcaaggagcaacttaagtcttttaacaagatttttcttgctggaaagaaaggtatgcagatagcgctggggcgttcgcctgcttatgaaactaaaacaagccttcacaaacttttcaaggttctttaaa

SEQ ID NO: 5677 - DNA, 465 bp, Zea mays
  Clone ID: LIB3137-038-Q1-K1-E3
gacgacgcgtccggagacgaagtgaccaacatacctctaaaatcttgctagccccgcgccgccgccgccgccgtggtggaataggaaggaagcaggaacgcgatcccgaagtcgaagcgcaaccgcccagtgaccttatcgaagaccaagaagaagccaggtttagagcgcaagggcaaagtagtcgcctaaataaaaaaatccttgtcaaaaaatacagcaaccccttatttttttaacttacattaccattaagaattaaaaacgttaaaggaccttatggaacaactttaagtctttttacaagatttttcttccttgaaaaaaaggtattcaaaatacccttgggccttccccttgttattaaacttaaacaagccttcacaaacttttcaaagttctttaaaggaacttttgtttgttatttaacaaattttcaaaggattatttttaaaagtattttta

SEQ ID NO: 5678 - DNA, 265 bp, Zea mays
  Clone ID: LIB3137-038-Q1-K1-E4
gggtttaatagagggatttagacctctgtctctgcaacaaaggagaagttttattccgggggctttgggttagttacttcatgtggaggacttgaagcttagaatgtttttatatatctcttatggaaaggcttcacccttcccattattgtaataagttatgcacttcgagtactatcaggacttgtaataaatacatctctttctaccatgtaaaacttgagttctggaaatgtaagtgtactttgtaaaagtcttccgctct

SEQ ID NO: 5679 - DNA, 401 bp, Zea mays
  Clone ID: LIB3137-038-Q1-K1-E5
caaaactctagctagctaccaggggggttaatggctccacttctcgccgcagccatgagcgcgggctacccatccagtccttagaagccatctaagacccaacaatgagagtttctcacgacaccacctatcttcttcaccacaaagcagtaagcgaaggtttaaccttagctttacgccacgatctgcaagggtaggcaatgaaaatggagtccaattgttgagcccctcggaaattccttgaacggactggttcccctctgacttcatctttggtgccgccacttcagcgtaccaaattgaaggtgcatggaacgaagatggaaagggggaaagcaattgggatcacttctgccacaattttccggaaaggataatggacgggagcaatgcagacattg

SEQ ID NO: 5680 - DNA, 362 bp, Zea mays
  unsure (1)..(362): unsure at all n locations; Clone ID: LIB3137-038-Q1-K1-E6
cggacgcgtgggtgggaattaaggagggcgcggcggtggcgagcagcttctgctcagcgaggcagctgcaccggcgagctagccgcggcctctatgctcgcggggatctgaactagccgctgctaccccatcgcgctgacgactggggcgccctctcctcatatcccattcccaacacaacactcattttctccattcccacgtaaaagagagaaaggggagcatcgcagtgcacacgcgcaatggaaggctcgccggtggcgcgccttccggaggctaactctctccccgacggcttcgtccacgacgacgagagctcaaacacggacgcggntncttccttcttcgcgcccataagtgac

SEQ ID NO: 5681 - DNA, 169 bp, Zea mays
  Clone ID: LIB3137-038-Q1-K1-E7
gggcggcaagcaaccacgggcggagctcggtgcgtcctcctcctcccgtctataaattcccctctttttcttcctccatatataggggccatcagatccaagaagagggaagagcaccaaggaccttcggcgcccgttcaggatccacatcttcccgagcgagttcttg

SEQ ID NO: 5682 - DNA, 382 bp, Zea mays
  Clone ID: LIB3137-038-Q1-K1-E8
gagacgaagtgacgaacagacctctaaaacctatcagagccccgcgccgccgccgccgccagccgcgaagaggaaggaagcaggaacgcgatgccgaagtcgaagcgcaaccgcccagtgaccttatcgaagaccaagaagaagccaggtttagagcgcaagggcaaagtagtcgccgagataaaaaatgctgtcaccaaatcaagaagcggctattgttttaactaacataaccttgaggattaaaaacttaaaggccttaaggaggcacttaaggttttttaccagattttttttggttgaaaaaaaggtattccaataaggcttgggccgtcggcttgttattgaacttaaacaaggcttcacaaacttttcaaggttc

SEQ ID NO: 5683 - DNA, 385 bp, Zea mays
  Clone ID: LIB3137-038-Q1-K1-E9
acttcctcctcctcgcgagctcagctcgcgctccgccgcagacagcgccgccgccctctcctcggcccccccgaaggaagcttgcgctttgccgccacccactgatgccggccgccgcaggcaccccatggccccgaccgggcggctggtttagagcgcaagggcaaagtattcatcgagataaaagatgctgtggacaaatacagcagcccctatgtttatacctaccataacatgaggaatcagaagctcaaagaccttatggagcatgtcaagtcttctatcaagatttttctagctggaaaaaaagttatgcaaatagctcttgggcgttcttctgctgattaaactaaaacaggcctccacaaacttttcaagtttcttt

SEQ ID NO: 5684 - DNA, 364 bp, Zea mays
  Clone ID: LIB3137-038-Q1-K1-F10
ccgcgcctctacatttcttctctctctgctcctccgcctccgcctgatccatccaagacagggatcgccatgtcggactcggaggagcaccacttcgaatcgaaggccgacgctggggcgtccaagacctacccgcagcaggctggcaccgtccgtaagaacggcttcatcgtcatcaagaaccgtccctgcaaggttgtggaggtttctacctccaagactggtaagcatggccacgccaaatgccactttgtcgccatagacatattcaatgggaaaaagcttgaagatattgttccttcatcacacaactgtgacattccgcatgtgaacccgtactgagtatcagctgattgatatttct

SEQ ID NO: 5685 - DNA, 318 bp, Zea mays
  Clone ID: LIB3137-038-Q1-K1-F11
aaaaaggggccgacacacgcgtccggcgcgagcatttaatgttctctcggattagtggaactacgcgtggctcagctgataccagtgggggaaaccaacgagctaccgccgccacccttggactcgccgaccaacatgatgccgattcagaccatgatggaatgcgcaggctccattcacccgaccaactagcagttcctccataacaactactgcgaacacttaaatgcatcctgctttcatgcggcagcacttgcattcattgactatcttgttatggtcggatataccttcatgcttacaacacctattgatcct

SEQ ID NO: 5686 - DNA, 228 bp, Zea mays
  unsure (1)..(228): unsure at all n locations; Clone ID: LIB3137-038-Q1-K1-F12
aaaagggccgacgacgcgtccgttcacgtgcactctgcaccccctcgacaggtgctcntaccgccgcatnggccgcggaaatgtcgcggaatctggacgacgtgccgccgctagatctgatgcacgagatgatcacgccgtatgaagtgcagctccaagccatgacacgccgttaaatcgccatgccaccacctggctcttgaaagggaacccattctaccattatta

SEQ ID NO: 5687 - DNA, 391 bp, Zea mays
  Clone ID: LIB3137-038-Q1-K1-F2
ggaaaaaccgcgacgaccgacgcgtccgttgacctgcaaacttcaaatgctcaatactccattttctcgagtactcgttcttccgagaggaaatgataacaggtgggatgcccaaaatgacgaaacttttgttataacacatagcacttaatacgcgtatttgaaaaactcatatgagacgactaactacacacgattggcttatcaccaacgagaatactctgctattagaatgacatagaccttaactctggtcctgtggaacaagaaaaatctcataaaatatttaagaatgccaaagatgctcttacaaacccatgcatctaagaaactctaaaaaggggggttttttttactatcgaacaaacaacacttcctcaatagatatttg

SEQ ID NO: 5688 - DNA, 369 bp, Zea mays
  Clone ID: LIB3137-038-Q1-K1-F3
tcgaccgcacgcgtccggtgacctgcaaacttcaaatgctcaatagtccagtttctccagtactcgttcttctggacgacaaatgatgacagttgcgatgcacaaaaagatggggcttttgggggttaacttatgagtgatgacgcttgctgatggaactcaatacagccaactagctatacgcgatccgcgcagaaatttgattggtagtcgctgattaacatggcattattttgatatcactttttgtgtgataagattattctcatctagattttaagtatgcaatagatggttaagggtccgtatgtatgattgaatctatgggttcgaagtaatttttaggctttggatactgaactcttgttt

SEQ ID NO: 5689 - DNA, 230 bp, Zea mays
  Clone ID: LIB3137-038-Q1-K1-F5
ccgcgcctctacatttcttctctctctgctcctccgcctccgcctgatccatccaagacagggatcgccatgtcggactcggaggagcaccacttcgaatcgaaggccgacgctggggcgtccaagacctacccgcagcaagctggcaccgtccgtaagaacggcttcatcgtcatcaaaaacccgccctgcaaggttggggaagtttctacctccaaaactggtaagca

SEQ ID NO: 5690 - DNA, 333 bp, Zea mays
  Clone ID: LIB3137-038-Q1-K1-F7
ggctccctcctcctccctgcaaatcctgcatacaccaccgctcgtttttctctccgggacaggagaaaaggggagagagaggtgaggcgcggtgtccgcccgatctgctctgccccgacgcagctgttacgacctcctcagtctcagtcaggagcaagatgggtgccggcggcaggatgaccgaaaagggacgggagaagcaagaacagctcgcccgaactaccggtggcgccgcgattcaacggtcgccggtggaaaaaccttcggtcacttttggtcaaatcaagaaagccattccgccacacttgtttgaacgcttggtgcttaaattct

SEQ ID NO: 5691 - DNA, 446 bp, Zea mays
  Clone ID: LIB3137-038-Q1-K1-F8
cggacgcgtgggtgcagttgctatgcaaatgctgtttttcagtgtttgatgtttactcgaccactcacaacatatcttttggaagggcttcactcaaaaaactgttctcaaaacggatggtgcttcatgtgtgaatttgaaaaactcattgtggagggcaaacgacgcaagattgccttgtcaccgactggaatactctctcatttgaatgacattggcagtagctttggtcctggtaaacaagaagatgctcatgaatttcttaagtatgcaattgatgctatgcaatccgtatgcatgaaagaagctagaaaaggaggtgttcttcaatcaacggaagaaacaactcttgggcaattgatatttggtggatatctgcgggctaagatcaagtgctcaaagtgccatgttaagtctgaacaatgggagcccatgttggatcttac

SEQ ID NO: 5692 - DNA, 405 bp, Zea mays
  Clone ID: LIB3137-038-Q1-K1-F9
ctatgacgccgggaagctcggccgccggatttggcgtcgtcgttcctcggaacttcaggctcctagaagagcttgaacgtggagagaagggcattggagatgggacagtgagctatggaatggatgacgcagatgacatctacatgcgatcatggactggcactattattgggcctcataataccggccatgagggtcgcatctaccaacttaaagtggtctgggacaaggactaccctgagaaggcaacattaagtcgatttcattcaagaataaacttaacatgccttaattattaaactggaatgggtgaaccgaaaaaagtcaacgttcttggtaactggcaacgtgattacttaatggaatacattctaacccattttaagaaagagatgacattggcac

SEQ ID NO: 5693 - DNA, 388 bp, Zea mays
  unsure (1)..(388): unsure at all n locations; Clone ID: LIB3137-038-Q1-K1-G1
gcggccgcgcacacgggcacgnggcaagctcgcaacgcgttttctccaccgatcccctgaccgactccggggcccttctgtgccggctgcctgcctaccacatcaaacagtgcgaccatacaccacattcacatgacggaccacgccatcctgctgctgccggcgctcgccgtcgtactgctctgctaccccctcgcgcaatgcgggcagtagaactacaacctcatgttcagctacggcgactcgctcacacacactctcaacctgctcgtgtccagcccgctcttcaaccacatagaaggccgctacctatacggcatgacctacttacacccacccaccgggcgtttcttcgaccgccgactcattgtcaaatttctaacccaag

SEQ ID NO: 5694 - DNA, 317 bp, Zea mays
  Clone ID: LIB3137-038-Q1-K1-G10
gacgacacgcgcgtgcgttgaacatatgttctgaagggcaagtttttttttaagggtctgctcattacagatagggcgggcattgacaggatctgggagccacaaaagccttgagggtatgattatcgctattgcattgcacaatcagtaaatgcatgaatggacatgaatatgatatgtcacaggtctgagaaatctttggatgatattgcttacttgatggaggcggaccacataccaacacctcggattgatgatgctgttgaacgaattctgacggttaagtatatttctggagtgtatgagcatccattttc

SEQ ID NO: 5695 - DNA, 159 bp, Zea mays
  unsure (1)..(159): unsure at all n locations; Clone ID: LIB3137-038-Q1-K1-G12
gacccacgcgccctacaaatacacgaataaagattttttttatcaaccantctcaaactgcttttttgatgaaagtccccaaacccacctgatttttctctatatccaccataagtatttacaaaaaaataatctactcctcctacaacctttgctata

SEQ ID NO: 5696 - DNA, 339 bp, Zea mays
  Clone ID: LIB3137-038-Q1-K1-G2
cgcacatcgggtcgaggcaagctcgcgacgcgtaatcgccaccgctcccctgtccgtctccgggcgccttctgtgccggctgcctgcctaccacatcaatcactgtgaccatacaccacattcccatgacggcccacaccagcctgctgctgccggcgctcgccgccgtcctgctctgctgccccctcgcgcaatgcgggcagcagaactacacctccatgttcagcttcggcgactcgctcaccgacaccggcaacctgctcgtgtccagcccgctctccaaccacatcgtcggccgctacccctaccgcatcacctactttcaccggcccaccggcc

SEQ ID NO: 5697 - DNA, 394 bp, Zea mays
  unsure (1)..(394): unsure at all n locations; Clone ID: LIB3137-038-Q1-K1-G3
gaccgacgcgtccgccgtaaaggatcagatttggtgactgtcagacatgntcttgggcagcatgccaagcgcattggggggatgtcaaaggttgaaaaccaagagggtgttgtaaactttgatgagatcttgagggagactgatgcttttatggttgctagaggtgatctgggaatggagattccagtcgagaagattttccttgcgcagaagatgatgatctacaagtgcaacattgctggcaaacctgttgttactgctacccaaatgctcgaatcgatgatcaaatctcctttgccgacacgtgcttaagccactgatgttgcaaatgccgttcttgatggaactgactgtgtcatgctcaacggccaaagtgccccttgaacctaacccg

SEQ ID NO: 5698 - DNA, 216 bp, Zea mays
  Clone ID: LIB3137-038-Q1-K1-G4
tgcacctgcattctgcaagcctcgtctggtgctcttcccgttgcattggcggcggaaatggcggcgaatctggaggacgtgccgtcgctggatctgatgcacgagttgctccgccgcatgaagtgcagctccaagcccgacaagcgcctcatcgtcatcggcccacctggctctggaaagggaacccaatctcccattattaaggatgaatattgc

SEQ ID NO: 5699 - DNA, 397 bp, Zea mays
  Clone ID: LIB3137-038-Q1-K1-G5
tcttgtccctctcctctcctctcctcttcttcgatggcgacgctgcagctgaaccacatcgcgcgggagacctccgacgtggcccgactcgccgccttctacgaggccgtgctggggttcgagcgcatcccttcgcccacctactcgggcttccaggtcgcatggctccgccttccgagctcccccgacgtcgcgctccacctcatcgagcgggaccccgccggggcacccgtcgcggtggggcctggcgccgaaggcgcgccgccgtcgcaactggcccggcgccaccaacttgccttcttcggtgctgactacgacgggttcgtgaccgggctgaaagcgcgcggcacccgagtgttcgagaagtcgcagccggatgggcgcacgcgccaagtct

SEQ ID NO: 5700 - DNA, 299 bp, Zea mays
  Clone ID: LIB3137-038-Q1-K1-G6
cacatcgagaacacgatcgagcacacaagcattaatactcgtttaggagaaaccacaaaccacgcaagccgtgaaagcatcatggagtacggtcagcaggggcagcacggccacggcgccacgggccatgtcgaccagtacggcaacccagtcggcggcgtcgagcacggcaccggcggcatgaggcacggcacgggaaccggcggcatgggccagctgggtgagcacggcggcgctgcatgggtgcggcagtccagctgcaggagacacagaccgcgatctgatcgctcgagtcagtc

SEQ ID NO: 5701 - DNA, 385 bp, Zea mays
  unsure (1)..(385): unsure at all n locations; Clone ID: LIB3137-038-Q1-K1-G7
cgcacatcgggtcgtggcaagctcgcgacgcggaagcgccaccgctcccctgtccgtctccgtccacctcctgtgccggctgcctgcctaccacatcaatcagtgtgaccatccagcacattcccatgacgggccacgccagcctgctgctgccggcgctcgccgccgtcctgctctgctgccccctcgcgcaatgcgggcagcaaaactacacctncatgttcagcttcggggactcgctcaacgacaccggcaacctgctcgtgttcaagccgctcttcaaccacattggcgggcggtacccctacggcattacctactttcaccggcccaccggccggtggttcgaccggcggcttgtcgtcgactttctaacgcaagcgtt

SEQ ID NO: 5702 - DNA, 345 bp, Zea mays
  Clone ID: LIB3137-038-Q1-K1-G8
ccgtaaaggatcagatttggtgactgtcagatatggttcttgggcagcatgccaagcgcattaagttgatgtcaaaggttgaaaaccaagagggtgttgtaaactttgatgagatcttgagggagactgatgcttttatggttgctagaggtgatctgggaatggagattccagtcgagaagattttccttgcgcaaaagatgatgatctacaagtgcaacattgctggcaaaccttgtgttactgctacccaaatgctcgagtcgatgatcaaatcttcttggccgacacgtgctgaagccacttatgttgcaaatgccggtcttgattgaactgacttggtta

SEQ ID NO: 5703 - DNA, 447 bp, Zea mays
  Clone ID: LIB3137-038-Q1-K1-G9
cggacgcgtgggcggacgcgtgggcgggcaatgtgattaaaatatatgctgaaggaggattggtttattctgtccatggtttgggcacagagcttgagttctatgatctcctgcaaaaaagtggttcacctttgatcaatcacattcctgagataattgctagtggcttccttgagtataaggatgatatctacagcacggttccgtggaatggaaaaggaataccagaaattttggttaagtactactcattggaagtttcttgggccaacagctgctttccttttgggctttggaacaagcaacgatttgggatgtgtaattcggctgatgtttcaaacaaaccaatttggccttacatggtaacaagaaagtgcaaaagagatatttttgcttgcattcgcgatatgctgtccaagactgatattcttcatcttgcattattct

SEQ ID NO: 5704 - DNA, 333 bp, Zea mays
  Clone ID: LIB3137-038-Q1-K1-H1
ctgcacgcgagagtgagcataacaacctcaaaaagaggtccatccttaaagagaggcctcctcttgacgatgtgtctaacaccaccattgagacgtccatcttgaaagacaaatctaccctgtgtagccatgaagctattatgaacccacagaatatttttgctgatgacgacgagaccaaagggtgccataaatgggctaaagatggtatggagggcactcactttactgcgaatgattctcacaaaaatgataaatatgttctacacaaacgtcttattaagaaaaaggcggaagttaccatagccaatggtggctggtcacatgacgtat

SEQ ID NO: 5705 - DNA, 404 bp, Zea mays
  unsure (1)..(404): unsure at all n locations; Clone ID: LIB3137-038-Q1-K1-H11
cccacgcgtccgattcctccttcggatctcttattcagcgcagcgcangtgtgaaggaagggggacgcggaggaagatggggctcgcgttcgggaagctcttcagccggctcttcgccaagaaggagatgcggatcctcatggtcggcctcgacgccgccggtaaaaccaccatcctctacaagctcaagctcggcgagatcgtcaacaccatccccaacatcgggtttaaatgttaaacctgttaataccaaaaccttaacttcacttgcttggattgtcggggttaagaacaaaacaaaactttttggaagcattactttcaaaacaaccaaggtcttatttttggtggggacaagaatgaccgtgaccgggttggtgaaaccagaaattaacttcacaaga

SEQ ID NO: 5706 - DNA, 335 bp, Zea mays
  Clone ID: LIB3137-038-Q1-K1-H12
cacctccgttcctccctcacgccggcggtttttatccctctccccatggctgctggactgggagcgcgcccctccgccaccttcgtggccggaaggttccggcctctcgctgcccctctccgccccgtccgctccggcaagttcgttgtgccaaagcgatgcttcattgtatcaaacagcctggcatggggggaaaataacctaatgaaaatccaaaagtaacaaaaccaaagttaattaaaataaaaaaaaaggcaacttttaaggcttgaaaaggtttcccaaaactttctttaccaaggcacatttcaagaacattttattgttgtgccaaa

SEQ ID NO: 5707 - DNA, 421 bp, Zea mays
  Clone ID: LIB3137-038-Q1-K1-H2
gaccacgcgtccgatgaagcgagcggacattccttaaaagaacggtgaatgacctgaacagggagtattcttggagttggtctatggctcgaatcggctgaccaaatcagcgagaatggcaaccaaatatgcttcgtacttgatacccgcgttgccttgagacatgtgcgagttctcacaattcatttgattggtgatcatggttgttaaagcggtaaggcgaacaaccgcagtgaaataccggttggacacctaaacaccacctaggccactccttggcctagtaatcggacaaagcgcatacactttacaccaccggacggacacctaggcgttgactatacgacaccttaaaaactcaagaagaaagtggcgaaagttacgtcagcattgtatggcttgtcacattaagtatatggtc

SEQ ID NO: 5708 - DNA, 194 bp, Zea mays
  unsure (1)..(194): unsure at all n locations; Clone ID: LIB3137-038-Q1-K1-H3
acctgngcagagagtattagcctcgttggtttatggctcgaatcggctgacccaatcagcgagaatggcaaccaaatatgcttcgtacttgatacccgtgttgccttgagacatgtgcgagttctcacagttcatttgattggtgatcatggtttttaaagcggtaaggcgtccaangcgttggaggaccgttt

SEQ ID NO: 5709 - DNA, 328 bp, Zea mays
  Clone ID: LIB3137-038-Q1-K1-H4
gcgtccggtcgccactgccggcggcaagtgatgaggcgatgccgctccggagactgggcgttcggcacccgtcgtcgtgtatatataatatagctgatggctctgcctgtgcattactcgtgttctgctactactagcactacgatggtgtcccggcgtgtgtttgaatgttctcagtgtgtgtgtgtgtggcacagatgcgccactgctattctatgcacttgtgagtattatgctagctttcacggactcggcgagaaacgagaggtgaggtcttccaaaaaaaaaaataatattataaaattttatttaataaagattatatatg

SEQ ID NO: 5710 - DNA, 423 bp, Zea mays
  unsure (1)..(423): unsure at all n locations; Clone ID: LIB3137-038-Q1-K1-H5
gccacaggctaggccaggagggatcggaccgagtctggcgaggaagcctgcctgctttcagatagagagagttattaagatggcgttgcttcggctgcttgccatctccctgctcttcgcagtggccactcctgtcagggacatcgcccacgatgcctgctcgtcagaagtgaaggatttccagcacctgaacaacagctcggggctccacctgacgctgcaccacccgcagagcccctgctccccggcgcccgttgccgccgacctncccttcttcgcggggctcgcccacgacggcgcgcgcatcgcgttgctcgccgcgccccttgccaagacgccgtccttttggcccaccttgcttgaccagagccgcgcggggtcgtcgtcgtcgtcccccgatgaccagtccctcgcgttcgtgcc

SEQ ID NO: 5711 - DNA, 408 bp, Zea mays
  Clone ID: LIB3137-038-Q1-K1-H8
gttgtagcgagcggtctttccgtagtagaactgagaaagacctgtgcagtgagtatttgtgtacttggccgatggctcgaatcgtctgaccgaatcagcgagaatggcaaccaaatatgcttcgtacttgatacccgtgttgccttgagacatgtgcgagttctcacagttcatttgattggtgatcatggtttttaaagcggtaaggcgtccaaagcgttggaagaccgcttggacgcctaagcggcgcctaggcgacccctaagccaggtaagccggcaagggccctaagccttaaaacaccggccggacgcctaagcgtcgcctaaaccaccccttaaaaacagaattggtgatgcctgacaatttggtcagatctgataccggtgactatataatgcaaggttg

SEQ ID NO: 5712 - DNA, 191 bp, Zea mays
  unsure (1)..(191): unsure at all n locations; Clone ID: LIB3137-038-Q1-K1-H9
ggtgggcgagcggactttctcgagagacgtggattgacctgngcagngagtatttgtctgctgggtctatggctcgaatggtctgaccgaatcagcgagaatggcaaccaaatatgcttcgtacttgatacccgtgttgccttgagacatgtgcgagttctcacagttcatttgattggtgatcatggttt

SEQ ID NO: 5713 - DNA, 414 bp, Zea mays
  Clone ID: LIB3137-039-Q1-K1-A1
ggctccaccatcccctcccctgccctgcccccaccgccccgcttccttccgccttgctccgttgcttcctcccaccacagtccactccactcgccggccctgcagctcagtatttgactgagactggtggtggagctgctagcagcgagcctgctacttcctggtcctgacggtgcgttcagacctcataccagtgccgacgacgagctgtgaggagagggcaaggaagcaagcctgtgaggaaggcggcgatggagaggtacgaggtgatcaaggacatatgatcgggcaacttcggggtggccaagctggtccgggacgtcaggaccaaagagctcttcgacgtcaagttcatcgagcgggggatgaagattgatgagaatgtccaaagggagatcatgaaccacaggtcac

SEQ ID NO: 5714 - DNA, 312 bp, Zea mays
  Clone ID: LIB3137-039-Q1-K1-A10
ccgagtcccacagtctcagaggccacctcgagccccccctgccccgcaagccgcacccgccgctccctgcgccatctgcgctgcgctgctctgctctgcggtgccaggctgccagccagtgccggcgcgcgcccgctgccgccccgacgggcccaccgttctcttctctccgcgctgcgcgccggctgggctgcacgtctgaggtcagttaatgcgcccgtgacaggcggcgtcggggaggccaagggcggtgccgggttaatcccgccgtctctcgaggcggcgcccgcggaggaccaggcgggaggggga

SEQ ID NO: 5715 - DNA, 411 bp, Zea mays
  Clone ID: LIB3137-039-Q1-K1-A11
gcgcccacgcgtacgggcggactgaaatctggtggtaatgtttatgtgataggagatccaagaagacctgtacagaattggaacgtttgtatcccacttaatacccaaagcaaccaatgggtaaccttgagatatgcatgactggtctggacaaaaaaaaagactttgtctttttcaaaactaatgctgatgggaacacaccatgtgccaaggaaatgacaaagctctctggcatatctgaaatcatacccgagatggagatctgcgattttgactttgaaccctgtggctactccatgaatgcgatccatggctctgcattctctacaatacatgtgacgcccgaggacggtttcagctatgccacttacgaggatatgggcttggatgccactgctctatcttatggtg

SEQ ID NO: 5716 - DNA, 361 bp, Zea mays
  Clone ID: LIB3137-039-Q1-K1-A12
cagtccctcacacactcactatacactgctctgctgcagcaagaaggaagaagctagcgcctccctaggtctcgttgtcagcaatggccaccaccgccgcgtccagcctcctcaagtcgtccttcgcgggctcccggctcccttcggccacgcgcaccaccaccccgtcgtccgtggccgtggccaccccgcgcgccggcggcggccccatccgcgcgtccatctcctcctcccccaccccgccctacgacctgacgtgctttcggttcagccccatcaaggagtccatcgtgtcccgcgagatgacccggcgctacatgacggacatgatcacgcacgccgacaccgacgtggtgatcgt

SEQ ID NO: 5717 - DNA, 283 bp, Zea mays
  Clone ID: LIB3137-039-Q1-K1-A2
acaagggctaccgcccaccggccaccaccccacgcgcgtctcacgccatgggcagcgcgtcgtccccgccatctcacaggcggtggagctggggctcggcgctggcgggcgcggcgactacggccgccgccacggccctagtgctgtgccggccgcgggacccgcggttcgagctcatctccatcagcctgtccgccttccacttccgcccgccggcggcgctggacatcgggctcaccctcaccgtgcacgccaccaaccccaacgtcgtgcccgtgcgcta

SEQ ID NO: 5718 - DNA, 419 bp, Zea mays
  Clone ID: LIB3137-039-Q1-K1-A3
gcacaccaaggagagtacgtggaggagcagccatggcttcatcggttggcgccgcggcgagagcaattctgtgcacccgcctgtcggacccggcgccacacaacgggcgcatattggcccgggtcgggttctggttgggcggcaaggggaaacctgctcccaagaaagtggcgaagacatatacctcctctgaccggccgctgttgtttcccggcgccgtggcgcccgactacctcgacggctcgctggtcggcgactactggttctacccgttcggtctcgggaagcccgcggagtacctgcagttcgagttggactcgctggaccagaacctggccaagaatgaggccggcggcatcatcggcacccggttcgagtcctccgaagtcaagtccaccccgttgcagccctacagcgag

SEQ ID NO: 5719 - DNA, 339 bp, Zea mays
  unsure (1)..(339): unsure at all n locations; Clone ID: LIB3137-039-Q1-K1-A4
tcgnntccgatactagttccttcttggttgcatgctgtcagagggagggtgtacacagtagggccagtatgccgtcgtcgcgccgtgtcgaaatccgaaagcatgagaggagtcggcatatggccggtgatccgcgcggtctcggcgtcggtcgtggtcgtgcgtcgtcttggcgtgccgtggcggtgtgcgccgcgagccggcggtcggggatcactcgtacccggtgtgacttcctggcgctgcattgcggtgcggcggtccctggacgacatgcccggctcggcgttcttcgacgggtgggacttcacggccgacccgtgcgggttccccggcgtg

SEQ ID NO: 5720 - DNA, 367 bp, Zea mays
  Clone ID: LIB3137-039-Q1-K1-A5
cttcacctccgccgccgaatccgagactctgatctcgggttcaccgcagcgcacagagcacccccgactcccgtcccgatccgcgctctcctctacgacgcttcagtcatggcaggaatggcacccgagggttctcagtttgatgctaagcactatgattctaaaatgcaggagctgctgagcactggtgagactgaggagtttttcacttcatatgatgaagtttttgaaagttttgatgacatgggccttcaagagaatcttctgagaggcatttatgcatatggttttgagaaaccatctgcaattcagcagagaggaatcgttcccttctgcaaggggcttgatgtcattcatcaagcacaat

SEQ ID NO: 5721 - DNA, 322 bp, Zea mays
  Clone ID: LIB3137-039-Q1-K1-A6
gggttttgctgctctccgaccccgagctccgaaggccgcagcatcaggcgcggcccccctcgcgtgtgaccgagatggcgctgccgaatcaggggaccgttgattaccccagcttcaagctcgtcatcgtcggcgatggtggaactggtaaaactacattcgtgaagaggcatctcactggagagtttgagaagaaatatgaaccaaccattggtgtggaagttcatccgttggatttcaccactaactgtggtaagatcaggttctactgctgggataccgcatggcaagagaagtttggtggcctcaaggatggatacta

SEQ ID NO: 5722 - DNA, 370 bp, Zea mays
  Clone ID: LIB3137-039-Q1-K1-A7
cacaagcgcactctagcaatggcttgtgaggttgtccgccctagcgacgccgagctactaaaggcacaagccgacatatggcggctcagcctctcctacctcacgcccctgtcactgaggtgcgccgtggagcttggcatccccacggccatctaccgccatggcggggctgcctcagccgctgagctggtcacggcgctgtatctcccctccactaagctgccgttcctccgccgtctgctgcggctcctcgtcgcgtcaggcgtgttcaccgtcgacaagcagagcacggaagaggagcggtaccgcatgatccccgcgtcctacctcctcgtggacggcatccctcacgaggaccacatgaaccaca

SEQ ID NO: 5723 - DNA, 369 bp, Zea mays
  Clone ID: LIB3137-039-Q1-K1-A8
gaatctcccgtggcatccatgacaagggacattccctgacaaggaaactgcattcggatgggaaggttgacaccacacagacactgcacaacctgaatgaagatgaactagccggatttgagcaatcatggaaagggaatgctggacattacttgcctgactggaaccacaatgctggtgcacctaatatcgataattctggaaagcctagcttcatatttgtaaggaggacacatttcgtgcacatggaggtttgatgcacatattaaaatatcaatatgcatcttaaatctaacgctctaattgatttgtatatgttgcaaaaaaacaccatctgcagtggtggaatgtaacagtggaagatgatat

SEQ ID NO: 5724 - DNA, 444 bp, Zea mays
  Clone ID: LIB3137-039-Q1-K1-A9
ctagttctagctagctagcaaagggggggaaaatggcttcgcttctcgctgctgccatgaaccacgctgcagcccatcctggccttaggagccacctagtaggacccaacaatgagagtttctcacggcaccacctgccgtcttcttctccacagagcagcaagcgaaggtgtaaccttagctttactccacgatctgcaagagtaggcagccaaaatggagtccaaatgttgagcccctcggaaatcccacaaagggactggttcccctctgacttcaccttcggtgccgccacttcagcgtaccaaattgaaggtgcttggaatgaagatggaaagggggaaagcaactgggatcacttctgccacaatcatccggaaaggatactggacgggagcaattcagacattggagcgaattcgtaccatatgtacaaaacggacg

SEQ ID NO: 5725 - DNA, 423 bp, Zea mays
  Clone ID: LIB3137-039-Q1-K1-B1
ggactacgtgcggcggttccaccggcacgagccccgcgaccaccttgtctggtccctggtgaggcggttcgaccagccacagctcttcaagcccttcgtgagccggtgtgagatgaaggggaacatcgagatcggtagcgtcagggaggtcaacgtcaagtccgggctgccggccacaagaagcacggagaggctcgagctgttagacgacgacgagcgcattctcagcgtcaggttcgttggaggcgatcacaggctgcagaactactccttcatcctcaccgtccacccggaggtcatcgacggccggccagggacgctcgtcatcgagtccttcgtcgtcgacgtccccgacggcaacaccaaggacgagacctgctacttcgtggaggcgctgctcaagtgcaacctccggtcactcgc

SEQ ID NO: 5726 - DNA, 304 bp, Zea mays
  Clone ID: LIB3137-039-Q1-K1-B10
gagagagggcccgagagccgaggacgagtgcagtctggctggcgtgatgctgcttcggagcgcgtccgcgccgctgctcaactgcgggcgcgcgccggctgccgcggcgtcggtcgagcacctcgcggtggtttcgccgttgttatcaccggcagtggcggcgcctatgcaggggccggtgctgtgccgcgccatgtccgagggggacctcgccgcgccgctcgtgcccaagaaggacgatggacacgggagggcgccgaggctgtcggcgtccttgtcctcgtccgcctccatcttcgtcgag

SEQ ID NO: 5727 - DNA, 251 bp, Zea mays
  unsure (1)..(251): unsure at all n locations; Clone ID: LIB3137-039-Q1-K1-B11
ggacgatcgagcaagaagcaagcagcagtaacaagaaaccatcatcgatccatgtatccagcaatggcggcgctctgaggacggcggaggacggcgtcntcagcggccctcttgctagccttgttggcgggggccctggtttccttggccggccaaccacggccgtggggaacaagaccggggcaggtgaccgtgttttggggccgaaccaaggccaagggaccctctgccaaggctctgaatttggcctt

SEQ ID NO: 5728 - DNA, 389 bp, Zea mays
  Clone ID: LIB3137-039-Q1-K1-B12
ccctagccgccgccgacgctcgtctccctgagaggtgccgggaccgaggaactggccgagttctaggtagagaatcggttttgcttgtctcagcacggggtctgctgcgtctggtggtggtgaaggggagaaattcgtgagatctgttccggatcaggcgtgcgagctcgggaatcaggggtttcacacatagcttcgtcgatttgaatttgatgtactaatggagtctaagggtggcaaaaagtctagcagtagtcgttccatgatgtatgaagctccccttggctacagcattgaggacgttcgacctgccggaggcgtgaagaacttccagtctgctgcttactccaaactgggcgagaaatccatctgatatcccttttggcttt

SEQ ID NO: 5729 - DNA, 389 bp, Zea mays
  Clone ID: LIB3137-039-Q1-K1-B2
gcggagcggccctccacctttatcgccgccgcctccgccgccgttgctgtgttccgtctcttcgccgatggcttcggccaagttcggtgctgcccagcaggtggagaaccgaggcgcgctgtccaaaaggtcacgtaacgacgtgtctgtaagggagggggactggaattgtcctcagtgtggtaatgtcaacttcagttttagaaatgtttgcaaccgtggagcctgtggtgcaccccgtccatcaccgagtccaagtccaagaatgatgccaggacctcctgcttctggatatgaccggtcacctctattttacggaagaagtggtggcgccccacctccaattccgcttggaactggtagctatggtgctccatattcacaccctg

SEQ ID NO: 5730 - DNA, 376 bp, Zea mays
  Clone ID: LIB3137-039-Q1-K1-B3
caaggccgagctcaagggctgctacaacgacgttgaccgcatgcgccggtgccttgtcgaccgcttcggcttctacgaggccgacatccgggtcctcaccgacgccgaccgatccgcgccgcagcccacgggggctaacatccggcgcgccctcgcccgcctcgtcggggatgcccgccccggggacttcctcttcttccactacagcggccacggcacgcgcctgccagccgagacggggcagcacgacgacaccggctacgacgagtgcatcgtgccctgcgacatgaacctcatcacagatcatgatttcatggaactcgtgcagaaggtccctgaaagttgcctattcaccatcggctctgactcatgccat

SEQ ID NO: 5731 - DNA, 392 bp, Zea mays
  Clone ID: LIB3137-039-Q1-K1-B5
tccatttcggcctctgtcccttgcaagttcaatctcacctccaaccatgggtaaagagaagtcccacatcaacattgtggttattggccatgtcgactctggcaagtcgaccaccacaggacaccttatctacaagcttggaggcattgacaagcgtgtgatcgagaggttcgagaaggaggctgctgaaatgaacaagcggtccttcaagtacgcgtgggtgctcgacaagctcaaggctgagcgtgagagaggtatcaccattgatatcgctctgtggaagtttgagaccaccaagtactactgcacggtcattgatgcccctggacaccgtgacttcatcaagaacatgatcactggtacctcccaggctgactgtgctgtccttatca

SEQ ID NO: 5732 - DNA, 410 bp, Zea mays
  Clone ID: LIB3137-039-Q1-K1-B6
cggacgcgtgggccaaaattggcggttactggcggaggtacaagtgccacccatacaaaggaaaggattcaacaccctggtttctcttgtggcttggatgttgtggaaacatcggaatacatgtgtctttgataaggctccaccaagcattgctaggatcatccaggaagtcagagatgaggcttctctttggtgtttggctggagcagcagggttgcgtggtctttggccatatagctgttatgtaatgtggtataggtcgtctattgttttgtatcttagatgagttcctttaggtttctttgtttttggcctgcataaagagtacttgctttctttgggtctattacagacccttactcttcttaatataatgaaacacaactcttctgcgttttcaagattttttt

SEQ ID NO: 5733 - DNA, 353 bp, Zea mays
  Clone ID: LIB3137-039-Q1-K1-B7
gctagctcacttgatatacatattgcatcggcataaaaaccgaatttaccatggaccactggatctcttctgcaatcgcaggcgcgggcaacttggtcgctgatggaatcagtggtgtcactggcgtagcgtcgcacgttgtagaacgcgtataggacactttaggcagtatcgtataagcaatcgaccaaggagtcaaggatgaggaccaactggatttgcccaagtacgtgtgtttcaagggagataacggtctgtacctgagtgctcgaacggttgaaggccatccctacctgcagtttgcatcggaagacattggcgacccaagtgtgaggttcatcacctacaaccac

SEQ ID NO: 5734 - DNA, 400 bp, Zea mays
  Clone ID: LIB3137-039-Q1-K1-B8
gctcaaaatttcccccaaaacttctcctcttgtaggaaggcagcccgagcgagcgcgctgcaatggcggactcgtcggcgccgacgagagtgatgatggcggtgaacgagtcgtcgctcaaggggtacccgcacccctccatcagctgtcgcaccgccttcgactggacgctctccaagctcgtacgctccaaccctgggggcttgcacttcctcttcgtccacgttcatgttcccgacgaggacggatttgatgacatggatagcatctatgcttcgccggatgactttcaccaaatgaagcagagagacaagataagagggcttcatttgctcgagtactttgtaaaccaatgccatcagttagggataaaatgcgaggcatggatcaaacattgaga

SEQ ID NO: 5735 - DNA, 449 bp, Zea mays
  Clone ID: LIB3137-039-Q1-K1-B9
cggacgcgtgggccggcagcagccaaaccctacataggcgccgccgcaggcggcccccccgcatcgtgggcaaagatgcagatctttgtgaagactctgacggggaagaccatcactttggaggtggagtcctcggacaccatcgacaatgtgaaggccaagatccaggacaaggagggcatccccccggaccagcagcggctcatcttcgccggcaagcagctcgaggacggtcgcaccctcgccgactacaacatccagaaggagtccacactccacctggtgctccgcctccgcggcggcgccaagaagcgtaagaagaagacgtacaccaagcccaagaagatcaagcacaagcacaagaaggtcaagctctccgtgctgcagttctataaggtggacgacaccactagcaaggtgacccgcctccgcagggagtgccccaacac

SEQ ID NO: 5736 - DNA, 416 bp, Zea mays
  unsure (1)..(416): unsure at all n locations; Clone ID: LIB3137-039-Q1-K1-C1
cattgccacaaatagcaaccaaggcagtaagcctagccaagccaaccgacggcggcgagagtatatatacacacacacctgacgcctctgctgctgctgggatcaacgcggcagcttagtgacgacgacgactcttctgtctctgcgttgattaatggacagtaacagatccatggcgacgagcggcgtggctccgttcgtggccaagacgtaccgcatggtggatgacccggcgaccgacggcgtggtcgcgtggggcagggacaacaacagcttcgtcgtggccgaccccttcgccttctcgcagacgctcctgcccgcgcacttcaagcactccaacttctccagcttcgtgcgccagctcaacacctacngcttncggaaggtcgatccggaccggtgggagttcgcgcacg

SEQ ID NO: 5737 - DNA, 334 bp, Zea mays
  Clone ID: LIB3137-039-Q1-K1-C10
gtccagttctctccagatgtgaatgcgggacgggtattatagatatgtatagtctagagatatgtatgtgcttgtatttcaaggtgtattttgactatacacatgaaagccaccctttctataacgagtgtgaggtgttctcttaatcttctacatttatgggggtggatgatcaattcagcgtaacaaaaccattgtgctgatatgctggcttttcctccaacaaactatcaggctggaaaaaagttgcttctcattactaattcagatttccattatacaaacaaaatgatgaatcatgcattcaatcgctttcttcctaatgatgtgggat

SEQ ID NO: 5738 - DNA, 424 bp, Zea mays
  Clone ID: LIB3137-039-Q1-K1-C11
ggatcacacactcttttctttgatagatggactcgtcaagtttgagaagtatgggccggacaagaaaaaggttagtgtttacccatatgagaaggagcctgaaaacccaaacagttacagagcaaggaagagagagtacttccgcatgcggcgtgaacggaagaaggcgagagcggagggcgccgctgagcctcagttggtactagctgctgttgatgaaaactctgaggtcagcgcggactgctgataagtttcctgtgtggtgtttctctttttcacagcccttgttacactttttcttgcttaattgtaagaccacatgatctataaaggtcatatttacatgtgttgtttagataaatggatatgttctacttgtactttttgtgcggaagttgtgctttagagtcacagtgggggtcta

SEQ ID NO: 5739 - DNA, 388 bp, Zea mays
  Clone ID: LIB3137-039-Q1-K1-C12
ggcctcgccactggggactacgccgcccatctcgccgtttgccggcgccggtggtcgcttcagaaggggatcatcgtccgacgcatacgagagggcgaccccaccagggacgaccagccaccctcctcccttcgacgtgtgaactgaccgcaccctcgcacttgcttttgctccttgacaagcatcatctacggtagacagggaggaccggagaagacatcaagaggggaacggggataatctagtcgcgggttgtcttacctctactgtgatatattatattgtagatatatctgtatggcttccttcctagtatgtggcatatgatgtataataataatacgtcgaacgctcatggtactgtgctgtgtgtgccatgtgcataagg

SEQ ID NO: 5740 - DNA, 402 bp, Zea mays
  Clone ID: LIB3137-039-Q1-K1-C2
ggcgtcttcgtactcgcctacctccgcggctcaaacctttcccccttctcccaattccctgcgtcggccgccgctccatcccgtacgacgacaccatgagggagtgcatttcgatccacatcggccaggccggtatccaggtcggaaacgcgtgctgggagctgtactgccttgagcatggcattcaggctgacggtcagatgcccggtgacaagaccattgggggaggtgatgatgctttcaacaccttcttcagtgagactggtgctgggaagcacgtgccccgtgctgtttttgttgaccttgaacccactgtcatcgatgaggtgaggactggcacctaccgtcagctctttcaccctgagcagctcatcagtgggaaagaggatgcagccaacaact

SEQ ID NO: 5741 - DNA, 387 bp, Zea mays
  Clone ID: LIB3137-039-Q1-K1-C3
ctcatgctcttgataccttggtactcttacatcaccccttcttcttcaccttcttcttgttcttgctcatccctcctatccggccctctcttcctcctgcctctctctagctaggacgatcttcaacaaccctctccccctctaattctctttccccatatagagagaataaaggagagagagagagaggcgaaggcaggcagctaattttcttttgctcaagggaaaggacagcacgtgccggagcgagctcataagctggtagctgcatcaattcctgaggcaaaaccacctgtttacgatcttgcagtcatcatcacgctattagttgaggataatttcgcgcacaagagcacgacaagccgagatttttgggggcgtcggctt

SEQ ID NO: 5742 - DNA, 384 bp, Zea mays
  Clone ID: LIB3137-039-Q1-K1-C4
gataaagtttgcgtccttagctgtggtatttctaccggtcttggtgcatcaattaatgttgcaaaacctccgaagggttcgacagtggctgttttcggtttaggagccgttggtcttgccgctgcagaaggtgcaaggattgctggagcgtcaaggatcattggtgtcgacctgaaccccagcagattcgaagaagctaggaagttcggttgcactgaatttgtgaacccaaaagaccacaacaagccagtgcatgaggtacttgctgagatgaccaacggaggcgtcgaccgcattgtggaatgcactggcaacattaatgctatgatccaagctttcgaatgtgttcatgatggctggggtggcgctttactggtgggtgtg

SEQ ID NO: 5743 - DNA, 417 bp, Zea mays
  Clone ID: LIB3137-039-Q1-K1-C5
gccgtttacggtttagccgcgtgctctctctgtctccctcggggacaattcggctaccgctgccgccctacgccaggttcccagctcttcgccaggcccttctcccgcgacgagcacccaccaggccaccagttgacacttaatactacctgaatctaatgcttatcaatatgcctaatattttctggcgaagctttactttgtgcaacacatattctccatctaatcaactacaaggaggttgtactcaaagaatggatttatggattacttcttgttcacaagcagcgagacatcatgcaaggacaggttcagttgattttcctgttaagaagaacgtgaagtcatctcaactgcaaaacacgacatgttttggtggtttagtgcggcagttgcagtgcagacggtcaacaaaaa

SEQ ID NO: 5744 - DNA, 429 bp, Zea mays
  Clone ID: LIB3137-039-Q1-K1-C6
cgcgtgcactgaccagacctggccagcccaggcgtggaggtgctcgtctcctccggcgcgccgggaccggcgatgaacggcgggctccctggattccacaatgcgccggcgtcaaaggccgtggtcgtcgccgcaggtctcttctccgtcgcctttggcttccgcggccactccctcaacctcggccttgcctaccagagtgtttatgaaaagctgagtgtatggagactgatcacctcattttttgctttttcgtcaacccccgagctgatctttggagcagtcctgctgtactactttagagtgttcgaacgacaaataggttctaacaagtatgctgtcttcattatcttctcaaccatggtgtcggtactgcttcagatccttgctttaggttacatgaaaagaccttctctaaatcctttgaca

SEQ ID NO: 5745 - DNA, 368 bp, Zea mays
  Clone ID: LIB3137-039-Q1-K1-C7
cggacgcgtgggtgtgtctcgacccaaagccacatcggcacgacgagcagagggccccccggagcggcgcggatcaatggcggcgggataccgggcggaggacgactacgactacctgttcaaggtggtactgatcggcgactccggcgtcggcaagtccaatctgctctcacgcttcacgcgcaacgagttcagccttgagtccaagtccaccatcggcgtcgagttcggcacccgctctctccaggtcgacggcaaggttgtcaaggcccagatttgggacactgccggccaggaacgatatcgtgctattactagtgcgtattatcgaggtgctcgtggggcgttgcttgtatatgacgtcactc

SEQ ID NO: 5746 - DNA, 443 bp, Zea mays
  Clone ID: LIB3137-039-Q1-K1-C9
caagcagccagaccaagagttcttggcccacgtgtctatggtgtcaaggctgaagcatgaaaatgtgggcgagttgcttggttactgtgctgatgggacactccgcgtccttgcttatgagttcgctacaatgggttcccttcatgatatgcttcatggaaggaaaggggttaaaggggctcaacccggtccagtcttatcgtggtcgcaacgtgtgaagatagcggttggggcagcgaaaggcctcgagtatcttcatgagaaagcgcagccccatatcatacaccgagacatcaagtctagcaacgtccttcttttcgatgacgatgtagctaacatcgctgactttgatctgtcgaaccaagctcctgacatggcagctcggcttcactcaactagggttctcggaacattcggataccatgcgcctgagtatgcgatga

SEQ ID NO: 5747 - DNA, 447 bp, Zea mays
  Clone ID: LIB3137-039-Q1-K1-D1
cgtcactgcacccttgggcagcgggcgcgtacctacctacgtgcggggggagccacacgcctccctctcgcctcttggcatggacgccggcggagagaagtgcggcgacgcggcggcggagggcggggagggtggcggagacctctacgcggttctcgggctcaagaaggagtgctccgacgccgagcttaaggtcgcttaccggaagctcgccaagaggcaagaaagctttgaggagctgcagcagctttttgtggacatgttccagtccgatattgattcaggattctgcaataggactgccaaggcccatcagtttcaggggccaaccaaaagtagaacatgctcgacctcaccttcatcatcaccgtcccctccttcttctaccacagcaaaggatgcagaggtgccaacatgtaatggcttcaataagcggggttcatcagc

SEQ ID NO: 5748 - DNA, 361 bp, Zea mays
  Clone ID: LIB3137-039-Q1-K1-D10
gtccttcctccatcttcctcctccactccactcccaagttcccaccacccccaaccccgtgtctacagtgcggcgcatgcttcgcttcggctccgctcggctcgagcagaagaaaatgcaacgggcagtgcaggccgtcaggtcacacggcaatgttcttaaatatgctgttctacaacacatcagcgctcccaagccagcaatgcttcctgctgccttttctcgcttcatgtcagtttcatctgctcgcctagaggatcgtggatttgaaactgccactgtagcagacgtcttgaagtctaaagggaagagtgctgatggatcttggctctggtgcaccacacaggatagcgtctatgac

SEQ ID NO: 5749 - DNA, 355 bp, Zea mays
  Clone ID: LIB3137-039-Q1-K1-D11
tccacggtgtgatgtcacggagcggtggcggctttcccgatccactgtgcgggagaaatccccgtgcggccttcttccagctcttcctactctttgctactcgtcttcgctgatttctgccttaattccatcccttccctgcctagaacttgctttgcttcaccccatcacagcttttggtgcctcgtcatcggcgacctaaccgccggcgaccggataaactaagccaggcccttcgctccgaaagtcgtctctcgtagagagcacttgctcacctgctcctcgccctcctctgctggcagtggacttgcgcggagtggacatccatccggacctggttcgatttcttcatctc

SEQ ID NO: 5750 - DNA, 411 bp, Zea mays
  Clone ID: LIB3137-039-Q1-K1-D12
gcgggaaggagtacccgcccgacctcacgctcccagaccttaagagcgggctcttcagcaccgacgagttgggcatgtacagcttcaagttgaagccctgctcgcgcgcctactcccacgactggaccgagtgccccttcgtgcaccccggcgagaacgcgcgccgccgcgacccgcgccgcttctcctacagctgcgtcccctgcccggagttccgcaagggcggcgcctgccgcaagggcgacaactgcgagtacgcgcacggcgtcttcgagtgctggctccacccggcgcagtaccggacgcgcctctgcaaggacgaggtcggctgcgcgcgccgcatctgcttcttcgcgcacaaacccgaggagctgcgcgccgtcaacccgtccgcggtctccgtcgggatgc

SEQ ID NO: 5751 - DNA, 327 bp, Zea mays
  Clone ID: LIB3137-039-Q1-K1-D3
ccccccccctctcttctcctgctggttggctcatcaggcctgcccgaataatcctcctgcggattcccctcacgggaggccaaaacccgcacctttcccccgtcgacagattctcaaacccggcgaactccggtcagggctcacgtcgccgatcccgctcccggattctctttgccgccgcgaggagacggcgtccagtccaggccttcagcagctccgtctacgcgtgtatctgatcgggggattctttgcttgagaaactgctagcatgggcgcggtgcttggacggcatgacacgcacaagcggagttcccatggttcgaagct

SEQ ID NO: 5752 - DNA, 226 bp, Zea mays
  Clone ID: LIB3137-039-Q1-K1-D5
gaaatggtgatggaccaaaatggggtggtggagataattggaacgctacaaatccaccaagttatcagtcttggagtagcagtggaggcaccaagtcatatggtcaaaatcagccttccacttggaataattcagaggataacaaaccatctgtaggtgaacaaggtgatccttgggcaagcaaggtgtcttctactgaagggtaaggacaacagaatgattcttg

SEQ ID NO: 5753 - DNA, 320 bp, Zea mays
  Clone ID: LIB3137-039-Q1-K1-D6
gggtcatgatgccagagattatcgtaccaaacaacatcttgtttgtccaaaacttgccacacgagacgacgcccatgatgctccagatgctcttctgccagtaccctggctctaaggaggttcggatgatcgaggcgaagcctgggattgctttcgtggagcatggagacgagacccatgccactgctgccatgaacaaccttcaaagcttcaaaattacaaaagaaaaccagatggtcatcacatatgcgaagaagtaatgagcttccgagcaatgtttacctgatgtgtgagatgttgtatttcgagttttacacaac

SEQ ID NO: 5754 - DNA, 397 bp, Zea mays
  Clone ID: LIB3137-039-Q1-K1-D7
gtcactccggaagataggctacgacgtggtgccctccggcgactccggtcggcttgtatgcaactacgtgtactaccactctcttcggttcgcggagcaacacggcatcaaatacctgttcgtgcatgttcccctcttcttgacgatcgacgaggaggtccagatgcacttcgtcgcttgcctccttgaagtcatagatttctcatccaactaggatcagcagttggaagatcagcgtctggattcctatctcaaagatggatgtaaagctggaatgctgcatgtaggctgaataaggtggtgtggtcattggcgatagatgttaatcttgctccacaagttgggtttgggaatcgggaaggaaaaaaagaaaggtccttggcgatagatgatgatc

SEQ ID NO: 5755 - DNA, 443 bp, Zea mays
  Clone ID: LIB3137-039-Q1-K1-D8
caaaatgcaggctctcctgctccccgcgcgggccgtgccgccgacgccggcgatgcttcggcagcgtgcggtttctgcctccgcgcgtgcgtcgcaggtctgccgccccctattcggtgccgccaattgcatctcctgtggggtctacggaagcgttcggcggcacctcacagtggcggtggcggcggacccgccctcgccttcgtcctgaccttcgtcgggaccgctctacccgacgcctacacccaccgagcaggacgtggagagggtcaagctcgagcaggttatgaggagactagagaaaacagcaaggtatttcaagaatttgggtaccctggggttctggtcccaattggtgtgcacaattatttctgctggaattttggcattctctacagtcgtaacggggaaggtgacatcaccctgtacattctatgcaactg

SEQ ID NO: 5756 - DNA, 447 bp, Zea mays
  Clone ID: LIB3137-039-Q1-K1-D9
atcggcataaaaactgaatttaccatggcccacttgatctcttctgcaatcgcaggcgcgggcaactgggtcgctgatggaatcagtggtgtcactggcgtagcgtcgcaggttgtagaaggcgtagaggacactttaggcagtatcgtagaagcaatcgaccaaggagtcaaggatgaggaccaactggatttgcccaagtacgtgtgtttcaagggagataacggtctgtacctgagtgctcgaacggttgaaggccatccctacctgcagtttgcatcggaagacattggcgacccaagtgtgaggttcatcacctacaaccacaaggtgaacggcaaacgggtggtgcgcttcaagtcgaaccatctcggcaagttctggaggcggagccccaactggatctgggccgacaccgacgacaccagcactaacaactgcgacacc

SEQ ID NO: 5757 - DNA, 164 bp, Zea mays
  Clone ID: LIB3137-039-Q1-K1-E1
ggtagagcatggcatgggtggtgttcatatatccgtcgtcgccgtcatcagcatcatcatgtgtgtcatcagcatccgcgtctgtaaatatgacagcatttgaccatttgtacatataacgtgtaaactaaaggacgtaaatataagctgtacagaatatagtt

SEQ ID NO: 5758 - DNA, 409 bp, Zea mays
  Clone ID: LIB3137-039-Q1-K1-E10
tgacactttttggtagtgtccatgacaatatgcctcattctggaggaagtatgaagagcacattgttgccaaactttggaagtatgttcagtgtcacagatcagcatgccaaaaatgagcagtgggatgaagagaatctcatagggatgacgaggagtatgcatctgatggtgcaggacgtgactatgaggacaatctccatagtccattgctatccaggcaggcaacaggtgcggaagggaaggacattgtgcaccatggtcaccgtggaagtgctttgagcatgagaaggcaaagcctcttacgggagggtggagatggtgtgagcagcactgatatcggtgggggatggcagcttgcttggaaatggtcagagaaagaaagtgagaatggtatgaatgaaggtggt

SEQ ID NO: 5759 - DNA, 385 bp, Zea mays
  Clone ID: LIB3137-039-Q1-K1-E11
cggacgcgtgggttccatttcttatcccctcctcctcccagtcccagccatcgcctcccgatggcgtggctcgtcacgctccccgccatcgccttctctaaccccgccacagcctccggcgctgtccgcctacgcgccgcggccttccgctgctgggcgctccggcggcgcgggtgggcggtggcggctgccgtggcctcgcccaactccgtgctcagcgagcacgccttcaagcggctccagctcgggagtgacgacgaggacgaagaagggccgtacgggagcgacgccgacgaggggttccagggggacgaggaggagctcgccattgccaggctcggcctggccgacgagctcgtcggcacgctcgagaagcgcgggatta

SEQ ID NO: 5760 - DNA, 390 bp, Zea mays
  Clone ID: LIB3137-039-Q1-K1-E12
caaaagagttgatgcttttaactacacatcaatagttacgattcacagccgtctcgttccaagtcctgggccacatgaagacagttctggtgttgaccttggggttccttttctttgggaaagaggggctcaacttccatgtcgcccttggcatgcttctggctgtgatcggcatgatctggtacgggaacgcgtcgtcgaaatctggaggcaaagagcgccaggtctaccccacaccgagcgagaagactcagaagcatggggcgctgtcatcgcagtccgagctcgatcagaaggtctaaacgagacacacaaaggcatccgatgcttgttgagcaccggtcgacctggctgtattttttagtacttatttttgagggatgagatgtt

SEQ ID NO: 5761 - DNA, 204 bp, Zea mays
  Clone ID: LIB3137-039-Q1-K1-E2
atggtattcgtcgtcttggcttcatcctctcgcccgccgtctcgactgtagcaagcggggctgctgtccgccgcattcaggagccatgcgtgaggggatgagggagagggacagaggcgggagcccggatgcgtcaggtcctccgcccttccgcggcccggcgtacaagacgaagctgtgcgcgctttggaaggggcaggggcg

SEQ ID NO: 5762 - DNA, 338 bp, Zea mays
  Clone ID: LIB3137-039-Q1-K1-E3
cttgctcgtcgaggtccaagttcctgcattgatggcgaccgaggtggctgagactcccgcgccgttggcggaggctgtccccgagacccctgcggaggcaccggcggcgcccgccggcgaggctaagcctgccaaaggcaataaggcctctgcgcccaagaagcgtgccaacccgacccacccgccgtacgccgagatgatctcggaggctgtcacgtcgctcaaggagcggacggggtccagccagtacgcgatcgccaagttcgtctgggacaagcacaaggacaagctcccgcccaactttcgcaagctactgctcggtcagctcaagaagctcg

SEQ ID NO: 5763 - DNA, 317 bp, Zea mays
  Clone ID: LIB3137-039-Q1-K1-E4
aaaggtccggaaccttctagccgcacctatggtttggattggcgcctagcatggggtacgttgaccacgccttcttcatctacgactaggacgacctcttcggcagagccacggggggcccgcgcggggcgcccgtgaaggagatcgccttcgccgccgcgctgataagacttagggcgcctcgcaccataggtggactgctaatggccgtcaaccgcgtctgaggggaccgcgcgcacggaattttcttcatgatgttgggcattgtaatgttcatccctgggttctactacacaaggatcgcctactatgcttac

SEQ ID NO: 5764 - DNA, 274 bp, Zea mays
  Clone ID: LIB3137-039-Q1-K1-E5
cgggagctggaggtcatccactcccgctgggccatgctgggcgcgttgggctgcgtgttcccggagctgctcgcccgcaacggcgtcaagttcggcgaggccgtgtggttcaaggccgggtcgcacatcttcagcgagggtgggctggactacctcggcaacccgagcctgatccacgcgcagagcatcctcgccatctgggcctgccaggtcgtgctcatgggcgccatcgaggggtaccgcgtcgccggcggcccgctcggagaggtcgtcg

SEQ ID NO: 5765 - DNA, 437 bp, Zea mays
  Clone ID: LIB3137-039-Q1-K1-E6
agaacacagggcacacgcacggcacgcagatacatatagagagaggttagctatagcttgcacatctatttaactaactaactaactggctagctagctcgatcggcagagcaaagcgaaagcagcaagaagcaaagcaatggagaaccctgcgagtgtgctagttctaccagcgcagttcaccaaactcaccttcggaaacctgtacatccgccgggccgggccgggcagcagggagataaccgaggagggcaggtgcgacctggacaagagatacgtgagtgacttccccgtctacgacggccgcggccccgacgccagccttgtggcccgcgtgcaagggatcaccagcgaaatcgggaacgcgcaccaactgttcgtcgttgttttcgacaccgacaggctcaaaggctccacgctcgtcaccaatggcgtga

SEQ ID NO: 5766 - DNA, 391 bp, Zea mays
  Clone ID: LIB3137-039-Q1-K1-E7
ctcctaccgtttaacattgccgccctgctgctccccaacaacctcggccgtaacggttggggcgtgttctcccggcgcctcgcgcaggggtggcctcctgcgccgttggagccaagccccggcggccggaaatggtaaaaagattgattctctgagggcaatcaatggagcaccaccttgcattacggtgtccaacaggtcgttattgactcctgtaaccttgccagttttccgggatccaaacatgaggaacgacacgaggctgcgcatcttatcaggcacagactatccttccctttcccaggagatagcaagttacttggggctagaacttgtgaagataaccataaagaggtttgctgacggtgaaatatatgttcagttgcaagaa

SEQ ID NO: 5767 - DNA, 437 bp, Zea mays
  Clone ID: LIB3137-039-Q1-K1-E8
ctccttccagtgtccgccgtcgtgcgctcgctacccctctccctcgaggcctttgccggcgaagagcgcccagtcgcccaccaggatgaagtttgttgctgcctacctgcttgctgtcctcgctgggaactccagcccctctgccgaggacttgacagccattctggagtcagttggctgtgaagttgacaatgaaaagatggaactccttctgtcccaactgagcggtaaggacattaccgagctcattgctgctggcagggagaagtttgcttcagtcccatgtggccgtggcggtgtggctgttgcggcagcttgccctgctgctggcggcgctcctgcagctgaggcgaagaaagaagagaaggtggaggagaaggaagaaagtgatgacgacatgggcttcagcctcttcgactaagcctgtgcaatagtca

SEQ ID NO: 5768 - DNA, 381 bp, Zea mays
  Clone ID: LIB3137-039-Q1-K1-E9
gctggagcttcggaccaagctggaccgaaatcttttggtggtgatggttggaacaagggtggtgatcggaatagcagttggaacagtcctggaaattttggaggtgggcgtggctttgggcgaggacgagggagaggtatgggtcgggaatctggagatttcaatggcagaaatgatcaaggaaattgaaagaattcatggggtggtgacaatgctgaaaaatcttcttggaggtctgataatcacgtagacaatgaagctggagattctggtggatataggggacggtgaagaggaggaagggggcaatatggaggacgaggaacatgcagagacaatggttggagaaatggtgatggaccaaaatgtgatggtggagat

SEQ ID NO: 5769 - DNA, 369 bp, Zea mays
  unsure (1)..(369): unsure at all n locations; Clone ID: LIB3137-039-Q1-K1-F1
tcgtctcgtccgtatccaatatgatattacactgtgtgtgcanntctgtctctattcgccattcganntcttcctctcggtgacgctcggaccttgaataccaaagtctgcttatctatctatatcntgcatcaatatattcagcacacgtacgctatccatctgcatatatgtcagtataggtggcgcatgtattgcttttaataattggtgtcatctaagccatgcaagcatgtgtgctttatagctaatcatcttgcactacgctcgtctgtttatttgtatacgtaagtactgtacattgcatgcacatgcactctcatcacctgtaatgttttacttgaaatttattcaaaaataaataaaggc

SEQ ID NO: 5770 - DNA, 449 bp, Zea mays
  Clone ID: LIB3137-039-Q1-K1-F10
ctcccagccgtcgtctgctgcgtactccgcctccagtttggtctgtttcttgcaagttgctcttgcgggggttcccccaactgtcaccatgcagaacgaggagggtaagactgtggacctctatgttcccaggaagtgctcggccacaaacaggatcatcactgccaaggaccatgcctctgtccacatcaacattggccacttggatgcgaatggcctgtatgatggtcacttcacaacatttgctctctctgggtttgtccgtgctcagggcgatgcagacagctccttggacaggctgtggcagaagaagaaggctgatatcaagcagtagattttacatctagtttaccaagaattggacactgccttagctatgttttgaattcatgtcactatatgcaatgttgtgatttcagctggtaccttaaatctgaagatttagtatc

SEQ ID NO: 5771 - DNA, 446 bp, Zea mays
  Clone ID: LIB3137-039-Q1-K1-F11
agctaagcagcagcccgcggtgcccatggacgctggggccttctcgcgcgcctgctccaacgtctcgggcctcttcggctgcctcggcatcgccttcaagttcgccgagatggactacgtcgccaaggttgatgatttggtggaggcctccaagtcaatttcaacattgccttctatggttgagcgagacattcagaccgacactgtcaggaaaccagggagccatacaaggaatctgcttagagtgaagcgcgggattgatatggtcaaagtcctgtttgagcaaattcttgtcacagagggcaactcactaagggatgcggcatcggttgcttatgctcacgtctttgctcctcaccatggatgggcaataaggaaagcagtttctgctggaatgtatgcccttccctcaaagtcccagctgttgaagaaattgaatgaagatg

SEQ ID NO: 5772 - DNA, 445 bp, Zea mays
  Clone ID: LIB3137-039-Q1-K1-F12
cagctttgaccgccgcctcccttcccctccgctactgctcctcctcaccccactcccccgcaggagcggcggcggcggcggcgaggtcgtaccccacatcggcgagcggcggcggcaccgccggaggcaaaggcaagatgttcgggcgcgcgccgaagaagagcgacaacaccaagtactacgagatcctcggggtgcccaagtcggcgtcccaggacgatctcaagaaggcctaccgcaaggctgctatcaagaaccaccccgacaagggcggtgaccccgagaagttcaaggagctcgcacaagcctatgaggttttgagtgatccagagaaacgtgagatttatgatcagtatggtgaagatgcccttaaggaaggaatgggcggtggaggatcccatgttgatccatttgacatcttctcatcattttttggaccctcttt

SEQ ID NO: 5773 - DNA, 446 bp, Zea mays
  Clone ID: LIB3137-039-Q1-K1-F2
ggaagatcagatgatgggggtcctctggtcaccaatcagatatatgtgcacagtaaattgatgattattgatgatcgcatggcattgattggctcatccaacataaatgatagaagcttgctgggatctagggattctgagattggtataattattgaagataaagaggttctcagttctataatggatggaagaccttgggaagctggaaagttctccctcatcctacgactttctctatgggcagaacaccttgttcttcttccaggagaggttagttgcattatggatccttgggatgattcagcgtacaaaaacatctggatggccacggctaaggagaataccgtgatctaccaataaatattctcatgtgttcccaacgatcacatccattctaggtaccaatttcgccaaagttttgctcatcgtaaggagaaaattgg

SEQ ID NO: 5774 - DNA, 365 bp, Zea mays
  Clone ID: LIB3137-039-Q1-K1-F3
tccaggggcacgctgctcccattccgccgcgcccgtagtcgccggtcctcttgctgcttcgtgctcccgcgcaatcagtgaagacctccacgcgcagcgccgcccgtcgactccatggaagctgatccgtcgccgccgtcggcgtgcgcgctgactgagtagctcgtggagaaggtcgtgctgcgcaccccatctgctgacccggcgatcctcgtccatgctgcactcgtctgcgcacggtggcgcatcgtgaatggcccgcggttcacgcgatgctgccgcaaccttcaccgctggtgcgagggtcgcagcccccgatgcttggctttcctcccagcaccggcgccgggattcgcttcgtgctc

SEQ ID NO: 5775 - DNA, 287 bp, Zea mays
  Clone ID: LIB3137-039-Q1-K1-F4
tccaggggcactcttgtcccattccgcctctcccgtagtctccgttcccattgctgcttggtgctcccgcacaatcagagaacacctacacgcgcagcgccgaccgtcgactccatggaagctgatccgtcgccttcgtcgacgtgcgcgctgactgagtagctcgtggagaaggtcgtgctgcgcaccccatctgctgacccggcgatcctcgttcatgctgaactcatatgcgcacggtggcgcatcgtgaatggcccgcggttcacgcgatgctgtcgcaacct

SEQ ID NO: 5776 - DNA, 407 bp, Zea mays
  Clone ID: LIB3137-039-Q1-K1-F5
caacccccgagctcagcttagctccactccatctccaatcgcagtcgtgaccagagcgcgagagctagctagagggccgtgaaaatgccgatcaatatgatcgccctggggagccaccaggaggtgtaccacccgggcgccctcaaggcggcgttcgctgagttcatctacaccctcatcttcgtcttcgccggccagggctccggcatggccttcagcaagctgaccggcggcggcccgacgaccccggcgggcctgatcgcggcggcagtggctcacgcgttcgcgctgttcgtggcggtgtctgtgggcgcgaacatcttctgcgggcacgtgaaccctgccgtgaccttctgcgccttcgtgggcggcaacatcaccctgttccgggggctcctgtactgggt

SEQ ID NO: 5777 - DNA, 441 bp, Zea mays
  Clone ID: LIB3137-039-Q1-K1-F6
cgcttgtgttgtggcgattggtaagctcggcggctcgtggcagcgggaacgtacgaggcaaaggagagtgagggcgaccgcgcggatcgcatcgcagctctgggcggagggggggtcttgcgcggagatgctggcggtgttcgatcgggcggtggcgccgagcccggaggggctgcggcagccgggcgccgcggggggcggcagcgcggcgggcctcgcggaccggttcagagaggcgcgccccgacgcggtcaccgtcaaccttggcgggtccggcgtcctggcgtactcctcgagcaaccagaaccccctccttcccaggttgtttggagcggtggacggcgtattctgcatgttccagggaacaattgcgaacgttgccgtgctgaagcagcagtacgggttgagcaaaggcgctaatgaggtcagcatcatcatcga

SEQ ID NO: 5778 - DNA, 185 bp, Zea mays
  Clone ID: LIB3137-039-Q1-K1-F7
atgatatgatccatggaccatgcatggtgctctggtcgatgccgtacgtgtgtccctgatacaatactatttgtactgatgctagtcatcatatatatcgagctcgccactgcgaagtctgggagataatgcatgtatgcttgacggcgagatctgaggaaaaataatactatatatgtttcgcg

SEQ ID NO: 5779 - DNA, 416 bp, Zea mays
  Clone ID: LIB3137-039-Q1-K1-F8
cattgccacaaatagcaaccaaggcagtaagcctagccaagccaaccgacggcggcgagagtatatatacacacacacctgacgcctctgctgctgctgggatcaacgcggcagcttagcgacgacgactactcttctgtctctgcgttgattaatggacagtaacagatccatggcgactagcggcgtggctccgttcgtggccaagacgtaccgcatggtggatgacccggcgaccgactgcgtggtcgcgtggggcagggacaacaacagcttcgtcgtggccgaccccttcgccttctcgcagacgctcctgcccgcgcacttcaagcactccaacttctccagcttcgtgcgccagctcaacacctacggcttccggaaagtcgatccggaccggtgggagttcgcgcacg

SEQ ID NO: 5780 - DNA, 409 bp, Zea mays
  Clone ID: LIB3137-039-Q1-K1-F9
cgggcgacccacgcgtccgttgaacttatccatacgccagccataccccaggctcattgtgcttgtacttcaaaccgctaaaggggctgttcactggagaccatgttgcaaagtcagaagaatcagacgatctgaacctctttctgatgtacagcaagcagtcagtgagccttcagctggaaagcatcaggaagctactggagctagagttcgagtggcttttacctggacatggctatcgaatcaagtacaaagatgtgcgtgccaagaatgtagccatggagtccctcctagctaattacacaagctaggagcctatgagcatcttacttgagttagtgctcgcaaataagcattccacgaggctgaatgttgatgctatgttttcagagaatagtgtgcatgatgc

SEQ ID NO: 5781 - DNA, 389 bp, Zea mays
  Clone ID: LIB3137-039-Q1-K1-G1
aaaaaggtactgattgatatgagcgtgcatacagcatatgtgaatgtcatccgaggtgctggacatttcatctatattgagaaccagtacttccttggctcttcatttaactgggattcacatagagatgttgaaaatgacaatgcacatgatgtatgagataatctataaggccttgaaagaagtaggactagatggtacatatgagccacaggattacctgaatttcttctgccttggtaaccgagaagctgatgacactacttgcacatctagtggaccattctcagccagttacccacatgaccaagctcggaagaataggagattcatggtgtatgtgcactcgaaaggcatgattgtggatgatgaatatgtgataattggat

SEQ ID NO: 5782 - DNA, 404 bp, Zea mays
  Clone ID: LIB3137-039-Q1-K1-G10
gtctagtggagcttttccttgccctcgagttctagccagtgttcctcacgagatcgaggtagttcctgtgttcaaaccagtgttagctcctcttctcagtcactaggttgttctgcctttgtgctgcgcctgccaaccctattgtctggtgaccacacccaccgaaacctcccacctcgctgtggccaaagcgttccagtgagttgcatgcccgtgtggtcttcgttccgtggtcttcaaaggtcagtgaagcattggtattgctgctgtgtaaaaaaattggataaaacgtctcaaaactttcactgacaggtatatagtttcagtcagctgaaacagaattttatgtgttctcaacccatttttggagcactataactcttgatccatgattctttgaccta

SEQ ID NO: 5783 - DNA, 319 bp, Zea mays
  Clone ID: LIB3137-039-Q1-K1-G11
ctcgtcacgtacgcacacgtacgtacacacacctcgcttgatatcatgcccgtgtgctctcaggtctgaaacaacgctgtccgtctctccggcgcggaggggataaaagtctcggcgtgaactcctggccagtcttttgctgctgccatatccgcgcgcgtgtcgcggcgaggtagcagagtggtgggtggtggccagtgccgcgggttgcgttgggatggcggcgcttgtggcgctgacgctgacgctggcgctgacggcggcagtgacagcgacggcgaaggagtgcaccaaccatccgactgagctgtcgtcgcac

SEQ ID NO: 5784 - DNA, 449 bp, Zea mays
  Clone ID: LIB3137-039-Q1-K1-G12
tggctgcgcaggcacaagtccgcggatggccgccttgagctgcagatacaaccagcctaccaatgtgcgagggcaaacaaggctcacaagccacataacacgcagagatgccctgtcgttcatgtcatccggcgtgctggccgcattcgtgctcgtggtggccagtccggcagaagctagaccttcgagattggagaacaaaaggaaagccctggagaagcttgagaagctccgggagaaggcgttaggcccgaaggagaagagcggagccaccggtaacggtaaggagatgccccctccggcgaacttgctaatccctcctgcggcccgggaggctttcttgtgaaaggcagtctgccgatggacccttccattgtgttaaatggcgaggctagtctgagtttgtacgttgttggagtcttgtataactatgccaacttgaaaatgaa

SEQ ID NO: 5785 - DNA, 406 bp, Zea mays
  Clone ID: LIB3137-039-Q1-K1-G2
caccagagtactgtgtctcactgttctggcaccttgccgccactatcagcaagagacggttctagtgcccaggcttgtggtacaaatgttcagagtcacctgcttccatcatcatttgcaatccatgatggattgtcaaccatcaggagtggtggtgttggcagtggaactgatgcgataaccatagcttcgttgagatatagtgatgcgaatttgctacctgaaaactccatagcaacttccagttgtttgggtgaatcaggaaccttcaattctcttgacgatgtttgtggtgtaaacccatcacaaggtggaacctttgtgaaggtttacaaatcatggtccctcgggagatcgctcgacatcaccagattcggcagctactacgagttgcgtgtcgagctcg

SEQ ID NO: 5786 - DNA, 324 bp, Zea mays
  Clone ID: LIB3137-039-Q1-K1-G3
cgctgtcaaactggctggtgaacccgcgccgcatcccgctcgcgcgcctccacatgaacgccgtgtgctcgcgcctgaggaaatacgggctgaggtacgatgacctgtacgacccctatttcgacctggacatcaaggaggcgctcgggaggctgcctagggaggtggtcgacgcccgcatccatcgcctcaagcgcgccatggacctctccatgaagcatcagtacctccccgaggacctccaggcacagcaggtgccattcagaggatatttgagtgacatgttggctctggtgaaaaaagaaagcgctgagcgtgaagcac

SEQ ID NO: 5787 - DNA, 338 bp, Zea mays
  Clone ID: LIB3137-039-Q1-K1-G4
gcgcccatgtctggcggcaccttcgtcgccgtgcctggctagatgcactacccgtccgcggagtgcgcgtccgcgtttctctgctccccgatcaagaagcacttgttagatcactttcacaaggcacccctgccggtgccggagtaccacccggtgcctgaccacatgaagccgccggtgcccgagtaccacccggtgcctgagcacagcaagccggcgccggagtaccacccttccacgccggaataccacccttccactccagtgtacgggcagccaaagccaactccgatctaccatcctgccgctgagcactgagttcgatcaacaacgaacgc

SEQ ID NO: 5788 - DNA, 309 bp, Zea mays
  Clone ID: LIB3137-039-Q1-K1-G5
cggacgcgtgggcggatctgagacgagacgagtcccctgcccccacctatgctcacccaaccggaacgaacaagttacaatctcatcccaaccccgcctcgaccggatctcgtctgactcggatccgaccgaccaccccgtgccgacgcagatcaaagaagatggcagctgtcgacacattcctcttcacctcggagtctgtgaacgagggacaccctgacaagctctgtgaccaggtctcagatgccgttcttgacgcttggcttgctgaggacccttacaggaaggttggttgtgagacctggacca

SEQ ID NO: 5789 - DNA, 195 bp, Zea mays
  Clone ID: LIB3137-039-Q1-K1-G6
aatccacactgacattgagttgcatttcttgaggtaacaagcgtactctgacagggagacggcgagcgagatggtttatagggcaaccaactctgaagtggctggccgcgtgctcacatccctcttactgaaagaagcgtagcttcagctgattcaattggactgctacagatgcacctatcgcatgctggagta

SEQ ID NO: 5790 - DNA, 225 bp, Zea mays
  Clone ID: LIB3137-039-Q1-K1-G7
atttggcgctgataagactcgagtggaggcggcaagcgaggccaccagtgttcaaaaactgtgaaaattcccacctctccctgcctctctcgcgcgtccgcgcccgcgcccgcggactcgttcaatccgccagcgctcccccgccccccggtggtagcgggctctacagcagcgctcctatccggttcccctgcgctccgcgtcttcatctgtggcggacgacgc

SEQ ID NO: 5791 - DNA, 272 bp, Zea mays
  Clone ID: LIB3137-039-Q1-K1-G9
ggagatgccaacactgacagcacgccaaagacggcaaggaagataaccggcaagaaggtcaacgaccgcaccggcaacgacatcttcaagggagacgctccgccagcttctgcagagaagcatctgagcaccgcgaagctgaaggagatcactggaagcaacatttttgcagatgggaaggaaccaatccgcgagcgtgtgggcggaaaccgcaagcctcctggcggtgagagcagcatcgcgctgatttagcataatccgggactcagtgt

SEQ ID NO: 5792 - DNA, 285 bp, Zea mays
  Clone ID: LIB3137-039-Q1-K1-H1
tgtttacctagttgatgctattgagggtggaaaagaacttattcaagcttgtaagcccggacttgagtctgatcatatcaccaaagttattcatgattgtaaaagggacagtgaggctttgtattttcagtttggcataaaactgcataatgtgatggatacacagattgcttattctctgatagaagagcaggagcaggaaggaaaaaagaagacatctgatgattacaattacatatcttttgtcagccttcttgctgataaacgatactgtggcatactata

SEQ ID NO: 5793 - DNA, 365 bp, Zea mays
  unsure (1)..(365): unsure at all n locations; Clone ID: LIB3137-036-Q1-K1-H11
atgaaaacgataagtgggggggaatattagaatgatgaagcaggcaaattttccaagagtaaaggtattggagtctttggtaatgatgcaaaggatacaaatattcctcctgaagtatggcgatactatttgcttatgaatcgccctgaggcatcagatacactctttacttgggctgatttgcaagccaaattgaacagcgagttgctgaacaacttgngaaacttcattaatcgtgtgctaagttttgttgcaaaaccagctggagctggatatggttctgttgtacccgatgcacctaatgcgggcgcgcacacattgacaaaaacacttgcagaaaaaaccagtaaatgggttgaacaata

SEQ ID NO: 5794 - DNA, 404 bp, Zea mays
  unsure (1)..(404): unsure at all n locations; Clone ID: LIB3137-033-Q1-K1-E10
ctcgcctcttcctctggtctctggactacctagccagagaggagcagccagcgacaaccgcctctcctctcctcccctcttattccgcgcccagcagcgaggcatggtggagaaggcgaggaccatggcgcgcaggctggagatcccccagtggaaggccgacggcctgccgtcgccgacgagcccgctggaccgcgcgtcggcgtcgccccgtgggtggcgccaccgcgacgccgtangaggaggcgtggggctcgggatcctggcggcgctcgaggccgagggcccgccgcagcccgcgccgagggtgtccatcccgcggcgcgcggcgcggctggaggtgtcggagctcgggtgcatcggacgctgcgccaccagcctgtgcggcggcgtcagcccggccc

SEQ ID NO: 5795 - DNA, 212 bp, Zea mays
  Clone ID: LIB3137-033-Q1-K1-E11
gccgaggaggcgtccgttttgctcttcctttcacacacaatctccctatcccaagcaaaccaaaccccaacggccagagtttttataatcttgtccaactcacacaccaaccctttattcaatgtatataagtccaaaacaaccgaacacatgctatacatcccccattgtaaagccaacacccaacctaacaacaacaaccctcttatcca

SEQ ID NO: 5796 - DNA, 242 bp, Zea mays
  Clone ID: LIB3137-033-Q1-K1-E2
ctcaccagcagcaagtagttttggaggcagttacaaaacaaccatgttttgaaactccatttgtagattatttaagttttggaggcatattggagtagaaacaattgaatttttaacgagatccctccctcagttaatgagtgcaagactatgttcaggaacgagactatgttcaggaacgaaatttctctgttgtgtcatcgagtcaagtctaatcttaaggagtaacttttcatttgatt

SEQ ID NO: 5797 - DNA, 324 bp, Zea mays
  Clone ID: LIB3137-033-Q1-K1-E3
atcgtatcatctaacctgttcagcaggctttttctattttcgcagcccggtttgccgaccaggttccagggttccagagtagccaagctaatcccgagtatcgttcgcgcgatggcggaggagcattccaaccctcatccccagcaagctgtggagagggacgttattgtggagcagcaccaacatcctaggagggccccgaaactgaggtacctggacttcgtccaagtggcggtggcgcaagccgcgatgtgcctcgctgggctctacggtctctccaaggaccacgccggccctttccgacccagcgttgacaccgtctag

SEQ ID NO: 5798 - DNA, 345 bp, Zea mays
  unsure (1)..(345): unsure at all n locations; Clone ID: LIB3137-033-Q1-K1-E4
ctcggccnctccgagttcatttggacgcatctactgcttttctggaagacagacctgacggagagactggcagacattatgcgagcgcatcgcatggcaaccaggccggcttttgacgggaagccttggtagctggatgcgcaccagacgatgtccaaggacaagactgttgtcaaggtcgagctggacaggtggggcgaggcagtgacctaccccttcaatggcatacacgtcgtcgacacgcccacgcttgacgtcctcaagcaagaaggtccggagagatagaggctcatcaatgctcaccgcacggttgcggcgctgtcgactgactactacgtggggaac

SEQ ID NO: 5799 - DNA, 450 bp, Zea mays
  Clone ID: LIB3137-033-Q1-K1-E5
ccgaggaacaccaccatcccgaccaagaaggtagcaggtcttctccacgtactccgacaaccagccgggcgtcctgatccaggtgtacgagggtgagcgcgcgaggaccaaggacaacaacctcctcggcaagttcgagctctccggcatccctcctgctccccgcggcgtgccccagatcacggttaccttcgacatcgatgccaacggcatcctcaacgtctctgccgaggacaagacaaccggccagaagaacaagatcacgatcaccaacgacaagggccggcttagcaaggaggagatcgagaagatggtgcaggaggctgagaagtacaaggcagaggacgaggaggtcaaagaagaggtggatgccaagaacgcgctcgagaattatgcctacaacatgaggaacaccatcaaggacgacaagatcgccttcaagcttccggt

SEQ ID NO: 5800 - DNA, 431 bp, Zea mays
  unsure (1)..(431): unsure at all n locations; Clone ID: LIB3137-033-Q1-K1-E6
ggaatccaacagttaaatattattcattttgttcacaaggaattataagacaatgatctgggggatgcattaatctaggtagctatttactttaagtgcattttgactaacgatttgttgctatgttcctgaggatctatggatatttgctttcctgttggtactaaggaagccaacaggaaattttggactactgcctagattaatgctcgagaaaaaaggtgcatgacatcaatattgctattctatttgttctatagaatcttatatggaaacgtgcattacacagtcccagcctactagagactatagctttttattcactacactaaaccagntaacttncttcacacccgtgcacccaaaacatggtattgcaatccttgggatcgagcctcagagctagaggaaagtattcatgtacatggata

SEQ ID NO: 5801 - DNA, 181 bp, Zea mays
  Clone ID: LIB3137-033-Q1-K1-E7
ccgaggaacaacaccattccgattaacatgtatcaccacatagccactgactgcgacacggggactgccttaatgaaccaagagtacaacctcaagcgcgccaagaccaaagacaactatctaccttgctagctcgagcttttctgaatccctactgctccccgcagtccaacccatatca

SEQ ID NO: 5802 - DNA, 366 bp, Zea mays
  unsure (1)..(366): unsure at all n locations; Clone ID: LIB3137-033-Q1-K1-E8
gaccgaaccctaacccggagcctttactaatcttaggaggcaggcaccggcgggcatggggtgctactctctgttggccggcgcacaactggatggcctcaccaacctgcaaccccgccactgctgggacgaccccaacttcctctactacctcaagctcaagtgcgagaactgcggagaggtcaccgccaaatacacctacgttacccttagcgagcaagtctacctgcccaaaggacacagtgccgatcaccttgttcagaagtgcaagctntgtgggagagatggaacaattgtgatgattcctgatcaggggacaccacttactattgagcagagtcagaaagaagagaagacttgtttgat

SEQ ID NO: 5803 - DNA, 320 bp, Zea mays
  Clone ID: LIB3137-033-Q1-K1-F1
gcgggagggcctggggtcagcaaaaatctttatgcccactctcggcctagatctccggcgagccggccgcgcgcggtagccgatccactctacgaccccgacccgatgggtggcgaggtgccggagccgcgccggctgagccgctcgctcaacttcggctgcggcggcgtacccgaggaggcgctgcacctcttgctcgggtacgtggacgacccgcacgaccgggaggcggcctcactcgtgtgcctgcgttggcaccgcatagacgcgctctcgcgcaagcacgttacacgaagcgtttgctacgccgtggagcccgc

SEQ ID NO: 5804 - DNA, 431 bp, Zea mays
  Clone ID: LIB3137-033-Q1-K1-F10
cagaggtgggttggcttctcctcccccaccggttcgtgttcaggttctggttcgtgggcgagagggaagagatggcggcgtcggacgttgagtaccgttgcttcgttggcggcctcgcctgggccaccgacgaccactccctcaacaacgccttcagcacctacggcgaggtcctcgagtcgaagatcatcctggatcgggagacgcagaggtcccgcggcttcggcttcgtcaccttctccacggaggacgcgatgcgcagcgccatcgagggcatgaacggcaaggagctcgacggccgcaacatcaccgttaacgaggcccagtcccgcggcggccgtggaggcggcggtggcggatacggtggcgggcgccgtgatggaggcggctactgcggtggcggtggaggctaccgcggtggtcgtggaggc

SEQ ID NO: 5805 - DNA, 386 bp, Zea mays
  Clone ID: LIB3137-033-Q1-K1-F11
gaaaaccgggccgacgacgcgtacgcagaggtgggttggcttctcctcccttactttttcgtgttcaggttctggttcgtgggcgagagggtagagatggcggcgtccgacgttgagtaccgttgcttcgttggctgcctctcctgggccaccgacgaccactccctcaacaacgccttcatcacctacggcgaggtcctcgagtcgaagatcatcctgtatcgggagacgcagaggtcccgcggcttcagcttcgtcaccttctccactgatgacgcgatgcgcatcgccatcgatggcatgaacggtaaggagctcgacagccgcaacatcaccgtttacgaggcccagtcccgctgcggccgtggaagcggcggtggctgata

SEQ ID NO: 5806 - DNA, 354 bp, Zea mays
  unsure (1)..(354): unsure at all n locations; Clone ID: LIB3137-033-Q1-K1-F2
gnccgcccacgcgtctcggcccgcctggcgccggacctactctcgcctttacgtcccctctctcccccacccggggagcctcgcggccagacgtactcttctctcccgcacccgccgcccaacgtcacgggtncgcccccacgtatccatgccttaggtgccggctagcccctaggcaaggcggtacccctccgcccagaggcgcgcccaggcgagagcggaagagcgttttgttgaacactgaccaggacacccgcctcgctcgcgcctcattcttctccctgtttcccggtacacagctgcgcgaccgaggaccgaatccgtgaaccatgtcgaccagcaagggcagcgcag

SEQ ID NO: 5807 - DNA, 371 bp, Zea mays
  unsure (1)..(371): unsure at all n locations; Clone ID: LIB3137-033-Q1-K1-F3
gccagatccagttcctgggcgtcctccagttttcctccttctcctcctcctcctccattccggccctcgcgcccgtccgtctcctgcccccgtccctggtcggaccacgagagccccggactgcgttcacctctgccttttgttcacccctgcacgcgttctctggcgctcttgtctcgtgcgtgcgacaacaactgggcgaccgccgccgccgccgccgccgccctacgccaggtgcgcaggtcttcgtcggatccttcgccagcgaggcgacgagcacctaccaggtgatgcccccggcttaattgaatgggctctcttctcaccaggactggcgtcctgccatggctncaggccaagatcgttgatcc

SEQ ID NO: 5808 - DNA, 145 bp, Zea mays
  Clone ID: LIB3137-033-Q1-K1-F4
gggagcctcacacaaatgatggcactacagtatcttgtttttgtccccaaacatgaccttgtggacctgtacgctgaacttaaaccagcgtggatcaataacagatcagagatatggccgatcatacatcacggtgcatgctaca

SEQ ID NO: 5809 - DNA, 444 bp, Zea mays
  Clone ID: LIB3137-033-Q1-K1-F5
ggccgcatcccgcccgccgcccaccgcccatcgcccacctgtggcaaccgccggctacatggaccaccaatcgaccactcgccgaaccaagccacccaccccaaacccaatggcgtccaacctcctatccgcggtggcaatcgagaaggagacgccggagagcgagctgcccccgacgttcctccgcgaggacgggcgcggcgccgggtccgtgcgggcgcggttcgagtccatgatacggcgggtgcagggggaggtctgcgccgcgctcgaggaggcagatggcggtggggcgcgcttcgtcgaggacgtctggtcgcgccccggcggcggcggcggcatcagccgggtcctgcaggacggccgcgtcttcgagaaggccggggtcaacgtctccgtcgtctacggggtcatgccacccgacgcctaccgcgccgccaaggg

SEQ ID NO: 5810 - DNA, 401 bp, Zea mays
  Clone ID: LIB3137-033-Q1-K1-F6
ccatcgtccatcgacccacccattctcctttttcgccccgcgcttcgcctgggtgccggcgtccgccgcgccccgtaccgtctcgtccaggaacaggaagagcagtaacccatccacccatccatcggggatcaccaggggtcaggggagcaagatgtcgactgccaccgccccaagattgcccgctcccagatccggggcaagctatcactatcagacgaccgcggctccggcggccaacaccctctccttcgccggccacgcgaggcaggcggcccgcgcgtccgggccacggctgtccagcaggttcgtggcgtccgcggcggccgtgctgcacaaggtgaagctggtcggcccggacgggacggagcacgagttcgaggcccccgacgacacctaca

SEQ ID NO: 5811 - DNA, 445 bp, Zea mays
  Clone ID: LIB3137-033-Q1-K1-F7
ttttacggtacaaagaaataacttattttgttagagcacctgttttccgaccaaacagggggaggggcgcccaacctgaacccgatgtctttaaaatctgcaacggacgactaataacaacacaaagcaccagcacctcaagggccatggcgctcgtacagatgacgtatatccagttacacaggccacgctgctgatacgatatacgagagggccccgacacgaacccaatgggaccatgtcgaattattgctgcatactgaaaaatgctctagttttcctgggcaccttcaccacctgcggcggcggcagcggcttccttctccttcacagcctccgcggtcgtcgtagtcggcgccttctcggcctcggtggcggcctcgctggttccaggggctgtgcttgcggcgctgctgcggtcttcaacggtgacggtcttcgtgac

SEQ ID NO: 5812 - DNA, 416 bp, Zea mays
  Clone ID: LIB3137-033-Q1-K1-F9
gcagcagctagctagctagcatggccgggaaagagcttacgctgctggggttatgggcgagcccgttcgtgctccgggcgcgcatcgcgctcagcctcaaaggcctcacctacgcatactccgaggagaacctcgacgacaagagcgagcttctcctcagctccaaccccgtgctcaagaaggtgcccgtgctcatccaccacggcaagcccgtctgcgagtcccagatcatcgtgcagtacgtcgacgaggctttccccgccgccgcacctaatttccttccatccgacccctacgaccgcgccattgctcgcttctgggcctcctacgtcgacgacaagttctacagcgcgtggatacccgtgttcaggggcaggacggcggaggagatggcggaggcggcgaggcatgccgtc

SEQ ID NO: 5813 - DNA, 356 bp, Zea mays
  Clone ID: LIB3137-033-Q1-K1-G1
ggagaagcgaagcaagcaggcttcgagaacatgactgcatggggagggggaggaccaagcgaaaggggaactagagcaagatgggcggcgcactgctgcttgcgctcctcctcgtctctgctgctgccgcccctcaggtacttggagttggcaatggagacaatcacatgagaatcatccaggaggacatcatcgagacagtcaacaaccatcccagtgctgggtggacagcctcacgtaatccttacttttcaaactataccattgcgcaatttaagcacatacttggagtgaaaccagcaccacagaatgcactaagcaatgttcctgtcaaaacttattcaagatcactggaa

SEQ ID NO: 5814 - DNA, 250 bp, Zea mays
  Clone ID: LIB3137-033-Q1-K1-G10
gatttaaatcggggtcggcggcttctgaaggatcggcaggctccttgccagggtcgccctccagaacgaggatgttcagctcgttcgtcgtcaactaccccttcatcaccacggactacatgacctacatgttcaagtacgacaccggccacggtctctggaagcacatcgacatcacactccaggactcccagaccctttttttttgtgacaagccggtcaccgtctttggcatcatgaaccctgagga

SEQ ID NO: 5815 - DNA, 227 bp, Zea mays
  Clone ID: LIB3137-033-Q1-K1-G11
tctgtcttcacccacatttcactctttcttatcaacaccccacccctttctcgaggaagctcttttaaacagcagcgagcccccccccctctcttataacctccccttctccatctcttcccattataacattaacaccttctacacacaccacacctacttctcctccaatttcttcccacaaaacaccacttctattactttcaaacctaaccactttctttacc

SEQ ID NO: 5816 - DNA, 437 bp, Zea mays
  unsure (1)..(437): unsure at all n locations; Clone ID: LIB3137-033-Q1-K1-G12
cggacgcgtgggcggacaccggtgactcgttcatgccgctcccgacgatgacccactccggcgcctatctcctgccggccccaaccgccccgtccgaccccagcggcgctgccccgaccacctacgcgctcgtcgtcctcaaccagcgtctcccccgcttcgcgccgctcctctggtcccgcgcgcgcctgcgcgtgtgcgccgacggaggcgccaaccgcgtcttcgacggcatgccggagctcctcgcgggcgaggaccccgccgaggtccgcaccaggtacaagccagatgtaattaaaggggacatggactcaataaggccagaagtgaaggagtattattccaaattgtgcacaaacatagttgatgaatcacatgatcaggacacaactgactngcacanatgtgtatcatttatcacaagcaatctccct

SEQ ID NO: 5817 - DNA, 354 bp, Zea mays
  Clone ID: LIB3137-033-Q1-K1-G2
aggtggtgaaattgtgtttggtggaatggattctagcctctacaagggtgatcacacgtttgtcccagtcactcggaagggatactggcagttcaacatgggtgatgtcctggttgatggaaagtccactgggttttgtgctggtggctgtgcagccatcgcagattctggaacttccttgcttgctggccccacagccataattactgaaatcaatgaaaaaattggtgctgctggtgtagtcagccaggagtgcaagactgttgtttctcaatatggacagcagatcctagatcttttgctagctgagacacaaccagcgaagatctgttctcaggttggtctgtgcacttt

SEQ ID NO: 5818 - DNA, 394 bp, Zea mays
  Clone ID: LIB3137-033-Q1-K1-G3
cggacgcgtgggatcctaccccgagggcagttttccgctcttctgggggaacaccgccgacggctgcggggccttctacgacgacatcgacatgctcaaaggctcatgccgcaagtctctcgcgccgatcccgcaaggctgcttctactccaacgccctcggagggctcaagtgctactagaaccccaagcacaaggtcaccgctgtctcccgccgactaaaaagagatctgctgcgccactttcaaggtggtggaagggtatactgtcctgacagcgctgcactgatctatcatcatcaggcggaggcgatgcgatgatgatgcagaactgtgtacatgcgttggtggatggtggtgtaacaatatagctgccacaagtcatgctcatgcaaa

SEQ ID NO: 5819 - DNA, 128 bp, Zea mays
  Clone ID: LIB3137-033-Q1-K1-G4
cgcagcccgcgcagggggatcactcgaggggatgtgggctggtgctcttgttccagcaaagaacaaggcggaccttccaacaactcctgcgtgaagccaagttatgtgcgatagcaagcaccttttat

SEQ ID NO: 5820 - DNA, 297 bp, Zea mays
  Clone ID: LIB3137-033-Q1-K1-G5
gtttgtgttgtaagacagtgacttctgaagtctgatcgtctcggttctttttattaacatgggatatacgttactgcctgttggtagtcgccaaaaaaaaaaaaaaaaaaaaaaaaaaaaaaaaaaaaaaaaaaaaaaaaaggaaaaaaaaaaaaaaaataaaaaaaaaaaatgggggtgcctttagaacaagcacgatattagttgtgccagatagaaaaaaaaaaatgccaatcgttccacatccaaatatatgcaaaaaccctgaaataccaaaatttattcaggaaaaatcac

SEQ ID NO: 5821 - DNA, 253 bp, Zea mays
  Clone ID: LIB3137-033-Q1-K1-G6
acgtggagaggtcatacatctcgaaaggaatgtttactattgcagggatgaccacactatggggatcgttcaaaccggaggtcctctttgcgatccccaatggcaagcaccaggcctatcttaactaggcatggtgacgaccttttgggtacacggacttcctgaattgtcgaagataattgatgcattgcacactataatattgtactgagattaagcaatactcgcgggctatgtctgtcaccactcgatg

SEQ ID NO: 5822 - DNA, 380 bp, Zea mays
  Clone ID: LIB3137-033-Q1-K1-G7
cgacccacgcggccgttaagccctaacaaagactgatttcggcgattatgacaagaagcccccggagggcgacgccgacattttccttaaggccaagggacacgacagcaacgaggagaactatcgcataaagaggttcacccagctgaagaagctgatgaacgcttattgtgaccgacagtctgtggacatgaatgccattgcgttcctgtttgatggccgcatgcttcgcggagagcagacccctgattaactgtatatggaggacggctacgagatcgatgccatacttcaccagaccataggcagctttcctagcaccacttaaaagcatcagtcgcagagcttcgttttgctctccgccctgcgtagtagtaaac

SEQ ID NO: 5823 - DNA, 353 bp, Zea mays
  Clone ID: LIB3137-033-Q1-K1-G8
accaccatcgctcctcctccccgccgccaggtgctaggacgaggcaggagacagaccgacagccggcgatgtcaccgccgacctgtcagacatggagacggggcccgagcaggaggcgccggcggaggtggatcccttggtggaatggtggctgctgttccggctccggtcaagaagaagcggaacctccccaagactccagggtcaagttttcttatctccaagaacaattgggttttattcaagcatgtttgggaggaaaacaaaattttactttctatgggaggatattgaagacatacaaggaatacctcaatcaatatcatcatggagtccatccattataataactc

SEQ ID NO: 5824 - DNA, 404 bp, Zea mays
  Clone ID: LIB3137-033-Q1-K1-G9
ctcagttttacaaagatattaactggtttctacacaagacgagcaaatgtacacgagtagagtggctaaacgtcacaagctggacgcctacacctccagcgacaactccgccatcgtcgccacagattccatcaagaacaccgtgtatgtcaaggcgaaagagtgcacggaagtggtgtccatggaggaattcgccgtgattcttggaaggcatttcacctcgctgtaccctcaggttacagaggccacggtgactatcgtggagcgcccatgggagcgtgtgactgtcgacggaaagcctcattcgcatgggttcaaagttggtgttgagaagcacagcacagaggtcattgtaaaaaaatctggaagcctgcttataaattctggaattcaaggatactcgc

SEQ ID NO: 5825 - DNA, 317 bp, Zea mays
  Clone ID: LIB3137-033-Q1-K1-H1
gcgctccttcggagatgctcgttaaaagaacgcatgcattatgcgcccgcatgcatcagcgtgctacgaggggccggtgacagtccccggcttgcgcgactcgtcgcacggggcacagaccccggcaccctcggcgaggacgcgacgccgctaggccaagcgcaggagcgtgtgctcctcggccccgacttacgacgcgggcccggctgccggcgttggatcccctgcgctggccgcagcagcctggcgcatccagccaccggcgcgcgggcgcggctggccaccggctcgtgggcgcggctggccccggcgcggat

SEQ ID NO: 5826 - DNA, 431 bp, Zea mays
  unsure (1)..(431): unsure at all n locations; Clone ID: LIB3137-033-Q1-K1-H10
gcgtacgnaaagaacttggcctcctctaccgtttcgtttccttacatgcgcgccaggccgcgacgacgtagctttttaaaggcgacacgcccacccaaaatggccgtctcccacgcgccgccgcgccagaacgtgctccccctcctgctcttacacgcgctcgcagcagcgttgcctgccacctgctccgcggccagtatcaagaagtcgcacacggacatcttcagcttcggtgactcgctctacgacaccggcaacctcatcataaaccacacgcccaatgcgctcaccaccagacgccctccctacaggatgaccttcttacacaagcccaccgaccgctgctccaacggccgcctctttgacgacttcctgttcgagcatttcaggctgacactaccaccaccttcgcaagccaaaggcaatgactt

SEQ ID NO: 5827 - DNA, 435 bp, Zea mays
  unsure (1)..(435): unsure at all n locations; Clone ID: LIB3137-033-Q1-K1-H11
cggntttgaaaaaccgggccgacgcacgcgtccgcggacgcgtgggcccagctcgctcgttttatctgatcaggtcgagcacctagtagcgacgtgctctttcatcagtgtagagggccggtaggtgtctgtctctcttggtggctggttgcaacggtcatggcgacgtcgtctcgtcgggtgcccttgctgctgctgtgcctgggcgtgctggtgtcctgctccttcgcggcgggcagcttggaccatgagctggacatcacgtgtggcgacgggcggggcaaggtccttgacaacgggcggctgctgacgctgtcgctggaccgcacgtccggctccgggttccagtcccggcacgagtacctgttctgcaagatcgacatgcagctgcggctggtgccgggcaactccgtcggcacccttaccgcctactac

SEQ ID NO: 5828 - DNA, 432 bp, Zea mays
  Clone ID: LIB3137-033-Q1-K1-H12
cggaattctctgcgatttctctagatctcttctaccccccactagttttggttcctccgttcgttcgagagagcgattctggtggcaatggcgaagagcgagggtccggcgatcgggatcgacctcggcaccacctactcgtgcgtcggcgtgtggcagcacgaccgggtggagatcatcgccaacgaccaggggaaccgcaccacgccgtcctatgtcggcttcaccgacaccgagcggctcatcggcgacgctgccaagaaccaggtcgccatgaaccccaccaacaccgtcttcgatgccaagcggttgatcggcaggaggttctctgacccgtcagtgcagagtgacatgaagctatggccgttcaaggtcatcccagggcctggtgacaaacccatgattgtagtcaactacaagggcgaggagaag

SEQ ID NO: 5829 - DNA, 443 bp, Zea mays
  unsure (1)..(443): unsure at all n locations; Clone ID: LIB3137-033-Q1-K1-H3
gaccacgcgtccgcttcctctctcaagcccataggtgttgtagttcaactcaactagcaatggcttccaagagcgcaatgcgttcccttgtcctcatcatggggctcctgctgctctcgtgcagcggcatcagcagcgcggcgcggctgctggaggaggtggcgcccaaggaggagtacccgcaccctgaagtgccagagctgcccaagcctgagctcccgccgcaccctacggtgccggaactccctaagcctgatgagctaccgccacatccggtcgtgccggagctgccaaagcccgaggtgccagtgcaccccgccgtgccggagctgccgaagcccgagcttnctcctcaccccaccgtgcctgagctgccgaaagcccgaggtgcccgcgcaacccgcctgcccgaactgccaaaccccaactttcttcttaaccca

SEQ ID NO: 5830 - DNA, 296 bp, Zea mays
  Clone ID: LIB3137-033-Q1-K1-H6
atacaggacgatcaaaagttcttcaatttgttgtatactttccatctgcaagggaatgcccattatatgtacaacttcctgatggtgggctttcaaaaaccaatgcatttatatcccctatgtggggaggtgttcttatctggaactcaccggactgttcacttggttccaagaaaactcatggtacccagaagaaaatgtcatctcaggaacttatggaggcactcgaaatatttgttggacaactaaggcagctgtttggtctaaaaccatcttatttctcacaaaatatggac

SEQ ID NO: 5831 - DNA, 357 bp, Zea mays
  Clone ID: LIB3137-033-Q1-K1-H7
tccataactccagggggtcgggcgcggttctatataaccaatgcactatacatgctacttcctaggacaggagtagctacaccaggcacgttgtatatggaattattgaacagcgtatttcttatgcaattaaacttatgagtttcttaacatcaatcacacggctcaactatagcttggctagacaaattatgaagaaaagtacgtagcagatctgtgtgatttatctgacctgccaaatacagctactgtctagctatatatgcatgtttaccattgtttgcatctaacatatacagaggtcttgttaacatgccactttataagttagatagatggaaactgtactaaacttat

SEQ ID NO: 5832 - DNA, 425 bp, Zea mays
  Clone ID: LIB3137-033-Q1-K1-H9
caaagaacttggccccgcctcccgtctcttaccgcacatgcgcgtcgggccgcgtcgacggagctgcttgccgccgacacccgcagccgcaatggccgtcgcccacgcgccgccgcgccggggcgtgctccccctcctgctcgtcgccgcgctcgtggcggcgttgccggccacctgcgccgcggccaggagcaagaagtcgtacacggccatcttcagcttcggggactcgctctccgacgccggcaacctcatcgtcaacggcacgcccaaggcgctcaccaccgcgcgccctccctacgggatgaccttcttccgcaagcccaccggccgctgctccaacggccgcctcgtcgtcgacttcctggccgagcatttcgggctgccactgccgccaccgtcgcatgccaagggcaaggacttca

SEQ ID NO: 5833 - DNA, 429 bp, Zea mays
  unsure (1)..(429): unsure at all n locations; Clone ID: LIB3137-035-Q1-K1-A1
cactcatcagaaacccccgcaccctctaactaaaccctcaccggccgccacccatggcgagggccggcgccgccgccgccgccgccggtcgctgcctcctcctctcccgcccgtcccccctccggctccgcctcctccacgctgccctctccaccgccgcccccaccctcggccccacctccactccggctccccctccgcggcacgagctcctcctcgagcgcctccgcctccgccacctaaaggacgcctcctcccccggagccccgaggcctacctcgaggagcgcggagcggagctcgcagcaggggaaggggaagagggtcgaggccgcggagagcttcnaggagctcggtctcggggaggaggtgatgtccgcgctgggggagatgggcatctccaagcccacggagatccaatgcgttggcg

SEQ ID NO: 5834 - DNA, 267 bp, Zea mays
  Clone ID: LIB3137-035-Q1-K1-A10
ccctcccaatgataccagcgtatgaattcttaactcgattctctaatgccatgccagcagaaccataatccattttaccgctcatcagtgtacatctctctctctgtaaaaaccttgggctgactcagctgattgcacaagcaaaacaagacatttatcttacatcttctaatagcgaatcagatcaaaactgcccacatgcttaacatgcctgcactcttaatgccactgcttacccaaccccaatgcgcccatctacttcagctg

SEQ ID NO: 5835 - DNA, 394 bp, Zea mays
  unsure (1)..(394): unsure at all n locations; Clone ID: LIB3137-035-Q1-K1-A11
cgtccgggtgaggcanctccgaccgttcacacactgcctatactccgcagggacccaacgcagcggtcagacaaatgcagcggcggccgggcggcagcggcaacggcgtaactcccaagtcacctccgcctcgggctccaaaaatccccacccgacctcgagactgagcggaccgacggtgatgtcgtcgtcggtgcccccgccaccgccccagcaggagctggagtcgccctccgccggcggcgacaaggtcctggccgcagcgcagcacatcgtcaagtccctcgccacctccaagaacgccgctgacgacatgatccgcatactctccggcttcgacaaccgcctctcctccatcaccaacgaccaccttttccccttccccgaccttacc

SEQ ID NO: 5836 - DNA, 214 bp, Zea mays
  unsure (1)..(214): unsure at all n locations; Clone ID: LIB3137-035-Q1-K1-A12
ccacctnncctaccacctcaacaacaactcatggtcctacgccaccaacttcgtgcccggcaagtgagggggtcggatgcgccaccgtccaccgacaccggccaccgctgtctatatctaggagttctgatgcacgttagcgctcactgatttcagtttgtaccatgatgtaaattacttaccgtaccactgttcaatcggcatggaataattg

SEQ ID NO: 5837 - DNA, 317 bp, Zea mays
  Clone ID: LIB3137-035-Q1-K1-A2
accgcgaccgcgactggctccgcagaacccggaaccgggacgacggcacagctcccgccggccctgtcgctcggcgtcggcaggccaccagcgaggcccgaccacgccgcgctgcctccgagcagcctgctgtccctgcagctgccgcggtgctcggcgggaattggccgcacggcgccgagcctggccctggcgccgccgaaacacagccacccttcttcgtcgctgacggcggcaaaggctggtggcctggcgccggacctggagctgaagatctcgaccgcccggcagagcgagcaccagcagcaggtccagat

SEQ ID NO: 5838 - DNA, 403 bp, Zea mays
  Clone ID: LIB3137-035-Q1-K1-A3
gggccgacgcacgcgtccggcctgagggtgttccagaaagtgcttccgttcaggcaattcttgactggcaaaggagaggaatggatatgatgtacactgacatcacacaagctctcgaagccaatggaatccaaacaaaccccaaggactatctcactttcttctgcttacgtaaccgtgaggtgaatcaggacggagaatatcaacctgaggaacacccagaacctggcactgattacatccgggctcaagaggctaggaggtttatgatctatgttcatgccaaaatgatgatagtggacgacgaatacatcatcattgggtccgccaacatcaaccagaggtccatggacggtgccagggactccgagataaccatgggcgcgtaccagccgtaccacct

SEQ ID NO: 5839 - DNA, 317 bp, Zea mays
  Clone ID: LIB3137-035-Q1-K1-A4
cacggttcaagcacatcgacacacacgagctcagaagataaacgggcacacgcaactgatgaaggcaaccaatattcaccgtcggcaaggcaatgggcgacctcatccctgggctgccggatgaagtggccagggagtgcctcgtccgggtgggcttcgaccagctgccggtggtgcgccgcatctcgcgccagtggaagtcggaggtggagtcgccggactaccaccgccagcgccgggcggaggggctggcgcgcccggtgctcgcgctggtccaggcgcagccgacagcgccgccggatgacgacgacgacgac

SEQ ID NO: 5840 - DNA, 381 bp, Zea mays
  Clone ID: LIB3137-035-Q1-K1-A5
agcacactcagctatccagcttaagagatctagacgcaggagtcatggccgccgtcagcgccgccgtggtgaccaccatcgttgcccgcgccgcgatcgccaggcccaatgctctagggctgcctgcgctgagggcgaggagcgagagggtgcggtgcatctacgccaaggacgcggccccagtcagcaccaagggcgcaggcgcgtcgctgctcgccgcagcgggcgcggtgaccgcgtcggcggggcccgcgctggcgctcgtggacgagcgcatgttcacggagggcaccgggctgagcctcgggctcagcaacaacctgctggggtggatcctcctgggggtcttcggcctcatctggtccctctacaccatctaca

SEQ ID NO: 5841 - DNA, 312 bp, Zea mays
  Clone ID: LIB3137-035-Q1-K1-A6
gcgtgtggtccgggtccgcctttcgcctttttgacgggcggatcgtgatgcgctacacggggtccacggcggagtcggcgcaggtgcagaacctcgcggagccggccgacccgtccgacccgctgctgctggagtgggtcaagtcggacgccaacccggtgctggtgccgccgccgggaatcgggctgacggacttccgcgacccgacgacggcgtggcgggcggcgcccaacgacggcgcggcggcgtcgtggcgggtcgccatcgggtccaaggaccgggaccacgcggggctggcgctggtgtaccgca

SEQ ID NO: 5842 - DNA, 396 bp, Zea mays
  Clone ID: LIB3137-035-Q1-K1-A7
gacgcacgcgtccgggccgatgccgcccgcggtttacgggacctttagggagtccccgattggggggggttcagagttctaccacttgcagcacgccgaggacttgctggaccgcggcttcagctccaactcgctcatcgaggacatctccgcgagcctggaggcggcactatccgggcgcgccaagaagccgcgccggtggcgcaaggcgtggagcctgtgggggctcatccaccggcgcgccgcggggcgcaagagcggcggggggccgtcggacatcaccgaccgttccttctccgagccgtggccggacctgcgcgtccgcggagccaaccctaagatgcagcggtgcaacagcagcaacctgagcgcgcgcaactcgttcagcaacaacag

SEQ ID NO: 5843 - DNA, 323 bp, Zea mays
  Clone ID: LIB3137-035-Q1-K1-A8
ccctccggccgcttccccctctctgccctttctttccccagatccgaagccgttaaaacgggcggatctcacctgggggcgcgtccgcggcatctgggcaagcgagtggtagagccagcagccatgagatggtatgcatcggtagcctcctgagggcgctggtcctgagtgcggcggcgtctgcgggcaggcgccgggggcccatgatcctgtgtggccacgaggcggatgtacgcgtgactcctcggcacggacacggctggcgcggattccgggcagtcacgggaaggatgatgctggactcctctgactgtgcctctgct

SEQ ID NO: 5844 - DNA, 385 bp, Zea mays
  Clone ID: LIB3137-035-Q1-K1-B1
cgggctcgaccacacgcgtccgatcgcgtactatccactacacctagccgatttgatcgctactagacaccagccgatcccgcgtacgttgacaccaacgaccactctaaccgcccgctgtcatggcgtacggcgaccgcgttaccaccttcgaggactcacagaaggagagcgagtaccgctatgtccgcaaggtctctggacctgtggctgttgctgatggaatgggtggtgctgccatatatgaacttgtacgctgcgggcatgataacctcatcggggaaattatccgtctcgagggcgattcagctacaatccaagtttatgaggaaacaactggactgatggttaatgaccctgttttgagaacgagaaagcctctatc

SEQ ID NO: 5845 - DNA, 241 bp, Zea mays
  unsure (1)..(241): unsure at all n locations; Clone ID: LIB3137-035-Q1-K1-B11
cacttttcctccgggcaatataggccagctagctctatataccacccgggctccntttaacagggaggagagacccaatgatcctagcaaaacgcacacagcatcaagccaaccagccagctaaaccgaacaatatctacatatatactatcaaccaacaataaagaaaccaaaaaaaaaggcaagcccaccagcgcctgcaaacacaggatctaataaggaatgaaagaaggaagtaacg

SEQ ID NO: 5846 - DNA, 229 bp, Zea mays
  Clone ID: LIB3137-035-Q1-K1-B2
cacatacacaagcacaagcgcactctagcaatggctactgagggtgtccgccctagcgaggccgagctactaaaggcacaagccgacatatggcagctcaaactatcctacctcacgcccctgtcactgaggtgcgccgcggagcttggcatacctactgcgatctaccgacatggcggggctgcctcaaccgctgagctggtcacggcgctgtctctcccctccacta

SEQ ID NO: 5847 - DNA, 452 bp, Zea mays
  Clone ID: LIB3137-035-Q1-K1-B3
gatctttcccccgtcctccctcgccttcgtcttcgccgtcaggagatttccaccaccacggccgaaccgccccgaccctcctcccctctcgcgctatggcccagactgttgtgctcaaggttggcatgtcctgtgagggctgtgttggagctgtcaagcgggtcctgggcaagatggaaggcgtcgagtcctacgacgtagacatcatggaacagaaggtcaccgtgaagggcaatgtgacacctgacgccgtcctgcaaactgtttccaagactggcaagaagacttcgttctgggaggctgaggccgtgacaagtgaatccgccacacctgccggcgccaccgcctgacaggttcgatgatctggaagtgcccagcaaaaaaatgtgaatgcatttagcttggatctgttacaaataattgcaaactgctagctcggtctgtacatttta

SEQ ID NO: 5848 - DNA, 367 bp, Zea mays
  unsure (1)..(367): unsure at all n locations; Clone ID: LIB3137-035-Q1-K1-B4
atgggctattgcggtgggacatacgcggattctggtgctggaagcctcgccagacctagggctnccgactgccgagctgggtgcggacgccaggagtcnacnggaagacaagggtgaggaattatgagtgaaacagggcacactgtacaagtcactaacctctcgagcagagtatctgaaagtgatcttcatgagttcttttcgttctctggtcctattgagcatatagaacttatcagatcagaaggatacggtgccactgcttatgtgacattcaaggaacgctttgccttggaaactgcagtattgctcagtggggctactattgtggatcagccagtatgcataacctattgggacaacctga

SEQ ID NO: 5849 - DNA, 457 bp, Zea mays
  unsure (1)..(457): unsure at all n locations; Clone ID: LIB3137-035-Q1-K1-B5
acgcgtccgcgctttgttaacaaagaattttctcatagtttccgccgccgccgccgccgcggctcatcgggccgagaggtgacgggaccgaggaactcgccgagttctaagatagagaatcgcttttcacagcctggggtctgctgcgtagggtggtgttgaaggggagaagtttaagatctgttccacagatcacgcgtgcgcgctcgcgaatcgggggttccacacatagcttcgtcgttttgaatttgatgtactaatggagtctaagggtggcaagaagtctagcagtagtcgttccatgatgtatgaagctccccttggctacagcattgaggacgttcgacctgccggaggcgcgaagaagttccagtctgctgcttactccaactgcgcaaagaagccatcctgatatcccttntggcttcctcgttctagtagtttaagatttcttttc

SEQ ID NO: 5850 - DNA, 343 bp, Zea mays
  Clone ID: LIB3137-035-Q1-K1-B6
gcgtccagtcaagatcttccctggtgtgtttcatggtttgagcgtgagatacaaccacgacgactcggctgccgtgaagagcgctcatgaagcctttgcggacatgctcgactggttcaacaagaatctgaaataaactctgcaattgcatcctgccttgtaataatgcgtgttccagtgccctgggatcgaatctgctgtgtttgggcttttgcatggtcaggctatatatagttgtcatggacttagggttgtgttagtagattgggtgcgctgaatctatcataaaaacgaggtcaactaggacaatgatgatgtggacaaacgtatttaatgtattctg

SEQ ID NO: 5851 - DNA, 412 bp, Zea mays
  Clone ID: LIB3137-035-Q1-K1-B7
cccaggcaggcaggtcggcgttgagggcaggaagaccgaagaccgacccgggcgggggggcgggacgggaacgggacaggaccccaaaatctcagatccttcctgcccgcccgcccgtgcccgtcgacgcgtcgttcttgccggccgcgccccacctccgccctcttctcctccaggggaatcggatacgccacaggctgcgcgatggtgctgtgggtcttcggctacggctccctcatctggaaccccggcttcgacttcgacgacaaaatcctcggcttcatcaagggctacaagcgcacctttaatctcgcttgcattgaccacagaggcacaccggagcatccggcgaggacctgcacgcttgaaaccgacgacgaggccatatgctggggaaatgcctattgtgtca

SEQ ID NO: 5852 - DNA, 352 bp, Zea mays
  Clone ID: LIB3137-035-Q1-K1-B8
aaaaccgcggccgacgcacgcgtccgcaatctcctcgatttggttgttcacgagcttattgagctgttgctcctgcggcctgagagcctctggctgctgcgcaacagtttgttcatcctcatccccaatctcatgtgtccaatacacagcaaaagatgcctccttattgaaactggttggcatctgcaacagacgcttcctgttagttccagaggcactgccaaggatctcccccttcatgaggtcatatatgcaggccctgaagttgtccatgctcttatgatcctgagagtcgaggcttatgaagatcagaatttcccagcaccggaggaactgtttcttctttatcttc

SEQ ID NO: 5853 - DNA, 321 bp, Zea mays
  unsure (1)..(321): unsure at all n locations; Clone ID: LIB3137-035-Q1-K1-B9
acacagggcagcatggatacactgatttctggtgggcccgctcctngcgctgccatcgcggccttctaccaccagtacatcctccgggcgggcgccatcaaggctctcggctccttcaggagcaacgcgtgatgagcagagctaaagaaaggccttcgctggactgcgtgctggagcaacggcgatcgatcgatctagcgtggggagaggaggataggcgggcgggcgcgcgagggaggagaataagtttgtgggatttgggtctcgttaattaccccggccctgtaatcatcaatcaccatgtgtgcagtgtgcgtataa

SEQ ID NO: 5854 - DNA, 290 bp, Zea mays
  Clone ID: LIB3137-035-Q1-K1-C1
gttattagcgaaaaagtttacatttgggccttgggttaataaccctttccataacacaaagtttagtgtgtacaaataattactcaactaaacaacctctttatatcatcataacattataattatctctatttagctcccaagaaaaatgtatctactctatcttctaatacttctatatgcattccttaccactatttctattcacttcataaagtattagtatacactcaactaattaataaataatatatacataacatgaaatctcttaatattttcaacaaata

SEQ ID NO: 5855 - DNA, 465 bp, Zea mays
  Clone ID: LIB3137-035-Q1-K1-C11
ctccggaaatggtttctcgtggttttaaggatcagatgtactacatcttgcagcttctcccatccaagagtgaggttttagtcggctctggtgccatgccccctgaggcccttgagattacccgcaagttcatgaacaagccagtgagaatcctcgtgaagagagatgagctgacccttgagggtatcaagcagttctatgtgaatgtggataaggaagactggaagctggacacactgtgtgacctgtacgagacccttgccatcacccagagtgtcatctttgtcaacacccgccgcaaggtggactggctcactgacaagatgaggagcagggaccacactgtttctgccactcatggtgacatggaccagaacactagagacatcatcatgagggaattccggtctggctcctcccgtgtgctcatcaccaccgacctgcttgctcgtggtattgatgttc

SEQ ID NO: 5856 - DNA, 304 bp, Zea mays
  Clone ID: LIB3137-035-Q1-K1-C2
tgcaggcttcttgaagtccttcaacaaggatgagtttgacaaggagattgaggacaagaagacagagctggagcccaaggtcgtggaggcctacgaagcatctcctcctgaggtcaaggctctgttcaaggataagaagccagtcaaggtcagcaagaagaactcggctgcagtcaccaagttcctcgatgagctggctaagattgacttccctggagccaaggtggtgagcgaggcggtggccaagtccggcacctcgcccctgcttccggcgatcaccttcatcttggacaaggtcgcaccg

SEQ ID NO: 5857 - DNA, 405 bp, Zea mays
  Clone ID: LIB3137-035-Q1-K1-C3
gtgtttttgaactgatatcatcatcttggctgttttcttcagtgttttcttggtttgtcggtgttctatctgatatgaagatcaaacttgttttatctggatgcaaacaaataattggtgttttgagttgatatcttgcctcgagatcatgtttgtttagttgtcttggatattgttactttatcttcataatttaccgctgtcatttgtccttctcatattgatgttaggtagttccagttggttttgattccttttgtttccatccaaacattgtctcctaacttctcatatggttttggtaggatattctggacttggcaaaatatgcatctgtacctgtcataaatggtctcactgactataaccatccatgccaaataatggctgatgcacttactatgc

SEQ ID NO: 5858 - DNA, 347 bp, Zea mays
  Clone ID: LIB3137-035-Q1-K1-C4
ctgagctcaaaggactggctatagtcaactgcgcaagcattcgtatgttaaacaattcgggtgcgaggtcagaggcctctgaggagcagaaaccacctagcggggatgatgatgtataccatttcataaactacgttccagtggatggtgtcctgtacgagctcgatgggctaaaggaaggaccaataagcctagggaaatgcccaggtggtgttggtgatgcagggtggtggcttaggctagcgcagcctgtgatcaaagagcacatccaacctgttctctcagaacgagataagattcagcgtgatggcgatcttgagaaccggaaggagatgttcacggtggag

SEQ ID NO: 5859 - DNA, 344 bp, Zea mays
  Clone ID: LIB3137-035-Q1-K1-C7
ggaaaaccgcggccgacgcacgcgtccggcgagagactggcagggtagtttaaaagtttatctaaccctagcatccgcggcgctaggggtcgggggttgcgagggccgcggctgttacacaacggaggacggtgaagtggttcaacgacaccaaggtcttcggcttcatctgccccgaggacggcagcaaacatctcttcgtgcaccagtcgtacatcaagtcggacggcttccactcgctcgcggacggcgatgatgtcgagttttccatctaccacggtgactacggccgcactaaggccgtcgacctgaccatccccgacggatcctttctcaggggctgc

SEQ ID NO: 5860 - DNA, 329 bp, Zea mays
  Clone ID: LIB3137-035-Q1-K1-C8
ccgacgcacgcgtccgtataattgcttgtgaatataattacaatcttttgataacaaagatacaacaggtccccaatacatcgttacagcgtgcacaaatcaaacaacacagacacccacccaataataccatattatcaactcttaacttgatatatcaatgccaggacagcacaaaccaatagctactgctcctgttctcaaaggatgtctcacactatgcactgtgtctacattgaatctgaacttcacttacgcaaaaccaaacaagaatcttgcagcttctcccagcagatcacatcaaaactacccacatgcttaacattcat

SEQ ID NO: 5861 - DNA, 429 bp, Zea mays
  Clone ID: LIB3137-035-Q1-K1-D1
cactgaggtgcgccgtggagcttggcatccctacggcgatctaccgccatggcggtgctgcctcagccgctgagctggtcacggcgctgtctctcccctccactaagctgccgttcctccgccgcctgctgcggctcctcgccgcgtcgggcgtgttcaccgtcgacaagcagagctcggaggaggagcggtaccgcatcagccccgtgtcctacctcctggtggacggcatccctcacgaggaccacatgaaccacaccgctctggtgctcacctgcacctcgacgcgctacatcgaggcggcgatagggctggcggagtggttcaagagggacgtggtcacgtcaccgttcgaggagctgcacggggcgactctgttccacgagagcatggggagccttgacgcatatttccacgacatggcgagcg

SEQ ID NO: 5862 - DNA, 241 bp, Zea mays
  Clone ID: LIB3137-035-Q1-K1-D10
aaaaccacaaaaaaaaaaaaaaaaaaaaaaaaaaaacaaaaaaaaaaaaaaaaaaaaaaaaaaaaaaaaaaaaaaaaaaaaaaaaaaaaaaaaaaaaaaaaaaaaaaaaaaaaaaaaaaaaaaaaaaaaaaaaaaaaaaaaaaaaaaaaaaaaaaaaaaaaaaaaaaaaaaaaaaaaaaaaaataaaaaaaaaaaaaaaaaaaaaaaaaaaaaaaaaaaaaaaaaaacaaaaaaaaaaaaa

SEQ ID NO: 5863 - DNA, 295 bp, Zea mays
  unsure (1)..(295): unsure at all n locations; Clone ID: LIB3137-035-Q1-K1-D11
cgccctagcgacgccgggctacttaaaacacgaagccgagatattacaactcancctctcctacctcacgcccctgtcactgaggtgcgccgtggagcttggcatccccacggcgatctaccgccatgtcggtgctgcctcagccgctgagctggtcacggcgctgtctctcccctccactaagctgccgatcctccgccgcctgctgcggctcctcaccgcgtcaggcgtgttcaccgtctacaagcagagcacttatgatgagcggtaccgcatcagccccgtttcctacctc

SEQ ID NO: 5864 - DNA, 328 bp, Zea mays
  Clone ID: LIB3137-035-Q1-K1-D2
ccgccgtcggcttctgccaccgccgcggcgtcgcgccccgggacctcaagcccgagaacgtgctgctggacgaggcggggcggctcaaggtcaccgacttcgggctggccgcgctgcccgagcagctgcgccacgacggcctgctccacacgcagtgcggcacccccgcgtacgtcgcgcccgaggtgctcaggaagcgcggctacgacggcgcccgcgccgacctctggtcctgcggcgtcgtgctctacgtcctcctctgcggcttcctcccgttccagcacgacaactacgtcaagttgtaccagaagatcttcaaggccgacta

SEQ ID NO: 5865 - DNA, 290 bp, Zea mays
  Clone ID: LIB3137-035-Q1-K1-D3
aaaaccggcccgacgcacgcgtccgcaaggaaatactcacaattaactacacatcctaacgcatttctaccaccaacccgatactgcgctaatggaaaaagctggacagggttcatgttctcccctccactaatctggcgctactccaacgtctgctgcaattcctcgtcatatatgtcttgttcaccacccaaaagtcacatctcggaggaggagctaaaaacgcatcagcactcaaaaactacctgctgttcgacagtatatctcacgaggaccacatgaaccacacc

SEQ ID NO: 5866 - DNA, 391 bp, Zea mays
  unsure (1)..(391): unsure at all n locations; Clone ID: LIB3137-035-Q1-K1-D4
ttcgcgcttccgcgctgagggttccaccattatgcagcatccattgcgcaaggcagctggaatcgagaatccacttccagtcggccttgcagatctctacaagggtgtgacaaaaaagatgaaaatctcaagagagactattgatgccagcgggagaatctcaaacacagaggatattctgacaatacaagtaaaggctggttggaagaagggaacaaggattacatttcctgacaagggaaatgaagctccaaatatgaaacctgctgatattgttttcatcattgatgagaagccccatgatgttttcactcgggaggggaatgatcttgtcgtgactgagaagatcntcactgtggaagcactgactggctataccgcacgtgtcact

SEQ ID NO: 5867 - DNA, 385 bp, Zea mays
  Clone ID: LIB3137-035-Q1-K1-D7
gaaaacccgggccgacgcacgcgtccggagcgagccaccgccgttaattttcccgttatctatcccttaaccctagccggcgccgggggcgcttaaacccgggctgcggaaactacagcaacccccgccggcgatggtgaaggagaataagcggaagcagcctcctgccgacgcggcgccgcctccgggcgacgagggtgaggggaggagcgggcggaagggcaagaaggccaggaaggagaaggcggaggcgatactgccgtcgcagatcaagaacaaggacaagcgccgcgaggtgcacgccaagcttaagcgagagaagaaggcccagaagcgcgcgctcgcccgcgagcgcggccaggccgcccgtcgcgccgaagagctc

SEQ ID NO: 5868 - DNA, 368 bp, Zea mays
  Clone ID: LIB3137-035-Q1-K1-D8
cgcgtccggaagaataactcatcgtcgtttctgcatttcttctctgtagcgtgagatgtggaaataagtaaagtcaccttgggatgaacaacccattggacggatcgagctggtactggcacactcgatccaatattttagctagctagcaagcaaagcaagccttgagcttgagcggcggctagcgcaatgggaggcgtggcgtcggagctggtaggagccaccatggagaggcagagcaagaagaggaagcagttccacacggtggagctcaagatcatgatggactgcgacggctgcgagctcaaggtcaggaacacccttgcccgcatgagaggtgtggagtccgtggagatcaaccggaagca

SEQ ID NO: 5869 - DNA, 168 bp, Zea mays
  Clone ID: LIB3137-035-Q1-K1-E1
ccagacacacatacaacttataaaaaaaatttttgaactatatacacagctccttttacagagataacgggtttgaatactctgcaattgatactcaaacttctaaattgtaggcgcataatttcatttaattaatcctcacttacacacaattatcttgaaaataca

SEQ ID NO: 5870 - DNA, 294 bp, Zea mays
  Clone ID: LIB3137-035-Q1-K1-E10
gcactcttgcactgaacacttgattgccgcggttaataaccccctagctgaatcacaatggatcggagcattttccatgggtccagtggccaccacacgacggtgactacgacgaacgcgggcgctcctgtgtggaacgacaacgaggcgctgactgtggggcctcgcggtcccatcctgctggaggactaccacctgatcgagaaggtggcgcacttcgcgcgcgagcacatcccggagcgcttggtgcacgcacacagtgccttcaccaaagactacttcaagtgcacccac

SEQ ID NO: 5871 - DNA, 344 bp, Zea mays
  unsure (1)..(344): unsure at all n locations; Clone ID: LIB3137-035-Q1-K1-E11
cgtacgattttaatccgcttttcgtatggcggngccatacatctaccgngcggagggggaagagggacgggcctttataggaaggcctgcggccaccatagattccgacctctggatctcgcgtcttcacggccgccaagcggcagtttgcgctgcagcgcgcgcagcgccagcacgccgccccggcatcccatcacgatcgatttgggtatgatgatatcgaacctgaggatgatttgcactcagacttcccatgcccttactgtaatgaagatcatgatgttgcttctctctgcgcccatttggagactaacaccctttcagtctaaaattgtgaaacatca

SEQ ID NO: 5872 - DNA, 459 bp, Zea mays
  unsure (1)..(459): unsure at all n locations; Clone ID: LIB3137-035-Q1-K1-E12
gagagtgagagagagagagtgggatcgagagctcgacgcacgcaatggcaagcggagggaangggctcaactcgactggggagttcttccggcggaaggacgagtggaggaggcaccctatggcggggaaccagctgcgccacgccacacccgggctcggcatcgccatcgtcgccttcgggatctacctcgtcggcgaggccgcctacaaccgcctctaccgcccctccggcgacaaccaccactagattgccggcaggatccgtgactcggtcaagaagctggagccaactttaccaagcacttgtgctgttgatgtttttacagttttgagctcataaggtcagccgtgaccatattgtaatttgtgaccaggtagacttgcccactggtccgtacaactattgtcttgggaccctgtgtaaatccttgctatatggatctgacagtgcttatgta

SEQ ID NO: 5873 - DNA, 440 bp, Zea mays
  Clone ID: LIB3137-035-Q1-K1-E3
gcctccggttccagagcggagaggattgcgtcgcctgattggcgattgctgatagtctgcggccagtgccctcgcccgatttgctccgccgagaacaacatggggagaagctataatcacagtccatcgccaccaagaggctacaggagaagaactcgcagcccaagtcctcgtggtcggtatggaggccgtgatactgatagggacctcccaactagtcttttggtgaggaatcttcgtcgggattgtaggcctgatgaccttcgtagaccatttggaaaatttggccccgttaaagacatatatctgccaaaggattactacactcgacgcaagtcttaagagtactattgaagaaaaggaagaaatagaggtttaaagagatatgcaagttatgaagaagttcaagtgtatttctaacactgatgactgcaggggac

SEQ ID NO: 5874 - DNA, 349 bp, Zea mays
  Clone ID: LIB3137-035-Q1-K1-E4
cgggccgaccgcacgcgtccgatttcctcgtggctcgttcgcgcgctgcttgccatacacgctccaggctctcgtttccgggtaggcgctggtacaagcggaagcagcagtagcgtgaggcatccccatgccgggggcaatctcttcctcgtcgtcggcttttctcctccccgtcgcgtcctcctcgccgcggcgcaggcggggcagtgtgggtgctgctctgcgctcgtacggctacagcggcgcggagctgccgttgcattgagcgcagcggggcccgcctcatgatggagcggcgtcagtacgcgccgcatcggcaccggacgggggcgaaagcgaggaggcagcg

SEQ ID NO: 5875 - DNA, 377 bp, Zea mays
  Clone ID: LIB3137-035-Q1-K1-E5
cggacgcgtgggtggaaaccttatccgccttatctcacgatccactcgagcggcaagccgagggaaggtgaggagcgatggcgcgcggcgtggtgtcggcgaagggcggcgcggtcgcgggcaagaagaaggggtcggtttccttcacgatcgactgcaccaagccagtggaggacaagatcatggaggtcgcctcgctcgagaagtttctgcaggagcgcatcaaggtcgccggcggcaaggctggcaacctcggcgactccgtcaccatctctcgcgagaagaccaaggtcaccgtcacctctgacggacccttctccaagaggtacctgaagtacttgaccaagaagtacttgaagagcacaacgtgcgggatt

SEQ ID NO: 5876 - DNA, 339 bp, Zea mays
  Clone ID: LIB3137-035-Q1-K1-E6
cggacgcttgggtgatgatgttcaggaacttcagtacaatgtgcctcaagggaagggtcatcgacttagaggtgggccacagatgattcagctgagcttggatggcaagaggatatacgtgacaaactcacttttcagccgatgggatgagcagtttttcggtgatgatcttgtcaagaagggctcccacatgttgcagatcgatgtcgacaccgagaaaggaggcctggctgtcaaccccaacttcttcgtcgattttggcaccgagcctgatggtcctgccctggcccacgagatgagatatcctggtggggactgcacctctgatatatggatctg

SEQ ID NO: 5877 - DNA, 172 bp, Zea mays
  Clone ID: LIB3137-035-Q1-K1-E7
tacttcgtgtttcgtataataataacgagaaaacgaccaatgcggatttatctggatgtcatgtattgaccaccgtcattgctggcttggatttcaaacccaccatgcatactgatgcttgaagaccgaaccttctatcacacttgcccatataatatgcattggaacttgt

SEQ ID NO: 5878 - DNA, 368 bp, Zea mays
  Clone ID: LIB3137-035-Q1-K1-F1
ggaggagaagatcaaagcagaggtccatattagcctggtaggggcctttgtgctaaaccagcatcagccggcggagcatgatgagtcgagcagccagtgaactgacgtaactgtgtgagctgtagtagtaacgtacttcgtgttacgtagaagaataaggagaaaacgaccaatccggttttatctggatgtcatgtatggtcgacggtcgttgctggcttggcttccgaacgcagcaggcatactggtgctggaagacggtacctgctgtcgcacttgccgttataataggcattggaacttgtcgatttcgggagctgatctgtttgtaccgtattgtttatttataatatgatggatcgtatgtt

SEQ ID NO: 5879 - DNA, 176 bp, Zea mays
  Clone ID: LIB3137-035-Q1-K1-F10
ggcggccgggcgccctttgcctcgctgccgtcccgcccgtcgtcgcaactcgcctgcatggcgttctgcgtcgacgccggcgccgccagtatcacgttctccctgcacgacgtctccaacaggtgcgtctacgccgcaaaactcgccggcttctcgctcgccacctcggcgctcct

SEQ ID NO: 5880 - DNA, 483 bp, Zea mays
  Clone ID: LIB3137-035-Q1-K1-F11
gcgtccgcctctctccttccctgtgtttctctcctcgcgtgctcttcatcccttcttccagcgcggtttggcgatggctgcagcgcaggcgatctcgaaggggagcgtggtgtctccatgcggcaatcgagcggcgccgggcttccttgccaggcggaggggtgccgtggcggcgcggatggcaccgtcagcggcgcggatcgggggcttctggaggaagaacgcgtttcctggcgggaggctaaccctgaggacgaggagatccagggccgcgtcaccgacgcagatgaacatgaaccttgcgcttgggaaatcgatgaggtggtgggagaaggggttgcagcccaacatgcgtgagatcgagtccgcccaagaccttgtcgatgctttgaccaacgccggcgacaggctcgtcgtcgtcgacttcttctctcctggctgcggcggctgccgtgcttttcacccccagatttgtcaatttgg

SEQ ID NO: 5881 - DNA, 359 bp, Zea mays
  Clone ID: LIB3137-035-Q1-K1-F2
gcagcccccaactacccccagcctcggaaggaaccttccagaagcgcaagactctaaggccgtcaccttcccattcttcctcgccgcgggggtcgcctgagatcacataaacaatggtgaaggctgttgctgtgcttggtagcagcgatggtgtcaagggcaccatctttttcacccaagagggagatggccctaccgctgtcaccggaagtgtctctggcctcaagcctggcctccatgggttccatgtacatgcacttggtgacaccaccaatggatgcatgtcaactggaccacactacaatcctgcgagcaaggagcatggggcaccaaaagatgagaaccgccatgctggtgat

SEQ ID NO: 5882 - DNA, 352 bp, Zea mays
  Clone ID: LIB3137-035-Q1-K1-F3
gggcgacacacgcgtccggcaggacacaactaccattaaggtccatagtatcctgctatgagcccaagacctaaacgggggtacgggggcagtgtatgaggagtctagcatccactgaaatgacataaccgtttgtgctggcttaagcacctcctggcggccccgtcgaagaatagggcaccatcgtacctacccataagatcaggatgtcatctattgtcaacggacgttgcttgccctcttccgaacctccatgcatacaggtgctggaacacggtacctccagcagaacttgcctgtataataagcaattctacaagcctattatcggagatcatctgtcaccaccgta

SEQ ID NO: 5883 - DNA, 277 bp, Zea mays
  unsure (1)..(277): unsure at all n locations; Clone ID: LIB3137-035-Q1-K1-F4
gacgcacgcgtccgcaatganccaaacacattcaagccaacaatgaaccgccttcaagaccccgagccaaagcgccacattggaggggctcaccatcaccctactctccaccgaaatcacatcaacaatggcgacggagccaacagtgcttcatgaccccgctgaacaccagcgcctcaccaaggagacggcctacgtaaactggataaccatagtccacgcgacggatccacgaaaaccaccagacgcaacacgaggactaccacaccaacaagct

SEQ ID NO: 5884 - DNA, 394 bp, Zea mays
  unsure (1)..(394): unsure at all n locations; Clone ID: LIB3137-035-Q1-K1-F5
gaaagcaatgaacttatcagattctgtggttcaagctaatgaaatcacaaaggcacttcctacgagtcagaacaatactgcaccagtaattgctcaagcagattgtggagtagagatcagctctggtgtcatcatgcacgttgctgtgtctgcttcatgcaatggaactacagagaaaaaggtgaattcgaagtcaaagaagtttgtgaggtatcctgttgtgaacatgtggttagggtccagacatctaaagccagggaagaaagcgaaccgcaagagaagtaaaatgataagacgtgttgtagcctgcaaggacgcggcaaatttatcttgtttgagtgagcagctgacgtcaacatcgtncactgcatgctctgaaaccgtagaatgtacc

SEQ ID NO: 5885 - DNA, 383 bp, Zea mays
  Clone ID: LIB3137-035-Q1-K1-F6
aagaagcatgcggacggaagcctccaactaccttcagcccgggaattaaccgcctataagcgcaagactctaagggggccacctgggcattgttacaggccgcgggggtcccctgagatcacataaacaatggtgaaggctgctgctgtgcttggtagcagcgatggtgtcaagggcaccatctttttcacccaagaaggagatggccctaccgctgtcaccggaagtgtctctggcctcaagcctggcctccatgggttccatgtacatgcacttggtgacaccaccaatggatgcatgtcaactggaccacactacaatcctgcgagcaaggagcatggtgcaccaaaagatgagaaccgccatgctggtgatcttggaaa

SEQ ID NO: 5886 - DNA, 346 bp, Zea mays
  Clone ID: LIB3137-035-Q1-K1-F7
aagacccgggccgacgcgcacgcgtccgaccgcctttttgcactactctttaccctattttcctcccgatcgcgaactcgcgatataggcaagattaccagggagaaggagatggccaataataaagataaggcgttgaacgtttctggcaagccgcggcactcgaacgacgtcgaccgccccaatgacaatacaggcgcgtgcacgccgctccaattgctggagcacttccgaaagtaccgttccgcggatctagatgtacaagacgcatgccatgatggacccctccgagaaggtgctcaggaacgataaagagtctaaacagctatctaacacccgcatcgag

SEQ ID NO: 5887 - DNA, 335 bp, Zea mays
  unsure (1)..(335): unsure at all n locations; Clone ID: LIB3137-035-Q1-K1-F8
ccgccttcaaacccgaactttatagtcgcttcgcatcgatggcgcccaaggccganaagaagcccgcggcgaagaagccggcggaggaggagcccgctgccgagaaggcgccggccgggaagaagcccaaggcggagaagcgtgtcccagcaggcaagtccgccggcaaggagggcggcgagggaaagaggggccggaagaagggcaagaagagcgtggagacctacaagatctacatcttcaaggtgctgaagcaggtgcacccggacatcggcatctcctctaaggccatgtccatcatgaactccttcatcaacgacatcttcgagaagctc

SEQ ID NO: 5888 - DNA, 354 bp, Zea mays
  Clone ID: LIB3137-035-Q1-K1-G1
cagagaaccacttcacagcaagtttcggcttctagaaaccttccagaggccgatccttagttctgaacctcaaattaccgaacatcgaatacagccaaatgatcaatttgttatatttgcttctgatggtctatgggagcacctcaccaataaggaagcagttgaccttgtccaaagtagtccacgcaatggaattgctcggagactagtgaaagcggcgatgcaagaagctgccaagaagagggagatgagatactcatacctcaagaagatcgaccgtggtgtgagaaggcatttccacgacgatataacggtcgtcgtggtattccttgatttgaatgccatgagcaaagc

SEQ ID NO: 5889 - DNA, 344 bp, Zea mays
  unsure (1)..(344): unsure at all n locations; Clone ID: LIB3137-035-Q1-K1-G2
aggacccaatctgaggtaggagaagcacctcctccttgcgtcgcgtcacgcccccaccaccaccgccgtaggcttctctccggcgctcccgctcgaacgcgcgctcagcctcagcatgccaccaccatcgccgtctcgcccgctgttgcccacttcccgttgtcccctgcaccgctgccgcttgtaggctcctccacctccgctgcctcctcgagctccgtcgcgcgaggccaaggtccggccaaccggccggaacccctgtctactatggttgttgtcgtgaactctgaggccaggggtcgcccgtgcaatcgcatncgacttgacctgaccttgccgtcgtc

SEQ ID NO: 5890 - DNA, 378 bp, Zea mays
  Clone ID: LIB3137-035-Q1-K1-G3
gttggcattggtggtggtgtggtgacccgtgtgatggcagcggagcgggatatcgacgacctgccgcggaacgacgccaactacacggcgctcacgccgctctggttcctcgagcgcgccgcgctgacccacccggccagggcctccgtcgtgcacgggcccgtgcgctacacctgggccgacacctacagccgctgccgccgcctcgcctccgccctcgcgcgccgatccgtcggccacggaagcacggtagctgtaatagccccaaacatcccagcgatctatgaagctcattttggagtgcccatggctggggcagtggtcaactgtgtcaacattcgactaaatgctgccactgtagcatttctcttggagcac

SEQ ID NO: 5891 - DNA, 352 bp, Zea mays
  unsure (1)..(352): unsure at all n locations; Clone ID: LIB3137-035-Q1-K1-G4
cttcctcctctctctctctctctctttttttctcccgatttccaaatctcaaataataagtaaccagaagggaagcgaatcttctccatcaacccagcaaatcgctcgttcgagcgtcccactcgacgagaaattctcacccatcacctccgcgtcgctccccccgttcgccgccaggggcccaatttcgtgtggacaggcacaggctgctgtgatcctttggtggatgggggcagcgcagctagccaccggaggttgcctagtttgaaatttaaccgcgttaccgaagtggtactctgtagttcttatggatcaacttgccctgcttgcgacngagcttggtgactcgtca

SEQ ID NO: 5892 - DNA, 345 bp, Zea mays
  Clone ID: LIB3137-035-Q1-K1-G5
cggacgcgtgggcgaaattgttttagattgtctgcgttgcggcagacatgggggttggtggggaaaggtttgccacgctgcttatgatgagacttacggaggcagtcatgctttggctctcagacgaccagagcttttgggaagaggttgaagaaggaccaagggctctgggtccggttggacttcagcagttctacctcgatatgcaatttgtgatccttttcgggcaaggtcgtttcttatctcggcatgtgcatcaagtcatattgcacatcattgatagagcgatgagagcgtattctgccacggggatggaccctgatagggtccttccaagcgacgact

SEQ ID NO: 5893 - DNA, 282 bp, Zea mays
  Clone ID: LIB3137-035-Q1-K1-G6
acgacgcgtccgagacccaatcttatgtttgagaacactttctccttgtttcgagacacgcccccaccagcacccacgggggatgctattcggcgctaccaatccaacacacgcttagtctgagcatgccaccaccatagaaattttgacccatgacgtccacttcccgtcgtcccctgcaccgctggcgctcgaatgctcgtgcacatgcactggctgctgtaactccgtcgtgcgaggccgcagtccagctaaccaccgcgaaccgccgactactatagt

SEQ ID NO: 5894 - DNA, 458 bp, Zea mays
  Clone ID: LIB3137-035-Q1-K1-G9
gtacgtgcatcttttggaaagaggatgaccgcgcctaagccgccctctggcgcaggcggtaagaagcttaagatttggttgggaaagaacaaagtagaagaagatgaaagtgatagcgatagtgacagtgacatggatgatgaggacagtgaagatcaggagagcgcagatgcaaaatctctcgtagttgatgaaggcaattgctcaaatggatccataaaaaatgagaaacttgatctgggttctgtttctggatcacattcagaaggagagtcctcaggggaaaagtcccaaccgacaacaaaatcaggagctgaaggtggtgactttgaatctgatggcagtgcaaagcctgaattaggaatggtggatcatcccattcctgtgaacaatgctgttgctgctgcttcagaagaagtgctgaaatcagatgaagtgacagcagatgaggataacac

SEQ ID NO: 5895 - DNA, 375 bp, Zea mays
  Clone ID: LIB3137-035-Q1-K1-H1
caccgcctctctcaatctgataccgcagatccgtcgtccggtgagtggaagccgcacgaacccatggcctccggcgagcttgcctgcacctacgccgctctcatcctcagcgacgatggcatcgccatcaccgccgagaagatcgccacgatcgtgaaggcggccaacatcaaggtcgagtcctactggccggccctcttcgccaagctcctggagaagcgcaacgtcgaggacctcatcctctccgttggatctggtggcggagctgctccagttgctgctgccgcacctgctggtggtgctgcggctgctgctgccccggctgtcgaggagaagaaggaaaaggccaaagaggagtctgatgacgacatgggc

SEQ ID NO: 5896 - DNA, 272 bp, Zea mays
  Clone ID: LIB3137-035-Q1-K1-H10
gaaaaggccaaaaggcaccttcgcccgcgacgataacaatggcagcctcgctccaagtccaagcgggggccaccttgatgcaaccggtcaagatcgacggccgggccccgtccgcctcgttgccgtcgtcccgcccgtcgtcacaactcgccagggcgttcggcgtcgacgccggcgccggcaggatcacgtgctccctccagtccgacgtcagggacgtcgtcagcaagtgcgtcgacgccgtcaagctcgccggcttcgcgctcgccacc

SEQ ID NO: 5897 - DNA, 357 bp, Zea mays
  Clone ID: LIB3137-035-Q1-K1-H2
aactggcgaagatgagaatgttcaacttattaaaatgtttcaacaccaaactgctggggaatatcgtatcatgatgggcaccgatgtgcgtattcagcgagatcctttggccatgagaatgcgggaagaccagatcaaacagatttggggcggtgatcctgtctatccaacaattaattatgttcaggatcctgatgaagtgattgactacagaggtcctgaatttcatgagcctacccctgaagttgtaccttacctgatggagcatgggataatgatcacaaaggaagagctatatgcacgtctgaatgaagagagagaggacgtcaatcaagacataacgtatattcctgaagc

SEQ ID NO: 5898 - DNA, 269 bp, Zea mays
  Clone ID: LIB3137-035-Q1-K1-H3
cactggctctcataatattataccgcagattttctaccgctgctgagcggaagccgcacggagccatgtcctacggtgagcacggctgcacctacaccgctatcatcctcagccacgatagtgtcggcataaccgcccagaagaactccacgatcgggaacgcggtcaacatcaatgtagagtgctactgaccgggcctattcgacaagctcctgaagaagcgcaacgtctaagacctcatcctctgcggtgcatctgcgtgcggagct

SEQ ID NO: 5899 - DNA, 304 bp, Zea mays
  unsure (1)..(304): unsure at all n locations; Clone ID: LIB3137-035-Q1-K1-H4
cactcccaagccagactgagtcctacgatatgtcgcttgcaagtgtcaagagacgaaacggtcgacatggctcgcacgcaatctgccgtagcggtcgccgtggtggccgcggtgctgctgctggcagcggcggcgacgacctcggaggccgccatcacctgcgggcaggtgagctccgncatcgcgcgctgcctctactacgcccgcggcacggggtccgccccctccgcgtactgctgtagcggcgtcaggaaccttaagagcgccgtcagcaccgacgtcgacaggcgcgccggctgcaact

SEQ ID NO: 5900 - DNA, 356 bp, Zea mays
  Clone ID: LIB3137-035-Q1-K1-H5
aaaaccggcccgacgcacgcgtcggctctttctccctatatttctgccttacgatcccgttcctgcatcgcggaggagatggccgactccagcacgccgctcgcgtcggctgatgcgctgctactagctgctgctcgcgccgctcgccgaagagggggacaagtcgatcggctgctaccatgagcggagcgaggaagaggcgcggcgtatgtacgccgagtggatagaagcgcacggccggacctacaacgctctcggtgaagatgagcgcaggatcgaggcgatcaggtgacaacctcacctacttggacgcccacaacggctgcgtcgacgcgggcgtacactaattacgacta

SEQ ID NO: 5901 - DNA, 319 bp, Zea mays
  Clone ID: LIB3137-035-Q1-K1-H6
cccaggcgtacgcactcgcaagccaggactcgataccactatcatgcgcttgctaagtgccaagagaccaaagggacgacatggctcgcacgcaatctgccgtagcggatcgccgtggaggccgccgagctgatgctggcagcggcggcgacgaccatggaggccgacatgacctgcgggcagatgagctccgccatcgcgccctgccacaactacgcccgcggcacggggtccgccccctacaagacctgctgtagcggcgtcaggaaccttaagagcgccgacagcaccgacgtcgacaggcgcgccgtctgcaact

SEQ ID NO: 5902 - DNA, 307 bp, Zea mays
  unsure (1)..(307): unsure at all n locations; Clone ID: LIB3137-035-Q1-K1-H7
gaccgcgaccncnactggttcccanatcctttaccggtagacggcacaactcccgccggccctgtggctcggcgtctgcgggccaccaccnaagccccaccacaccgcgctgtctccgagcagactgctgtccctgcagctgccgcggtgctcggcgggaattggccgcacggcgccgagcctggccctggcgccgccgaaacacaaacaccctttttcgtcgctgacggcggcaaaggctggtggcctggcgccggacctggagctgaagatctcgaccgcccggcagagcgagcaccagcagcag

SEQ ID NO: 5903 - DNA, 298 bp, Zea mays
  unsure (1)..(298): unsure at all n locations; Clone ID: LIB3137-035-Q1-K1-H8
cggacgcactcccaagccagtactgagncctacgattagacgcatgcaagtggcaagagacgaagcggtcgacatggctcgtacgcaatctgccgtagcggtcgacgaggtggccgcggggctgctgctggcagcggcggcgacaacctcggaggccgtcatcacctgcgggcaggtgagctccgacatcgcgccctgactgtcctacgcccgcggcacggggtccgacccctgcgagtcctgctgtagcggcgtgaagaacctgaagagcgccgtcagcaccgtcgtcgacaggcgc

SEQ ID NO: 5904 - DNA, 449 bp, Zea mays
  Clone ID: LIB3137-035-Q1-K1-H9
cacgaaccaaaccaccgccttctcccccgacctgagaggagcctcaccgccggcgcccatggcgagacgctacttgatcgtgtcgctgcccgtgcagtcgcccggcgccaccgccagctccctgtggtcgcgcctccaggactccatctcccgccactccttcgacaccccgctctaccgcttcaacgtcccggatctccgcgtcggcaccctcgactcgctcctcgcgctcagtgacgacctcgtcaagtccaatgtcttcgtggagggcgtgtcacacaagatccggaggcagatcgaggacctcgagcgcgccggaggggtcgagaccgggaccctcaccgtcgacggcgtccccgtcgacacctacctcactaggttcgtgtgggatgaaggcaagtaccccacaatgtcccctctcaaggagatcggtggcagcatacagtcac

SEQ ID NO: 5905 - DNA, 334 bp, Zea mays
  Clone ID: LIB3137-036-Q1-K1-A1
ggtgttctcgcgcatcgacgcggacggcgacgggcggatctcgccgtcggagctggcggcggtgtcgcgcgccatctccccgccggcgagctcctcgcacgggcggcgcgaggtggcggccatgatggaggagctggacacggaccgcgacggcttcgtggacctgggcgagttcagggcgttccacgcgcgcggcggcggcgttggcggcggcggcgacgacggcgacgacgcggagctccgcgccgccttcgccgtgtacgacgccgacggcgacgggcgcatcacggcggccgagctgggcagcgtgctcgcccgcatcggcgaggggtgc

SEQ ID NO: 5906 - DNA, 391 bp, Zea mays
  Clone ID: LIB3137-036-Q1-K1-A10
tttccgccggggtttgccgcactttcccgagacgcttccaccacacgttcacggaaccaagagcttatcgtcgtcggcggcgaagatggtgtcgctgaagctgcagaagcggctcgccgcgagcgtcctcaagtgtgggaaaggcaaagtctggcttgaccccaatgaagtcagcgagatctccatggctaactcccgccagaacatccggaagttggttaaggatgggtttatcatcaggaagcctcagaaggttcactctaggtcccgtgcaagaagggcacatgaggccaagcagaagggaaggcactctggatatggcaagcgcaggggtaccagggaggctaggctccccaccaagattctgtggatgaggaggatgcgtgttctg

SEQ ID NO: 5907 - DNA, 388 bp, Zea mays
  unsure (1)..(388): unsure at all n locations; Clone ID: LIB3137-036-Q1-K1-A11
ggggcccgggcccttttttgtgtgcccccttttgtgacactttttccggcccagaccaagcggcaatggaccccgtcgccacatgggggctaaccccgttcgcgggcgccgacccggagatctacgacctcctggagcgcgagaagcggcgccagcgtcgcggcatcgagctcatcgcctccgagaacttcacctccttcgccgtcatggaagcgctcggctccgcgctcactaacaagtactccgagggcatgcccggcgcccgctactacggcggcaacgacgtcatcgacgagatcgagaacctctgccggtcacgcgcgctcgctgccttncgccttgacgccgcgtcctggggcgtcaacgtgcagccctactcgggctcccc

SEQ ID NO: 5908 - DNA, 371 bp, Zea mays
  Clone ID: LIB3137-036-Q1-K1-A12
ccacggggttgccgctttaagaggatcgccgggacgcggcgcgcaagctgtcggtgagctcacggcccgacgacgagacgcccagggcgagggcccccgtgatcaggggaggcggcggcaacgggaggaggaacggcggcacggcggacgactgctcgccgtcgacgacgtgcccccggaggacggccgcggagtccgacccggccgggctccggagccagtcggcgctgtcgttccgaggcgcgtggtcgtcgtcgtcgtcgacgtcgtccaggatatcgcccacggaggacagcctcgcgcgggcgctgcggtcctgccactcccagcccttctccttcctggagcaaggcgagacgacggcgccgtca

SEQ ID NO: 5909 - DNA, 320 bp, Zea mays
  Clone ID: LIB3137-036-Q1-K1-A2
tgtgtaccgaggtctttactttggtatgtatgattccctgaagccagtgcttcttgttggtaccctgcaggataacttcttggccagcttcttgctcgggtggggtataaccattggtgctggccttgcctcctaccccattgacactgttcgccgtcgcatgatgatgacatctggtgaggccgtcaagtacaacagctccttggacgctttcaagcagattgtcgcaaaggagggtaccaagtccctcttcaagggtgctggcgcaaacatcctccgcgctgtagctggtgctggtgtccttgctgggtacgacaagc

SEQ ID NO: 5910 - DNA, 240 bp, Zea mays
  unsure (1)..(240): unsure at all n locations; Clone ID: LIB3137-036-Q1-K1-A3
ttccctgaagccagngcancnaaagaagaccctacaggagaacttctcgtccaccttcttgctcgggtggggtataaccattggtgctggccttgccttctaccccattgacactgttcgccgtctcatgatgatgacatctggtgagtgccgtcaagtacaacagcttcttggacgctttcaagcagattgtcgcaaaggagggtaccaagtccctcttcaagggtgctggcgcataca

SEQ ID NO: 5911 - DNA, 412 bp, Zea mays
  unsure (1)..(412): unsure at all n locations; Clone ID: LIB3137-036-Q1-K1-A4
gagttgcttgagcttggagacaaaattggatatgtcaacacagggttacgtgacgacgagattactcgcaaccttaggaaggtcaagcacccatccttcagttccttacggttcgcaacagaaatggaaagaaaatgcagcatttgccaagaagaatttgaaacaaatgaagagatgggaaggctagactgtggccatagctaccatgtgtactgcatcaagcagtggctctcgcagaagaacatttgcccagtttgcaagactgccgtcagcaagaattgaaatccaaactccagtcacgctgtctgtagatctcggtgaaaacagcaaattctggtgtcctgtacagnccgntatatatattattattggatgaacacaatccatttgtttcatcttgcagaaagaaaat

SEQ ID NO: 5912 - DNA, 409 bp, Zea mays
  Clone ID: LIB3137-036-Q1-K1-A5
cggacgcgtggggggagcgcgatggggatatatcggcagctgatctgcctcgtggccggggtcgccgccgcggccatcctcctgacagcgtcggccaagaagtccggcgacgtcaccgagcttcagatcggcgtcaagtacaagcctgagtcatgtacgctgcaagcacacaaaggagacaaaattaaggttcactatcgtgggacactgactgatggatcagttttcgattctagctatgacagaggtgacccgtttgaattcacccttggaaatggccaagtgataaaaggttgggaccaaggattgctcggtatgtgcgtgggtgaaaagaggaagctaaagatacctgcaaagatgggttatggtgagcgaggctcctcaccaaagattccaggtggagcaactc

SEQ ID NO: 5913 - DNA, 305 bp, Zea mays
  unsure (1)..(305): unsure at all n locations; Clone ID: LIB3137-036-Q1-K1-A7
ggggggcaggnagctcgagcgggcgctccacctgcgccgacgcgatgcgggccaagtggaagaagaagaggatgcagcagctcaagaggaagcgccggaaaatgaagcagacatctaagtaggcgcatcttgtgaccgaggatggcgagcttctcctgcaccatggctgtgacgcgttgggatgattgtctcccttagtagacgtgctatgctgttgacgtaggcgatgtaaaccgaccttcttgattaattctaatatgctctgagactgggtttatactgcaatttgaagataattatattat

SEQ ID NO: 5914 - DNA, 354 bp, Zea mays
  unsure (1)..(354): unsure at all n locations; Clone ID: LIB3137-036-Q1-K1-A8
cgtccggttttttggtgaataaaaaataaataaaaaaatttttttttttaaaaaaaaaaaaannnnnaaaaaaagaaaaaaaaatttaaaaaagaaaaaaaaaaaataaaaataaaataataaaaaataaggggcgcggcctgttttaaagaaatcaaagcttaacttacccggtgcattgcaacgtaataattttttttatagggtcactaaaattaaattaattgcccgccgtttaaaaacgtcgaaactgaaaaaaccttggcgtaaccaaattaaatcgctttgaaaaaaatccccttttcgcaagttggcaaaaaaacaaaaaggcccgcacaaatcgcctttccaaaa

SEQ ID NO: 5915 - DNA, 423 bp, Zea mays
  unsure (1)..(423): unsure at all n locations; Clone ID: LIB3137-036-Q1-K1-B1
atcgagaacacgatcgagcacacaagcactaagactcgtttaggagaaaccacaaaccaccaagccgtgaaagcatcatggagtacggtcagcaggggcagcacggccacggcgccacgggccatgtcgaccagtacggcaacccagtcggcggcgtcgagcacggcaccggcggcatgaggcacggcacgggaaccggcggcatgggccagctgggtgagcacggcggcgctggcatgggtggcgggcagttccagcctgcgagggaggagcacaagaccggcggcatcctgcatcgctccggcagctccagctccagctcgtcggaggacgacggcatgggcggaaggaggaagaagggaatcaaggagaagatcaaggagaagctgnccggaggccacaaggacgaccagcacgccacgg

SEQ ID NO: 5916 - DNA, 423 bp, Zea mays
  unsure (1)..(423): unsure at all n locations; Clone ID: LIB3137-036-Q1-K1-B10
aaaggcccgggggggggtttttgttttttttttttgttctatcctaaagcccatcttttggcgaccgnccaggacggaggaagaagcgctcaagggggcggacgagcccgccgcctcaggcaggcaaagacctgaaaggaagaagaggaagtgggatcagcccgcggaggacttggtctccgcggcggtgacagctgctgccgtgtcggggatgcctgtgatgaatttcggagctcttcctgccgttgtactgtctggcgtcaccgcatatggagctgctacattgccaagtgatgtccctgttccgtattcaatgcccccccatattgcaccatcagtgctccaaaatgctgcatgaacaacttagaaatcgagtcaagcaaatataccagatgaggtcattggacgggaaattgttataaa

SEQ ID NO: 5917 - DNA, 417 bp, Zea mays
  Clone ID: LIB3137-036-Q1-K1-B11
accttccgggttatccaggccaaaagggttcacacttacctaataaaaagaccaaaagttgggttcaacacaagagcaaaggagcaacagaaggcttctttggtctggcgcaccggactgtccggtgtgccaccggacatgtccggtgcaccaggggactccaacttcgaactgctcggcttcgggaatttctagagggcactccgctaaaattcaccggacagtgtccggtgctccaagggaggtcgtcctcaggaactcgccagcctcgggttttcactccagccgctccgctataattcaccggactgtccggtgtgcaccggactgtccggtgtgcaccggactgtccggtgcatctgcggagcaacggctacttcaggcgccaacagctacctgcagcgcatttattgcgcg

SEQ ID NO: 5918 - DNA, 370 bp, Zea mays
  Clone ID: LIB3137-036-Q1-K1-B12
ctttcccttcggttacggttcttcctaacccaattcccccgaaggagcggcggcggcggcggcgaggtcgtaccccacatcggcgagcggcggcggcaccgccggaggcaaaggcaagatgttcgggcgcgcgccgaagaagagcgacaacaccaagtactacgagatcctcggggtgcccaagtcggcgtcccaggacgatctcaagaaggcctaccgcaaggctgctatcaagaaccaccccgacaagggcggtgaccccgagaagttcaaggagctcgcacaagcctatgaggttttgagtgatccagagaaacgtgagatttatgatcagtatggtgaagatgcccttaaggaaggaatgggcggt

SEQ ID NO: 5919 - DNA, 418 bp, Zea mays
  Clone ID: LIB3137-036-Q1-K1-B2
ccggttagtagtcggaacttattgctcaccaattaacttaccattgctttaggatgttttatttttgtatataggcttagccggttagggcctgtttggatcagtttataagaaactgtttttttgaaaatcgaggtggttccaaatatatcacaaacagcatcttagttaaacaggaccttaaccttagttaaacaggaccttagttttgatatgaggcctgcactcagcccggcagcgatcaaaatcgaacgtgtgggatctctgatatttgactaggtctggtcggtagcaaaccaaacatgtaagaatttctacatatactcaacgtcttacaatttgcagtttagagaacagagtttttgtttttgtttttgcttagttcacgtctctttcatcgaagtggcttctcattttt

SEQ ID NO: 5920 - DNA, 418 bp, Zea mays
  unsure (1)..(418): unsure at all n locations; Clone ID: LIB3137-036-Q1-K1-B3
cgtccggggggcanagctggacttcctcaccatcttgcagcccagcggcggctgcgacgacgggggctttctctactagctgaagctcaagtgcgagaactgcggggaggtcaccgccaagtccacctacgtcactctcagcgagcaagtcgacctgcccaagggacatggcaccgctcacctcgtccagaagtgcaagctttgtgggagagatggaacaattgtgatgattcctggtcaggggacgccacttactattgagcagagccaganagaagagaagacttgtttgatggtgtttgactgcagaggctatgaacctgttgagttttcttttggagctggctggaaagctgagtctgagcctgggactccttatgaaattgactggtcttgagatgaattttctgagtatgat

SEQ ID NO: 5921 - DNA, 388 bp, Zea mays
  Clone ID: LIB3137-036-Q1-K1-B4
cgcgtccggaagtcacatctacgcctccatactgtagtagcagcagccgccgccgccgtctcggaagtggagctcctaggggcccggggcccacgcggcggcgccatggaccagctccggcccgagccggccgcgggcgcgcggcacgagatcgagaagacggcggcgccggacgtggagtcggagcccgcggcggcggagccggagccggagcgcgtgccgccgtggcgcgagcaggtcaccgcgcgcgggatggtggcggcgctgctcatcggcttcgtctacacggtgatcgtcatgaagctgagcctcaccacggggctcacccccaccatgaacgtctttgccgcgctgctcgccttcctggcgctccgcggctagacgcgcg

SEQ ID NO: 5922 - DNA, 332 bp, Zea mays
  Clone ID: LIB3137-036-Q1-K1-B7
tgaacaagcgccaggtcgccgagagggaggctgccctcctggcgctgctagccacatcatcgacggccggcgccgtgacgttcgacgcgacgaacacggcgtccgatacccccggcgggcagcggttcgaccaggccgtcggcctcgactacgccaagcaggtcctggccgacgcgtccacgttcatctggaacaccttcgaccagcccagccccgccgaccgcaagcccgtcgacgcggtgaccctcgtcgtcgaggacatcggcggcgtggccttcacgagcgccaacgggatccacctcagcgcgcagtacgtcggcggctactccggc

SEQ ID NO: 5923 - DNA, 297 bp, Zea mays
  Clone ID: LIB3137-036-Q1-K1-C1
aaacccggggcgagccacgcgtccgctgctcctggacgacatgcagaagtccgtctacccgtcccgccgcctcatcatcctggggtccatcaccggcaacaccaacacgctggccgggaacatcccgcccaaggccgggctgggcgacctccgcggcctcgcggcggggctgcgcggccagaacggctctgccatgatcgacggctcccaaagcttcgacagcgcccaaggcgtaccaaggacaagcagaatcttgcaacatgggctcactcatgctaggagctttgcaccggcggg

SEQ ID NO: 5924 - DNA, 375 bp, Zea mays
  Clone ID: LIB3137-036-Q1-K1-C11
ggaaaaaaaacccaaccaaaacccaaagcctttgggttgtacacagttggcgccggccactctcccccgaggcagtctctggcgttctctgctcgacatggcgctccaggcggcgacgtccttcctcccctctgccctctccgcgcgcaaggaggggtcggtgaaggactcggcgtcgttcttgggtgttcgtttcgcggcggatggcctcaagctggacaccaccgctctgggcctacgcaccatgagggtgagcaggtcggcggacatccgcgcgcagacggcagcggtgtcctccccgtcagtgacccctgcgtcgccgtctggcaagaagaccctccgcaagggcacggcggtcatcaccggcgcgtcgtc

SEQ ID NO: 5925 - DNA, 355 bp, Zea mays
  Clone ID: LIB3137-036-Q1-K1-C12
aatatgtccggacttacgaggacaaggatggagattggatgcttgttggcgatgtaccatgggagatgttcgctgactcttgccgcaggctcaggatcatgaaaggatcagatgcaattggacttgctccaagggcagctgataagtccaagaatcgcaactagaatggttgcttcttacagtccagagcaagagggagatatccagtgactgtagggatctttgtggaagccggaaaacgtctaacagtttcaagaagaattctgccttatggtctgtaccacatgtttttgctgctacgcaagtaaagaactccacgtctgtcaatgttagttttacaacatcgtctacggac

SEQ ID NO: 5926 - DNA, 407 bp, Zea mays
  Clone ID: LIB3137-036-Q1-K1-C2
gtggggctcgacgccgaccgctgcaaggtgctggtgaacatcgagcagcagtcccccgacatcgcgcagggcgtgcacgggcacttcacgaagcggcccgaggagatcggcgccggcgaccagggccacatgttcgggtacgccaccgacgagacccccgagctgatgccgctgagccacgtgctggccaccaagctcggcgcgcgcctgacggaggtccgcaaggacggcacctgcgcctggctcaggcccgacggcaagacccaggtgacggtggagtacgtgaacgagggcggcgccatggtgcccgtccgcgtgcacaccgtgctcatctccacccagcacgacgagaccgtcaccaacgacgagatcgccgccgacctcaaggagcacgtcatcaagcccgt

SEQ ID NO: 5927 - DNA, 361 bp, Zea mays
  Clone ID: LIB3137-036-Q1-K1-C3
ggaaaacccgggcggggccacgcgtccgaaaaaaccaatgctccagagttcagtcgtacacgcacaaccgcgacttgcgtgcatgaggcgtaccacacacagatcgtcagttgtgaagacagagaccggcttacaataacttagaaagatacatcacgcccacatcaactctgcaccttactagaggtgttctggaccgccgagctggtcttcgtggaccttcacccttccagtgataatagcttaggctcgctctggttcgtcatcagtcgccgaattgagtagagagcagcaggttctgcacgaacgtggctctgacgctggcttgctttcgctttaacttccttttttaacttgggag

SEQ ID NO: 5928 - DNA, 377 bp, Zea mays
  Clone ID: LIB3137-036-Q1-K1-C4
cgtacgaaaggaatctattctgcaagacatgggttttgtttgcccggccacagcactggcccaagacggcctttagcgcggcagcatgggtgcggccgtaccctgataaaacatatatatctggagttgtgtttgctgctactgggggagttcggttatgcgccataggttgttcgctatatattgggttgtgcgggattttgtagcaatgtggttagagtgatgctcatttggagcgttagagagctctcggctcgtatttcttatcaagacaagatagtatttaagggcgctgtttgggattttgaagcaatgctctaactgtttatctctctgtctctgaacacgacaaacatgaaggtttgctatatttcatg

SEQ ID NO: 5929 - DNA, 240 bp, Zea mays
  unsure (1)..(240): unsure at all n locations; Clone ID: LIB3137-036-Q1-K1-C5
gcaggcagaggcagcagnccgggatactatatcagcgggccgagccgacactccctgccatcataactctctccaccatctcgtgtccttcatcctcggagcgtccgcctccgtcgtcctgctcttctttctcactattgctacaagcggatcgcggttcactgtaatctctaactgttccaacataaccacgggctttgacgaccatactcccgtccagtctgctccttttaccctttc

SEQ ID NO: 5930 - DNA, 308 bp, Zea mays
  Clone ID: LIB3137-036-Q1-K1-C8
ggggcggcccaagccgtccgcggacccgtggccggacccgtgggcggattcttgggccgcctcaccgctccgacacaggctgcgccgcctctcctcctgctccgcggctacccctctcgttggggctgcccgcttcctcgtgccctgctccgagagccgtctccccgcgttcacctcgtctcgcttcctccggtcggcggcggctgcgccgtgccggtgttgctcaagcgctgcgatcaccgagcggcctgcgtctgcgtggcgcggagtcgccaccatggccgatggtagtagccgcttcgggcatg

SEQ ID NO: 5931 - DNA, 297 bp, Zea mays
  unsure (1)..(297): unsure at all n locations; Clone ID: LIB3137-036-Q1-K1-C9
ggccaccgccccncggaagaggcccttcctcgggggcgggcggaattcggggttcttgcccggccccggtcccctcggcgattgcgaacgctctctgcaaatcttcgcgtaactccggaagcgctccgaagatgaactgcgggccgcccgaccagctgccgccggagtcggcgccgtcgtgcttcctcaacctgaactgggaccagtctatggccggcgaccacctcgacccggcgctcaactcgatggtctcctccccggcgttcaactcgacggccgccgccgcggttactgaca

SEQ ID NO: 5932 - DNA, 415 bp, Zea mays
  unsure (1)..(415): unsure at all n locations; Clone ID: LIB3137-036-Q1-K1-D10
aaaagggccaggcggcgcncccggagacgcgtggcccctttttagggacatcctcattatcgagaccaagccccccacggggggccctttttcgcggaggagcgcggtaggcaccccgccggcctcgccactggggactaccccgcccatctcgccgattgccggcgccggtggtcggttcagaaggaaatcatcgaccgacgcatacgagagggcgaccccgccagggacgaccagccaccctactcccttcgacgtgtgaactgaccgcaccctcgcacttgattttgctccttcacaagcatcatctacggtagacagggaggaccgtagaagacatcaagagggtaacggggatgatctaatcgcgggttgacttacctctactgtgatatattatattgccgctatatct

SEQ ID NO: 5933 - DNA, 373 bp, Zea mays
  Clone ID: LIB3137-036-Q1-K1-D11
ggagctcatcgaaaacccggacgggagcctgtcgcggcgggatgagtccaactcggaggaactgggcacctctctttgcgccaatcatcgcagcggttatgttgctgtattggggaagccaaatgttggcaagagcacacttattaaccaaatggttggtcagaaactttcaattgtaacagataaaccgcaaacgacaagacatcgcattcttggtatatgttctgaaccagagtaccagattatactttatgacactcctggtgttattagaaaggagatgcataagctggacagtatgatgatgaagaatgttaggagcgctatcggcagtgcggactgtgtgcttgttggtgctgatgcttgcaaaact

SEQ ID NO: 5934 - DNA, 372 bp, Zea mays
  Clone ID: LIB3137-036-Q1-K1-D12
gttcgcgagcaagtacgtgggtccccgaggtactgctgcagcaccatttgctgaaacactgccgggcatcgtcaggatgttcgcgagcgagatgaccgtcgcctccgcatggatccacctcctagcagtcgacctcttcgcggcgaggcaggtgtaccacgacggtgtcaagaacaacatcgagaccaggcattcggtctcgctgtgcctgctcttctgcccggtcgggatcctggctcatgtggtaaccaaggtattggcaggggcagctggccgctcacattgatgattggaattgagtggttgtatctaggattccgtttgtttagctggtggagtttatgagatctggatatgaataaagcttgttca

SEQ ID NO: 5935 - DNA, 412 bp, Zea mays
  unsure (1)..(412): unsure at all n locations; Clone ID: LIB3137-036-Q1-K1-D2
accaagccaacaaccaaatcgaattcgcctacgactctctttattcctcccgctcgggggcgccgccgcctgagggcaagaagcgagcgagcgcaccgcggatctccctcccggccccgccgcgcgcaccggtgaagacgacgagcccctcgtgaatggtgggagcccgcgcgacgtccgtcgcctcgcagccgcagccggaggaggcctccttccgcggcttcggttactgcatgcagggctggtaccaccgctgcatcggtctcgacccctgaaccccgccgccgcttgcttctttgatttgatttgatttgattcggttcgttctgtccctcccgtcctggatctgttgcgcgagagcgcggcagcgcgcgagattcgcccncttctcttctcataggaagcaggaagc

SEQ ID NO: 5936 - DNA, 392 bp, Zea mays
  unsure (1)..(392): unsure at all n locations; Clone ID: LIB3137-036-Q1-K1-D5
cgcgtccgcgagaagagaccatttttaatgaaaataatcctgaaaccaagccangggtctgcagaagaaattttaggaggatgctgagaaggcaaagaccttgcctgagaacacgagcaatgagaacaagctgatcctatacgggctctacaagcaagccacggttggagatgtgaataccgatcgtccggacatattctaccaaaaggacagggccaagtgggatgcctggaaggctgttgaaggcaaatctaatgattaggcgatgaatgactacttcaccaatgtgaaattttttcatgaggaggctgccgtcttttaaaagttttttaatattgttgccaaacaactatttgttagattagcattattccattttcttattaaaagta

SEQ ID NO: 5937 - DNA, 394 bp, Zea mays
  Clone ID: LIB3137-036-Q1-K1-D8
tttttggaggcttttattccgccgatttgaaccacctgcccccggggggcgatccatggccggggaagaagcaccttgttgcgagcctcttttatggcgagctccgaccatggttccaccaccgcccccaaggccgtgccgggcagctacagcctgccgctggtgggcgccgtgcgcgaccgcctcgacttctactacttccaggggcaggacaagtacttcgagtcccgcgtggagcgctacggctccaccgtggtgcgcatgaacgtgccgccgggccccttcatggcgcgcgacccgcgggtggtggcggtcctggacgccaagagcttccccgtgctcttcgacatggacaaggtggagaagaaggacctgttcacgggcacctacatgc

SEQ ID NO: 5938 - DNA, 294 bp, Zea mays
  Clone ID: LIB3137-036-Q1-K1-D9
ttccagtttgctttctttatcattcacaaaagcttcagagatgatcagtcacaaaggctccacagggacatcttttcactttgaagcagtttaaaagcccacaactacatcacttatttttaatatcactccagcttttgttcaaaagcccacaactaccagctctttttttaaatcaaccgttgaaacaacaaataggagcttggcaagctatgctagatatgtatttcagaagaggattctggattgacagatatttgtatggaataatgaacttttacatggaaagatgaa

SEQ ID NO: 5939 - DNA, 394 bp, Zea mays
  Clone ID: LIB3137-036-Q1-K1-E1
cgcctccgctgccgattcgaaagcacccgtcctgtcccctcgcaaaaccctagctccgggcaccatgaagggcaaggctgacacctccaagaaggacgagggcaggctccgggcgggcggcgccgccggaaagcgcaagaaggccgccgcgagcggcaagcccaagcgcccgccctccgccttcttcgtcttcatgtctgaattcaggcaggagtatcaggcgctgcaccctggcaacaagagcgttgcgaccgtgagcaaggcagcaggggaaaagtggcgtgctatgtcagatcaagagaagcaaccatatgtggaccaagctggacagaagaagcaggactatgagaagactaaggcaaactttgataagaaggagagcacaagctcaaag

SEQ ID NO: 5940 - DNA, 396 bp, Zea mays
  unsure (1)..(396): unsure at all n locations; Clone ID: LIB3137-036-Q1-K1-E10
cggcccggaaancccgggccggccggacccttccacagaaaatctttcgaagcgttatgtcccttttttcttgggctacaagctccacaagccaggaacctcatgtattggtcttttaaactcctcaagacgtggcactgggggcatgcgggagttttgcaatccttgaagacttgcatataagagcgccattggcaggtcagtggattggtaaaattctatcatgctgcagcgtgcttgtaccttagctggctggcacctatccaacatttgaatgtagctctaaggatatcaatgttgtaacctaactgctattgttctttgattagtaaaccaggagccccccctacaatgtagaatatggcaattatttatggctttgcngaaaattnanna

SEQ ID NO: 5941 - DNA, 421 bp, Zea mays
  Clone ID: LIB3137-036-Q1-K1-E11
gcacccttccgggcacccttggggaaaatcccggtggttggttgaaagccaaccaaggtccgggtgacggtggctaggcatccgatggaaggcccgaaccaaaaatcatcgtcaatctcatggtgtctagtggggattgactatggtacgctagatgattatgcgagctgaaggacatggatcagagcgaaccataagatggtattggtggattaatcttgtggatgcatcaagccagcaacagaatggaagatgctcaccaagtggtcgtcaattaacaacactaacgtagtgtttatcccaggcaagccccggtgcatttgccacctccttgttgttttaaaacttttatcacttatatgttgcattagatgataggagttgagtgatgaaacagttgatgcattgccattccttagaa

SEQ ID NO: 5942 - DNA, 404 bp, Zea mays
  unsure (1)..(404): unsure at all n locations; Clone ID: LIB3137-036-Q1-K1-E12
tccgcccacgcgtccggtggcgctcaccgacttctttggcacaaggtacaggggggcaggcgcagcggcagcccgccgctggatctctcccgaggctccggcgatggagcggtcctgctacttcccgctgcggtgggagagcacgggcgaccagtggtggtacgcgtcgccgatagactgggcggcggccgacggccactacgacatcgtccgccagctgctgcacctcgaccctaacctgctcatcaagctcacctccctccgccggatccgccgcctcgaggcgctgtgggacgacgacgcccgcttcgccgacgcggcccggaaccgcgcgtncgtcgcccgcagcctgctgctggagtgcgagtgcangaaccaccgcccccgcgccggggagaacacgc

SEQ ID NO: 5943 - DNA, 412 bp, Zea mays
  unsure (1)..(412): unsure at all n locations; Clone ID: LIB3137-036-Q1-K1-E2
tgaaaacactagaatgaaactcctgagacatgtttcttttgttgattgcccgggacacgacattctcatggctacaatgcttaatggagctgctatcatggatggagctcttcttttgatcgcagcaaatgaaagttgtccacagccccagacatcagagcatcttgctgctgttgaaatcatgcgtcttcaacatatcatcattctgcagaacaagatcgatcttatccaggaaagcgcagcgatgaatcagcatgaagcaatccaaaaattcatccagggaacaatagctgaaggtgcacctgtggtgcctatatccgcccagctgaaatacaacattgatgttatctgtgaataccttgtgaagaaaatccccatcccttgaaggaactttacctcacctnccaacatg

SEQ ID NO: 5944 - DNA, 308 bp, Zea mays
  unsure (1)..(308): unsure at all n locations; Clone ID: LIB3137-036-Q1-K1-E3
caccgnntcggaaaacccggccgggggacgcgtccggttcaaaaccattctccactgttcctgcgttccctctgtctcgtcgtctcccatctggggctagggtttggcctttccaccgcgtccgacgcctacctcgcccgcgccactgcagggaccaaggatgtcgcaacagcaaggtgtggaggagccgccgccggcaccgctgccggcggcggaaggcgaggcacaaccggccgccgatatccccatgagcgaggccgcngaggtggaggatgaggaggaggaacccgtcgtgggggagggggagg

SEQ ID NO: 5945 - DNA, 411 bp, Zea mays
  unsure (1)..(411): unsure at all n locations; Clone ID: LIB3137-036-Q1-K1-E4
cgcgtccgccggctcctcgccggcttgctctacctcgtcatactccccatcagngtctctcatcagcggctcttcagggtggacgtgggtccgccgtacctctcgtgcgatccgcgcgcaatggagcaagatcaaagcccagccgtcgacagcgcggattctggcgccgcgtcttttgattttgcgactggcaatgcacctagctcggctgtgaccagcggaagcgccgtggcccctgacggtggggctcaggcagctgatacttctgcctaccaggccgagcacacggagttgaatgggacgactggcgatatgtctaattaccaatctgcaggagctgcatagaatggcacagccgtcaccgagataggcgagccggttcctgagccatcctacgaggaagctgtgctt

SEQ ID NO: 5946 - DNA, 438 bp, Zea mays
  Clone ID: LIB3137-036-Q1-K1-E5
cggaaaacccggggcgagggcacgcgtccgcagaggaaaagggcaaaagccaaaaggtatcaccgccgcgacgacgatggcagcctggggccaagccgcggccaccctgatgcagccggccaagatcggcggccgggcgccctttgcctcgctgccgtcccgcccgtcgtcgcaactcgcctgcagggcgttcggcgtcgacgccggcgccgccaggatcacgtgctccctgcaggacgtcgccagcaggtgcgtcgacgccgcgaagctcgccggcttcgcgctcgccacctcggcgctcctcgtctcgggcgcgagcgcggagggcacgcccaagaggctgacctacgacgagatccagagcaaaacgtacatggaggtgaagggcacgggcacggcgaaccagtgcccgaccatcgacggcggcgtggagtcgtt

SEQ ID NO: 5947 - DNA, 421 bp, Zea mays
  Clone ID: LIB3137-036-Q1-K1-E6
ggaaaaccggcgggcgacgcgtccgggagaagcgaaaccgacctttccggcgctcccgcattccacctcgcggagatccagagcggccctatgatgggggcagcggcgagccaaactccacgagcgggggaagaggggaaagcagggacgacgagggggcagccatggggcagcagtcgctgatctacgcgttcgtggcccgtggcacggtcatactggccgagtacacggagttcaccggcaacttcaccaccatcgcctcccagtgcctcatgaagctccccgcaagcaacaacaagttcacctacaactgcgacggtcacactttcaattacctcgtggaagacggattcacatactgtgttgttgctgttgaatcggtggggcaacaaattcctattgctttcatggatagggttaa

SEQ ID NO: 5948 - DNA, 193 bp, Zea mays
  Clone ID: LIB3137-036-Q1-K1-E9
atcaacaatgctatccagatggatgttaccgggagcaggaaggctgttgtcatccacgtcccataccgcctgcgcaaggccttcaggaagatccatgtcagactcgtcagggagctggagaagaaattcagcggcaaggatgtggtaattgttgctacaaggaggattgtgaggccacccaagaagggttcac

SEQ ID NO: 5949 - DNA, 413 bp, Zea mays
  Clone ID: LIB3137-036-Q1-K1-F1
cccaagggagattcaagtatcatccatcagtgatccaatctcagctacgttctgtgaacgagttgagaaagctaactcaagccattccttcacagcaggacttgctcaaagtgtaggattaaggaatcaacctctgcgcgtgtacagcatggtgaaatatgctgcaatagcacgaggcgatgctgaaatcttcatgaaatttgcaagagctggatacaaagagaagatatgggatcatgctgcaggggtggttatcattcaggaggctggtggagtggtcacagatgctggtggccgcccattggacttctcaaggggtgtttacctggaaggtttggatcgaggcataatagcttgttccggagcattgcttcatcaaagaattttaaatgctgttgatgcgagctggaact

SEQ ID NO: 5950 - DNA, 443 bp, Zea mays
  unsure (1)..(443): unsure at all n locations; Clone ID: LIB3137-036-Q1-K1-F10
cggaaannccgggcgggcggagcgcttcgggaaatgggaacttccggtccggagggggattacaaccggcgacgcggggggaacatggggaagactccggtgcggatgaaggcggtcgtgtacgcgctgtcgcccttccagcagaaggtaatgccggggctgtggaaggacatcaccaccaagatccaccacaaggtcaccgagaactggatctccgccacgctcctcctcacccccgtcgtcggcacctaccaatacgccatgtggtacaaggagcaggagaagctttcccacagatattaaatgcgctgcccttgacagacagcactcggagttttcatgatgggtttcataatcctcccatgatgatttaacatttgtttgatcaatttcagttcaacgccttttcatcgttccatatgcatatatggtatccgtgtctg

SEQ ID NO: 5951 - DNA, 409 bp, Zea mays
  Clone ID: LIB3137-036-Q1-K1-F11
taaacccaaaaaccctgcaaaggaggggtttaggacctgggggaggaaatggccgggggggagggctaaaggggggtggggctagcaacggacttctcggaggggagccgggcggcgctgcggtgggcggcggccaacctgctgcgagccggcgaccacctgctgctgctgcacgtcatcaaggagcccgactacgagcagagcgaggccatcctctgggaatccaccggctccccgttgattcccctctcggaattctctgaccctatcattgcgaagaaatatggagcaaagccggacatagaaaccttggacatcctgaacactacagctacccagaaggatatcgtggtggttgtgaaagtcctgtggggtgatccgcgtgagaagctctgtcaagttatccatg

SEQ ID NO: 5952 - DNA, 445 bp, Zea mays
  unsure (1)..(445): unsure at all n locations; Clone ID: LIB3137-036-Q1-K1-F12
cggaaaanccgggccggaggcagccttccggttgggccacccaacgaaacccgcagtcctatccgaagccggacgatgaaaagggagggggggcagcacggcgccgtccgggccagccgcagcaaggtgcttaggacggccgccggcgacgacaactccgacgccgacgcggtcgtggcggcggcggcagcggcggcggcgaggaagccgacgaacgcgtcccggagcacgggcaagtgccggcgggcccggtgcgcgggctgccacgcgcacccggtctccaaggcgcgcgacaaggccaagggcgcgcgcaagctgcgcgcctgcgatgtcgcgctcaaccaccgcctcgtgtcctggcgcgtcgtcgaccagggccccgggtacagcggcgcgtncgcctcctccctgctggcgtacctggcccgtggcagcagctggcacg

SEQ ID NO: 5953 - DNA, 411 bp, Zea mays
  Clone ID: LIB3137-036-Q1-K1-F2
aaccgagaagagaccaggccgaaggaaaataatcctgaaaccaagccatgggtcagcaggaggaatttgaggagcatgctgagaaggcaaagaccttgcctgagagcacgagcaatgagaacaagctgatcctctacgggctctacaagcaagccacggttggagatgtgaataccgatcgtccgggcatattctaccaaaaggacagggccaagtgggatgcctggaaggctgttgaaggcaaatcgaaggatgaggcgatgaatgactacatcaccaaggtgaagcagctccaggaggaggctgccgcctcttaaaagtctcttaatagtgttgccaaacagctatttgtcagatgagctttgtgccatttcctcattagaagtatatcattcgatccatttgggatct

SEQ ID NO: 5954 - DNA, 446 bp, Zea mays
  unsure (1)..(446): unsure at all n locations; Clone ID: LIB3137-036-Q1-K1-F5
taccggntnggaaaacccggccggaggcacgcgtccgcgcacattcgcaccataccagataccatctccgctgcacacaaacccagaaaccacgggcaataaacaactggcgctcccagtctccgatccgaggaagccggaagaggggatttcgagccgcggcgatcggggctagagtggccctcgacgcgtccgcgggtggaattgccgagaagccgagagagagggcttggagcggagttgcgggaggtgggagagaaggcggcgatggggcgcctgttcctgatgcacctggacggcaacgtctacagctgcaaacactgcaagacccacctcggcgttgccagcgacatcatctccaaggccttccagtgcaagcacggcaaggcgtacctcttccataaggttgtcaacgtgacttctggagtaaaagaagaccgcatgat

SEQ ID NO: 5955 - DNA, 272 bp, Zea mays
  unsure (1)..(272): unsure at all n locations; Clone ID: LIB3137-036-Q1-K1-G10
ttccagaaccgcaagactctaaaagcggcactttacaaggcttcctgccctcttcaatcncctgatatcacataaacaatgcttaatgctgttgctctgcttagtagcaccgatcgagtaaaggacaccatttttttcacccaatatgaacatatccctaccgctgtcaccggaagtgtctctctcctcaagcctgacctccatgagttccatgtacatgcacttcgttacaccaccaatttattcatgtcaactgcaccacactacaatcc

SEQ ID NO: 5956 - DNA, 449 bp, Zea mays
  Clone ID: LIB3137-036-Q1-K1-G12
accgggtaggaaccggggggggggagggcttcccgaacggtcaagggtgttgttataactatcgactaggactttcttcatgctaaagtcagtgtatgggataacatgagcgatatgcgtacttccttacaaaacatgctaagagagtacccgttaaatggatatgtggcggagccagataaatcacagttaatcgaggccctgaaatttcattccagaggtgctgaaaagatcggtgtgggagtaagagaaattaagatcgggttgaatccaagtcacccaggtacaaggtgcttcattttgctgagaaacgatgataccactgaagacttttcttaccacaagtgtgttcagggtgctgcagactctatctcaccccagctcggaagttatttgaagaaactatattacagagcataagcttatgcaacactcccactagttcattt

SEQ ID NO: 5957 - DNA, 283 bp, Zea mays
  unsure (1)..(283): unsure at all n locations; Clone ID: LIB3137-036-Q1-K1-G2
cacacggtactacnagatcctctgggtctccaaagacgcgtcccaagatgacctcaagaaagcctacctcaaggccgccatcaataactattctgacaagggcggcgatcccaagaagttcaaggagctatctcaggcttatgatgtcctcattgatcctgaaaagcggtagatttatgatcaatatggtgaggatgccctcaatgaaggaatgggaagttgtttagggattcacgatccctttgacatattccattcattctttgttggtgtaaaccctttt

SEQ ID NO: 5958 - DNA, 383 bp, Zea mays
  Clone ID: LIB3137-036-Q1-K1-G3
caccccccgagctgagcttagctccactccagctccaatcacagtcgtgaccagagcgcgagagctagctagagggccgtgaaaatgccgatcaataggatcgccctggggagccaccaggaggtgtaccacccgggcgccctcaaggcggcgttcgctgagttcatctccaccctcatcttcgtcttcgccggccagggctccggcatggccttcagcaagctgaccggcggcggcccgacgaccccggcgggcctgatcgcggcggcggtggcgcacgcgttcgcgctgttcgtggcggtgtcggtgggcgcgaacatctccggcgggcacgtgaacccggccgtgaccttcggcgccttcgtgggcggcaacatcaccct

SEQ ID NO: 5959 - DNA, 404 bp, Zea mays
  unsure (1)..(404): unsure at all n locations; Clone ID: LIB3137-036-Q1-K1-G4
cggacgcgtgggcggacgcgtgggtacgacatggcgtccatggtgtcgcagcagctgccagccaagaaagggctatcgcggtactacgagggcaagtcgcagtcgttcgcgtgcatgtcggaggtgcgctgcctggaggacctgcgcaagaagggcagcccctacaggcacaggaccaacaagagctacggcgcgctgggactgggagggatgatggccaagaagcccgcctccagctcctgcgccgacctcggcctcgccgccgccaacgggttcaggacggccccaattcagaacgggtaccaccagtgaggctgtagcctgtaggcagacgacgagagcactgcaactgttttttcgntcttttttttttacttctctatctctactcttgttccgcggga

SEQ ID NO: 5960 - DNA, 323 bp, Zea mays
  Clone ID: LIB3137-036-Q1-K1-G7
tccacacacacccccaaaatttacgcgggttttttcacccatgaggagaaaattacctattcttggaactaaactgaataccttgaattcgttgcttgccagaattcctccaaagtcaatcactgacaaggaaatgcataagcgccaagacatgttttccagtttgaagtctaaagcaaagcagatggcgacaagtttcaacatgtcaaacttttctaacaaggaggatctgcttggtcagagtaaaaaagcagatgacatgagcagagttgctgggttagataaccaaaggattgttgtccttcagaggcaaattatgaaag

SEQ ID NO: 5961 - DNA, 420 bp, Zea mays
  unsure (1)..(420): unsure at all n locations; Clone ID: LIB3137-036-Q1-K1-G8
ttccgccattcggaccttcccgtcccgaggaggatgacacccggcgacccggggggaacatggggaggaccctcgtgcggatgaaggcggccgtgtaccccctgtcgcccttccagcaaaaggtaatcccggggctgtggaaggacatcaccaccaagatccaccacaaggtcaccgagaactggatctccgccacgctcctcctcacccccgtcgtcggcacctaccaatacgccatgtggtacaaggagcaggagaagctttcccacagatattaaatgcgctgcccttgacagacagcactcggagttttcatgatgggtttcataatcctcccatgatgatttaacatttgtttgatcaatttcagttcaacgccttttcatcgntccatatgcatatatggtatccgtgtctggc

SEQ ID NO: 5962 - DNA, 327 bp, Zea mays
  unsure (1)..(327): unsure at all n locations; Clone ID: LIB3137-036-Q1-K1-H1
caccancctccggagtttctccggcgagccccgtccccttgtgagagcgctctataaaggacttctgcctccancttacanancccacctaattgctgcnagatggatagagggcacaacgggagggatgacgtcttccgacgcagggatccattttctgggtttggcttaagcccccacaggagcttgttttctggtctccttggggggaagcatccatttgacgatccgttctttacccatccgttcgggggtcagatgatgggtgaccatgacatgtttgtacctagtccttttgggccgatgggaaggcccttttgggacatg

SEQ ID NO: 5963 - DNA, 328 bp, Zea mays
  Clone ID: LIB3137-033-Q1-K1-E1
ctccaatccaatggacaagatcacagaaacattccagtttcatctcaaacttcatttcgatgccccaggtgtcccacaatctgaatccttaagtcatttagctcatggaatgaccaaagccagggcagcccgactattctatcaaatagctgttttggcaacttgtgattacatcaaggttactcagctggaacggaaaggagatgaactgtacggagacatcttgatctccagaggattaaagatgtgacttggtgatgttggaaacaattttgctgcggtggttcccggtgcacatctcgtgtttatattacagaatgcttacata

SEQ ID NO: 5964 - DNA, 418 bp, Zea mays
  Clone ID: LIB3137-029-Q1-K1-F4
cggcgctggacgcggcccgccgacacggggtcggcgctgcatccgcgcggctgtacccggtgttcgtgctcgatccgcgctaccttcgcccggatcccgtcgcggcgtccccaggttccgcgcgcgccggggtcgcccgcatccgcttcctcctggagagcctcagcgacctcgacgctcgtctccgccgcctagggtcccgcctcctcctcctgcgtgcccgcgacgacgtcgccgacgctgtctgcgcggccctaaaggactggaacattggcaagctgtgcttcgagtccgataccgagccgtacgcgctggcccgcgataagaaggtcacggattttgcattggcgtccggcatcgaggtgctcacgcccgtcagccacaccctcttcgacccagaagaaattataaagaagaa

SEQ ID NO: 5965 - DNA, 403 bp, Zea mays
  Clone ID: LIB3137-029-Q1-K1-F5
tcgacccgcacgcgagggcatcctcagcatttggaaggaggccgacttcatcaaggtcagcgacgacgaggtggccttcctcacgcgcggggactccaacgatgagaagaacgtgctgtccctgtggtttgacgggctcaagctgctcgtcgtcaccgacggggacaagggatgcaggtacttcaccaaggacttcaagggcagcgtgcccggcttcaaggtcgacaccgtcgacaccaccggcgccggcgacgccttcgtcggctccctcctcgtcaacgtcgccaaggacgactccatcttccacaacgaggagaagctccgcgaggctctcaagttctccaacgcctgcggcgccatctgcaccaccaagaagggcgccatcccggcgctgcccacggtc

SEQ ID NO: 5966 - DNA, 413 bp, Zea mays
  unsure (1)..(413): unsure at all n locations; Clone ID: LIB3137-029-Q1-K1-F6
gcgaaggcgtccgtgaccgaccgaccgaccgtagcttcatgcgccaggggcggcggcttcaccccgtcgtttgatgggcaacgcatgcagcggcgcccttagatccaagtacctgcacagcttcaagcacgccgcgtcgcagcgccacgactccgagtacagcgccagcgccagcgccgacgactcgcccaggaagcccacaccgtccgccaccacggacgcccacgcgccggcgccgcccgccgccgccatgaggcgcggcgcggctggcgcgacgccggacctcgggtccgtgctcggncacacaacccccaacctccgcgacctctacccgctcggcatgaagctcgggcaggggcagttcggcaccacctacctctgcaccgagctcgccacggggatcgactacgcct

SEQ ID NO: 5967 - DNA, 438 bp, Zea mays
  Clone ID: LIB3137-029-Q1-K1-F7
acaagcacaagcgcactctagcaatggcttttgaggttgtccgccctagcgacgccgagctgactaaaggcacaagccgacatatggcggctcagcctctcctacctcacgcccctgtcactgaagtgcgccgtggagcttggcatccccacggcgatctaccgccatggcggggctgcctcagccgctgagctggtcacggcgctgtctctcccctccactaagctgccgttcctccgccgtctgctgcggctcctcgccgcgtcgggcgtgttcaccgtcgacaagcagagcacggaggaggagcggtaccgcatcagccccgtgtcctacctcctggtggacggcatccctcacgaggaccacatgaaccacaccgctctggtgctcacctgcacctcgacgcgctacatcgaggcggtgatagggctggcggag

SEQ ID NO: 5968 - DNA, 435 bp, Zea mays
  Clone ID: LIB3137-029-Q1-K1-F9
gcggaaggccgcaagcaccttgtacagcaattctggcgctcgacccttggtggcacaaggcgcggttagacgagcggatttcgatacgtcagctagtttcggccccgcttgggggcttatgaaagctcctgacggtaactgcggcgtctattcctctctgagtggagcgctacagagaaagctcgtggacgggcaacgaaccaacggcgtttccatacgcggaaccatcctcttcgttttcggattgcagtacgtgctacaatatcacatatctcgcctttatccgaagagggggttattcacctagctttcaccaccagtgattttgcggacgacggcctatggttcccaaatcaccgaccgatcgacgacgccatccttcttcccggcaacataagctcacccatcgacctcatgagtggtgcgattgattca

SEQ ID NO: 5969 - DNA, 435 bp, Zea mays
  Clone ID: LIB3137-029-Q1-K1-G1
cttcgaaacccgtagatactttggcctagaccctgaccaagtgacatttttccaacaaggcacacttccatgcgtctctgccgatggtagatttattatggagacaccatatagggtagcgaaggctcctgacggcaacggtggagtttatgctgcgctgaagtccaagaagctgatggaagacatggctgcgcggggagtgaaatacgtagactgctacggagtcgacaacgcgctggttcgagttgcggatcctacgttcttagggtacttcatcgacaagggtgtgtcttctgccgccaaggtggtgaggaaggcttacccgcaagagaatgtgggggtgtttgttcaacgaggccgcggtggacctctctccgtggttgagtacagcgaaatggacgcggcgatgactactgagatcaatcagtcgacagg

SEQ ID NO: 5970 - DNA, 421 bp, Zea mays
  Clone ID: LIB3137-029-Q1-K1-G10
caaccgaggaggaggcctgccaggttcgttgccggccgtgtgtttgttcgcccggccggccggcccgaccgaggggaagctgcagcctgctcgctcgatcgagctcttgcgtaggccgttgacgatgtcatgtggcccctgtgcgtcatctccgagaagctcttcaggatggcgggcgacgacggcgcgcagggggcggcgggctcgccgtaccccgacgggcggatttcactagcacgccgatcgtactacgtcgatgttccgcatgtgcagcaggccttcacctgggactgcggcctcgcttgcgtgctcatggtgctcaggacgctagggattgattgctgcgacggcattgccgatctcgagaggctctgccgcaccacgagcatttggacggttgacttagcatatctgttaaaca

SEQ ID NO: 5971 - DNA, 399 bp, Zea mays
  Clone ID: LIB3137-029-Q1-K1-G11
ggccgacgacgcgtccgatcgatcacctccaacatgatcctgaaggtgtcgttacacctgcagaaggacccgcccacctggtgcatcgcatgtcctgttggtgaggaatcaatacagagtggatgcaccatgatggggcctccggacagcccatttgcaggtggggtattcttggtgaacattcacttgccaccggattaccctttcaagccaccaaaggtgtctttccgcaccaatgttttccacccgaacatcaacagcaacggcagcatttgccttgacattcttaaggaacagtggagtccgacgctgtacaactcaaaggttctcctgtcaatctgctcactgctcacggacccaaaccctgatgatcctcttgttcctgagattgctcacatg

SEQ ID NO: 5972 - DNA, 259 bp, Zea mays
  Clone ID: LIB3137-029-Q1-K1-G12
cgtccggttccggtgaacctgaatttatggctggaactcgctttgcaaaagaaaacggctaaagaaactgctgcttgtcacacctcatctgataccataacaacacctggatgtgcacccttgatgtaccctcttcactaggcgtgtatatttcggggagatacctaaaggttgattagaaaacttgaaaagataggctataacctttgcttagtatttggaaaaacaccttatgccctgtgtttgctattatattttc

SEQ ID NO: 5973 - DNA, 437 bp, Zea mays
  Clone ID: LIB3137-029-Q1-K1-G2
gtatgaatgaggaagctaggctgcttgcactaattgaaggtgtccttgctgcaaatatatttgattgggggtctcgagcttgtgtagaactttatcacaagggaactataatagaaatctatcgcatgagtcgcaagaagatgcaacgtccttggcggattgatgactttgacatgttcaaaaagagaatgcttactgataggaaggaccaatcatacaaaagagcactgctttttgttgataactcaggtgctgatgtggtccttggaatgcttcctttagctagggagcttttacgccatggaacagaggtagttcttgttgcaaattcgttgccggctttgaatgatgttaccgctaatgaacttccagaagttatagctgaagcctcaaagcactgtggtatccttcggaaagctgcagaagctggtggattg

SEQ ID NO: 5974 - DNA, 436 bp, Zea mays
  Clone ID: LIB3137-029-Q1-K1-G3
gctcgattgaacaaattggagcagcactacactcctccacgcctccacctccagcctcccactgatctggcctctctcgagttaatcctagatcaatatgagaaggggctacagttacagtccttcaccaccaaggggctacaggagaagggcccgcagtccaagtcctcatgatcattatggtggtcgtggtagggatctcccaaccagtcttctggtcaggaatctccgtcgggactgcaggccagaagacctccgtcgcccatttggacagtttggtcgagttaaaagatatatatcttccaagagattattacactggggatccccgagggtttgggtttgtccagtattatgatcctgctgatgctgctgatgcgaagtactatatggatgggcaggtagttcttggtaggcaaataacagttgtttttgc

SEQ ID NO: 5975 - DNA, 107 bp, Zea mays
  Clone ID: LIB3137-029-Q1-K1-G4
tgaggtgtccagtcagacacggtttcgcctttactactgctacttcattgtaatataatccttggcattctagaaatgccatgcctggtctctgttctagatcgcga

SEQ ID NO: 5976 - DNA, 421 bp, Zea mays
  Clone ID: LIB3137-029-Q1-K1-G5
atcgatggcgtcgaagaggatcctgaaggagttgaaggacctgcagaaggacccgcccacctcctgcagcgcaggtcctgttggtgaggacatgttccattggcaagcgaccatcatggggccttcggacagcccatttgcaggtggggtattcttggtgaacattcacttcccaccggattaccctttcaagccaccaaaggtgtctttccgcaccaaggttttccacccgaacatcaacagcaacggcagcatttgccttgacattcttaaggaacagtggagtcctgctttaactatctcaaaggttctcctgtcaatctgctcactgctcacggacccaaaccctgatgatcctcttgtccctgagattgctcacatgtacaagaccgacagggccaagtatgagtccaccgcacgc

SEQ ID NO: 5977 - DNA, 420 bp, Zea mays
  Clone ID: LIB3137-029-Q1-K1-G6
caagaacaactccaactcccatctctcactatttcaacactttgcgagctgagccatcaaagctcggggcggatggcggggcggcggcagatcaagaaggagtgggtgcaggcggcggcggacgcggcgtcgtggtgcgtggcgctgtcgctggtggcgatgctggtagtggtgtgcacgctgggcgccggggaaggcggcggcggcggcgcgccggttgtggtggtgcggggcgcggcgctgtcggcgcggccgtgcgaggagatctacgtggtggcggagggcgagacgctgcacagcatcagcgacaagtgcggcgaccctctcatcctggagcggaacccgcacgtgcacgaccccgacgacgtcttccccggcctcgtcatccggatcacgccgtccaagcccatgtagatcgat

SEQ ID NO: 5978 - DNA, 282 bp, Zea mays
  Clone ID: LIB3137-029-Q1-K1-G7
accgacgcgtccggtttgaatgaagaagctattctgcccgctcttctttacagtggccatgctgccaacatattgcattggtggtctcgagcttgtgtagaactttatcacaagggaactataatagaaatctatcgcatgagtcgcaagaatattcaacgtacttggcggattgatgactttgacatgttcaaaaagagaatgcttactgattggaatgaccaaacataaacaagatcaaccatgtttgttgataactcaggtgctgatgtggtccatgga

SEQ ID NO: 5979 - DNA, 431 bp, Zea mays
  Clone ID: LIB3137-029-Q1-K1-G8
cttaccagcagtcaccactcccaagccagtatcgagtcctacgagcagtcgcacgcaagtgtcaagagacgaaacggtcgacatggctcgcacgcaatctgccgtagcggtcgccgtggtggccgcggtgctgctgctggcagcggcggcgacgacctcggaggccgccatcacctgcgggcaggtgagctccgccatcgcgccctgcctcttctacgcccgcggtacggggtccgccccctccgcgtcctgctgtagcggcgtcaggaacctcaagagcgccgccagcaccgccgccgacaggcgcgccgcctgcaactgccataagaacgccgtcaggggcgtcagcggcctcaacgccggcaacgccgccagcatcccctccaagtgcggcgtcagcatcccctacaccatcagcacctccaccgact

SEQ ID NO: 5980 - DNA, 436 bp, Zea mays
  unsure (1)..(436): unsure at all n locations; Clone ID: LIB3137-029-Q1-K1-G9
gtcgcagtgccaccgaggcttccaagcaagttccacccccgcctgcctgcggagctcggccgtcccctgcgctgcggagcgggagcgggagcggcggcgacaatgtcctccaacggcaagcccaccccacagcccgcggcggccagcgccggcgccggcgccggcggcccgccgaagatgtaccagcgacccatctaccggccgcagcaagcgcccgcgaagcgccggcgcggggggcggtcgtgcccgttcagctgctgctgctgcttctgctggacgctcctcgtcgtcgtcctcctcgccgtcctggccgccgtggccgggggcgccttctacctgctgtaccggccgcaccggccggccttcacgctgaccgcggcgcgcgtgacgaggctgagcctgtcgccgtccgncaccgcgcccgcgctgagcgacg

SEQ ID NO: 5981 - DNA, 199 bp, Zea mays
  unsure (1)..(199): unsure at all n locations; Clone ID: LIB3137-029-Q1-K1-H1
gagcgggagctgtagcggctgcgttttttttcttcatcgtgtagcccaccccacattccgctgcggccagcgccggttttttttttgtattcttttgtttatgtaccagcgacccatctaccggccgttttaagcgcccgcttatcgccttctcggtgggcggtcgttcccgttcattntnttnttttttttttttttt

SEQ ID NO: 5982 - DNA, 421 bp, Zea mays
  Clone ID: LIB3137-029-Q1-K1-H11
ggtgggttggcttctcctccccctccggtttgtgttcgggttcgtgaggttctccggggtggggtttcgtgggtgagcggatcgagatggcgtcctcggatgttgagtaccgctgcttcgtcggcggcctcgcctgggccacggacgaccactccctccacaacgccttcagcacctacggcgaggtcctcgagtccaagattatcctcgatcgggagacgcacaggtcccgcggcttcggcttcgtcaccttctccacggaggaggcgatgcggaacgccatcgatggcatgaacggcaaggagctggacggccgcaacatcaccgtcaacgaggcccagtcccgcggcggccgtggaggcggcggcagcggctacggtggtggccgtggaggcggcggctactgcggtggcgggcgccg

SEQ ID NO: 5983 - DNA, 429 bp, Zea mays
  Clone ID: LIB3137-029-Q1-K1-H2
cggctctacgttattccctcttcacttcattgtcagcaatcctaaaagctcgcagcagcagctagcagctcgttattgttcgtgagctctagcctaccctgcgctggctcttctttaattctgcagggaagttccagtttcagctagagtgcaggcggagaaccaatgggggcggcgccgtcgtccgacgactcgtcacgcgccggagacggccgggctgtggcgagcagcgctgcctctggcactggcactggcagcaacagcaaccaggcccagtcgaagcgggcgccgccgcctcacaagttccacgagatagttgcgcttgcgcaggaggcgacgacggccggcggcggcggcggcggcggcactgctgctgcagccgacctggaggatcaggcgtgcagcaccggtgtctacctggctgggaaa

SEQ ID NO: 5984 - DNA, 435 bp, Zea mays
  Clone ID: LIB3137-029-Q1-K1-H3
agaaggcgcagaacgaggtggccaaggcgcttcgtaaggcggaggagaagcgcgcgtccgcggaggccaagcggggcaccaaggtggcgcgagtgctggagctcgccaacttcatgagggccgtggggagggcgccctccaccaagcgctccttcttctgaacccaccgcccaccggcctcttcttcaccaccagttcctctgtcttgccgccgccgccgcctgtgcagttcagttcagttcagttgtcctgtgggtcggaccgttcaccgcttcactccacgggatcaggcacagtgatcagtgccgtgctagctgtgtggaacgcttgttttagtgttgtatccacatgtacgatctgtaacgtttccttgcttctcccgtttcgtgttttcgtatggtatctatggtattgcaaagtccatggccacgatag

SEQ ID NO: 5985 - DNA, 310 bp, Zea mays
  Clone ID: LIB3137-029-Q1-K1-H4
gttccggtgaacctgaaagaggtgctggtattcgtgtggaaaagaatatggctaaggaagctgctgcaagtcgcacctcatctcataccatgacgacacctggatgtctcctctcgatgtacctttttcgctaggcgtgtatatttcggggagatacctagaggtggattagagaacttgaaaagataggctataacttttgcttagtatttggagaaacacgttaggccatgtgttggctatagtatttccttaaccaaacatatggaaatggtgttaaacgttagatgttgtgaagcacttcataggc

SEQ ID NO: 5986 - DNA, 426 bp, Zea mays
  Clone ID: LIB3137-029-Q1-K1-H5
gcttcatcggtggccgccgcggcgagcacattcctgggcacccgcctggcggacccggcgccacagaacgggcgcatcgtggcccggttcgggttcgggttgggcggcaaggcgaagcctgctccgaagaaggtggcgaagacatcgacctcctctgaccggccgctgtggttccccggcgccgtggcgcccgactacctggacggctcgctggtcggcgactacgggttcgacccgttcggtctcgggaagcccgtggagtacctgcagttcgagttggactcgctggaccagaacctggccaagaatgaggccggcggcatcatcggcacccggttcgagtcctccgaagtcaagtccaccccgttgcagccctacagcgaggtgttcggcctccagcggttccgcgagtgcgagctcatccac

SEQ ID NO: 5987 - DNA, 414 bp, Zea mays
  Clone ID: LIB3137-029-Q1-K1-H6
cacgcggccacgccgaagtatggcgctctctttctcctccctcgccgccgccctctcccaccggtccctcccatcgacctccacccccaagcctcacccggccccgctcctgcgcctgcgctccacctaccgccgcgctgttagcctcgcgctccgcgcctccgcagccgaagccgccgaatcgttcgaggcggacctgcccgccgaggaggtgatggctgtcgaggaggaggcggaggaggatgcgctgtcgggaatcgcgctgcgaaagtatgtgaagcagcggctgccgggcgggttcgcggcgcagcggatcaccgccacgggccgtcgcaagacggccatcgcccgcgtcgtgctccaggagggcaccggcaaggtcttcatcaacttccgcgacgctaaggagtatct

SEQ ID NO: 5988 - DNA, 429 bp, Zea mays
  unsure (1)..(429): unsure at all n locations; Clone ID: LIB3137-029-Q1-K1-H7
cggctctacnttattccctcttcacttcatttgtagcaatcctaaaagctcgcagcagcaggtagcagctcgttcttgttcgtcagctctagcctaccctgcgctggctcttctttaattctgcagggaagttccagtttcagctagagtgcaggcggagaaccaatgggggcggcgccgtcgtccgacgactcgtcacgcgccggagacggccgggctgtggcgagcagcgctgcctctggcactggcactggcagcaacagcaaccaggcccagtcgaagcgggcgccggcttctcacaagttccacgagatagttgcgcttgcgcaggatgcgacgaccgccggcggcggcggcggcggcggcactgctgctgcaaccgacctggaagatcaggcgtgcagcaccggggtctacctggctggaaaa

SEQ ID NO: 5989 - DNA, 391 bp, Zea mays
  Clone ID: LIB3137-029-Q1-K1-H8
cggacgcgtgggaaggacaacttatgaagccatgtaaagggatattgctttttggtccacctggcaccggtaagaccatgcttgccaaagctgttgcaacagaggctggtgctaattttatcaacatatcaatgtcaagcattgcttcaaagtggtttggagagggagaaaaatatgtgaaagctgttttttcacttgcaagcaaaatttctcctagtgttattttcgtggatgaggttgatggcatgctgggtagacgtgagaatccaggggaacatgaggccatgcgcaagatgaaaaatgagtttatggtgaactgggatggtcttaggacaaaagacaaagaacgtgttctggtacttgctgccactaataggccatttgatcttga

SEQ ID NO: 5990 - DNA, 436 bp, Zea mays
  Clone ID: LIB3137-029-Q1-K1-H9
cgagaacttgatttggttcacactattgcccttagtgcacattgcttagcacaagggaaaatgggcagtggttttgatgttagtgctgctgtctatgggagtcaacgctatgtaaggttttctccagaaatactctcctcggctcaggctataggtgggactgtcttgccagatgtagtatcagatgttctaacacaaaggtgggatcatgagaataaacagttttcattacctcctctgatgacccttgtaagtcgccaagcctcaatgtccatattgttgtttccaaaatggcaatcaaatcattttactggtagtcaccagccaccataactactggtctgctactactggtataggatttacagttcctttactagacactgcaatgctatgatgcttataggctatagacattaggccattccttatgctg

SEQ ID NO: 5991 - DNA, 263 bp, Zea mays
  unsure (1)..(263): unsure at all n locations; Clone ID: LIB3137-030-Q1-K1-A1
gttcgatcttgggaagctcatggaggttcatggcgtctacaaagaggatgttggtgtgaagcttgagaggcctgtcgagggagatgaggctgtgcaggaggttgctgctgccgagtagtttgtttgctacttctatatctaggctgagtctggacatgaggttgcttatgacgtgaacttagagttgtctacttgttttcatccgcccctaagattttgtctggaaacaagtttaaaattaagattattctccncaaanaaaa

SEQ ID NO: 5992 - DNA, 261 bp, Zea mays
  Clone ID: LIB3137-030-Q1-K1-A10
gcgcagcgcgcgcggctacttgctagtatacttacgtccacaaataaaaataaaagtggctagcgtacaaagctaacatctggttgttcgtcccgacatggacgattagcctagctcgatcgctagctgctgccactctcgttcgatttaatttcatccccatgtgtggcggtgtagggagtgtggatatgatcatccaataaagtagtctactgaaaatgaatcgtcgttgatcatattaatatacatccatctcatttt

SEQ ID NO: 5993 - DNA, 400 bp, Zea mays
  Clone ID: LIB3137-030-Q1-K1-A12
cgaaactctagctctgcttgcggcgggcggtagcgactgcgcgcgacgtggaggaggcacccccacccgcccactcatccgccccccgccgtcctcctcccgcggttccacggtgcacggtgcaggatccactcttctcgtcccctccgcccgcccgtcgtcgccctcctccatggatccactgcgctcggcgcaggagctcttcacgcgtgtcgccctcctccatggatccactgcgctcgacgcaggagcaacaaggggcgcgcgcgatggcaggcggcggtctccaaggagcgaagaagcgcaagcgcgagcacgcaagtcctcgaaaagaagtcccgtccttggcgcgcccccgtcaggtgccgccggctgcgtgcgttaacacccagccaagaac

SEQ ID NO: 5994 - DNA, 357 bp, Zea mays
  unsure (1)..(357): unsure at all n locations; Clone ID: LIB3137-030-Q1-K1-A2
cgggatggaagggcgggccgacccaggcggtcgntcctatttttttttttttttttttttttaacggaaaatgggttccgattcaaccatagacaaagtaccaagaacagataaatttattacaaagaagacactagacaatctgatggttcaccctgaatcgcacgagtccatacaggcagcagtttgtgtcccgctccaggatatggaccatttaagcatcagcataccccagttcggagagcttgaggtgggcctctttgtagtcatcaaagaatgccttctcatctgcagcatatttctccacaagaaggcggaagacagggtcgctcagcaaggctttgtcacttgggagct

SEQ ID NO: 5995 - DNA, 163 bp, Zea mays
  unsure (1)..(163): unsure at all n locations; Clone ID: LIB3137-030-Q1-K1-A3
cagcggtttcatactaccacgcccacgcccggcgccggagcgcgagggccgatctccccgatggaatcttctccgccgctactcccaaccagnngccctcttcgcccgccgtcccgataccgctcgaccgcgcccccgccgtcccgcgccgccttctctggtc

SEQ ID NO: 5996 - DNA, 422 bp, Zea mays
  Clone ID: LIB3137-030-Q1-K1-A5
ccaagccgtccgccaatggaacctaataaattttatgatgctttcttttgtctgatgtcttatatgaatgatggtggtggttttgcgacttatgaactcacaagatcctatgcctggctggagctgatcaatcctgctgagacctttggggatattgtgattgattacccgtatgttgaatgtacatcagcagcaattcaggccctgacatcattcagaaaactataccctgggcaccgcaggaaagaggtggacagctgtatcagcaaagctgctaatttcattgagagcattcagaaaagtgacggttcatggtatggctcttgggctgtttgtttcacgtacggcacttggtttggtgtgaaaggactaattgctgctggtagaacatttgagagcagtcctgcaatcagaaaagcatg

SEQ ID NO: 5997 - DNA, 277 bp, Zea mays
  unsure (1)..(277): unsure at all n locations; Clone ID: LIB3137-030-Q1-K1-A7
cacgcgtccgntcctatctctatctggtagtataggactgtgcggagctactagcaacgtagagtatccggcatgagtcctttcggggcggtgatcacgccagaaaccctcaagtacatgtccaagtaccagggacgagagatcacgcaggtggactgcgcacgggaggcgatgaggctgatccacgcggaagacaagaacctgcaagccgagaattcggcatgggaactcaagaagaagttcggcaacggcgtgagcaccatggtgctcgtctaca

SEQ ID NO: 5998 - DNA, 343 bp, Zea mays
  Clone ID: LIB3137-030-Q1-K1-A8
gtagtctagcaacatagacgtgcaacatgcttggaaggtgtgaggatactatattcggaggtactgaattccaagttcttttccccctgtcaattatggtattcaacaaagatggatagctgaaggtggtggctcagagattggtttttctttaattttggaggtaaatcatacgcattattgaggtcccagtaggttaaaagaatgaagttcctcgtctggggttgttccaaggccaacccaggtagaactgcaccccggcagcatcggtctcatcgattgaagttctctgttttgttaattaacccctgttaaaaaaaaaagaagcgttgtcgccgtgtcg

SEQ ID NO: 5999 - DNA, 388 bp, Zea mays
  Clone ID: LIB3137-030-Q1-K1-B1
ggaccttcggtcgccgtcctcgcaagcagacccgtcgcgcccagcgtggagggatgctttggatggctcgatcgtagcggctacgctggcgcatgagttgtcttggacccgtgactgcttggaggacccccgctgccgtgcggccgactcccggcgcccgtgtcccatcgctcgtgcgggcatcctgtgcctgctgcgttgagaagtgcttgcgtgctgctacccgtcccacgggaagccgtgctcgatacacgttgccttcgtcgagctcaccccccggggtgcggctcgtcggctcgagagcgcccgcggcgtttgcctcgtgccgccgtcggcctatggccggcggcaccgaggacacctcgcttgcgcttttggtctcggatgt

SEQ ID NO: 6000 - DNA, 425 bp, Zea mays
  unsure (1)..(425): unsure at all n locations; Clone ID: LIB3137-030-Q1-K1-B10
gccgacccacgcgnacaaaagcggtgcatnnngctgttgcagcattgttaacaggaagaccaagaagaagaccaggggggctaatcctaaattagagatgattaagaaactttataagaaaaaggaaaatcaagcctctgcatatgctcttggtgaaatatatgaagccgctccaggagctgaaaatgaaaaggctattattgaaaatcaacacaagttgcaaaagaaatttggccagtcttcatgctttgttgcatccacacttctatagaactgttgaacccttaagagtgctagaccagctactcttctcaaggaagctatgcatgtgatcatctgagcatatgaagacaaaacacgctgggcaaaagatattagatggatctatggatcaatcacagaatatatttttactgggtttaaaa

SEQ ID NO: 6001 - DNA, 422 bp, Zea mays
  Clone ID: LIB3137-030-Q1-K1-B11
cggacgcgtgggcgaccacccgattcgttgtttgcggagagaccgaagaagcgggagagatggctcgtaccaagcagactgctcgcaagtccacgggagggaaggctcccaggaagcagcttgccaccaaggctgcccgtaagtctgcccccaccactggtggagtgaagaagcctcaccgctaccgccctggaactgttgccctccgtgagatccgcaagtatcagaagagcactgagctgctgatcaggaagctgcccttccagaggctcgtcagggaaattgcacaggacttcaaaactgatttgcgtttccagagccatgcggtgcttgccctccaggaggctgctgaggcataccttgttggcctgtttgaggacaccaacctgtgcgccatccatgctaagcgtgtgaccatcatg

SEQ ID NO: 6002 - DNA, 437 bp, Zea mays
  Clone ID: LIB3137-030-Q1-K1-B2
gacccacgcgtccggccggcttctctgctgcctcctacgacgcctgctgccccggccgccgcgagggcgaccaaggcggcgggcgccgtgcccgcggagaagggcaggtccaaggccaggaagcccggcgccgtgctgccggtggcgacgttcgcggcgccggaggcgttcgagccggcggggagcatcgccgcggcgcggcgggagcacgccgcgcaggcgcaggcgcagcgcaagtcgcggatcgcgcactacggccgcaccgcgtccttctcccgggtggagggccgagtcggcggcgccaccgccgcggccgagccggccgtccccgcctcccccaccgggctcgacgagaagcgctgcagcttcatcacgccctactctgaccccctgtatgtggcgtaccacgacgaggagtggggagtgcccgtgcacga

SEQ ID NO: 6003 - DNA, 347 bp, Zea mays
  Clone ID: LIB3137-030-Q1-K1-B3
ccaaatgcatgacacgctcattgttttaacgcctacgcctaccacaagtggaaacctatggatatcaagcaagcctcctctggtacaatcttctgccttctgcttctattctgcgtgggctgcatatgtcggccttcggaaatagaggccacccaaacagcagccctgaaagggtgatgcctcgccacagcttgcccggaagatccctgaaacactgtttgggatattttttgaggagatcaaccatgcatgagctggtggcatatgggcagagcttgtcagtaacagaggtttcgaagctggaggctctcatactccatcaaacatcgacccgtggtccatcattt

SEQ ID NO: 6004 - DNA, 427 bp, Zea mays
  Clone ID: LIB3137-030-Q1-K1-B5
catacacaagcacaagttcactctagctatgttttctgaggttggccgccctagcgacgcgcgagctactaaaggcacaagccgacatatggcggctcagcctctcctacctcacgcccctgtcactgaggtgcgccgtggagcttggcatccctacggcgatctaccgccatggcggggctgcctcagccgctgagctggtcacggcgctgtctctcccctccactaagctgccgttcctccgccgcctgctgcggctcctcgccgcgtcgggcgtgttcaccgtcgacaagcagagctcggaggaggagcggtaccgcatcagccccgtgtcctacctcctggtggacggcatccctcacgaggaccacatgaaccacaccgctctggtgctcacctgcacctcgacgcgctacatcgaggcggg

SEQ ID NO: 6005 - DNA, 383 bp, Zea mays
  unsure (1)..(383): unsure at all n locations; Clone ID: LIB3137-030-Q1-K1-B6
ggcgacccacgcgtncggggaggcccagtgactgtagaagtgaacatttctatggcagttgtctgtaagctattttaggtgctactagtgcaagatcccaagccaggatagagagtcatagatagaggtgtgtgtatgcgtgggtgtgcttaagatcttgcataccttgggttgctgtctcggtatgaccgtatgggtctcctagtatgtccgcagtcggcagagacaggtcgctgcagaatactactacaatacggagtacaatactactagtacatgattgtattgacctggttgagtggatgtagttgacacctctatctacagacagaatggaagtaaaagtgagaaagaaaaaaaaaattaataataaataatttttt

SEQ ID NO: 6006 - DNA, 306 bp, Zea mays
  Clone ID: LIB3137-030-Q1-K1-B7
ttctcttcttcttcttctttaggtcgtccgtcgaaaggctcctcttctttttattgcgccgttttggcaaagggggtggggaggaactcttcgtcgtcgcgcaccagcagcagcgttacgcaattcacgaaagaacatgctttaagcagggagaccaatttttttccgagcgcgctacgatggagctctactccggataccttgacgaccatttcaacccccacaagctaagcatcggccgcagcgccgtcttgtcgccggagtacatggcgtccgcgtcccccgcccacttcgccgaggcgcccc

SEQ ID NO: 6007 - DNA, 417 bp, Zea mays
  unsure (1)..(417): unsure at all n locations; Clone ID: LIB3137-030-Q1-K1-B8
cgatcacttcttcctctggattttgggaatgaggcatcggacgtcggatgcatgacagactcattgcattagcgcctacgcctaccgcaagtggaagcctatggatctcaagcaagcctcctctggtacaatcttctgccttctgcttctattctgcgtgggctgcagatgtcggccttcggaaatagaggccacccagacagcagccctcaaggttgatgcctcgccacagcttgcccggaagatccctgaaacactgtttgggatattttttgaggagatcaaccatgcangagctggtggcatatgggcagagcttgtcagtaacagaggtttcgaagctggaggctctcatactccatcaaacatcgacccgtgtccatcattgagatgactcctcgtgtttgtgcgactgat

SEQ ID NO: 6008 - DNA, 325 bp, Zea mays
  Clone ID: LIB3137-030-Q1-K1-B9
cgcagttttgcccctcccttcttgaacttcttctccgctcgatcgaactcagttccgattcggcaggttcattgtgaagttgaggtgggtggtataagcatcgaagagagcatgagcactgccagtggtacaaggcgtgcaccaagaagacagtcgcaagatgggtctgctgataaagtagtggtgatcatcgaagcaacctccccggtggtggggagccgtcgtggaccaccgacccctgtttctggcgcccaaaactcacccattgatgtggaggccatcgaaaatgaagttcaagcagtatcttcctcgcgagtgcccccac

SEQ ID NO: 6009 - DNA, 406 bp, Zea mays
  Clone ID: LIB3137-030-Q1-K1-C1
aagacggggaagaaacactcgcttctgagtttggtcgcggttttgcccctcccttcttgaactcctccgctcgatcgaactcagttccgattcggcaggttcattgtgaagttgaggtgggtggtataagcatcgaagagagcatgagcactgccagtggtacaaggcgtgcaccaagaagacagtcgcaagatgggtctgctgataaagtagtggtgatcatcgaagcaacctccccggtggtggggagccgtcgtggaccaccgacccctgttcctggcgcccaaaactcacccattgatgtggaggccatcgaagatgaagttcaggcagtatctccctcgcgagtgcccccaccgaggaaggacaggagaaccaggagggaacctataacagtggttgactt

SEQ ID NO: 6010 - DNA, 425 bp, Zea mays
  Clone ID: LIB3137-030-Q1-K1-C11
cggacgcgtgggaaagaatttggaggcctttgtgggggtcccttgcgaccggttctggtcgattattcgtgctgttgaattcaatatgccgctgtgacccacctctgcctggtttcttggaggaaatttgcttcagttgtgcgtcgttgagttagagctctcctccagctcttgattcggtccatggggctttgccatggcaaaccgacgcaaatcccggaggccgaggcgggggaggatccccatgtagcctccggagcgggtgacagcggggacgggccgacctcgccgtcggcggcggcgcccacggcgaagccgggcacgccgaagcagcccaagttcccgttctacctgccgagcccgctcccgccgtccagctacaagggctcgccggcgaactcgagcgtcgcgtccacgccggcgcg

SEQ ID NO: 6011 - DNA, 427 bp, Zea mays
  Clone ID: LIB3137-030-Q1-K1-C12
ggaacccctgcggcgagccgtgcgtgttcttctgtcccgccgccgccgcccgtgtactggcgccggccgccgccgccgacgccggagtactacccgccgacgaccccgaccccgaccacgccctactgcccgccgccgcctttgggcggcggcggcggctacgagccgtcgcccgggtacacgccgtcgacgccctacacgcccggctacaaccccacgccctccgggtccggctggtacgcgccgccctacacgccgccgtccgcagggacgctgtacccgcaggaccccgggttccggcccaacgccgcgccgcggcgcgccgcgaccctcttctccctcgccgcggcggtggcctgcgcctgcttcggcttgttgtgaccgaccgaccggacggatcggaggccgcgaatcgcgcacgtacggt

SEQ ID NO: 6012 - DNA, 243 bp, Zea mays
  Clone ID: LIB3137-030-Q1-K1-C2
gtccggccagggacatctggacggattccatcgggttcttgacggcgcggatcctggagcaggcgctgcacggctggcccgtctgctccaggtgctgatcgacaaggcgtggcagtcgcgcacccgcgcggcggggttcgcgcggggctcccccgtgcacgtgtgcttcgccatgaacgcgcgggcggcgcttggcgtaccgcgcgggttctacggcaactgctactacatcatgcgcgtgtc

SEQ ID NO: 6013 - DNA, 262 bp, Zea mays
  unsure (1)..(262): unsure at all n locations; Clone ID: LIB3137-030-Q1-K1-C3
cggggcggccccacgcgtccgtccttgtacgaagcgtgggcatctttgttcttgtctatggctgncatcgtactctgttgttagctccacaaggatagtcgatggtactttgattcacatctcagcccggttccgttgtcggattgcctagtgcctacacttgtttttttttaccgtttcggcttccgttatgtgggcaattaagctgatactcgtgtggattttccaatccttcgtgaagtggcagcggtggtgctggctt

SEQ ID NO: 6014 - DNA, 424 bp, Zea mays
  Clone ID: LIB3137-030-Q1-K1-C4
cttcgtcttggtagaatctaccatgccactggaggctatttttttccaggaagtaaggaaaggtgctgataaaccaaaaatatatagcttggctttctcgaatgatttgcagtatttggctgtctccagtgataaaggaacaatacatgtcttcaacttaaagataaatgtgggatcaactgcaaatgacaagcctatgccttctccggatcctgaagttcctcatataaggccctctctttcattcattaagggtgtgctgccaaaatattttcactctgaatggtcagtagcccaattcaggctgcaagagggtgaacactatattgttgcatttggacatgagaagaatactgtggcagttgttggcatggatggaagcttctacagatgccggtttgatccagtcaacggaagagaaatg

SEQ ID NO: 6015 - DNA, 432 bp, Zea mays
  Clone ID: LIB3137-030-Q1-K1-C5
tccggtttaatcctgtgggttttggaaggccaatattgtctagcgaataaaaaaatgctggacaggcggtgggacgacatggtggccgggcctcacccggagacaggcctcgagaagctccgcaaggccaccaccgcccgcccgctcgtcatcaacaaagacgcggacggcggcagctacaagcgggcgcagtcgatgccgtcgaccccgacgacgccggtgacgccgtcgtcgtcgtcgtcgtcgacgacgccgcgcggcgccggcaacgtgtggcgcaacgtcttccacccggggagcaacctggccaccaagggcatgggcgccaacctcttcgaccggacgcagcccaactcccccaccgtctacgactggctctacagcgacgagaccatgagcaaccaccgctagatcgggcgagatggatggaca

SEQ ID NO: 6016 - DNA, 385 bp, Zea mays
  Clone ID: LIB3137-030-Q1-K1-C6
agagagagagataaagtggcgggggtttgggcacaaccaccacaaccagccggttcccccggcgtcgggccccaaccaggtgttcaagatcttctgccgcgccaacgagaactactgcctggccgtccgcgacggcgccgtcgtgctggccccggtcaaccccaaggacgaccaccagcactggtacaaggacatgcgcttcagcacccgggtcaaggacgaggaaagcatgccggcgttcgcgctcgtcaacaaggccacggggctcgccatcaagcactccctcggccagtcccacccggtcaagctcgcgcctttcagcccggaccaggaagacgcgtctgtgctgtggacggagagcaaggacgtgggcaagggcttccgc

SEQ ID NO: 6017 - DNA, 425 bp, Zea mays
  Clone ID: LIB3137-030-Q1-K1-C7
cgctgccaccctcctctccgccgtcgttgctgtcgccggggatggggggagcgcaattcggcggcgacaacgacgtcgcggaagtagacgcggcccgcgacggagaggtggaccgccgtgacgtgggcaagatgaagcacgggtgcgagcattaccggcggaggtgcaagatcgtggcaccgtgctgcaaccaggtgttcccctgccgccactgccacaacgaggctacggcttccggagatcggcatacaatatgtcgtcaggatgttgaaaaagtagtttgcctactctgtgaaacaaaacagccagtgtcacaagtgtgcataagctgtggagtcaatatgggagagtacttttgtgatatatgcaaattttatgatgatgatacagacaaagggcagtaccattgcatcgattgtggcata

SEQ ID NO: 6018 - DNA, 421 bp, Zea mays
  Clone ID: LIB3137-030-Q1-K1-C8
accacacaccccacctaccccggccggtcctgcaggcagcacaacatggacctcgccgtgctggagaaggccctgctgggcctgttcgccgcggctgtggtggccatcgccgtggccaagctgagcggcaagcggtaccgcctcccaccggggcccccgggcgcccccgtggttggaaactggctgcaggtgggcgacgacctgaaccaccgcaacctgatggccatggcgaagcggttcggcgacatcttcctgctgcgcatgggcgtgcgcaacctggtggtggtgtcgaccccggagctggccaaggaggtgctccacacgcagggcgtggagttcggctcccgcacccgcaacgtggtgttcgacatcttcacgggcaaggggcaggacatggtgttcacggtgtacggcgaccact

SEQ ID NO: 6019 - DNA, 433 bp, Zea mays
  unsure (1)..(433): unsure at all n locations; Clone ID: LIB3137-030-Q1-K1-D1
gcgtcggtctgcttcctgattcatccgcaagcccttcttttggcgatcgnccatgacggaggatggagggcacaaggtcgccgacgagccctccgcctcaggcaggcaaagacctgaaaggaagaagaggaagtgggatcagcccgcggaggacttggtcttcgcggcggtgacggctgctgccgtgtcggggatgcctgtgatgaatttcggtgctcttcctgccgttgtactgcctggcgtcaccgcatatggagctgctacattgccaagtgtagtccctgttccgtattcattgccgccccatattgcaccatcggtgctccagaatgctgctgcatcagctcataaattgagttaggcaaaaataccagatgaggtcattgcacgggaaattgttataaacgatgcagatccatctgtgcgatataag

SEQ ID NO: 6020 - DNA, 417 bp, Zea mays
  Clone ID: LIB3137-030-Q1-K1-D11
ctgcaagtctcgctacgtagcagtgcattatataaaaagcagccgcaatggcgagcaggagcatggccctctcctccacggccttcgccggcaaggccgtgaacgtgccgtcgtcgtccgccttcggcgaggcccgcgtgacgatgcgcaagacggcggcgaaggccaagcctgcggcggcgtccgggagcccgtggtacggccccgaccgcgtgctgtacctgggcccactgtccggcgagccaccgagctacctgacgggcgagttcccgggcgactacggctgggacaccgcggggctgtcggcggacccggagacgttcgccaagaaccgggagctggaggtgatccactcccgctgggccatgcttggcgcgctcggcttgcgttttcccgagctgctcgcccgcaacggcg

SEQ ID NO: 6021 - DNA, 421 bp, Zea mays
  unsure (1)..(421): unsure at all n locations; Clone ID: LIB3137-030-Q1-K1-D12
ggatagcttacctcacatcgacggtcgttgtagtcgttcgngagtggcgaggcagtgcgggcgctgcatcctgcagggcaagaacaggcgactaataagatgagcacgctggacacgcggacgctcaaggacgagctgacgagcatggacaggaagtgcctcgtggacctcggccacccgctgctcaaccgcgtcgccgacagcttcatccgcgccgccggggtcggggcggccagggccgtctccagggaggcctacgtcgtcaccgtcgaagggctttcaggagactcgtccgggctggacgccgacggcggcaagcggagccatttctccagcatcagaggcgacgacggccagaggtcgctcgacgcagtggtaaaaacggccggcaaggaagccttccagtgggggttggcagccg

SEQ ID NO: 6022 - DNA, 415 bp, Zea mays
  Clone ID: LIB3137-030-Q1-K1-D2
cggggcggccccacccttccggcaagagcgcgcaggaggagcggctgatttttgattctctctgtccctccctccctcgcttcgctcgcgcggggtgcgtgcacgtaccatgagaagatgatgcgcgccaggcccaaaggtacattcgccgacgcgatgagggagagctcccctcctcctcctccccctccggctccggcttcggcagcggtgaaggaggacgagtgggaggtgcggcccggcgggatgctggtgcagaagcggagccccgacgccgacgcccccgccggggcgcccgtccccaccatccgcgtcaaggtcaagttcaacggcgtgtaccacgagatctacatcaactcccaggcctccttcggtgagctgaaaaagatgctgtcggcgcggaccggtctgcacc

SEQ ID NO: 6023 - DNA, 451 bp, Zea mays
  Clone ID: LIB3137-030-Q1-K1-D3
cggggcggcccaaggcgtccgcccacgcacacttttttcccccacgagtccggaccccggaggagccaagccatggcgtccacctcctgctgcctcctccaccagtcaaccgcccgcctcggcgcgtcgccgcgcctggccgccgccccgccgcgcagcgcccagctgctcgtctgcaaggcccggaagcaggaagccgccgcggaccagagcgacgtctcgcgccgcgccgcgctcgcgctcctcgccggcgtcacggccgccgccggcgccaaggtgggtcccgccgccgcggcatacggagaagcagccaacgtgttcggcaagcccaaggcgagcacggagtacatcgcgtacagcggcgacggcttcaagctgctgatcccgtccaagtggaaccccagcaaggagcgggagttccccgggcaggtgctccgctacgaggacaact

SEQ ID NO: 6024 - DNA, 414 bp, Zea mays
  Clone ID: LIB3137-030-Q1-K1-D4
cggttttaatccaaaaacactttttcttttttttttaagaatttccatgctcgggcaattttccattcttcatatatgcacctagcaccacctcgatccatgtcgggtcgtcgtcgctgctgcatgccccccccccccccccctttttttgattcgttgctgtgttaattatagtggtcgcctctttagatgttacagtaaaaaaatattggcggtgatgcggttatttattgatttgttctggtaattaataagaaccctcaagctttggggtgttcacggagaggttgagttgatgcggtgaaaacagcacgtgaaagggtaatgagagatcgatcgcgcggttaaggagacaaggtgacaagaaaggcagatgacgcaatgggtgtttgcactgttactgcggtaaatttt

SEQ ID NO: 6025 - DNA, 204 bp, Zea mays
  Clone ID: LIB3137-030-Q1-K1-D5
gtggcagcccaagtggggcgtcgcagccctgtacggcccaccggtaagtacctcgccctttcggcagccccagctactaccggcagttcccggcactcggtgggacaccgcgctgtcgccgaccccaaccttcgcaagaaccggagctgaggtgatccactccgtgggcatgctgggcgctcggtgcgtttcccgactgtctcc

SEQ ID NO: 6026 - DNA, 385 bp, Zea mays
  Clone ID: LIB3137-030-Q1-K1-D6
ctggcatggctttcaataatggggtctaagaataaggacaaccttggaggagataaacttgtcactgttgaagatattgtccgtcagcactgggccacatatggtcgccattactacacacgctatgactatgagaatgttgatgcaggggctgctaaggagcttatggcaaacctagtaagcatgcagtcatcactttctgatgttaacaagttggtcaaggagatccggtctgatgtttctgaagtagttgcagctgacgagtttgagtacaaggatcctgttgatggctctgtgtccaagcaccaaggcatccgatacctctttggagatggttcacgactggtgttccgcctctctggaaccggttctgttggtgccacca

SEQ ID NO: 6027 - DNA, 314 bp, Zea mays
  unsure (1)..(314): unsure at all n locations; Clone ID: LIB3137-030-Q1-K1-D7
ctccctcctccttcctcctcccngcaaatcctgcaggcaccaccgctcgttttcctgtccgggggacaggagagaaggggagagacctatagagggtgaggcgcggcgtccgcccgatctgctccgccccccgaagcagcctgtcacgtcgttctcactctcagcaaccagcgaaaatgggtgccggaggcaagatgaccgagaaggagcgggagaagcatgagcaggagcaggtcgaccgtgctaccggcggtggcgccgcagtgcagccgtcgccccttgacaaaccggccttcaccttggggcacatcaag

SEQ ID NO: 6028 - DNA, 252 bp, Zea mays
  unsure (1)..(252): unsure at all n locations; Clone ID: LIB3137-030-Q1-K1-D8
ggccgacgcaggcgtccgagcggtnnnnncaaaaaataaacacgtcgctcattatcgtgcttcattcaatccggggcggtccgttcttgcgcgcaccaaccgccactcacatcttatccttcacacctttcacactcttttcactcagttcgagcaaggggggcagctagcgagccacgtgctgcagtcaagctagtgccaatggcgagggcggtggcgatgcttgcggccctggctcttgtcgtggtggat

SEQ ID NO: 6029 - DNA, 413 bp, Zea mays
  Clone ID: LIB3137-030-Q1-K1-D9
ccaggatggagatgtacatggagacagttatgatgagggttgaagctgagattaagaggggggagatggagctcaagagaactgacatcatggcgaaaacgcaccttcagatcgctaggctttttgcaaagaaattgaaacagagcagtggaaagaatggtgtcagttcgtcagtaacagctgaagtggacacccttaccaagaaaggcgagaatggttccgggtgatgtggcatgcccggcagttgattctatcctcagcgtacatggcacctcacttttcctgtgcagcaagtgtaccgagtctgattgagaaatagtcagctgtaaacttacagatgcaataatgggagcgaagatttgactgtttggcccattgcgggattatagaagcgatttttgaatcagtgactt

SEQ ID NO: 6030 - DNA, 424 bp, Zea mays
  Clone ID: LIB3137-030-Q1-K1-E1
atttaattttcttacatactgattattgaaatctctaaaggactgtttggatggtcggtaatatttgagttctttatggttactaaaatataccataacatttaaagcttcaaggtgtttcgatacagcgatgtagttttacatccaattaccatgttattttgagttcttgaagaaaacctattcaaaactcatttccccctttttttaaaatcaaagcacacctcacattaccttttgcaccattgtgagttatgaagcattggcctgtctaatttcatgcgaaagggcctccagctgagttggttaggtggtatgattagcactccttaggtcctgaatttagctctccatgggagcaaatttcagtatgattttaaaaaatcccctcgtctgtcccacgccaaagcacaagtctaatgct

SEQ ID NO: 6031 - DNA, 391 bp, Zea mays
  Clone ID: LIB3137-030-Q1-K1-E12
aattatattatcatatattttttttttttttttttatttttttttttttttttttttctactttttttttttttttttttttttttttttttttttatttttttatatttttttttttttttttttttttttaatttttttattttttttttttatatttttttttttatttttttttttttttttatatcttttttttttttattcttttttttttttttttatttataaatttttttattttttttatcttttttttttattattatttttataatttttttcttaaacttttatcttatttttttttctttttttttttttctaaattttttttatatttattttctgtatttttttttttttatttttttttatttttatttttttt

SEQ ID NO: 6032 - DNA, 369 bp, Zea mays
  Clone ID: LIB3137-030-Q1-K1-E2
cggggcggccccacccgtccgaaccgaggcggccaggctccctcctccctcttcttccctgcaaatcgccaaatcctgcaggcaccaccgctcgttttcctgtgcggggaacaggagagaaggggagagaccgagagagggggaggcgcggcgtccgccggatctgctccgacccccgacgcagcctgtcacgccgtcctcactctcagccagcgaaaatgggtgccggaggcaggatgaccgagaaggagcgggaggagcaagagcaagtcgcccgtgctaccggcggtggcgcggcagtgcagcggtcgccggtggagaagccgccgttcacgttggggcagatcaagaaggcgatcccgccgcact

SEQ ID NO: 6033 - DNA, 448 bp, Zea mays
  Clone ID: LIB3137-030-Q1-K1-E3
aacggggcggccgaggcggccgaacaggcactccctcggccggtcccacccgtgttatgctggtgccgttcaacccggagtacgaggacgagtcggtgctgtggacggagagcggcgacctgggcaagggcttccgctgcatccgcatggtgaacaacatccgcctcaacttcgacgccttccacggcgacaagggccacggcggcgtgcacgacggcaccaccgtggtgctgtgggagtgggccaagggagacaaccagagctggaagatcctgccctggggcgacgaggcctacgccgcgggaggcagcagcgccgccaacgcgccccgcttcggcggcggcggcgagcccaccgtccgcatctactgcaaggccgacgaggggttcagcgccacggtccgcaacggcgccgtgtgcctcgcgcccaccaacccgcgcgacgagta

SEQ ID NO: 6034 - DNA, 313 bp, Zea mays
  Clone ID: LIB3137-030-Q1-K1-E4
ccctcgaggtggagtcgtctgacaccattgacaacgttaaggccaagatccaggacaaggagggcatccccccagaccagcagcggctcatctttgctggcaaacagcttgaggacgggcgcacgcttgctgactacaacatccagaaggagagcaccctccaccttgtgctccgtctcaggggaggcatgcagatctttgtgaaaaccctgaccggcaagactatcaccctcgaggtggagtcctctgacaccattgacaacgtcaaggccaagatccaggacaaggagggcatccctccagaccagcagcg

SEQ ID NO: 6035 - DNA, 339 bp, Zea mays
  Clone ID: LIB3137-030-Q1-K1-E5
tacgaagctgatacttattgtggaacttgcaatggaagtggcgtcccccctggaactgtgcctaaaacatgtaaaacatgtcgaggctctggtgtgatatacatgcagaatggtatatttactgtcgaatgtacttgctccctgtgcaatgggagcgggaaaattgtcaagagtttttgcaagacttgcaaaggagaacaagtagtgaaagtgaaaacgtcagtcaagctagacatagccgcaggaagtgaccataatgacatcatgaaggtttttggtaacggtggtgcagattttgaccgaactaaacctggtgacctttatgttactatcaaggtc

SEQ ID NO: 6036 - DNA, 424 bp, Zea mays
  Clone ID: LIB3137-030-Q1-K1-E6
ggaaaaaccgggccgacccaagcgttcgaaccgggagacccaaaaggtgaaaaaagagtgtttgagtgtgtgtaatcgttacaaggatagggggtgtgcctgcgcgtgctgtttaaccaaatcaagtagaatcctgtccgaatccgacctaagggatggcaaccggtagtgaagcctcaaacgcagctgaggctgtggttgactggcataaacacgacagcaagaggatgctccatgcggtttaccgtgttggggatctggaccgcacaatcaagtactacacggaatgctttgggatgaaactgctgaagaaaagggatgttcctgatgagaagtacaccaatgcctttcttggctatgggccagagaacaccaactttgcagttgaattgacatacaactatggcgttgacaagtatgacat

SEQ ID NO: 6037 - DNA, 422 bp, Zea mays
  Clone ID: LIB3137-030-Q1-K1-E7
ctcagagatggatagataatcctgctaccatatgcagggtcctactagctgatttgtcatgtaaggctgaaattttgcctgtttgtcttgtcaatgaggtagaccatgagaaaggacctgtacatttcacttatactaatcaggtcaaatacttgaggcctctcagttctatgaaaaagttgcagggctgtggatgccagagcgtttgcttgcctggcgacaccagttgtgcttgtggacaacataatggaggcgatttaccctttagttcatcaggattgttgtcatgccgcaaaccaatagtctacgaatgtggcgaatcttgcaactgttctacaaattgcaggaacagagtgacccaaaaagggtccaagctacatttcgaggtcttcaggaccacaaatcgaagctggggtcttcgc

SEQ ID NO: 6038 - DNA, 411 bp, Zea mays
  Clone ID: LIB3137-030-Q1-K1-E8
ctttccccatcgcctcccttccaccccttcttatctccgtctcccgcgccgacgacttgaggagggtttggccttagggttcaggcaagatgggtgagcgcaaagtgctgaacaagtattacccgccggacttcgacccgtcgaagatcccgcggcggcggcagcccaagaaccagcagatcaaggtgcgcatgatgctccccatgagcatccagtgcggtacctgcgggacatacatatacaagggcactaagttcaactccagaaaggaggacgtcgtcggagagacatacttgggaatacaaatatttaggttttacttcaagtgcactaaatgctctgctgagatcacattcaaaacggaccctcagaattctggctacacagtggaatcgggggctagtcgcaatt

SEQ ID NO: 6039 - DNA, 416 bp, Zea mays
  Clone ID: LIB3137-030-Q1-K1-E9
atgaactttagtttacacttcctcttattttgtccaattgtattcacaaggtatgacgctgctgatgaaactgcacaaagtccaccgaattgacaggcgcccttgggtacatagcagtgagactggaaaggtaacaaatggaatacggatacgtagataaccacggaaacccagcaatgctaaggtattgtttggtcactgcataaccgacgatgatggtcacaacgcctcgtgatgcctcgtgccttaacagcacccggatgatctctgggcccggttgccacccaccacgttcacggtatctggcacatacagttcttcctctggctcattcttcagagcgttcttcacgatacactggaaagcgtcttacacgttcgttccgtccttagcagacgtctcaaagtacgggatgt

SEQ ID NO: 6040 - DNA, 428 bp, Zea mays
  Clone ID: LIB3137-030-Q1-K1-F1
gggaggcgcgacaaaaagggcgccgcgccccgctccgccccgcatcgcccccgacgccggcatgtctccctcgctctccttctcccgatctgatccgaagcgcggcggcgtcgacgacgacgacctaagggcacgatgcattcgaccaacctgctgctggaggagcccatccggatggcctccatcctggagccatccaagaccagcttcttcccggcgatgaccaagatcgtcggcacgctcggccccaagtcgcgctccgtcgacaccatctcctcctgcctcaaggccggcatgtccgtcgcgcggttcgatttctcgtggggagacgccgcctaccaccaggagacgctcgagaacctcaagctcgccatcaagtccaccaagaagctgtgcgctgttatgcttgacacggttggaccggagct

SEQ ID NO: 6041 - DNA, 423 bp, Zea mays
  unsure (1)..(423): unsure at all n locations; Clone ID: LIB3137-030-Q1-K1-F10
gaagatcaagatcgagatcaagatctcgttctccatcccattctaggcgtcatggccgtgggatacatgctgaaagcaattattggagcaagcaaaaggctcctagggttgaatatattactgaatttggaggttccgatgataccagtgaaccaaaagtttcagggatctctccgccttcgtctccaatacgaattgacatacctaaccggttgtctggtggtcaaattcttgaggcacttcacagtgatcctgcctcttctttgtctgtggaacaggaaagaactgcaaaacttttgaaaccttcccccagtacatcatcagcattagctaaactaagcaaggttgcttctgggggaactggtaaaactccncagactgaaaagaaagaaacaccacaagaaagacttaagaggataatga

SEQ ID NO: 6042 - DNA, 425 bp, Zea mays
  Clone ID: LIB3137-030-Q1-K1-F11
gccacggcgtactccgtggcgctcctcggttgcgcacgcctgccggccgccttcctcgctggacgcagcagcgtgtgccaccaccagcttcgcctccaagacgcaccgaggctgatctccctgcaccgtgccagggccgcttccgaggacacgtcggcctccggcggcgacgagctcatcgaagacctcaaggcaaagtgggacgccgttgaggacaagcccaccgtcctcctgtacggcggcggcgccgtcgtcgcgctatggttgacgtccgttgtcgtcggcgccatcaacgccgtgccgctgctccccaagatcctggagctcgttggcctcggctacaccggctggttcgtctaccgctacctcctcttcaagcaaagcaggaaagagctggtcgacgacattgagaccctcaagaaaaa

SEQ ID NO: 6043 - DNA, 168 bp, Zea mays
  unsure (1)..(168): unsure at all n locations; Clone ID: LIB3137-030-Q1-K1-F12
acccacgcgtccgctagatcgcgagcggnnccctttttttaataattttttgaancgaacgagtaaagttcgctcatattaacagaggaaatccccccctaaatataagacttagaaggatatgtacattcacttatctctctcaaaaaaaatccttgttcataatgc

SEQ ID NO: 6044 - DNA, 376 bp, Zea mays
  Clone ID: LIB3137-030-Q1-K1-F2
cgtcgggttccgccgactgccaagagtgcgaggagtctttggccggcgacggcttcgtctgccgtgacgggatcttcagcctgctcgagcccccggtctgcacacctaggccgtgggactgctgcgacttcgccgtctgcacaagggactacatcccctactgccagtgcggcgacgtggtggagtcgtgccccagcaactgcaaagcgtgcaagcttgtggagtcggaccctcctcgctaccgatgcctagacgtcttccacggctatcctggtcccaagtgcacgccatggatcagttagagcaattagctcagctcagctacttgctaaataaataaataaataaataaaagtagcgcagctcagctacttgc

SEQ ID NO: 6045 - DNA, 424 bp, Zea mays
  unsure (1)..(424): unsure at all n locations; Clone ID: LIB3137-030-Q1-K1-F3
gcgtccggcaactgcaaagcaccaagctttactctttttttgtactgaacgggtgactagataacagggggcgtgaaccatggcggacgagtacggccgcagcggctacggcaggtccggcgccggcgacgactacgacagcggctacaacagcaagtccggcactgatgactacggccgtggcgaaggtggctacaacaagtcgggcggcgatgacgactacggccgcagcggcggcgatgggtacggcaggtccggcggcgacgactacggccgtggcaccggcggcggtggctacaacaagtccggcggcggagacgactactgccgcagcggcggcgacgactacngccgtggcaccggcggcggcgggtacaacatgtccggagacgacggctacgacagcgggtacaacagatcgggc

SEQ ID NO: 6046 - DNA, 279 bp, Zea mays
  unsure (1)..(279): unsure at all n locations; Clone ID: LIB3137-030-Q1-K1-F5
ggggagtcgagggaacgacctttcaacctccaggaagcctcgcnctcgcttctgtccgtcgatgaagcaccaacaaggaagggccaatgctttcttctggggttcgagggaagcttgtgaaggggccaagaacacaagtggtnttgctggcacgatnngtactatctcactatntgaagtgaaggggatggcgaagtcnaagaagcttcttacgaagctaaggggtctgggaagaaaagccatgtggaagaacctcaaagggggctgcaagggaattca

SEQ ID NO: 6047 - DNA, 439 bp, Zea mays
  unsure (1)..(439): unsure at all n locations; Clone ID: LIB3137-030-Q1-K1-F6
ccaagcggtccggggctaatccaccacgtccccgaccgcaactttttccggtacgaggccatctacagcttctgcgtcggcgactacggccacatctcggtgcanggcgcgtacctgacctacgaggagtcgtacctggccgtcacgggcggctccggcgtcttcgagggcgcctacggccaggtcaagctccaccagatcgtattccccttcaagatcttctacaccttctacctccggggcatcccggacctgcccagggacctgctctgcacgcccgtcccgccctcccccaccgtcgagcccacgcccgccgccagggccgccgagccgcacgcctgcgtcaacaactacaccaactgactgatcaattccagcccaggaaccatctctgtctgccgtgcctgtccccccctgcccctcactcgatttgtatgtt

SEQ ID NO: 6048 - DNA, 195 bp, Zea mays
  Clone ID: LIB3137-030-Q1-K1-F7
accttcactgaggcgaacaccaatcaaagaagttaaattactcttatttggcaaacaaatactaatatcttgtcactggcttctactaatatagatggtgcgactcattccaatttgctggctgataattctgtgaaactttccgtgaagccattaatcggcaccatcattttattgcactacaaatgttgctca

SEQ ID NO: 6049 - DNA, 418 bp, Zea mays
  Clone ID: LIB3137-030-Q1-K1-F8
ccggagggtcgcttagcaaggaccaagtcaaatccgccgttgatcagtatgtgaagtaccacgacctccacggaggcgaacaagaatcaaggaagtcaaattacgctgatttggcaaacaagtactatgatcttgtcactggcttctacgaatatggatggggcgactcattccattttgctggcggatatccgggtgaaacttcccgtgaagccattaagcggcaccagcattttatggcactacaattggggctcaagaagggtatgaaggttctggacgtgggatgtggaattgggggacctttaatagaaattgccagattcagctcaacttcaataactggattgaccaacaatgactaccatgtctcaaggggcaaggagcacatcttttcagcaggtttgagtgagcaatg

SEQ ID NO: 6050 - DNA, 428 bp, Zea mays
  unsure (1)..(428): unsure at all n locations; Clone ID: LIB3137-030-Q1-K1-G1
gcgttcgtttatcttttctcattttgctgttngaangtttgtttaaaaacagaccaaactgtcgtttagttgctcttgtcgctttagttcatctgattgaagttggtggtcaccagttcagtgatggtgattgggaaacattattaaagagtattagggatgcgtcatacacaactcagcctcttgaactgctcaattcattaggattccataaatcaaacaaccagcagttactttcaagagaagaaagcaatgcacatggcaatagttaccatggcagccggggggaacccttcatcgttaataatggtgagcatagtcatgcagaagcaggtccacaaactagcctggagaattcggaaggtttaccgttaccattagggaaaacacaaccttgctgttccccacgtggccaaatctttggacaa

SEQ ID NO: 6051 - DNA, 394 bp, Zea mays
  Clone ID: LIB3137-030-Q1-K1-G10
gacacaggggggtttggtttcgtcccttaatcaaagatacaactgaatggtcggcgtgttgatcaggtctaaaagcacctctcaggaaaccactgaccctggtacagtatatatagattgtttaaccacatgtatcctgctataagattgatgtgcagcagaacaggacgtattgggagattgcagaatttggatctttatacttgtgcgttgtatttaatctgttccctaattgtttgttttgtttgccgacatctctcccagtcccaacaatcatttttttacgcgatcagtttgaaacagtgcaaaaacatgctaattccttatttttccttgcaagatttgtcttttggtccttaccagattccctgggaggcgcttcgttctggctggg

SEQ ID NO: 6052 - DNA, 418 bp, Zea mays
  Clone ID: LIB3137-030-Q1-K1-G2
gtgggctgcaggctaaggagagtgtgttcaccaacagctagtgctagtcccccttcgttccatccatccatggcatgcgtcagcaccttccagagctgccccattgccagaagagcaaagatcaacacgagggccaggggctgcagcagtagcgtggcgaaggggtcaccaccaccagccttccagttccagtgcagggcgtcgactttcgcggcggacaccagcctccggctcgagctggacgagaaccccgaggcgatcatctcgggtgcgtggcccgggaactgctccctcctcagctacgacgacctccgcgcctacctcgagtcgcaggagacggcggcccaggcagacggtcagcgcggcgtggcgctcctgagcgagaccatgtccacacccgtgctggtagccacagcag

SEQ ID NO: 6053 - DNA, 408 bp, Zea mays
  unsure (1)..(408): unsure at all n locations; Clone ID: LIB3137-030-Q1-K1-G3
ccagacctactcacggttttacattggagnacactcctccagaggcagtccttaattcaaactggtttcaaggatcaagaagtgcaaggcttaagtatgacatctggagcgttggagttgtcatgctagagttgatgatgggttctccccatgtttttcagataagtgaccgtacacgcattttaatggatcagcatctcggagggtggagtgaacaaacaaaggagcttgcatacaagttgaggtcatacatggagttgtgcattttagtcccagggatttcctcgcaacatcatggcagtggtagcccagaacaaggtcaatttgggttagctttcttgaaaatgctctgaagaatcatttgcacatcaagttgaagatcagagatccctctaagattggtttttc

SEQ ID NO: 6054 - DNA, 209 bp, Zea mays
  Clone ID: LIB3137-030-Q1-K1-G4
cggggccgccccacgcgtccggttgaatccggggagtgggctattgttgggggcactggtcagtttgccatggcaaacggtgtgatctccaagaagtttcatgagcagagaagcgaagggaacatcatacaactcaccatccatgctttctgtccggtgctcggaccgacaaagcgcttgtccacaaaagttggaccgtggggtgggag

SEQ ID NO: 6055 - DNA, 424 bp, Zea mays
  unsure (1)..(424): unsure at all n locations; Clone ID: LIB3137-030-Q1-K1-G6
gggctggttgccccccccaggattcnccgngtggtctacttcctccatcaccacccaccggatgaccgtggtgatgctcgtcatatggaaaaagcacatcgtctacgtcctcctcttctacgtggtgttcggcctcacggagatgatctacctctcgtccatcctgtccaagttcatccagggcggctacctccccttctgcttcgcgctggtcctcatgacgctgatggcgacgtggcactacgtccacgtgaagcggtactggtacgagctggaccacatcgtgcccaccaaccagatgacggcgctgctggagaagaacgacgtgcggcggatccccggggtggggctcctgtacacggagctggtccagggcatcccgcccgtgttcccccgactcatcaagaagatcccgtccgtgcac

SEQ ID NO: 6056 - DNA, 421 bp, Zea mays
  Clone ID: LIB3137-030-Q1-K1-G7
ctctcgtccgcgcttgtttgttcgcgtctttttcctgtagggaactccgttacccggccccggctgtgcgtggcgtcagcacgccccgcgggcaggagggtgaggctgctgagcgtgaggtgcgagcagggagccaagggcggtggcgggctggacgtgtggctgagccgcggggcgatgctgggcttcgtcggagcggtggccgtggagctgaccaccgggaaaggcgtgcttcagaatgtgggattgaccgcgccggtgccgacgctggcgctggcgctcaccggcgcggtcggcgtcctcacggcctttctcatcttccagtccgggacgcgggactgatgggtgaattgtcaaagctcccaaaaggacatgcataaagtctgtcagagtcttgtgctgtgtatgtctatgctgttgt

SEQ ID NO: 6057 - DNA, 413 bp, Zea mays
  Clone ID: LIB3137-030-Q1-K1-G8
actcgctagccccactaccaccgcaccacgcgctcccgtttccgccgatccgagcggcgtagatcgtggaagcccagcggctcagagtccagggggagggagctcgcggcggctgaggaaggtgttcaccagcgtcgcggatttcattgaggaagagatggggctctcctttgggaagctgttcagccgcctcttcgccaagaaggagatgaggattctcatggtcggactcgatgccgccggtaagaccaccatcctctacaagctcaagctcggcgagatcgtcaccaccatccccaccattggattcaatgttgaaactgttgagtacaagaacattagcttcaccgtttgggatgttggtggccaggacaagatcaggcccctgtggaggcactactttcagaacacgc

SEQ ID NO: 6058 - DNA, 406 bp, Zea mays
  Clone ID: LIB3137-030-Q1-K1-G9
gtccggatcccagctcccctgcccgctcggttgactccctcgtcgccgagtccagctgggagtccgagaaaaaatcaaatcgaccgagtccgcccgtgaagccgccgacagaaggagagagcacacagcgggcgaggcaggcagcatgaagtccatgggcagccgcgacaagctcgcggcggcgtcgagcccccgccgcgtcctcttggtggtcttcgccttctgcttcgccttcgccaccttcctcaccttcctctacaccacctcccacttcacgaccgcgcccggctccggctccggctccggctccatcgcggcctctaccaccaccaccaccaccacgaccttcggctctgcgggcggcggcggccaaggccaagcagggcccgagtccgtgtccaagcag

SEQ ID NO: 6059 - DNA, 430 bp, Zea mays
  Clone ID: LIB3137-030-Q1-K1-H1
cggacgcgtgggcctccctttccccttccctccctccctctccccgcgggccgccagaggcaatgtcgccctcgattcgaccccgattcgtccgcccgcgaccgggattccctccgccaagcgcggatctgaacgctgcgctccgtgtcgccgctcgaatccgccatgaagggggccaaatccaagggcgccgccaaggccgatgccaagctggcggtgaagagcaagggggcggagaagcccgccaagggcaggaaagggaaggccggcaaggaccccaacaagcctaagagggctcccagcgctttcttcgtgttcatggaggaatttcgcaaggagttcaaggagaagaaccctaagaacaagtctgtcgctgcggtggggaaagctgctggcgacaggtggaaatccctgagcgagtcggacaagg

SEQ ID NO: 6060 - DNA, 423 bp, Zea mays
  Clone ID: LIB3137-030-Q1-K1-H10
agcggacccatatgtgaaaggtcaccttggttctttcaaattccaaacacagatacggaggaaaacattgtcccctaagtggtttgaagaatttaaaataccaatcacatcatgggaggcaacgaatgaacttatcatggaagttcgtgataaggaccccatgtttgatgactcacttgggcaatgtaccattagtttacatgatctgagaggtggacaaagacatgacaaatggatatcactgaataatgtgaagaaaggaaggattcacttggcagtaacaattgatgatatatccgaggaccaaaatacatcaagtttggaccaatcattgaagcaagcggatactgaactaccagtatcaacatctgtttgtagcgaagtggatgctagtgaacctcctgaagaaaagaaagtcttaat

SEQ ID NO: 6061 - DNA, 422 bp, Zea mays
  Clone ID: LIB3137-030-Q1-K1-H11
gcaccttccttttcagcacctgcaccatcattccgttgcgctcgtgctcccctctgggcgggcgccagcacccccgcgccgccatggccacggactcctccgccgcctcgttccagaagatccagatccagcgcgaggacaccacttttgatgcttatgttgttggcaaagaaaatgctcctggaattgtggttttgcaagagtggtggggagttgactatgagataaagaaccatgcgatccacatttcccaacttggtggaggatacagagcactcattccagatttataccgtggaaaagttgctctcgatgttgctgaagcacaacatctgatggagggtctcgactggcaaggtgcagtcaaagatatccaagcttcaattaaatggctgaagtcaaatggatcacccaaggttggt

SEQ ID NO: 6062 - DNA, 423 bp, Zea mays
  Clone ID: LIB3137-030-Q1-K1-H2
gaagggaggagggatggttctccttcgtctctggcacatcctcttcttcctcacatgcttgtggccatcctttgttcatcctatggaaccaggcacctaccgttgctccaatgtttccatcccatatccttttggcgttgctggtaagagcccctccctgtcccgtggatttaaagttgtgtgtggacacagtggtccgttgctgtccatcggaaacagcatgcttgggattcttgacatctcgttgcttgatggtcttgtgagcatattggctagtgctagttctcagcagtgcataggagggacggcgaactctagcgttaaccttgaggggaccgtcttcacattctcagacacaaggaacaagttcacagctctgggttgtaacgtggtggccatgcttttgaatgacagcagggggta

SEQ ID NO: 6063 - DNA, 434 bp, Zea mays
  Clone ID: LIB3137-030-Q1-K1-H3
cttccgcggccgttttttacggccggtgcaggggacgtgtgtagtaccctttctttctcttcgaagaaagatgcggcggcgtgtggtataaaccccgcccgtcacgccgggccgtccgtgcgtttccttttgtcttcgcttgcttcctttcgaaagtccttgcgtcacactcgccgatcgatcgagtctctccggattccagagaggcccaactgccgaagccatcgatcgccgccacctcttcgagcagaatagttgagaatggctgacgaggatatccagcctatcgtatgtgacaatggcactggaatggtcaaggccggtttcgctggtgatgatgcgccaagagctgtcttccccagcattgtgggaagaccacgccacaccggtgtcatggtcggcatgggccaaaaggatgcctacgtaggtgatga

SEQ ID NO: 6064 - DNA, 300 bp, Zea mays
  unsure (1)..(300): unsure at all n locations; Clone ID: LIB3137-030-Q1-K1-H5
cgagcttatagagcttctatttctgtaccattttgtttgatcagtataaaatcctctgtcatgcatggaccagaagttgtgtgcatcgcctgaaagctaatttttggggtcttgttgctgttggcattcctgctcatgtgtgaagttattttttgtagaaattgtacctttacaaattgttataggagtgacttttcatagtagtaaagcatttgtgtgacctgtanacaaaaacaatacagaatacaatactactattacatgaaagngttgacctggttgaatacatataaataaaaa

SEQ ID NO: 6065 - DNA, 350 bp, Zea mays
  Clone ID: LIB3137-030-Q1-K1-H6
ggcccgaggcgggggcctgggcgggcaaggcagtgaacgtgccgttttttttcttcggcgaggcccgcgtgacggggcggaagacggcggcaaaggcaaagccggcggcaagctccggcagcccgtggtacggccccgaccgcgtgctctacctgggcccgctgtccggcgcgcccccgagctacctgacgggcgagttcccgggcgactacggctgggacaccgcggggctgtcggcggacccggagacgttcgccaagaaccgggagctggaggtcatccactcccgctgggccatgctgggcgcgttgggctgcgtgttcccggagcttgtcgcccgcaacggcgtc

SEQ ID NO: 6066 - DNA, 389 bp, Zea mays
  Clone ID: LIB3137-030-Q1-K1-H7
cggccctccccaccgccaccattttcccctgcgacatgggccgcaatcttccagccgagcgggtggaagcacccaggagcagcaagatggacaagaagagaaagaaggacaagaagcggaagctggcagccgaggccgaggaggaggcggcggtgacggcgacagtggagaccgtgaagagcagcaagaagaagcgggtggagaatgaacccggcgcaggagcagtggaggcggagaacggcgctgagaagaccgtggcggtgaccgggaagggttcggaggaccctaagtacgcgccgctacggtcgttctccgctgccgagctgccgtctcaggtgctcgaatgctgcagcgcgttcgcgcggccgtcacctatccaggcacacgcc

SEQ ID NO: 6067 - DNA, 415 bp, Zea mays
  unsure (1)..(415): unsure at all n locations; Clone ID: LIB3137-030-Q1-K1-H8
ctcctctcttctgcgcccccctatcgngcgtgattctatctaggattctagggttcgggcgcctcgtctcgcgatggacaagggcagcgtcttcgtgcccccagcccctgccgcagccgccgcgaagaaggccaagcgcttcgaaatcaagaagtggaacgccgtctctctctgggcctgggacatcgtggtggacaactgcgccatctgccgcaaccacatcatggacctttgcatcgagtgccaggcgaaccaggcgagcgccaccagcgaggagtgcaccgtcgcttggggaatttgcaaccatgcattccacttccactgtatcagccgttggctaaagacccgtcaagtgtgccctcttgacaacagtgagtgggagttccagaagtatggtcactagagagaatggctt

SEQ ID NO: 6068 - DNA, 284 bp, Zea mays
  unsure (1)..(284): unsure at all n locations; Clone ID: LIB3137-030-Q1-K1-H9
acccattcgtacggaaagttatgcaggacctaaagccaggattcnatcacggnaaggccananagnnctgggggggtgaatttaaatttaattttgctcataaaaccttattccctactgaatgttgtcattaaggcactcatgctctattagatcataaactacgtccattctctttatcatcatattaatgtttagcgaatgtcccacttacatatggttacataacacattcttatctctatattctatttttaaattttttctttacttattattaacac

SEQ ID NO: 6069 - DNA, 441 bp, Zea mays
  unsure (1)..(441): unsure at all n locations; Clone ID: LIB3137-032-Q1-K1-A9
cgtccgcccaggcctccnntcccttttaacgaacngtacatcttagtggttgaggggaagaatagaagcatggtttacattaaccaaaagttttccaacattacattanttccaacattaaatacggatgtatcataaacataaagcaagaggatgttgaatgggctgccaatctggcacatgcccatgacttcatcacattactccccaatggatataacacacttgttgatgatgatctgctcactgggggacaaaagcatagaattgccattgctcgagccattcttatagaccctacaattctcatccttgatgaatcaaccagtgcattgtatgcataaagtgaacacaatgttaaggctgtgcttcgttctgtcaaaagtgatttgtcatctataacaaccgtcatagtaattgctcatcgactttctacaattc

SEQ ID NO: 6070 - DNA, 428 bp, Zea mays
  Clone ID: LIB3137-032-Q1-K1-B10
cggacgcgtgggttaattttgagccaacctctcatctagagccaaacacttccaatttttgtaacgacacttctcagatcttaataatcgagcgagagcatcatcagcctttttctctagattgtttgtctttgtagcacatacagtgaaccagaactggtgttttgattattaaatgcggctaaaagtatggggcacaaatacgattagaactttgcagtcttggtcaacaattggtgataatcatgcaatcaatgcccaccacttgctgaaatatgtggcgatttgcgttgaaagtttgttttgcctgtcatagaaagcaccacgcgctgtggcacaattaatgtagaatagcttgaacatgtacattaagggctagtttgggaacattatttttctaagagatttctattttcctaagggaaatt

SEQ ID NO: 6071 - DNA, 433 bp, Zea mays
  Clone ID: LIB3137-032-Q1-K1-B11
ctgctgccttatacgaaacatagctacctactactcaagtatccatccttattgagtacagtgttgatccatggactcggaaggagttgtagcagcaaaggtggcagatgagactactaaaccggcaatccaagaagacggcgccgagagcaaggccgggatgactgatctgctgatgctgaccgacaagtcgcagctgcaggcgctggcgatgctgctgcggaacaacgaggagctcatgatgagccaggcgatcaagtcggagacggagcgcattgagtacctcaagacggtgagcgactgctacacgcggacgatgaagctcctcgacgattccatggcggccaggaccacgtacgagcgttcgggcggaatgaggagcctcgtcgcccgggacatggacgactacgtcgtctacggcctcaacgcgtgc

SEQ ID NO: 6072 - DNA, 436 bp, Zea mays
  Clone ID: LIB3137-032-Q1-K1-B9
agcgcacacacacacaaccagatctcccctttattcacccgtcggcacctccgcttcaaggggcggatctttgtgaaaaccctgactggcaagactatcaccctcgaggtggagtcgtctgacaccattgacaacgttaaggccaagatccaggacaaggagggcatccccccagaccagcagcggctcatctttgctggcaaacagcttgaggacgggcgcacgcttgctgactacaacatccagaaggagagcaccctccaccttgtgctccgtctcaggggaggcatgcagatctttgtgaaaaccctgaccggcaagactatcaccctcgaggtggagtcctctgacaccattgacaacgtcaaggccaagatccaggacaaggagggcatccctccagaccagcagcggctcatctttgctgggaagcagc

SEQ ID NO: 6073 - DNA, 381 bp, Zea mays
  unsure (1)..(381): unsure at all n locations; Clone ID: LIB3137-032-Q1-K1-C10
ccgtgcttntcctcctgactttatcacgagctctgctttattgagtgcaatatgattatagagctcgcactgtttgcaaacctgaccgtgagcctgctctgtacaacagtggcgtgctccgctgggcgagcaaaataacggacttcagaacggaggacgaatgcaactactccccggcatttgtgctctacaacatgtcggcggaaactgcgtacagcttctattactgggtgaaaatcgacgggccacaaaacgcacatgtgaaaagaaatatactgaccgtggagaacgcaccataacagtgcttcttgaccgctatcgcgcgcaacgactgctgatattttctcaagggtggctttactctcaactccacgtctcaaa

SEQ ID NO: 6074 - DNA, 430 bp, Zea mays
  Clone ID: LIB3137-032-Q1-K1-C11
gcagagacaggtgtgcagggaaggatcatttacgtatcatcggtcgcgcataaaagaagtgatggtacatgctttgagctgaacaagctaaacgataaggctaggtacaaaccgttcattgcatacgcgcattcgaagttagccaatattctccacacaaatgagttgtccaggcgttttcaggaagaaggatgcaacctgacagcgaattccctgcatcctggagtgatcatcaccaatatcattcgctatgttgctggaaacagtgcgctgatttcggctctctcccctgtagcaaatcttgttctgaagagcgtgccccggggggctgcaactacttgttacttggcattgcaccctaatgtcaaaggtgtatctggtaaatacttcgctgattgcaatgaagcaacaccgactgctgtcgcgagag

SEQ ID NO: 6075 - DNA, 300 bp, Zea mays
  Clone ID: LIB3137-032-Q1-K1-C12
ccgaccgaggcgtgcgtgctccatcccgctctgcctccatgctttttttttttccatgacgccagtcctctcgcctgtgtccggacccaacacccgggcggctggaacccgcatgtgctcttattgccgctcgaggaggctcgccgtttgctggattcgttctgtcctttgccggccgtcattgtgcccttcgcggctgctacaggggcgtgcgcagtgctgctgtatgggagggtgacggccatctcccatgtcgtccgctgcccgggctggtggcgtgcaatgaagacggattcacaa

SEQ ID NO: 6076 - DNA, 435 bp, Zea mays
  Clone ID: LIB3137-032-Q1-K1-C9
ctgacgcgtgggccgattgggtaaatgagttctattctggggatttctggtaccatgaagatagagaggcatactttgatgatgcggaccactaccggatgatacggaccatgtgtcaactttcctgtaatgtttgtgacaacgcacaagatcaggttgctcaagcaaagcgcaaaagcaagttcaagagcattgatcaactgaagggacatttatactgtgtgcataggttgcacatgtgcaatctttgtttggaggagaggaaggtgttcatttgtgaacaaaaggtttatttgaagtcacagttagctcatcatatgaaaactggcgactctgaattggatggctctgacgtagagcgcaatggttttgctgggcatacaatgtgtgagttctgcagaaattcattttatggagatagtgagctttacatgc

SEQ ID NO: 6077 - DNA, 414 bp, Zea mays
  Clone ID: LIB3137-032-Q1-K1-D11
ggccgaccgaggcgtccgatccgcccttcgccttgctagggggcggtgtggttgtggtagtggtagggtatacaggagggcgctgcccatggagaaggcggggcaacaacgccatgttatcggcggcggcggcaagagggcgcccgcgctggggctgcagaagcagaactcgtggtcgccggacatcgagcgcgacgaggcgtgggagcgccggcgcaggggcatgcgccgcgggggcacggcgctgcgccgcgcccgcatcgtcacggacgacgacctcgacgagctccgcggctgcatcgacctgggcttcggcttcgagccggcgcccgccgccgcgtgcgcctgcgcctgctccgggaggaaccgcctcctggagacgctgcccgcgctcgacctctactacgccgtcca

SEQ ID NO: 6078 - DNA, 421 bp, Zea mays
  Clone ID: LIB3137-032-Q1-K1-D9
ggacgatcgagcaagaatcaagcagcagtttctattaaaccatcatcgatccatgtatccaccaatggcggcgctcggaggacggcggaggagggcgtcgtcagcggccctcctgctagccttgttggcggtggccctggtctccctggccggcccagccactgccgcggggaacaagaccgggcaggtgaccgtgttctggggccggaacaaggccgagggcacgctgctcgaggcctgcgactcgggcctctacaccatggtgatcatgtccttcctcgacgtctacggcccgcagcgcggtggctaccaccagtaccacctggacctgtcggggcacccgacggccggcatcggggacgacatcaagcactgccagttcgtgggcgtgccggtgacgctctccgtcggcggcttcggc

SEQ ID NO: 6079 - DNA, 397 bp, Zea mays
  Clone ID: LIB3137-032-Q1-K1-E10
ccactggctctcctatatagaagcgcggcttgagctcgcaccgtcgccgccgctgtcgcatcagaagcctctcttcccgtcttccggtcttcccccaaacccctcccagaagcaatcattccgcccgcattaaggccaagtggaagaagaagcggatgaagcggcttaagaagaagcgcccaaagattaagcaaaagtcccagttagccaaatcattgagtgtccccgcctggagtctctctgcgttcggttgttggttactgagaaaatttaggtttttttactaagacacgctgttatggatcacaaattcctctcgtttgttcgtggtctaaatattgcatcaagtgttctgcactttattctttagatgttaagtgaaacgagagcttgtcta

SEQ ID NO: 6080 - DNA, 461 bp, Zea mays
  unsure (1)..(461): unsure at all n locations; Clone ID: LIB3137-032-Q1-K1-E11
aatanngggccgacggcgcgtncggcacacactcgtctcatcggagaaaagttgtgccttgttagggttttagacggcgatgggggcggggggcgacgagaaggctgcgatggctgcgtccgctgcagccgcgggggccggtgccgccgagggcgagggcgcggtggactccaaggaccttcagcagcagagcaaggcgctcgacaagctcactgatcatgtcgaggaccggcagctcgattcatcccgtgtccaatccgccatggcggcacttgcttcatccaaggaggctgactggaacgcgatgaggctgagggagaaagaattggctgctgtcaagatcaacccctcatgaagctaagcattacacctagctagctagctgaactgaacaccaccagacactgaattccactcagcaaaggagagccggcaaccaaccatgatcaatgccaagagac

SEQ ID NO: 6081 - DNA, 442 bp, Zea mays
  unsure (1)..(442): unsure at all n locations; Clone ID: LIB3137-032-Q1-K1-E9
gcagcagtgcccgccaccgcctctgctccctccgaagaagcagcagtacccgccaccgcctctggtcccgccgaagaagcagctgtacccgccaccgcttcccctaccgccgaagaagcagcagcaccatcacccgccaccgcctctgcccacacttccgccgaagaagcggctggcgtcaccgcctctgctgcctggaagcgagaagcagtgggtcatctcctccccgtcggagccgcggttcgtgccgctgccggtgtgggctctgatgtccggctccgggaagcgcaagaagcggtcaggctgcggcgggcgcgttcccgccctccacaccccagccgtcgtcgaggagaccgggcgcgcctgagaggccgagacgatagacgacaccctccctgttactggtatccatccnctgctcctggatcatgccaatctgatg

SEQ ID NO: 6082 - DNA, 184 bp, Zea mays
  Clone ID: LIB3137-032-Q1-K1-F10
acgaatgagcttgaagagctaccctatactattggatcgtgcacctctctcgtggagcttatactggattttaatcagctcaaagccctcccaaaagccattgtgaagttggaaaacctggaaatccttgacgttacactacaatcataatcaaaagcctgcctacaacaatcggccattttac

SEQ ID NO: 6083 - DNA, 428 bp, Zea mays
  Clone ID: LIB3137-032-Q1-K1-F11
ggaagaggtgaatgtttcctctgctgaaactttttctctgacatggctgatgctcctgcgccagaccaattgaaaaagatgagagacaaactgaataactggcagaagctattgcagctcctcctgtgccataggaggagaagaaagatgtcaagccagctgagcctgaagctgcagcaagcaacccaactgaggattctgcccctgctcctgctgaacctgctgatgttgctgctccagctgctgagcccaaatcagacgccaaacctgctgctgttgctgctccagtgcctgagaccaaatcagacgccgagcctgctgctgttgctgctccagcgcctgagaccaaatcagacgctgatcctgctgctgttgctgctacagctcctgagaccaaatcaatagccgagcctgctgctgttgctttt

SEQ ID NO: 6084 - DNA, 434 bp, Zea mays
  unsure (1)..(434): unsure at all n locations; Clone ID: LIB3137-032-Q1-K1-F12
ctgacgcgtgggcggactcgtgggctggatagcttcagcaggaaaaattgatggccttgggtctggtatcgggacaggaggtaccatcaccggtactgggcgatacctcagagagcaaaatcctaatgtcaagctctatggtgtggagccagtggagagtgctgttttgaatggtggaaaacctggaccacacaagattcaaggaattggagctggttttatccctggagtcttggatgttgatctccttgatgaaactctacaagtttcaagtgatgaagctatcgagactgccaaggctcttgctctgaaagaagggttgttggttggaatctcttctggtgcagctgcagctgcggcagttaggcttgctaagaggccagaaaacgccggaaagctatttgttgtcgtgttcccgagcttcngcgagcgct

SEQ ID NO: 6085 - DNA, 425 bp, Zea mays
  Clone ID: LIB3137-032-Q1-K1-F9
ccgcctttcgtcccagcccctaaaccatttttcattcctctcatcagtttagcacaatggcactggctaataagcttggtggtctgctcaagaaagccacaagttcaaatctgtctgtctaccaagcaatcagatgcatgtcatccaagctctttgttggagggatttcttatcaaactgatgatcacagtctcagggacgagtttgccaaatatgggcaagtcattgaagctaggattatcattgaccgtgaatctgggaggtctagaggttttggctttgtaacttacacgtcttctgaggaggcttcagctgccattactgccttggatggaaagactctcgatggacggagcatacgtgttaatcatgctaacgagaagacaggtggctttcgtggcggcggtggctatggtggcggcggc

SEQ ID NO: 6086 - DNA, 430 bp, Zea mays
  Clone ID: LIB3137-032-Q1-K1-G10
tccgcctctcgagtctcgtccacccgtcgtttttttagctcctctactcgccagtcgccatgggcaagattaagatcggaatcaacggcttcggaaggatcggcaggctcgtggccagggtcgccctccagagcgaggatgtcgagctcgtcgccgtcaacgaccccttcatcaccacggactacatgacctacatgttcaagtacgacaccgtccacggccactggaagcacagcgacatcacactcaaggactccaagacccttctcttcggtgacaagccggtcaccgtctttggcatcaagaaccctgaagaaatcccgtggggtgaggctggcgctgagtatgtcgtggagtccaccggcgtcttcactgacaaggacaaggctgctgcacatctcaagggtggtgccaagaaggttgttatctc

SEQ ID NO: 6087 - DNA, 257 bp, Zea mays
  Clone ID: LIB3137-032-Q1-K1-G11
gcttcttgcgcgagtctgttgctaagatgctcttctcgaccgccgaagcttcctgagaggcgtgcctcagttctgtaaatatgatggacgggatgtgtataaataaacccagcatgctgttttttttcgtcgtcgttgtgtgcgtttgagagctcgcctagtgttttggaacaataatttttggacagactatgtgttctgtatgttttggtcgtcagacatatctatcctcagtccatggctttgcttaacggttt

SEQ ID NO: 6088 - DNA, 452 bp, Zea mays
  Clone ID: LIB3137-032-Q1-K1-G12
cgacccgcgcgtccgtaaacaaacaactgcagagcctaaaattgtctgtgaggcagcaactcatactgaaccagatgcgcctgttctggagcaccaggaaccaaaggaagttgcttccttcggtagtttgccaactatgtctgaaccatctgttcttttgtcaaaactgatgcaaaggattctttatgcctctctcccggttcttgcccagggaaggaactgggtcttgctatacagctgtgcagtacatggaggcatggcatatctttatctactttatatagaaggagcatgctttgccctggcttctcactcttggttgttggggataaaaaaggcacagtttttggtgggttagttgatgccccattgcagccatctagttcaaagaagtatcaagggaccaacaattgctttgttttcactaatttacacaatcgccctgtcatcta

SEQ ID NO: 6089 - DNA, 420 bp, Zea mays
  unsure (1)..(420): unsure at all n locations; Clone ID: LIB3137-032-Q1-K1-G9
ggcgaggcaaaagcattgcgaccacagacttctctcgcttcaaggcctttttttttgagataacagggaggagatggcggtcacgatcacgtgggtgaaggcgaggcagatcttcgacagccgcggcaaccccaccgtcgaggtggacgtgggcctcagcgacggcagctacgcgaggggggccgtacccagcggcgcatccactggaatatatgaggccttggagttgagggatggaggatctgattatcttggcaagggtgttcttaaggctgtcagcaatgtaaataacattattggaccagcaattgttggaaaggaccccactgagcaggttgagattgacaacttcatggtccaacagcttgatggaacctncaatgagtggggctggtgcaaacagaagcttggagcaaatgc

SEQ ID NO: 6090 - DNA, 437 bp, Zea mays
  Clone ID: LIB3137-032-Q1-K1-H11
cgaccggcgcgtccgccgttcgcctcttctcctccctcctgcctgtgctttaataaagagcagcagcgcaagagggtgggggagctagcgagaagaaggcaatggcggcggagagcttcctgttcacctcggagtccgtgaacgaggggcacccagacaagctgtgcgaccaggtgtctgacgcggtgctggacgcctgcctggcgcaggaccccgacagcaaggtggcctgcgagacctgcaccaagacgaacatggtgatggttttcggcgagatcaccacgaaggcgagcgtggactacgagaagatcgtgcgcgacacctgccgcgagatcgggttcacctccgacgatgtggggctcgacgccgaccgctgcaaggtgctggtgaacatcgagcagcagtcccccgacatcgcgcatggcgtgcacgggcac

SEQ ID NO: 6091 - DNA, 332 bp, Zea mays
  unsure (1)..(332): unsure at all n locations; Clone ID: LIB3137-032-Q1-K1-H9
agcgncnaacaacgctgtttctcatctgtcaagcgagcctctttacataaacacctgcatcatcctccagtagctgtcatcaacgatctctctacccatcatcggcatataattgaagtgatttgagtggcatcaccttctcctgcaaagggaaatggagactggtgcgagttgatttatacctagtttaacataacattccgaacactattcctctgattccacctcatagttctccacatgttctgaggggaaatgaaacccactggaacagttatcaagcacttcaagtctcttcagccatgctttgtgagcatctattgctttcatct

SEQ ID NO: 6092 - DNA, 281 bp, Zea mays
  unsure (1)..(281): unsure at all n locations; Clone ID: LIB3137-033-Q1-K1-A1
ggcggctgtggcatgggcgcctggcccatctgcgtccacctcgtcatcgtcctcgccgtccaccttcagggtgggggttgcgtcgacngccgtgcgggcttcttccgcgcccagccttgttgcgtcctccgcgcccctgggccgtcgacggctgcggcaagtggttcaagctgttgccaatccagaccctgcgatcgagcttccattgactgctgaaaatgtcgagatggtgttggatgaagtaaggccgtatcttatggcagacggaggcaatgttgcgt

SEQ ID NO: 6093 - DNA, 262 bp, Zea mays
  unsure (1)..(262): unsure at all n locations; Clone ID: LIB3137-033-Q1-K1-A10
gggacgagttncatttttttctcacattggttatcacataaacaanggngaaagctggtgcgattctttttaacagggatggtgccaaagacaccatctttttcacccaaatttgaaatggccctaccactgtcaccggaagtatctcttgcctcaaaccttaccttcattggtttcatgtgcatgcgcttttttacaccaccaaatgcctcctttatacttgtccacactacaatcctgcgaacaatgaacattgagcacc

SEQ ID NO: 6094 - DNA, 358 bp, Zea mays
  Clone ID: LIB3137-033-Q1-K1-A12
tgaaaaccgggccgaccgcacgcgtccggtcttccccaccgaagcatggtgattctgtttgcgtcgccttcgctgtctccggcgaggggcccggctgtcttcgccgccgcggtcgtggtgtttctgccggtcttattccccgggttgttctcccctcttggccacgctttcccttctgtcttctcggagtggaatgcccctaaaccaatgcatccttctcttttgaatgaggccttgcgatggacagctacagacggacaaaagaaagatctatggtcacccttgccatatcaggggtggaaaccatgcttaacgccatcaatttctcacaaattacctcttgaaccaagtggataca

SEQ ID NO: 6095 - DNA, 362 bp, Zea mays
  Clone ID: LIB3137-033-Q1-K1-A2
aaagaggtcatctggcccccaatctggtggtgtaacccctatggcccgtcagaactctggccctttgacgcctgtacttgctacaactgggctaatcacatcaggtcctatcacctctggtcagttaaattcatctggtgctcaacgcaaagtatcagggcctcttgattctagtgtatcaatgaagatgcgtaccacatcttttgcacacaacccagctgtcacaaatctcaatgtgggagatggttactccattaacggcagcattccgaccacaataatctggttggtcgcgttgctctttttggttgggtatgtagctggtggcttcattctcgctgctattcataaacctatcttgc

SEQ ID NO: 6096 - DNA, 329 bp, Zea mays
  Clone ID: LIB3137-033-Q1-K1-A3
cttggccgccgtctctcccgccgccacttttctcccgatccactatcccaaaaccgtagcggcctcgggtgctcgccgccgccgtcgttgcgagctccccatcttcctccgtcaaccatggcgacccagatcagcaagaagaagaagttcgtcagcgacggcgtgttctacgccgagctcaatgagatgctgacgcgggagctcgcggaggacggctactccggcgtggaggtgcgcgtcacaccgatgcgcacggagatcatcattcgcgccacgcgcacgcagaacgtgctcggcgagaagggccgcaagatcagggggctcacgtc

SEQ ID NO: 6097 - DNA, 345 bp, Zea mays
  Clone ID: LIB3137-033-Q1-K1-A4
ccatgcatctggggatctccctcgtcgtccttctctcccctccataaaatccgatcggcaggtcctgggcgctgcccactcctccccgctctggctcttcctcgcgcctcgcgcgcccacccaccttcacgcgctctcccagctagatcgaccccactggcaatcgcgcacgctcccctatcccttcctgttccttcaaaaagactggactggatcttcccagagttcccgttcggagagccgccggatcttcttcgacgaggcttcgatctgctgctctccgtcagcgtgttggggacttgcaccttatccgaagatgtcttttcggagcatggatcgtgatat

SEQ ID NO: 6098 - DNA, 448 bp, Zea mays
  unsure (1)..(448): unsure at all n locations; Clone ID: LIB3137-033-Q1-K1-A6
ctccttcccggtctcctccgcccgttgccttcgtcccctccatctccggctgcgtcgccggcgagcccgacaccgcgaatcggatccgccgacaaggcgagagggaagagatggggctcacgttcaccaagctgttcagccggctgttcgccaagaaggagatgcggatcctgatggtgggactcgacgccgccggaaagaccaccatcctctacaagctgaagctcggcgagatcgtcaccaccatccccaccatcggattcaatgttgaaactgtggagtacaagaacatcagcttcactgtctgggatgtcgggggccaggacaagatcaggccactgtggaggcattacttccagaacacccagngtctcatctttgttgtggacagcaatgatagggaccgtgtngttgaagcaagggatgagcttcaccgaatgctgaatga

SEQ ID NO: 6099 - DNA, 359 bp, Zea mays
  Clone ID: LIB3137-033-Q1-K1-A7
cgatcttcaagtctcgctacgtttcagtgctataaaaaaagcagccgcaatggcgagcagcacgcatggccctctcctccacggccttcgccggcaaggccgagaacgtgccgtcgtcgtccgccttcggcgaggcccgcgtgacgatgcgcaagacggcggctaaggccaagccggcggcggcgtccgggagcccgtggtacggccccgaccgcgtgctgtacctgggcccgctgtccggcgagccgccgagctacctgacgggcgagttcccgggcgactacggctgggacaccgcggggctgtcggcggacccggagacgttcgccaaagaaccgggagcttgtaggtgatcccac

SEQ ID NO: 6100 - DNA, 180 bp, Zea mays
  Clone ID: LIB3137-033-Q1-K1-A9
ctaacagccagaaattctcctccgaacgacttatttaaaaagaagcaacccccctacctccctcgatccaaagacctcatagattctgccgtcgccactccagaaccaataaatgctcctcctgctcttcttttctttcctcaccaccaatacctcctttctcctcttcaatttctccac

SEQ ID NO: 6101 - DNA, 315 bp, Zea mays
  Clone ID: LIB3137-033-Q1-K1-B1
cgctactctgttcccagctcggggcctctgacgaggcccgaggcgcaggcgccaacctcccggcccgggctagggtttggggctgatcgatccggctaggtcttggcgggagctgctccaatgggggatcgggaggaggacgaggagctccagatggcgctccgcatgagcctccagggctccccgccggcgcagcctgagcccaagcgcagcaagcccccgccccccgctgcggagtctccggaggcagaggcgcgccggaagcagcgcgagctcatggccgccgccgccgagaagcgccgccgcggtgcagcc

SEQ ID NO: 6102 - DNA, 432 bp, Zea mays
  Clone ID: LIB3137-033-Q1-K1-B11
caccttcttaaaggttcaacagttcaactcagagaggagagaaagatccccatcccaggcgacgcgaccggcgagccccgaaaccctaggtcgcgcgacccgggcagcgctcttctgcgtgactgcgtgtcgttcagggaggggacagcgttaggacgcgaggaggtgagcgaggccgtctggccgactataggcggaagaatcttctccgaagccttcctagagctgtgaagagcgcgtgtatctcctggatttgcagactcgaggggagctgagacaaggtcatggcagaagtgtctgtgtgatgtgtgcgcttcttgtcgcattaaggttcgctgaagattggaaagctgctgcgcaaatgatccgtgagaagcgaccttctattagcatgaatactcttcaccgcataagcttggaggaatggtcaaa

SEQ ID NO: 6103 - DNA, 424 bp, Zea mays
  unsure (1)..(424): unsure at all n locations; Clone ID: LIB3137-033-Q1-K1-B12
gacgacgacacgaagattcagaccccaccacaggcaccggaggaggagaagaaaggcctgctggacaagatcaaggagaagcttcccggtggccacaagaagccggaagacgctgctgccgccgccgccgcgccggccgtccacgcgccaccgccggcgccgcacgccgaggtcgacgtcagcagcccggatggcaagaagggcttgctgggcaagatcatggacaagatacccggctaccacaagagctcgggtgaagaagaccgcaaggacgccgccggcgagcacaagaccagctcctaaggtcgcagcgtgtgcgtgtccggcgatcagaagcgttgcgttggcgtgtgtgtggttctggcttgctttaattntaccaatgttngtttcaaggtggatcgcgtggtcaaggtccgtgtgc

SEQ ID NO: 6104 - DNA, 328 bp, Zea mays
  Clone ID: LIB3137-033-Q1-K1-B2
tctagatcgcgaggccgccctttttttttttttttttttttttttttttttttttttttttgttttttgttaaaaacaggagcaaaataagacaattattttttattacaagaagaataattgttgttattcccttcttatttccacacccgcgttggaacagtaggagcctaaacagttgccttggggggcagggcgatgatattaagtaattaatgagataccggatacgcaagggccattccattgggcatgacggggggggggaacattaacttgctcatgttacgcaactttcttggggagcccatgatgagggtaatgagga

SEQ ID NO: 6105 - DNA, 233 bp, Zea mays
  Clone ID: LIB3137-033-Q1-K1-B3
cgcagatctgtaggcatctctgggcctatgttcagaccttagacccaggcgccaacctagggggccgtggtagaatttggggcttatcaaaccagcatatgtctagaaacgagctgctccaatgctgcaacgaaaagaggacgacgagcttcagataatgctccatatgaaccttcatggctaccctccactgcagactgagtccaaactcatgaagccgacctccccagctt

SEQ ID NO: 6106 - DNA, 390 bp, Zea mays
  Clone ID: LIB3137-033-Q1-K1-B4
gataggtctccaggctactctgaagcttaattgattcgtttcctcagccgcctctatgctcggatctgcggcggagcctcgccggcggcctgcgccccacggcgccgccgatccaagatgccttcgtgcgtgcagggatgctgctgctgctcgtccctgcgccttcttccccgcgacgacgctctctcgtccccctccgcctgcgcagcaccgactgaagccttggtcttggcgtgcccaatcccccaccttgtgctcctaacgcttgttcccgcccgctccccaccctgatctacctgtctctaccctagcctgctccatttctacatcttctcgttgctgctctgctcctgctgccacaagagtattcgccttcaatcgttgctcgcg

SEQ ID NO: 6107 - DNA, 333 bp, Zea mays
  Clone ID: LIB3137-033-Q1-K1-B5
accggaggccggagagaccggctcagcctctctccgccgccgccggcgaccatgtccctggcggctatcttcgtcttcctcctcgtgtccgcgctgcagctgctcgaccgctacctcgacctcgccagaaagagcggaggacttagtgatgagcacatcaaagtgcggcttgaaatcaagcaacttctcaaggaggctgatcagttgtcaacgccgtccacatttgcacaagctgctaaactcaagcgcctggctgctgccaaggagaaagaactggcaaaaatgcaagaacatgaccttaaagggaagcaatccttatacgacagatacaca

SEQ ID NO: 6108 - DNA, 440 bp, Zea mays
  unsure (1)..(440): unsure at all n locations; Clone ID: LIB3137-033-Q1-K1-B6
cggacgcgtgggcgcgtcgcctcttccctttccccaccccgccgccgccctcgcgtccgtgcgtccgtgcctagttattagggttcggtcgccgccatggcgatcctctcggcgctcgccaccgaggtgctcatccccgtcgccgccgtcatcggcatcgccttcgccgtcgtgcagtgggtggtcgtgtcgcgcgtgaagctctccccggccgcgtccggcggcagcggcggcaaggccggctacgccgactccctcatcgaggaggaggaggggctcaacgaccacaacgtcgtcgtcaagtgcgccgagatccagaacgccatctccgaaggagcaacatcgtttcttttcaccgagtaccaatatgttggtatcttcatggctatcttcgctgntgtgatctttctcttccttggttcggttgagggattcagcac

SEQ ID NO: 6109 - DNA, 376 bp, Zea mays
  Clone ID: LIB3137-033-Q1-K1-B7
ccaaattccaaatcgttgctagagaaaccatcaaaccggccggcagcccggcacctctcactcagtctctcaccccttgccaccactctcccgtggcgccttctagaagcttccggaaccagacaaccactgtgcgccgagttttctgaaggcggctttggtctttcgagatctcgttgtcggtgccatggcgggtcagtactgagtgcgcgggcgggagcaggtgaaggtctgccagctcgagatcccgatgcagatccgggagggcccggcgcggcggcaggcgccgtcggccgcgggggcgctgcggtcgccgttgtccgccatgatgctcgccatgttcgctaccatggcctccttctacgtcggcggacga

SEQ ID NO: 6110 - DNA, 332 bp, Zea mays
  Clone ID: LIB3137-033-Q1-K1-C1
ctccaagggctaagtaccttaggtgcgcaatacagaatttgttgtagtgtgaaaagcggatgcctccctcccttttctccccctttgatgaatagtataagcacaggagataccttcacgtctagttcgcttttgactcgattaccctctttgcaaaagaaggcaaacagaatgatgccgtgtggatctccgaggccgccgccgctgcagtgtccatagccaccgcaggagactgagatggggggttttgtcaagacccacaagagcaatgcatacttcaagcgtttccaggtgaagctcaagagaaggcgcgctggcaagacagactacag

SEQ ID NO: 6111 - DNA, 418 bp, Zea mays
  Clone ID: LIB3137-033-Q1-K1-C10
caaaagccaaaaggcatcaccgccgctacgtctatggcagcctcgctccaagccgcgggcgccctgatgcagccggccaagatcggcggccgggcgccctttgcctcgctgccgtcccgcccgtcgtcgcaactcgcctgcagggcgttcggcgtcgacgccggcgccgccaggatcacgtgctccctgcaggacgtcgccagcaggtgcgtcgacgccgcgaagctcgccggcttcgcgctcgccacctcggcgctcctcgtctcgggcgcgagcgcggagggcacgcccaagaggctgacctacgacgagatccagagcaaaacgtacatggaggtgaagggcacgggcacggcgaaccagtgcccgaccatcgacggcggcgtggagtcgttcccgttcaaggccgggaagtacc

SEQ ID NO: 6112 - DNA, 273 bp, Zea mays
  Clone ID: LIB3137-033-Q1-K1-C11
ccgggccgacgcacgcgtccgaaaagccaaaagcatcaccgccgtgtctttctattgcagcctccctccaagacggggacgcgctgtttcattcggacacgacccgcatcctgccgccctttgcctacctgccatcccttccgtccacgcaactgaagtacatagtgttcacacacaacacctgccccgccagcatcacgaaataagattctgacatccgcaccatgtactgcctcctcgcgaaactatccaccaataaactcgccaccttgg

SEQ ID NO: 6113 - DNA, 400 bp, Zea mays
  Clone ID: LIB3137-033-Q1-K1-C2
cggagcacgacgcacgcagagccgcagagattcgtcacactgcaagttttgaaaactgaactgtaagatggcatcagcagagctttcccgtgaggaaaatgtgtacatggcgaagctcgccgagcaggcagagaggtacgaggaaatggttgagttcatggagaaggtagcgaaaactgttgactcggaggagctcactgtggaggagcgcaacctcctgtctgttgcatacaagaacgtcattggagcccgccgtgcctcatggcgcatcatctcctccatcgagcagaaggaggagggtcgaggcaatgaggaccgtgtaacactcatcaaggactaccgtggcaagattgaaactgagctcaccaagatctgtgatggcatcctcaagcttctcgaa

SEQ ID NO: 6114 - DNA, 316 bp, Zea mays
  Clone ID: LIB3137-033-Q1-K1-C3
cggacgcgtgggggacggcagcgacctctttctggcgtcggatatggatctcgacgccgacgcgcagggcgccgcagtacgacaagctgaaagcagtgtcagaggaacttggacatgagatccgggttttttcaagtgagaactttgctctacaacccagcaagctgcctagtgcagatcatgaggaaggtgacgacttttatgagcttcagcctgctgattactacaacttgatttcaaacaggatgggagagctatccaaaatgctaaagactcgcaagatgcgggaagcagaacttgctgctcagcgagcaaa

SEQ ID NO: 6115 - DNA, 415 bp, Zea mays
  Clone ID: LIB3137-033-Q1-K1-C4
gagctagcatacatcgctagctcactttagtttatatattacataaatattggcatatatggctaaactgaattgaggacgatatggcccgcttggtctcttccggaatcattggtaaggggcacaacatctttgacgatggcggattcggtgaagtccatgctgacccaattaaagtcgagcgtccgcacaagcgtccgccgcagaagcagaatgcggagaatggaacgacgacgaatgttgatgagccaaaggaattgcctaagcacgtgtgcttcaagggagacaacgggctgtacctgagcgctcggatggtggaaggctacccctacctgcagtttgcgtcggacgacatacgcgatccaagtgtgaggttcaccacgtacaactacatgatcgatggcaagcgggtgat

SEQ ID NO: 6116 - DNA, 264 bp, Zea mays
  unsure (1)..(264): unsure at all n locations; Clone ID: LIB3137-033-Q1-K1-C5
tggaanaaccgggccgacccacgcgtgcgcaaggcacaagccacccatttgtttacaggttccggagctaccgacaaccactgggccaggggcggcgtttccatccttgccgagctcctcgagccggaaccttgccatctcacgcagcggtacatatggcagaacattaatattcccaccaggggcggtgctagtggaaagcactaggtaggggacgaatactatgaggactacgcggccgacttctacgactttgaatccaac

SEQ ID NO: 6117 - DNA, 176 bp, Zea mays
  Clone ID: LIB3137-033-Q1-K1-C6
aaatagctacatggcgaatctctcctaacaggcacagatgtactaggaaaatgatgacttcatggagaaggtaaccaaaactgttcactctgatgagctcactgtataagaacccaaccttctgtcttttgcatacaaaaacctcattggaaccctccgttcctcatgtcacatca

SEQ ID NO: 6118 - DNA, 189 bp, Zea mays
  Clone ID: LIB3137-033-Q1-K1-C7
acaaccatctccaaacacaattatcacgaactttcacatcaaatctcccgttttttcaagtgacaactttgctatacaacccagcaagcatcctactacatatcattcggaacgacaccacttttatgagctttaccctgctaattaccacaactttattacacacacgacctgatagctatccaaaat

SEQ ID NO: 6119 - DNA, 242 bp, Zea mays
  Clone ID: LIB3137-033-Q1-K1-C8
caaccaaggacacgctcataattcgccgtcatctggtagcatttctggaacaacttactctttttcaaggctgagtttgggtaaggaggatgattcgtcgcctatgaagaattcaacggttcatagcacggcagcccttattgagtgcaaatgttggatgcctttgtgtatatctgaagcaccaaaaccagaaccttcttctacacctgtaaagaatattaacactcgttccccaaccacac

SEQ ID NO: 6120 - DNA, 381 bp, Zea mays
  unsure (1)..(381): unsure at all n locations; Clone ID: LIB3137-033-Q1-K1-C9
aaaaaccgggccgacgcgacgcgtncgaaaaaaaaaaaaaaaaaaaaaaaaaataattttaaaaaaaaaaaaaaaaaaaaaaaaggaagagtcaataaaaaaaaaaacacacccaaaaaaacaaaaaaacaaaaaaaaaaaaaaaaaaaaaaacgggcccccctttaaaaaaacccaaatccacccccccacaccttcccacaaaaaacccttttaaaagagcccccaaaataaataaaatccccccccctttaaaaaatctgaacctgaaaaaaccctgcctttcccaaaaaaaatcccctataaaaaaacccccctcctcccaaaaaataaaaatccaaaaaaccccccccacagccccctccaaaacattttcccccc

SEQ ID NO: 6121 - DNA, 327 bp, Zea mays
  Clone ID: LIB3137-033-Q1-K1-D1
ctccccccctaccggctaccctacccatcacacacaaacagccactcctcacctcccccgtcctccggttcatgtcctgctgctccccatgtcgcccccactcgacctcgactacataggcctctcgccggcggcggctgccgccgctgcccacgacgacctgaagggtaccgagctccgccttggtctgccggggtccggttcgccggaccgccgtgttgtggctgccaccgcaaccaccctggacctgctcccggctaagggcgccaagcgcgggttttctgacgaggcgccgacgccatcgcccggtgcagcttccgggaaagg

SEQ ID NO: 6122 - DNA, 197 bp, Zea mays
  Clone ID: LIB3137-033-Q1-K1-D10
ttgtagcttcacaagaaacaaatgccaaattgggccaaaaatatatagaccattcctttattcttaggctgctagacctttttgactctgaggaccccacggaaagggactatctaaagacgatacttcattgaatatatggtaaattcatgggccatcgaccattcatcatgaaagcaattaacaacatattctac

SEQ ID NO: 6123 - DNA, 432 bp, Zea mays
  unsure (1)..(432): unsure at all n locations; Clone ID: LIB3137-033-Q1-K1-D11
cgctacccctgccccttctctcttcgtcgctcctccgcctccgccgtcgtagcatcctcgtccgccacctcggccatggcgacatccccagcgctcctcttcccttctccctcctcggcatcctctgcgccttcgtcggcgcgggtggaggcagtggtgcttttcaacgtctgcgacagctacgtgcggcgcccggaccaggcggaccgcgtcatcggcaccctcctcggttccctcctctccgacggcaccgtccacgtccgcaactcctatgtcgtcccccacagcgagtcagccgaccaggtcgccatcgacatcgactaccaccataacatgtacgcctcgcaccagaaggtgaaccccaaggaggtcatcgtcggatggttctcgactggatttggtgtttctggngggagtacgctcatccacgag

SEQ ID NO: 6124 - DNA, 95 bp, Zea mays
  unsure (1)..(95): unsure at all n locations; Clone ID: LIB3137-033-Q1-K1-D12
ccgtccagctcgtgcccagagatttaaatanntttagaatctatantgtcgtgtnntttttttttgtaggtttcagctcccgtgtctcagccctc

SEQ ID NO: 6125 - DNA, 434 bp, Zea mays
  Clone ID: LIB3137-033-Q1-K1-D2
cgtactacatggctctcccgcagtatgggatatatacagacgtcagagtctgctacggttgcttcaacaaatcctccagccaaggacacgctgataatccggtgtcagctggtagcatttctggagcagctgactctttttcagggctgagtttgggtaaggaggatgattcgtcgcctatgaagaattcaacggttcagagcacggcagcccttattgagtgcaaatgtgggatgcctttgtgtatatgtgaagcaccaaaaccagaaccttctcctacacctgtaaagaatatcaacaccgttcccccaaccacacagtcaaatccaaggccaaagaagcctgctaacactcaacagaaggcttcagctacttccagtagcaactcaagcccattcttaaatattggataaatgacaacgatagcaatgata

SEQ ID NO: 6126 - DNA, 297 bp, Zea mays
  Clone ID: LIB3137-033-Q1-K1-D3
ctcgcctcctcgggctccggcccactcctttcctccctcgctcaccgagagccagagccagtggggcagccaaagccgagccgcaaccgcaaagatcttgcgcggcctcctttccccagctcgcgtcactcactgtgccgctcgtgccatccaccctcggttcacccaaccaacaatccatccgccaccacaccccgctgcggcgatgtgcggcggcgccatcctctcgggtttcatcccgccgtccggggtgccggcggcggcggccaagaagaaacagcagcggcgtgcgacggc

SEQ ID NO: 6127 - DNA, 399 bp, Zea mays
  Clone ID: LIB3137-033-Q1-K1-D4
ctcgccgtctgccttctgcgcctccatttttttctctgtcccttgcaagttgaatctcaccggcaaccatgggtaaagagaagtcccacatcaacattgtggttattggccactttgactctggcaagtctaccaccacaggacacctgatctacaatcttggaggcattgacaagcgtgtgatcgacaggtttgagaaggaggctgctgaaatgaacaagcggtccttcaagtactcatgggtgctcgacaagctcaaggctgagcgtgagagaggcatcaccattgatatcactctgaggaagtttgagaccaccaagtactactgcacagccattgatgccgatggacaccgtgacttcatcaagaacatgatcactggtaccttacaggctgact

SEQ ID NO: 6128 - DNA, 258 bp, Zea mays
  Clone ID: LIB3137-033-Q1-K1-D5
gtcccggcgtctccagccccacttctgccgtgcggataacgaacgactggcgggggctcgggtcagccttcctcctctccttctcctctctcctcgcatcgcagtctcagcaggcaacaaaccaaatcgcttaccgcccccgaagcgtcttggttcgcatagcacagctgctcttgcaacaagccaaacaacccagtggatgctagccgagacagtgcatagattgatagacacgcgcgcagatggccacgccgtcgt

SEQ ID NO: 6129 - DNA, 445 bp, Zea mays
  Clone ID: LIB3137-033-Q1-K1-D6
atcagggttgcccaatggatgcttcaaacttctggtgcaacaagttacatgggatgcattggaaaggacaagtttggtgaggaaatgaagaaaaacgctcaagctgcaggagttactgctcattactacgaggatgagactgctcctactggcacatgtgctgtatgtgttgttggtggtgaaaggtcattgattgcaaatctgtcagcggcaaactgttacaaatctgagcatctaaagagaccagagaactgggcactagttgaaaaggcaaaatacatctacattgctggatttttccttacagtgtcgcctgattctatccagctagtcgctgagcatgctgcagcaaataacaaggtgttcctgatgaacctctctgctcccttcatttgtgagttcttccgtgatgcccaagagaaggttctcccgtatgctgactaca

SEQ ID NO: 6130 - DNA, 283 bp, Zea mays
  Clone ID: LIB3137-033-Q1-K1-D7
gttcctgaacaagcaaacggctttctccattttccttgagtgcacagatagggcgtcgtggggcatgaactttgcgaacgtgaaccacatggtgctcttcaactacccccacgacccgagcaagtacgtgcggagcgactggcggacatgtccgcagagcgtgcagaaacggcaaggcgttcgagttcacggtgggcaaacatgtgtccctggccagtagtgcgatggagagcaacatgacagagcacccgctgcacgacttgccgaagcgtctaaagaccct

SEQ ID NO: 6131 - DNA, 391 bp, Zea mays
  Clone ID: LIB3137-033-Q1-K1-D9
caccagaccaattagctagcttcttttagctctagctaggctcgtctgctgcaagagggggacagttacagcaggcatggaggggaaggaggaggacgtccgcctgggcgccaacaagttctcggagcgccagcccatcggcacggcggcgcatggcacggacgacaaggactacaaggagcccccgccggcgccgctcttcgagcccggggagctcaagtcctggtccttctaccgcgccggcatcgccgagttcgtcgccaccttcctcttcctctacatctccatcctcaccgtcatgggcgtttccaagtccacctccaaatgcgccaccgtccgcattcaaggcatcgcctggtccttcagcggcatgatctttgccctcgtctac

SEQ ID NO: 6132 - DNA, 430 bp, Zea mays
  Clone ID: LIB3137-029-Q1-K1-F3
cattactaagtcttgtcatctatgcttctatttttaccacgaatgcggcacggcaccgacttgtagctgggaagtcaaagaatttacttgaatttggacttcgacgggctcaagggcctgatggaggaatcagtgcatcaagatattgttatatgggaggatttgatgcaacaagcaatgttgcagcaggaagattgtttgggataccaatacgtgggactcattcacatgcatttgtgagctccttcatgggtcttgatgaaattactgacaaaacacttactagttctgatggttcaaacacatgtgaagattttatctctctggcgcagaactggctgatcaggattcaggattctagatcattgcatggcacctttggagaaacgagccatagtgaggtggctgcattcacgtcatatgcactggc

SEQ ID NO: 6133 - DNA, 378 bp, Zea mays
  Clone ID: LIB3137-027-Q1-K1-F5
cgcaaactgccaactgccatcttcttccctatccgctgtgcccgtccccctgccaccaaggtccaaggtctccggagcgcgacctggctgcaacgcaggcaatggagtcgccgttccgcgcggacctgctgagggggaaggcggcgctggtcacgggcgggggctccggcatcggcttcgagatcgccgcgcagctcgcgcgccacggcgcgcacgtcgcactcatgggccgccgccgcgaggtcctcgacaaggccgtcgccgcgctccggtccgagggcctcatggctgttggttttgacggggatgtccgaaagcaagaggatgctgccagagtgatcgcagcaacggttgagcattttggcaaactggacattc

SEQ ID NO: 6134 - DNA, 324 bp, Zea mays
  Clone ID: LIB3137-027-Q1-K1-F6
ccgggccgaccgcacgcgtccgcgcaaacagccaactgccatcaccttccccatacgttgcgcccgaccccccgccaccaaggggcgaggtctccggagcgcgagctgactgcaactcatgcaatggagtcgccgttccgcgcggacctgctgagggggaaggcggcgctggtcacgggcgggggctccggcatcggcttctagatcgccgcgcagctcgcgcgccacggcgcgcacgtagcactcatgggccgccgccgcgaggtcctcgacaaggccgtcgtcgcgctccggtccgagggcctcatggctgttggttttgac

SEQ ID NO: 6135 - DNA, 303 bp, Zea mays
  Clone ID: LIB3137-027-Q1-K1-F8
cctcgagcgacgccaagcggccaagacggtgtggagaacaattggggacggggaaagtccagggggaagccacgggcaccggcgcgatgaaaccgtcgctgtcgaagaagaagggcaagaagaagaagaagaagtcctcgctgccggccgccgcaccggcccctccgccggcggagggcgctgcggatacggaggcatgtcccccgctgcccggaaccataaccctagccgctgccaccgctgctgcggcggcggtttcggagacggagtccagcatcagctgcgaggcctcgacgtgcccat

SEQ ID NO: 6136 - DNA, 397 bp, Zea mays
  Clone ID: LIB3137-027-Q1-K1-F9
ggagcaaccgcttgcgtcagacgcacactgttggagagtgatcactgatttctggtcatggcaaccgtaactgaggaagttgctccggtcgtcaccgtctccgaggagccggcgccggaagcggcgaaggaggtggtggagaagccggaggaggggaagaagcccgacgaggagggtgacgagaggaagaaggccgaccccgccgccgagaaggagaagaaggcgaggaagccgcggagcaggaagcccaagtccgccgggctgcaccacccgccctatttcgagatgatcaaggaggcgatcctgtcgcaagacggcgggaaggtcggggcgagcccgtacgcgatcgccaagcacatgggggagaagcaccgggacgtgctcccgcccaattacc

SEQ ID NO: 6137 - DNA, 397 bp, Zea mays
  Clone ID: LIB3137-027-Q1-K1-G10
gctgtacctgctagccttggagtcgctgcttgtcctgctgtacttgaaaacatccaaaagatggcacagcaaaatggatcctctgctgctgaaagcacaaactctggcagtactcaagatgcattgaataagcgattggagcagcttgtcaattcccatcctgtgtttttatttatgaagggaaccccagaacaaccaaagtgtggtttcagccgtaaagtggtgaacattttgaagcaagaaggggtcacatttgggagctttgacattcttacagataatgatgttcgggaaggtatgaagaagttctccaactggcccacttttcctcaactgtactgcaaaggcgagctgcttggtggatgtgatattgctattgctatgcatgacagtggtg

SEQ ID NO: 6138 - DNA, 187 bp, Zea mays
  Clone ID: LIB3137-027-Q1-K1-G11
ggcttacctgatctcctctcagcagaagacgtaccttctgaacgccggaacgaacagaagagagcgcattataatggatcctgtgattctaaaatcacaaaacctggcaacacccatcatgaatacaatctgccatttttgcatcgaggacttccccatcctgtgcttttacctataaatggacccc

SEQ ID NO: 6139 - DNA, 401 bp, Zea mays
  Clone ID: LIB3137-027-Q1-K1-G12
cggacgcgtgggcggcgcgtgggggaaagctaatctcgcccggttcttggagaagcgacaggaaggagtggcttgcgtcgagccatacctgacgtccaacttcaagagcccgctagagagcagtgacgccgtcggcagcgctagcgctccaacgaaatcgtcatccacagacgtcgccccggcgagcagccacaacggcggcggcgcagagcttgtgcgccatggccgatatctgaggagcatcaacttcagcacaaacctgcagatctgactctggtgttgctgtccatagactaccactaccactacgacttcgtgttcttgagcgcgccccttcctacccatcgacacgaaagctggatagctgtcttgctttgcatccggatgaggcgggaggtata

SEQ ID NO: 6140 - DNA, 402 bp, Zea mays
  Clone ID: LIB3137-027-Q1-K1-G2
gaaaaccattcccaggcccgacatcctgcccttgcacaacgcacgcacgctccacgtcccaatggctcagactctctccgccgcctccgagctggccaccctgaagcgcccgttcggcaacgacgggttcggcgatggcagcaacaacggcagcgcgaccggcgagaagcccaaggcgcggcggcgggaggcggacccggcggcggcgctggccgcggcgcggcacgagttcggcgagcacggcggcgtgaacatgtccatcgaggcgtcggcgacgttcacggtgatggagccggacacgatgcggcggctgttcgcgggcgagctgggccccgaccgcggcgacatgtacatctacagccggcacttcaacccgacgggtgctggcgctgggcggcagat

SEQ ID NO: 6141 - DNA, 369 bp, Zea mays
  Clone ID: LIB3137-027-Q1-K1-G3
cggacgcgtgggcggctccgtcagtcacgcctgcggcgtacagatcatggaggactttggcggctggaatatgcagtatgcagcagatctatgcctgccaaaccgccgggacgacgacgacgacgacggcctcctcggtgacttcctaggcggcggcggtttggacctccgttctgaccatggcggtctcaacctgccctcgtcgcaccctgctgtccagaaccttgtgccctgccacggcggcgcgagtctttccgtttccgacgccttcatgggcctggacacggcggatatgctcgctagcgtcaccggcgcactggactgcagccttctcgagtcgtttgcttgcggttcggacgccgtcgtcgt

SEQ ID NO: 6142 - DNA, 378 bp, Zea mays
  Clone ID: LIB3137-027-Q1-K1-G4
agcttacctcacatcgacggtcggtgagccgttcgtgagtggcgaggcagtgcgtgcgctgcagcctgcagggcaagaacaggcgacgaagaagatgagcacgctggacacgcggacgctcaaggacgagctgacgagcatggacaggaagtgcctcgtggacctcggccacccgctgctcaaccgcgtcgccgacagcttcatccgcgccgccggggtcggggcggccagggccgtctccagggaggcctacgtcgtcaccgtcgaagggctttcaggagactcgtccgggctggacgccgacggcggcaagcggagccatttctccagcatcagaggcgacgacggccagaggtcgctcgacgcagtggtaaaaac

SEQ ID NO: 6143 - DNA, 392 bp, Zea mays
  Clone ID: LIB3137-027-Q1-K1-G5
ggattgttggagctcggccgagcagagcacgttcagtgtgattgtgtgtgtgtgtgtctgacatggcgtcgctctggctagcgagagcgtcgtcccagctggcgcgccgtgccgccgccaggaggcctcctccgcgtcctgcgcgccacggctccggccaacccaccagttcgtggttcttgggctcggtgccgcaggcggcccttgggtcaccagcgctggacacaagccgccggggcttctgctccgtccggcgcttcgcaggggagagcagcgctgctgctgctgcggcggctgtcgtcgacgaggagccggagagcgggttcgcagccggcgatcagcaggcagttgactttccaagagggaaagtatcctttgtggccgaaatgaac

SEQ ID NO: 6144 - DNA, 322 bp, Zea mays
  Clone ID: LIB3137-027-Q1-K1-G6
cgctccccagatccagcatgcagatcagatgtttacattcacggaccggaaggaaaggaaagggttgaactatgagcgccgtggcagtttcgtcgtaactgaacccggacgcgccgctcttcatgccgacggcgctgctgtgggtggaggacttctcgccgcactggtggaacctcatcaccaccactggctggttacgtgaccactggctccgcgagcgcgcacatctggacgagatggccgagcagatcgactcggaacgatctcctttcatacgacgaggacctcttgtactacgaccagctcgagcagggccccgtcg

SEQ ID NO: 6145 - DNA, 55 bp, Zea mays
  Clone ID: LIB3137-027-Q1-K1-G8
cggacgcatgtgcagctcctacagtcacgccttctttttacagatcacgcagcac

SEQ ID NO: 6146 - DNA, 140 bp, Zea mays
  Clone ID: LIB3137-027-Q1-K1-G9
ctcttcgcctgcatcgtatgaagagatggcatagctttttacccgaatcgccatacttagcgggggacaatttcaagcccaaaagatccccccaggaattcaaaaaaaacttgccccttcttcaaaactggaaacttttc

SEQ ID NO: 6147 - DNA, 390 bp, Zea mays
  Clone ID: LIB3137-027-Q1-K1-H1
ctcttcgccggcatcgtaagaagagatggcatatcgtttgacccgtatcgccatagttagcgaggacaagtgcaagcccaagaagtgccgccaggagtgcaagaagagctgccccgtcgtcaagactgggaaactttgcattgaagtgacttcggcgtcgaaactcgctttcatttctgaggaactgtgcatcggttgtggtatctgtgtaaagaaatgcccatttgatgccattgaaatcatcaaccttccaaaagacttggaaaaggataccactcaccggtatgggcctaataccttcaagctgcacaggttgcctgtcccgagacctggtcaggttttgggccttgttggaacaaatggaattggaaagtcgacagctcttaaagt

SEQ ID NO: 6148 - DNA, 388 bp, Zea mays
  Clone ID: LIB3137-027-Q1-K1-H10
caacttcgtgccgaacaagaacccgagcagtgacagcgtcgccgtcatggagaggccaaacgcgatgccccagcagaggatccagatggacgagggtttcttcgtacagggcaacggagccttcgacgacgtcaacagcatgatgcagcagcagcagcagcaacaccaggcgccagtgcagcagcagcagcagttcttcatccgcgacgacacgccattcgtgagccagatgggcgacatcgccgccagcgcgccggagttcaggttcggtcatggtttcaacatgtctagcggcgtcgactacccatgcgcggcacagaggaacgacgggaccaattggttctactgaagaataaattaacctgtagggctgagaaaagagagagag

SEQ ID NO: 6149 - DNA, 258 bp, Zea mays
  unsure (1)..(258): unsure at all n locations; Clone ID: LIB3137-027-Q1-K1-H11
ggaanacccggtcgaccgcggcgtcccgactcaaccaatctacttgctgctacaacagtgtttgcctggtgccttgcttccacctaccggatggatctacacctgctgctcgaacggaacaaccgctcgcggcatgttaaccaccacctccaacaactctggctttaatgaaggggaaaaacatttgagattcgttgcggatcaaaagcccgagcaagagaattagacgtaaaacgaaaaaccttttgagattcaatt

SEQ ID NO: 6150 - DNA, 389 bp, Zea mays
  Clone ID: LIB3137-027-Q1-K1-H12
cgccaggatacccgccgtcctcctcgggacacgcaacgtccgcgctttctccggcgacatgcccaccgatcctgccggcacgtcggcgaagcgggggcggtataacgtaacggccgtgcagaagctctccgagtcactgacggcggcggcgtgccatgacctgacgtacccctacgttgtgttctactgccacacgaccaacccagcggccacgtacctggtgaagctggcagcccaggatggcgggacgccggacatggaggcgttggtcgtgtgccacctcgacacgtcgttgtggagtcccagacacccattcttggtggcgcacagtctcaagccaggggacgacgcagtcgtgtgccattttctctctaagctcagcatcgtct

SEQ ID NO: 6151 - DNA, 350 bp, Zea mays
  Clone ID: LIB3137-027-Q1-K1-H2
caacgacctcggtgagccagacaagggtgaataccatgcccggcctgtcctcgggggcagccaagaacacccgtatccccgtcgctgcaggaccggccggcgtccaacagagacagaccccaactcggagagcaggctgtttctgctgaacctgaacatctacgtcccgcgcgacgagcggtttgggcatctcaagatgtcggacttcctcgggtactcactgaaggcgatcatcgaggctgtccttccgacgctggggacgttcgtcgacgatacgcccaaggagttcgattcgttcgaagacatccttgggctctacgagccgggttcagaggcgcccaacaacccac

SEQ ID NO: 6152 - DNA, 393 bp, Zea mays
  Clone ID: LIB3137-027-Q1-K1-H4
cagagcgaaccataagatggtattggtggattatatcttgtggatgcatcaagccagcaacagaatggaagatgctcaccaagtggtcgtcaattaacaacactaacgtagtgtttatcccaggcaagccccggtgcatttgccacctccttgttgttttaaaacttttatcacttatatgttgcattaggtgataggagttgagtgatgaaacagttgatgcattgccattccttggaatttgattatcctccttgatacctgttttacaaaaagaactaatgaggcttagccctgcctagagaattaaaacttgtttctttttaaaagaatgatgtgtgacactgggtatgggtttgtttttatgaaaaaagacttgtaatggtgagcgca

SEQ ID NO: 6153 - DNA, 340 bp, Zea mays
  Clone ID: LIB3137-027-Q1-K1-H5
agcgcatcccggagcgcgtggtgcacgcgcgtggtgtctccgacaagggcttcttcgagtgcacccacgacgtgacgtcgctgacgtgcgcctacttactgctcgcgcccggcgtgcggacgcccgtgatcgtgcgcttttcgacggtgatccacgagcggaggtcccatggagacatatccgcgacccgcgcgggttcgtcgtgaagatgtacacccgcgagggcaactgtgacctgctgggcaacaactttcccggcttcttgatccgcgacgggatcaagttacgctacgtgatccactcgaacaagcccaacccgtggtcgtagtgcatgagtact

SEQ ID NO: 6154 - DNA, 403 bp, Zea mays
  Clone ID: LIB3137-027-Q1-K1-H6
gactcaaccaatctactcgctgctacaacagtttttgcctgttgccttgcttccacctcccggctgcagctgcacctgctgctcgatcggatcggccgcgcgcggcatgtcgaccaccacccccaccaacgccggctcccagcagggcgacgacgctgcggctggcggcgcggacaagaagccggcgcaagagacggtgacgaatactgtgcaaacggtggaggtgcggtcctcggcagggcagcccgacgaggagggcgtgctcaagcccgtgaaggtggtgcacgagatcccctgcaaggacagctccggcgtcaagcatgactaggactagctaagctgcctagctcgatcgatcatctagctaggatcgatgctgctgctgctaagctgagtggatttg

SEQ ID NO: 6155 - DNA, 276 bp, Zea mays
  Clone ID: LIB3137-027-Q1-K1-H7
cttctcctccgcttattaccacgagctccttttttttgggatccttatggtcttatgtaggggggaaagccgcatccgatgtggtgcaccaccgctccgcctgcaagcttgactgacccaccatcaacgagccggttgagaatgcctatccctcctacggacgagatcctcgactacaaggtcatcacatgacaggagacggagatgtcccgcaacttcgctttggctaccttctcatgcgagaactccatgctcgacgctgtcgagaacatgaac

SEQ ID NO: 6156 - DNA, 381 bp, Zea mays
  Clone ID: LIB3137-027-Q1-K1-H9
tgttgccaaagaattccctcccctagccgccttcgccgctcgtatccctgagaggtgccgggaccgaggaactggccgagttctaggtagagaatcggttttgcttgtctcagcccggggtctgctgcgtctggtggtggtgaaggggagaaattcgtgagatctgttccggatcaggcgtgcgagctcgggaatcaggggtttcacacatagcttcgtcgatttgaatttgatgtactaatggagtctaagggtggcaaaaagtctagcagtagtcgttccatgatgtatgaagctccccttggctacagcattgaggacgttcgacctgccggaggcgtgaagaagttccagtctgctgcttactccaactgcgcgaag

SEQ ID NO: 6157 - DNA, 406 bp, Zea mays
  Clone ID: LIB3137-028-Q1-K1-A1
cacgcccctgtcactgaggtgcgccgtggagcttggcatccccacggcgatctaccgccatggcggggctgcctcagccgctgagctggtcacggcgctgtctctcccctccactaagctgccgttcctccgccgcctgctgcggctcctcgccgcgtcgggcgtgttcaccgtcgacaagcagagcacggaggaggagcggtaccgcatcagccccgtgtcctacctcctggtggacggcatccctcacgaggaccacatgaaccacaccgctctggtgctcacctgcacctcgacgcgctacatcgaggcggggatagggctggcggagtggttcaagaaggacgtggtcacgtcaccgttcgaggagctgcacggggcgactctgttccacgagagcatgggg

SEQ ID NO: 6158 - DNA, 427 bp, Zea mays
  unsure (1)..(427): unsure at all n locations; Clone ID: LIB3137-028-Q1-K1-A10
gaagaagagctggagggcatacttgataaagttttggtcatgtttcggtttatacaaggtgaagatgtatttgaggcattctacaagaaagatctagctaagaggttgctgcttgggaagagcgcatcaatagatgctgaaaaatcgatgatcacaaaactcaaaactgagtgtggaagtcagtttaccaataagctggagggaatgttcaaggacattgaattatccaaagaaataaacgattcattcaggcaatcatctcaagctaggacaaagcttccctcaggcattgaaatgagtgttcatgtgcttacaacaggctattggcctacatatccaccaatggacgtgaaactcccacacgaactgaatgtgtatcangatatatttaaagagttctatttgagcaagtacagtggaaggcgtt

SEQ ID NO: 6159 - DNA, 333 bp, Zea mays
  Clone ID: LIB3137-028-Q1-K1-A2
gtcggcgcgtccgtcgtatcggtgcagaacagcgcgcgtcaccgcaagctcaagtgtcttcttgcttgcttgctcgcctgcttacctctcagttccccactcacgtcccttgccgtacgtacgtgcgtccaacacacaccaggtgaaaatgggctcggagacggagacggtcaacgtggaaggcatcccgttcccggcggagatcaccgtcgggaaccctctctccctcctagccacaggtatcacggacatcgagatccacttcctgcagatcaagtacaacgccatcggagtctacctccacaacgccggcggcggcgacagcaccacgct

SEQ ID NO: 6160 - DNA, 355 bp, Zea mays
  Clone ID: LIB3137-028-Q1-K1-A3
cgtaccgcgctttgtcaacaaataattccctcatagcctccgccgccgccgccgccgccgctcatctcgccgagaggtgacgggaccgaggaactcgccgagttctaagatagagaatcgcttttcacagcctggggtctgctgcgtagggtggtgttgaaggggagaagtttaagatctgttccacagatcacgcgtgcgcgctcgcgaatcgggggttccacacatagcttcgtcgctttgaatttgatgtactaatggagtctaagggtggcaagaagtctagcagtagtcgttccatgatgtatgaagctccccttggctacagcattgaagacgttcgacctgtcggagg

SEQ ID NO: 6161 - DNA, 413 bp, Zea mays
  Clone ID: LIB3137-028-Q1-K1-A4
cccacgcgtccggcgctctggaggcgccaggaggaggaggaggaggaggaggagaagaggggagccaggaccaggagcggcagctgcacgcgctcctcgtcgcggccgacaagtacgacgtgccgttcctgaggcgggcatgcgaggcgcggctggcggcgggcgtggcgccccggaacgcgctgcggacgcttgaggtcgccgagctgagctccagcgccgcgctcatggagcgcgccatgggcgccgtcgtggagcacgccgaggaggtcgtgttctcggcggagtacgagcggttcgccgcacggaacgcggggctgtgcgtcgagatcacccgcgcgctgcttgccaagatgccgacgccggcgaggagtgatgggccgtgcttagagcttgaaagcagctgatgcatg

SEQ ID NO: 6162 - DNA, 430 bp, Zea mays
  Clone ID: LIB3137-028-Q1-K1-A5
cgccacgcctacgtgcgcgcctgcgagttcttcgccatgttcgacgcagacttccagccggcgccggacttcctcgtcagaaccgtcccgttcctcgtccacaaccccagcctcgcgctcgtgcagacacgctggaagttcgtgaatgccaacgactgcttgctgacgagaatgcaggagatgtccatggactaccatttcaaggtggagcaggaagctggctcttccttatgcaacttctttggatacaacggaaccgctggagtatggagaacgcaagcgatcgtcgagtccgggggctgggaggaccgaaccactgctgaggacatggacttggcgctgagagcagggctcctgggctgggagttcgtctacgtttgaagcataaaggttaagagtgagctgccgagcactctcatagcgtaccggt

SEQ ID NO: 6163 - DNA, 437 bp, Zea mays
  Clone ID: LIB3137-028-Q1-K1-A6
aacgagttaacgaaagccttttatccaagctcagggaagggaagctcacagtttcgttggatccaatgttttatccaagctcagcgatggcttctcgtcagcagcatcctactagctaccacgccggcgagaccaaggcccgtgccgaggagaagacgggtcaagtgatgggggcgacgcaggagaaagggagggaggccaagcacaaggcgtccgacgcctccgaccgcgccatgggaatgggccacgacgccatggaggcgaccagggagaaggcgcgcgccgccgcggaccgaaccatggggatgggccacgacgccggggaggcggccaatgacagggcgtaccgggccaaggacgcggcctccggtgccgctggccgcgccagggacactgcgtccgacgcggccggcgctgccggggaccgcgcccgcgac

SEQ ID NO: 6164 - DNA, 368 bp, Zea mays
  Clone ID: LIB3137-028-Q1-K1-A7
tggccgggaagacccaggcgtaccgacagcgtccgatcgtataggtacacaacagcgcgcgttaccggaagcggaaccgtcttgttgcttgctggtcgagctgtttatgggagtatggcatgggttacatacttgagcgccgtaacgcctggtatgagcctcgtggagaagcaatggctagtccacggggctcatacttcagcgctgcatcgcttggtactcggacctcggctcgaggcattttctctaccccttcttaccctgaaaaagcagggtcaccttgtgtccttaaacctataaccatctttcggctaacctaaccttcttcgtcccttcgtaccaacaaggggtagtacaagaatattgac

SEQ ID NO: 6165 - DNA, 76 bp, Zea mays
  Clone ID: LIB3137-028-Q1-K1-A9
gggttctccaagctatttgctcctatactttattaattgattattattatgattaaaaaggaaaaaagaagggctt

SEQ ID NO: 6166 - DNA, 428 bp, Zea mays
  Clone ID: LIB3137-028-Q1-K1-B10
gaagacttcgtataacctgacggagagcctgatgttcctggcacacttcgtcggcgacgtgcaccagccgctgcacgtaggcttcgaagatgacgagggcggtaacaccatcaccgtccactggtaccggaggaaagcaaacctccatcacgtgtgggatgtcagcattattgatacggcaatcaaggacttctacaacaagagcatggataccatggtagaggctctcaagatgaatcttacagatggatggtctgacgacatcgtccactgggaaaattgcaagaacaaacacgcgacctgcgcgaacgactatgcgattgagagcatccattattcctgcaactacgcctacaaagatgtggagcaagacatcactctaggagatgattattttttcagtaggtacccgattgtggagaagaggt

SEQ ID NO: 6167 - DNA, 394 bp, Zea mays
  Clone ID: LIB3137-028-Q1-K1-B11
gcagttccttcagccccaactccagatgttgctgaagcacaggccccagttgctgaggaggacgacgacgatgatgttgacctttttggtgaggagaccgaagatgagaagaaggctgctgaagagcgtgctgcagctgccaaggcttctggcaagaagaaagaatctgggaagtcatcagttttacttgatgtgaagccatgggacgatgagactgacatggccaagctcgaggaagctgttaggagtgtccagatggaagggctgctctggggcgcatccaagcttgtcccagttggatatggtatcaagaagctgcaaatcatgatgaccatcgtcgacgaccttgtctctgtcgacactctcattgaggactatctgtgcgctgagccag

SEQ ID NO: 6168 - DNA, 385 bp, Zea mays
  Clone ID: LIB3137-028-Q1-K1-B12
cgcgctccctctcccggccatttctctcatttcggcctccctccgccggctagggttactgccaccgccttccacccctccccgactgcccgtgggtggaggaggctggttggcgtgcaggcgacctcggcggcggagatggagccggacttctcgaccgtgggcgggcccagctttgagttcgctttcaacgaggccaacttctccgaccgggaattgcggatcgaggtcgtcgcgggggattacgacgcgccggggtccactggcggcggtgccggaggaggtggcctcgccgactgggcgcgccatcgcaagcgccgacgcgaggagctcttcaaggagaaagaatctacaacctacatgtcagaccaaactaaatttaatg

SEQ ID NO: 6169 - DNA, 411 bp, Zea mays
  Clone ID: LIB3137-028-Q1-K1-B2
cctcgctctctcttgtctcgcccgctagctcccatcccagcctcccaccgcgcccgcctgccccaaccgcccccctcccctccccgctccgctccgctccacgcacggcgccagatctgctgctgctgcggcggccggtggacgccgcgccgcgcgtgccggcggcggtgacgtgagcggcggatcctgcccggccgtgccatcccggcgacgatgacagcgtaagcgggcggcggacgaccgtgcccccccggcccctactcccgaggtcattggcgtgtgctccttggcagaaaatggcgatgatggtggatccccccaatggcatggcaagtcaaggaaagcattactatactatgtggcagacactgtttgagatcgacaccaagtacgtgccgatcaagcccatcg

SEQ ID NO: 6170 - DNA, 429 bp, Zea mays
  Clone ID: LIB3137-028-Q1-K1-B3
ggaagcgaagcggaagagaccgagagggagaagcgtttctcctgggttgttcgggtgagccgctagcgagagcgagacggagcgaggctttgccgctgcagagcagagcgacatgagctaccggcttggaggcgcggcggaccgcgaggagggggacgaggagctgttcgagacggcgccgtccgtctccggcggcgagggctcgtgcgaccaggagcgccgcgcgttcgtgccgccgctgcggaggatgaactcggacagcatctacgacatggcgtccatggtgtcgcagcagctcccagccaagaaagggctatcgcggtactacgagggcaagtcgcagtcgttcgcgtgcatgtcggaggtgcgctgcctggaggacctgcgcaagaagggcagcccctacaagcacaggaccaacaagagcta

SEQ ID NO: 6171 - DNA, 412 bp, Zea mays
  Clone ID: LIB3137-028-Q1-K1-B4
ccaacccttccggggggccaattccaaggcccccgccaaggcttatgccattctggcggtgaaaagcaagggggcggagaggccctcctagggcaggaaggggaaggccggctaggaccccaacaagcctaagagggctcccagcgctttcttcgtgttcatggaggaatttcgcaaggagttcaaggagaagaaccctaagaacaagtctgtcgctgcggtgggaaaagctgctggcgacaggtggaaatccctgagcgagtcggacaaggctccctatgtagccaaggctaacaagctcaagctagagtacaacaaggccatcgcagcctacaacaaaggcgagagcactgcagctaagaaggctcctgccaaggaggaagaggaggaagacgaataggagtctgacaag

SEQ ID NO: 6172 - DNA, 404 bp, Zea mays
  Clone ID: LIB3137-028-Q1-K1-B5
gggacccacccttccccctccgaagaagccctaggcatgccccgcagccgatgaggtcgctgcgccgggtcctcatcccgctcgtcctcctcgcaggactcgtcttccgcgtggacgacggcggcggcgcgttcctcccgcccccgccccccgcgctccccgctcccccgccccgcctcgcacttaacggagaagcggctccggaggatgatggggcggcggtttcccgctccacggagatcgtcgcggcggaggcgcgctccaccgagttcgtcgccccagcgaggcccaagaagcagagcttccgggagctccttgtccggccgcagcctgcgcgccacgagccggctagtttggttaccgacgaggcgaaagccgaatccaggggctttcttggtcttatc

SEQ ID NO: 6173 - DNA, 382 bp, Zea mays
  Clone ID: LIB3137-028-Q1-K1-B6
gggaaaaatagcaggtgggagataaacaggaagagctaggtgaatacttagagaaaaggtcccccacaccccccacgcaggtgaatacaagtagcagtacaaggaagagagccaatctgcccgtgactgccagtgagttgctcgggtgtggtggttagttgaggtcacgatgatgggaggcgggctgatgatggatcagagcgtggtgttccctggcgtccacaacttcgtggatctcctgcagcagaacggcgacaagaacctgggcttcgcctcactcatgccgcagacgtcctccggcgaccagtgcgtgatggggggagggtgatcttgtggacccaccgccagacagcttcccggacgccgtggaggacgacagcga

SEQ ID NO: 6174 - DNA, 320 bp, Zea mays
  Clone ID: LIB3137-028-Q1-K1-B7
ctaccctctccttccagcgaaatggcaagagcggcggctcctccgcctctgcaccggctgcccggtctggccttgctgtgccttgccgtggcagtttgcttctccggcggcgaaaacgccgcggcggcggcctggacgaggaagatagtcggcgttcacgagctcagggtgggggatttctccgtcaaggtcaccaactggggggcgactctcatgtccgtcatcctccccgactccaaagggaacttgggcgacgttgtgctcggctacgacaccgtcgctgaatacgtcaacggcaccggctacttcggcggtctgat

SEQ ID NO: 6175 - DNA, 428 bp, Zea mays
  Clone ID: LIB3137-028-Q1-K1-B8
cccacaccccccgagctgagcttagctccactccagctccaatcacagtcgtgaccagagcgcgagagctagctagagggccgtgaaaatgccgatcaataggatcgccctggggagccaccaggaggtgtaccacccgggcgccctcaaggcggcgttcgctgagttcatctccaccctcatcttcgtcttcgccggccagggctccggcatggccttcagcaagctgaccggcggcggcccgacgaccccggcgggcctgatcgcggcggcggtggcgcacgcgttcgcgctgttcgtggcggtgtcggtgggcgcgaacatctccggcgggcacgtgaacccggccgtgaccttcggcgccttcgtgggcggcaacatcaccctgttccgggggctcctgtactgggtggcgcagctgctggggt

SEQ ID NO: 6176 - DNA, 407 bp, Zea mays
  Clone ID: LIB3137-028-Q1-K1-B9
gacgagtgtcaagtgaacctgtaatttgcggtgtcactggctggtatagccggagtgtgagtgagtgagtgatcgagctagctgagctccgatcctcgctagctaggataccgccataccacaagtcttcttcacaagtttaggagtgacagcaacaagagatcgatggcctctgccaccgtgctcaagtcctccttccttcccaagaagtccgaatggggcgccaccaggcaggccgccgcgcccaggccgtccaccgtctccatggtcgtccgcgcctccgcctacgccgatgagctcgtgaagaccgcgaaaacgatcgcgtcgccggggcggtgcatcctggcgatggacgagtcgaacgccacgtgcgggaagcggctggcgtccatcgggcttgagaacac

SEQ ID NO: 6177 - DNA, 305 bp, Zea mays
  Clone ID: LIB3137-028-Q1-K1-C10
gggccgacccacgcgttctttagaaacatttaccctgagcttcttctcttttttgccgagaagtataaaaggagtccatgcagttttttctggacagctgcatacaatcaatctaatctcgataaccaggttggagtgggcggctactgctatcccgccatggttgctctcaacgtgaagaaaggtgcatacgctccactccgtagtgccttccatcgcgacgaaatcatcgagttttgttaaagaagcataggcgcttttgaacattaaatctttctctgaactatgctccgtcagtttgtact

SEQ ID NO: 6178 - DNA, 355 bp, Zea mays
  Clone ID: LIB3137-028-Q1-K1-C11
tgcaacccaaccaagcccgcacgacacgactccaagtcgaggagctcgagagggcaccaataatggccggcgtgaactccagcgtcgtcgggctcaagcccgccgcggcagtgccgcaggccgccgccgcctcatcgccggcgaagcgggtgcagctggccgcgcccgagggccgccgcgccgctctgctcggcctggcggccgtcttcgccgtcacggccaccaccgggtcggccaaggccacgatcttcgatgagtacctcgagaagagcaaggccaacaaggagctgaacgacaagaagaggctgggcaccagtggagccaactttgcgcgcgcctacaccgtggagttcgg

SEQ ID NO: 6179 - DNA, 379 bp, Zea mays
  Clone ID: LIB3137-028-Q1-K1-C12
cgcccactcctccggctcttcttctccaccggcaccagtccaccacctcctgccaccgcgcggccccaaccaaccacaccgcagcgcagcaatggcgggcaacggcgccatcgtggagagcgacccgctgaactggggcgcggcggcggcggagctggccgggagccacctggacgaggtgaagcgcatggtggcgcaggcccggcagcccgtggtgaagatcgagggctccaccctccgcgtcggccaggtggccgccgtcgcctccgccaaggacgcgtccggcgtcgccgtcgagctcgacgaggaggcccgcccccgcgtcaaggccagcagcgagtggatcctcgactgcatcgcccacggcggcgacatctac

SEQ ID NO: 6180 - DNA, 347 bp, Zea mays
  Clone ID: LIB3137-028-Q1-K1-C2
gtccgcgacacgcatcgcccaggcgagcgcagtggagaatgtcatctccggaagatggcacccgccgaagcccacgtctccgccggcgccggtgtcagttccggtgttggagactcccgtggccccgccagagattgagaggcctaggtctgttggggtgagagagctggatagtggggtggagaggggcgccgcaccagtgagacccgcgtcacatgaaggaaggattggggaagggagagccggggaggtgccagagagacccaagttgaagctgcttcctcggtccaagccaattgaggatcctgaacagcgtcctacctatgtcgaagagaagcaggtgcacc

SEQ ID NO: 6181 - DNA, 423 bp, Zea mays
  Clone ID: LIB3137-028-Q1-K1-C3
gtcaggggaaggcttgctcggtttatcccttccgcaccctactcatgtgggagtctactgcactggatcttttctttttatagacatgactgagtgatgatgttatttgttccatgcctttttcgtcatcagtatttatatctttccttgtctttttcaggacaagcctcagccgccacctgagggccgtcttcctgatgccaccaagggtagatttctaatctttactagattggcatgaatgctgagttaatgggttacattgaccttgcatctttttttaagtgtttcaaagatgttgttttggcatccctgtacccagcttgctttgggtaacagtggttccttgtagccaaagcaccgcatatgcggccagaccaaacactcgttttcatgtcacttctattgacacgaggactggca

SEQ ID NO: 6182 - DNA, 310 bp, Zea mays
  unsure (1)..(310): unsure at all n locations; Clone ID: LIB3137-028-Q1-K1-C4
gaaacctgacccaccacgaactgcctatctgcatccatctttgggccaaccaatgaccgggccaaccacacctgggctctcccctcgagatgctttcacggtgtactgcaagaaccaggaaccttcctgttccctccggcgcaaggggctcacttttaatttctcgagaggggacgctcctttctcggggcagccttctctgcttgttgcctgcactcggctgtcctcttttgattcttggcaccgcgttaatttcgcaaatgcggcagggtgtcngctcaagaggccggcttctgcgtcttgggcgctt

SEQ ID NO: 6183 - DNA, 428 bp, Zea mays
  Clone ID: LIB3137-028-Q1-K1-C6
ttgggtcctacccctgctgtctttttcaaaattctgtcccttcctaggctcaaggcttggggccgcattgttgtagcaaaaggtaatggcactgaaggcaaccagcttaagcctaggattgatgatgaaacggccgatgctgtaaaggcttctgcttcggctgtttctgctattgccaaaacaaaccaacaactgcttgcttcaaaggatgaagcagaaaagaagatactagtgacgttgacacaagctctatattcccaagccaaggagttaaaatccttgaccgattcaatcggtcataccatggaacccataaatattaccagtgatgataggttttctcagtaccgcccactggaagaccatgcccctactgttataatgaatggggcaattaacagttcatggaaagcctctcagcaaactaa

SEQ ID NO: 6184 - DNA, 423 bp, Zea mays
  Clone ID: LIB3137-028-Q1-K1-C7
gcacggcaccggcggcatgatgttcggcacgggaaccaccggcggcatgggccagctgggggagcacggcggcgctggcatgggtggcgggcagttccagcctgcgagggaggagcacaagaccggcggcatcctgcatcgctccggcagctccagctccagctcgtcggaggacgacggcatgggcggaaggaggaagaagggaatcaaggagaagatcaaagagaagctgcccggaggccacaaggacgaccagcacgccacggcgacgaccggcggcgcctatgggcagcagggacacaccggcagcgcctacgggcagcaaggacacaccggcggcgcctacgccaccggcaccgatggcaccggcgagaagaaaggcattatggacaagatcaaggagaagctgcccggacagcactg

SEQ ID NO: 6185 - DNA, 427 bp, Zea mays
  Clone ID: LIB3137-028-Q1-K1-C8
ccacaacccccgagctcagcttatctccactccagctccaatcgcagtcgtgagcagagcgcgagagctagctagagggccgtgaaaatgccgatcaataggatcgccctggggagccaccaggaggtgtaccacccgggcgccctcaaggcggcgttcgctgagttcatctccaccctcatcttcgtcttcgccggccagggctccggcatggccttcagcaagctgaccggcggcggcccgacgaccccggcgggcctgatcgcggcggcggtggcgcacgcgttcgcgctgttcgtggcggtgtctgtgggcgcgaacatctccggcgggcacgtgaaccctgccgtgaccttcggcgccttcgtgggcggcaacatcaccctgttccggtggctcctgtactgtgtggcgcagctgctggggt

SEQ ID NO: 6186 - DNA, 414 bp, Zea mays
  Clone ID: LIB3137-028-Q1-K1-C9
gttggcttctcctccccctccttttcgggttcgggttcgtgaggttctccggggttcggggtcgtgggtgagcggatcgagatggcggcgtcggatgttgagtaccgctgcttcgtcggcggcctcgcctgggccacggacgaccactccctccacaacgccttcagcacctacggcgaggtcctcgagtccaagattatcctcgatcgggagacgcagaggtcccgcggcttcggcttcgtcaccttctccacggaggaggcgatgcggaacgccatcgagggcatgaacggcaaggagctggacggccgcaacatcaccgtcaacgaggcccattcccgcggcggccgtggaggcggcggcggcggctactgtggtggccgtggaggcggcggctactgcggtggcgggcgc

SEQ ID NO: 6187 - DNA, 429 bp, Zea mays
  Clone ID: LIB3137-028-Q1-K1-D1
gccgcgagctgcaggagctcatggacgctttggaggcatgcatgtccttcatcctggggcactcgtacatgaaggcgaagagcgggtcgagtttcataaagcggattgtgataaacttcttctacgagttcttgaggaagaacagccgtggccctgcatacgccgcaaacataccccatgcctccactctggaggtaggaatggtctaccaggtctgacaacagttagcagctgtgtaaaggtagagagatgagacgacgcctgtcagccccacctgtatatatatatccactcgttgctgccgataccgttaacacaatcacaggatgacacgagtagtgagtgacccttgagcacagccaatgctgaggaagcagctgaagatgagatcatctgtggggagcccagccagaaatatgcatttttttg

SEQ ID NO: 6188 - DNA, 331 bp, Zea mays
  Clone ID: LIB3137-028-Q1-K1-D10
ggtggtggtgcggttcaacaaggtgaactactccggcgtgtctaccaacaactatgccttggacgagatcctcgaggtgaaatgagtgaggccagtctgctcaaggaccccatgctcctgtgtgatttgtagttgtgaagtgaggctgctgcctagctgctacgttagctgctagcgtcacaacatcaatcttgtaatggcttaatctccacaatcatcatgtaatttattgcatgcttcattcaccgtggactcaataatctctcttgctctaaaatcgatgtattcgtttttcttgtgattttgtacatgcacataaatttctctctgg

SEQ ID NO: 6189 - DNA, 405 bp, Zea mays
  Clone ID: LIB3137-028-Q1-K1-D11
gcacaagcgcactctagcaatggcttctgaggttgtccgccctagcgacgccgagctacgaaaggcacaagccgacatatggcggctcagcctctcctacctcacgcccctgtcactgaggtgcgccgtggagcttggcatccccacggcgatctaccgccatggcggggctgcctcagccgctgagctggtcacggcgctgtctctcccctccactaagctgccgttcctccgccgcctgctgcggctcctcgccgcgtcgggcgtgttcaccgtcgacaagcagagcacggaggaggagcggtaccgcatcagccccgtgtcctacctcctggtggacggcatccctcacgaggaccacatgaaccacaccgctcttgtgctcacctgcacctcgacgcgcta

SEQ ID NO: 6190 - DNA, 334 bp, Zea mays
  Clone ID: LIB3137-028-Q1-K1-D12
cttcaacgaccagcttcacattttttaccccagacaccccaccaagaccttttgtaactacaccatggttatcatccacaaccctgacaacggcacatcaagaattaatctgccctcttgctccaataatattgcccccattatcttccctaccattatttaatcacttattctatttaaagcaggactaacaatccgatactcaatgctagtaactcgcaccacaagtaccgcttgaaaagaaacatctcacccaaagttctttatacattcattaaccctttataatatccccactgtatgatgtaaccaccaacacatttttcacaccttt

SEQ ID NO: 6191 - DNA, 420 bp, Zea mays
  Clone ID: LIB3137-028-Q1-K1-D2
gtctcactcgtgtctgccctgctcatcctgcttgccctcgccgtatcgtccacccgcaacgcacaggaggattccatggccaacaacaccgggacgttggtgggcggcatccaggacgtgccggggagcgagaacgaccttcacctccaggagctcgcccgcttcgccgtcgatgagcacaacaagaaggccaatgctcttctggggttcgagaagcttgtgaaggccaagacacaagtggttgctggcacgatgtactatctcactattgaagtgaaggatggcgaagtcaagaagctctacgaagctaaggtctgggagaagccatgggagaacctcaaggggctgcaggaattcaagcctgttgaaaagggtgctagcgcctaaagatgtctccttctccatgtgcgagcctgaagc

SEQ ID NO: 6192 - DNA, 411 bp, Zea mays
  Clone ID: LIB3137-028-Q1-K1-D3
cacactctcatcacttcgctccaagccagtgctagccccttgtgtacgtgagagacggcatcgtaccgtagagcagcatccatggcggctcagggaagtggcagtgctcgtggcagcggcgccgccgccgcgcttgcgctggtcctcctctgcgtgctccttcacggcgagctggccgagtcggcggtgtacacggtcggcgaccgcggcgggtggagcttcaacagcgccaactggcccaagggcaagcggttccgcgccggcgacgtgctcgcgttcaagtacaacgccaaggcgcacaacgtggtgcccgtgagcgcggcggggtacaagtcgtgcagcgcgcccaaaggcgtgagggcgctcaccaccgggaacgaccgcgtcacgctgaagcgcggcaacaactac

SEQ ID NO: 6193 - DNA, 417 bp, Zea mays
  Clone ID: LIB3137-028-Q1-K1-D6
ccagaggaaaagggcaaaagccaaaaggcatcaccgccgcgacgacgatggcagcctcgctccaagccgcggccaccctgatgcagccggccaagatcggcggccgggcgccctttgcctcgctgccgtcccgcccgtcgtcgcaactcgcctgcagggcgttcggcgtcgacgccggcgccgccaggatcacgtgctccctgcaggacgtcgccagcaggtgcgtcgacgccgcgaagctcgccggcttcgcgctcgccacctcggcgctcctcgtctcgggcgcgagcgcggagggcacgcccaagaggctgacctacgacgagatccagagcaaaacgtacatggaggtgaagggcacgggcacggcgaaccagtgcccgaccatcgacggcggcgtggagtcgttcccgttca

SEQ ID NO: 6194 - DNA, 359 bp, Zea mays
  Clone ID: LIB3137-028-Q1-K1-D7
gtgagaagccatgagtagggaacagcagatgccacggcggaggttcatcgccgtccccttctcctccggctgccgctcccactccagcgtcgacgtcgtcgacactgggcgccacgccggcaacggcaagaagccccacccgcaaggggctgaagcaggggcggcggcggcgaggggcaagggggagtctctggtggcgcggctcctgcgggggttcaagaacctgtcgcagatcttcgcggtgtacgacgacgaggacgaggaggaggaggagcgggagatggtgatcggcctccctacggacgtgaagcacgtggcccacatcggctgggacggcgccacgagcaccagcagcaacc

SEQ ID NO: 6195 - DNA, 427 bp, Zea mays
  Clone ID: LIB3137-028-Q1-K1-D8
gcagctcaaaactctagctagctaccaggggggaaaatggctccacttctcgccgcagccgtgaaccacgctacccatccagtccttagaagccatctaggacccaacaatgagagtttctcacgacaccacctatcttcttcaccacaaagcagtaagcgaaggtttaaccttagctttacgccacgatctgcaagggtaggcaatgaaaatggagtccaattgttgagcccctcggaaatccctcgaagggactggttcccctctgacttcatctttggtgccgccacttcagcgtaccaaattgaaggtgcatggaacgaagatggaaagggggaaagcaattgggatcacttctgccacaattttccggaaaggataatggacgggagcaatgcagacattggagcgaattcgtaccatatgt

SEQ ID NO: 6196 - DNA, 419 bp, Zea mays
  Clone ID: LIB3137-028-Q1-K1-D9
caaagagctttttttacgagctctgtactgttcacgagctcctgtccattaacaggacttgtgctgtcagttaatgatgcattacattccctggagtgaatgccccttcacagcttagatggaggctggtaccatccccacggttcatccgagcaatacttggtgacttgcttaactgtcaggtagttatcaagaccccattctccgagctcccgaccaaaaccgctccgcttgttccctccccaaggagcttggacgaagcatggttgcgagcaatttatccaaataataccagagtgaagagcctttgaaatgcgctcacacctctcttgatcattggagatcacggcaccagctaaaccataatgagtattatttgcaagttccacagcttcactctttgtcctaaactccttaac

SEQ ID NO: 6197 - DNA, 155 bp, Zea mays
  Clone ID: LIB3137-028-Q1-K1-E1
cccgtgaaggatgtccgatgtccggcgatgtgcgccaatgccgcagcagcagggcatggggggctgcgccgtccatctggccgcccgcccccgagtggggctacagcgcgcagccatacggcagctacagcggcccgcctgccggcgggtactac

SEQ ID NO: 6198 - DNA, 424 bp, Zea mays
  Clone ID: LIB3137-028-Q1-K1-E11
tggcgcttgtgcggtgggtgaagcgcgggtgctggtgcgggaagcctcgccagacctagcgctgccgactgccgagctgggtgcgggcgcgaggagtcgacgggaagacaagggtgaggaattatgagtgaaacagggcacactgtacaagtcactaacctctcgagcagagtatctgaaagtgatcttcatgagttcttttcgttctctggtcctattgagcatatagaacttatcagatcagaaggatacggtgccactgcttatgtgacattcaaggaacgctttgccttggaaactgcagtattgctcagtggggctactattgtggatcagccagtatgcataacctattggggacaacctgagggaacttttaatttctgggacaagccaacttgggaggttgaagaggaaatcgaat

SEQ ID NO: 6199 - DNA, 434 bp, Zea mays
  Clone ID: LIB3137-028-Q1-K1-E2
ctctgctcctgctgccacaagagtattcgccttcaatcgttgctcgcgcctgtcatttcgtgctgcacgccgacttgtttgccgttttcgctgccgtcttctgttggatcggatttgtctggatcgcttccgagatcggatctacgctgctgcgggtcagtcactttatggacggtggttcctgtggtctcgagggagcgtcggtagtgacatctactaccagcgctggtattccgcttctgccagagaagcactgcaccttgtttgatgaagcttgtggagccatggcgggcagtaatggtcctgaaggagtgccagtagtgacttctgctgatgaccctccgacccatgccgatattccatttctctgcaattcagttgatgaaatctgtgaagccacagggggcggcagtgctcccttggatgctcagata

SEQ ID NO: 6200 - DNA, 434 bp, Zea mays
  Clone ID: LIB3137-028-Q1-K1-E3
cctagtcgcacactcaatgctagtgagtgtgtggctcgggggtgcgcgttgcaatgtgcaatgcttagtcctacgttccgtgttcgggaatacgaggtgcaggatgcaatccctgcttccataggatttaacactagtgacggcccagtttcaacattgtcaagtgatgcattgttccggagaggcctgcactttcccagtgttaagatcattactctagagaagaatgacagttttagttttgatgcatattatgtggatgctaatgaattgcctcctggtacctcaacagacatcggtagttttcagattggcccattccaagcacataccgaagcttctaaagtcaaagtaaaaattcgcttgaatctacatggtttggtttcagtcgaatctgccgttttgataaatgattatcaaaggaatggaagttc

SEQ ID NO: 6201 - DNA, 433 bp, Zea mays
  Clone ID: LIB3137-028-Q1-K1-E4
atcccttcccctggcttcacggctcggctggctgcacgccggagccccggcgccagatctcgccaagtgccagggccgccgcaggcccctctttgcctgcgcgaggtctcagaatcccgagagggaaaaagaaaagaaaagatgatgacttcctctgcctgttactacctgtgccgctccctcgtccgggctcctccgctcaagtcggggagtgcagtgcgctgtccaagcgccgccccgccaggagccagcggtgccacctccacctccaagacacaggatccagttgaaaaccagaagctatgtgcctatttggttgagaaggcagtcaacagacttccgccaggagcagagaatatacttgggatctttgatctgcgaggctttcgggttgaaaatggtgatctccagttcctaaaagttttgatggacg

SEQ ID NO: 6202 - DNA, 434 bp, Zea mays
  Clone ID: LIB3137-028-Q1-K1-E5
gccagtcagccacatcactagctatctgtgcagaggcaatggcgtccaaggttgagctggtggtggaggtcaagtccccggctgacaagctgtgggcggcgctgcgtgactcgacggagctgttccccaagatcttccccgagcagtacaagagcatcgagaccgtcgagggcgacggcaagtcggccggcaccgtccgcctcctcaagtacaccgaggcggtgccgatgctgacgttcgccaaggagaagcttgagacggcggacgacgagaacaaggtggtgtcgtacagcgtggtggacggcgagctggcggacttctacaagaacttcaagatcacgctgaaggtgactccggccaaggcggagggcgagggcggcgccgtcgtcagctgggccatggagttcgacaaggccaacgaccaggtgcctgac

SEQ ID NO: 6203 - DNA, 410 bp, Zea mays
  Clone ID: LIB3137-028-Q1-K1-E6
gtcgattgcaaggtcgagcataagcactcggcggcagcgacgcactgcgacccggagttaacgtctcagctgaagcgcgcggcgcggtcgaccgtgtcggcaatgccggggcgcaccgtggcggccggcgagacgcccgtgctgatgagcggcgcagggcacgacgcgatggcgatggccaggctcaccaagatcgggatgctgttcgtgcggtgccgcggcggcatcagccactcgccggaggagtcggtgatggacaacgacgtgtgggccgcggggctcgcgctgttcaacttcatcgaccagaacgcggtgtcagaagaactggatgccgggcagaacgtggtggctgtggcgctggcggtggcagagtcgtgatggttcggtggcgattcttttcagtgggagta

SEQ ID NO: 6204 - DNA, 426 bp, Zea mays
  Clone ID: LIB3137-028-Q1-K1-E7
gtccaacaagtggagggtagaactcgtcgcgccgcctccgcccccgcccccgcctccgcctgcggtggttagttcctctctcctcgtcatctcaccgcccgccccacagaaatctgccccgtgctttgccaccggtgactgcagtctgcagaagcagctagccatggcggcggcggccttcgatgcctacaccgacaagaacgccatcttccgccgcctcaaggccaagcccgagaacaagatgtgcttcgactgcaacgccaagaaccccacctgggcctccgtcacctacggcatcttcctctgcctcgactgctcggccgtccaccgcagccttggggtccacatcaccttcgtcaggtcaacgaacctcgactcatggactccagatcagctgaaaatgatggcgttcggaggcaacaaccg

SEQ ID NO: 6205 - DNA, 365 bp, Zea mays
  Clone ID: LIB3137-028-Q1-K1-E8
ggaatatacatagccactggaatcaagcagttcatggtctcactgcaaatgtgcgcaagatgtttctggacatggacagtgaactatttgaagagtgccagcagcagtatatggataaacaagcaaaagccaaagagatgcaggagcaacgagaatcagcatggagacaattggaagctgttgttgctgccaaggctgctggggatgacatggttttggtcaactaggtaatataaccaacctttccacttcatttatttgttagtgcttgttgtttttagtcttgtaacctaaaattgtactacttttgttctcggctttgttctagcatatctgtgagatgcattgccaccttttgtactgct

SEQ ID NO: 6206 - DNA, 386 bp, Zea mays
  Clone ID: LIB3137-028-Q1-K1-F10
ctctcctgtgttcctccataccccactccccccgcaggagcggcgcggcggcggcaaaggcaaaggcaaaggcaagatgttcgggcgcgcgccgaataagagcgacaacaccaagtactatgagatcctcggggtgcccaagtcggcgtcccaggacgacctcaagaaggcctaccgcaaggccgctatcaagaaccaccccgacaagggcggtgaccccgagaagttcaaggagctcgcacaagcctatgaggttttgagtgatccagagaaacgtgagatttatgatcagtatggtgaagatgcccttaaggaaggaatgggtggtggtggatcccatgctgatccatttgacattttctcatcattctttggaccctcttttg

SEQ ID NO: 6207 - DNA, 429 bp, Zea mays
  Clone ID: LIB3137-028-Q1-K1-F11
agctcgccggttcctataacatgttggggttaaactactacacctcacggttctccaaaaacatcgacatctcaccaaactactcacctgtgctcaacactgacgacgcctacgccagtcaagaagttaacgggcctgacgggaagcccattggtcctcctatgggaaatccatggatctacatgtaccctgagggcttgaaggatctccttatgataatgaagaacaaatacggaaacccacctatctacatcaccgagaacggaatcggggatgttgataccaaagagacacctctacccatggaggctgccttaaatgactacaaaaggctagattacatccagcgccacatcgctactcttaaggaatcaatagacttgggatcaaatgtgcaaggctacttcgcttggtctctgctggacaact

SEQ ID NO: 6208 - DNA, 419 bp, Zea mays
  Clone ID: LIB3137-028-Q1-K1-F12
cattgaggctcctctccaagcttgtgcctgtatactccccttccttggatgaggacggtgtttgtaaaacagcatttgagattatatttgctttcgatgaagccatctctcttgggaacaaggaaaatgtgacagtgcaacaagttaaacaatattgtgagatggagagccatgaagagaaggcacacaagctgatgatgcaagccaaaatcaacgaaaccaaggatctcatgaagaagagggctaatgaacttgacaaaatgaggatggaaagaggcaagcttgacaaaggaggatactcatcaatatctggtccacacgtgattgaaaaaacgtttagtgacatgagcatcagtggttctggatttggtagtggttctggattaggtggactgagcactgacatggactcatttgcc

SEQ ID NO: 6209 - DNA, 411 bp, Zea mays
  Clone ID: LIB3137-028-Q1-K1-F3
acactgagctggtctgtttagttggaaagccatctgtacgtttttcgccgatcatggaggatgagaggaacacccagcagcaccagggcggtgagcaggcccaggaccaggagaacgaggtgaaggacaggggactcctggacagccttctcggcaggaacaagcacgacgaccaggagaagaagaaccagcagcagcagcaggcggaggaggagctggcgaccggcatggagaaggtcacggtggccgagcccgaccacaaggaggaggggcacgaggccgccgagaagaaggacagccttctcgccaagctgcaccgcaccagctccagttccagctcgtcgagcgacgacgaggaagaagaagtgatcgatgagaacggcgagattgtcaagaggaagaagaagaaga

SEQ ID NO: 6210 - DNA, 325 bp, Zea mays
  Clone ID: LIB3137-028-Q1-K1-F4
ctccctccgagtccagggggcaggggcaccattaccgagtagtttaattagtgctagttgtattaccattgttagtgacttaattaccctcacgcgaagcaccctacctttgctagtcctcctacgtctcctcttcgcttaatcttggtgatttgattcttcacttcttgcgcgcattgcagagggtgctcggtctgcagctatcttaggttaaccagtcgtgtgtggtctatcggtttcgatatagtattactactgctctgttataatcagcggggaggaggaagatgacggtgacgccacggatcacggtgagcgacgggcg

SEQ ID NO: 6211 - DNA, 417 bp, Zea mays
  Clone ID: LIB3137-028-Q1-K1-F6
cggacgcgtggggtcgccgccgctccgctcggagtccgcacccgagcgcgcgccctcgcgctgcagcgtctgcaggagcagcagacgcagtgggaggaaggtgctggcggcgagtacctggagctaaggaaccggaggctcgagaagctgccgccgccgccggcgaccacgaggaggtcgggcgggaggaaagcggcagccgaggccgccgcaactaaggaggctgaggcgtcgtacggggagaacatgctcgagttggaggccatggagaggattaccagggagacgacgccttgcagcttgattaacacccagatgactagcactcctgggtccacgagatccagccactcttgccaccgcatggtgaacgctcctccggtgcacgccgtcccaagttctagggagatgaatgag

SEQ ID NO: 6212 - DNA, 231 bp, Zea mays
  Clone ID: LIB3137-028-Q1-K1-F7
aaagcaacgatacattgcttaagctattcaaccactggtcatcagttatatgagtggtttgagtgttagtatccttatatgaagatgtcctctgatgagattactacttatgtgtatctccagcctctcttttttttgttctcctgattaaaggagtgatatacttgtaatctctgaactagcagaatattagagtggctacttgaaaattcatgtcactagcatattatc

SEQ ID NO: 6213 - DNA, 429 bp, Zea mays
  Clone ID: LIB3137-028-Q1-K1-F9
ggcaggggcataattataattattattctatcaagtgcttttgcttttattttatgtgctggagctgcactggtggtttatttcaagcttagaaaccgcagccatttaactgaagcatcacctgtgccaacaaaacctgcaggtcctggttctgcaatgttggggaacaggctagaaagcagacctatttcggcatcaccatccttcagctcaagtttggtggcatataaaggaactgccaaaacgtttaatctggttgagatggagagagccacactaggatttgatgagtccagaattattggggagggtggttttgggcgtgtctatgaaggtattcttgaggatggagagcgggttgctatcaaggttttaaaacgggacgatcagcaaggtacccgggagtttttggctgaggttgagatgctt

SEQ ID NO: 6214 - DNA, 431 bp, Zea mays
  Clone ID: LIB3137-028-Q1-K1-G1
aattcatggaggataggcagttcatgcagctttgcaagaggatacggatgcgcggcgaggatggacggcaatctgtacttcattggtggggtcaacgatgctggagaaactctcgggactgtggaggtctacaatgagaggcaaggctggtcgatctctggctgcaaatccgtagggaagagggcctttgcctgcgctatcaccgtttgacatgatcgcggatctcataccgtaccaatttttttgcaaccagcagtcatggttcgcagcctggtcctaccacgttggtccgagtataccttcttcccaaaacagtcactgggttgagagaaattttgctgcctcctcccccactacttatactactccagtccgtgaacaaatcaacttctagagttgacttgagccaaacttttgcaaacgttagaaaa

SEQ ID NO: 6215 - DNA, 428 bp, Zea mays
  Clone ID: LIB3137-028-Q1-K1-G10
atcaaagatcccaagaaggtgttggttattgtagggggtgatggtggtgttgtgcgtgaggtttcacggcattcctctgtggaacaaattgacatctgtgaaattgacaagatggtggtagatgtatccaaacaatttttccctcatttagctgttggatttgaagaccctcgtgtgtcattacacattggagatggggttgcctttttgaaaaatgctccagaaggtacttatgacgcagtaattgtggactcatctgatccgataggtcctgctcaagagctttttgagaagcctttcttccagttggtggccagagctttgcgtccaggtggagttgtatgcacccaagcagagagcatatggctacatatgcacattattgaagatattgttgtcaattgtcgacaagttttcaaaggctcggt

SEQ ID NO: 6216 - DNA, 415 bp, Zea mays
  Clone ID: LIB3137-028-Q1-K1-G11
gaaatcctggattaaacaccatgatggtgaatttctgggtgggagggggaatcaattggaccacctgattttctcttctttgatatcaagttttaccatggaaagagactgccatgtcaaagcgagttcagctgcttcaaggtgctcggaaaggggatgctgctgtccaaccccatcgtcgttagggccaagctcatctccaaggtcaccgagaagaggatcaatgttactggaggcactatcttgctgaccgccacataggatctgcgtaggaacatggaacattgaggcgcatgtcaacccaatgaattggatattgaaaaatggctggatatagatgaaccagctgatatttatgttcttaggggatagcaggtttaagcacaaagagaaatgagtccatcataagtgagat

SEQ ID NO: 6217 - DNA, 436 bp, Zea mays
  Clone ID: LIB3137-028-Q1-K1-G2
cggagccgccgcaacccagcgtcccccgaagtctaaccctagatccggaccggccatggcgtcccgccgggtcgtctcctcgctcctccgctccgcgtcccgcctgcgggccgcctcgcccgctgctccacgaccgcgcgcgccaccgcaccgcccgtccccggccgggtacctcttcaaccgcgctgccgcctacgcctcttccgccgcggcccaggcggcacctgccaccccgccgccggccaccgggaagaccgggggcggcaagatcaccgacgagttcaccggcgctggcgccatcggccaggtgtgccaggtgatcggcgccgtcgttgacgtgcgcttcgatgagggcctcccgcccatcctcacggcgctcgaggtgctcgacaacaacatccgcctcgtgctcgaggtggcgcagcaccttggcgag

SEQ ID NO: 6218 - DNA, 331 bp, Zea mays
  Clone ID: LIB3137-028-Q1-K1-G3
tcctatctctatctggtagtataggacggagcggagctactagcaacgtagagtatccggcatgagtcctttcggggcggtgatcacgccagaaaccctcaagtacatgtccaagtaccagggacgagagatcacgcacgtggactgcgcacgggaggcgatgaggctgatccacgcggaagacaataacctgcaagccgagaattcggcatgggaactcaagaagaagttcggcaacggcgtgagcaccatggtgctcgtctacaacgccaccggggccagcctgagcctggtggacgacggccaagactggatgggctccgtctacagc

SEQ ID NO: 6219 - DNA, 415 bp, Zea mays
  Clone ID: LIB3137-028-Q1-K1-G4
gcgaccacgcgtccgctccccacgctaggccagatccaacctgcctcggccgtccaccgccatggctcccacggtgccttcggcggcgaagtctgcctctccttcccaaccttccgggaagagcgaggtggcagatctgaagcagcagctgcggcagctggcggggagccgcgctcccgatgcggacgaccagcgccgtgatgtcttcaagagggtgatctcctgcatgacggccggcatcgacgtgtcggccgcgttcggggagatggtgctctgctccgccacctccgacgtagtaaccaagaagatgtgctatctctatgtaagctcccacgcgcgcgcgcacccggacctagcactcctgaccatcaactttctccagcgggactgccgtgatcaggaccccaccattcgc

SEQ ID NO: 6220 - DNA, 437 bp, Zea mays
  Clone ID: LIB3137-028-Q1-K1-G5
acccgggcgtccgaagcgtccaaacgtcctacatggctcgcactcaatctgttgtagcggtcgccgtggtggcgacggtgcggctgctggcagcggcggcgactacctcggaggccgccatcacctgcgggcaggtgagctccgccatcgcgccctgcctctcctacgcccgcggcacggggtccgccccctccgcgtcctgctgtagcggcgtcaggaacctcaagagcgccgccagcaccgccgccgacaggcgcgccgcctgcaactgcctcaagaacgccgccaggggcgtcagcggcctcaacgccggctacgccgccagcatcccctccaagtgcggcgtcagcatcccctacaccatcagcaccttcaccgactgctccaaggtgaactaaaacctataccacgcgcgacgacgtgccgctgatcgatcg

SEQ ID NO: 6221 - DNA, 351 bp, Zea mays
  Clone ID: LIB3137-028-Q1-K1-G6
ggagcgagagagaacccaaacggagagagacaatcgagagagatggcaaactgttttggtgacgtcgtggacaattacaagctagacacaatgccaaggtatatcggcaaaacgaagactcgagaagaccgggcacgagaggcctcccatctcagtaatgagaatgataagtccaagaaggctaaagactatgtgaacatgctgaaggactggtacggcaatggagcgtcgacgctgtgcgtgatctacaaccagacgggcggaaccctgcggtacgtcgacgacaaggactggctgggctacccggggccgacgccctacccgacggagatcggcaacgggcagtgggcg

SEQ ID NO: 6222 - DNA, 418 bp, Zea mays
  Clone ID: LIB3137-028-Q1-K1-G7
cggacgcgtggggacaagctagctagctagctgtacagcagaatgcggtgcgagccccgtagctatgacaaggtcgatcgaatcgccttttcagcaggcgacagcgctatttgtccggtggaattattccggccgtgtctcaaagccttccttccgtacgtgtcgctgcaggcaggtgatggagcagttcgcatcggagatccggaagctgtcggagaggctgctggacctgctgtgcgagaacctgggcctggagcccgggtacctgaaggcggccttcgcggggtcggacggcccgacgttcggcaccaaggtgagcgcgtacccgccgtgcccgcgcccggacctcgtcgacggccttcgcgcgcacaccgacgccggcggcatcgtgctgctgttccaggacgaccaggtgagc

SEQ ID NO: 6223 - DNA, 416 bp, Zea mays
  Clone ID: LIB3137-028-Q1-K1-G8
cctccctctctcctcccctcgccttgtctcgcttttctgctgctcggccccatccgatctggatcaacacattgaccgagcagccatggaggttcaacactccctgtctcgacccctgagcggcaagggtctgtgcgagcacaccggcagccccaggcgcggattccccatcgccgtcgcggcgttcgtgctcgtcctagccctggtcgccggaggccacggccacgcaggaagctctcgccgcgcacgccccaaccgcgaccatctttgtcgaaccagacgtccgctctaagcagctcgccgtcgtctgtcccctggcctgcgtgcccaggccacgccctgcctctacgtcgttgtcgtgttatgccgccttccatcgcgcctcgccttgctgcgcaacggttcgctgcgtcgtc

SEQ ID NO: 6224 - DNA, 425 bp, Zea mays
  Clone ID: LIB3137-028-Q1-K1-G9
aggttatacagatattgtgctgtaccttgatgctactattatgtgtagtaaaatttttggggtcggaattgaccaaacttatggatttattcaacgtttcaattcagtgacaaatgctactattttctatattcagatacttggtactgatttcttgatcaaactcattaaacttagcattccttatagttatccccacacgctgaggttgcgcctgtgccatggcataagacacgcctacatcgtggacggatatgcgctgccatggactgacctcagcgcagatcgtgattgatttgtgggtgaccccggtttgatgtctggttgttgggctgcgcaggtgggctgtcgcttgggatcgaaaaggatagggcatctactgccaccatggggtttgtcgacgacttcaaaaggcatgttgtcgc

SEQ ID NO: 6225 - DNA, 436 bp, Zea mays
  unsure (1)..(436): unsure at all n locations; Clone ID: LIB3137-028-Q1-K1-H1
gcccaatcattctgtccgttttcgccacccgtggcctcaaaaccaatccgaggcacggaacatatggcggccctggcgggcgaggacaaggacgttgccgccttcctcgcggactgcacggcgtctggagacgccgcatatggcgccgccaaggccgtgctcgagcgcctncacgcncccgtcacgcgccccgccgcacgacgccttcttggcgccgtccgccgacgcttcgccgccttccgcgccgcgggggaggactgcttccgcaccttccactttcgcatccacgacgtcgtcctcgacccacacgtacaaggtttccaacaaaggaagaagttgacaatgatggagataccaagcatcttcattcctgaagattggtcattcactttctatgagggcctcaaccgtcatccagactccattttcagggata

SEQ ID NO: 6226 - DNA, 388 bp, Zea mays
  Clone ID: LIB3137-028-Q1-K1-H10
gcaatgcaaacggcgctgcttgcgagagtgaaactgaacttgtttacacaaatcctctacctttggcgcgctgcttgcaagctgtttgggaggtccagatatggcggatcgatccttccacgtcggagcgcaaagatctggtgtcaacagcgagggtcaccctattgaccaatctaccaacaccagaaaagatgaagagcttcgaacaaggcctgaagaatttttcatccaagttgtagagctactgacgaaggcatgcctgccgcctacattatcacatacagcgggggagcgccgtctattagtttactccatcatcagctctaggaggaaggagagctgctcagtggctgctggacctatctgtcattggcatggcacatcatca

SEQ ID NO: 6227 - DNA, 369 bp, Zea mays
  unsure (1)..(369): unsure at all n locations; Clone ID: LIB3137-028-Q1-K1-H11
nnnnnnnnnnnnnnnacnggtgtcatcaagcctgttatggttgtcacctttggtccaactggcctgactaccgaggtgaagtctgttgagatgcaccacgaggcgcttcaggaggctcttccgggtgacaatgttggcttcaacgtgaagaacgttgctgtcaaggatctcaagcgtgggtttgtggcctccaactccaaggatgaccctgccaaggaggctgccagcttcacctcccaggtcatcatcatgaaccaccctgggcagattggcaacggctatgccccagtgctggactgccacacctcccacattgctgtcaagtttgctgagctcattaccaagatcgacaggcggtctggcaaggag

SEQ ID NO: 6228 - DNA, 303 bp, Zea mays
  Clone ID: LIB3137-028-Q1-K1-H12
acgcatgcgctgctgcagctcgaccctcaaatggtgcccgaccgtggcgtacaagggatcgtccgtcttcgtcacactcgagcaggccccggaggaccccatcctcggagtgaccgttgcctacaacaaggatcccagccccgtgaaggtcaacctcggggtcggcgcctaccggaccgaggaagggaagcccctagtgctgaacgtggtcaggcgcgccgagcaaatgttgatcaataatccgtcacgtgtcaaggagtacctaccaatcaccggtctggctgaattcaataagctgagcgc

SEQ ID NO: 6229 - DNA, 430 bp, Zea mays
  Clone ID: LIB3137-028-Q1-K1-H2
cttcgcttccactccccacgttccccgcctgcttcctccaagccccggccagatccgcgcgcccgcggggaagagggcctcctctcctcctcctcctcccttggctcgcgctctggtcgaggaggcggaggccggtgccggcgggcgggcggggaggtaggtagcagcttgcggttgcgggagggaagctgcgcgcgctaggctgccatggcggtggagaagacgctgcccggcgcgagtgcggggaggaccgtgctggtcacgggcggggcgggctacatcggtagccacgccgtgctgcagctcctcctcgcgggcttccgcgccgtcgtcgtcgacaacctcaacaactcctccgagctggccgtccgccgcgtcgccgcgctcgcgggggaccactcccgcaacctctctttccacaagattgatc

SEQ ID NO: 6230 - DNA, 435 bp, Zea mays
  Clone ID: LIB3137-028-Q1-K1-H3
tctctctcccgtccggcacttcctccgatcgactagcctgcggcggcgccggcgccggcgagcagcgggcatgcgggtggcacccatggtgctcttcctcgtccgcgacgccgcgggctacggcgctgccctcgccgacgcgctccgcccgccgtccgggctaacgagggagtcctcgcccttcgagctcccccttggaaagtacggcctcgacggagagaaggcgtgcgccgagctcctgagcttttccgattccagtggctctccacaggtgaccatttttgttctgccagactataagccacctcttgcagcgtgtgttgtaaatggggtcttggaactgatttcttctgaagctacctccactgagcgaactctaattgtcccatacatcacaagatcgtcaagctatcatcatggaacggaacatgcaac

SEQ ID NO: 6231 - DNA, 358 bp, Zea mays
  Clone ID: LIB3137-028-Q1-K1-H4
gcaatgcatactaccacctttggccgtaagaggcaaaagacatctcaatctgttcctgcgttacctgcacctcctgcaatgcattcacaacagctggctacaccaacacagccatcgtcttcaactgctaggaaagcagtacccccagtccctaaaggcaaaaagacgaaaccaggtcagaaggtaccaggtggctctgcagccaagcctatgccatcttcagcaggtcctagtggaagaggaccacacatgaataggaattttccaggtggttctgctcctgaagctcaagctcaaaatgtcgatccattggttggtcgtaaagtgatgaaccggtggcctgaaaataatagttttt

SEQ ID NO: 6232 - DNA, 419 bp, Zea mays
  Clone ID: LIB3137-028-Q1-K1-H5
tcggtcgcgtggagaccgcatccttcgtctccccgtctgctcctcgctcccgacctatctccgctgtcgccaacgtctcattctctgcctcaaggctgcaatgcaagaacctgtcatccctacagagccctctgaacgtgactgctacttgcgcttctttcgccgagaagaggtcggctcctgtccatgccacggctgaggggtctgaggctggtgcggcggagcagccagaagaaccgaaacctgcgaccaagatcgaggaaatgccgctcgagtcgaagcagaagatgatcatggagcagagggcgcggatgaagcttgccaagaaactgagacagcggcgcaagcggcttgtccgcaagaggaagcttaagaagaagggcaggtggccaccgtccaagatgaagaagctcaagaat

SEQ ID NO: 6233 - DNA, 410 bp, Zea mays
  Clone ID: LIB3137-028-Q1-K1-H6
tcgctccggcaccccgaccctcaaacggtgccgatcgtggccaacatggggatgatggaccagctgacgcaccgcgggctggcggcgctggcggagacgtacggcgggctgctgcacctccggctggggcggctgcacgcgttcgcggtgtcgacgcccgagtacgcgcgcgaggtgctgcaggcgcaggacggcgcgttctcgaaccggccggcgaccgcggcgatcgcgtacctgacgtacgaccgcgcggacatggcgttcgcgcactacgggcccttctggcggcagatgcgcaagctgtgcgtgatgaagctgttcagccggcggcgcgccgagacgtgggccgccgtgcgcgacgagtgcgcggcgcttgtccgggccgtggccgttggcggcgggggcggggg

SEQ ID NO: 6234 - DNA, 426 bp, Zea mays
  Clone ID: LIB3137-028-Q1-K1-H7
ccggttcgtcaacgtcagggacgaccgcggcgccacgccgctgcacctcgccgccaggcagggccgccccgcctgcgtgcaggtgctgctggagaacggcgccattgtctccgccctcaccggctcctacgggttccccggcagcacgtcgctgcatctggccgctcgaagcgggaacctggactgcatccggaaactgctcgcctggggcgcggatcgtctccagagggactcagcagggaggattccttacgccgtggcgctgaagcgcaaccacggggcgtgcgcggcgctgctgaacccgtcggcggcggagcccatggtgtggccttccccgctcaagttcatcagcgagctggacccggaggcgaaggctctcctggaagcggcactgatggacgccaatagggagagggaggagaagat

SEQ ID NO: 6235 - DNA, 399 bp, Zea mays
  Clone ID: LIB3137-028-Q1-K1-H8
gagacgcacctgagcgtgcaggagctggcggcgtcgctgggcgcgctaccggcggagttcgtgcggtctgagcaggaccagccgggcgcgaccacgtaccgcggggccgccgtgccggacgcgccggtgatcgacatgtcggagcccgggttcggcgcgcgcatggccgcagccgccagggagtgggggctgttccaggtggtgaaccacggcgtgccctcagcggcggtggcggagctccagcgcgtcgggcgggccttcttcgcgcttccgacggaggagaaggagcgctacgccatggacccggcgtccggcaagatcgagggctacggcaccaagctgcagagggacctcgagggcaagaagacgtggaacgacttcttcttccacgtcgtcgcg

SEQ ID NO: 6236 - DNA, 295 bp, Zea mays
  Clone ID: LIB3137-029-Q1-K1-A1
cgcaaactagcatagttcgtcagttcacattttatttcaaatcacctggtgaacctaaatacttggaggcatttgatcttagcccagatgaggctgaagatgctcgctctaagcaggcatggcttatatacttctggagaagagccaaaactcatggtgttgaggaagatattgctgatgaccggcttcagctttggattggtcgcaacgcacaagctccaaattctcatgacgctatcgatgtggagagaggtctaacagagctgaggaaattgggcatagagcagcaactgtg

SEQ ID NO: 6237 - DNA, 425 bp, Zea mays
  Clone ID: LIB3137-029-Q1-K1-A10
ccacaagttaaagaagcgctgaaagcagactttgataacagtgcttcagctacttcgaaccggaacaacccagaggtgcccaaagtagaagaatatgctgatgccagcaaatcttattcagagccattggaccttgcaaagtatagttcagctgcagaattggaggtgcttggtctggagaagataaaaatagagctgcaatctcgtggattaaaatgtggtggaacttttacaggagcgagctacccgactcttccttctgaagacaactccattggataagttaccaaagaagctgcttgctaaggccgctattgggggggaagtgagaagctgtataaacaagtactgatggtgcaatgcttaagtttttctttgacaatgtatggaaatctgttgtggtgtaatcacgtgttacaagccct

SEQ ID NO: 6238 - DNA, 435 bp, Zea mays
  Clone ID: LIB3137-029-Q1-K1-A11
gaagtactttgtggagctagtgaaactaatgtttgcccatcaggaggagttggaatctacaagcctggttactggggcatgaacattgaaagaacaaaggtctatagagttaccatatacatcaggtcatcagaatcggtggagctaatggtttctttaacaagttcagatggtcttcaaaatctagcctctcatacaatcatgggagacaaagaagatttcgttgagtggacgaaggttgaatttgatttgcaatcaaattatataaatactaattcaagacttcagcttacaaccaccaaaagtggcataatttggtttgatcaagtatcacttatgccatcagatacttatatggggcatggtttccgtaaagatcttgcctctatgctggcaaatctgaagcctcgatttctaaaatttccagggggcaac

SEQ ID NO: 6239 - DNA, 432 bp, Zea mays
  Clone ID: LIB3137-029-Q1-K1-A12
gttctttcttgctccgctccccacgcgtactcgctctcgtggcgacgactgggtgatcgccgccgccgtcgccgccaccacgcaccaccaggccttcaccggcgacaaacaccaccaacagacacaagtgcttcagtcattatagtgccagtaccattctgccagcgagttcctttgccacaaaaagataacactcggatatctcatggcaaaacctgggattttaggccgcagcagtgcacagagatcaaatgagggcatgcgaatcatattctcagcagttattggtgttatgctagggtacttgtttggcatttccttccctaccgttaatataacaaagcttcacttcccttccagcattatctcctatatcgaggacagaaactctggcatcacaacccaaacattattgaatcatgcatggacgtc

SEQ ID NO: 6240 - DNA, 297 bp, Zea mays
  Clone ID: LIB3137-029-Q1-K1-A2
gcacaacacaaacaccatttttattccttcaaaggaaacacacagcggcacgctcttatttccggtgtttccaccatcagatggtctctgcgccctagcacagcaccgggcgcatggctcacgcatgcctttggcaatatacacatagaccacgcagtagaaaaaaaaaaagaaaggaaaaccttgccgaacttaacatcattgtccaagaaaacacggcctatttcgtcatatcatcattgttccgagttattggatttcaaaggcggacttcactgactggcgggatcggagggg

SEQ ID NO: 6241 - DNA, 325 bp, Zea mays
  Clone ID: LIB3137-029-Q1-K1-A3
gcggcggcgtacgtagcggcggtctcaaccttatgcgagctcggctccggtcacccgtcgagccacgcatccatgtcgaggaggaagaccagggagcccaaggaggagaacgttacccttggacccactgtccgtgaaggagagtttgtctctggtgttgctcacatctttgcatccttcaatgacaccttcattcatgtcactgatttgtctgggagggaaactctggctcggatcactggtggcatgaaggttaaagctgatcgtgatgagtcgtctccttatgctgttatgcttgctgctcaagatgttgcacaacagtgca

SEQ ID NO: 6242 - DNA, 416 bp, Zea mays
  Clone ID: LIB3137-029-Q1-K1-A4
cgagaacttgatttggttcacactattgcccttagtgcacattgcttagcacaagggaaaatgggcagtggttttgatgttagtgctgctgtctatgggagtcaacgctatgtaaggttttctccagaaatactctcctcggctcaggctataggtgggactgtcttgccagatgtagtatcagatgttctaacacaaaggtgggatcatgagaataaacagttttcattacctcctctgatgacccttgtaagtcgccaagcctcaatgtccatattgttgtttccaaaatggcaatcaaatcattttactggtagtcaccagccaccataactactggtctgctactactggtataggatttacagttcctttactagacactgcaatgctatgatgcttataggctatagaca

SEQ ID NO: 6243 - DNA, 436 bp, Zea mays
  Clone ID: LIB3137-029-Q1-K1-A5
gccccaagccagcaagcgctcgatacattcttcacaacaactccgcatctctgacccagcccggccacaggagttgccgcatctcgcctctctggtctggtcacaggagctacgagacctctccaatggcggttaagatctacgttgtgtactattccatgtacgggcatgttggctaactagctgacgagatcatgaatggtgccttatctgttgaaagcgatgaggctaatatatggcatgtccctgaaattctctctgaagaagcgcttggaaagatgggcgcaccccctaagcccgacgtgccagtcatcacaccgcaggaacttgcagaggctgacggtatcctctttgggtttccgacacggttcggaatgatggcagatcaaatgaaggcgttcttcgatgccaccggtgggctctggagggagcagag

SEQ ID NO: 6244 - DNA, 431 bp, Zea mays
  Clone ID: LIB3137-029-Q1-K1-A6
gccccaagccagcaggcgctcgatacattcctcacaacaacccccagctctgccccagcccgcccacaggagttcccgcatctccctctctggtctggtcacaggagctccgagacctctccaatggcggttaagatctacgttgtgtactattccatgtacgggcatgttggcaaactagctgaagagatcaagaaaggtgccttatctgttgaaggcgttgaggctaaaatatggcaggtccctgaaattctctctgaagaagtgcttggaaagatgggcgcgccccctaagcccgacgtgccagtcatcacaccgcaggaacttgcagaggctgacggtatcctctttgggtttccgacacggttcggaatgatggcagctcagatgaaggcgttcttcgatgccaccggtgggctctggagggagca

SEQ ID NO: 6245 - DNA, 356 bp, Zea mays
  Clone ID: LIB3137-029-Q1-K1-A7
ggagaccatcgccgagatgaaggtcgaggtttagggcgccgcggaggacccggacacctcgaccgtgccggcgacgctgatgccgcactaccccaggccggacgcgcgcgaggcggccacggcgcggcacatcaccatgtacgagtacaccagggccggcacggacgagccgacgcacctgtacctgaacgcgcgctcgtacatggacccggtgacggagacgcccaaggaaggcacgtcggaggtctgggaggtgatcaacctcacggacgacaaccatccgctgcacgtgcacctggcggtgttcgcggtgctggagcagcggtcgctgcgccgcgtggacgagttcagggact

SEQ ID NO: 6246 - DNA, 301 bp, Zea mays
  Clone ID: LIB3137-029-Q1-K1-A8
gccgaccatcgacataattaaactcgtggtctagtgcgccagaggaggacccgcgcacctgggccgcgccgactacgctgttgcgctcaatacaactgtcatgacgcgctccaggaggggatggtacgtctcatcatcctctacgagtacacgaaggcgcggcacgcacaatcctactcacctgtactgtgagctctcgctagtacattgaccctgtgactgagacacttaaggtatgcacgtcagaggtctgggaggttatcaaactcacggacgacaaccatgcgctgcacacgcacat

SEQ ID NO: 6247 - DNA, 354 bp, Zea mays
  Clone ID: LIB3137-029-Q1-K1-A9
ctctgctccaatccgccgctccactccaagtttcacggaggcagccatcacagcctcgccgggctccgcttcccctgttctttgggcatggagcttatcacaaatgtcaccgagtacgacaagctcgcgaaggagaggctgccgaagatggtgtacgactactacgcctccggcgcagaagatcagtggacgctcaaggagcaccggcaggccttctccagaattctgtttaggccacgggtactgatcgacgtctcccgtatcgacatggccacaaacgttctgggcttcagcatttccatgcctatcatgatcgctacttcagccatgcagaaaatggctcatcctgatgga

SEQ ID NO: 6248 - DNA, 362 bp, Zea mays
  Clone ID: LIB3137-029-Q1-K1-B1
gattcgatgtagtcactgactgtttggatcatcattttgtgaaggaaaatggccatgaaagtgttacaagaggttggctgaagaaggtgcgactggaatggaacatcctgcaaaatgacctaccagatggtattcatgtgagagtttatgaggaaaggatggatcttctgagggcttgcatcgttggggcacctggaacaccttaccatgacaatctttttttcttcgatattttctttcctcctgattacccccatgaaccaccttctgttcactatcattctggtggtctccgcctgaatccaaatctgtatgaatcgggaaaagtgtgcctcagcctcctgaagacatggacaggcact

SEQ ID NO: 6249 - DNA, 430 bp, Zea mays
  Clone ID: LIB3137-029-Q1-K1-B10
gcgccgaagaagagcgacaacaccaagtactatgagatcctcggggtgcccaagtcggcgtgccaggacgacctcaagaaggcctaccgcaaggccgctatcaagaaccaccccgacaagggcggtgaccccgagaagttcaaggagctcgcacaagcctatgaggttttgagtgatccagagaaacgtgagatttatgatcagtatggtgaagatgcccttaaggaaggaatgggtggtggtggatcccatgctgatccatttgacattttctcatcattctttggaccctcttttggaggaggtggtggaagcagcaggggaagaaggcaaaggaggggagaagatgtagtccactcacttaaagtttctctggaagatctttacaatggaatctcaaagaagctctctctttcgcgcaatgtcatct

SEQ ID NO: 6250 - DNA, 422 bp, Zea mays
  Clone ID: LIB3137-029-Q1-K1-B11
gcgggacgcagcgagcgttccgccggagatctagaccgtagctagggtttgaggcgccgggctgcggtggacgagatgtcgacgccggcgaggaagcggctgatgcgggacttcaggcgcctgcagcaggacccgcccgccgggatcagcggcgcgccgcacgacaacaacatcatgctctggaacgccgtcatattcgggccggatgatacgccgtgggacggtggcacgttcaagcttaccttgcagtttacagaagattacccaaacaagccaccaactgttcgatttgtctctaggatgtttcatccaaatatatatgctgatggaagcatctgtttggatatcctacagaaccagtggagtcctatatatgatgttgctgcaattttaacttctatccagtccctgctgtgtgatcc

SEQ ID NO: 6251 - DNA, 426 bp, Zea mays
  Clone ID: LIB3137-029-Q1-K1-B12
gttctttcttgctacgttccccacgcgtactttctctcgtggtgacgactgggtgatcgcggtcgtcttctccgtctctactcaccaccatgccttcaccggctacaaacactaccaacagactcaagtgcttcagtcattatagagccagtaccattctgccagcgagttcctttgccacaaaaagataacactcggatatctcatggcaaaacctgggattttaggccgcagcagtgcacagtgactcaaatgatggcatgcgaatcatatactcagcagctattggtgttatgctagggcacttgtattgcatttgcttgcataccggtaatataacatagcttcacttcccttacagcattatctcctatatcgaggacagaaactctggcattacaacccaaacattattgaatcatgcat

SEQ ID NO: 6252 - DNA, 362 bp, Zea mays
  Clone ID: LIB3137-029-Q1-K1-B3
gggctcggcaatcctgacccgaccctccagatttcccgtcgccgagccacgcggatcgagtacccgtcgaactcgccgctgtcggatcgttctcgggggctggggcgatcaagctaacgggatttgaggagatctaggccagccgcgggcagcagccatcagccatgagcgaggtgttcgagggctacgagcggcagtactgcgaggcctccgcctcgctctcccgcaagtgcaccgctgcctccgccctcgatggagagaggaagaagcagaagctctccgagatccaatccggcgttgaggaagctgaatcgctgattcggaagatggacctggaggcaaggagcctacagcctagcatt

SEQ ID NO: 6253 - DNA, 435 bp, Zea mays
  Clone ID: LIB3137-029-Q1-K1-B4
gtttaaggacatcaacaacaaccacatcggtttcgacatcaacagcatgacctccgtgcagggcaacccggctggtttcttccatgatcaagatggaaccttcgaaaacctgacactcagtagcaaagaggcgatgcgggtgtgggtggagtacgatcgagagaatacacagattgacgtcaccatggctcctctggccatagtcaaacctaagagaccaacagtgtccactatccaaaacctctcagacgtgctcaccgacgtggcatacgtcggtttctcatcgtcaacgggcaagatccatacgcaacactatgttctcggctggagcttcgccatgaacggccctgctccgtccatcgacctgagcatgcttccaaagcttccacggcatcatcacaagagtcgacgatcctgggtgttagagacagttct

SEQ ID NO: 6254 - DNA, 434 bp, Zea mays
  Clone ID: LIB3137-029-Q1-K1-B5
tgaagaagccagtcaatagcgagttctactactagtagctagcctgctgatctgttctgttgtttagttcgcaaagccttctgtttcggcgaccatggaggatgagaggaacacccagcagcaccagggcggtgaggcccagcaggacgccgccgatcaggtggacgtgaaggatagggggctcctggacagccttctcggcaggaagaagcacgacgacgaccaggagaagaagaagcagacggatgagctggcgaccggcatggagaaggtcacggtgtccgagcccgagaagcacgggcacaaggaggaggagcacgaggtcgtcggcgagaagaaggagggccttctcgccaagctgcaccgcaccagttccagctccagctcgtcgagcgacgaggaagaggaggcgatcgatgagaacggcgagatta

SEQ ID NO: 6255 - DNA, 429 bp, Zea mays
  Clone ID: LIB3137-029-Q1-K1-B6
cggtgctactgacggttgctctagatccgttcatcctggtggttttgtgaggtcgaaagcggcgagcgaattagaagatgctggacaagctgtgggacgacgtggtggccgggcctcgcccggagacgggcctcgagaagctccgcaaggccaccaccgcccgcccgctcgtcatcaacaaagacgcggacggcggcagctacaagcgggcgcagtcgatgccgtcgaccccgacgacgccggtgacgccgtcgtcgtcgtcgtcgtcgacgacgccgcgcggcgccggcaacgtgtggcgcagcgtcttccacccggggagcaacctggccaccaagggcatgggcgccaacctcttcgaccggccgcagcccaactcccccaccgtctacgactggctctacagcgacgagaccaggagcaaccacc

SEQ ID NO: 6256 - DNA, 308 bp, Zea mays
  Clone ID: LIB3137-029-Q1-K1-B7
ccggaaccgggacccagcgtcggacgcgggcggcgtcgtcctattatatactcttctatccggccggttcgctcaggtgtcgcttacaccacgttcgtttgctcgcgggcccgcagccgcctgctgctcctctgaccgccgcggacgcgccgctctagtctctgggttacaccgcaacgtctgccacttcgcaccgccacacaggctgacctcgcacggtcgcgcggggccgcgggacatcaacgggttatggatccacgcggacccggggtctcggatgcggcctcggtgggcggctgtcggtcagc

SEQ ID NO: 6257 - DNA, 310 bp, Zea mays
  Clone ID: LIB3137-029-Q1-K1-B8
cgcgcgcgcccgacggtcgatgtcttcatgttagtcgacgcgttcctgcttatcgtcctgccttctgcgctcatgatgtgtcttgaatggtggtcgtttgacctccttactctcatgtcagggcttgtacccaacccagagctgcagacctcatggctttcgatctgtcatacgagtgtaacattactcttcactataccttgtggccttggagctgctgtaagcacgcgagtggcaaatgagctgcgcgctgggtaccctgacggagctcgatcagcactccgcgtggtgctgaccatggcggggatcg

SEQ ID NO: 6258 - DNA, 203 bp, Zea mays
  Clone ID: LIB3137-029-Q1-K1-B9
cgcgcgcgccctacctactttatcttcatgctattcacccacacaccgattcctatcctaagcgcatttctcactaccaagtgggatccttcctcacaccacctcttcactttcttccgaccgcctctacccaacccagacatcctgacttcagtaccttctaaccagcctcacgcagttaccatcactctctactatagctc

SEQ ID NO: 6259 - DNA, 395 bp, Zea mays
  Clone ID: LIB3137-029-Q1-K1-C1
cccacgcgtccgacgacaccatcaagatcgatctggagaccaacaagatcatggacttcatcaagtttgacgtcggcaacgtggtcatggtgaccggcgggaggaacaccgggcgtgtaggtgtgatcaagaacagggagaagcacaagggcggcttcgataccatccacgtcgaggactccatgggccaccagttcgccacccgcatgggcaacgtgttcaccattggcaagggcaacaagccgtgggtgagcctgcccaagggcaagggtatcaagctcagcatcatcgaggagcagaggaggcgcgactttgctgcccaggctgctgccaaagcataagttctctgaatgtgctgcttggagctttttgctatgtctagttttatttttatc

SEQ ID NO: 6260 - DNA, 405 bp, Zea mays
  Clone ID: LIB3137-029-Q1-K1-C10
cccacgcgcacggagtgtcccttcccatatttctaacgtgctttgggtttgacgcacccggggtcgttcgtcgagatgccgaagccggtcacgaagctggaatacatcatgactgaggaccttgaccgcaaagagcgacctgtacaattatcggcgtgctgtactacaacaacatgatggtctggaacgcatcgatcggtctcgggggtccaaggagcagagactgtgggactgtgacacatacctagctgtatacagaagattagctatacacgccatcgactgagcgatttgtgtgtacgatgtttgatccaaatatatatgctgatggaagcatcttgttgcatatcatagacaaccagacgagtcctatatacgatgttgctgcatttttaacttctatcc

SEQ ID NO: 6261 - DNA, 289 bp, Zea mays
  unsure (1)..(289): unsure at all n locations; Clone ID: LIB3137-029-Q1-K1-C11
gcgtncgaccaagctgtcggactttgtgctcgccaatgtctggcctcagggcgacgcgacccacgtaaggacgctcgtcatggggaccaacgggtacgcggcgccagagtacatcatgacggggcacctcaccgccaagagcgacgtctacagnntttgggcagtgctgctggagctcctgacgggccgtcggtccgtcgatcggtctcggcggcccatggagcagagcctggtggactgggccagaccctacctcaagaagcccgacaagctctaccgggtcatggat

SEQ ID NO: 6262 - DNA, 421 bp, Zea mays
  Clone ID: LIB3137-029-Q1-K1-C12
gcgtgagattgctgaagcttaccttggtttttcgatcaagaatgctgtggtcacagtcccggcctacttcaatgactcacagaggcaggccccataggatgctggggtgattgctggccttaatgtgctgcgtatcatcaacgagccaacagctgcagctatcgcctatggtcttgacaagaaggctaccagtgtcggtgagaagaatgtcctcatctttgatcttggaggtggtacctttgatgtctccctcctcaccattgaggaaggaatctttgaggtcaaggccacagctggtgacacccatcttggtggtgaggactttgacaacaggatggtcaaccacttcgtccaggagttcaagaggaagaacaagaaggatatcactggcaaccccagggctctccggaagctgaggacc

SEQ ID NO: 6263 - DNA, 324 bp, Zea mays
  Clone ID: LIB3137-029-Q1-K1-C2
cccatccagcggtcgacttggacttctccgctactgtgctgttctgtgcagccgtgcaggggcgccaacgactccgagctctgctccatccaactctcatggcgggctaccgcggtggctcctccgtctccgcctccaccggcggcgggggcagcgcggtggccgcagccttctccacccggctgctgctactcctcacgctgctgccgctcgcgctcgccgccttcgccttcgcgctccagtggcgcggcggtatgcgggacccggcaggtgcagtctggcccgccgacgcgcagcgcttaccgggcatggagaacagccccc

SEQ ID NO: 6264 - DNA, 427 bp, Zea mays
  Clone ID: LIB3137-029-Q1-K1-C3
gagtatttaagctttattggcactcttccacaggatgttgaggtagttaattcagtagattcaactgtccctgagaagccacggctagagctgttcaagcatgactgctccagctctggaaaatgtagtgaatatagcaacacagaatcttctgatgatgttggcaagcaagagattagtgaactatcagacggagatgaatttcatttctatgacacaaggcaaagtttcagtgaatttgctactagtcctgctgacccgagaaagggatgtttaaacaacggaaatgaagatgataaatctgttgaatcattgacggttgacaaggctgagaaatatatgctgtcacattcaaaaaggcgcttacagttgcctgaaccaatagaaaaggagaaaggagttagcctttggtcaatgatcaaagaca

SEQ ID NO: 6265 - DNA, 426 bp, Zea mays
  Clone ID: LIB3137-029-Q1-K1-C4
atcgagaacacgatcgagcacacaagcacgaagactcgtttaggagaaaccacaaaccaccaagccgtgaaagcatcatggagtacggtcagcaggggcagcacggccacggcgccacgggccatgtcgaccagtacggcaacccagtcggcggcgtcgagcacggcaccggcggcatgaggcacggcacgggaaccggcggcatgggccagctgggtgagcacggcggcgctggcatgggtggcgggcagttccagcctgcgagggaggagcacaagaccggcggcatcctgcatcgctccggcagctccagctccagctcgtcggaggacgacggcatgggcggaaggaggaagaagggaatcaaggagaagatcaaggagaagctgcccggaggccacaaggacgaccagcacgccacggcga

SEQ ID NO: 6266 - DNA, 432 bp, Zea mays
  Clone ID: LIB3137-029-Q1-K1-C5
accaagctgtcggactttgggctcgccaaggacgggcctcagggcgacgcgacccacgtaacaacgcgcgtcatggggaccaacgggtacgcggcgccagagtacatcatgacggggcacctcaccgccaagagcgacgtctacagcttcggggtagtgctgctggagctcctgacgggccgtcggtccgtcgatcggtctcggcggcccagggagcagagcctggtggactgggccagaccctacctcaagaagcccgacaagctctaccgggtcatggatccagccatggagtgccagtactcgtgccaaggggccggacgcgccgctatggtggcgtacaagtgcctgagccagaaccccaagtccaggcccaccatgagggaggtggtccaggccctggagcccgtcctggacatgaacgactacctt

SEQ ID NO: 6267 - DNA, 416 bp, Zea mays
  Clone ID: LIB3137-029-Q1-K1-C6
gcggagctgtgtatgctaatcctatttatctcttgggttaggggtttgatgaacactgctggtcagatgaggattactgcaggaagaaggacgattggtatttactttccaaaacactgcctgaacgagaggctcttgcttttgcagcaaaaacagggctggacgttgctactgtttgtccgtcattagtatttggacccttgatgcagcctacagtaaattcgagcagcgaaatgatccttaaatatttcaaagatctcgagactgttgaaaatgtactcagcaatatgggggatattcgcgatgttgctgatgctcttcttctgacttacgaaaagccagaagcgtctggacgatacatctgcagctcacatgcaataaaaatttctgatatgataaacatactgaagaccatg

SEQ ID NO: 6268 - DNA, 325 bp, Zea mays
  Clone ID: LIB3137-029-Q1-K1-C7
gacagacagcacctactttagcttttttcgttcttcccaaatgtcactcccatggccgagagagccttcttcccagtgactcgttccgtgcctgtgccattcaacgactttaacgactgcattgttccaaagcaaactcccaacgatgagttctgtgacctcgtggacgtgctgacgagcaggcagtacttcatcctgtatctgcgcctgtaccattgattattgctgcctgagcactgagtgcctttgaccattgtgttccagctccattttacgccgttcccagactacgagatccttgagagctaccccaagtgcggaacca

SEQ ID NO: 6269 - DNA, 297 bp, Zea mays
  Clone ID: LIB3137-029-Q1-K1-C8
gagtatttaagctttattggcactcttccacaggatgttgaggtagttaattcagtagaggcagactgtccctgagaagccacggctagagctgttcaagcatgactgctccagctctggaaaatgtagtgaatatagcaacacagaatcttctgatgatgttggcaagcaagagattagtgaactatcatacggacattatcttcgcttgtactactcacttcaaagtttcagtgaatttgctactagtcctgatgtccccagaattggttttttcacaccaccctgacgtcattt

SEQ ID NO: 6270 - DNA, 319 bp, Zea mays
  Clone ID: LIB3137-029-Q1-K1-C9
gagaatgtaaccatgatttacgctccagcgctctaattcgaggtaggagaatcaatggcttgaacgctttcctgcgcaatcagagaaacatctgacggcgccaccaacagcctctggaaagaagcaacacttggcttcgcttgaaaagtggtttattggctctgctggaactggtattactccccatgagacataattcaatccatatatatcacagctgccaaaataatggcctttttacaacaaggcccaaaggcagtgtgcatcatattcaccaactgcagctatgactacgataaaccctgacaatcatttgaca

SEQ ID NO: 6271 - DNA, 241 bp, Zea mays
  Clone ID: LIB3137-029-Q1-K1-D1
gcggcgaggtagcagagtggtgggtggtggccagtgccgcgggttgcgttgggatggcggcgcttgtggcgctgacgctgacgctggcgctgacggcggcagtgacagcgacggcgaaggagtgcaccaccatcccgactgacctgtcgtcgcacacggtgcgggcgcggctgcaggcggcgccggccggagcggcaaagtggcggtggcccgagcttgtccacgagcacctcaaccccac

SEQ ID NO: 6272 - DNA, 419 bp, Zea mays
  Clone ID: LIB3137-029-Q1-K1-D11
ccccattcccgtcccgagacaggagaaggtttggatgctgctcctgagctcccccttcgggtgcgtgtcgccgccgccgccgccgctcagctcccatggcgctcgcccggcgctgaggatcgaggcggccaggcagctgacggggcgggtggtgacgaccaaggcggacaagacggtcggggtggaggtggtgcgcctggctccacaccccaagtacaagcgccgggagcgcatcaagaagaagtaccaggcgcacgaccccgacaaccagttcaaggtcggcgacgtcgtcgagctccaaccctcccgtcccatctccaagaccaagcactttctcgccatcccgcttccgccccgcgacactcgccgcaagtctcagctcctaccgccgctccagtccgacgacgaccaggagccgt

SEQ ID NO: 6273 - DNA, 419 bp, Zea mays
  Clone ID: LIB3137-029-Q1-K1-D12
gcaacgtcaaatcaacacaggctgttgttttcttcttttggtaaaggctttagctgcggcggatccaccggcggcgccccgagaatcgaagatgccggtgaaggtgttcggatcgccgacgtcggcggaggtcgcccgcgtcctggcctgcctgttcgagaaggacgtctagttccagctcatccgcgtcgactccttccgcggcaccaagcgcctgccccagtacctcatgctccagccgcacggcgaggcgctcaccttcgaggacggcaacgtcaccctcgtcgagtcgaggaagatcctgcgccacatcgccgacaagtacaagaaccaggggtacagggacctgttcggcccgggcgcgctggagcgggcctccatcgagcagtggctgcagacggaggcgcagagcttcgacg

SEQ ID NO: 6274 - DNA, 219 bp, Zea mays
  Clone ID: LIB3137-029-Q1-K1-D2
ggttcccccagtttgtctcattgtgcaactgtgctctcacccgctccccgagtgtttgggtccacctgtcagcccagccgcgtgacagtgcccaacaacagaattatttgttctttgtaactcccagcttcatccactgacatagggttgcactgaatgctgtattgctttgttgaatttcattttcttaatgcagaatatataaatatattacaatat

SEQ ID NO: 6275 - DNA, 409 bp, Zea mays
  unsure (1)..(409): unsure at all n locations; Clone ID: LIB3137-029-Q1-K1-D3
ttaaaatggaagccgaggacgggcggccaaggagttaggtgtaggccaggcaggcagaggcagcagttctcctctacgaagcggcgttccgatccgagatggggggccagcagaacgcgctccaccagctcgtgtccttcatcctcggggcgtccgccgccgccgtcctgctcttcttcctcacgacggcgacgagcggagcgcggttcacggggatctcgagctgggccaacggaaccacgggctttgacgacgatgctcccgtccaggcggctcctgctacccgggcaaatcacgccgacgcatagggcgcggcggcggagcaggaggacgagctgcagcggctgctgcgcgcggtggcggacgaggaccggacggtgatcatgacgtcngtgaacgaggcgtgggc

SEQ ID NO: 6276 - DNA, 424 bp, Zea mays
  Clone ID: LIB3137-029-Q1-K1-D4
ggcagagagcacctactccagtttttttctctgttctcagttctcactcccatggccgccgcggcctgcaacccagtggctccttccgggcctgtgccgttcaaggacgtcgacgacggcagtgttccagagcaaactcccaaggaggagttcggtgacctcgtggccgcgctgccgagcaggcagcagtccatcctggagctgcgcctgtaccagggcttctggctgccggagcactgggtgccggtgaccatcgtgttccagcgccgcttcacgccgcgccccgacgacgtgatcctcgcgagctaccccaagtgcggcaccacgtggctgaaggcgctggccttcgccacggcggcgcgtacggcgtaccctgccggtggcgccaggcacccgctccgacggctcaacccgcacgactgcg

SEQ ID NO: 6277 - DNA, 392 bp, Zea mays
  Clone ID: LIB3137-029-Q1-K1-D5
tgttcttcctcttccccatcagtctcgccgccattcccctgtcctgctgctgctgctactgctggtagtggttccccaaacccaagccttcgattcgcccgcccgcccgcgctctcgagccagccttccgcgccgtcgtggttgctttacgcgcagctatccatggatgaggtccctgccaccgacgctgtcctcgacttccgacccggctcttctgtaccacgcgtctccgccgtcccgcgccgtgccgtgcagtgcccccctgacaccggcggtgcagagggggcgacgggaggtccaggtatcgggaacactgccgccgtttccgcggagttgacggggtcaagttcgtccggtcccgatatccaggctgtggattgcgatacatcggg

SEQ ID NO: 6278 - DNA, 208 bp, Zea mays
  Clone ID: LIB3137-029-Q1-K1-D6
ccctgctgtgcttgcagataatgctataagtttctcacctgacaagctgcatgtgctactggggatagttctaaagaaaacccaagccttcaatcacacgccagcccgcgctctcaagccagactaacaagccgaactctgttgcattacccccatctatccatgaaacatgtacctgccaccctcgatcaacaccacttccgaccca

SEQ ID NO: 6279 - DNA, 407 bp, Zea mays
  Clone ID: LIB3137-029-Q1-K1-D7
gcggaaggctgttagccttctggagagcagtgctgtgctcgacgctcggtggcggtagggacggatatacgagcggatttgtatacgtcagctcgtttcggccccgcttgggggcttctcctcggcgtcgtcgctccctccgacgcctcttcctcttagtgtcgagcgctacagagaaagctcgtggacgggcaacgaaccaacggcgttttcatacgcggaaccatcctcttcgttttcggattgcagtacgtgctacaatatcacatatctcgggtttatccgaagagggggttattcacctagctttcaccaccagtgattttgcggacgacagcctatggttcccaaatcaccgaccgatcgacgacgccattctttttccaggcaacataatctcacccatc

SEQ ID NO: 6280 - DNA, 434 bp, Zea mays
  Clone ID: LIB3137-029-Q1-K1-D8
ctgtgactccagcaaggccggcgtcggaatgtccaccacaaccgccagcctcgccgcctggctcgcgcgccacggcctcccagccgtcatcgtcgacgctggcctcctcaacctcgatctcttgttcggcttcaagaaccgtgtccacctcaccgccgccaccgtcctcgcgggagacttcccactcgactaggcgctcgtctgccaccatgcgctccacgacctccacctcctctgcctccaagcctcgctccatgctgcccctctcgttcggatccaagaccctcacctgggtcacagacgcggttacctctgttggagcgaatgtcgcccacccactcgctcggctcattaataatgggaacatgacaagttataacggagggagagcgaagtctactttaactaagcgaaggctttgggatggagggatc

SEQ ID NO: 6281 - DNA, 134 bp, Zea mays
  Clone ID: LIB3137-029-Q1-K1-E1
cgatgtagacaggacagaacggccttagattttgtatcatggctgatcaacatgttatattaccatgaggcgaggtaagcttgaccgattgtcgcttcaacagccaggaagagcaagagcaagatgctgcgcaa

SEQ ID NO: 6282 - DNA, 423 bp, Zea mays
  Clone ID: LIB3137-029-Q1-K1-E10
cgcctcgatacgcggcgccggcgcaggcgttcagccatggcgatgagctggatccgatcggttgttaggagggccctcatcgctccgaagccgcggggctcccgccagtttactgtcaccgccgccggcggcggcgcgacgcagaccgaaatggtggcggcggagatggtccgctacgccctcggcggcgccgtgcaccggagctcgccagaggaggcgatgcggatactggagcaaggcgcctcgaacctgcagggaggaggcgagggcagtgccgaagctgttgggttgctcatgctcgctatgtccacgctgctttaccggagtggaagacgtcaagacgcaatggaaaagctcaaagcaacccaacaagttgccccttctgcagtttttagagttgcagcgtgggaagcactaatggga

SEQ ID NO: 6283 - DNA, 391 bp, Zea mays
  Clone ID: LIB3137-029-Q1-K1-E11
caagcacataagaccaactcatacctgaccgtctcaatcagcacgcccccgctctctcccaggtccctaagtgaaccaccctgtctggctaggcatgacctattgcacatttgctccatctgcaccacctcaatattctgagcttaagatgactctatacacaaacaaggaggagtatcgttctgagccagatcaaaacggagtaaccatcacagagagatcatacatggacacaacctgggtcttctcgtggcctgtagccgatgggccaacacctgatgcgaacatcctcgtccaactacagggcactagtgaccaagtagccaatactccagatgtggtgtaccactactccctacgattagcgttccaagataaaaggttaatgggt

SEQ ID NO: 6284 - DNA, 371 bp, Zea mays
  Clone ID: LIB3137-029-Q1-K1-E12
ggaagagcgtggcggtgaggcggcgacgactgggagggaggaggaggcgctgtctgaggcggtcgtctatcggagcggcgtcgtcctacagctcctccatcggcgagaactccgcgtccgacaaggagggcagcgacgggaggaggaggtggtggaaggaactgcacaaggcctcagcatgatgccctgctccagtccttggacgatgccctgcccatcaacatggaacctggcagctggaaccggaccgatccccaccgagaagaatgccacgtctttgcacaccgtcaggatggcgacgccaacgccggcgccacgggacaccgacccgcgcgcctgcatgaagagagcggcggacagcgccgccaggc

SEQ ID NO: 6285 - DNA, 421 bp, Zea mays
  Clone ID: LIB3137-029-Q1-K1-E2
gattgtcgtattgtctttctcgtaataaatttgtcgatgttgagcccttaggctgttgttggtacattggtacttcgtcgatgcttgaattgggacccttagtccgttttcctagactctgatgctgtatgcaactgaaacaagtaaatctatgatcttaaggctgcagtatgttcttgtttcagttgcatacagcatcagagccccctcgcgccgtcaaggcctccggaaccggtcgcaagcggcgtaggacccgcgccgctacagagccctcgtccgtcgcacttcgccgccgcgtcggagtcatccagctcgtcgacgcctggcggggagatccccagtgcgaggggaacctccacgacgcgagtacttctctacttcctgtcacaaaaaaaagatttgcaatctagcatatttatgg

SEQ ID NO: 6286 - DNA, 435 bp, Zea mays
  Clone ID: LIB3137-029-Q1-K1-E3
gttctttctctctctctcttccggcgactggtcagtgagctaccgccgccgccctacgccaggtgctgaggtcttcgtcgatctcgagctcccacaagggaagctgtccaggatgggatacaaccgccacaggcgtggccggggatcatcctcatcgtcttcgcgccgcaccaagcaagaagcctcgtgtgatgatggccttgggacatcacttccaaggcaagaaggcacagaagacgaactcaaaggttcaagaattcagcttgcaatgtgggactttggtcagtgtgatgttaaaagatgcactggtcgtaaactttcaagatttgggcttttgaaggagttgagagtgaccaatggttttggtggtgttgttctcagccctgttggaacacagtgtgtatccaaggaagatcatcctattgtgcaaagaaa

SEQ ID NO: 6287 - DNA, 421 bp, Zea mays
  Clone ID: LIB3137-029-Q1-K1-E4
gcggaaggcggcaagccggcagtagagcagtctcggcgctcgacgctcgggggcggcagagacggagagacgagcggatttctatacgtcagctcgtttcggccccgcttgggggcttctcctcggcgtcgtcgctccctccgccgcctcttcctcttcgtgtcgagcgctacagagaaagctcgtggacgggcaacgaaccaacggcgttttcatacgcggaaccatcctcttcgttttcggattgcagtacgtgctacaatatcacatatctcgggtttatccgaagagggggttattcacctagctttcaccaccagtgattttgcggacgacggcctatggttcccaaatcaccgaccgatcgacgacgccattcttctccccggcaacataagctcacccatcgacctcatcagtg

SEQ ID NO: 6288 - DNA, 405 bp, Zea mays
  Clone ID: LIB3137-029-Q1-K1-E5
cggacgcgtggggcgaaccaagcagaccccttcagaagaagcgaagtcgtcgccggagcaggaggaagagcgagcagcaagatgtcgtggcaggcgtacgtcgatgaccacctgctgtgcgacatcgaaggccagcacctcagcgccgccgccatcgtcggccacgacggcagcgtctgggcacagtccgagaacttccccgagttaaagcctgaggaggttgctgggatgataaaggactttgatgaacctggaactcttgcaccaactggtctttttgttggaggtacgaagtacatggtgatccaaggtgaacctggagttgtcatccgaagaaagaaaggcactggaggcattactatcaagaaaaactgcatgtccttgattatcgggatctatgatgag

SEQ ID NO: 6289 - DNA, 55 bp, Zea mays
  Clone ID: LIB3137-029-Q1-K1-E6
gatactcatatcaccatcttatcactaaccgtctctaaactcacacccacggcct

SEQ ID NO: 6290 - DNA, 260 bp, Zea mays
  Clone ID: LIB3137-029-Q1-K1-E7
ggagcgttggcgccgtgcggactgtcttgaccaccaacagctactaaagaggggactgggcggctgacacgccgcaatggtcccgacacacgggggccagcaccagccgagtgaaaggaggggtgaacagacaggcccgcacgcctgatggcctggaacctgggccacctggccacgtctgggcaccgcctcggggtcgactatcagcatcagacagagaggagctaccagactctgcaggcaggcattggccacacggt

SEQ ID NO: 6291 - DNA, 434 bp, Zea mays
  unsure (1)..(434): unsure at all n locations; Clone ID: LIB3137-029-Q1-K1-E8
caagcaaataagagcaaatcatagctgaccgttccaaacaacacgcccccgctctctcccaggtccctaagtgaaccaccctgtctggctaggcatggcctattgcgcatttgctccatctgcaccacctcaatattctgagcttaagatgactctatacacaaacaaggaggtgtatcgttctgggccagatcaaaacggagtaaccatcacagagagatcaaacatgggcacaacctgggtcttctcgtggcctgtagccgatgggccaacacctgatgcgaacatcgtcggccaactccagggcactagtgttcaagtagccaatactcccgttgtggtgtaccactactccctgggattagtgttcgaggataaaaggttcaatgggtccacactccaaatacaagggacctnccaaataaatggcgagt

SEQ ID NO: 6292 - DNA, 371 bp, Zea mays
  Clone ID: LIB3137-029-Q1-K1-E9
accgcacacaacacaaactcaaccttgaccgtgacatacacgacgccatggctatctagcaggcccgtaagctaactcagcctggccggctaggcatgatgtattgtgcatccggtcgatttgtgccacatcaacattgagagctgaagatgactggatacacaaacgaaggggagcatcgtgctgatccagaccaaaacggtcgagccatgacagacagaccatacatggacacacgctgctactgataaaaccatgtagacggtgaagcagcagatgatgctaacatacttgttcaactacaggcaactagtgacgcacgacacaagtctacagatgaggtgtaccactaccggctactattagcggtc

SEQ ID NO: 6293 - DNA, 438 bp, Zea mays
  Clone ID: LIB3137-029-Q1-K1-F1
ggttgaaaatgtatagagatactgcagaagctgttatctgtggtctgattccagattcgcctcaagccactgccagcagaactggaggaggcttggtgtggataagcgggtggaattctctccagcatgccaccaatgctgcgttcctatctgttgtgtacagcgactacatgctctcgacgcggacagcggcagtgcagtgcagcgggaagtactacagccctaccgatatacgcaactttgctgcatcacaggctaactatatcctgggagacaacccgatgaagcttagctaccttgtgggatatgggagcagctacccaaagcaagtgcaccacagaggggcgtcgatccccgcggatgcgaaaacaggctgcaaagggttcgagtatctccactcgcccagcccgaacccaaacgtggctacgggcgccctgg

SEQ ID NO: 6294 - DNA, 423 bp, Zea mays
  Clone ID: LIB3137-029-Q1-K1-F10
ggtgaagccgccgccgctgcagtgtccatatccaccgcaggagactgagatggggggttttgtcaagacccacaagagcaatgcatacttcaagcgtttccaggtgaagttcaagagaaggcgcgctggcaagacagactacagggccaggataaggctgattaaccaagacaaaaacaagtacaatacacccaaatacagatttgttgtgcgatttaccaacaaggacatcacagcacaaatcatctctgctagtatagcaggtgatatggttcttgcttctgcttactcgcatgagttgccacgatatggtcttgaagttggtctgaccaactatgcagctgcctactgcactggccttctgttggctcgccgtgtgctcaagacccgtggtttagataaggaatatgagggcaatgttga

SEQ ID NO: 6295 - DNA, 320 bp, Zea mays
  unsure (1)..(320): unsure at all n locations; Clone ID: LIB3137-029-Q1-K1-F11
gcgaaaggctcccaaccctacccacagcccttacttctatgcacgctcggcgacggcaaaagcccgttttttgatgggcaacgcatgcatcgacgccctcagatccaattacctgctcatcttcaagcacgccgagttccagcgccacgactccgagtacagcgccagcgccagcgccgacgactcgtccaggaagcccacaccgtccgccaccacggacgcccacgcgccggttccgtccgccgtcgccattatgttcggcgcggctggcgcgacgccggacctcgggtcngggctcggccacacaacccccaaccttc

SEQ ID NO: 6296 - DNA, 393 bp, Zea mays
  Clone ID: LIB3137-029-Q1-K1-F12
ccgcttcagccacgcgacgtcgccgctcttttatcgtcttcaggaactgtgcctactactggaccttcggcgcttacattgcttactactgcaaccacccgctgtacaccccagtgagtgatctgcagatgaagattgggtttggttttggggtcgtctgccaggtcgcgaacttctactgccacatcctgctgcggaacctcaggagcccaagcggcagcggcgggtaccagatcccccgcggtttcttgttcaacatcgtgacctgcgccaattacaccaccgagatctatcagtgggtcggcttcaacatcgccacgcagaccgtggcaggttacgtcttccttgtcgtggcggcaggcatcatgaccaactgggcgctcggcaagcaca

SEQ ID NO: 6297 - DNA, 439 bp, Zea mays
  Clone ID: LIB3137-029-Q1-K1-F2
agagaagggagttcttcctttcctcttcgatcccgacgaacgccgagggccgcggcgatggaatactcaggcggcggtgcgacgctgtcggagatgtaccagagcgcgcggcggctgctactctcggcgcgggatggcgtgggccgcgtcgagcgccttgcctcggcacccacttcgtcctcctactcctcggcgccgctcgtcggtggtgcgtcgggggaccccgcggttgctgaggaggtgcggcgagaggtggcgcagatccaggggctgtgcgcgcagatggaccgactctggcgatccatccccgccaaaggccaacgggacctctggaagagaaaagtggagcagctctctgaagaggtagattcattgaaggaaacccttgacaggcattctctgcgacagaaaaaacggattctggaagcaaaagaaaggg

SEQ ID NO: 6298 - DNA, 394 bp, Zea mays
  unsure (1)..(394): unsure at all n locations; Clone ID: LIB3137-027-Q1-K1-F4
caactgcattgctcgctctctcctttcactgttagtctgggaacatctatcagctcgctcattggccatctttggcttccatggagaggctcattgccggcctacttggcttcctattggttgcatcggtaggaagccatgcagctcgtgctccggatcagtactggaagtctgctcttcccgacactcccatgccgacctccctctcccaactccttgacgccgctccagccggcggcggcacgaccgtcaacgtcggctggggcggtgtccacgtcgatgctgggcacggtaagcccgggggtacgacagttgacgtangcaagggcggcgtcggcgtcaacgttaaccctggcaggagcggcaagcccggcggcacgacggttggcgtcgg

SEQ ID NO: 6299 - DNA, 264 bp, Zea mays
  Clone ID: LIB3137-023-Q1-K1-G4
cccactctctctccccacgatggcaaaaatggcgatggcgtcctcccgcctcccggctctcgggtgcctcgccgccgtcgccgtcgccgtcgcggcggaggccgccgccgccgccggagaaggcggcctccgcctgccccgcgacgccacgttcccggcggcgcaggcggagcggctcatccgcgcgctcaacctcctgcctaaagagaaagagggggggccggccgcgggccggggccaacggcccagcgtggcgcccgggga

SEQ ID NO: 6300 - DNA, 446 bp, Zea mays
  Clone ID: LIB3137-023-Q1-K1-G5
gaaaagggtcgacgaacgcgtcctacgaatgctatctctactcattattgcatatatttctaatccaagcacacctctcatgaatcgcactatatcaatcacgcttccttaaacattatcatcattacccaccccacaattatataatacgcatttcgatttatcactatcgtagtatttcttcaggcttattctattcaagaacacatgtactgcgtttatgttcctaccaaccatctctatattcgtgacataatttgtcgtccactcaactaacctggttcaaacccaacattttatatcgtcgaatgccttttaacttttttccccttcggcccatcgatcccttaaataatagccaattattttatacttagcccaaccaaattaaaaacaaatggtccacccttaacttaaattaattggcaaaaaccaagttctcccca

SEQ ID NO: 6301 - DNA, 334 bp, Zea mays
  Clone ID: LIB3137-023-Q1-K1-G6
agcgatcccactcccgatcagcagctgatcgctcactcttgcagctcgatcattctgtagctgctctagctctagccctagctagtagctagccactcggtcgtgtagtcatcagccttctgatcgtcacccatggccactgccgaggtccagaccccgaccgtcgtggcgaccgaggaagcgccggtggtggagaccccggctccgcccgccgccgtgcccgaggaggctgctcccgccgccgaggccaaggtggaggagccagctgccccggcggagaccgagccagctgccgcccgtgagcccgaagcggcccccgtggcgggggaggaag

SEQ ID NO: 6302 - DNA, 413 bp, Zea mays
  Clone ID: LIB3137-023-Q1-K1-G7
aggcctccttctaggaactagaaggctactcttcgcacatggccgtggagaccactcgcgggactctggctttcgtcatgatcaccaactagatgatggacaccgtattcatgacgctcgtcaccgtccaccatcaggggcagcagatccaccgcacgcacatgatggccgtagacatcaaccagcatctctccaggagtgagaagctattgcgcgatcttgggggtatatttttcaaaagtggaagccaaagaagaatggccccatcacgggtcctatgctaactacaaatgattcctttataaggaaggggagtcatttggagcaaaagcagaaactacggctggcagatcatccaccttcattaaatgcgcgccaattcccttctgaacccttattaacacttgaaaaag

SEQ ID NO: 6303 - DNA, 231 bp, Zea mays
  unsure (1)..(231): unsure at all n locations; Clone ID: LIB3137-023-Q1-K1-G8
accgnnccagaataggggggacgaccgcaggcgtccggatcagtattggtagcagatggaggttgttctggcacgacgacaacgccaagaccagaggtggggccgcccatgtacagagaacaccctatccttggcgctcgcgggacggtgccatgcttctactgcgtccaggagacgcatcaccacggggggtactacaaacgtatcttaccagtcggcggcagtgtaatc

SEQ ID NO: 6304 - DNA, 406 bp, Zea mays
  Clone ID: LIB3137-023-Q1-K1-G9
ctcagattgtattcatgacatgttggacaacaaatgtccataagctacaagcactgtaggtattatatgtacaatgcctggataaggggaaaaactaggcaggtaaagtgaaaaaggataaaaaaaaatatttctagtaaatcaaggcgttacacagatggagcctttggtttataagcaaagtttcgtggttggaaggatgataaaagaccactgacaggggcatgggctccgactaacgtgttgcagtcatcgcatggtacatggcaaggctagatctactatatggctgcgtaccagacggcccatttggcggcgctatcaacacgacgcatggacttgatcttagcgaaggcgtcgaacttgaaagtggctccacacatggctccctagctgtcgacacgcg

SEQ ID NO: 6305 - DNA, 219 bp, Zea mays
  Clone ID: LIB3137-023-Q1-K1-H1
gtgggacaaggatcttgccaagaagatttggtgcttcggacctgagaccaccggcccaaacgatggttgttgatatgtgcaagggagtgcatctcaatgaaatcaaggattctgttgtggctggtttccagtgggcatcgaaggagggtgcactggctgaagagaacatgcgcgggatttgcttcgaggtctgtgatgtcgttcttcatgctgatgcta

SEQ ID NO: 6306 - DNA, 419 bp, Zea mays
  unsure (1)..(419): unsure at all n locations; Clone ID: LIB3137-023-Q1-K1-H10
cccaaacggccgtttcctcctcccgttgtcagcttcgcttcgcctccggagtctggcatgcgcgtcgcgagtcgccaaaccaaacccaccgcccttataaagacaccttcccctttcccgtcgccctcctctgccctgctcgagctctccttccgcgctccctacccacaagccttttccgcaggtgcgccgcctctgcgaggtggggtgactccgtgaatgggtgacctgggaggaggagactggcgggaggcggtggccgagaaggggttggcggaagccgacggcgggcccgaccatctggtgatcatggtccacgggatcgtcgggagcacagcagattggaaggttggagctgagcagttnggtaaactgctctcagacaaaattatagttcattgtagcaaccgcaacatgca

SEQ ID NO: 6307 - DNA, 204 bp, Zea mays
  unsure (1)..(204): unsure at all n locations; Clone ID: LIB3137-023-Q1-K1-H11
cccacacgtnctcttactcctcccctgactttgtttcttacgcctacatactcattcatgcacctttccattccctgactcaaacccaccacccttataaatacaccctcctctttccaacaaacctcctcttccttcctccacctatgcatacgagctccctacccacacacctattacgaagaacacaccctctatgacttg

SEQ ID NO: 6308 - DNA, 455 bp, Zea mays
  Clone ID: LIB3137-023-Q1-K1-H12
atccgttccccttcccttccctcctctcgcgcgccggctccacgcagatccaggagatgaggcctcgctatgatgaccgctatggaggcacgcgcttgtatgttggcagattggccactcgtactcgttcccgcgatttagaacatctgtttggcagatatggaaggtttttcggtttttaccggaggtctttggtggaagggtgcccttggtggacttggtgaccatttggtgaagggtgcccttggtgtaatgttattgactgttttagtggaagttccaagttggtgatgcatttgagtacttgacacatgacgtgacggcttactgtttgtggcaaccctttgcgcagaatacgagaagtggagttgaagcgtgactatgcatttattgagttcagtgatcatcgcgatgctgatgaggctcgataccagctagatggcaaggatgttgat

SEQ ID NO: 6309 - DNA, 417 bp, Zea mays
  Clone ID: LIB3137-023-Q1-K1-H2
ctccgcatacgcacctacgagagtcgagtgacagcgagcgagcgagcgagcgaagccatggctctccgcaccctggcatcgaagaacgccctatccttcgcgctcggcggcgcggcccggccgtcggcggcgtccgcgaggggggtgacgaccgtggcgctccccaacctttcttacaatttcgggcccctgaacccgcccttttgggggaaaatattccccttgaccaaccaaaacaacaagccaactaacttggccacttcaacaaggggcttgaacaacttgacccttccctcggcaaaggccaagccttcggtggcgttcaacttcaaggcgccattaagttcaacggcggcggtcatgtgaaccattcaatcttttggaagaaccttaagcctattaaccaaagtggtgggg

SEQ ID NO: 6310 - DNA, 412 bp, Zea mays
  Clone ID: LIB3137-023-Q1-K1-H3
gtacgggtgtagtttttcttttgtaagaaccttccttttttttttttttttttttgcatggtgtgaattaagatcaaacgaatccgagcccttccaaaccctaagctcgcctcccctcccccccaaacaccaccgcgcacctatggcgaagtacggcgagggcgacaagcggtggatcgtggaggagcgcgccgacggcaccaacgtccacaactggcactgggcggaccgcgcctgcctgaatgggcccgggccgcggtttttttcctggttggggggcttaacattcttgaccgggagggggggcttaggtttcggaacggcgcgcttgaaaaggttggtggggagggctacctcaaccttcggaagggccagggcattccggggtaccaggttttgcttacccttttct

SEQ ID NO: 6311 - DNA, 159 bp, Zea mays
  Clone ID: LIB3137-023-Q1-K1-H4
cgccgccgtcgtcgtcgcgctcttcacgctctcccgtcgagaagattttaaaggactttcttgttgggatcaaggagaacttgggtgcatggggtcctttggtgctggccctagcttacattcctctgacagtcttaagctggttcaggcatcaaattc

SEQ ID NO: 6312 - DNA, 438 bp, Zea mays
  Clone ID: LIB3137-023-Q1-K1-H5
gaccaattagctagcttcttctagctctagctaggctcgtctgctgcaagaaggtaacaggaacagcaggcatggaggggaaggaggaggacgtccgcctgggcgccaacaagttctcggagcgccagcccatcggcacggcggcgcagggcacggacgacaaggactacaaggagcccccgccggcgccgctcttcgagcccggggagctcaagtcctggtccttctaccgggccggcatcggccagttcggcgccaccttccttttcctctacattttcatccttaccgtcatgggcgtcttcaagtccaccttcaagtgcgccaccgtcggcattcagggcattgcctggtccttcggcggcatgatctttgccctcgtctactggaccggcggcatcttcggcgggcacatcaacccggcggtgaccttcgggc

SEQ ID NO: 6313 - DNA, 140 bp, Zea mays
  Clone ID: LIB3137-023-Q1-K1-H6
ggcgcgaggggcgcgctgccccagccggcgcggattcgcttcgcgtctatagccttggagacccgatcggtgagctagcgccaagacgatatcggcggcgatgatgatggacgcgggaggatcgtaagtccttcagggca

SEQ ID NO: 6314 - DNA, 218 bp, Zea mays
  Clone ID: LIB3137-023-Q1-K1-H7
cggacgcgtgggtgtgtgtggacgtcctattccaaatccaagacctgagggtgagcagcgggtcatgggtaactcagggttaatatcaacagtgcctcgaaatctaacttctacttctgcatctgcttccgacatatgcaaaatggagatcttgaatgagaaaagaacacttgaagcaaacccatcaaatggtttgattactcaatctcctcaaccca

SEQ ID NO: 6315 - DNA, 66 bp, Zea mays
  unsure (1)..(66): unsure at all n locations; Clone ID: LIB3137-023-Q1-K1-H8
cgacgccagcgtccgggggcacnagggtgtgccttcacgctctatttcaaaaccaaaacctaaaac

SEQ ID NO: 6316 - DNA, 369 bp, Zea mays
  Clone ID: LIB3137-023-Q1-K1-H9
cccgctcgtcctcctcctctcctcctggactgcagagcacagcacaacacaccgagaaagaacaagcagccgccaccggagctcacaaccaccatcatcagcagcagcacacccggtcaaccttacacacacgcgcgcacacacacatggcgtcgcagcataggcaacagcaggcgggagcggcggcggctgcgtcctccgccgtgggcttcgaggactacctgccgatgatggcggaacggctgggctaggacgggctgatgcgggagctggcgagcggtttccggctgctgatggacccggcgcgcgggctcatcaccttcgacagcctccgccgcaacgccccgctgctgggcctgggcggcatgt

SEQ ID NO: 6317 - DNA, 198 bp, Zea mays
  Clone ID: LIB3137-024-Q1-K1-A1
ctcatctcaagagcgactagagagagagagaggaagagatcatgcgataagctcatctcgcacgcaagatgcggtctccaaggggcgcatgcggctgccgcggcgtccaaaagcatgtggaactgatccctggcataaccgacaacgtggtcttggactgcctggcgcgcgtgcaccacgcctgctacctggcgatgc

SEQ ID NO: 6318 - DNA, 445 bp, Zea mays
  Clone ID: LIB3137-024-Q1-K1-A10
caaggtctcatcagtgaccctgttttctctttctggtttaaccgacatgctggtgaaggagaaggtggtgaaattgtgtttggtggaatggattctagtcactacaagggtgatcacacctatgtcccagtcactcagaagggatactggcagtttaacatgggtgatgtcctggttgatggaaagtccactgggttttgtgctggtggttgtgcagcaatagcagattctggaacttccttgcttgctggccccacagccattattactgaaatcaacgaaaagattggtgctgctggtgtagtcagccaggagtgcaagactgttgtttctcaatacggacaacagatcctagatcttctgctagctgagacgcaacctgccaaaaatctgtcttaggttggcctgtgcacttttgatggcactcacggtgttagcgctggaa

SEQ ID NO: 6319 - DNA, 391 bp, Zea mays
  unsure (1)..(391): unsure at all n locations; Clone ID: LIB3137-024-Q1-K1-A11
cagcagccaattcgctcgagttcagatcgagcgcgcgccaagcaagtcttccggccggccgcgaagagcgcaatcaagcaagacaagatggtgaagctcgccttcggaagcgtcggcgactccttcagcgccacctccatcaaagcctacgtggccgagttcatcgccaccctcctcttcgtcttcgccggcgtcggttccgccatcgcctacgggcaactgacgaatggcggcgcgctggacccngcgggcctggtggcgatcgcgatcgcgcacgcgcctgcgctgttcgtgggcgtgtccgtcgcggcgaacatctcgggcggccacctgaacccggccgtgacgttcgggctggccgtgggcgggcacatcaccatcctgacgggcg

SEQ ID NO: 6320 - DNA, 276 bp, Zea mays
  Clone ID: LIB3137-024-Q1-K1-A12
cacaagcccattcgctctacttcacaagcattgcgcgccaagcaagtctttcggtcggccgggaccagcgcactcaagcacgacaagacggtgaacctctccttctgaagcgtccgcgactgcttcagcgccacctccatcaaggcctacatggccgaattcatcgccacccttctattcgtcttcgccgacgtcagttccgccatctcctacggtcaactgacgaatggctgcgcgctggacccggcggtcctcgtggcgatcgcgatcgcgcac

SEQ ID NO: 6321 - DNA, 93 bp, Zea mays
  Clone ID: LIB3137-024-Q1-K1-A2
aaaaaaaaaaaaaaaaataaaaaaaaaaaaaataaaaaaaaaaataaaaaagaaaaaaaaaaaaaggaagggcggccgaaatgagggaggcct

SEQ ID NO: 6322 - DNA, 429 bp, Zea mays
  Clone ID: LIB3137-024-Q1-K1-A3
cacacaatgaaactttaagtgtaacctggtgaccggtgaccattcataatatttcgtttttacattttggatatcaatatccattaatatgtttccctgttttgtttgtatatcagtcgaacttctgatagaatgaactgaaagacttctctaacaaaagtggagctgaggggagcaagagtgctgaaagcctgaaagtggtccaatgtttttagatgttctcgaatgttatctgaaatatgaggtttatctcttgcttgatcaacaatagaagcaaaaaatcatccttttgtttatttatgtttcccaatataaaggaaaaaggggaaatattttggtgcagtgtgcccaattcttttgtccctagaaaactgtgtagtcacctatagcaggcactatagtcagttttagctattttagacaccacta

SEQ ID NO: 6323 - DNA, 449 bp, Zea mays
  Clone ID: LIB3137-024-Q1-K1-A4
cttccaggctaagtgtttggagactggagagaccttcgccattaagaaggtgctgcaggatcggcgttacaagaaccgggagctgcaacttatgcgtgccatggagcaccccaacgtcatctgcctgaagcactgcttcttctcaacaacgagcagggacgagttgtttctaaaccttgtcatggaatttgtccccgagaccctgtaccgtgtcctgaagcactacagcaacgcgaaccagaggatgcctcttatctacgtcaagctctacatgtatcagcttttcagaggcctagcctatattcataatgtgccaggagtctgccatagggatgtaaagccacaaaacgttttggttgatcctctcacccaccaggtcaagctctgtgactttggtagcgcaaaagtcctgattcctggtgaaccgaacatatcttacatatgctctc

SEQ ID NO: 6324 - DNA, 300 bp, Zea mays
  Clone ID: LIB3137-024-Q1-K1-A5
acaagcgccgccgcagccggtgactgctcctttccgatctccgaggcaaagctgcgactccgcaaccgccgccatggcgttcgagaagatcaaggtctccaacccaatcgtcgagatggacggtgatgagatgaccagggtattctggcagtctatcaaggacaagcttatcctcccatttctggacctggacatcaagtactatgatttggggatactgcaccgtgaagcaactgatgacaaggtcacagtggaggctgcagaggctactctcaagtacaacgtggctattaagtgtgc

SEQ ID NO: 6325 - DNA, 335 bp, Zea mays
  Clone ID: LIB3137-024-Q1-K1-A7
ggccgctccgccaccttggcactcggctcttttcgctctagccaccgggccaggggagggggcattcgatcggctgcgttatggctggagctgctgctctcaatgagggtatgctttcttccgtgatcgaaaaaaatgtggctgctcacccatggcctgatttggagataggaccagatgttcctcaatggctaaattgtgtggtagagattcctacatgcaccatggttaattttaagacggactcaatctgtatgctgaataaggtgcaccgtgtactttactgcttatttagtgacccaccattccttcggattattctacgcttactgtgt

SEQ ID NO: 6326 - DNA, 388 bp, Zea mays
  Clone ID: LIB3137-024-Q1-K1-A8
ataattaattattgccctttcagttcgccatttgcagccgagcaccatgagctccacaggcggcggcgacgatggcgccaagaagtcttggccggaagtggtcgggctcagcctggaagaagccaagagggtgatcctgtgcgacaagcccgacgccgacatcgtcgtgctgcccgtcggcacgccggtgaccatggatttccgtcccaaccgcgttcgcatcttcgtcgacaccgtcgcggaggcaccccacatcggctgagaatcaaatctataaaacgaataactcggacatgtcatgcgtgcatgtccgtcgccgaataatggatgtgtgtgcttcgttccaataaattgctagtaaaaaaaaatggcatcgtcggtatgcatg

SEQ ID NO: 6327 - DNA, 343 bp, Zea mays
  Clone ID: LIB3137-024-Q1-K1-A9
gtaatgctgcaaggcacttgctcacccttgtcgcgaagaacccccgtcgtatctttgagggtgaggcgcttcttcgccgcatgaaccgctatgggctgcttgctgagggtcagaacaagcttgattatgttcttgccctcaccgctgagaacttcctcgcaaggcggcttcaaacacttgtcttcaaggctggcatgtccaagtacattcaccatgctcgtgtcttgatcaagcagcgtcacatcatggttggcaggcaaattgtcaacgtcccatcattcatcgtgagggtggagtctgacaagcacattgacttttactgccaagcccatatcgcggacgc

(The sequence listing continues in the following parts.)

We claim:

1. A substantially purified nucleic acid molecule that encodes a maize protein or fragment thereof comprising a nucleic acid sequence selected from the group consisting of SEQ ID NO: 1 through SEQ ID NO: 14882.

2. A substantially purified maize protein or fragment thereof, wherein said maize protein is encoded by a nucleic acid molecule that comprises a nucleic acid sequence selected from the group consisting of SEQ ID NO: 1 through SEQ ID NO: 14882.

3. A transformed plant having a nucleic acid molecule which comprises:
(a) an exogenous promoter region which functions in a plant cell to cause the production of a mRNA molecule;
(b) a structural nucleic acid molecule comprising a nucleic acid sequence selected from the group consisting of SEQ ID NO: 1 through SEQ ID NO: 14882 or complements thereof;
(c) a 3′ non-translated sequence that functions in said plant cell to cause termination of transcription and addition of polyadenylated ribonucleotides to a 3′ end of said mRNA molecule.

4. The transformed plant according to claim 3, wherein said structural nucleic acid molecule is a complement of any of the nucleic acid sequences of SEQ ID NO: 1 through SEQ ID NO: 14882.

5. The transformed plant according to claim 4, wherein said plant is maize, soybean, cotton or wheat.

6. The transformed plant according to claim 4, wherein said plant is maize.

7. The transformed plant according to claim 4, wherein said plant is soybean.
